United States Patent Application Publication US 2019/0048337 A1 - sequence listing, part 12

SEQ ID NO: 379668 - RNA, 23 nt, Artificial Sequence
  Synthetic
uuugcuuuugacaaaaucuuccu

SEQ ID NO: 379669 - RNA, 24 nt, Artificial Sequence
  Synthetic
guuugcuuuugacaaaaucuuccu

SEQ ID NO: 379670 - RNA, 18 nt, Artificial Sequence
  Synthetic
uuuuuucaaaaucuuccu

SEQ ID NO: 379671 - RNA, 19 nt, Artificial Sequence
  Synthetic
uuuuuuucaaaaucuuccu

SEQ ID NO: 379672 - RNA, 20 nt, Artificial Sequence
  Synthetic
uuuuuuuucaaaaucuuccu

SEQ ID NO: 379673 - RNA, 21 nt, Artificial Sequence
  Synthetic
guuuuuuuucaaaaucuuccu

SEQ ID NO: 379674 - RNA, 22 nt, Artificial Sequence
  Synthetic
uguuuuuuuucaaaaucuuccu

SEQ ID NO: 379675 - RNA, 23 nt, Artificial Sequence
  Synthetic
uuguuuuuuuucaaaaucuuccu

SEQ ID NO: 379676 - RNA, 24 nt, Artificial Sequence
  Synthetic
uuuguuuuuuuucaaaaucuuccu

SEQ ID NO: 379677 - RNA, 18 nt, Artificial Sequence
  Synthetic
uauguuauuaaucuuccu

SEQ ID NO: 379678 - RNA, 19 nt, Artificial Sequence
  Synthetic
cuauguuauuaaucuuccu

SEQ ID NO: 379679 - RNA, 20 nt, Artificial Sequence
  Synthetic
gcuauguuauuaaucuuccu

SEQ ID NO: 379680 - RNA, 21 nt, Artificial Sequence
  Synthetic
cgcuauguuauuaaucuuccu

SEQ ID NO: 379681 - RNA, 22 nt, Artificial Sequence
  Synthetic
ccgcuauguuauuaaucuuccu

SEQ ID NO: 379682 - RNA, 23 nt, Artificial Sequence
  Synthetic
accgcuauguuauuaaucuuccu

SEQ ID NO: 379683 - RNA, 24 nt, Artificial Sequence
  Synthetic
uaccgcuauguuauuaaucuuccu

SEQ ID NO: 379684 - RNA, 18 nt, Artificial Sequence
  Synthetic
aauguauaacaucuuccu

SEQ ID NO: 379685 - RNA, 19 nt, Artificial Sequence
  Synthetic
gaauguauaacaucuuccu

SEQ ID NO: 379686 - RNA, 20 nt, Artificial Sequence
  Synthetic
ugaauguauaacaucuuccu

SEQ ID NO: 379687 - RNA, 21 nt, Artificial Sequence
  Synthetic
augaauguauaacaucuuccu

SEQ ID NO: 379688 - RNA, 22 nt, Artificial Sequence
  Synthetic
aaugaauguauaacaucuuccu

SEQ ID NO: 379689 - RNA, 23 nt, Artificial Sequence
  Synthetic
gaaugaauguauaacaucuuccu

SEQ ID NO: 379690 - RNA, 24 nt, Artificial Sequence
  Synthetic
ugaaugaauguauaacaucuuccu

SEQ ID NO: 379691 - RNA, 18 nt, Artificial Sequence
  Synthetic
gaaaagucgccucuuccu

SEQ ID NO: 379692 - RNA, 19 nt, Artificial Sequence
  Synthetic
agaaaagucgccucuuccu

SEQ ID NO: 379693 - RNA, 20 nt, Artificial Sequence
  Synthetic
cagaaaagucgccucuuccu

SEQ ID NO: 379694 - RNA, 21 nt, Artificial Sequence
  Synthetic
gcagaaaagucgccucuuccu

SEQ ID NO: 379695 - RNA, 22 nt, Artificial Sequence
  Synthetic
agcagaaaagucgccucuuccu

SEQ ID NO: 379696 - RNA, 23 nt, Artificial Sequence
  Synthetic
uagcagaaaagucgccucuuccu

SEQ ID NO: 379697 - RNA, 24 nt, Artificial Sequence
  Synthetic
auagcagaaaagucgccucuuccu

SEQ ID NO: 379698 - RNA, 18 nt, Artificial Sequence
  Synthetic
acaggacaaggucuuccu

SEQ ID NO: 379699 - RNA, 19 nt, Artificial Sequence
  Synthetic
uacaggacaaggucuuccu

SEQ ID NO: 379700 - RNA, 20 nt, Artificial Sequence
  Synthetic
cuacaggacaaggucuuccu

SEQ ID NO: 379701 - RNA, 21 nt, Artificial Sequence
  Synthetic
acuacaggacaaggucuuccu

SEQ ID NO: 379702 - RNA, 22 nt, Artificial Sequence
  Synthetic
gacuacaggacaaggucuuccu

SEQ ID NO: 379703 - RNA, 23 nt, Artificial Sequence
  Synthetic
ugacuacaggacaaggucuuccu

SEQ ID NO: 379704 - RNA, 24 nt, Artificial Sequence
  Synthetic
cugacuacaggacaaggucuuccu

SEQ ID NO: 379705 - RNA, 18 nt, Artificial Sequence
  Synthetic
aauuuaaauuuucuuccu

SEQ ID NO: 379706 - RNA, 19 nt, Artificial Sequence
  Synthetic
gaauuuaaauuuucuuccu

SEQ ID NO: 379707 - RNA, 20 nt, Artificial Sequence
  Synthetic
agaauuuaaauuuucuuccu

SEQ ID NO: 379708 - RNA, 21 nt, Artificial Sequence
  Synthetic
aagaauuuaaauuuucuuccu

SEQ ID NO: 379709 - RNA, 22 nt, Artificial Sequence
  Synthetic
gaagaauuuaaauuuucuuccu

SEQ ID NO: 379710 - RNA, 23 nt, Artificial Sequence
  Synthetic
agaagaauuuaaauuuucuuccu

SEQ ID NO: 379711 - RNA, 24 nt, Artificial Sequence
  Synthetic
uagaagaauuuaaauuuucuuccu

SEQ ID NO: 379712 - RNA, 18 nt, Artificial Sequence
  Synthetic
gccuuucuugaaguuccu

SEQ ID NO: 379713 - RNA, 19 nt, Artificial Sequence
  Synthetic
ugccuuucuugaaguuccu

SEQ ID NO: 379714 - RNA, 20 nt, Artificial Sequence
  Synthetic
cugccuuucuugaaguuccu

SEQ ID NO: 379715 - RNA, 21 nt, Artificial Sequence
  Synthetic
acugccuuucuugaaguuccu

SEQ ID NO: 379716 - RNA, 22 nt, Artificial Sequence
  Synthetic
cacugccuuucuugaaguuccu

SEQ ID NO: 379717 - RNA, 23 nt, Artificial Sequence
  Synthetic
gcacugccuuucuugaaguuccu

SEQ ID NO: 379718 - RNA, 24 nt, Artificial Sequence
  Synthetic
ugcacugccuuucuugaaguuccu

SEQ ID NO: 379719 - RNA, 18 nt, Artificial Sequence
  Synthetic
cuuuuugucacaguuccu

SEQ ID NO: 379720 - RNA, 19 nt, Artificial Sequence
  Synthetic
ucuuuuugucacaguuccu

SEQ ID NO: 379721 - RNA, 20 nt, Artificial Sequence
  Synthetic
uucuuuuugucacaguuccu

SEQ ID NO: 379722 - RNA, 21 nt, Artificial Sequence
  Synthetic
uuucuuuuugucacaguuccu

SEQ ID NO: 379723 - RNA, 22 nt, Artificial Sequence
  Synthetic
uuuucuuuuugucacaguuccu

SEQ ID NO: 379724 - RNA, 23 nt, Artificial Sequence
  Synthetic
uuuuucuuuuugucacaguuccu

SEQ ID NO: 379725 - RNA, 24 nt, Artificial Sequence
  Synthetic
auuuuucuuuuugucacaguuccu

SEQ ID NO: 379726 - RNA, 18 nt, Artificial Sequence
  Synthetic
aggucauucuuuguuccu

SEQ ID NO: 379727 - RNA, 19 nt, Artificial Sequence
  Synthetic
aaggucauucuuuguuccu

SEQ ID NO: 379728 - RNA, 20 nt, Artificial Sequence
  Synthetic
uaaggucauucuuuguuccu

SEQ ID NO: 379729 - RNA, 21 nt, Artificial Sequence
  Synthetic
auaaggucauucuuuguuccu

SEQ ID NO: 379730 - RNA, 22 nt, Artificial Sequence
  Synthetic
aauaaggucauucuuuguuccu

SEQ ID NO: 379731 - RNA, 23 nt, Artificial Sequence
  Synthetic
uaauaaggucauucuuuguuccu

SEQ ID NO: 379732 - RNA, 24 nt, Artificial Sequence
  Synthetic
guaauaaggucauucuuuguuccu

SEQ ID NO: 379733 - RNA, 18 nt, Artificial Sequence
  Synthetic
ggacacuuaaaauuuccu

SEQ ID NO: 379734 - RNA, 19 nt, Artificial Sequence
  Synthetic
cggacacuuaaaauuuccu

SEQ ID NO: 379735 - RNA, 20 nt, Artificial Sequence
  Synthetic
ucggacacuuaaaauuuccu

SEQ ID NO: 379736 - RNA, 21 nt, Artificial Sequence
  Synthetic
uucggacacuuaaaauuuccu

SEQ ID NO: 379737 - RNA, 22 nt, Artificial Sequence
  Synthetic
uuucggacacuuaaaauuuccu

SEQ ID NO: 379738 - RNA, 23 nt, Artificial Sequence
  Synthetic
guuucggacacuuaaaauuuccu

SEQ ID NO: 379739 - RNA, 24 nt, Artificial Sequence
  Synthetic
uguuucggacacuuaaaauuuccu

SEQ ID NO: 379740 - RNA, 18 nt, Artificial Sequence
  Synthetic
ugacauaaaugauuuccu

SEQ ID NO: 379741 - RNA, 19 nt, Artificial Sequence
  Synthetic
uugacauaaaugauuuccu

SEQ ID NO: 379742 - RNA, 20 nt, Artificial Sequence
  Synthetic
uuugacauaaaugauuuccu

SEQ ID NO: 379743 - RNA, 21 nt, Artificial Sequence
  Synthetic
uuuugacauaaaugauuuccu

SEQ ID NO: 379744 - RNA, 22 nt, Artificial Sequence
  Synthetic
cuuuugacauaaaugauuuccu

SEQ ID NO: 379745 - RNA, 23 nt, Artificial Sequence
  Synthetic
ucuuuugacauaaaugauuuccu

SEQ ID NO: 379746 - RNA, 24 nt, Artificial Sequence
  Synthetic
aucuuuugacauaaaugauuuccu

SEQ ID NO: 379747 - RNA, 18 nt, Artificial Sequence
  Synthetic
gaaacacugugauuuccu

SEQ ID NO: 379748 - RNA, 19 nt, Artificial Sequence
  Synthetic
agaaacacugugauuuccu

SEQ ID NO: 379749 - RNA, 20 nt, Artificial Sequence
  Synthetic
cagaaacacugugauuuccu

SEQ ID NO: 379750 - RNA, 21 nt, Artificial Sequence
  Synthetic
acagaaacacugugauuuccu

SEQ ID NO: 379751 - RNA, 22 nt, Artificial Sequence
  Synthetic
aacagaaacacugugauuuccu

SEQ ID NO: 379752 - RNA, 23 nt, Artificial Sequence
  Synthetic
aaacagaaacacugugauuuccu

SEQ ID NO: 379753 - RNA, 24 nt, Artificial Sequence
  Synthetic
caaacagaaacacugugauuuccu

SEQ ID NO: 379754 - RNA, 18 nt, Artificial Sequence
  Synthetic
ggcuugaaaauauuuccu

SEQ ID NO: 379755 - RNA, 19 nt, Artificial Sequence
  Synthetic
uggcuugaaaauauuuccu

SEQ ID NO: 379756 - RNA, 20 nt, Artificial Sequence
  Synthetic
uuggcuugaaaauauuuccu

SEQ ID NO: 379757 - RNA, 21 nt, Artificial Sequence
  Synthetic
guuggcuugaaaauauuuccu

SEQ ID NO: 379758 - RNA, 22 nt, Artificial Sequence
  Synthetic
uguuggcuugaaaauauuuccu

SEQ ID NO: 379759 - RNA, 23 nt, Artificial Sequence
  Synthetic
auguuggcuugaaaauauuuccu

SEQ ID NO: 379760 - RNA, 24 nt, Artificial Sequence
  Synthetic
gauguuggcuugaaaauauuuccu

SEQ ID NO: 379761 - RNA, 18 nt, Artificial Sequence
  Synthetic
ugaaauuccauauuuccu

SEQ ID NO: 379762 - RNA, 19 nt, Artificial Sequence
  Synthetic
cugaaauuccauauuuccu

SEQ ID NO: 379763 - RNA, 20 nt, Artificial Sequence
  Synthetic
acugaaauuccauauuuccu

SEQ ID NO: 379764 - RNA, 21 nt, Artificial Sequence
  Synthetic
aacugaaauuccauauuuccu

SEQ ID NO: 379765 - RNA, 22 nt, Artificial Sequence
  Synthetic
uaacugaaauuccauauuuccu

SEQ ID NO: 379766 - RNA, 23 nt, Artificial Sequence
  Synthetic
uuaacugaaauuccauauuuccu

SEQ ID NO: 379767 - RNA, 24 nt, Artificial Sequence
  Synthetic
uuuaacugaaauuccauauuuccu

SEQ ID NO: 379768 - RNA, 18 nt, Artificial Sequence
  Synthetic
aauacugcuguauuuccu

SEQ ID NO: 379769 - RNA, 19 nt, Artificial Sequence
  Synthetic
aaauacugcuguauuuccu

SEQ ID NO: 379770 - RNA, 20 nt, Artificial Sequence
  Synthetic
uaaauacugcuguauuuccu

SEQ ID NO: 379771 - RNA, 21 nt, Artificial Sequence
  Synthetic
uuaaauacugcuguauuuccu

SEQ ID NO: 379772 - RNA, 22 nt, Artificial Sequence
  Synthetic
uuuaaauacugcuguauuuccu

SEQ ID NO: 379773 - RNA, 23 nt, Artificial Sequence
  Synthetic
uuuuaaauacugcuguauuuccu

SEQ ID NO: 379774 - RNA, 24 nt, Artificial Sequence
  Synthetic
auuuuaaauacugcuguauuuccu

SEQ ID NO: 379775 - RNA, 18 nt, Artificial Sequence
  Synthetic
cucuugaaauuauuuccu

SEQ ID NO: 379776 - RNA, 19 nt, Artificial Sequence
  Synthetic
acucuugaaauuauuuccu

SEQ ID NO: 379777 - RNA, 20 nt, Artificial Sequence
  Synthetic
gacucuugaaauuauuuccu

SEQ ID NO: 379778 - RNA, 21 nt, Artificial Sequence
  Synthetic
ggacucuugaaauuauuuccu

SEQ ID NO: 379779 - RNA, 22 nt, Artificial Sequence
  Synthetic
aggacucuugaaauuauuuccu

SEQ ID NO: 379780 - RNA, 23 nt, Artificial Sequence
  Synthetic
uaggacucuugaaauuauuuccu

SEQ ID NO: 379781 - RNA, 24 nt, Artificial Sequence
  Synthetic
guaggacucuugaaauuauuuccu

SEQ ID NO: 379782 - RNA, 18 nt, Artificial Sequence
  Synthetic
gaaauguccaacuuuccu

SEQ ID NO: 379783 - RNA, 19 nt, Artificial Sequence
  Synthetic
cgaaauguccaacuuuccu

SEQ ID NO: 379784 - RNA, 20 nt, Artificial Sequence
  Synthetic
acgaaauguccaacuuuccu

SEQ ID NO: 379785 - RNA, 21 nt, Artificial Sequence
  Synthetic
gacgaaauguccaacuuuccu

SEQ ID NO: 379786 - RNA, 22 nt, Artificial Sequence
  Synthetic
ggacgaaauguccaacuuuccu

SEQ ID NO: 379787 - RNA, 23 nt, Artificial Sequence
  Synthetic
uggacgaaauguccaacuuuccu

SEQ ID NO: 379788 - RNA, 24 nt, Artificial Sequence
  Synthetic
uuggacgaaauguccaacuuuccu

SEQ ID NO: 379789 - RNA, 18 nt, Artificial Sequence
  Synthetic
agucugaugggcuuuccu

SEQ ID NO: 379790 - RNA, 19 nt, Artificial Sequence
  Synthetic
uagucugaugggcuuuccu

SEQ ID NO: 379791 - RNA, 20 nt, Artificial Sequence
  Synthetic
uuagucugaugggcuuuccu

SEQ ID NO: 379792 - RNA, 21 nt, Artificial Sequence
  Synthetic
guuagucugaugggcuuuccu

SEQ ID NO: 379793 - RNA, 22 nt, Artificial Sequence
  Synthetic
uguuagucugaugggcuuuccu

SEQ ID NO: 379794 - RNA, 23 nt, Artificial Sequence
  Synthetic
cuguuagucugaugggcuuuccu

SEQ ID NO: 379795 - RNA, 24 nt, Artificial Sequence
  Synthetic
gcuguuagucugaugggcuuuccu

SEQ ID NO: 379796 - RNA, 18 nt, Artificial Sequence
  Synthetic
uuugcauguggcuuuccu

SEQ ID NO: 379797 - RNA, 19 nt, Artificial Sequence
  Synthetic
uuuugcauguggcuuuccu

SEQ ID NO: 379798 - RNA, 20 nt, Artificial Sequence
  Synthetic
cuuuugcauguggcuuuccu

SEQ ID NO: 379799 - RNA, 21 nt, Artificial Sequence
  Synthetic
ucuuuugcauguggcuuuccu

SEQ ID NO: 379800 - RNA, 22 nt, Artificial Sequence
  Synthetic
cucuuuugcauguggcuuuccu

SEQ ID NO: 379801 - RNA, 23 nt, Artificial Sequence
  Synthetic
ucucuuuugcauguggcuuuccu

SEQ ID NO: 379802 - RNA, 24 nt, Artificial Sequence
  Synthetic
gucucuuuugcauguggcuuuccu

SEQ ID NO: 379803 - RNA, 18 nt, Artificial Sequence
  Synthetic
uugcuuaagugcuuuccu

SEQ ID NO: 379804 - RNA, 19 nt, Artificial Sequence
  Synthetic
uuugcuuaagugcuuuccu

SEQ ID NO: 379805 - RNA, 20 nt, Artificial Sequence
  Synthetic
uuuugcuuaagugcuuuccu

SEQ ID NO: 379806 - RNA, 21 nt, Artificial Sequence
  Synthetic
cuuuugcuuaagugcuuuccu

SEQ ID NO: 379807 - RNA, 22 nt, Artificial Sequence
  Synthetic
ccuuuugcuuaagugcuuuccu

SEQ ID NO: 379808 - RNA, 23 nt, Artificial Sequence
  Synthetic
gccuuuugcuuaagugcuuuccu

SEQ ID NO: 379809 - RNA, 24 nt, Artificial Sequence
  Synthetic
agccuuuugcuuaagugcuuuccu

SEQ ID NO: 379810 - RNA, 18 nt, Artificial Sequence
  Synthetic
cucuucuuucucuuuccu

SEQ ID NO: 379811 - RNA, 19 nt, Artificial Sequence
  Synthetic
ucucuucuuucucuuuccu

SEQ ID NO: 379812 - RNA, 20 nt, Artificial Sequence
  Synthetic
uucucuucuuucucuuuccu

SEQ ID NO: 379813 - RNA, 21 nt, Artificial Sequence
  Synthetic
cuucucuucuuucucuuuccu

SEQ ID NO: 379814 - RNA, 22 nt, Artificial Sequence
  Synthetic
ucuucucuucuuucucuuuccu

SEQ ID NO: 379815 - RNA, 23 nt, Artificial Sequence
  Synthetic
uucuucucuucuuucucuuuccu

SEQ ID NO: 379816 - RNA, 24 nt, Artificial Sequence
  Synthetic
auucuucucuucuuucucuuuccu

SEQ ID NO: 379817 - RNA, 18 nt, Artificial Sequence
  Synthetic
aagcaauuuuucuuuccu

SEQ ID NO: 379818 - RNA, 19 nt, Artificial Sequence
  Synthetic
uaagcaauuuuucuuuccu

SEQ ID NO: 379819 - RNA, 20 nt, Artificial Sequence
  Synthetic
auaagcaauuuuucuuuccu

SEQ ID NO: 379820 - RNA, 21 nt, Artificial Sequence
  Synthetic
cauaagcaauuuuucuuuccu

SEQ ID NO: 379821 - RNA, 22 nt, Artificial Sequence
  Synthetic
ccauaagcaauuuuucuuuccu

SEQ ID NO: 379822 - RNA, 23 nt, Artificial Sequence
  Synthetic
accauaagcaauuuuucuuuccu

SEQ ID NO: 379823 - RNA, 24 nt, Artificial Sequence
  Synthetic
aaccauaagcaauuuuucuuuccu

SEQ ID NO: 379824 - RNA, 18 nt, Artificial Sequence
  Synthetic
aauuucuagaaguuuccu

SEQ ID NO: 379825 - RNA, 19 nt, Artificial Sequence
  Synthetic
caauuucuagaaguuuccu

SEQ ID NO: 379826 - RNA, 20 nt, Artificial Sequence
  Synthetic
acaauuucuagaaguuuccu

SEQ ID NO: 379827 - RNA, 21 nt, Artificial Sequence
  Synthetic
aacaauuucuagaaguuuccu

SEQ ID NO: 379828 - RNA, 22 nt, Artificial Sequence
  Synthetic
gaacaauuucuagaaguuuccu

SEQ ID NO: 379829 - RNA, 23 nt, Artificial Sequence
  Synthetic
agaacaauuucuagaaguuuccu

SEQ ID NO: 379830 - RNA, 24 nt, Artificial Sequence
  Synthetic
uagaacaauuucuagaaguuuccu

SEQ ID NO: 379831 - RNA, 18 nt, Artificial Sequence
  Synthetic
gcgguuugacaguuuccu

SEQ ID NO: 379832 - RNA, 19 nt, Artificial Sequence
  Synthetic
ggcgguuugacaguuuccu

SEQ ID NO: 379833 - RNA, 20 nt, Artificial Sequence
  Synthetic
aggcgguuugacaguuuccu

SEQ ID NO: 379834 - RNA, 21 nt, Artificial Sequence
  Synthetic
aaggcgguuugacaguuuccu

SEQ ID NO: 379835 - RNA, 22 nt, Artificial Sequence
  Synthetic
uaaggcgguuugacaguuuccu

SEQ ID NO: 379836 - RNA, 23 nt, Artificial Sequence
  Synthetic
uuaaggcgguuugacaguuuccu

SEQ ID NO: 379837 - RNA, 24 nt, Artificial Sequence
  Synthetic
cuuaaggcgguuugacaguuuccu

SEQ ID NO: 379838 - RNA, 18 nt, Artificial Sequence
  Synthetic
uucucaaaauaguuuccu

SEQ ID NO: 379839 - RNA, 19 nt, Artificial Sequence
  Synthetic
uuucucaaaauaguuuccu

SEQ ID NO: 379840 - RNA, 20 nt, Artificial Sequence
  Synthetic
guuucucaaaauaguuuccu

SEQ ID NO: 379841 - RNA, 21 nt, Artificial Sequence
  Synthetic
aguuucucaaaauaguuuccu

SEQ ID NO: 379842 - RNA, 22 nt, Artificial Sequence
  Synthetic
gaguuucucaaaauaguuuccu

SEQ ID NO: 379843 - RNA, 23 nt, Artificial Sequence
  Synthetic
ugaguuucucaaaauaguuuccu

SEQ ID NO: 379844 - RNA, 24 nt, Artificial Sequence
  Synthetic
uugaguuucucaaaauaguuuccu

SEQ ID NO: 379845 - RNA, 18 nt, Artificial Sequence
  Synthetic
acuccagccagguuuccu

SEQ ID NO: 379846 - RNA, 19 nt, Artificial Sequence
  Synthetic
cacuccagccagguuuccu

SEQ ID NO: 379847 - RNA, 20 nt, Artificial Sequence
  Synthetic
ucacuccagccagguuuccu

SEQ ID NO: 379848 - RNA, 21 nt, Artificial Sequence
  Synthetic
uucacuccagccagguuuccu

SEQ ID NO: 379849 - RNA, 22 nt, Artificial Sequence
  Synthetic
uuucacuccagccagguuuccu

SEQ ID NO: 379850 - RNA, 23 nt, Artificial Sequence
  Synthetic
uuuucacuccagccagguuuccu

SEQ ID NO: 379851 - RNA, 24 nt, Artificial Sequence
  Synthetic
auuuucacuccagccagguuuccu

SEQ ID NO: 379852 - RNA, 18 nt, Artificial Sequence
  Synthetic
auugaaauuguguuuccu

SEQ ID NO: 379853 - RNA, 19 nt, Artificial Sequence
  Synthetic
aauugaaauuguguuuccu

SEQ ID NO: 379854 - RNA, 20 nt, Artificial Sequence
  Synthetic
uaauugaaauuguguuuccu

SEQ ID NO: 379855 - RNA, 21 nt, Artificial Sequence
  Synthetic
cuaauugaaauuguguuuccu

SEQ ID NO: 379856 - RNA, 22 nt, Artificial Sequence
  Synthetic
ucuaauugaaauuguguuuccu

SEQ ID NO: 379857 - RNA, 23 nt, Artificial Sequence
  Synthetic
gucuaauugaaauuguguuuccu

SEQ ID NO: 379858 - RNA, 24 nt, Artificial Sequence
  Synthetic
ugucuaauugaaauuguguuuccu

SEQ ID NO: 379859 - RNA, 18 nt, Artificial Sequence
  Synthetic
aaaguaaaacauuuuccu

SEQ ID NO: 379860 - RNA, 19 nt, Artificial Sequence
  Synthetic
aaaaguaaaacauuuuccu

SEQ ID NO: 379861 - RNA, 20 nt, Artificial Sequence
  Synthetic
aaaaaguaaaacauuuuccu

SEQ ID NO: 379862 - RNA, 21 nt, Artificial Sequence
  Synthetic
gaaaaaguaaaacauuuuccu

SEQ ID NO: 379863 - RNA, 22 nt, Artificial Sequence
  Synthetic
ugaaaaaguaaaacauuuuccu

SEQ ID NO: 379864 - RNA, 23 nt, Artificial Sequence
  Synthetic
augaaaaaguaaaacauuuuccu

SEQ ID NO: 379865 - RNA, 24 nt, Artificial Sequence
  Synthetic
aaugaaaaaguaaaacauuuuccu

SEQ ID NO: 379866 - RNA, 18 nt, Artificial Sequence
  Synthetic
aaaauaugcccuuuuccu

SEQ ID NO: 379867 - RNA, 19 nt, Artificial Sequence
  Synthetic
uaaaauaugcccuuuuccu

SEQ ID NO: 379868 - RNA, 20 nt, Artificial Sequence
  Synthetic
guaaaauaugcccuuuuccu

SEQ ID NO: 379869 - RNA, 21 nt, Artificial Sequence
  Synthetic
gguaaaauaugcccuuuuccu

SEQ ID NO: 379870 - RNA, 22 nt, Artificial Sequence
  Synthetic
agguaaaauaugcccuuuuccu

SEQ ID NO: 379871 - RNA, 23 nt, Artificial Sequence
  Synthetic
aagguaaaauaugcccuuuuccu

SEQ ID NO: 379872 - RNA, 24 nt, Artificial Sequence
  Synthetic
uaagguaaaauaugcccuuuuccu

SEQ ID NO: 379873 - RNA, 18 nt, Artificial Sequence
  Synthetic
aacuccuaagguuuuccu

SEQ ID NO: 379874 - RNA, 19 nt, Artificial Sequence
  Synthetic
uaacuccuaagguuuuccu

SEQ ID NO: 379875 - RNA, 20 nt, Artificial Sequence
  Synthetic
auaacuccuaagguuuuccu

SEQ ID NO: 379876 - RNA, 21 nt, Artificial Sequence
  Synthetic
gauaacuccuaagguuuuccu

SEQ ID NO: 379877 - RNA, 22 nt, Artificial Sequence
  Synthetic
agauaacuccuaagguuuuccu

SEQ ID NO: 379878 - RNA, 23 nt, Artificial Sequence
  Synthetic
cagauaacuccuaagguuuuccu

SEQ ID NO: 379879 - RNA, 24 nt, Artificial Sequence
  Synthetic
ucagauaacuccuaagguuuuccu

SEQ ID NO: 379880 - RNA, 18 nt, Artificial Sequence
  Synthetic
auaccauuaacaaaagcu

SEQ ID NO: 379881 - RNA, 19 nt, Artificial Sequence
  Synthetic
aauaccauuaacaaaagcu

SEQ ID NO: 379882 - RNA, 20 nt, Artificial Sequence
  Synthetic
aaauaccauuaacaaaagcu

SEQ ID NO: 379883 - RNA, 21 nt, Artificial Sequence
  Synthetic
aaaauaccauuaacaaaagcu

SEQ ID NO: 379884 - RNA, 22 nt, Artificial Sequence
  Synthetic
aaaaauaccauuaacaaaagcu

SEQ ID NO: 379885 - RNA, 23 nt, Artificial Sequence
  Synthetic
gaaaaauaccauuaacaaaagcu

SEQ ID NO: 379886 - RNA, 24 nt, Artificial Sequence
  Synthetic
agaaaaauaccauuaacaaaagcu

SEQ ID NO: 379887 - RNA, 18 nt, Artificial Sequence
  Synthetic
aaccaauggacaaaagcu

SEQ ID NO: 379888 - RNA, 19 nt, Artificial Sequence
  Synthetic
uaaccaauggacaaaagcu

SEQ ID NO: 379889 - RNA, 20 nt, Artificial Sequence
  Synthetic
uuaaccaauggacaaaagcu

SEQ ID NO: 379890 - RNA, 21 nt, Artificial Sequence
  Synthetic
cuuaaccaauggacaaaagcu

SEQ ID NO: 379891 - RNA, 22 nt, Artificial Sequence
  Synthetic
acuuaaccaauggacaaaagcu

SEQ ID NO: 379892 - RNA, 23 nt, Artificial Sequence
  Synthetic
cacuuaaccaauggacaaaagcu

SEQ ID NO: 379893 - RNA, 24 nt, Artificial Sequence
  Synthetic
gcacuuaaccaauggacaaaagcu

SEQ ID NO: 379894 - RNA, 18 nt, Artificial Sequence
  Synthetic
uauuaaguggcaaaagcu

SEQ ID NO: 379895 - RNA, 19 nt, Artificial Sequence
  Synthetic
auauuaaguggcaaaagcu

SEQ ID NO: 379896 - RNA, 20 nt, Artificial Sequence
  Synthetic
aauauuaaguggcaaaagcu

SEQ ID NO: 379897 - RNA, 21 nt, Artificial Sequence
  Synthetic
caauauuaaguggcaaaagcu

SEQ ID NO: 379898 - RNA, 22 nt, Artificial Sequence
  Synthetic
ccaauauuaaguggcaaaagcu

SEQ ID NO: 379899 - RNA, 23 nt, Artificial Sequence
  Synthetic
accaauauuaaguggcaaaagcu

SEQ ID NO: 379900 - RNA, 24 nt, Artificial Sequence
  Synthetic
aaccaauauuaaguggcaaaagcu

SEQ ID NO: 379901 - RNA, 18 nt, Artificial Sequence
  Synthetic
uuuaaauaaagaaaagcu

SEQ ID NO: 379902 - RNA, 19 nt, Artificial Sequence
  Synthetic
auuuaaauaaagaaaagcu

SEQ ID NO: 379903 - RNA, 20 nt, Artificial Sequence
  Synthetic
aauuuaaauaaagaaaagcu

SEQ ID NO: 379904 - RNA, 21 nt, Artificial Sequence
  Synthetic
uaauuuaaauaaagaaaagcu

SEQ ID NO: 379905 - RNA, 22 nt, Artificial Sequence
  Synthetic
auaauuuaaauaaagaaaagcu

SEQ ID NO: 379906 - RNA, 23 nt, Artificial Sequence
  Synthetic
uauaauuuaaauaaagaaaagcu

SEQ ID NO: 379907 - RNA, 24 nt, Artificial Sequence
  Synthetic
guauaauuuaaauaaagaaaagcu

SEQ ID NO: 379908 - RNA, 18 nt, Artificial Sequence
  Synthetic
acugcuuucagaaaagcu

SEQ ID NO: 379909 - RNA, 19 nt, Artificial Sequence
  Synthetic
aacugcuuucagaaaagcu

SEQ ID NO: 379910 - RNA, 20 nt, Artificial Sequence
  Synthetic
uaacugcuuucagaaaagcu

SEQ ID NO: 379911 - RNA, 21 nt, Artificial Sequence
  Synthetic
cuaacugcuuucagaaaagcu

SEQ ID NO: 379912 - RNA, 22 nt, Artificial Sequence
  Synthetic
acuaacugcuuucagaaaagcu

SEQ ID NO: 379913 - RNA, 23 nt, Artificial Sequence
  Synthetic
uacuaacugcuuucagaaaagcu

SEQ ID NO: 379914 - RNA, 24 nt, Artificial Sequence
  Synthetic
auacuaacugcuuucagaaaagcu

SEQ ID NO: 379915 - RNA, 18 nt, Artificial Sequence
  Synthetic
auuggaaccugaaaagcu

SEQ ID NO: 379916 - RNA, 19 nt, Artificial Sequence
  Synthetic
uauuggaaccugaaaagcu

SEQ ID NO: 379917 - RNA, 20 nt, Artificial Sequence
  Synthetic
guauuggaaccugaaaagcu

SEQ ID NO: 379918 - RNA, 21 nt, Artificial Sequence
  Synthetic
uguauuggaaccugaaaagcu

SEQ ID NO: 379919 - RNA, 22 nt, Artificial Sequence
  Synthetic
cuguauuggaaccugaaaagcu

SEQ ID NO: 379920 - RNA, 23 nt, Artificial Sequence
  Synthetic
acuguauuggaaccugaaaagcu

SEQ ID NO: 379921 - RNA, 24 nt, Artificial Sequence
  Synthetic
uacuguauuggaaccugaaaagcu

SEQ ID NO: 379922 - RNA, 18 nt, Artificial Sequence
  Synthetic
agagguuuucacaaagcu

SEQ ID NO: 379923 - RNA, 19 nt, Artificial Sequence
  Synthetic
uagagguuuucacaaagcu

SEQ ID NO: 379924 - RNA, 20 nt, Artificial Sequence
  Synthetic
auagagguuuucacaaagcu

SEQ ID NO: 379925 - RNA, 21 nt, Artificial Sequence
  Synthetic
aauagagguuuucacaaagcu

SEQ ID NO: 379926 - RNA, 22 nt, Artificial Sequence
  Synthetic
uaauagagguuuucacaaagcu

SEQ ID NO: 379927 - RNA, 23 nt, Artificial Sequence
  Synthetic
uuaauagagguuuucacaaagcu

SEQ ID NO: 379928 - RNA, 24 nt, Artificial Sequence
  Synthetic
guuaauagagguuuucacaaagcu

SEQ ID NO: 379929 - RNA, 18 nt, Artificial Sequence
  Synthetic
guggcaguugccaaagcu

SEQ ID NO: 379930 - RNA, 19 nt, Artificial Sequence
  Synthetic
cguggcaguugccaaagcu

SEQ ID NO: 379931 - RNA, 20 nt, Artificial Sequence
  Synthetic
acguggcaguugccaaagcu

SEQ ID NO: 379932 - RNA, 21 nt, Artificial Sequence
  Synthetic
cacguggcaguugccaaagcu

SEQ ID NO: 379933 - RNA, 22 nt, Artificial Sequence
  Synthetic
ccacguggcaguugccaaagcu

SEQ ID NO: 379934 - RNA, 23 nt, Artificial Sequence
  Synthetic
accacguggcaguugccaaagcu

SEQ ID NO: 379935 - RNA, 24 nt, Artificial Sequence
  Synthetic
caccacguggcaguugccaaagcu

SEQ ID NO: 379936 - RNA, 18 nt, Artificial Sequence
  Synthetic
uaauaugauaucaaagcu

SEQ ID NO: 379937 - RNA, 19 nt, Artificial Sequence
  Synthetic
uuaauaugauaucaaagcu

SEQ ID NO: 379938 - RNA, 20 nt, Artificial Sequence
  Synthetic
auuaauaugauaucaaagcu

SEQ ID NO: 379939 - RNA, 21 nt, Artificial Sequence
  Synthetic
cauuaauaugauaucaaagcu

SEQ ID NO: 379940 - RNA, 22 nt, Artificial Sequence
  Synthetic
acauuaauaugauaucaaagcu

SEQ ID NO: 379941 - RNA, 23 nt, Artificial Sequence
  Synthetic
uacauuaauaugauaucaaagcu

SEQ ID NO: 379942 - RNA, 24 nt, Artificial Sequence
  Synthetic
guacauuaauaugauaucaaagcu

SEQ ID NO: 379943 - RNA, 18 nt, Artificial Sequence
  Synthetic
aauacaaggcagaaagcu

SEQ ID NO: 379944 - RNA, 19 nt, Artificial Sequence
  Synthetic
caauacaaggcagaaagcu

SEQ ID NO: 379945 - RNA, 20 nt, Artificial Sequence
  Synthetic
gcaauacaaggcagaaagcu

SEQ ID NO: 379946 - RNA, 21 nt, Artificial Sequence
  Synthetic
agcaauacaaggcagaaagcu

SEQ ID NO: 379947 - RNA, 22 nt, Artificial Sequence
  Synthetic
cagcaauacaaggcagaaagcu

SEQ ID NO: 379948 - RNA, 23 nt, Artificial Sequence
  Synthetic
ccagcaauacaaggcagaaagcu

SEQ ID NO: 379949 - RNA, 24 nt, Artificial Sequence
  Synthetic
cccagcaauacaaggcagaaagcu

SEQ ID NO: 379950 - RNA, 18 nt, Artificial Sequence
  Synthetic
uaugguaguaauaaagcu

SEQ ID NO: 379951 - RNA, 19 nt, Artificial Sequence
  Synthetic
auaugguaguaauaaagcu

SEQ ID NO: 379952 - RNA, 20 nt, Artificial Sequence
  Synthetic
uauaugguaguaauaaagcu

SEQ ID NO: 379953 - RNA, 21 nt, Artificial Sequence
  Synthetic
auauaugguaguaauaaagcu

SEQ ID NO: 379954 - RNA, 22 nt, Artificial Sequence
  Synthetic
uauauaugguaguaauaaagcu

SEQ ID NO: 379955 - RNA, 23 nt, Artificial Sequence
  Synthetic
cuauauaugguaguaauaaagcu

SEQ ID NO: 379956 - RNA, 24 nt, Artificial Sequence
  Synthetic
gcuauauaugguaguaauaaagcu

SEQ ID NO: 379957 - RNA, 18 nt, Artificial Sequence
  Synthetic
cuauuguuuuauaaagcu

SEQ ID NO: 379958 - RNA, 19 nt, Artificial Sequence
  Synthetic
acuauuguuuuauaaagcu

SEQ ID NO: 379959 - RNA, 20 nt, Artificial Sequence
  Synthetic
uacuauuguuuuauaaagcu

SEQ ID NO: 379960 - RNA, 21 nt, Artificial Sequence
  Synthetic
guacuauuguuuuauaaagcu

SEQ ID NO: 379961 - RNA, 22 nt, Artificial Sequence
  Synthetic
aguacuauuguuuuauaaagcu

SEQ ID NO: 379962 - RNA, 23 nt, Artificial Sequence
  Synthetic
uaguacuauuguuuuauaaagcu

SEQ ID NO: 379963 - RNA, 24 nt, Artificial Sequence
  Synthetic
cuaguacuauuguuuuauaaagcu

SEQ ID NO: 379964 - RNA, 18 nt, Artificial Sequence
  Synthetic
ugaaguuauacuaaagcu

SEQ ID NO: 379965 - RNA, 19 nt, Artificial Sequence
  Synthetic
uugaaguuauacuaaagcu

SEQ ID NO: 379966 - RNA, 20 nt, Artificial Sequence
  Synthetic
uuugaaguuauacuaaagcu

SEQ ID NO: 379967 - RNA, 21 nt, Artificial Sequence
  Synthetic
cuuugaaguuauacuaaagcu

SEQ ID NO: 379968 - RNA, 22 nt, Artificial Sequence
  Synthetic
ucuuugaaguuauacuaaagcu

SEQ ID NO: 379969 - RNA, 23 nt, Artificial Sequence
  Synthetic
aucuuugaaguuauacuaaagcu

SEQ ID NO: 379970 - RNA, 24 nt, Artificial Sequence
  Synthetic
caucuuugaaguuauacuaaagcu

SEQ ID NO: 379971 - RNA, 18 nt, Artificial Sequence
  Synthetic
ugccauuguaaacaagcu

SEQ ID NO: 379972 - RNA, 19 nt, Artificial Sequence
  Synthetic
augccauuguaaacaagcu

SEQ ID NO: 379973 - RNA, 20 nt, Artificial Sequence
  Synthetic
gaugccauuguaaacaagcu

SEQ ID NO: 379974 - RNA, 21 nt, Artificial Sequence
  Synthetic
ggaugccauuguaaacaagcu

SEQ ID NO: 379975 - RNA, 22 nt, Artificial Sequence
  Synthetic
uggaugccauuguaaacaagcu

SEQ ID NO: 379976 - RNA, 23 nt, Artificial Sequence
  Synthetic
uuggaugccauuguaaacaagcu

SEQ ID NO: 379977 - RNA, 24 nt, Artificial Sequence
  Synthetic
guuggaugccauuguaaacaagcu

SEQ ID NO: 379978 - RNA, 18 nt, Artificial Sequence
  Synthetic
auuauuuagcaccaagcu

SEQ ID NO: 379979 - RNA, 19 nt, Artificial Sequence
  Synthetic
uauuauuuagcaccaagcu

SEQ ID NO: 379980 - RNA, 20 nt, Artificial Sequence
  Synthetic
uuauuauuuagcaccaagcu

SEQ ID NO: 379981 - RNA, 21 nt, Artificial Sequence
  Synthetic
auuauuauuuagcaccaagcu

SEQ ID NO: 379982 - RNA, 22 nt, Artificial Sequence
  Synthetic
uauuauuauuuagcaccaagcu

SEQ ID NO: 379983 - RNA, 23 nt, Artificial Sequence
  Synthetic
auauuauuauuuagcaccaagcu

SEQ ID NO: 379984 - RNA, 24 nt, Artificial Sequence
  Synthetic
aauauuauuauuuagcaccaagcu

SEQ ID NO: 379985 - RNA, 18 nt, Artificial Sequence
  Synthetic
cagcgcaccuagcaagcu

SEQ ID NO: 379986 - RNA, 19 nt, Artificial Sequence
  Synthetic
ccagcgcaccuagcaagcu

SEQ ID NO: 379987 - RNA, 20 nt, Artificial Sequence
  Synthetic
gccagcgcaccuagcaagcu

SEQ ID NO: 379988 - RNA, 21 nt, Artificial Sequence
  Synthetic
ggccagcgcaccuagcaagcu

SEQ ID NO: 379989 - RNA, 22 nt, Artificial Sequence
  Synthetic
uggccagcgcaccuagcaagcu

SEQ ID NO: 379990 - RNA, 23 nt, Artificial Sequence
  Synthetic
cuggccagcgcaccuagcaagcu

SEQ ID NO: 379991 - RNA, 24 nt, Artificial Sequence
  Synthetic
ucuggccagcgcaccuagcaagcu

SEQ ID NO: 379992 - RNA, 18 nt, Artificial Sequence
  Synthetic
cagaacccuuagcaagcu

SEQ ID NO: 379993 - RNA, 19 nt, Artificial Sequence
  Synthetic
acagaacccuuagcaagcu

SEQ ID NO: 379994 - RNA, 20 nt, Artificial Sequence
  Synthetic
cacagaacccuuagcaagcu

SEQ ID NO: 379995 - RNA, 21 nt, Artificial Sequence
  Synthetic
ucacagaacccuuagcaagcu

SEQ ID NO: 379996 - RNA, 22 nt, Artificial Sequence
  Synthetic
cucacagaacccuuagcaagcu

SEQ ID NO: 379997 - RNA, 23 nt, Artificial Sequence
  Synthetic
ccucacagaacccuuagcaagcu

SEQ ID NO: 379998 - RNA, 24 nt, Artificial Sequence
  Synthetic
accucacagaacccuuagcaagcu

SEQ ID NO: 379999 - RNA, 18 nt, Artificial Sequence
  Synthetic
ugaggacagcaucaagcu

SEQ ID NO: 380000 - RNA, 19 nt, Artificial Sequence
  Synthetic
augaggacagcaucaagcu

SEQ ID NO: 380001 - RNA, 20 nt, Artificial Sequence
  Synthetic
caugaggacagcaucaagcu

SEQ ID NO: 380002 - RNA, 21 nt, Artificial Sequence
  Synthetic
ucaugaggacagcaucaagcu

SEQ ID NO: 380003 - RNA, 22 nt, Artificial Sequence
  Synthetic
aucaugaggacagcaucaagcu

SEQ ID NO: 380004 - RNA, 23 nt, Artificial Sequence
  Synthetic
uaucaugaggacagcaucaagcu

SEQ ID NO: 380005 - RNA, 24 nt, Artificial Sequence
  Synthetic
cuaucaugaggacagcaucaagcu

SEQ ID NO: 380006 - RNA, 18 nt, Artificial Sequence
  Synthetic
uauaucuacuaucaagcu

SEQ ID NO: 380007 - RNA, 19 nt, Artificial Sequence
  Synthetic
auauaucuacuaucaagcu

SEQ ID NO: 380008 - RNA, 20 nt, Artificial Sequence
  Synthetic
aauauaucuacuaucaagcu

SEQ ID NO: 380009 - RNA, 21 nt, Artificial Sequence
  Synthetic
gaauauaucuacuaucaagcu

SEQ ID NO: 380010 - RNA, 22 nt, Artificial Sequence
  Synthetic
agaauauaucuacuaucaagcu

SEQ ID NO: 380011 - RNA, 23 nt, Artificial Sequence
  Synthetic
cagaauauaucuacuaucaagcu

SEQ ID NO: 380012 - RNA, 24 nt, Artificial Sequence
  Synthetic
ccagaauauaucuacuaucaagcu

SEQ ID NO: 380013 - RNA, 18 nt, Artificial Sequence
  Synthetic
uauugcaguguucaagcu

SEQ ID NO: 380014 - RNA, 19 nt, Artificial Sequence
  Synthetic
uuauugcaguguucaagcu

SEQ ID NO: 380015 - RNA, 20 nt, Artificial Sequence
  Synthetic
guuauugcaguguucaagcu

SEQ ID NO: 380016 - RNA, 21 nt, Artificial Sequence
  Synthetic
uguuauugcaguguucaagcu

SEQ ID NO: 380017 - RNA, 22 nt, Artificial Sequence
  Synthetic
auguuauugcaguguucaagcu

SEQ ID NO: 380018 - RNA, 23 nt, Artificial Sequence
  Synthetic
uauguuauugcaguguucaagcu

SEQ ID NO: 380019 - RNA, 24 nt, Artificial Sequence
  Synthetic
auauguuauugcaguguucaagcu

SEQ ID NO: 380020 - RNA, 18 nt, Artificial Sequence
  Synthetic
cuaaugugcagcgaagcu

SEQ ID NO: 380021 - RNA, 19 nt, Artificial Sequence
  Synthetic
ucuaaugugcagcgaagcu

SEQ ID NO: 380022 - RNA, 20 nt, Artificial Sequence
  Synthetic
aucuaaugugcagcgaagcu

SEQ ID NO: 380023 - RNA, 21 nt, Artificial Sequence
  Synthetic
aaucuaaugugcagcgaagcu

SEQ ID NO: 380024 - RNA, 22 nt, Artificial Sequence
  Synthetic
caaucuaaugugcagcgaagcu

SEQ ID NO: 380025 - RNA, 23 nt, Artificial Sequence
  Synthetic
ucaaucuaaugugcagcgaagcu

SEQ ID NO: 380026 - RNA, 24 nt, Artificial Sequence
  Synthetic
cucaaucuaaugugcagcgaagcu

SEQ ID NO: 380027 - RNA, 18 nt, Artificial Sequence
  Synthetic
acccaaugcaaggaagcu

SEQ ID NO: 380028 - RNA, 19 nt, Artificial Sequence
  Synthetic
aacccaaugcaaggaagcu

SEQ ID NO: 380029 - RNA, 20 nt, Artificial Sequence
  Synthetic
uaacccaaugcaaggaagcu

SEQ ID NO: 380030 - RNA, 21 nt, Artificial Sequence
  Synthetic
cuaacccaaugcaaggaagcu

SEQ ID NO: 380031 - RNA, 22 nt, Artificial Sequence
  Synthetic
ucuaacccaaugcaaggaagcu

SEQ ID NO: 380032 - RNA, 23 nt, Artificial Sequence
  Synthetic
uucuaacccaaugcaaggaagcu

SEQ ID NO: 380033 - RNA, 24 nt, Artificial Sequence
  Synthetic
guucuaacccaaugcaaggaagcu

SEQ ID NO: 380034 - RNA, 18 nt, Artificial Sequence
  Synthetic
cagagcaggcuggaagcu

SEQ ID NO: 380035 - RNA, 19 nt, Artificial Sequence
  Synthetic
gcagagcaggcuggaagcu

SEQ ID NO: 380036 - RNA, 20 nt, Artificial Sequence
  Synthetic
ugcagagcaggcuggaagcu

SEQ ID NO: 380037 - RNA, 21 nt, Artificial Sequence
  Synthetic
uugcagagcaggcuggaagcu

SEQ ID NO: 380038 - RNA, 22 nt, Artificial Sequence
  Synthetic
cuugcagagcaggcuggaagcu

SEQ ID NO: 380039 - RNA, 23 nt, Artificial Sequence
  Synthetic
acuugcagagcaggcuggaagcu

SEQ ID NO: 380040 - RNA, 24 nt, Artificial Sequence
  Synthetic
cacuugcagagcaggcuggaagcu

SEQ ID NO: 380041 - RNA, 18 nt, Artificial Sequence
  Synthetic
gaguuuucucuggaagcu

SEQ ID NO: 380042 - RNA, 19 nt, Artificial Sequence
  Synthetic
ugaguuuucucuggaagcu

SEQ ID NO: 380043 - RNA, 20 nt, Artificial Sequence
  Synthetic
augaguuuucucuggaagcu

SEQ ID NO: 380044 - RNA, 21 nt, Artificial Sequence
  Synthetic
caugaguuuucucuggaagcu

SEQ ID NO: 380045 - RNA, 22 nt, Artificial Sequence
  Synthetic
ccaugaguuuucucuggaagcu

SEQ ID NO: 380046 - RNA, 23 nt, Artificial Sequence
  Synthetic
gccaugaguuuucucuggaagcu

SEQ ID NO: 380047 - RNA, 24 nt, Artificial Sequence
  Synthetic
ugccaugaguuuucucuggaagcu

SEQ ID NO: 380048 - RNA, 18 nt, Artificial Sequence
  Synthetic
ggcaauagggcugaagcu

SEQ ID NO: 380049 - RNA, 19 nt, Artificial Sequence
  Synthetic
uggcaauagggcugaagcu

SEQ ID NO: 380050 - RNA, 20 nt, Artificial Sequence
  Synthetic
auggcaauagggcugaagcu

SEQ ID NO: 380051 - RNA, 21 nt, Artificial Sequence
  Synthetic
aauggcaauagggcugaagcu

SEQ ID NO: 380052 - RNA, 22 nt, Artificial Sequence
  Synthetic
aaauggcaauagggcugaagcu

SEQ ID NO: 380053 - RNA, 23 nt, Artificial Sequence
  Synthetic
caaauggcaauagggcugaagcu

SEQ ID NO: 380054 - RNA, 24 nt, Artificial Sequence
  Synthetic
ccaaauggcaauagggcugaagcu

SEQ ID NO: 380055 - RNA, 18 nt, Artificial Sequence
  Synthetic
guuugaaacucugaagcu

SEQ ID NO: 380056 - RNA, 19 nt, Artificial Sequence
  Synthetic
gguuugaaacucugaagcu

SEQ ID NO: 380057 - RNA, 20 nt, Artificial Sequence
  Synthetic
ggguuugaaacucugaagcu

SEQ ID NO: 380058 - RNA, 21 nt, Artificial Sequence
  Synthetic
uggguuugaaacucugaagcu

SEQ ID NO: 380059 - RNA, 22 nt, Artificial Sequence
  Synthetic
cuggguuugaaacucugaagcu

SEQ ID NO: 380060 - RNA, 23 nt, Artificial Sequence
  Synthetic
acuggguuugaaacucugaagcu

SEQ ID NO: 380061 - RNA, 24 nt, Artificial Sequence
  Synthetic
cacuggguuugaaacucugaagcu

SEQ ID NO: 380062 - RNA, 18 nt, Artificial Sequence
  Synthetic
aaaacuuccagugaagcu

SEQ ID NO: 380063 - RNA, 19 nt, Artificial Sequence
  Synthetic
aaaaacuuccagugaagcu

SEQ ID NO: 380064 - RNA, 20 nt, Artificial Sequence
  Synthetic
gaaaaacuuccagugaagcu

SEQ ID NO: 380065 - RNA, 21 nt, Artificial Sequence
  Synthetic
agaaaaacuuccagugaagcu

SEQ ID NO: 380066 - RNA, 22 nt, Artificial Sequence
  Synthetic
gagaaaaacuuccagugaagcu

SEQ ID NO: 380067 - RNA, 23 nt, Artificial Sequence
  Synthetic
ggagaaaaacuuccagugaagcu

SEQ ID NO: 380068 - RNA, 24 nt, Artificial Sequence
  Synthetic
uggagaaaaacuuccagugaagcu

SEQ ID NO: 380069 - RNA, 18 nt, Artificial Sequence
  Synthetic
uagauguuaguugaagcu

SEQ ID NO: 380070 - RNA, 19 nt, Artificial Sequence
  Synthetic
guagauguuaguugaagcu

SEQ ID NO: 380071 - RNA, 20 nt, Artificial Sequence
  Synthetic
uguagauguuaguugaagcu

SEQ ID NO: 380072 - RNA, 21 nt, Artificial Sequence
  Synthetic
cuguagauguuaguugaagcu

SEQ ID NO: 380073 - RNA, 22 nt, Artificial Sequence
  Synthetic
gcuguagauguuaguugaagcu

SEQ ID NO: 380074 - RNA, 23 nt, Artificial Sequence
  Synthetic
ugcuguagauguuaguugaagcu

SEQ ID NO: 380075 - RNA, 24 nt, Artificial Sequence
  Synthetic
cugcuguagauguuaguugaagcu

SEQ ID NO: 380076 - RNA, 18 nt, Artificial Sequence
  Synthetic
cuucuugaagcuuaagcu

SEQ ID NO: 380077 - RNA, 19 nt, Artificial Sequence
  Synthetic
acuucuugaagcuuaagcu

SEQ ID NO: 380078 - RNA, 20 nt, Artificial Sequence
  Synthetic
gacuucuugaagcuuaagcu

SEQ ID NO: 380079 - RNA, 21 nt, Artificial Sequence
  Synthetic
agacuucuugaagcuuaagcu

SEQ ID NO: 380080 - RNA, 22 nt, Artificial Sequence
  Synthetic
aagacuucuugaagcuuaagcu

SEQ ID NO: 380081 - RNA, 23 nt, Artificial Sequence
  Synthetic
caagacuucuugaagcuuaagcu

SEQ ID NO: 380082 - RNA, 24 nt, Artificial Sequence
  Synthetic
acaagacuucuugaagcuuaagcu

SEQ ID NO: 380083 - RNA, 18 nt, Artificial Sequence
  Synthetic
cagacaggaauaacagcu

SEQ ID NO: 380084 - RNA, 19 nt, Artificial Sequence
  Synthetic
ucagacaggaauaacagcu

SEQ ID NO: 380085 - RNA, 20 nt, Artificial Sequence
  Synthetic
cucagacaggaauaacagcu

SEQ ID NO: 380086 - RNA, 21 nt, Artificial Sequence
  Synthetic
ucucagacaggaauaacagcu

SEQ ID NO: 380087 - RNA, 22 nt, Artificial Sequence
  Synthetic
cucucagacaggaauaacagcu

SEQ ID NO: 380088 - RNA, 23 nt, Artificial Sequence
  Synthetic
gcucucagacaggaauaacagcu

SEQ ID NO: 380089 - RNA, 24 nt, Artificial Sequence
  Synthetic
agcucucagacaggaauaacagcu

SEQ ID NO: 380090 - RNA, 18 nt, Artificial Sequence
  Synthetic
uuacaguuccacacagcu

SEQ ID NO: 380091 - RNA, 19 nt, Artificial Sequence
  Synthetic
cuuacaguuccacacagcu

SEQ ID NO: 380092 - RNA, 20 nt, Artificial Sequence
  Synthetic
acuuacaguuccacacagcu

SEQ ID NO: 380093 - RNA, 21 nt, Artificial Sequence
  Synthetic
gacuuacaguuccacacagcu

SEQ ID NO: 380094 - RNA, 22 nt, Artificial Sequence
  Synthetic
ggacuuacaguuccacacagcu

SEQ ID NO: 380095 - RNA, 23 nt, Artificial Sequence
  Synthetic
uggacuuacaguuccacacagcu

SEQ ID NO: 380096 - RNA, 24 nt, Artificial Sequence
  Synthetic
auggacuuacaguuccacacagcu

SEQ ID NO: 380097 - RNA, 18 nt, Artificial Sequence
  Synthetic
uuaucuaacuccacagcu

SEQ ID NO: 380098 - RNA, 19 nt, Artificial Sequence
  Synthetic
uuuaucuaacuccacagcu

SEQ ID NO: 380099 - RNA, 20 nt, Artificial Sequence
  Synthetic
uuuuaucuaacuccacagcu

SEQ ID NO: 380100 - RNA, 21 nt, Artificial Sequence
  Synthetic
auuuuaucuaacuccacagcu

SEQ ID NO: 380101 - RNA, 22 nt, Artificial Sequence
  Synthetic
aauuuuaucuaacuccacagcu

SEQ ID NO: 380102 - RNA, 23 nt, Artificial Sequence
  Synthetic
aaauuuuaucuaacuccacagcu

SEQ ID NO: 380103 - RNA, 24 nt, Artificial Sequence
  Synthetic
gaaauuuuaucuaacuccacagcu

SEQ ID NO: 380104 - RNA, 18 nt, Artificial Sequence
  Synthetic
aucuugaggagcacagcu

SEQ ID NO: 380105 - RNA, 19 nt, Artificial Sequence
  Synthetic
caucuugaggagcacagcu

SEQ ID NO: 380106 - RNA, 20 nt, Artificial Sequence
  Synthetic
gcaucuugaggagcacagcu

SEQ ID NO: 380107 - RNA, 21 nt, Artificial Sequence
  Synthetic
agcaucuugaggagcacagcu

SEQ ID NO: 380108 - RNA, 22 nt, Artificial Sequence
  Synthetic
gagcaucuugaggagcacagcu

SEQ ID NO: 380109 - RNA, 23 nt, Artificial Sequence
  Synthetic
agagcaucuugaggagcacagcu

SEQ ID NO: 380110 - RNA, 24 nt, Artificial Sequence
  Synthetic
uagagcaucuugaggagcacagcu

SEQ ID NO: 380111 - RNA, 18 nt, Artificial Sequence
  Synthetic
uauuugguugucacagcu

SEQ ID NO: 380112 - RNA, 19 nt, Artificial Sequence
  Synthetic
auauuugguugucacagcu

SEQ ID NO: 380113 - RNA, 20 nt, Artificial Sequence
  Synthetic
cauauuugguugucacagcu

SEQ ID NO: 380114 - RNA, 21 nt, Artificial Sequence
  Synthetic
acauauuugguugucacagcu

SEQ ID NO: 380115 - RNA, 22 nt, Artificial Sequence
  Synthetic
aacauauuugguugucacagcu

SEQ ID NO: 380116 - RNA, 23 nt, Artificial Sequence
  Synthetic
aaacauauuugguugucacagcu

SEQ ID NO: 380117 - RNA, 24 nt, Artificial Sequence
  Synthetic
gaaacauauuugguugucacagcu

SEQ ID NO: 380118 - RNA, 18 nt, Artificial Sequence
  Synthetic
agugcuucaaagacagcu

SEQ ID NO: 380119 - RNA, 19 nt, Artificial Sequence
  Synthetic
uagugcuucaaagacagcu

SEQ ID NO: 380120 - RNA, 20 nt, Artificial Sequence
  Synthetic
cuagugcuucaaagacagcu

SEQ ID NO: 380121 - RNA, 21 nt, Artificial Sequence
  Synthetic
ucuagugcuucaaagacagcu

SEQ ID NO: 380122 - RNA, 22 nt, Artificial Sequence
  Synthetic
cucuagugcuucaaagacagcu

SEQ ID NO: 380123 - RNA, 23 nt, Artificial Sequence
  Synthetic
gcucuagugcuucaaagacagcu

SEQ ID NO: 380124 - RNA, 24 nt, Artificial Sequence
  Synthetic
ugcucuagugcuucaaagacagcu

SEQ ID NO: 380125 - RNA, 18 nt, Artificial Sequence
  Synthetic
agagagaggaagacagcu

SEQ ID NO: 380126 - RNA, 19 nt, Artificial Sequence
  Synthetic
aagagagaggaagacagcu

SEQ ID NO: 380127 - RNA, 20 nt, Artificial Sequence
  Synthetic
aaagagagaggaagacagcu

SEQ ID NO: 380128 - RNA, 21 nt, Artificial Sequence
  Synthetic
aaaagagagaggaagacagcu

SEQ ID NO: 380129 - RNA, 22 nt, Artificial Sequence
  Synthetic
aaaaagagagaggaagacagcu

SEQ ID NO: 380130 - RNA, 23 nt, Artificial Sequence
  Synthetic
gaaaaagagagaggaagacagcu

SEQ ID NO: 380131 - RNA, 24 nt, Artificial Sequence
  Synthetic
ugaaaaagagagaggaagacagcu

SEQ ID NO: 380132 - RNA, 18 nt, Artificial Sequence
  Synthetic
gcagcaccauggacagcu

SEQ ID NO: 380133 - RNA, 19 nt, Artificial Sequence
  Synthetic
ugcagcaccauggacagcu

SEQ ID NO: 380134 - RNA, 20 nt, Artificial Sequence
  Synthetic
augcagcaccauggacagcu

SEQ ID NO: 380135 - RNA, 21 nt, Artificial Sequence
  Synthetic
caugcagcaccauggacagcu

SEQ ID NO: 380136 - RNA, 22 nt, Artificial Sequence
  Synthetic
ucaugcagcaccauggacagcu

SEQ ID NO: 380137 - RNA, 23 nt, Artificial Sequence
  Synthetic
cucaugcagcaccauggacagcu

SEQ ID NO: 380138 - RNA, 24 nt, Artificial Sequence
  Synthetic
ucucaugcagcaccauggacagcu

SEQ ID NO: 380139 - RNA, 18 nt, Artificial Sequence
  Synthetic
gugucauacaauacagcu

SEQ ID NO: 380140 - RNA, 19 nt, Artificial Sequence
  Synthetic
ugugucauacaauacagcu

SEQ ID NO: 380141 - RNA, 20 nt, Artificial Sequence
  Synthetic
augugucauacaauacagcu

SEQ ID NO: 380142 - RNA, 21 nt, Artificial Sequence
  Synthetic
aaugugucauacaauacagcu

SEQ ID NO: 380143 - RNA, 22 nt, Artificial Sequence
  Synthetic
aaaugugucauacaauacagcu

SEQ ID NO: 380144 - RNA, 23 nt, Artificial Sequence
  Synthetic
uaaaugugucauacaauacagcu

SEQ ID NO: 380145 - RNA, 24 nt, Artificial Sequence
  Synthetic
auaaaugugucauacaauacagcu

SEQ ID NO: 380146 - RNA, 18 nt, Artificial Sequence
  Synthetic
cuaggguuuaauacagcu

SEQ ID NO: 380147 - RNA, 19 nt, Artificial Sequence
  Synthetic
ucuaggguuuaauacagcu

SEQ ID NO: 380148 - RNA, 20 nt, Artificial Sequence
  Synthetic
aucuaggguuuaauacagcu

SEQ ID NO: 380149 - RNA, 21 nt, Artificial Sequence
  Synthetic
uaucuaggguuuaauacagcu

SEQ ID NO: 380150 - RNA, 22 nt, Artificial Sequence
  Synthetic
auaucuaggguuuaauacagcu

SEQ ID NO: 380151 - RNA, 23 nt, Artificial Sequence
  Synthetic
aauaucuaggguuuaauacagcu

SEQ ID NO: 380152 - RNA, 24 nt, Artificial Sequence
  Synthetic
gaauaucuaggguuuaauacagcu

SEQ ID NO: 380153 - RNA, 18 nt, Artificial Sequence
  Synthetic
aagaaaacaaguacagcu

SEQ ID NO: 380154 - RNA, 19 nt, Artificial Sequence
  Synthetic
uaagaaaacaaguacagcu

SEQ ID NO: 380155 - RNA, 20 nt, Artificial Sequence
  Synthetic
auaagaaaacaaguacagcu

SEQ ID NO: 380156 - RNA, 21 nt, Artificial Sequence
  Synthetic
aauaagaaaacaaguacagcu

SEQ ID NO: 380157 - RNA, 22 nt, Artificial Sequence
  Synthetic
uaauaagaaaacaaguacagcu

SEQ ID NO: 380158 - RNA, 23 nt, Artificial Sequence
  Synthetic
uuaauaagaaaacaaguacagcu

SEQ ID NO: 380159 - RNA, 24 nt, Artificial Sequence
  Synthetic
cuuaauaagaaaacaaguacagcu

SEQ ID NO: 380160 - RNA, 18 nt, Artificial Sequence
  Synthetic
cagucaaaucuuacagcu

SEQ ID NO: 380161 - RNA, 19 nt, Artificial Sequence
  Synthetic
gcagucaaaucuuacagcu

SEQ ID NO: 380162 - RNA, 20 nt, Artificial Sequence
  Synthetic
ggcagucaaaucuuacagcu

SEQ ID NO: 380163 - RNA, 21 nt, Artificial Sequence
  Synthetic
gggcagucaaaucuuacagcu

SEQ ID NO: 380164 - RNA, 22 nt, Artificial Sequence
  Synthetic
agggcagucaaaucuuacagcu

SEQ ID NO: 380165 - RNA, 23 nt, Artificial Sequence
  Synthetic
cagggcagucaaaucuuacagcu

SEQ ID NO: 380166 - RNA, 24 nt, Artificial Sequence
  Synthetic
ucagggcagucaaaucuuacagcu

SEQ ID NO: 380167 - RNA, 18 nt, Artificial Sequence
  Synthetic
uaugcccauuuuacagcu

SEQ ID NO: 380168 - RNA, 19 nt, Artificial Sequence
  Synthetic
uuaugcccauuuuacagcu

SEQ ID NO: 380169 - RNA, 20 nt, Artificial Sequence
  Synthetic
auuaugcccauuuuacagcu

SEQ ID NO: 380170 - RNA, 21 nt, Artificial Sequence
  Synthetic
uauuaugcccauuuuacagcu

SEQ ID NO: 380171 - RNA, 22 nt, Artificial Sequence
  Synthetic
uuauuaugcccauuuuacagcu

SEQ ID NO: 380172 - RNA, 23 nt, Artificial Sequence
  Synthetic
auuauuaugcccauuuuacagcu

SEQ ID NO: 380173 - RNA, 24 nt, Artificial Sequence
  Synthetic
cauuauuaugcccauuuuacagcu

SEQ ID NO: 380174 - RNA, 18 nt, Artificial Sequence
  Synthetic
uauuucauaaaaccagcu

SEQ ID NO: 380175 - RNA, 19 nt, Artificial Sequence
  Synthetic
uuauuucauaaaaccagcu

SEQ ID NO: 380176 - RNA, 20 nt, Artificial Sequence
  Synthetic
uuuauuucauaaaaccagcu

SEQ ID NO: 380177 - RNA, 21 nt, Artificial Sequence
  Synthetic
uuuuauuucauaaaaccagcu

SEQ ID NO: 380178 - RNA, 22 nt, Artificial Sequence
  Synthetic
uuuuuauuucauaaaaccagcu

SEQ ID NO: 380179 - RNA, 23 nt, Artificial Sequence
  Synthetic
auuuuuauuucauaaaaccagcu

SEQ ID NO: 380180 - RNA, 24 nt, Artificial Sequence
  Synthetic
uauuuuuauuucauaaaaccagcu

SEQ ID NO: 380181 - RNA, 18 nt, Artificial Sequence
  Synthetic
agugaaguggaaccagcu

SEQ ID NO: 380182 - RNA, 19 nt, Artificial Sequence
  Synthetic
cagugaaguggaaccagcu

SEQ ID NO: 380183 - RNA, 20 nt, Artificial Sequence
  Synthetic
ccagugaaguggaaccagcu

SEQ ID NO: 380184 - RNA, 21 nt, Artificial Sequence
  Synthetic
cccagugaaguggaaccagcu

SEQ ID NO: 380185 - RNA, 22 nt, Artificial Sequence
  Synthetic
gcccagugaaguggaaccagcu

SEQ ID NO: 380186 - RNA, 23 nt, Artificial Sequence
  Synthetic
ugcccagugaaguggaaccagcu

SEQ ID NO: 380187 - RNA, 24 nt, Artificial Sequence
  Synthetic
cugcccagugaaguggaaccagcu

SEQ ID NO: 380188 - RNA, 18 nt, Artificial Sequence
  Synthetic
uggugcugccuaccagcu

SEQ ID NO: 380189 - RNA, 19 nt, Artificial Sequence
  Synthetic
uuggugcugccuaccagcu

SEQ ID NO: 380190 - RNA, 20 nt, Artificial Sequence
  Synthetic
guuggugcugccuaccagcu

SEQ ID NO: 380191 - RNA, 21 nt, Artificial Sequence
  Synthetic
aguuggugcugccuaccagcu

SEQ ID NO: 380192 - RNA, 22 nt, Artificial Sequence
  Synthetic
caguuggugcugccuaccagcu

SEQ ID NO: 380193 - RNA, 23 nt, Artificial Sequence
  Synthetic
gcaguuggugcugccuaccagcu

SEQ ID NO: 380194 - RNA, 24 nt, Artificial Sequence
  Synthetic
ggcaguuggugcugccuaccagcu

SEQ ID NO: 380195 - RNA, 18 nt, Artificial Sequence
  Synthetic
agucuggaaaagccagcu

SEQ ID NO: 380196 - RNA, 19 nt, Artificial Sequence
  Synthetic
cagucuggaaaagccagcu

SEQ ID NO: 380197 - RNA, 20 nt, Artificial Sequence
  Synthetic
ucagucuggaaaagccagcu

SEQ ID NO: 380198 - RNA, 21 nt, Artificial Sequence
  Synthetic
cucagucuggaaaagccagcu

SEQ ID NO: 380199 - RNA, 22 nt, Artificial Sequence
  Synthetic
ccucagucuggaaaagccagcu

SEQ ID NO: 380200 - RNA, 23 nt, Artificial Sequence
  Synthetic
accucagucuggaaaagccagcu

SEQ ID NO: 380201 - RNA, 24 nt, Artificial Sequence
  Synthetic
gaccucagucuggaaaagccagcu

SEQ ID NO: 380202 - RNA, 18 nt, Artificial Sequence
  Synthetic
gucuuagaugagccagcu

SEQ ID NO: 380203 - RNA, 19 nt, Artificial Sequence
  Synthetic
ggucuuagaugagccagcu

SEQ ID NO: 380204 - RNA, 20 nt, Artificial Sequence
  Synthetic
aggucuuagaugagccagcu

SEQ ID NO: 380205 - RNA, 21 nt, Artificial Sequence
  Synthetic
gaggucuuagaugagccagcu

SEQ ID NO: 380206 - RNA, 22 nt, Artificial Sequence
  Synthetic
agaggucuuagaugagccagcu

SEQ ID NO: 380207 - RNA, 23 nt, Artificial Sequence
  Synthetic
gagaggucuuagaugagccagcu

SEQ ID NO: 380208 - RNA, 24 nt, Artificial Sequence
  Synthetic
ggagaggucuuagaugagccagcu

SEQ ID NO: 380209 - RNA, 18 nt, Artificial Sequence
  Synthetic
ggggaagagcugccagcu

SEQ ID NO: 380210 - RNA, 19 nt, Artificial Sequence
  Synthetic
aggggaagagcugccagcu

SEQ ID NO: 380211 - RNA, 20 nt, Artificial Sequence
  Synthetic
gaggggaagagcugccagcu

SEQ ID NO: 380212 - RNA, 21 nt, Artificial Sequence
  Synthetic
ggaggggaagagcugccagcu

SEQ ID NO: 380213 - RNA, 22 nt, Artificial Sequence
  Synthetic
uggaggggaagagcugccagcu

SEQ ID NO: 380214 - RNA, 23 nt, Artificial Sequence
  Synthetic
auggaggggaagagcugccagcu

SEQ ID NO: 380215 - RNA, 24 nt, Artificial Sequence
  Synthetic
gauggaggggaagagcugccagcu

SEQ ID NO: 380216 - RNA, 18 nt, Artificial Sequence
  Synthetic
gccuuuaaaguuccagcu

SEQ ID NO: 380217 - RNA, 19 nt, Artificial Sequence
  Synthetic
ugccuuuaaaguuccagcu

SEQ ID NO: 380218 - RNA, 20 nt, Artificial Sequence
  Synthetic
cugccuuuaaaguuccagcu

SEQ ID NO: 380219 - RNA, 21 nt, Artificial Sequence
  Synthetic
acugccuuuaaaguuccagcu

SEQ ID NO: 380220 - RNA, 22 nt, Artificial Sequence
  Synthetic
aacugccuuuaaaguuccagcu

SEQ ID NO: 380221 - RNA, 23 nt, Artificial Sequence
  Synthetic
gaacugccuuuaaaguuccagcu

SEQ ID NO: 380222 - RNA, 24 nt, Artificial Sequence
  Synthetic
ugaacugccuuuaaaguuccagcu

SEQ ID NO: 380223 - RNA, 18 nt, Artificial Sequence
  Synthetic
guguuaucuuuuccagcu

SEQ ID NO: 380224 - RNA, 19 nt, Artificial Sequence
  Synthetic
aguguuaucuuuuccagcu

SEQ ID NO: 380225 - RNA, 20 nt, Artificial Sequence
  Synthetic
caguguuaucuuuuccagcu

SEQ ID NO: 380226 - RNA, 21 nt, Artificial Sequence
  Synthetic
ccaguguuaucuuuuccagcu

SEQ ID NO: 380227 - RNA, 22 nt, Artificial Sequence
  Synthetic
cccaguguuaucuuuuccagcu

SEQ ID NO: 380228 - RNA, 23 nt, Artificial Sequence
  Synthetic
acccaguguuaucuuuuccagcu

SEQ ID NO: 380229 - RNA, 24 nt, Artificial Sequence
  Synthetic
aacccaguguuaucuuuuccagcu

SEQ ID NO: 380230 - RNA, 18 nt, Artificial Sequence
  Synthetic
gccugguaagaagcagcu

SEQ ID NO: 380231 - RNA, 19 nt, Artificial Sequence
  Synthetic
ugccugguaagaagcagcu

SEQ ID NO: 380232 - RNA, 20 nt, Artificial Sequence
  Synthetic
cugccugguaagaagcagcu

SEQ ID NO: 380233 - RNA, 21 nt, Artificial Sequence
  Synthetic
ucugccugguaagaagcagcu

SEQ ID NO: 380234 - RNA, 22 nt, Artificial Sequence
  Synthetic
gucugccugguaagaagcagcu

SEQ ID NO: 380235 - RNA, 23 nt, Artificial Sequence
  Synthetic
ugucugccugguaagaagcagcu

SEQ ID NO: 380236 - RNA, 24 nt, Artificial Sequence
  Synthetic
cugucugccugguaagaagcagcu

SEQ ID NO: 380237 - RNA, 18 nt, Artificial Sequence
  Synthetic
guggcauuggaagcagcu

SEQ ID NO: 380238 - RNA, 19 nt, Artificial Sequence
  Synthetic
uguggcauuggaagcagcu

SEQ ID NO: 380239 - RNA, 20 nt, Artificial Sequence
  Synthetic
uuguggcauuggaagcagcu

SEQ ID NO: 380240 - RNA, 21 nt, Artificial Sequence
  Synthetic
guuguggcauuggaagcagcu

SEQ ID NO: 380241 - RNA, 22 nt, Artificial Sequence
  Synthetic
aguuguggcauuggaagcagcu

SEQ ID NO: 380242 - RNA, 23 nt, Artificial Sequence
  Synthetic
caguuguggcauuggaagcagcu

SEQ ID NO: 380243 - RNA, 24 nt, Artificial Sequence
  Synthetic
gcaguuguggcauuggaagcagcu

SEQ ID NO: 380244 - RNA, 18 nt, Artificial Sequence
  Synthetic
aaacaaaaagcagcagcu

SEQ ID NO: 380245 - RNA, 19 nt, Artificial Sequence
  Synthetic
aaaacaaaaagcagcagcu

SEQ ID NO: 380246 - RNA, 20 nt, Artificial Sequence
  Synthetic
aaaaacaaaaagcagcagcu

SEQ ID NO: 380247 - RNA, 21 nt, Artificial Sequence
  Synthetic
gaaaaacaaaaagcagcagcu

SEQ ID NO: 380248 - RNA, 22 nt, Artificial Sequence
  Synthetic
agaaaaacaaaaagcagcagcu

SEQ ID NO: 380249 - RNA, 23 nt, Artificial Sequence
  Synthetic
cagaaaaacaaaaagcagcagcu

SEQ ID NO: 380250 - RNA, 24 nt, Artificial Sequence
  Synthetic
ccagaaaaacaaaaagcagcagcu

SEQ ID NO: 380251 - RNA, 18 nt, Artificial Sequence
  Synthetic
aguuaauucugagcagcu

SEQ ID NO: 380252 - RNA, 19 nt, Artificial Sequence
  Synthetic
gaguuaauucugagcagcu

SEQ ID NO: 380253 - RNA, 20 nt, Artificial Sequence
  Synthetic
agaguuaauucugagcagcu

SEQ ID NO: 380254 - RNA, 21 nt, Artificial Sequence
  Synthetic
gagaguuaauucugagcagcu

SEQ ID NO: 380255 - RNA, 22 nt, Artificial Sequence
  Synthetic
agagaguuaauucugagcagcu

SEQ ID NO: 380256 - RNA, 23 nt, Artificial Sequence
  Synthetic
aagagaguuaauucugagcagcu

SEQ ID NO: 380257 - RNA, 24 nt, Artificial Sequence
  Synthetic
caagagaguuaauucugagcagcu

SEQ ID NO: 380258 - RNA, 18 nt, Artificial Sequence
  Synthetic
cuagccaugauagcagcu

SEQ ID NO: 380259 - RNA, 19 nt, Artificial Sequence
  Synthetic
gcuagccaugauagcagcu

SEQ ID NO: 380260 - RNA, 20 nt, Artificial Sequence
  Synthetic
ugcuagccaugauagcagcu

SEQ ID NO: 380261 - RNA, 21 nt, Artificial Sequence
  Synthetic
gugcuagccaugauagcagcu

SEQ ID NO: 380262 - RNA, 22 nt, Artificial Sequence
  Synthetic
agugcuagccaugauagcagcu

SEQ ID NO: 380263 - RNA, 23 nt, Artificial Sequence
  Synthetic
cagugcuagccaugauagcagcu

SEQ ID NO: 380264 - RNA, 24 nt, Artificial Sequence
  Synthetic
ucagugcuagccaugauagcagcu

SEQ ID NO: 380265 - RNA, 18 nt, Artificial Sequence
  Synthetic
gcagcacuccuagcagcu

SEQ ID NO: 380266 - RNA, 19 nt, Artificial Sequence
  Synthetic
agcagcacuccuagcagcu

SEQ ID NO: 380267 - RNA, 20 nt, Artificial Sequence
  Synthetic
cagcagcacuccuagcagcu

SEQ ID NO: 380268 - RNA, 21 nt, Artificial Sequence
  Synthetic
ccagcagcacuccuagcagcu

SEQ ID NO: 380269 - RNA, 22 nt, Artificial Sequence
  Synthetic
accagcagcacuccuagcagcu

SEQ ID NO: 380270 - RNA, 23 nt, Artificial Sequence
  Synthetic
uaccagcagcacuccuagcagcu

SEQ ID NO: 380271 - RNA, 24 nt, Artificial Sequence
  Synthetic
cuaccagcagcacuccuagcagcu

SEQ ID NO: 380272 - RNA, 18 nt, Artificial Sequence
  Synthetic
ucuuacggacaggcagcu

SEQ ID NO: 380273 - RNA, 19 nt, Artificial Sequence
  Synthetic
uucuuacggacaggcagcu

SEQ ID NO: 380274 - RNA, 20 nt, Artificial Sequence
  Synthetic
auucuuacggacaggcagcu

SEQ ID NO: 380275 - RNA, 21 nt, Artificial Sequence
  Synthetic
gauucuuacggacaggcagcu

SEQ ID NO: 380276 - RNA, 22 nt, Artificial Sequence
  Synthetic
ugauucuuacggacaggcagcu

SEQ ID NO: 380277 - RNA, 23 nt, Artificial Sequence
  Synthetic
gugauucuuacggacaggcagcu

SEQ ID NO: 380278 - RNA, 24 nt, Artificial Sequence
  Synthetic
ggugauucuuacggacaggcagcu

SEQ ID NO: 380279 - RNA, 18 nt, Artificial Sequence
  Synthetic
ccagggagggaggcagcu

SEQ ID NO: 380280 - RNA, 19 nt, Artificial Sequence
  Synthetic
uccagggagggaggcagcu

SEQ ID NO: 380281 - RNA, 20 nt, Artificial Sequence
  Synthetic
uuccagggagggaggcagcu

SEQ ID NO: 380282 - RNA, 21 nt, Artificial Sequence
  Synthetic
uuuccagggagggaggcagcu

SEQ ID NO: 380283 - RNA, 22 nt, Artificial Sequence
  Synthetic
auuuccagggagggaggcagcu

SEQ ID NO: 380284 - RNA, 23 nt, Artificial Sequence
  Synthetic
aauuuccagggagggaggcagcu

SEQ ID NO: 380285 - RNA, 24 nt, Artificial Sequence
  Synthetic
caauuuccagggagggaggcagcu

SEQ ID NO: 380286 - RNA, 18 nt, Artificial Sequence
  Synthetic
gagaauuaaacugcagcu

SEQ ID NO: 380287 - RNA, 19 nt, Artificial Sequence
  Synthetic
ggagaauuaaacugcagcu

SEQ ID NO: 380288 - RNA, 20 nt, Artificial Sequence
  Synthetic
uggagaauuaaacugcagcu

SEQ ID NO: 380289 - RNA, 21 nt, Artificial Sequence
  Synthetic
guggagaauuaaacugcagcu

SEQ ID NO: 380290 - RNA, 22 nt, Artificial Sequence
  Synthetic
gguggagaauuaaacugcagcu

SEQ ID NO: 380291 - RNA, 23 nt, Artificial Sequence
  Synthetic
agguggagaauuaaacugcagcu

SEQ ID NO: 380292 - RNA, 24 nt, Artificial Sequence
  Synthetic
aagguggagaauuaaacugcagcu

SEQ ID NO: 380293 - RNA, 18 nt, Artificial Sequence
  Synthetic
uuaauaaucacaucagcu

SEQ ID NO: 380294 - RNA, 19 nt, Artificial Sequence
  Synthetic
uuuaauaaucacaucagcu

SEQ ID NO: 380295 - RNA, 20 nt, Artificial Sequence
  Synthetic
uuuuaauaaucacaucagcu

SEQ ID NO: 380296 - RNA, 21 nt, Artificial Sequence
  Synthetic
cuuuuaauaaucacaucagcu

SEQ ID NO: 380297 - RNA, 22 nt, Artificial Sequence
  Synthetic
gcuuuuaauaaucacaucagcu

SEQ ID NO: 380298 - RNA, 23 nt, Artificial Sequence
  Synthetic
ggcuuuuaauaaucacaucagcu

SEQ ID NO: 380299 - RNA, 24 nt, Artificial Sequence
  Synthetic
uggcuuuuaauaaucacaucagcu

SEQ ID NO: 380300 - RNA, 18 nt, Artificial Sequence
  Synthetic
uccaaaaagcuaucagcu

SEQ ID NO: 380301 - RNA, 19 nt, Artificial Sequence
  Synthetic
uuccaaaaagcuaucagcu

SEQ ID NO: 380302 - RNA, 20 nt, Artificial Sequence
  Synthetic
guuccaaaaagcuaucagcu

SEQ ID NO: 380303 - RNA, 21 nt, Artificial Sequence
  Synthetic
gguuccaaaaagcuaucagcu

SEQ ID NO: 380304 - RNA, 22 nt, Artificial Sequence
  Synthetic
ugguuccaaaaagcuaucagcu

SEQ ID NO: 380305 - RNA, 23 nt, Artificial Sequence
  Synthetic
uugguuccaaaaagcuaucagcu

SEQ ID NO: 380306 - RNA, 24 nt, Artificial Sequence
  Synthetic
cuugguuccaaaaagcuaucagcu

SEQ ID NO: 380307 - RNA, 18 nt, Artificial Sequence
  Synthetic
uuagagccuuuaucagcu

SEQ ID NO: 380308 - RNA, 19 nt, Artificial Sequence
  Synthetic
uuuagagccuuuaucagcu

SEQ ID NO: 380309 - RNA, 20 nt, Artificial Sequence
  Synthetic
uuuuagagccuuuaucagcu

SEQ ID NO: 380310 - RNA, 21 nt, Artificial Sequence
  Synthetic
guuuuagagccuuuaucagcu

SEQ ID NO: 380311 - RNA, 22 nt, Artificial Sequence
  Synthetic
uguuuuagagccuuuaucagcu

SEQ ID NO: 380312 - RNA, 23 nt, Artificial Sequence
  Synthetic
cuguuuuagagccuuuaucagcu

SEQ ID NO: 380313 - RNA, 24 nt, Artificial Sequence
  Synthetic
ccuguuuuagagccuuuaucagcu

SEQ ID NO: 380314 - RNA, 18 nt, Artificial Sequence
  Synthetic
caggacuuaaacucagcu

SEQ ID NO: 380315 - RNA, 19 nt, Artificial Sequence
  Synthetic
ucaggacuuaaacucagcu

SEQ ID NO: 380316 - RNA, 20 nt, Artificial Sequence
  Synthetic
uucaggacuuaaacucagcu

SEQ ID NO: 380317 - RNA, 21 nt, Artificial Sequence
  Synthetic
auucaggacuuaaacucagcu

SEQ ID NO: 380318 - RNA, 22 nt, Artificial Sequence
  Synthetic
uauucaggacuuaaacucagcu

SEQ ID NO: 380319 - RNA, 23 nt, Artificial Sequence
  Synthetic
auauucaggacuuaaacucagcu

SEQ ID NO: 380320 - RNA, 24 nt, Artificial Sequence
  Synthetic
gauauucaggacuuaaacucagcu

SEQ ID NO: 380321 - RNA, 18 nt, Artificial Sequence
  Synthetic
gggcucuagaucucagcu

SEQ ID NO: 380322 - RNA, 19 nt, Artificial Sequence
  Synthetic
agggcucuagaucucagcu

SEQ ID NO: 380323 - RNA, 20 nt, Artificial Sequence
  Synthetic
cagggcucuagaucucagcu

SEQ ID NO: 380324 - RNA, 21 nt, Artificial Sequence
  Synthetic
acagggcucuagaucucagcu

SEQ ID NO: 380325 - RNA, 22 nt, Artificial Sequence
  Synthetic
aacagggcucuagaucucagcu

SEQ ID NO: 380326 - RNA, 23 nt, Artificial Sequence
  Synthetic
caacagggcucuagaucucagcu

SEQ ID NO: 380327 - RNA, 24 nt, Artificial Sequence
  Synthetic
gcaacagggcucuagaucucagcu

SEQ ID NO: 380328 - RNA, 18 nt, Artificial Sequence
  Synthetic
aaaaacuguaucucagcu

SEQ ID NO: 380329 - RNA, 19 nt, Artificial Sequence
  Synthetic
aaaaaacuguaucucagcu

SEQ ID NO: 380330 - RNA, 20 nt, Artificial Sequence
  Synthetic
gaaaaaacuguaucucagcu

SEQ ID NO: 380331 - RNA, 21 nt, Artificial Sequence
  Synthetic
ggaaaaaacuguaucucagcu

SEQ ID NO: 380332 - RNA, 22 nt, Artificial Sequence
  Synthetic
gggaaaaaacuguaucucagcu

SEQ ID NO: 380333 - RNA, 23 nt, Artificial Sequence
  Synthetic
agggaaaaaacuguaucucagcu

SEQ ID NO: 380334 - RNA, 24 nt, Artificial Sequence
  Synthetic
aagggaaaaaacuguaucucagcu

SEQ ID NO: 380335 - RNA, 18 nt, Artificial Sequence
  Synthetic
gaucucucaaggucagcu

SEQ ID NO: 380336 - RNA, 19 nt, Artificial Sequence
  Synthetic
ugaucucucaaggucagcu

SEQ ID NO: 380337 - RNA, 20 nt, Artificial Sequence
  Synthetic
gugaucucucaaggucagcu

SEQ ID NO: 380338 - RNA, 21 nt, Artificial Sequence
  Synthetic
agugaucucucaaggucagcu

SEQ ID NO: 380339 - RNA, 22 nt, Artificial Sequence
  Synthetic
cagugaucucucaaggucagcu

SEQ ID NO: 380340 - RNA, 23 nt, Artificial Sequence
  Synthetic
ccagugaucucucaaggucagcu

SEQ ID NO: 380341 - RNA, 24 nt, Artificial Sequence
  Synthetic
accagugaucucucaaggucagcu

SEQ ID NO: 380342 - RNA, 18 nt, Artificial Sequence
  Synthetic
uucugucucgugucagcu

SEQ ID NO: 380343 - RNA, 19 nt, Artificial Sequence
  Synthetic
uuucugucucgugucagcu

SEQ ID NO: 380344 - RNA, 20 nt, Artificial Sequence
  Synthetic
auuucugucucgugucagcu

SEQ ID NO: 380345 - RNA, 21 nt, Artificial Sequence
  Synthetic
uauuucugucucgugucagcu

SEQ ID NO: 380346 - RNA, 22 nt, Artificial Sequence
  Synthetic
uuauuucugucucgugucagcu

SEQ ID NO: 380347 - RNA, 23 nt, Artificial Sequence
  Synthetic
guuauuucugucucgugucagcu

SEQ ID NO: 380348 - RNA, 24 nt, Artificial Sequence
  Synthetic
uguuauuucugucucgugucagcu

SEQ ID NO: 380349 - RNA, 18 nt, Artificial Sequence
  Synthetic
aauuauacaaauucagcu

SEQ ID NO: 380350 - RNA, 19 nt, Artificial Sequence
  Synthetic
aaauuauacaaauucagcu

SEQ ID NO: 380351 - RNA, 20 nt, Artificial Sequence
  Synthetic
uaaauuauacaaauucagcu

SEQ ID NO: 380352 - RNA, 21 nt, Artificial Sequence
  Synthetic
uuaaauuauacaaauucagcu

SEQ ID NO: 380353 - RNA, 22 nt, Artificial Sequence
  Synthetic
auuaaauuauacaaauucagcu

SEQ ID NO: 380354 - RNA, 23 nt, Artificial Sequence
  Synthetic
gauuaaauuauacaaauucagcu

SEQ ID NO: 380355 - RNA, 24 nt, Artificial Sequence
  Synthetic
agauuaaauuauacaaauucagcu

SEQ ID NO: 380356 - RNA, 18 nt, Artificial Sequence
  Synthetic
auauuacauuauucagcu

SEQ ID NO: 380357 - RNA, 19 nt, Artificial Sequence
  Synthetic
uauauuacauuauucagcu

SEQ ID NO: 380358 - RNA, 20 nt, Artificial Sequence
  Synthetic
auauauuacauuauucagcu

SEQ ID NO: 380359 - RNA, 21 nt, Artificial Sequence
  Synthetic
gauauauuacauuauucagcu

SEQ ID NO: 380360 - RNA, 22 nt, Artificial Sequence
  Synthetic
ugauauauuacauuauucagcu

SEQ ID NO: 380361 - RNA, 23 nt, Artificial Sequence
  Synthetic
uugauauauuacauuauucagcu

SEQ ID NO: 380362 - RNA, 24 nt, Artificial Sequence
  Synthetic
auugauauauuacauuauucagcu

SEQ ID NO: 380363 - RNA, 18 nt, Artificial Sequence
  Synthetic
gaacauauuuauucagcu

SEQ ID NO: 380364 - RNA, 19 nt, Artificial Sequence
  Synthetic
ugaacauauuuauucagcu

SEQ ID NO: 380365 - RNA, 20 nt, Artificial Sequence
  Synthetic
augaacauauuuauucagcu

SEQ ID NO: 380366 - RNA, 21 nt, Artificial Sequence
  Synthetic
uaugaacauauuuauucagcu

SEQ ID NO: 380367 - RNA, 22 nt, Artificial Sequence
  Synthetic
guaugaacauauuuauucagcu

SEQ ID NO: 380368 - RNA, 23 nt, Artificial Sequence
  Synthetic
uguaugaacauauuuauucagcu

SEQ ID NO: 380369 - RNA, 24 nt, Artificial Sequence
  Synthetic
uuguaugaacauauuuauucagcu

SEQ ID NO: 380370 - RNA, 18 nt, Artificial Sequence
  Synthetic
acaacauagaguucagcu

SEQ ID NO: 380371 - RNA, 19 nt, Artificial Sequence
  Synthetic
aacaacauagaguucagcu

SEQ ID NO: 380372 - RNA, 20 nt, Artificial Sequence
  Synthetic
uaacaacauagaguucagcu

SEQ ID NO: 380373 - RNA, 21 nt, Artificial Sequence
  Synthetic
cuaacaacauagaguucagcu

SEQ ID NO: 380374 - RNA, 22 nt, Artificial Sequence
  Synthetic
ucuaacaacauagaguucagcu

SEQ ID NO: 380375 - RNA, 23 nt, Artificial Sequence
  Synthetic
uucuaacaacauagaguucagcu

SEQ ID NO: 380376 - RNA, 24 nt, Artificial Sequence
  Synthetic
uuucuaacaacauagaguucagcu

SEQ ID NO: 380377 - RNA, 18 nt, Artificial Sequence
  Synthetic
cuuauggcccuuucagcu

SEQ ID NO: 380378 - RNA, 19 nt, Artificial Sequence
  Synthetic
gcuuauggcccuuucagcu

SEQ ID NO: 380379 - RNA, 20 nt, Artificial Sequence
  Synthetic
ugcuuauggcccuuucagcu

SEQ ID NO: 380380 - RNA, 21 nt, Artificial Sequence
  Synthetic
uugcuuauggcccuuucagcu

SEQ ID NO: 380381 - RNA, 22 nt, Artificial Sequence
  Synthetic
uuugcuuauggcccuuucagcu

SEQ ID NO: 380382 - RNA, 23 nt, Artificial Sequence
  Synthetic
uuuugcuuauggcccuuucagcu

SEQ ID NO: 380383 - RNA, 24 nt, Artificial Sequence
  Synthetic
guuuugcuuauggcccuuucagcu

SEQ ID NO: 380384 - RNA, 18 nt, Artificial Sequence
  Synthetic
agaugcuggacaagagcu

SEQ ID NO: 380385 - RNA, 19 nt, Artificial Sequence
  Synthetic
uagaugcuggacaagagcu

SEQ ID NO: 380386 - RNA, 20 nt, Artificial Sequence
  Synthetic
cuagaugcuggacaagagcu

SEQ ID NO: 380387 - RNA, 21 nt, Artificial Sequence
  Synthetic
ccuagaugcuggacaagagcu

SEQ ID NO: 380388 - RNA, 22 nt, Artificial Sequence
  Synthetic
cccuagaugcuggacaagagcu

SEQ ID NO: 380389 - RNA, 23 nt, Artificial Sequence
  Synthetic
ucccuagaugcuggacaagagcu

SEQ ID NO: 380390 - RNA, 24 nt, Artificial Sequence
  Synthetic
uucccuagaugcuggacaagagcu

SEQ ID NO: 380391 - RNA, 18 nt, Artificial Sequence
  Synthetic
aaacaucucccaagagcu

SEQ ID NO: 380392 - RNA, 19 nt, Artificial Sequence
  Synthetic
uaaacaucucccaagagcu

SEQ ID NO: 380393 - RNA, 20 nt, Artificial Sequence
  Synthetic
auaaacaucucccaagagcu

SEQ ID NO: 380394 - RNA, 21 nt, Artificial Sequence
  Synthetic
aauaaacaucucccaagagcu

SEQ ID NO: 380395 - RNA, 22 nt, Artificial Sequence
  Synthetic
aaauaaacaucucccaagagcu

SEQ ID NO: 380396 - RNA, 23 nt, Artificial Sequence
  Synthetic
caaauaaacaucucccaagagcu

SEQ ID NO: 380397 - RNA, 24 nt, Artificial Sequence
  Synthetic
ccaaauaaacaucucccaagagcu

SEQ ID NO: 380398 - RNA, 18 nt, Artificial Sequence
  Synthetic
ggauuuuagagaagagcu

SEQ ID NO: 380399 - RNA, 19 nt, Artificial Sequence
  Synthetic
uggauuuuagagaagagcu

SEQ ID NO: 380400 - RNA, 20 nt, Artificial Sequence
  Synthetic
guggauuuuagagaagagcu

SEQ ID NO: 380401 - RNA, 21 nt, Artificial Sequence
  Synthetic
uguggauuuuagagaagagcu

SEQ ID NO: 380402 - RNA, 22 nt, Artificial Sequence
  Synthetic
auguggauuuuagagaagagcu

SEQ ID NO: 380403 - RNA, 23 nt, Artificial Sequence
  Synthetic
aauguggauuuuagagaagagcu

SEQ ID NO: 380404 - RNA, 24 nt, Artificial Sequence
  Synthetic
aaauguggauuuuagagaagagcu

SEQ ID NO: 380405 - RNA, 18 nt, Artificial Sequence
  Synthetic
uggaggaucaccagagcu

SEQ ID NO: 380406 - RNA, 19 nt, Artificial Sequence
  Synthetic
guggaggaucaccagagcu

SEQ ID NO: 380407 - RNA, 20 nt, Artificial Sequence
  Synthetic
gguggaggaucaccagagcu

SEQ ID NO: 380408 - RNA, 21 nt, Artificial Sequence
  Synthetic
agguggaggaucaccagagcu

SEQ ID NO: 380409 - RNA, 22 nt, Artificial Sequence
  Synthetic
gagguggaggaucaccagagcu

SEQ ID NO: 380410 - RNA, 23 nt, Artificial Sequence
  Synthetic
ugagguggaggaucaccagagcu

SEQ ID NO: 380411 - RNA, 24 nt, Artificial Sequence
  Synthetic
cugagguggaggaucaccagagcu

SEQ ID NO: 380412 - RNA, 18 nt, Artificial Sequence
  Synthetic
guagaaaaagagagagcu

SEQ ID NO: 380413 - RNA, 19 nt, Artificial Sequence
  Synthetic
gguagaaaaagagagagcu

SEQ ID NO: 380414 - RNA, 20 nt, Artificial Sequence
  Synthetic
agguagaaaaagagagagcu

SEQ ID NO: 380415 - RNA, 21 nt, Artificial Sequence
  Synthetic
gagguagaaaaagagagagcu

SEQ ID NO: 380416 - RNA, 22 nt, Artificial Sequence
  Synthetic
cgagguagaaaaagagagagcu

SEQ ID NO: 380417 - RNA, 23 nt, Artificial Sequence
  Synthetic
ccgagguagaaaaagagagagcu

SEQ ID NO: 380418 - RNA, 24 nt, Artificial Sequence
  Synthetic
cccgagguagaaaaagagagagcu

SEQ ID NO: 380419 - RNA, 18 nt, Artificial Sequence
  Synthetic
uauugacaaaggagagcu

SEQ ID NO: 380420 - RNA, 19 nt, Artificial Sequence
  Synthetic
guauugacaaaggagagcu

SEQ ID NO: 380421 - RNA, 20 nt, Artificial Sequence
  Synthetic
gguauugacaaaggagagcu

SEQ ID NO: 380422 - RNA, 21 nt, Artificial Sequence
  Synthetic
agguauugacaaaggagagcu

SEQ ID NO: 380423 - RNA, 22 nt, Artificial Sequence
  Synthetic
gagguauugacaaaggagagcu

SEQ ID NO: 380424 - RNA, 23 nt, Artificial Sequence
  Synthetic
agagguauugacaaaggagagcu

SEQ ID NO: 380425 - RNA, 24 nt, Artificial Sequence
  Synthetic
cagagguauugacaaaggagagcu

SEQ ID NO: 380426 - RNA, 18 nt, Artificial Sequence
  Synthetic
caguuuuguuggagagcu

SEQ ID NO: 380427 - RNA, 19 nt, Artificial Sequence
  Synthetic
ccaguuuuguuggagagcu

SEQ ID NO: 380428 - RNA, 20 nt, Artificial Sequence
  Synthetic
cccaguuuuguuggagagcu

SEQ ID NO: 380429 - RNA, 21 nt, Artificial Sequence
  Synthetic
ucccaguuuuguuggagagcu

SEQ ID NO: 380430 - RNA, 22 nt, Artificial Sequence
  Synthetic
aucccaguuuuguuggagagcu

SEQ ID NO: 380431 - RNA, 23 nt, Artificial Sequence
  Synthetic
aaucccaguuuuguuggagagcu

SEQ ID NO: 380432 - RNA, 24 nt, Artificial Sequence
  Synthetic
caaucccaguuuuguuggagagcu

SEQ ID NO: 380433 - RNA, 18 nt, Artificial Sequence
  Synthetic
uaaauuguauuuagagcu

SEQ ID NO: 380434 - RNA, 19 nt, Artificial Sequence
  Synthetic
cuaaauuguauuuagagcu

SEQ ID NO: 380435 - RNA, 20 nt, Artificial Sequence
  Synthetic
acuaaauuguauuuagagcu

SEQ ID NO: 380436 - RNA, 21 nt, Artificial Sequence
  Synthetic
uacuaaauuguauuuagagcu

SEQ ID NO: 380437 - RNA, 22 nt, Artificial Sequence
  Synthetic
guacuaaauuguauuuagagcu

SEQ ID NO: 380438 - RNA, 23 nt, Artificial Sequence
  Synthetic
uguacuaaauuguauuuagagcu

SEQ ID NO: 380439 - RNA, 24 nt, Artificial Sequence
  Synthetic
uuguacuaaauuguauuuagagcu

SEQ ID NO: 380440 - RNA, 18 nt, Artificial Sequence
  Synthetic
auaauuauuuuacgagcu

SEQ ID NO: 380441 - RNA, 19 nt, Artificial Sequence
  Synthetic
gauaauuauuuuacgagcu

SEQ ID NO: 380442 - RNA, 20 nt, Artificial Sequence
  Synthetic
agauaauuauuuuacgagcu

SEQ ID NO: 380443 - RNA, 21 nt, Artificial Sequence
  Synthetic
aagauaauuauuuuacgagcu

SEQ ID NO: 380444 - RNA, 22 nt, Artificial Sequence
  Synthetic
uaagauaauuauuuuacgagcu

SEQ ID NO: 380445 - RNA, 23 nt, Artificial Sequence
  Synthetic
auaagauaauuauuuuacgagcu

SEQ ID NO: 380446 - RNA, 24 nt, Artificial Sequence
  Synthetic
aauaagauaauuauuuuacgagcu

SEQ ID NO: 380447 - RNA, 18 nt, Artificial Sequence
  Synthetic
gauccugaugaaggagcu

SEQ ID NO: 380448 - RNA, 19 nt, Artificial Sequence
  Synthetic
ugauccugaugaaggagcu

SEQ ID NO: 380449 - RNA, 20 nt, Artificial Sequence
  Synthetic
uugauccugaugaaggagcu

SEQ ID NO: 380450 - RNA, 21 nt, Artificial Sequence
  Synthetic
uuugauccugaugaaggagcu

SEQ ID NO: 380451 - RNA, 22 nt, Artificial Sequence
  Synthetic
guuugauccugaugaaggagcu

SEQ ID NO: 380452 - RNA, 23 nt, Artificial Sequence
  Synthetic
gguuugauccugaugaaggagcu

SEQ ID NO: 380453 - RNA, 24 nt, Artificial Sequence
  Synthetic
ggguuugauccugaugaaggagcu

SEQ ID NO: 380454 - RNA, 18 nt, Artificial Sequence
  Synthetic
aaaugaccugaaggagcu

SEQ ID NO: 380455 - RNA, 19 nt, Artificial Sequence
  Synthetic
uaaaugaccugaaggagcu

SEQ ID NO: 380456 - RNA, 20 nt, Artificial Sequence
  Synthetic
auaaaugaccugaaggagcu

SEQ ID NO: 380457 - RNA, 21 nt, Artificial Sequence
  Synthetic
cauaaaugaccugaaggagcu

SEQ ID NO: 380458 - RNA, 22 nt, Artificial Sequence
  Synthetic
acauaaaugaccugaaggagcu

SEQ ID NO: 380459 - RNA, 23 nt, Artificial Sequence
  Synthetic
aacauaaaugaccugaaggagcu

SEQ ID NO: 380460 - RNA, 24 nt, Artificial Sequence
  Synthetic
gaacauaaaugaccugaaggagcu

SEQ ID NO: 380461 - RNA, 18 nt, Artificial Sequence
  Synthetic
ugaaaaguauaaggagcu

SEQ ID NO: 380462 - RNA, 19 nt, Artificial Sequence
  Synthetic
augaaaaguauaaggagcu

SEQ ID NO: 380463 - RNA, 20 nt, Artificial Sequence
  Synthetic
aaugaaaaguauaaggagcu

SEQ ID NO: 380464 - RNA, 21 nt, Artificial Sequence
  Synthetic
gaaugaaaaguauaaggagcu

SEQ ID NO: 380465 - RNA, 22 nt, Artificial Sequence
  Synthetic
ugaaugaaaaguauaaggagcu

SEQ ID NO: 380466 - RNA, 23 nt, Artificial Sequence
  Synthetic
augaaugaaaaguauaaggagcu

SEQ ID NO: 380467 - RNA, 24 nt, Artificial Sequence
  Synthetic
uaugaaugaaaaguauaaggagcu

SEQ ID NO: 380468 - RNA, 18 nt, Artificial Sequence
  Synthetic
aagcuagcuaggggagcu

SEQ ID NO: 380469 - RNA, 19 nt, Artificial Sequence
  Synthetic
aaagcuagcuaggggagcu

SEQ ID NO: 380470 - RNA, 20 nt, Artificial Sequence
  Synthetic
caaagcuagcuaggggagcu

SEQ ID NO: 380471 - RNA, 21 nt, Artificial Sequence
  Synthetic
acaaagcuagcuaggggagcu

SEQ ID NO: 380472 - RNA, 22 nt, Artificial Sequence
  Synthetic
gacaaagcuagcuaggggagcu

SEQ ID NO: 380473 - RNA, 23 nt, Artificial Sequence
  Synthetic
agacaaagcuagcuaggggagcu

SEQ ID NO: 380474 - RNA, 24 nt, Artificial Sequence
  Synthetic
gagacaaagcuagcuaggggagcu

SEQ ID NO: 380475 - RNA, 18 nt, Artificial Sequence
  Synthetic
acaaggccacugggagcu

SEQ ID NO: 380476 - RNA, 19 nt, Artificial Sequence
  Synthetic
cacaaggccacugggagcu

SEQ ID NO: 380477 - RNA, 20 nt, Artificial Sequence
  Synthetic
ucacaaggccacugggagcu

SEQ ID NO: 380478 - RNA, 21 nt, Artificial Sequence
  Synthetic
cucacaaggccacugggagcu

SEQ ID NO: 380479 - RNA, 22 nt, Artificial Sequence
  Synthetic
acucacaaggccacugggagcu

SEQ ID NO: 380480 - RNA, 23 nt, Artificial Sequence
  Synthetic
aacucacaaggccacugggagcu

SEQ ID NO: 380481 - RNA, 24 nt, Artificial Sequence
  Synthetic
uaacucacaaggccacugggagcu

SEQ ID NO: 380482 - RNA, 18 nt, Artificial Sequence
  Synthetic
aaaaaugcucauggagcu

SEQ ID NO: 380483 - RNA, 19 nt, Artificial Sequence
  Synthetic
caaaaaugcucauggagcu

SEQ ID NO: 380484 - RNA, 20 nt, Artificial Sequence
  Synthetic
ccaaaaaugcucauggagcu

SEQ ID NO: 380485 - RNA, 21 nt, Artificial Sequence
  Synthetic
accaaaaaugcucauggagcu

SEQ ID NO: 380486 - RNA, 22 nt, Artificial Sequence
  Synthetic
aaccaaaaaugcucauggagcu

SEQ ID NO: 380487 - RNA, 23 nt, Artificial Sequence
  Synthetic
uaaccaaaaaugcucauggagcu

SEQ ID NO: 380488 - RNA, 24 nt, Artificial Sequence
  Synthetic
auaaccaaaaaugcucauggagcu

SEQ ID NO: 380489 - RNA, 18 nt, Artificial Sequence
  Synthetic
uccagcuaaacuggagcu

SEQ ID NO: 380490 - RNA, 19 nt, Artificial Sequence
  Synthetic
auccagcuaaacuggagcu

SEQ ID NO: 380491 - RNA, 20 nt, Artificial Sequence
  Synthetic
aauccagcuaaacuggagcu

SEQ ID NO: 380492 - RNA, 21 nt, Artificial Sequence
  Synthetic
caauccagcuaaacuggagcu

SEQ ID NO: 380493 - RNA, 22 nt, Artificial Sequence
  Synthetic
ccaauccagcuaaacuggagcu

SEQ ID NO: 380494 - RNA, 23 nt, Artificial Sequence
  Synthetic
uccaauccagcuaaacuggagcu

SEQ ID NO: 380495 - RNA, 24 nt, Artificial Sequence
  Synthetic
uuccaauccagcuaaacuggagcu

SEQ ID NO: 380496 - RNA, 18 nt, Artificial Sequence
  Synthetic
ggggaagacacuggagcu

SEQ ID NO: 380497 - RNA, 19 nt, Artificial Sequence
  Synthetic
uggggaagacacuggagcu

SEQ ID NO: 380498 - RNA, 20 nt, Artificial Sequence
  Synthetic
auggggaagacacuggagcu

SEQ ID NO: 380499 - RNA, 21 nt, Artificial Sequence
  Synthetic
gauggggaagacacuggagcu

SEQ ID NO: 380500 - RNA, 22 nt, Artificial Sequence
  Synthetic
ggauggggaagacacuggagcu

SEQ ID NO: 380501 - RNA, 23 nt, Artificial Sequence
  Synthetic
uggauggggaagacacuggagcu

SEQ ID NO: 380502 - RNA, 24 nt, Artificial Sequence
  Synthetic
auggauggggaagacacuggagcu

SEQ ID NO: 380503 - RNA, 18 nt, Artificial Sequence
  Synthetic
gcacugccuaguggagcu

SEQ ID NO: 380504 - RNA, 19 nt, Artificial Sequence
  Synthetic
ggcacugccuaguggagcu

SEQ ID NO: 380505 - RNA, 20 nt, Artificial Sequence
  Synthetic
gggcacugccuaguggagcu

SEQ ID NO: 380506 - RNA, 21 nt, Artificial Sequence
  Synthetic
ggggcacugccuaguggagcu

SEQ ID NO: 380507 - RNA, 22 nt, Artificial Sequence
  Synthetic
uggggcacugccuaguggagcu

SEQ ID NO: 380508 - RNA, 23 nt, Artificial Sequence
  Synthetic
cuggggcacugccuaguggagcu

SEQ ID NO: 380509 - RNA, 24 nt, Artificial Sequence
  Synthetic
acuggggcacugccuaguggagcu

SEQ ID NO: 380510 - RNA, 18 nt, Artificial Sequence
  Synthetic
aaacaacuauuuggagcu

SEQ ID NO: 380511 - RNA, 19 nt, Artificial Sequence
  Synthetic
caaacaacuauuuggagcu

SEQ ID NO: 380512 - RNA, 20 nt, Artificial Sequence
  Synthetic
ccaaacaacuauuuggagcu

SEQ ID NO: 380513 - RNA, 21 nt, Artificial Sequence
  Synthetic
accaaacaacuauuuggagcu

SEQ ID NO: 380514 - RNA, 22 nt, Artificial Sequence
  Synthetic
uaccaaacaacuauuuggagcu

SEQ ID NO: 380515 - RNA, 23 nt, Artificial Sequence
  Synthetic
cuaccaaacaacuauuuggagcu

SEQ ID NO: 380516 - RNA, 24 nt, Artificial Sequence
  Synthetic
ucuaccaaacaacuauuuggagcu

SEQ ID NO: 380517 - RNA, 18 nt, Artificial Sequence
  Synthetic
gagccacaagaaugagcu

SEQ ID NO: 380518 - RNA, 19 nt, Artificial Sequence
  Synthetic
agagccacaagaaugagcu

SEQ ID NO: 380519 - RNA, 20 nt, Artificial Sequence
  Synthetic
aagagccacaagaaugagcu

SEQ ID NO: 380520 - RNA, 21 nt, Artificial Sequence
  Synthetic
aaagagccacaagaaugagcu

SEQ ID NO: 380521 - RNA, 22 nt, Artificial Sequence
  Synthetic
caaagagccacaagaaugagcu

SEQ ID NO: 380522 - RNA, 23 nt, Artificial Sequence
  Synthetic
gcaaagagccacaagaaugagcu

SEQ ID NO: 380523 - RNA, 24 nt, Artificial Sequence
  Synthetic
ugcaaagagccacaagaaugagcu

SEQ ID NO: 380524 - RNA, 18 nt, Artificial Sequence
  Synthetic
ccccuuguagaaugagcu

SEQ ID NO: 380525 - RNA, 19 nt, Artificial Sequence
  Synthetic
gccccuuguagaaugagcu

SEQ ID NO: 380526 - RNA, 20 nt, Artificial Sequence
  Synthetic
ugccccuuguagaaugagcu

SEQ ID NO: 380527 - RNA, 21 nt, Artificial Sequence
  Synthetic
augccccuuguagaaugagcu

SEQ ID NO: 380528 - RNA, 22 nt, Artificial Sequence
  Synthetic
gaugccccuuguagaaugagcu

SEQ ID NO: 380529 - RNA, 23 nt, Artificial Sequence
  Synthetic
ugaugccccuuguagaaugagcu

SEQ ID NO: 380530 - RNA, 24 nt, Artificial Sequence
  Synthetic
cugaugccccuuguagaaugagcu

SEQ ID NO: 380531 - RNA, 18 nt, Artificial Sequence
  Synthetic
aaaccuucauaaugagcu

SEQ ID NO: 380532 - RNA, 19 nt, Artificial Sequence
  Synthetic
caaaccuucauaaugagcu

SEQ ID NO: 380533 - RNA, 20 nt, Artificial Sequence
  Synthetic
ccaaaccuucauaaugagcu

SEQ ID NO: 380534 - RNA, 21 nt, Artificial Sequence
  Synthetic
uccaaaccuucauaaugagcu

SEQ ID NO: 380535 - RNA, 22 nt, Artificial Sequence
  Synthetic
auccaaaccuucauaaugagcu

SEQ ID NO: 380536 - RNA, 23 nt, Artificial Sequence
  Synthetic
cauccaaaccuucauaaugagcu

SEQ ID NO: 380537 - RNA, 24 nt, Artificial Sequence
  Synthetic
ucauccaaaccuucauaaugagcu

SEQ ID NO: 380538 - RNA, 18 nt, Artificial Sequence
  Synthetic
ggguggguugcaugagcu

SEQ ID NO: 380539 - RNA, 19 nt, Artificial Sequence
  Synthetic
uggguggguugcaugagcu

SEQ ID NO: 380540 - RNA, 20 nt, Artificial Sequence
  Synthetic
guggguggguugcaugagcu

SEQ ID NO: 380541 - RNA, 21 nt, Artificial Sequence
  Synthetic
gguggguggguugcaugagcu

SEQ ID NO: 380542 - RNA, 22 nt, Artificial Sequence
  Synthetic
agguggguggguugcaugagcu

SEQ ID NO: 380543 - RNA, 23 nt, Artificial Sequence
  Synthetic
gagguggguggguugcaugagcu

SEQ ID NO: 380544 - RNA, 24 nt, Artificial Sequence
  Synthetic
cgagguggguggguugcaugagcu

SEQ ID NO: 380545 - RNA, 18 nt, Artificial Sequence
  Synthetic
uauuucuuuauaugagcu

SEQ ID NO: 380546 - RNA, 19 nt, Artificial Sequence
  Synthetic
auauuucuuuauaugagcu

SEQ ID NO: 380547 - RNA, 20 nt, Artificial Sequence
  Synthetic
uauauuucuuuauaugagcu

SEQ ID NO: 380548 - RNA, 21 nt, Artificial Sequence
  Synthetic
cuauauuucuuuauaugagcu

SEQ ID NO: 380549 - RNA, 22 nt, Artificial Sequence
  Synthetic
ucuauauuucuuuauaugagcu

SEQ ID NO: 380550 - RNA, 23 nt, Artificial Sequence
  Synthetic
aucuauauuucuuuauaugagcu

SEQ ID NO: 380551 - RNA, 24 nt, Artificial Sequence
  Synthetic
uaucuauauuucuuuauaugagcu

SEQ ID NO: 380552 - RNA, 18 nt, Artificial Sequence
  Synthetic
agguggauugccugagcu

SEQ ID NO: 380553 - RNA, 19 nt, Artificial Sequence
  Synthetic
cagguggauugccugagcu

SEQ ID NO: 380554 - RNA, 20 nt, Artificial Sequence
  Synthetic
gcagguggauugccugagcu

SEQ ID NO: 380555 - RNA, 21 nt, Artificial Sequence
  Synthetic
agcagguggauugccugagcu

SEQ ID NO: 380556 - RNA, 22 nt, Artificial Sequence
  Synthetic
aagcagguggauugccugagcu

SEQ ID NO: 380557 - RNA, 23 nt, Artificial Sequence
  Synthetic
aaagcagguggauugccugagcu

SEQ ID NO: 380558 - RNA, 24 nt, Artificial Sequence
  Synthetic
caaagcagguggauugccugagcu

SEQ ID NO: 380559 - RNA, 18 nt, Artificial Sequence
  Synthetic
aaugaacaaagcugagcu

SEQ ID NO: 380560 - RNA, 19 nt, Artificial Sequence
  Synthetic
gaaugaacaaagcugagcu

SEQ ID NO: 380561 - RNA, 20 nt, Artificial Sequence
  Synthetic
ugaaugaacaaagcugagcu

SEQ ID NO: 380562 - RNA, 21 nt, Artificial Sequence
  Synthetic
uugaaugaacaaagcugagcu

SEQ ID NO: 380563 - RNA, 22 nt, Artificial Sequence
  Synthetic
guugaaugaacaaagcugagcu

SEQ ID NO: 380564 - RNA, 23 nt, Artificial Sequence
  Synthetic
aguugaaugaacaaagcugagcu

SEQ ID NO: 380565 - RNA, 24 nt, Artificial Sequence
  Synthetic
aaguugaaugaacaaagcugagcu

SEQ ID NO: 380566 - RNA, 18 nt, Artificial Sequence
  Synthetic
aggaggaucacuugagcu

SEQ ID NO: 380567 - RNA, 19 nt, Artificial Sequence
  Synthetic
caggaggaucacuugagcu

SEQ ID NO: 380568 - RNA, 20 nt, Artificial Sequence
  Synthetic
gcaggaggaucacuugagcu

SEQ ID NO: 380569 - RNA, 21 nt, Artificial Sequence
  Synthetic
agcaggaggaucacuugagcu

SEQ ID NO: 380570 - RNA, 22 nt, Artificial Sequence
  Synthetic
aagcaggaggaucacuugagcu

SEQ ID NO: 380571 - RNA, 23 nt, Artificial Sequence
  Synthetic
aaagcaggaggaucacuugagcu

SEQ ID NO: 380572 - RNA, 24 nt, Artificial Sequence
  Synthetic
uaaagcaggaggaucacuugagcu

SEQ ID NO: 380573 - RNA, 18 nt, Artificial Sequence
  Synthetic
acaagaaccgcuugagcu

SEQ ID NO: 380574 - RNA, 19 nt, Artificial Sequence
  Synthetic
cacaagaaccgcuugagcu

SEQ ID NO: 380575 - RNA, 20 nt, Artificial Sequence
  Synthetic
gcacaagaaccgcuugagcu

SEQ ID NO: 380576 - RNA, 21 nt, Artificial Sequence
  Synthetic
ggcacaagaaccgcuugagcu

SEQ ID NO: 380577 - RNA, 22 nt, Artificial Sequence
  Synthetic
aggcacaagaaccgcuugagcu

SEQ ID NO: 380578 - RNA, 23 nt, Artificial Sequence
  Synthetic
gaggcacaagaaccgcuugagcu

SEQ ID NO: 380579 - RNA, 24 nt, Artificial Sequence
  Synthetic
ugaggcacaagaaccgcuugagcu

SEQ ID NO: 380580 - RNA, 18 nt, Artificial Sequence
  Synthetic
gggaggauugcuugagcu

SEQ ID NO: 380581 - RNA, 19 nt, Artificial Sequence
  Synthetic
ugggaggauugcuugagcu

SEQ ID NO: 380582 - RNA, 20 nt, Artificial Sequence
  Synthetic
gugggaggauugcuugagcu

SEQ ID NO: 380583 - RNA, 21 nt, Artificial Sequence
  Synthetic
ggugggaggauugcuugagcu

SEQ ID NO: 380584 - RNA, 22 nt, Artificial Sequence
  Synthetic
aggugggaggauugcuugagcu

SEQ ID NO: 380585 - RNA, 23 nt, Artificial Sequence
  Synthetic
gaggugggaggauugcuugagcu

SEQ ID NO: 380586 - RNA, 24 nt, Artificial Sequence
  Synthetic
ugaggugggaggauugcuugagcu

SEQ ID NO: 380587 - RNA, 18 nt, Artificial Sequence
  Synthetic
caagcacagguuugagcu

SEQ ID NO: 380588 - RNA, 19 nt, Artificial Sequence
  Synthetic
ccaagcacagguuugagcu

SEQ ID NO: 380589 - RNA, 20 nt, Artificial Sequence
  Synthetic
gccaagcacagguuugagcu

SEQ ID NO: 380590 - RNA, 21 nt, Artificial Sequence
  Synthetic
ugccaagcacagguuugagcu

SEQ ID NO: 380591 - RNA, 22 nt, Artificial Sequence
  Synthetic
gugccaagcacagguuugagcu

SEQ ID NO: 380592 - RNA, 23 nt, Artificial Sequence
  Synthetic
ugugccaagcacagguuugagcu

SEQ ID NO: 380593 - RNA, 24 nt, Artificial Sequence
  Synthetic
augugccaagcacagguuugagcu

SEQ ID NO: 380594 - RNA, 18 nt, Artificial Sequence
  Synthetic
uuucacuacuuuugagcu

SEQ ID NO: 380595 - RNA, 19 nt, Artificial Sequence
  Synthetic
uuuucacuacuuuugagcu

SEQ ID NO: 380596 - RNA, 20 nt, Artificial Sequence
  Synthetic
auuuucacuacuuuugagcu

SEQ ID NO: 380597 - RNA, 21 nt, Artificial Sequence
  Synthetic
cauuuucacuacuuuugagcu

SEQ ID NO: 380598 - RNA, 22 nt, Artificial Sequence
  Synthetic
acauuuucacuacuuuugagcu

SEQ ID NO: 380599 - RNA, 23 nt, Artificial Sequence
  Synthetic
aacauuuucacuacuuuugagcu

SEQ ID NO: 380600 - RNA, 24 nt, Artificial Sequence
  Synthetic
caacauuuucacuacuuuugagcu

SEQ ID NO: 380601 - RNA, 18 nt, Artificial Sequence
  Synthetic
cuugcaaccauaauagcu

SEQ ID NO: 380602 - RNA, 19 nt, Artificial Sequence
  Synthetic
ccuugcaaccauaauagcu

SEQ ID NO: 380603 - RNA, 20 nt, Artificial Sequence
  Synthetic
gccuugcaaccauaauagcu

SEQ ID NO: 380604 - RNA, 21 nt, Artificial Sequence
  Synthetic
agccuugcaaccauaauagcu

SEQ ID NO: 380605 - RNA, 22 nt, Artificial Sequence
  Synthetic
uagccuugcaaccauaauagcu

SEQ ID NO: 380606 - RNA, 23 nt, Artificial Sequence
  Synthetic
guagccuugcaaccauaauagcu

SEQ ID NO: 380607 - RNA, 24 nt, Artificial Sequence
  Synthetic
aguagccuugcaaccauaauagcu

SEQ ID NO: 380608 - RNA, 18 nt, Artificial Sequence
  Synthetic
ccgugugguauaauagcu

SEQ ID NO: 380609 - RNA, 19 nt, Artificial Sequence
  Synthetic
uccgugugguauaauagcu

SEQ ID NO: 380610 - RNA, 20 nt, Artificial Sequence
  Synthetic
uuccgugugguauaauagcu

SEQ ID NO: 380611 - RNA, 21 nt, Artificial Sequence
  Synthetic
guuccgugugguauaauagcu

SEQ ID NO: 380612 - RNA, 22 nt, Artificial Sequence
  Synthetic
aguuccgugugguauaauagcu

SEQ ID NO: 380613 - RNA, 23 nt, Artificial Sequence
  Synthetic
aaguuccgugugguauaauagcu

SEQ ID NO: 380614 - RNA, 24 nt, Artificial Sequence
  Synthetic
uaaguuccgugugguauaauagcu

SEQ ID NO: 380615 - RNA, 18 nt, Artificial Sequence
  Synthetic
aggcguaauuacauagcu

SEQ ID NO: 380616 - RNA, 19 nt, Artificial Sequence
  Synthetic
caggcguaauuacauagcu

SEQ ID NO: 380617 - RNA, 20 nt, Artificial Sequence
  Synthetic
acaggcguaauuacauagcu

SEQ ID NO: 380618 - RNA, 21 nt, Artificial Sequence
  Synthetic
aacaggcguaauuacauagcu

SEQ ID NO: 380619 - RNA, 22 nt, Artificial Sequence
  Synthetic
aaacaggcguaauuacauagcu

SEQ ID NO: 380620 - RNA, 23 nt, Artificial Sequence
  Synthetic
gaaacaggcguaauuacauagcu

SEQ ID NO: 380621 - RNA, 24 nt, Artificial Sequence
  Synthetic
ugaaacaggcguaauuacauagcu

SEQ ID NO: 380622 - RNA, 18 nt, Artificial Sequence
  Synthetic
uaugaauuuaagauagcu

SEQ ID NO: 380623 - RNA, 19 nt, Artificial Sequence
  Synthetic
auaugaauuuaagauagcu

SEQ ID NO: 380624 - RNA, 20 nt, Artificial Sequence
  Synthetic
aauaugaauuuaagauagcu

SEQ ID NO: 380625 - RNA, 21 nt, Artificial Sequence
  Synthetic
caauaugaauuuaagauagcu

SEQ ID NO: 380626 - RNA, 22 nt, Artificial Sequence
  Synthetic
ccaauaugaauuuaagauagcu

SEQ ID NO: 380627 - RNA, 23 nt, Artificial Sequence
  Synthetic
accaauaugaauuuaagauagcu

SEQ ID NO: 380628 - RNA, 24 nt, Artificial Sequence
  Synthetic
caccaauaugaauuuaagauagcu

SEQ ID NO: 380629 - RNA, 18 nt, Artificial Sequence
  Synthetic
cagaguagucagauagcu

SEQ ID NO: 380630 - RNA, 19 nt, Artificial Sequence
  Synthetic
ucagaguagucagauagcu

SEQ ID NO: 380631 - RNA, 20 nt, Artificial Sequence
  Synthetic
cucagaguagucagauagcu

SEQ ID NO: 380632 - RNA, 21 nt, Artificial Sequence
  Synthetic
ccucagaguagucagauagcu

SEQ ID NO: 380633 - RNA, 22 nt, Artificial Sequence
  Synthetic
gccucagaguagucagauagcu

SEQ ID NO: 380634 - RNA, 23 nt, Artificial Sequence
  Synthetic
agccucagaguagucagauagcu

SEQ ID NO: 380635 - RNA, 24 nt, Artificial Sequence
  Synthetic
gagccucagaguagucagauagcu

SEQ ID NO: 380636 - RNA, 18 nt, Artificial Sequence
  Synthetic
uugccucguaguauagcu

SEQ ID NO: 380637 - RNA, 19 nt, Artificial Sequence
  Synthetic
uuugccucguaguauagcu

SEQ ID NO: 380638 - RNA, 20 nt, Artificial Sequence
  Synthetic
cuuugccucguaguauagcu

SEQ ID NO: 380639 - RNA, 21 nt, Artificial Sequence
  Synthetic
ccuuugccucguaguauagcu

SEQ ID NO: 380640 - RNA, 22 nt, Artificial Sequence
  Synthetic
cccuuugccucguaguauagcu

SEQ ID NO: 380641 - RNA, 23 nt, Artificial Sequence
  Synthetic
ucccuuugccucguaguauagcu

SEQ ID NO: 380642 - RNA, 24 nt, Artificial Sequence
  Synthetic
cucccuuugccucguaguauagcu

SEQ ID NO: 380643 - RNA, 18 nt, Artificial Sequence
  Synthetic
cccgaggauguuauagcu

SEQ ID NO: 380644 - RNA, 19 nt, Artificial Sequence
  Synthetic
ccccgaggauguuauagcu

SEQ ID NO: 380645 - RNA, 20 nt, Artificial Sequence
  Synthetic
accccgaggauguuauagcu

SEQ ID NO: 380646 - RNA, 21 nt, Artificial Sequence
  Synthetic
caccccgaggauguuauagcu

SEQ ID NO: 380647 - RNA, 22 nt, Artificial Sequence
  Synthetic
ccaccccgaggauguuauagcu

SEQ ID NO: 380648 - RNA, 23 nt, Artificial Sequence
  Synthetic
cccaccccgaggauguuauagcu

SEQ ID NO: 380649 - RNA, 24 nt, Artificial Sequence
  Synthetic
ccccaccccgaggauguuauagcu

SEQ ID NO: 380650 - RNA, 18 nt, Artificial Sequence
  Synthetic
caccaaaacuuuauagcu

SEQ ID NO: 380651 - RNA, 19 nt, Artificial Sequence
  Synthetic
ccaccaaaacuuuauagcu

SEQ ID NO: 380652 - RNA, 20 nt, Artificial Sequence
  Synthetic
cccaccaaaacuuuauagcu

SEQ ID NO: 380653 - RNA, 21 nt, Artificial Sequence
  Synthetic
acccaccaaaacuuuauagcu

SEQ ID NO: 380654 - RNA, 22 nt, Artificial Sequence
  Synthetic
aacccaccaaaacuuuauagcu

SEQ ID NO: 380655 - RNA, 23 nt, Artificial Sequence
  Synthetic
gaacccaccaaaacuuuauagcu

SEQ ID NO: 380656 - RNA, 24 nt, Artificial Sequence
  Synthetic
agaacccaccaaaacuuuauagcu

SEQ ID NO: 380657 - RNA, 18 nt, Artificial Sequence
  Synthetic
agaaauauuagacuagcu

SEQ ID NO: 380658 - RNA, 19 nt, Artificial Sequence
  Synthetic
aagaaauauuagacuagcu

SEQ ID NO: 380659 - RNA, 20 nt, Artificial Sequence
  Synthetic
gaagaaauauuagacuagcu

SEQ ID NO: 380660 - RNA, 21 nt, Artificial Sequence
  Synthetic
agaagaaauauuagacuagcu

SEQ ID NO: 380661 - RNA, 22 nt, Artificial Sequence
  Synthetic
gagaagaaauauuagacuagcu

SEQ ID NO: 380662 - RNA, 23 nt, Artificial Sequence
  Synthetic
ugagaagaaauauuagacuagcu

SEQ ID NO: 380663 - RNA, 24 nt, Artificial Sequence
  Synthetic
gugagaagaaauauuagacuagcu

SEQ ID NO: 380664 - RNA, 18 nt, Artificial Sequence
  Synthetic
aauauuugucgacuagcu

SEQ ID NO: 380665 - RNA, 19 nt, Artificial Sequence
  Synthetic
aaauauuugucgacuagcu

SEQ ID NO: 380666 - RNA, 20 nt, Artificial Sequence
  Synthetic
caaauauuugucgacuagcu

SEQ ID NO: 380667 - RNA, 21 nt, Artificial Sequence
  Synthetic
gcaaauauuugucgacuagcu

SEQ ID NO: 380668 - RNA, 22 nt, Artificial Sequence
  Synthetic
ggcaaauauuugucgacuagcu

SEQ ID NO: 380669 - RNA, 23 nt, Artificial Sequence
  Synthetic
uggcaaauauuugucgacuagcu

SEQ ID NO: 380670 - RNA, 24 nt, Artificial Sequence
  Synthetic
cuggcaaauauuugucgacuagcu

SEQ ID NO: 380671 - RNA, 18 nt, Artificial Sequence
  Synthetic
guauguucacuacuagcu

SEQ ID NO: 380672 - RNA, 19 nt, Artificial Sequence
  Synthetic
aguauguucacuacuagcu

SEQ ID NO: 380673 - RNA, 20 nt, Artificial Sequence
  Synthetic
caguauguucacuacuagcu

SEQ ID NO: 380674 - RNA, 21 nt, Artificial Sequence
  Synthetic
ucaguauguucacuacuagcu

SEQ ID NO: 380675 - RNA, 22 nt, Artificial Sequence
  Synthetic
aucaguauguucacuacuagcu

SEQ ID NO: 380676 - RNA, 23 nt, Artificial Sequence
  Synthetic
gaucaguauguucacuacuagcu

SEQ ID NO: 380677 - RNA, 24 nt, Artificial Sequence
  Synthetic
ugaucaguauguucacuacuagcu

SEQ ID NO: 380678 - RNA, 18 nt, Artificial Sequence
  Synthetic
guuucugauuuacuagcu

SEQ ID NO: 380679 - RNA, 19 nt, Artificial Sequence
  Synthetic
aguuucugauuuacuagcu

SEQ ID NO: 380680 - RNA, 20 nt, Artificial Sequence
  Synthetic
gaguuucugauuuacuagcu

SEQ ID NO: 380681 - RNA, 21 nt, Artificial Sequence
  Synthetic
agaguuucugauuuacuagcu

SEQ ID NO: 380682 - RNA, 22 nt, Artificial Sequence
  Synthetic
cagaguuucugauuuacuagcu

SEQ ID NO: 380683 - RNA, 23 nt, Artificial Sequence
  Synthetic
ccagaguuucugauuuacuagcu

SEQ ID NO: 380684 - RNA, 24 nt, Artificial Sequence
  Synthetic
cccagaguuucugauuuacuagcu

SEQ ID NO: 380685 - RNA, 18 nt, Artificial Sequence
  Synthetic
ccagagacaaagcuagcu

SEQ ID NO: 380686 - RNA, 19 nt, Artificial Sequence
  Synthetic
uccagagacaaagcuagcu

SEQ ID NO: 380687 - RNA, 20 nt, Artificial Sequence
  Synthetic
uuccagagacaaagcuagcu

SEQ ID NO: 380688 - RNA, 21 nt, Artificial Sequence
  Synthetic
guuccagagacaaagcuagcu

SEQ ID NO: 380689 - RNA, 22 nt, Artificial Sequence
  Synthetic
uguuccagagacaaagcuagcu

SEQ ID NO: 380690 - RNA, 23 nt, Artificial Sequence
  Synthetic
uuguuccagagacaaagcuagcu

SEQ ID NO: 380691 - RNA, 24 nt, Artificial Sequence
  Synthetic
cuuguuccagagacaaagcuagcu

SEQ ID NO: 380692 - RNA, 18 nt, Artificial Sequence
  Synthetic
ugaaagcagacucuagcu

SEQ ID NO: 380693 - RNA, 19 nt, Artificial Sequence
  Synthetic
uugaaagcagacucuagcu

SEQ ID NO: 380694 - RNA, 20 nt, Artificial Sequence
  Synthetic
guugaaagcagacucuagcu

SEQ ID NO: 380695 - RNA, 21 nt, Artificial Sequence
  Synthetic
uguugaaagcagacucuagcu

SEQ ID NO: 380696 - RNA, 22 nt, Artificial Sequence
  Synthetic
cuguugaaagcagacucuagcu

SEQ ID NO: 380697 - RNA, 23 nt, Artificial Sequence
  Synthetic
gcuguugaaagcagacucuagcu

SEQ ID NO: 380698 - RNA, 24 nt, Artificial Sequence
  Synthetic
agcuguugaaagcagacucuagcu

SEQ ID NO: 380699 - RNA, 18 nt, Artificial Sequence
  Synthetic
auugacuucucucuagcu

SEQ ID NO: 380700 - RNA, 19 nt, Artificial Sequence
  Synthetic
cauugacuucucucuagcu

SEQ ID NO: 380701 - RNA, 20 nt, Artificial Sequence
  Synthetic
gcauugacuucucucuagcu

SEQ ID NO: 380702 - RNA, 21 nt, Artificial Sequence
  Synthetic
ggcauugacuucucucuagcu

SEQ ID NO: 380703 - RNA, 22 nt, Artificial Sequence
  Synthetic
aggcauugacuucucucuagcu

SEQ ID NO: 380704 - RNA, 23 nt, Artificial Sequence
  Synthetic
caggcauugacuucucucuagcu

SEQ ID NO: 380705 - RNA, 24 nt, Artificial Sequence
  Synthetic
ccaggcauugacuucucucuagcu

SEQ ID NO: 380706 - RNA, 18 nt, Artificial Sequence
  Synthetic
aguaucuucauucuagcu

SEQ ID NO: 380707 - RNA, 19 nt, Artificial Sequence
  Synthetic
uaguaucuucauucuagcu

SEQ ID NO: 380708 - RNA, 20 nt, Artificial Sequence
  Synthetic
cuaguaucuucauucuagcu

SEQ ID NO: 380709 - RNA, 21 nt, Artificial Sequence
  Synthetic
gcuaguaucuucauucuagcu

SEQ ID NO: 380710 - RNA, 22 nt, Artificial Sequence
  Synthetic
agcuaguaucuucauucuagcu

SEQ ID NO: 380711 - RNA, 23 nt, Artificial Sequence
  Synthetic
uagcuaguaucuucauucuagcu

SEQ ID NO: 380712 - RNA, 24 nt, Artificial Sequence
  Synthetic
guagcuaguaucuucauucuagcu

SEQ ID NO: 380713 - RNA, 18 nt, Artificial Sequence
  Synthetic
gucucaagauuucuagcu

SEQ ID NO: 380714 - RNA, 19 nt, Artificial Sequence
  Synthetic
ggucucaagauuucuagcu

SEQ ID NO: 380715 - RNA, 20 nt, Artificial Sequence
  Synthetic
uggucucaagauuucuagcu

SEQ ID NO: 380716 - RNA, 21 nt, Artificial Sequence
  Synthetic
auggucucaagauuucuagcu

SEQ ID NO: 380717 - RNA, 22 nt, Artificial Sequence
  Synthetic
gauggucucaagauuucuagcu

SEQ ID NO: 380718 - RNA, 23 nt, Artificial Sequence
  Synthetic
cgauggucucaagauuucuagcu

SEQ ID NO: 380719 - RNA, 24 nt, Artificial Sequence
  Synthetic
acgauggucucaagauuucuagcu

SEQ ID NO: 380720 - RNA, 18 nt, Artificial Sequence
  Synthetic
uuugugccccuaguagcu

SEQ ID NO: 380721 - RNA, 19 nt, Artificial Sequence
  Synthetic
uuuugugccccuaguagcu

SEQ ID NO: 380722 - RNA, 20 nt, Artificial Sequence
  Synthetic
uuuuugugccccuaguagcu

SEQ ID NO: 380723 - RNA, 21 nt, Artificial Sequence
  Synthetic
uuuuuugugccccuaguagcu

SEQ ID NO: 380724 - RNA, 22 nt, Artificial Sequence
  Synthetic
uuuuuuugugccccuaguagcu

SEQ ID NO: 380725 - RNA, 23 nt, Artificial Sequence
  Synthetic
uuuuuuuugugccccuaguagcu

SEQ ID NO: 380726 - RNA, 24 nt, Artificial Sequence
  Synthetic
uuuuuuuuugugccccuaguagcu

SEQ ID NO: 380727 - RNA, 18 nt, Artificial Sequence
  Synthetic
aguucugauaagguagcu

SEQ ID NO: 380728 - RNA, 19 nt, Artificial Sequence
  Synthetic
gaguucugauaagguagcu

SEQ ID NO: 380729 - RNA, 20 nt, Artificial Sequence
  Synthetic
ggaguucugauaagguagcu

SEQ ID NO: 380730 - RNA, 21 nt, Artificial Sequence
  Synthetic
aggaguucugauaagguagcu

SEQ ID NO: 380731 - RNA, 22 nt, Artificial Sequence
  Synthetic
uaggaguucugauaagguagcu

SEQ ID NO: 380732 - RNA, 23 nt, Artificial Sequence
  Synthetic
guaggaguucugauaagguagcu

SEQ ID NO: 380733 - RNA, 24 nt, Artificial Sequence
  Synthetic
cguaggaguucugauaagguagcu

SEQ ID NO: 380734 - RNA, 18 nt, Artificial Sequence
  Synthetic
ggaaucuggaggguagcu

SEQ ID NO: 380735 - RNA, 19 nt, Artificial Sequence
  Synthetic
gggaaucuggaggguagcu

SEQ ID NO: 380736 - RNA, 20 nt, Artificial Sequence
  Synthetic
ugggaaucuggaggguagcu

SEQ ID NO: 380737 - RNA, 21 nt, Artificial Sequence
  Synthetic
uugggaaucuggaggguagcu

SEQ ID NO: 380738 - RNA, 22 nt, Artificial Sequence
  Synthetic
cuugggaaucuggaggguagcu

SEQ ID NO: 380739 - RNA, 23 nt, Artificial Sequence
  Synthetic
ccuugggaaucuggaggguagcu

SEQ ID NO: 380740 - RNA, 24 nt, Artificial Sequence
  Synthetic
cccuugggaaucuggaggguagcu

SEQ ID NO: 380741 - RNA, 18 nt, Artificial Sequence
  Synthetic
aaauuuauuacuguagcu

SEQ ID NO: 380742 - RNA, 19 nt, Artificial Sequence
  Synthetic
aaaauuuauuacuguagcu

SEQ ID NO: 380743 - RNA, 20 nt, Artificial Sequence
  Synthetic
uaaaauuuauuacuguagcu

SEQ ID NO: 380744 - RNA, 21 nt, Artificial Sequence
  Synthetic
uuaaaauuuauuacuguagcu

SEQ ID NO: 380745 - RNA, 22 nt, Artificial Sequence
  Synthetic
uuuaaaauuuauuacuguagcu

SEQ ID NO: 380746 - RNA, 23 nt, Artificial Sequence
  Synthetic
uuuuaaaauuuauuacuguagcu

SEQ ID NO: 380747 - RNA, 24 nt, Artificial Sequence
  Synthetic
auuuuaaaauuuauuacuguagcu

SEQ ID NO: 380748 - RNA, 18 nt, Artificial Sequence
  Synthetic
uuccauguccucuuagcu

SEQ ID NO: 380749 - RNA, 19 nt, Artificial Sequence
  Synthetic
uuuccauguccucuuagcu

SEQ ID NO: 380750 - RNA, 20 nt, Artificial Sequence
  Synthetic
cuuuccauguccucuuagcu

SEQ ID NO: 380751 - RNA, 21 nt, Artificial Sequence
  Synthetic
ccuuuccauguccucuuagcu

SEQ ID NO: 380752 - RNA, 22 nt, Artificial Sequence
  Synthetic
uccuuuccauguccucuuagcu

SEQ ID NO: 380753 - RNA, 23 nt, Artificial Sequence
  Synthetic
auccuuuccauguccucuuagcu

SEQ ID NO: 380754 - RNA, 24 nt, Artificial Sequence
  Synthetic
uauccuuuccauguccucuuagcu

SEQ ID NO: 380755 - RNA, 18 nt, Artificial Sequence
  Synthetic
aaggaacagaaguuagcu

SEQ ID NO: 380756 - RNA, 19 nt, Artificial Sequence
  Synthetic
aaaggaacagaaguuagcu

SEQ ID NO: 380757 - RNA, 20 nt, Artificial Sequence
  Synthetic
aaaaggaacagaaguuagcu

SEQ ID NO: 380758 - RNA, 21 nt, Artificial Sequence
  Synthetic
gaaaaggaacagaaguuagcu

SEQ ID NO: 380759 - RNA, 22 nt, Artificial Sequence
  Synthetic
ggaaaaggaacagaaguuagcu

SEQ ID NO: 380760 - RNA, 23 nt, Artificial Sequence
  Synthetic
aggaaaaggaacagaaguuagcu

SEQ ID NO: 380761 - RNA, 24 nt, Artificial Sequence
  Synthetic
uaggaaaaggaacagaaguuagcu

SEQ ID NO: 380762 - RNA, 18 nt, Artificial Sequence
  Synthetic
uugugcaugauguuagcu

SEQ ID NO: 380763 - RNA, 19 nt, Artificial Sequence
  Synthetic
guugugcaugauguuagcu

SEQ ID NO: 380764 - RNA, 20 nt, Artificial Sequence
  Synthetic
uguugugcaugauguuagcu

SEQ ID NO: 380765 - RNA, 21 nt, Artificial Sequence
  Synthetic
cuguugugcaugauguuagcu

SEQ ID NO: 380766 - RNA, 22 nt, Artificial Sequence
  Synthetic
acuguugugcaugauguuagcu

SEQ ID NO: 380767 - RNA, 23 nt, Artificial Sequence
  Synthetic
uacuguugugcaugauguuagcu

SEQ ID NO: 380768 - RNA, 24 nt, Artificial Sequence
  Synthetic
uuacuguugugcaugauguuagcu

SEQ ID NO: 380769 - RNA, 18 nt, Artificial Sequence
  Synthetic
auuuuacaauauuuagcu

SEQ ID NO: 380770 - RNA, 19 nt, Artificial Sequence
  Synthetic
uauuuuacaauauuuagcu

SEQ ID NO: 380771 - RNA, 20 nt, Artificial Sequence
  Synthetic
guauuuuacaauauuuagcu

SEQ ID NO: 380772 - RNA, 21 nt, Artificial Sequence
  Synthetic
uguauuuuacaauauuuagcu

SEQ ID NO: 380773 - RNA, 22 nt, Artificial Sequence
  Synthetic
auguauuuuacaauauuuagcu

SEQ ID NO: 380774 - RNA, 23 nt, Artificial Sequence
  Synthetic
aauguauuuuacaauauuuagcu

SEQ ID NO: 380775 - RNA, 24 nt, Artificial Sequence
  Synthetic
aaauguauuuuacaauauuuagcu

SEQ ID NO: 380776 - RNA, 18 nt, Artificial Sequence
  Synthetic
acagauaacuauuuagcu

SEQ ID NO: 380777 - RNA, 19 nt, Artificial Sequence
  Synthetic
aacagauaacuauuuagcu

SEQ ID NO: 380778 - RNA, 20 nt, Artificial Sequence
  Synthetic
uaacagauaacuauuuagcu

SEQ ID NO: 380779 - RNA, 21 nt, Artificial Sequence
  Synthetic
uuaacagauaacuauuuagcu

SEQ ID NO: 380780 - RNA, 22 nt, Artificial Sequence
  Synthetic
uuuaacagauaacuauuuagcu

SEQ ID NO: 380781 - RNA, 23 nt, Artificial Sequence
  Synthetic
guuuaacagauaacuauuuagcu

SEQ ID NO: 380782 - RNA, 24 nt, Artificial Sequence
  Synthetic
gguuuaacagauaacuauuuagcu

SEQ ID NO: 380783 - RNA, 18 nt, Artificial Sequence
  Synthetic
uucuaauuaucuuuagcu

SEQ ID NO: 380784 - RNA, 19 nt, Artificial Sequence
  Synthetic
auucuaauuaucuuuagcu

SEQ ID NO: 380785 - RNA, 20 nt, Artificial Sequence
  Synthetic
cauucuaauuaucuuuagcu

SEQ ID NO: 380786 - RNA, 21 nt, Artificial Sequence
  Synthetic
acauucuaauuaucuuuagcu

SEQ ID NO: 380787 - RNA, 22 nt, Artificial Sequence
  Synthetic
aacauucuaauuaucuuuagcu

SEQ ID NO: 380788 - RNA, 23 nt, Artificial Sequence
  Synthetic
caacauucuaauuaucuuuagcu

SEQ ID NO: 380789 - RNA, 24 nt, Artificial Sequence
  Synthetic
gcaacauucuaauuaucuuuagcu

SEQ ID NO: 380790 - RNA, 18 nt, Artificial Sequence
  Synthetic
uuaauaacuucuuuagcu

SEQ ID NO: 380791 - RNA, 19 nt, Artificial Sequence
  Synthetic
auuaauaacuucuuuagcu

SEQ ID NO: 380792 - RNA, 20 nt, Artificial Sequence
  Synthetic
uauuaauaacuucuuuagcu

SEQ ID NO: 380793 - RNA, 21 nt, Artificial Sequence
  Synthetic
auauuaauaacuucuuuagcu

SEQ ID NO: 380794 - RNA, 22 nt, Artificial Sequence
  Synthetic
aauauuaauaacuucuuuagcu

SEQ ID NO: 380795 - RNA, 23 nt, Artificial Sequence
  Synthetic
uaauauuaauaacuucuuuagcu

SEQ ID NO: 380796 - RNA, 24 nt, Artificial Sequence
  Synthetic
uuaauauuaauaacuucuuuagcu

SEQ ID NO: 380797 - RNA, 18 nt, Artificial Sequence
  Synthetic
auuauggugguuuuagcu

SEQ ID NO: 380798 - RNA, 19 nt, Artificial Sequence
  Synthetic
aauuauggugguuuuagcu

SEQ ID NO: 380799 - RNA, 20 nt, Artificial Sequence
  Synthetic
caauuauggugguuuuagcu

SEQ ID NO: 380800 - RNA, 21 nt, Artificial Sequence
  Synthetic
ucaauuauggugguuuuagcu

SEQ ID NO: 380801 - RNA, 22 nt, Artificial Sequence
  Synthetic
cucaauuauggugguuuuagcu

SEQ ID NO: 380802 - RNA, 23 nt, Artificial Sequence
  Synthetic
ucucaauuauggugguuuuagcu

SEQ ID NO: 380803 - RNA, 24 nt, Artificial Sequence
  Synthetic
uucucaauuauggugguuuuagcu

SEQ ID NO: 380804 - RNA, 18 nt, Artificial Sequence
  Synthetic
auuuggauuuuuuuagcu

SEQ ID NO: 380805 - RNA, 19 nt, Artificial Sequence
  Synthetic
aauuuggauuuuuuuagcu

SEQ ID NO: 380806 - RNA, 20 nt, Artificial Sequence
  Synthetic
gaauuuggauuuuuuuagcu

SEQ ID NO: 380807 - RNA, 21 nt, Artificial Sequence
  Synthetic
agaauuuggauuuuuuuagcu

SEQ ID NO: 380808 - RNA, 22 nt, Artificial Sequence
  Synthetic
cagaauuuggauuuuuuuagcu

SEQ ID NO: 380809 - RNA, 23 nt, Artificial Sequence
  Synthetic
acagaauuuggauuuuuuuagcu

SEQ ID NO: 380810 - RNA, 24 nt, Artificial Sequence
  Synthetic
aacagaauuuggauuuuuuuagcu

SEQ ID NO: 380811 - RNA, 18 nt, Artificial Sequence
  Synthetic
uuaaaaaaaaaaaacgcu

SEQ ID NO: 380812 - RNA, 19 nt, Artificial Sequence
  Synthetic
auuaaaaaaaaaaaacgcu

SEQ ID NO: 380813 - RNA, 20 nt, Artificial Sequence
  Synthetic
aauuaaaaaaaaaaaacgcu

SEQ ID NO: 380814 - RNA, 21 nt, Artificial Sequence
  Synthetic
aaauuaaaaaaaaaaaacgcu

SEQ ID NO: 380815 - RNA, 22 nt, Artificial Sequence
  Synthetic
gaaauuaaaaaaaaaaaacgcu

SEQ ID NO: 380816 - RNA, 23 nt, Artificial Sequence
  Synthetic
ugaaauuaaaaaaaaaaaacgcu

SEQ ID NO: 380817 - RNA, 24 nt, Artificial Sequence
  Synthetic
uugaaauuaaaaaaaaaaaacgcu

SEQ ID NO: 380818 - RNA, 18 nt, Artificial Sequence
  Synthetic
gugauucugcugcacgcu

SEQ ID NO: 380819 - RNA, 19 nt, Artificial Sequence
  Synthetic
ggugauucugcugcacgcu

SEQ ID NO: 380820 - RNA, 20 nt, Artificial Sequence
  Synthetic
gggugauucugcugcacgcu

SEQ ID NO: 380821 - RNA, 21 nt, Artificial Sequence
  Synthetic
ggggugauucugcugcacgcu

SEQ ID NO: 380822 - RNA, 22 nt, Artificial Sequence
  Synthetic
aggggugauucugcugcacgcu

SEQ ID NO: 380823 - RNA, 23 nt, Artificial Sequence
  Synthetic
caggggugauucugcugcacgcu

SEQ ID NO: 380824 - RNA, 24 nt, Artificial Sequence
  Synthetic
ccaggggugauucugcugcacgcu

SEQ ID NO: 380825 - RNA, 18 nt, Artificial Sequence
  Synthetic
gagguguugggugacgcu

SEQ ID NO: 380826 - RNA, 19 nt, Artificial Sequence
  Synthetic
ugagguguugggugacgcu

SEQ ID NO: 380827 - RNA, 20 nt, Artificial Sequence
  Synthetic
augagguguugggugacgcu

SEQ ID NO: 380828 - RNA, 21 nt, Artificial Sequence
  Synthetic
uaugagguguugggugacgcu

SEQ ID NO: 380829 - RNA, 22 nt, Artificial Sequence
  Synthetic
auaugagguguugggugacgcu

SEQ ID NO: 380830 - RNA, 23 nt, Artificial Sequence
  Synthetic
uauaugagguguugggugacgcu

SEQ ID NO: 380831 - RNA, 24 nt, Artificial Sequence
  Synthetic
uuauaugagguguugggugacgcu

SEQ ID NO: 380832 - RNA, 18 nt, Artificial Sequence
  Synthetic
uuuucaaucaaauacgcu

SEQ ID NO: 380833 - RNA, 19 nt, Artificial Sequence
  Synthetic
auuuucaaucaaauacgcu

SEQ ID NO: 380834 - RNA, 20 nt, Artificial Sequence
  Synthetic
gauuuucaaucaaauacgcu

SEQ ID NO: 380835 - RNA, 21 nt, Artificial Sequence
  Synthetic
ugauuuucaaucaaauacgcu

SEQ ID NO: 380836 - RNA, 22 nt, Artificial Sequence
  Synthetic
augauuuucaaucaaauacgcu

SEQ ID NO: 380837 - RNA, 23 nt, Artificial Sequence
  Synthetic
caugauuuucaaucaaauacgcu

SEQ ID NO: 380838 - RNA, 24 nt, Artificial Sequence
  Synthetic
gcaugauuuucaaucaaauacgcu

SEQ ID NO: 380839 - RNA, 18 nt, Artificial Sequence
  Synthetic
caugcuuauugauacgcu

SEQ ID NO: 380840 - RNA, 19 nt, Artificial Sequence
  Synthetic
acaugcuuauugauacgcu

SEQ ID NO: 380841 - RNA, 20 nt, Artificial Sequence
  Synthetic
gacaugcuuauugauacgcu

SEQ ID NO: 380842 - RNA, 21 nt, Artificial Sequence
  Synthetic
ggacaugcuuauugauacgcu

SEQ ID NO: 380843 - RNA, 22 nt, Artificial Sequence
  Synthetic
aggacaugcuuauugauacgcu

SEQ ID NO: 380844 - RNA, 23 nt, Artificial Sequence
  Synthetic
gaggacaugcuuauugauacgcu

SEQ ID NO: 380845 - RNA, 24 nt, Artificial Sequence
  Synthetic
ugaggacaugcuuauugauacgcu

SEQ ID NO: 380846 - RNA, 18 nt, Artificial Sequence
  Synthetic
uuguucaaagauuacgcu

SEQ ID NO: 380847 - RNA, 19 nt, Artificial Sequence
  Synthetic
auuguucaaagauuacgcu

SEQ ID NO: 380848 - RNA, 20 nt, Artificial Sequence
  Synthetic
aauuguucaaagauuacgcu

SEQ ID NO: 380849 - RNA, 21 nt, Artificial Sequence
  Synthetic
aaauuguucaaagauuacgcu

SEQ ID NO: 380850 - RNA, 22 nt, Artificial Sequence
  Synthetic
caaauuguucaaagauuacgcu

SEQ ID NO: 380851 - RNA, 23 nt, Artificial Sequence
  Synthetic
ccaaauuguucaaagauuacgcu

SEQ ID NO: 380852 - RNA, 24 nt, Artificial Sequence
  Synthetic
cccaaauuguucaaagauuacgcu

SEQ ID NO: 380853 - RNA, 18 nt, Artificial Sequence
  Synthetic
cuagcauuugaaaccgcu

SEQ ID NO: 380854 - RNA, 19 nt, Artificial Sequence
  Synthetic
ccuagcauuugaaaccgcu

SEQ ID NO: 380855 - RNA, 20 nt, Artificial Sequence
  Synthetic
uccuagcauuugaaaccgcu

SEQ ID NO: 380856 - RNA, 21 nt, Artificial Sequence
  Synthetic
cuccuagcauuugaaaccgcu

SEQ ID NO: 380857 - RNA, 22 nt, Artificial Sequence
  Synthetic
acuccuagcauuugaaaccgcu

SEQ ID NO: 380858 - RNA, 23 nt, Artificial Sequence
  Synthetic
gacuccuagcauuugaaaccgcu

SEQ ID NO: 380859 - RNA, 24 nt, Artificial Sequence
  Synthetic
agacuccuagcauuugaaaccgcu

SEQ ID NO: 380860 - RNA, 18 nt, Artificial Sequence
  Synthetic
ucugcacugucauccgcu

SEQ ID NO: 380861 - RNA, 19 nt, Artificial Sequence
  Synthetic
gucugcacugucauccgcu

SEQ ID NO: 380862 - RNA, 20 nt, Artificial Sequence
  Synthetic
ugucugcacugucauccgcu

SEQ ID NO: 380863 - RNA, 21 nt, Artificial Sequence
  Synthetic
augucugcacugucauccgcu

SEQ ID NO: 380864 - RNA, 22 nt, Artificial Sequence
  Synthetic
caugucugcacugucauccgcu

SEQ ID NO: 380865 - RNA, 23 nt, Artificial Sequence
  Synthetic
ccaugucugcacugucauccgcu

SEQ ID NO: 380866 - RNA, 24 nt, Artificial Sequence
  Synthetic
uccaugucugcacugucauccgcu

SEQ ID NO: 380867 - RNA, 18 nt, Artificial Sequence
  Synthetic
gccugcacucccagcgcu

SEQ ID NO: 380868 - RNA, 19 nt, Artificial Sequence
  Synthetic
cgccugcacucccagcgcu

SEQ ID NO: 380869 - RNA, 20 nt, Artificial Sequence
  Synthetic
acgccugcacucccagcgcu

SEQ ID NO: 380870 - RNA, 21 nt, Artificial Sequence
  Synthetic
cacgccugcacucccagcgcu

SEQ ID NO: 380871 - RNA, 22 nt, Artificial Sequence
  Synthetic
ucacgccugcacucccagcgcu

SEQ ID NO: 380872 - RNA, 23 nt, Artificial Sequence
  Synthetic
uucacgccugcacucccagcgcu

SEQ ID NO: 380873 - RNA, 24 nt, Artificial Sequence
  Synthetic
uuucacgccugcacucccagcgcu

SEQ ID NO: 380874 - RNA, 18 nt, Artificial Sequence
  Synthetic
accuguaauuccagcgcu

SEQ ID NO: 380875 - RNA, 19 nt, Artificial Sequence
  Synthetic
caccuguaauuccagcgcu

SEQ ID NO: 380876 - RNA, 20 nt, Artificial Sequence
  Synthetic
acaccuguaauuccagcgcu

SEQ ID NO: 380877 - RNA, 21 nt, Artificial Sequence
  Synthetic
cacaccuguaauuccagcgcu

SEQ ID NO: 380878 - RNA, 22 nt, Artificial Sequence
  Synthetic
ucacaccuguaauuccagcgcu

SEQ ID NO: 380879 - RNA, 23 nt, Artificial Sequence
  Synthetic
cucacaccuguaauuccagcgcu

SEQ ID NO: 380880 - RNA, 24 nt, Artificial Sequence
  Synthetic
gcucacaccuguaauuccagcgcu

SEQ ID NO: 380881 - RNA, 18 nt, Artificial Sequence
  Synthetic
ugucuguuagagagcgcu

SEQ ID NO: 380882 - RNA, 19 nt, Artificial Sequence
  Synthetic
uugucuguuagagagcgcu

SEQ ID NO: 380883 - RNA, 20 nt, Artificial Sequence
  Synthetic
guugucuguuagagagcgcu

SEQ ID NO: 380884 - RNA, 21 nt, Artificial Sequence
  Synthetic
gguugucuguuagagagcgcu

SEQ ID NO: 380885 - RNA, 22 nt, Artificial Sequence
  Synthetic
agguugucuguuagagagcgcu

SEQ ID NO: 380886 - RNA, 23 nt, Artificial Sequence
  Synthetic
gagguugucuguuagagagcgcu

SEQ ID NO: 380887 - RNA, 24 nt, Artificial Sequence
  Synthetic
ugagguugucuguuagagagcgcu

SEQ ID NO: 380888 - RNA, 18 nt, Artificial Sequence
  Synthetic
ucagaaaacacaugcgcu

SEQ ID NO: 380889 - RNA, 19 nt, Artificial Sequence
  Synthetic
uucagaaaacacaugcgcu

SEQ ID NO: 380890 - RNA, 20 nt, Artificial Sequence
  Synthetic
uuucagaaaacacaugcgcu

SEQ ID NO: 380891 - RNA, 21 nt, Artificial Sequence
  Synthetic
auuucagaaaacacaugcgcu

SEQ ID NO: 380892 - RNA, 22 nt, Artificial Sequence
  Synthetic
aauuucagaaaacacaugcgcu

SEQ ID NO: 380893 - RNA, 23 nt, Artificial Sequence
  Synthetic
aaauuucagaaaacacaugcgcu

SEQ ID NO: 380894 - RNA, 24 nt, Artificial Sequence
  Synthetic
gaaauuucagaaaacacaugcgcu

SEQ ID NO: 380895 - RNA, 18 nt, Artificial Sequence
  Synthetic
uaauuacugauaaucgcu

SEQ ID NO: 380896 - RNA, 19 nt, Artificial Sequence
  Synthetic
auaauuacugauaaucgcu

SEQ ID NO: 380897 - RNA, 20 nt, Artificial Sequence
  Synthetic
uauaauuacugauaaucgcu

SEQ ID NO: 380898 - RNA, 21 nt, Artificial Sequence
  Synthetic
auauaauuacugauaaucgcu

SEQ ID NO: 380899 - RNA, 22 nt, Artificial Sequence
  Synthetic
aauauaauuacugauaaucgcu

SEQ ID NO: 380900 - RNA, 23 nt, Artificial Sequence
  Synthetic
aaauauaauuacugauaaucgcu

SEQ ID NO: 380901 - RNA, 24 nt, Artificial Sequence
  Synthetic
aaaauauaauuacugauaaucgcu

SEQ ID NO: 380902 - RNA, 18 nt, Artificial Sequence
  Synthetic
ucgagcagaaaccucgcu

SEQ ID NO: 380903 - RNA, 19 nt, Artificial Sequence
  Synthetic
cucgagcagaaaccucgcu

SEQ ID NO: 380904 - RNA, 20 nt, Artificial Sequence
  Synthetic
ccucgagcagaaaccucgcu

SEQ ID NO: 380905 - RNA, 21 nt, Artificial Sequence
  Synthetic
cccucgagcagaaaccucgcu

SEQ ID NO: 380906 - RNA, 22 nt, Artificial Sequence
  Synthetic
gcccucgagcagaaaccucgcu

SEQ ID NO: 380907 - RNA, 23 nt, Artificial Sequence
  Synthetic
agcccucgagcagaaaccucgcu

SEQ ID NO: 380908 - RNA, 24 nt, Artificial Sequence
  Synthetic
aagcccucgagcagaaaccucgcu

SEQ ID NO: 380909 - RNA, 18 nt, Artificial Sequence
  Synthetic
aauucagcaugugucgcu

SEQ ID NO: 380910 - RNA, 19 nt, Artificial Sequence
  Synthetic
uaauucagcaugugucgcu

SEQ ID NO: 380911 - RNA, 20 nt, Artificial Sequence
  Synthetic
auaauucagcaugugucgcu

SEQ ID NO: 380912 - RNA, 21 nt, Artificial Sequence
  Synthetic
aauaauucagcaugugucgcu

SEQ ID NO: 380913 - RNA, 22 nt, Artificial Sequence
  Synthetic
aaauaauucagcaugugucgcu

SEQ ID NO: 380914 - RNA, 23 nt, Artificial Sequence
  Synthetic
uaaauaauucagcaugugucgcu

SEQ ID NO: 380915 - RNA, 24 nt, Artificial Sequence
  Synthetic
cuaaauaauucagcaugugucgcu

SEQ ID NO: 380916 - RNA, 18 nt, Artificial Sequence
  Synthetic
agggagcauuguuucgcu

SEQ ID NO: 380917 - RNA, 19 nt, Artificial Sequence
  Synthetic
uagggagcauuguuucgcu

SEQ ID NO: 380918 - RNA, 20 nt, Artificial Sequence
  Synthetic
auagggagcauuguuucgcu

SEQ ID NO: 380919 - RNA, 21 nt, Artificial Sequence
  Synthetic
cauagggagcauuguuucgcu

SEQ ID NO: 380920 - RNA, 22 nt, Artificial Sequence
  Synthetic
ucauagggagcauuguuucgcu

SEQ ID NO: 380921 - RNA, 23 nt, Artificial Sequence
  Synthetic
aucauagggagcauuguuucgcu

SEQ ID NO: 380922 - RNA, 24 nt, Artificial Sequence
  Synthetic
caucauagggagcauuguuucgcu

SEQ ID NO: 380923 - RNA, 18 nt, Artificial Sequence
  Synthetic
agaaaucaacaaaaggcu

SEQ ID NO: 380924 - RNA, 19 nt, Artificial Sequence
  Synthetic
aagaaaucaacaaaaggcu

SEQ ID NO: 380925 - RNA, 20 nt, Artificial Sequence
  Synthetic
uaagaaaucaacaaaaggcu

SEQ ID NO: 380926 - RNA, 21 nt, Artificial Sequence
  Synthetic
auaagaaaucaacaaaaggcu

SEQ ID NO: 380927 - RNA, 22 nt, Artificial Sequence
  Synthetic
cauaagaaaucaacaaaaggcu

SEQ ID NO: 380928 - RNA, 23 nt, Artificial Sequence
  Synthetic
acauaagaaaucaacaaaaggcu

SEQ ID NO: 380929 - RNA, 24 nt, Artificial Sequence
  Synthetic
uacauaagaaaucaacaaaaggcu

SEQ ID NO: 380930 - RNA, 18 nt, Artificial Sequence
  Synthetic
aaggaagauacaaaggcu

SEQ ID NO: 380931 - RNA, 19 nt, Artificial Sequence
  Synthetic
uaaggaagauacaaaggcu

SEQ ID NO: 380932 - RNA, 20 nt, Artificial Sequence
  Synthetic
uuaaggaagauacaaaggcu

SEQ ID NO: 380933 - RNA, 21 nt, Artificial Sequence
  Synthetic
uuuaaggaagauacaaaggcu

SEQ ID NO: 380934 - RNA, 22 nt, Artificial Sequence
  Synthetic
cuuuaaggaagauacaaaggcu

SEQ ID NO: 380935 - RNA, 23 nt, Artificial Sequence
  Synthetic
ccuuuaaggaagauacaaaggcu

SEQ ID NO: 380936 - RNA, 24 nt, Artificial Sequence
  Synthetic
accuuuaaggaagauacaaaggcu

SEQ ID NO: 380937 - RNA, 18 nt, Artificial Sequence
  Synthetic
ggugagggaauaaaggcu

SEQ ID NO: 380938 - RNA, 19 nt, Artificial Sequence
  Synthetic
aggugagggaauaaaggcu

SEQ ID NO: 380939 - RNA, 20 nt, Artificial Sequence
  Synthetic
gaggugagggaauaaaggcu

SEQ ID NO: 380940 - RNA, 21 nt, Artificial Sequence
  Synthetic
ugaggugagggaauaaaggcu

SEQ ID NO: 380941 - RNA, 22 nt, Artificial Sequence
  Synthetic
cugaggugagggaauaaaggcu

SEQ ID NO: 380942 - RNA, 23 nt, Artificial Sequence
  Synthetic
ccugaggugagggaauaaaggcu

SEQ ID NO: 380943 - RNA, 24 nt, Artificial Sequence
  Synthetic
accugaggugagggaauaaaggcu

SEQ ID NO: 380944 - RNA, 18 nt, Artificial Sequence
  Synthetic
aaugucuggggcaaggcu

SEQ ID NO: 380945 - RNA, 19 nt, Artificial Sequence
  Synthetic
aaaugucuggggcaaggcu

SEQ ID NO: 380946 - RNA, 20 nt, Artificial Sequence
  Synthetic
aaaaugucuggggcaaggcu

SEQ ID NO: 380947 - RNA, 21 nt, Artificial Sequence
  Synthetic
caaaaugucuggggcaaggcu

SEQ ID NO: 380948 - RNA, 22 nt, Artificial Sequence
  Synthetic
ucaaaaugucuggggcaaggcu

SEQ ID NO: 380949 - RNA, 23 nt, Artificial Sequence
  Synthetic
uucaaaaugucuggggcaaggcu

SEQ ID NO: 380950 - RNA, 24 nt, Artificial Sequence
  Synthetic
auucaaaaugucuggggcaaggcu

SEQ ID NO: 380951 - RNA, 18 nt, Artificial Sequence
  Synthetic
agacuuuuucagaaggcu

SEQ ID NO: 380952 - RNA, 19 nt, Artificial Sequence
  Synthetic
aagacuuuuucagaaggcu

SEQ ID NO: 380953 - RNA, 20 nt, Artificial Sequence
  Synthetic
uaagacuuuuucagaaggcu

SEQ ID NO: 380954 - RNA, 21 nt, Artificial Sequence
  Synthetic
uuaagacuuuuucagaaggcu

SEQ ID NO: 380955 - RNA, 22 nt, Artificial Sequence
  Synthetic
cuuaagacuuuuucagaaggcu

SEQ ID NO: 380956 - RNA, 23 nt, Artificial Sequence
  Synthetic
gcuuaagacuuuuucagaaggcu

SEQ ID NO: 380957 - RNA, 24 nt, Artificial Sequence
  Synthetic
ugcuuaagacuuuuucagaaggcu

SEQ ID NO: 380958 - RNA, 18 nt, Artificial Sequence
  Synthetic
auuaucccucugaaggcu

SEQ ID NO: 380959 - RNA, 19 nt, Artificial Sequence
  Synthetic
aauuaucccucugaaggcu

SEQ ID NO: 380960 - RNA, 20 nt, Artificial Sequence
  Synthetic
caauuaucccucugaaggcu

SEQ ID NO: 380961 - RNA, 21 nt, Artificial Sequence
  Synthetic
ucaauuaucccucugaaggcu

SEQ ID NO: 380962 - RNA, 22 nt, Artificial Sequence
  Synthetic
gucaauuaucccucugaaggcu

SEQ ID NO: 380963 - RNA, 23 nt, Artificial Sequence
  Synthetic
ggucaauuaucccucugaaggcu

SEQ ID NO: 380964 - RNA, 24 nt, Artificial Sequence
  Synthetic
aggucaauuaucccucugaaggcu

SEQ ID NO: 380965 - RNA, 18 nt, Artificial Sequence
  Synthetic
accucagaacuuaaggcu

SEQ ID NO: 380966 - RNA, 19 nt, Artificial Sequence
  Synthetic
aaccucagaacuuaaggcu

SEQ ID NO: 380967 - RNA, 20 nt, Artificial Sequence
  Synthetic
uaaccucagaacuuaaggcu

SEQ ID NO: 380968 - RNA, 21 nt, Artificial Sequence
  Synthetic
cuaaccucagaacuuaaggcu

SEQ ID NO: 380969 - RNA, 22 nt, Artificial Sequence
  Synthetic
ccuaaccucagaacuuaaggcu

SEQ ID NO: 380970 - RNA, 23 nt, Artificial Sequence
  Synthetic
accuaaccucagaacuuaaggcu

SEQ ID NO: 380971 - RNA, 24 nt, Artificial Sequence
  Synthetic
aaccuaaccucagaacuuaaggcu

SEQ ID NO: 380972 - RNA, 18 nt, Artificial Sequence
  Synthetic
caaagugagagacaggcu

SEQ ID NO: 380973 - RNA, 19 nt, Artificial Sequence
  Synthetic
acaaagugagagacaggcu

SEQ ID NO: 380974 - RNA, 20 nt, Artificial Sequence
  Synthetic
cacaaagugagagacaggcu

SEQ ID NO: 380975 - RNA, 21 nt, Artificial Sequence
  Synthetic
ccacaaagugagagacaggcu

SEQ ID NO: 380976 - RNA, 22 nt, Artificial Sequence
  Synthetic
accacaaagugagagacaggcu

SEQ ID NO: 380977 - RNA, 23 nt, Artificial Sequence
  Synthetic
caccacaaagugagagacaggcu

SEQ ID NO: 380978 - RNA, 24 nt, Artificial Sequence
  Synthetic
ucaccacaaagugagagacaggcu

SEQ ID NO: 380979 - RNA, 18 nt, Artificial Sequence
  Synthetic
cacaguuacauacaggcu

SEQ ID NO: 380980 - RNA, 19 nt, Artificial Sequence
  Synthetic
ccacaguuacauacaggcu

SEQ ID NO: 380981 - RNA, 20 nt, Artificial Sequence
  Synthetic
cccacaguuacauacaggcu

SEQ ID NO: 380982 - RNA, 21 nt, Artificial Sequence
  Synthetic
ucccacaguuacauacaggcu

SEQ ID NO: 380983 - RNA, 22 nt, Artificial Sequence
  Synthetic
cucccacaguuacauacaggcu

SEQ ID NO: 380984 - RNA, 23 nt, Artificial Sequence
  Synthetic
gcucccacaguuacauacaggcu

SEQ ID NO: 380985 - RNA, 24 nt, Artificial Sequence
  Synthetic
ugcucccacaguuacauacaggcu

SEQ ID NO: 380986 - RNA, 18 nt, Artificial Sequence
  Synthetic
cuggugagggaccaggcu

SEQ ID NO: 380987 - RNA, 19 nt, Artificial Sequence
  Synthetic
gcuggugagggaccaggcu

SEQ ID NO: 380988 - RNA, 20 nt, Artificial Sequence
  Synthetic
cgcuggugagggaccaggcu

SEQ ID NO: 380989 - RNA, 21 nt, Artificial Sequence
  Synthetic
ccgcuggugagggaccaggcu

SEQ ID NO: 380990 - RNA, 22 nt, Artificial Sequence
  Synthetic
gccgcuggugagggaccaggcu

SEQ ID NO: 380991 - RNA, 23 nt, Artificial Sequence
  Synthetic
ugccgcuggugagggaccaggcu

SEQ ID NO: 380992 - RNA, 24 nt, Artificial Sequence
  Synthetic
augccgcuggugagggaccaggcu

SEQ ID NO: 380993 - RNA, 18 nt, Artificial Sequence
  Synthetic
ugugccagugcccaggcu

SEQ ID NO: 380994 - RNA, 19 nt, Artificial Sequence
  Synthetic
gugugccagugcccaggcu

SEQ ID NO: 380995 - RNA, 20 nt, Artificial Sequence
  Synthetic
ugugugccagugcccaggcu

SEQ ID NO: 380996 - RNA, 21 nt, Artificial Sequence
  Synthetic
cugugugccagugcccaggcu

SEQ ID NO: 380997 - RNA, 22 nt, Artificial Sequence
  Synthetic
gcugugugccagugcccaggcu

SEQ ID NO: 380998 - RNA, 23 nt, Artificial Sequence
  Synthetic
ugcugugugccagugcccaggcu

SEQ ID NO: 380999 - RNA, 24 nt, Artificial Sequence
  Synthetic
uugcugugugccagugcccaggcu

SEQ ID NO: 381000 - RNA, 18 nt, Artificial Sequence
  Synthetic
ugaugggccagccaggcu

SEQ ID NO: 381001 - RNA, 19 nt, Artificial Sequence
  Synthetic
uugaugggccagccaggcu

SEQ ID NO: 381002 - RNA, 20 nt, Artificial Sequence
  Synthetic
auugaugggccagccaggcu

SEQ ID NO: 381003 - RNA, 21 nt, Artificial Sequence
  Synthetic
aauugaugggccagccaggcu

SEQ ID NO: 381004 - RNA, 22 nt, Artificial Sequence
  Synthetic
aaauugaugggccagccaggcu

SEQ ID NO: 381005 - RNA, 23 nt, Artificial Sequence
  Synthetic
aaaauugaugggccagccaggcu

SEQ ID NO: 381006 - RNA, 24 nt, Artificial Sequence
  Synthetic
aaaaauugaugggccagccaggcu

SEQ ID NO: 381007 - RNA, 18 nt, Artificial Sequence
  Synthetic
cacccaagacuccaggcu

SEQ ID NO: 381008 - RNA, 19 nt, Artificial Sequence
  Synthetic
ccacccaagacuccaggcu

SEQ ID NO: 381009 - RNA, 20 nt, Artificial Sequence
  Synthetic
uccacccaagacuccaggcu

SEQ ID NO: 381010 - RNA, 21 nt, Artificial Sequence
  Synthetic
uuccacccaagacuccaggcu

SEQ ID NO: 381011 - RNA, 22 nt, Artificial Sequence
  Synthetic
auuccacccaagacuccaggcu

SEQ ID NO: 381012 - RNA, 23 nt, Artificial Sequence
  Synthetic
cauuccacccaagacuccaggcu

SEQ ID NO: 381013 - RNA, 24 nt, Artificial Sequence
  Synthetic
acauuccacccaagacuccaggcu

SEQ ID NO: 381014 - RNA, 18 nt, Artificial Sequence
  Synthetic
cuuaguguuaagcaggcu

SEQ ID NO: 381015 - RNA, 19 nt, Artificial Sequence
  Synthetic
ccuuaguguuaagcaggcu

SEQ ID NO: 381016 - RNA, 20 nt, Artificial Sequence
  Synthetic
gccuuaguguuaagcaggcu

SEQ ID NO: 381017 - RNA, 21 nt, Artificial Sequence
  Synthetic
agccuuaguguuaagcaggcu

SEQ ID NO: 381018 - RNA, 22 nt, Artificial Sequence
  Synthetic
cagccuuaguguuaagcaggcu

SEQ ID NO: 381019 - RNA, 23 nt, Artificial Sequence
  Synthetic
acagccuuaguguuaagcaggcu

SEQ ID NO: 381020 - RNA, 24 nt, Artificial Sequence
  Synthetic
aacagccuuaguguuaagcaggcu

SEQ ID NO: 381021 - RNA, 18 nt, Artificial Sequence
  Synthetic
uuaaaaugucugcaggcu

SEQ ID NO: 381022 - RNA, 19 nt, Artificial Sequence
  Synthetic
auuaaaaugucugcaggcu

SEQ ID NO: 381023 - RNA, 20 nt, Artificial Sequence
  Synthetic
cauuaaaaugucugcaggcu

SEQ ID NO: 381024 - RNA, 21 nt, Artificial Sequence
  Synthetic
gcauuaaaaugucugcaggcu

SEQ ID NO: 381025 - RNA, 22 nt, Artificial Sequence
  Synthetic
ggcauuaaaaugucugcaggcu

SEQ ID NO: 381026 - RNA, 23 nt, Artificial Sequence
  Synthetic
aggcauuaaaaugucugcaggcu

SEQ ID NO: 381027 - RNA, 24 nt, Artificial Sequence
  Synthetic
caggcauuaaaaugucugcaggcu

SEQ ID NO: 381028 - RNA, 18 nt, Artificial Sequence
  Synthetic
ccuagagaugaucaggcu

SEQ ID NO: 381029 - RNA, 19 nt, Artificial Sequence
  Synthetic
accuagagaugaucaggcu

SEQ ID NO: 381030 - RNA, 20 nt, Artificial Sequence
  Synthetic
uaccuagagaugaucaggcu

SEQ ID NO: 381031 - RNA, 21 nt, Artificial Sequence
  Synthetic
uuaccuagagaugaucaggcu

SEQ ID NO: 381032 - RNA, 22 nt, Artificial Sequence
  Synthetic
uuuaccuagagaugaucaggcu

SEQ ID NO: 381033 - RNA, 23 nt, Artificial Sequence
  Synthetic
guuuaccuagagaugaucaggcu

SEQ ID NO: 381034 - RNA, 24 nt, Artificial Sequence
  Synthetic
aguuuaccuagagaugaucaggcu

SEQ ID NO: 381035 - RNA, 18 nt, Artificial Sequence
  Synthetic
gucaucuccucucaggcu

SEQ ID NO: 381036 - RNA, 19 nt, Artificial Sequence
  Synthetic
cgucaucuccucucaggcu

SEQ ID NO: 381037 - RNA, 20 nt, Artificial Sequence
  Synthetic
ccgucaucuccucucaggcu

SEQ ID NO: 381038 - RNA, 21 nt, Artificial Sequence
  Synthetic
uccgucaucuccucucaggcu

SEQ ID NO: 381039 - RNA, 22 nt, Artificial Sequence
  Synthetic
cuccgucaucuccucucaggcu

SEQ ID NO: 381040 - RNA, 23 nt, Artificial Sequence
  Synthetic
acuccgucaucuccucucaggcu

SEQ ID NO: 381041 - RNA, 24 nt, Artificial Sequence
  Synthetic
aacuccgucaucuccucucaggcu

SEQ ID NO: 381042 - RNA, 18 nt, Artificial Sequence
  Synthetic
auuucuagccaagaggcu

SEQ ID NO: 381043 - RNA, 19 nt, Artificial Sequence
  Synthetic
gauuucuagccaagaggcu

SEQ ID NO: 381044 - RNA, 20 nt, Artificial Sequence
  Synthetic
agauuucuagccaagaggcu

SEQ ID NO: 381045 - RNA, 21 nt, Artificial Sequence
  Synthetic
aagauuucuagccaagaggcu

SEQ ID NO: 381046 - RNA, 22 nt, Artificial Sequence
  Synthetic
gaagauuucuagccaagaggcu

SEQ ID NO: 381047 - RNA, 23 nt, Artificial Sequence
  Synthetic
ugaagauuucuagccaagaggcu

SEQ ID NO: 381048 - RNA, 24 nt, Artificial Sequence
  Synthetic
gugaagauuucuagccaagaggcu

SEQ ID NO: 381049 - RNA, 18 nt, Artificial Sequence
  Synthetic
uaaaaguggcaagaggcu

SEQ ID NO: 381050 - RNA, 19 nt, Artificial Sequence
  Synthetic
auaaaaguggcaagaggcu

SEQ ID NO: 381051 - RNA, 20 nt, Artificial Sequence
  Synthetic
uauaaaaguggcaagaggcu

SEQ ID NO: 381052 - RNA, 21 nt, Artificial Sequence
  Synthetic
guauaaaaguggcaagaggcu

SEQ ID NO: 381053 - RNA, 22 nt, Artificial Sequence
  Synthetic
gguauaaaaguggcaagaggcu

SEQ ID NO: 381054 - RNA, 23 nt, Artificial Sequence
  Synthetic
agguauaaaaguggcaagaggcu

SEQ ID NO: 381055 - RNA, 24 nt, Artificial Sequence
  Synthetic
gagguauaaaaguggcaagaggcu

SEQ ID NO: 381056 - RNA, 18 nt, Artificial Sequence
  Synthetic
ucaugguuaacagaggcu

SEQ ID NO: 381057 - RNA, 19 nt, Artificial Sequence
  Synthetic
aucaugguuaacagaggcu

SEQ ID NO: 381058 - RNA, 20 nt, Artificial Sequence
  Synthetic
aaucaugguuaacagaggcu

SEQ ID NO: 381059 - RNA, 21 nt, Artificial Sequence
  Synthetic
gaaucaugguuaacagaggcu

SEQ ID NO: 381060 - RNA, 22 nt, Artificial Sequence
  Synthetic
agaaucaugguuaacagaggcu

SEQ ID NO: 381061 - RNA, 23 nt, Artificial Sequence
  Synthetic
uagaaucaugguuaacagaggcu

SEQ ID NO: 381062 - RNA, 24 nt, Artificial Sequence
  Synthetic
guagaaucaugguuaacagaggcu

SEQ ID NO: 381063 - RNA, 18 nt, Artificial Sequence
  Synthetic
acuucuguaugagaggcu

SEQ ID NO: 381064 - RNA, 19 nt, Artificial Sequence
  Synthetic
cacuucuguaugagaggcu

SEQ ID NO: 381065 - RNA, 20 nt, Artificial Sequence
  Synthetic
gcacuucuguaugagaggcu

SEQ ID NO: 381066 - RNA, 21 nt, Artificial Sequence
  Synthetic
ggcacuucuguaugagaggcu

SEQ ID NO: 381067 - RNA, 22 nt, Artificial Sequence
  Synthetic
uggcacuucuguaugagaggcu

SEQ ID NO: 381068 - RNA, 23 nt, Artificial Sequence
  Synthetic
cuggcacuucuguaugagaggcu

SEQ ID NO: 381069 - RNA, 24 nt, Artificial Sequence
  Synthetic
ucuggcacuucuguaugagaggcu

SEQ ID NO: 381070 - RNA, 18 nt, Artificial Sequence
  Synthetic
cuuacaguuacggaggcu

SEQ ID NO: 381071 - RNA, 19 nt, Artificial Sequence
  Synthetic
ucuuacaguuacggaggcu

SEQ ID NO: 381072 - RNA, 20 nt, Artificial Sequence
  Synthetic
uucuuacaguuacggaggcu

SEQ ID NO: 381073 - RNA, 21 nt, Artificial Sequence
  Synthetic
cuucuuacaguuacggaggcu

SEQ ID NO: 381074 - RNA, 22 nt, Artificial Sequence
  Synthetic
acuucuuacaguuacggaggcu

SEQ ID NO: 381075 - RNA, 23 nt, Artificial Sequence
  Synthetic
uacuucuuacaguuacggaggcu

SEQ ID NO: 381076 - RNA, 24 nt, Artificial Sequence
  Synthetic
uuacuucuuacaguuacggaggcu

SEQ ID NO: 381077 - RNA, 18 nt, Artificial Sequence
  Synthetic
cagcagugcugggaggcu

SEQ ID NO: 381078 - RNA, 19 nt, Artificial Sequence
  Synthetic
acagcagugcugggaggcu

SEQ ID NO: 381079 - RNA, 20 nt, Artificial Sequence
  Synthetic
cacagcagugcugggaggcu

SEQ ID NO: 381080 - RNA, 21 nt, Artificial Sequence
  Synthetic
acacagcagugcugggaggcu

SEQ ID NO: 381081 - RNA, 22 nt, Artificial Sequence
  Synthetic
aacacagcagugcugggaggcu

SEQ ID NO: 381082 - RNA, 23 nt, Artificial Sequence
  Synthetic
aaacacagcagugcugggaggcu

SEQ ID NO: 381083 - RNA, 24 nt, Artificial Sequence
  Synthetic
uaaacacagcagugcugggaggcu

SEQ ID NO: 381084 - RNA, 18 nt, Artificial Sequence
  Synthetic
ccaguacuuugggaggcu

SEQ ID NO: 381085 - RNA, 19 nt, Artificial Sequence
  Synthetic
cccaguacuuugggaggcu

SEQ ID NO: 381086 - RNA, 20 nt, Artificial Sequence
  Synthetic
ucccaguacuuugggaggcu

SEQ ID NO: 381087 - RNA, 21 nt, Artificial Sequence
  Synthetic
aucccaguacuuugggaggcu

SEQ ID NO: 381088 - RNA, 22 nt, Artificial Sequence
  Synthetic
aaucccaguacuuugggaggcu

SEQ ID NO: 381089 - RNA, 23 nt, Artificial Sequence
  Synthetic
uaaucccaguacuuugggaggcu

SEQ ID NO: 381090 - RNA, 24 nt, Artificial Sequence
  Synthetic
guaaucccaguacuuugggaggcu

SEQ ID NO: 381091 - RNA, 18 nt, Artificial Sequence
  Synthetic
cucauaguucuggaggcu

SEQ ID NO: 381092 - RNA, 19 nt, Artificial Sequence
  Synthetic
gcucauaguucuggaggcu

SEQ ID NO: 381093 - RNA, 20 nt, Artificial Sequence
  Synthetic
ggcucauaguucuggaggcu

SEQ ID NO: 381094 - RNA, 21 nt, Artificial Sequence
  Synthetic
uggcucauaguucuggaggcu

SEQ ID NO: 381095 - RNA, 22 nt, Artificial Sequence
  Synthetic
uuggcucauaguucuggaggcu

SEQ ID NO: 381096 - RNA, 23 nt, Artificial Sequence
  Synthetic
guuggcucauaguucuggaggcu

SEQ ID NO: 381097 - RNA, 24 nt, Artificial Sequence
  Synthetic
uguuggcucauaguucuggaggcu

SEQ ID NO: 381098 - RNA, 18 nt, Artificial Sequence
  Synthetic
cucaccguucuggaggcu

SEQ ID NO: 381099 - RNA, 19 nt, Artificial Sequence
  Synthetic
ucucaccguucuggaggcu

SEQ ID NO: 381100 - RNA, 20 nt, Artificial Sequence
  Synthetic
uucucaccguucuggaggcu

SEQ ID NO: 381101 - RNA, 21 nt, Artificial Sequence
  Synthetic
uuucucaccguucuggaggcu

SEQ ID NO: 381102 - RNA, 22 nt, Artificial Sequence
  Synthetic
auuucucaccguucuggaggcu

SEQ ID NO: 381103 - RNA, 23 nt, Artificial Sequence
  Synthetic
uauuucucaccguucuggaggcu

SEQ ID NO: 381104 - RNA, 24 nt, Artificial Sequence
  Synthetic
uuauuucucaccguucuggaggcu

SEQ ID NO: 381105 - RNA, 18 nt, Artificial Sequence
  Synthetic
aguaaguuucuggaggcu

SEQ ID NO: 381106 - RNA, 19 nt, Artificial Sequence
  Synthetic
aaguaaguuucuggaggcu

SEQ ID NO: 381107 - RNA, 20 nt, Artificial Sequence
  Synthetic
aaaguaaguuucuggaggcu

SEQ ID NO: 381108 - RNA, 21 nt, Artificial Sequence
  Synthetic
aaaaguaaguuucuggaggcu

SEQ ID NO: 381109 - RNA, 22 nt, Artificial Sequence
  Synthetic
caaaaguaaguuucuggaggcu

SEQ ID NO: 381110 - RNA, 23 nt, Artificial Sequence
  Synthetic
acaaaaguaaguuucuggaggcu

SEQ ID NO: 381111 - RNA, 24 nt, Artificial Sequence
  Synthetic
gacaaaaguaaguuucuggaggcu

SEQ ID NO: 381112 - RNA, 18 nt, Artificial Sequence
  Synthetic
ucuccuucuguggaggcu

SEQ ID NO: 381113 - RNA, 19 nt, Artificial Sequence
  Synthetic
aucuccuucuguggaggcu

SEQ ID NO: 381114 - RNA, 20 nt, Artificial Sequence
  Synthetic
caucuccuucuguggaggcu

SEQ ID NO: 381115 - RNA, 21 nt, Artificial Sequence
  Synthetic
gcaucuccuucuguggaggcu

SEQ ID NO: 381116 - RNA, 22 nt, Artificial Sequence
  Synthetic
agcaucuccuucuguggaggcu

SEQ ID NO: 381117 - RNA, 23 nt, Artificial Sequence
  Synthetic
cagcaucuccuucuguggaggcu

SEQ ID NO: 381118 - RNA, 24 nt, Artificial Sequence
  Synthetic
gcagcaucuccuucuguggaggcu

SEQ ID NO: 381119 - RNA, 18 nt, Artificial Sequence
  Synthetic
uguucugaauaugaggcu

SEQ ID NO: 381120 - RNA, 19 nt, Artificial Sequence
  Synthetic
auguucugaauaugaggcu

SEQ ID NO: 381121 - RNA, 20 nt, Artificial Sequence
  Synthetic
aauguucugaauaugaggcu

SEQ ID NO: 381122 - RNA, 21 nt, Artificial Sequence
  Synthetic
aaauguucugaauaugaggcu

SEQ ID NO: 381123 - RNA, 22 nt, Artificial Sequence
  Synthetic
gaaauguucugaauaugaggcu

SEQ ID NO: 381124 - RNA, 23 nt, Artificial Sequence
  Synthetic
ugaaauguucugaauaugaggcu

SEQ ID NO: 381125 - RNA, 24 nt, Artificial Sequence
  Synthetic
cugaaauguucugaauaugaggcu

SEQ ID NO: 381126 - RNA, 18 nt, Artificial Sequence
  Synthetic
auguaauggagugaggcu

SEQ ID NO: 381127 - RNA, 19 nt, Artificial Sequence
  Synthetic
aauguaauggagugaggcu

SEQ ID NO: 381128 - RNA, 20 nt, Artificial Sequence
  Synthetic
aaauguaauggagugaggcu

SEQ ID NO: 381129 - RNA, 21 nt, Artificial Sequence
  Synthetic
aaaauguaauggagugaggcu

SEQ ID NO: 381130 - RNA, 22 nt, Artificial Sequence
  Synthetic
aaaaauguaauggagugaggcu

SEQ ID NO: 381131 - RNA, 23 nt, Artificial Sequence
  Synthetic
uaaaaauguaauggagugaggcu

SEQ ID NO: 381132 - RNA, 24 nt, Artificial Sequence
  Synthetic
auaaaaauguaauggagugaggcu

SEQ ID NO: 381133 - RNA, 18 nt, Artificial Sequence
  Synthetic
gaacauuuuauugaggcu

SEQ ID NO: 381134 - RNA, 19 nt, Artificial Sequence
  Synthetic
cgaacauuuuauugaggcu

SEQ ID NO: 381135 - RNA, 20 nt, Artificial Sequence
  Synthetic
ucgaacauuuuauugaggcu

SEQ ID NO: 381136 - RNA, 21 nt, Artificial Sequence
  Synthetic
cucgaacauuuuauugaggcu

SEQ ID NO: 381137 - RNA, 22 nt, Artificial Sequence
  Synthetic
ccucgaacauuuuauugaggcu

SEQ ID NO: 381138 - RNA, 23 nt, Artificial Sequence
  Synthetic
accucgaacauuuuauugaggcu

SEQ ID NO: 381139 - RNA, 24 nt, Artificial Sequence
  Synthetic
caccucgaacauuuuauugaggcu

SEQ ID NO: 381140 - RNA, 18 nt, Artificial Sequence
  Synthetic
ccuucugaugccuaggcu

SEQ ID NO: 381141 - RNA, 19 nt, Artificial Sequence
  Synthetic
accuucugaugccuaggcu

SEQ ID NO: 381142 - RNA, 20 nt, Artificial Sequence
  Synthetic
gaccuucugaugccuaggcu

SEQ ID NO: 381143 - RNA, 21 nt, Artificial Sequence
  Synthetic
agaccuucugaugccuaggcu

SEQ ID NO: 381144 - RNA, 22 nt, Artificial Sequence
  Synthetic
aagaccuucugaugccuaggcu

SEQ ID NO: 381145 - RNA, 23 nt, Artificial Sequence
  Synthetic
caagaccuucugaugccuaggcu

SEQ ID NO: 381146 - RNA, 24 nt, Artificial Sequence
  Synthetic
acaagaccuucugaugccuaggcu

SEQ ID NO: 381147 - RNA, 18 nt, Artificial Sequence
  Synthetic
gccaccaacuccuaggcu

SEQ ID NO: 381148 - RNA, 19 nt, Artificial Sequence
  Synthetic
agccaccaacuccuaggcu

SEQ ID NO: 381149 - RNA, 20 nt, Artificial Sequence
  Synthetic
cagccaccaacuccuaggcu

SEQ ID NO: 381150 - RNA, 21 nt, Artificial Sequence
  Synthetic
gcagccaccaacuccuaggcu

SEQ ID NO: 381151 - RNA, 22 nt, Artificial Sequence
  Synthetic
ugcagccaccaacuccuaggcu

SEQ ID NO: 381152 - RNA, 23 nt, Artificial Sequence
  Synthetic
cugcagccaccaacuccuaggcu

SEQ ID NO: 381153 - RNA, 24 nt, Artificial Sequence
  Synthetic
acugcagccaccaacuccuaggcu

SEQ ID NO: 381154 - RNA, 18 nt, Artificial Sequence
  Synthetic
cuucacguuaaguaggcu

SEQ ID NO: 381155 - RNA, 19 nt, Artificial Sequence
  Synthetic
ucuucacguuaaguaggcu

SEQ ID NO: 381156 - RNA, 20 nt, Artificial Sequence
  Synthetic
aucuucacguuaaguaggcu

SEQ ID NO: 381157 - RNA, 21 nt, Artificial Sequence
  Synthetic
uaucuucacguuaaguaggcu

SEQ ID NO: 381158 - RNA, 22 nt, Artificial Sequence
  Synthetic
uuaucuucacguuaaguaggcu

SEQ ID NO: 381159 - RNA, 23 nt, Artificial Sequence
  Synthetic
auuaucuucacguuaaguaggcu

SEQ ID NO: 381160 - RNA, 24 nt, Artificial Sequence
  Synthetic
cauuaucuucacguuaaguaggcu

SEQ ID NO: 381161 - RNA, 18 nt, Artificial Sequence
  Synthetic
aucuuauugcaguaggcu

SEQ ID NO: 381162 - RNA, 19 nt, Artificial Sequence
  Synthetic
aaucuuauugcaguaggcu

SEQ ID NO: 381163 - RNA, 20 nt, Artificial Sequence
  Synthetic
aaaucuuauugcaguaggcu

SEQ ID NO: 381164 - RNA, 21 nt, Artificial Sequence
  Synthetic
caaaucuuauugcaguaggcu

SEQ ID NO: 381165 - RNA, 22 nt, Artificial Sequence
  Synthetic
ucaaaucuuauugcaguaggcu

SEQ ID NO: 381166 - RNA, 23 nt, Artificial Sequence
  Synthetic
gucaaaucuuauugcaguaggcu

SEQ ID NO: 381167 - RNA, 24 nt, Artificial Sequence
  Synthetic
agucaaaucuuauugcaguaggcu

SEQ ID NO: 381168 - RNA, 18 nt, Artificial Sequence
  Synthetic
ucugagaaaacuuaggcu

SEQ ID NO: 381169 - RNA, 19 nt, Artificial Sequence
  Synthetic
aucugagaaaacuuaggcu

SEQ ID NO: 381170 - RNA, 20 nt, Artificial Sequence
  Synthetic
caucugagaaaacuuaggcu

SEQ ID NO: 381171 - RNA, 21 nt, Artificial Sequence
  Synthetic
ucaucugagaaaacuuaggcu

SEQ ID NO: 381172 - RNA, 22 nt, Artificial Sequence
  Synthetic
uucaucugagaaaacuuaggcu

SEQ ID NO: 381173 - RNA, 23 nt, Artificial Sequence
  Synthetic
uuucaucugagaaaacuuaggcu

SEQ ID NO: 381174 - RNA, 24 nt, Artificial Sequence
  Synthetic
uuuucaucugagaaaacuuaggcu

SEQ ID NO: 381175 - RNA, 18 nt, Artificial Sequence
  Synthetic
uuuguuuagaguacggcu

SEQ ID NO: 381176 - RNA, 19 nt, Artificial Sequence
  Synthetic
cuuuguuuagaguacggcu

SEQ ID NO: 381177 - RNA, 20 nt, Artificial Sequence
  Synthetic
ccuuuguuuagaguacggcu

SEQ ID NO: 381178 - RNA, 21 nt, Artificial Sequence
  Synthetic
gccuuuguuuagaguacggcu

SEQ ID NO: 381179 - RNA, 22 nt, Artificial Sequence
  Synthetic
agccuuuguuuagaguacggcu

SEQ ID NO: 381180 - RNA, 23 nt, Artificial Sequence
  Synthetic
gagccuuuguuuagaguacggcu

SEQ ID NO: 381181 - RNA, 24 nt, Artificial Sequence
  Synthetic
agagccuuuguuuagaguacggcu

SEQ ID NO: 381182 - RNA, 18 nt, Artificial Sequence
  Synthetic
ugcguugaauuuacggcu

SEQ ID NO: 381183 - RNA, 19 nt, Artificial Sequence
  Synthetic
augcguugaauuuacggcu

SEQ ID NO: 381184 - RNA, 20 nt, Artificial Sequence
  Synthetic
uaugcguugaauuuacggcu

SEQ ID NO: 381185 - RNA, 21 nt, Artificial Sequence
  Synthetic
uuaugcguugaauuuacggcu

SEQ ID NO: 381186 - RNA, 22 nt, Artificial Sequence
  Synthetic
uuuaugcguugaauuuacggcu

SEQ ID NO: 381187 - RNA, 23 nt, Artificial Sequence
  Synthetic
cuuuaugcguugaauuuacggcu

SEQ ID NO: 381188 - RNA, 24 nt, Artificial Sequence
  Synthetic
acuuuaugcguugaauuuacggcu

SEQ ID NO: 381189 - RNA, 18 nt, Artificial Sequence
  Synthetic
cuggcaggagucccggcu

SEQ ID NO: 381190 - RNA, 19 nt, Artificial Sequence
  Synthetic
ucuggcaggagucccggcu

SEQ ID NO: 381191 - RNA, 20 nt, Artificial Sequence
  Synthetic
aucuggcaggagucccggcu

SEQ ID NO: 381192 - RNA, 21 nt, Artificial Sequence
  Synthetic
uaucuggcaggagucccggcu

SEQ ID NO: 381193 - RNA, 22 nt, Artificial Sequence
  Synthetic
uuaucuggcaggagucccggcu

SEQ ID NO: 381194 - RNA, 23 nt, Artificial Sequence
  Synthetic
guuaucuggcaggagucccggcu

SEQ ID NO: 381195 - RNA, 24 nt, Artificial Sequence
  Synthetic
gguuaucuggcaggagucccggcu

SEQ ID NO: 381196 - RNA, 18 nt, Artificial Sequence
  Synthetic
ucacccguuaaagcggcu

SEQ ID NO: 381197 - RNA, 19 nt, Artificial Sequence
  Synthetic
cucacccguuaaagcggcu

SEQ ID NO: 381198 - RNA, 20 nt, Artificial Sequence
  Synthetic
acucacccguuaaagcggcu

SEQ ID NO: 381199 - RNA, 21 nt, Artificial Sequence
  Synthetic
aacucacccguuaaagcggcu

SEQ ID NO: 381200 - RNA, 22 nt, Artificial Sequence
  Synthetic
caacucacccguuaaagcggcu

SEQ ID NO: 381201 - RNA, 23 nt, Artificial Sequence
  Synthetic
ccaacucacccguuaaagcggcu

SEQ ID NO: 381202 - RNA, 24 nt, Artificial Sequence
  Synthetic
accaacucacccguuaaagcggcu

SEQ ID NO: 381203 - RNA, 18 nt, Artificial Sequence
  Synthetic
auuaccaccucaagggcu

SEQ ID NO: 381204 - RNA, 19 nt, Artificial Sequence
  Synthetic
uauuaccaccucaagggcu

SEQ ID NO: 381205 - RNA, 20 nt, Artificial Sequence
  Synthetic
cuauuaccaccucaagggcu

SEQ ID NO: 381206 - RNA, 21 nt, Artificial Sequence
  Synthetic
acuauuaccaccucaagggcu

SEQ ID NO: 381207 - RNA, 22 nt, Artificial Sequence
  Synthetic
aacuauuaccaccucaagggcu

SEQ ID NO: 381208 - RNA, 23 nt, Artificial Sequence
  Synthetic
aaacuauuaccaccucaagggcu

SEQ ID NO: 381209 - RNA, 24 nt, Artificial Sequence
  Synthetic
gaaacuauuaccaccucaagggcu

SEQ ID NO: 381210 - RNA, 18 nt, Artificial Sequence
  Synthetic
gugcccaggcuaagggcu

SEQ ID NO: 381211 - RNA, 19 nt, Artificial Sequence
  Synthetic
agugcccaggcuaagggcu

SEQ ID NO: 381212 - RNA, 20 nt, Artificial Sequence
  Synthetic
cagugcccaggcuaagggcu

SEQ ID NO: 381213 - RNA, 21 nt, Artificial Sequence
  Synthetic
ccagugcccaggcuaagggcu

SEQ ID NO: 381214 - RNA, 22 nt, Artificial Sequence
  Synthetic
gccagugcccaggcuaagggcu

SEQ ID NO: 381215 - RNA, 23 nt, Artificial Sequence
  Synthetic
ugccagugcccaggcuaagggcu

SEQ ID NO: 381216 - RNA, 24 nt, Artificial Sequence
  Synthetic
gugccagugcccaggcuaagggcu

SEQ ID NO: 381217 - RNA, 18 nt, Artificial Sequence
  Synthetic
cuacuaccacacagggcu

SEQ ID NO: 381218 - RNA, 19 nt, Artificial Sequence
  Synthetic
acuacuaccacacagggcu

SEQ ID NO: 381219 - RNA, 20 nt, Artificial Sequence
  Synthetic
gacuacuaccacacagggcu

SEQ ID NO: 381220 - RNA, 21 nt, Artificial Sequence
  Synthetic
ugacuacuaccacacagggcu

SEQ ID NO: 381221 - RNA, 22 nt, Artificial Sequence
  Synthetic
cugacuacuaccacacagggcu

SEQ ID NO: 381222 - RNA, 23 nt, Artificial Sequence
  Synthetic
acugacuacuaccacacagggcu

SEQ ID NO: 381223 - RNA, 24 nt, Artificial Sequence
  Synthetic
uacugacuacuaccacacagggcu

SEQ ID NO: 381224 - RNA, 18 nt, Artificial Sequence
  Synthetic
ugauggccacccagggcu

SEQ ID NO: 381225 - RNA, 19 nt, Artificial Sequence
  Synthetic
gugauggccacccagggcu

SEQ ID NO: 381226 - RNA, 20 nt, Artificial Sequence
  Synthetic
ugugauggccacccagggcu

SEQ ID NO: 381227 - RNA, 21 nt, Artificial Sequence
  Synthetic
gugugauggccacccagggcu

SEQ ID NO: 381228 - RNA, 22 nt, Artificial Sequence
  Synthetic
ggugugauggccacccagggcu

SEQ ID NO: 381229 - RNA, 23 nt, Artificial Sequence
  Synthetic
gggugugauggccacccagggcu

SEQ ID NO: 381230 - RNA, 24 nt, Artificial Sequence
  Synthetic
agggugugauggccacccagggcu

SEQ ID NO: 381231 - RNA, 18 nt, Artificial Sequence
  Synthetic
ccuaaccaucccagggcu

SEQ ID NO: 381232 - RNA, 19 nt, Artificial Sequence
  Synthetic
gccuaaccaucccagggcu

SEQ ID NO: 381233 - RNA, 20 nt, Artificial Sequence
  Synthetic
ugccuaaccaucccagggcu

SEQ ID NO: 381234 - RNA, 21 nt, Artificial Sequence
  Synthetic
cugccuaaccaucccagggcu

SEQ ID NO: 381235 - RNA, 22 nt, Artificial Sequence
  Synthetic
gcugccuaaccaucccagggcu

SEQ ID NO: 381236 - RNA, 23 nt, Artificial Sequence
  Synthetic
agcugccuaaccaucccagggcu

SEQ ID NO: 381237 - RNA, 24 nt, Artificial Sequence
  Synthetic
aagcugccuaaccaucccagggcu

SEQ ID NO: 381238 - RNA, 18 nt, Artificial Sequence
  Synthetic
cauauucaagagagggcu

SEQ ID NO: 381239 - RNA, 19 nt, Artificial Sequence
  Synthetic
acauauucaagagagggcu

SEQ ID NO: 381240 - RNA, 20 nt, Artificial Sequence
  Synthetic
uacauauucaagagagggcu

SEQ ID NO: 381241 - RNA, 21 nt, Artificial Sequence
  Synthetic
auacauauucaagagagggcu

SEQ ID NO: 381242 - RNA, 22 nt, Artificial Sequence
  Synthetic
aauacauauucaagagagggcu

SEQ ID NO: 381243 - RNA, 23 nt, Artificial Sequence
  Synthetic
caauacauauucaagagagggcu

SEQ ID NO: 381244 - RNA, 24 nt, Artificial Sequence
  Synthetic
ccaauacauauucaagagagggcu

SEQ ID NO: 381245 - RNA, 18 nt, Artificial Sequence
  Synthetic
ugguuccuucugagggcu

SEQ ID NO: 381246 - RNA, 19 nt, Artificial Sequence
  Synthetic
uugguuccuucugagggcu

SEQ ID NO: 381247 - RNA, 20 nt, Artificial Sequence
  Synthetic
guugguuccuucugagggcu

SEQ ID NO: 381248 - RNA, 21 nt, Artificial Sequence
  Synthetic
gguugguuccuucugagggcu

SEQ ID NO: 381249 - RNA, 22 nt, Artificial Sequence
  Synthetic
ggguugguuccuucugagggcu

SEQ ID NO: 381250 - RNA, 23 nt, Artificial Sequence
  Synthetic
aggguugguuccuucugagggcu

SEQ ID NO: 381251 - RNA, 24 nt, Artificial Sequence
  Synthetic
gaggguugguuccuucugagggcu

SEQ ID NO: 381252 - RNA, 18 nt, Artificial Sequence
  Synthetic
ggugagcagcagcgggcu

SEQ ID NO: 381253 - RNA, 19 nt, Artificial Sequence
  Synthetic
aggugagcagcagcgggcu

SEQ ID NO: 381254 - RNA, 20 nt, Artificial Sequence
  Synthetic
uaggugagcagcagcgggcu

SEQ ID NO: 381255 - RNA, 21 nt, Artificial Sequence
  Synthetic
guaggugagcagcagcgggcu

SEQ ID NO: 381256 - RNA, 22 nt, Artificial Sequence
  Synthetic
aguaggugagcagcagcgggcu

SEQ ID NO: 381257 - RNA, 23 nt, Artificial Sequence
  Synthetic
caguaggugagcagcagcgggcu

SEQ ID NO: 381258 - RNA, 24 nt, Artificial Sequence
  Synthetic
gcaguaggugagcagcagcgggcu

SEQ ID NO: 381259 - RNA, 18 nt, Artificial Sequence
  Synthetic
gcucccaaaaggcgggcu

SEQ ID NO: 381260 - RNA, 19 nt, Artificial Sequence
  Synthetic
agcucccaaaaggcgggcu

SEQ ID NO: 381261 - RNA, 20 nt, Artificial Sequence
  Synthetic
aagcucccaaaaggcgggcu

SEQ ID NO: 381262 - RNA, 21 nt, Artificial Sequence
  Synthetic
caagcucccaaaaggcgggcu

SEQ ID NO: 381263 - RNA, 22 nt, Artificial Sequence
  Synthetic
ccaagcucccaaaaggcgggcu

SEQ ID NO: 381264 - RNA, 23 nt, Artificial Sequence
  Synthetic
accaagcucccaaaaggcgggcu

SEQ ID NO: 381265 - RNA, 24 nt, Artificial Sequence
  Synthetic
gaccaagcucccaaaaggcgggcu

SEQ ID NO: 381266 - RNA, 18 nt, Artificial Sequence
  Synthetic
uauuuucuugcaggggcu

SEQ ID NO: 381267 - RNA, 19 nt, Artificial Sequence
  Synthetic
guauuuucuugcaggggcu

SEQ ID NO: 381268 - RNA, 20 nt, Artificial Sequence
  Synthetic
uguauuuucuugcaggggcu

SEQ ID NO: 381269 - RNA, 21 nt, Artificial Sequence
  Synthetic
uuguauuuucuugcaggggcu

SEQ ID NO: 381270 - RNA, 22 nt, Artificial Sequence
  Synthetic
guuguauuuucuugcaggggcu

SEQ ID NO: 381271 - RNA, 23 nt, Artificial Sequence
  Synthetic
aguuguauuuucuugcaggggcu

SEQ ID NO: 381272 - RNA, 24 nt, Artificial Sequence
  Synthetic
gaguuguauuuucuugcaggggcu

SEQ ID NO: 381273 - RNA, 18 nt, Artificial Sequence
  Synthetic
gaaacauuaugaggggcu

SEQ ID NO: 381274 - RNA, 19 nt, Artificial Sequence
  Synthetic
ggaaacauuaugaggggcu

SEQ ID NO: 381275 - RNA, 20 nt, Artificial Sequence
  Synthetic
uggaaacauuaugaggggcu

SEQ ID NO: 381276 - RNA, 21 nt, Artificial Sequence
  Synthetic
auggaaacauuaugaggggcu

SEQ ID NO: 381277 - RNA, 22 nt, Artificial Sequence
  Synthetic
gauggaaacauuaugaggggcu

SEQ ID NO: 381278 - RNA, 23 nt, Artificial Sequence
  Synthetic
ugauggaaacauuaugaggggcu

SEQ ID NO: 381279 - RNA, 24 nt, Artificial Sequence
  Synthetic
gugauggaaacauuaugaggggcu

SEQ ID NO: 381280 - RNA, 18 nt, Artificial Sequence
  Synthetic
gcacauagcaggggggcu

SEQ ID NO: 381281 - RNA, 19 nt, Artificial Sequence
  Synthetic
ugcacauagcaggggggcu

SEQ ID NO: 381282 - RNA, 20 nt, Artificial Sequence
  Synthetic
cugcacauagcaggggggcu

SEQ ID NO: 381283 - RNA, 21 nt, Artificial Sequence
  Synthetic
gcugcacauagcaggggggcu

SEQ ID NO: 381284 - RNA, 22 nt, Artificial Sequence
  Synthetic
ggcugcacauagcaggggggcu

SEQ ID NO: 381285 - RNA, 23 nt, Artificial Sequence
  Synthetic
aggcugcacauagcaggggggcu

SEQ ID NO: 381286 - RNA, 24 nt, Artificial Sequence
  Synthetic
uaggcugcacauagcaggggggcu

SEQ ID NO: 381287 - RNA, 18 nt, Artificial Sequence
  Synthetic
ccccgaggauugggggcu

SEQ ID NO: 381288 - RNA, 19 nt, Artificial Sequence
  Synthetic
cccccgaggauugggggcu

SEQ ID NO: 381289 - RNA, 20 nt, Artificial Sequence
  Synthetic
ucccccgaggauugggggcu

SEQ ID NO: 381290 - RNA, 21 nt, Artificial Sequence
  Synthetic
cucccccgaggauugggggcu

SEQ ID NO: 381291 - RNA, 22 nt, Artificial Sequence
  Synthetic
ucucccccgaggauugggggcu

SEQ ID NO: 381292 - RNA, 23 nt, Artificial Sequence
  Synthetic
aucucccccgaggauugggggcu

SEQ ID NO: 381293 - RNA, 24 nt, Artificial Sequence
  Synthetic
aaucucccccgaggauugggggcu

SEQ ID NO: 381294 - RNA, 18 nt, Artificial Sequence
  Synthetic
uaagcugcaaguggggcu

SEQ ID NO: 381295 - RNA, 19 nt, Artificial Sequence
  Synthetic
cuaagcugcaaguggggcu

SEQ ID NO: 381296 - RNA, 20 nt, Artificial Sequence
  Synthetic
ucuaagcugcaaguggggcu

SEQ ID NO: 381297 - RNA, 21 nt, Artificial Sequence
  Synthetic
aucuaagcugcaaguggggcu

SEQ ID NO: 381298 - RNA, 22 nt, Artificial Sequence
  Synthetic
caucuaagcugcaaguggggcu

SEQ ID NO: 381299 - RNA, 23 nt, Artificial Sequence
  Synthetic
acaucuaagcugcaaguggggcu

SEQ ID NO: 381300 - RNA, 24 nt, Artificial Sequence
  Synthetic
cacaucuaagcugcaaguggggcu

SEQ ID NO: 381301 - RNA, 18 nt, Artificial Sequence
  Synthetic
auuaauagugguggggcu

SEQ ID NO: 381302 - RNA, 19 nt, Artificial Sequence
  Synthetic
aauuaauagugguggggcu

SEQ ID NO: 381303 - RNA, 20 nt, Artificial Sequence
  Synthetic
gaauuaauagugguggggcu

SEQ ID NO: 381304 - RNA, 21 nt, Artificial Sequence
  Synthetic
ggaauuaauagugguggggcu

SEQ ID NO: 381305 - RNA, 22 nt, Artificial Sequence
  Synthetic
aggaauuaauagugguggggcu

SEQ ID NO: 381306 - RNA, 23 nt, Artificial Sequence
  Synthetic
gaggaauuaauagugguggggcu

SEQ ID NO: 381307 - RNA, 24 nt, Artificial Sequence
  Synthetic
agaggaauuaauagugguggggcu

SEQ ID NO: 381308 - RNA, 18 nt, Artificial Sequence
  Synthetic
cugaagacuuguggggcu

SEQ ID NO: 381309 - RNA, 19 nt, Artificial Sequence
  Synthetic
ucugaagacuuguggggcu

SEQ ID NO: 381310 - RNA, 20 nt, Artificial Sequence
  Synthetic
cucugaagacuuguggggcu

SEQ ID NO: 381311 - RNA, 21 nt, Artificial Sequence
  Synthetic
ucucugaagacuuguggggcu

SEQ ID NO: 381312 - RNA, 22 nt, Artificial Sequence
  Synthetic
uucucugaagacuuguggggcu

SEQ ID NO: 381313 - RNA, 23 nt, Artificial Sequence
  Synthetic
uuucucugaagacuuguggggcu

SEQ ID NO: 381314 - RNA, 24 nt, Artificial Sequence
  Synthetic
cuuucucugaagacuuguggggcu

SEQ ID NO: 381315 - RNA, 18 nt, Artificial Sequence
  Synthetic
augugaaaucuuggggcu

SEQ ID NO: 381316 - RNA, 19 nt, Artificial Sequence
  Synthetic
gaugugaaaucuuggggcu

SEQ ID NO: 381317 - RNA, 20 nt, Artificial Sequence
  Synthetic
ugaugugaaaucuuggggcu

SEQ ID NO: 381318 - RNA, 21 nt, Artificial Sequence
  Synthetic
augaugugaaaucuuggggcu

SEQ ID NO: 381319 - RNA, 22 nt, Artificial Sequence
  Synthetic
uaugaugugaaaucuuggggcu

SEQ ID NO: 381320 - RNA, 23 nt, Artificial Sequence
  Synthetic
cuaugaugugaaaucuuggggcu

SEQ ID NO: 381321 - RNA, 24 nt, Artificial Sequence
  Synthetic
ucuaugaugugaaaucuuggggcu

SEQ ID NO: 381322 - RNA, 18 nt, Artificial Sequence
  Synthetic
gauuaaaauacaugggcu

SEQ ID NO: 381323 - RNA, 19 nt, Artificial Sequence
  Synthetic
ugauuaaaauacaugggcu

SEQ ID NO: 381324 - RNA, 20 nt, Artificial Sequence
  Synthetic
augauuaaaauacaugggcu

SEQ ID NO: 381325 - RNA, 21 nt, Artificial Sequence
  Synthetic
aaugauuaaaauacaugggcu

SEQ ID NO: 381326 - RNA, 22 nt, Artificial Sequence
  Synthetic
uaaugauuaaaauacaugggcu

SEQ ID NO: 381327 - RNA, 23 nt, Artificial Sequence
  Synthetic
auaaugauuaaaauacaugggcu

SEQ ID NO: 381328 - RNA, 24 nt, Artificial Sequence
  Synthetic
uauaaugauuaaaauacaugggcu

SEQ ID NO: 381329 - RNA, 18 nt, Artificial Sequence
  Synthetic
auacuuuuggcaugggcu

SEQ ID NO: 381330 - RNA, 19 nt, Artificial Sequence
  Synthetic
gauacuuuuggcaugggcu

SEQ ID NO: 381331 - RNA, 20 nt, Artificial Sequence
  Synthetic
ggauacuuuuggcaugggcu

SEQ ID NO: 381332 - RNA, 21 nt, Artificial Sequence
  Synthetic
uggauacuuuuggcaugggcu

SEQ ID NO: 381333 - RNA, 22 nt, Artificial Sequence
  Synthetic
auggauacuuuuggcaugggcu

SEQ ID NO: 381334 - RNA, 23 nt, Artificial Sequence
  Synthetic
aauggauacuuuuggcaugggcu

SEQ ID NO: 381335 - RNA, 24 nt, Artificial Sequence
  Synthetic
caauggauacuuuuggcaugggcu

SEQ ID NO: 381336 - RNA, 18 nt, Artificial Sequence
  Synthetic
gagcacuuacuaugggcu

SEQ ID NO: 381337 - RNA, 19 nt, Artificial Sequence
  Synthetic
ugagcacuuacuaugggcu

SEQ ID NO: 381338 - RNA, 20 nt, Artificial Sequence
  Synthetic
uugagcacuuacuaugggcu

SEQ ID NO: 381339 - RNA, 21 nt, Artificial Sequence
  Synthetic
auugagcacuuacuaugggcu

SEQ ID NO: 381340 - RNA, 22 nt, Artificial Sequence
  Synthetic
cauugagcacuuacuaugggcu

SEQ ID NO: 381341 - RNA, 23 nt, Artificial Sequence
  Synthetic
ccauugagcacuuacuaugggcu

SEQ ID NO: 381342 - RNA, 24 nt, Artificial Sequence
  Synthetic
accauugagcacuuacuaugggcu

SEQ ID NO: 381343 - RNA, 18 nt, Artificial Sequence
  Synthetic
guuuugguucuaugggcu

SEQ ID NO: 381344 - RNA, 19 nt, Artificial Sequence
  Synthetic
aguuuugguucuaugggcu

SEQ ID NO: 381345 - RNA, 20 nt, Artificial Sequence
  Synthetic
aaguuuugguucuaugggcu

SEQ ID NO: 381346 - RNA, 21 nt, Artificial Sequence
  Synthetic
uaaguuuugguucuaugggcu

SEQ ID NO: 381347 - RNA, 22 nt, Artificial Sequence
  Synthetic
guaaguuuugguucuaugggcu

SEQ ID NO: 381348 - RNA, 23 nt, Artificial Sequence
  Synthetic
gguaaguuuugguucuaugggcu

SEQ ID NO: 381349 - RNA, 24 nt, Artificial Sequence
  Synthetic
ugguaaguuuugguucuaugggcu

SEQ ID NO: 381350 - RNA, 18 nt, Artificial Sequence
  Synthetic
uggguuacuuccugggcu

SEQ ID NO: 381351 - RNA, 19 nt, Artificial Sequence
  Synthetic
auggguuacuuccugggcu

SEQ ID NO: 381352 - RNA, 20 nt, Artificial Sequence
  Synthetic
uauggguuacuuccugggcu

SEQ ID NO: 381353 - RNA, 21 nt, Artificial Sequence
  Synthetic
auauggguuacuuccugggcu

SEQ ID NO: 381354 - RNA, 22 nt, Artificial Sequence
  Synthetic
gauauggguuacuuccugggcu

SEQ ID NO: 381355 - RNA, 23 nt, Artificial Sequence
  Synthetic
ggauauggguuacuuccugggcu

SEQ ID NO: 381356 - RNA, 24 nt, Artificial Sequence
  Synthetic
gggauauggguuacuuccugggcu

SEQ ID NO: 381357 - RNA, 18 nt, Artificial Sequence
  Synthetic
uaacuauaccgcugggcu

SEQ ID NO: 381358 - RNA, 19 nt, Artificial Sequence
  Synthetic
auaacuauaccgcugggcu

SEQ ID NO: 381359 - RNA, 20 nt, Artificial Sequence
  Synthetic
aauaacuauaccgcugggcu

SEQ ID NO: 381360 - RNA, 21 nt, Artificial Sequence
  Synthetic
aaauaacuauaccgcugggcu

SEQ ID NO: 381361 - RNA, 22 nt, Artificial Sequence
  Synthetic
aaaauaacuauaccgcugggcu

SEQ ID NO: 381362 - RNA, 23 nt, Artificial Sequence
  Synthetic
aaaaauaacuauaccgcugggcu

SEQ ID NO: 381363 - RNA, 24 nt, Artificial Sequence
  Synthetic
uaaaaauaacuauaccgcugggcu

SEQ ID NO: 381364 - RNA, 18 nt, Artificial Sequence
  Synthetic
agaccgguaaagugggcu

SEQ ID NO: 381365 - RNA, 19 nt, Artificial Sequence
  Synthetic
aagaccgguaaagugggcu

SEQ ID NO: 381366 - RNA, 20 nt, Artificial Sequence
  Synthetic
gaagaccgguaaagugggcu

SEQ ID NO: 381367 - RNA, 21 nt, Artificial Sequence
  Synthetic
agaagaccgguaaagugggcu

SEQ ID NO: 381368 - RNA, 22 nt, Artificial Sequence
  Synthetic
gagaagaccgguaaagugggcu

SEQ ID NO: 381369 - RNA, 23 nt, Artificial Sequence
  Synthetic
ugagaagaccgguaaagugggcu

SEQ ID NO: 381370 - RNA, 24 nt, Artificial Sequence
  Synthetic
augagaagaccgguaaagugggcu

SEQ ID NO: 381371 - RNA, 18 nt, Artificial Sequence
  Synthetic
uaaucaagaacgugggcu

SEQ ID NO: 381372 - RNA, 19 nt, Artificial Sequence
  Synthetic
guaaucaagaacgugggcu

SEQ ID NO: 381373 - RNA, 20 nt, Artificial Sequence
  Synthetic
uguaaucaagaacgugggcu

SEQ ID NO: 381374 - RNA, 21 nt, Artificial Sequence
  Synthetic
auguaaucaagaacgugggcu

SEQ ID NO: 381375 - RNA, 22 nt, Artificial Sequence
  Synthetic
aauguaaucaagaacgugggcu

SEQ ID NO: 381376 - RNA, 23 nt, Artificial Sequence
  Synthetic
aaauguaaucaagaacgugggcu

SEQ ID NO: 381377 - RNA, 24 nt, Artificial Sequence
  Synthetic
caaauguaaucaagaacgugggcu

SEQ ID NO: 381378 - RNA, 18 nt, Artificial Sequence
  Synthetic
ucagcuaaugggugggcu

SEQ ID NO: 381379 - RNA, 19 nt, Artificial Sequence
  Synthetic
gucagcuaaugggugggcu

SEQ ID NO: 381380 - RNA, 20 nt, Artificial Sequence
  Synthetic
agucagcuaaugggugggcu

SEQ ID NO: 381381 - RNA, 21 nt, Artificial Sequence
  Synthetic
cagucagcuaaugggugggcu

SEQ ID NO: 381382 - RNA, 22 nt, Artificial Sequence
  Synthetic
ucagucagcuaaugggugggcu

SEQ ID NO: 381383 - RNA, 23 nt, Artificial Sequence
  Synthetic
uucagucagcuaaugggugggcu

SEQ ID NO: 381384 - RNA, 24 nt, Artificial Sequence
  Synthetic
uuucagucagcuaaugggugggcu

SEQ ID NO: 381385 - RNA, 18 nt, Artificial Sequence
  Synthetic
uucuuaagugugugggcu

SEQ ID NO: 381386 - RNA, 19 nt, Artificial Sequence
  Synthetic
guucuuaagugugugggcu

SEQ ID NO: 381387 - RNA, 20 nt, Artificial Sequence
  Synthetic
aguucuuaagugugugggcu

SEQ ID NO: 381388 - RNA, 21 nt, Artificial Sequence
  Synthetic
uaguucuuaagugugugggcu

SEQ ID NO: 381389 - RNA, 22 nt, Artificial Sequence
  Synthetic
auaguucuuaagugugugggcu

SEQ ID NO: 381390 - RNA, 23 nt, Artificial Sequence
  Synthetic
uauaguucuuaagugugugggcu

SEQ ID NO: 381391 - RNA, 24 nt, Artificial Sequence
  Synthetic
uuauaguucuuaagugugugggcu

SEQ ID NO: 381392 - RNA, 18 nt, Artificial Sequence
  Synthetic
cuaaguuaccaaauggcu

SEQ ID NO: 381393 - RNA, 19 nt, Artificial Sequence
  Synthetic
gcuaaguuaccaaauggcu

SEQ ID NO: 381394 - RNA, 20 nt, Artificial Sequence
  Synthetic
agcuaaguuaccaaauggcu

SEQ ID NO: 381395 - RNA, 21 nt, Artificial Sequence
  Synthetic
aagcuaaguuaccaaauggcu

SEQ ID NO: 381396 - RNA, 22 nt, Artificial Sequence
  Synthetic
caagcuaaguuaccaaauggcu

SEQ ID NO: 381397 - RNA, 23 nt, Artificial Sequence
  Synthetic
ucaagcuaaguuaccaaauggcu

SEQ ID NO: 381398 - RNA, 24 nt, Artificial Sequence
  Synthetic
gucaagcuaaguuaccaaauggcu

SEQ ID NO: 381399 - RNA, 18 nt, Artificial Sequence
  Synthetic
uuuuuaaaaucaauggcu

SEQ ID NO: 381400 - RNA, 19 nt, Artificial Sequence
  Synthetic
uuuuuuaaaaucaauggcu

SEQ ID NO: 381401 - RNA, 20 nt, Artificial Sequence
  Synthetic
auuuuuuaaaaucaauggcu

SEQ ID NO: 381402 - RNA, 21 nt, Artificial Sequence
  Synthetic
uauuuuuuaaaaucaauggcu

SEQ ID NO: 381403 - RNA, 22 nt, Artificial Sequence
  Synthetic
auauuuuuuaaaaucaauggcu

SEQ ID NO: 381404 - RNA, 23 nt, Artificial Sequence
  Synthetic
aauauuuuuuaaaaucaauggcu

SEQ ID NO: 381405 - RNA, 24 nt, Artificial Sequence
  Synthetic
aaauauuuuuuaaaaucaauggcu

SEQ ID NO: 381406 - RNA, 18 nt, Artificial Sequence
  Synthetic
ucagaaaucagaauggcu

SEQ ID NO: 381407 - RNA, 19 nt, Artificial Sequence
  Synthetic
aucagaaaucagaauggcu

SEQ ID NO: 381408 - RNA, 20 nt, Artificial Sequence
  Synthetic
gaucagaaaucagaauggcu

SEQ ID NO: 381409 - RNA, 21 nt, Artificial Sequence
  Synthetic
agaucagaaaucagaauggcu

SEQ ID NO: 381410 - RNA, 22 nt, Artificial Sequence
  Synthetic
cagaucagaaaucagaauggcu

SEQ ID NO: 381411 - RNA, 23 nt, Artificial Sequence
  Synthetic
acagaucagaaaucagaauggcu

SEQ ID NO: 381412 - RNA, 24 nt, Artificial Sequence
  Synthetic
cacagaucagaaaucagaauggcu

SEQ ID NO: 381413 - RNA, 18 nt, Artificial Sequence
  Synthetic
auugagagccuaauggcu

SEQ ID NO: 381414 - RNA, 19 nt, Artificial Sequence
  Synthetic
gauugagagccuaauggcu

SEQ ID NO: 381415 - RNA, 20 nt, Artificial Sequence
  Synthetic
ggauugagagccuaauggcu

SEQ ID NO: 381416 - RNA, 21 nt, Artificial Sequence
  Synthetic
uggauugagagccuaauggcu

SEQ ID NO: 381417 - RNA, 22 nt, Artificial Sequence
  Synthetic
cuggauugagagccuaauggcu

SEQ ID NO: 381418 - RNA, 23 nt, Artificial Sequence
  Synthetic
ccuggauugagagccuaauggcu

SEQ ID NO: 381419 - RNA, 24 nt, Artificial Sequence
  Synthetic
accuggauugagagccuaauggcu

SEQ ID NO: 381420 - RNA, 18 nt, Artificial Sequence
  Synthetic
ucacaguuccacauggcu

SEQ ID NO: 381421 - RNA, 19 nt, Artificial Sequence
  Synthetic
cucacaguuccacauggcu

SEQ ID NO: 381422 - RNA, 20 nt, Artificial Sequence
  Synthetic
acucacaguuccacauggcu

SEQ ID NO: 381423 - RNA, 21 nt, Artificial Sequence
  Synthetic
gacucacaguuccacauggcu

SEQ ID NO: 381424 - RNA, 22 nt, Artificial Sequence
  Synthetic
ugacucacaguuccacauggcu

SEQ ID NO: 381425 - RNA, 23 nt, Artificial Sequence
  Synthetic
uugacucacaguuccacauggcu

SEQ ID NO: 381426 - RNA, 24 nt, Artificial Sequence
  Synthetic
auugacucacaguuccacauggcu

SEQ ID NO: 381427 - RNA, 18 nt, Artificial Sequence
  Synthetic
uggagcuuaaccauggcu

SEQ ID NO: 381428 - RNA, 19 nt, Artificial Sequence
  Synthetic
cuggagcuuaaccauggcu

SEQ ID NO: 381429 - RNA, 20 nt, Artificial Sequence
  Synthetic
gcuggagcuuaaccauggcu

SEQ ID NO: 381430 - RNA, 21 nt, Artificial Sequence
  Synthetic
ugcuggagcuuaaccauggcu

SEQ ID NO: 381431 - RNA, 22 nt, Artificial Sequence
  Synthetic
uugcuggagcuuaaccauggcu

SEQ ID NO: 381432 - RNA, 23 nt, Artificial Sequence
  Synthetic
auugcuggagcuuaaccauggcu

SEQ ID NO: 381433 - RNA, 24 nt, Artificial Sequence
  Synthetic
aauugcuggagcuuaaccauggcu

SEQ ID NO: 381434 - RNA, 18 nt, Artificial Sequence
  Synthetic
ucacaguucagcauggcu

SEQ ID NO: 381435 - RNA, 19 nt, Artificial Sequence
  Synthetic
cucacaguucagcauggcu

SEQ ID NO: 381436 - RNA, 20 nt, Artificial Sequence
  Synthetic
acucacaguucagcauggcu

SEQ ID NO: 381437 - RNA, 21 nt, Artificial Sequence
  Synthetic
gacucacaguucagcauggcu

SEQ ID NO: 381438 - RNA, 22 nt, Artificial Sequence
  Synthetic
ugacucacaguucagcauggcu

SEQ ID NO: 381439 - RNA, 23 nt, Artificial Sequence
  Synthetic
uugacucacaguucagcauggcu

SEQ ID NO: 381440 - RNA, 24 nt, Artificial Sequence
  Synthetic
auugacucacaguucagcauggcu

SEQ ID NO: 381441 - RNA, 18 nt, Artificial Sequence
  Synthetic
ucacugguuugcauggcu

SEQ ID NO: 381442 - RNA, 19 nt, Artificial Sequence
  Synthetic
cucacugguuugcauggcu

SEQ ID NO: 381443 - RNA, 20 nt, Artificial Sequence
  Synthetic
acucacugguuugcauggcu

SEQ ID NO: 381444 - RNA, 21 nt, Artificial Sequence
  Synthetic
gacucacugguuugcauggcu

SEQ ID NO: 381445 - RNA, 22 nt, Artificial Sequence
  Synthetic
ugacucacugguuugcauggcu

SEQ ID NO: 381446 - RNA, 23 nt, Artificial Sequence
  Synthetic
uugacucacugguuugcauggcu

SEQ ID NO: 381447 - RNA, 24 nt, Artificial Sequence
  Synthetic
auugacucacugguuugcauggcu

SEQ ID NO: 381448 - RNA, 18 nt, Artificial Sequence
  Synthetic
aaggauagugagauggcu

SEQ ID NO: 381449 - RNA, 19 nt, Artificial Sequence
  Synthetic
aaaggauagugagauggcu

SEQ ID NO: 381450 - RNA, 20 nt, Artificial Sequence
  Synthetic
caaaggauagugagauggcu

SEQ ID NO: 381451 - RNA, 21 nt, Artificial Sequence
  Synthetic
acaaaggauagugagauggcu

SEQ ID NO: 381452 - RNA, 22 nt, Artificial Sequence
  Synthetic
aacaaaggauagugagauggcu

SEQ ID NO: 381453 - RNA, 23 nt, Artificial Sequence
  Synthetic
gaacaaaggauagugagauggcu

SEQ ID NO: 381454 - RNA, 24 nt, Artificial Sequence
  Synthetic
ugaacaaaggauagugagauggcu

SEQ ID NO: 381455 - RNA, 18 nt, Artificial Sequence
  Synthetic
aagauaaauuggauggcu

SEQ ID NO: 381456 - RNA, 19 nt, Artificial Sequence
  Synthetic
caagauaaauuggauggcu

SEQ ID NO: 381457 - RNA, 20 nt, Artificial Sequence
  Synthetic
gcaagauaaauuggauggcu

SEQ ID NO: 381458 - RNA, 21 nt, Artificial Sequence
  Synthetic
ugcaagauaaauuggauggcu

SEQ ID NO: 381459 - RNA, 22 nt, Artificial Sequence
  Synthetic
augcaagauaaauuggauggcu

SEQ ID NO: 381460 - RNA, 23 nt, Artificial Sequence
  Synthetic
gaugcaagauaaauuggauggcu

SEQ ID NO: 381461 - RNA, 24 nt, Artificial Sequence
  Synthetic
agaugcaagauaaauuggauggcu

SEQ ID NO: 381462 - RNA, 18 nt, Artificial Sequence
  Synthetic
ucacaguucaauauggcu

SEQ ID NO: 381463 - RNA, 19 nt, Artificial Sequence
  Synthetic
cucacaguucaauauggcu

SEQ ID NO: 381464 - RNA, 20 nt, Artificial Sequence
  Synthetic
acucacaguucaauauggcu

SEQ ID NO: 381465 - RNA, 21 nt, Artificial Sequence
  Synthetic
gacucacaguucaauauggcu

SEQ ID NO: 381466 - RNA, 22 nt, Artificial Sequence
  Synthetic
ugacucacaguucaauauggcu

SEQ ID NO: 381467 - RNA, 23 nt, Artificial Sequence
  Synthetic
uugacucacaguucaauauggcu

SEQ ID NO: 381468 - RNA, 24 nt, Artificial Sequence
  Synthetic
auugacucacaguucaauauggcu

SEQ ID NO: 381469 - RNA, 18 nt, Artificial Sequence
  Synthetic
acuauuaaccauauggcu

SEQ ID NO: 381470 - RNA, 19 nt, Artificial Sequence
  Synthetic
aacuauuaaccauauggcu

SEQ ID NO: 381471 - RNA, 20 nt, Artificial Sequence
  Synthetic
caacuauuaaccauauggcu

SEQ ID NO: 381472 - RNA, 21 nt, Artificial Sequence
  Synthetic
acaacuauuaaccauauggcu

SEQ ID NO: 381473 - RNA, 22 nt, Artificial Sequence
  Synthetic
uacaacuauuaaccauauggcu

SEQ ID NO: 381474 - RNA, 23 nt, Artificial Sequence
  Synthetic
uuacaacuauuaaccauauggcu

SEQ ID NO: 381475 - RNA, 24 nt, Artificial Sequence
  Synthetic
uuuacaacuauuaaccauauggcu

SEQ ID NO: 381476 - RNA, 18 nt, Artificial Sequence
  Synthetic
guaaauuauuuuauggcu

SEQ ID NO: 381477 - RNA, 19 nt, Artificial Sequence
  Synthetic
aguaaauuauuuuauggcu

SEQ ID NO: 381478 - RNA, 20 nt, Artificial Sequence
  Synthetic
aaguaaauuauuuuauggcu

SEQ ID NO: 381479 - RNA, 21 nt, Artificial Sequence
  Synthetic
aaaguaaauuauuuuauggcu

SEQ ID NO: 381480 - RNA, 22 nt, Artificial Sequence
  Synthetic
aaaaguaaauuauuuuauggcu

SEQ ID NO: 381481 - RNA, 23 nt, Artificial Sequence
  Synthetic
aaaaaguaaauuauuuuauggcu

SEQ ID NO: 381482 - RNA, 24 nt, Artificial Sequence
  Synthetic
caaaaaguaaauuauuuuauggcu

SEQ ID NO: 381483 - RNA, 18 nt, Artificial Sequence
  Synthetic
uagugucuuugccuggcu

SEQ ID NO: 381484 - RNA, 19 nt, Artificial Sequence
  Synthetic
guagugucuuugccuggcu

SEQ ID NO: 381485 - RNA, 20 nt, Artificial Sequence
  Synthetic
uguagugucuuugccuggcu

SEQ ID NO: 381486 - RNA, 21 nt, Artificial Sequence
  Synthetic
uuguagugucuuugccuggcu

SEQ ID NO: 381487 - RNA, 22 nt, Artificial Sequence
  Synthetic
cuuguagugucuuugccuggcu

SEQ ID NO: 381488 - RNA, 23 nt, Artificial Sequence
  Synthetic
ccuuguagugucuuugccuggcu

SEQ ID NO: 381489 - RNA, 24 nt, Artificial Sequence
  Synthetic
uccuuguagugucuuugccuggcu

SEQ ID NO: 381490 - RNA, 18 nt, Artificial Sequence
  Synthetic
ucugagagcuggcuggcu

SEQ ID NO: 381491 - RNA, 19 nt, Artificial Sequence
  Synthetic
aucugagagcuggcuggcu

SEQ ID NO: 381492 - RNA, 20 nt, Artificial Sequence
  Synthetic
caucugagagcuggcuggcu

SEQ ID NO: 381493 - RNA, 21 nt, Artificial Sequence
  Synthetic
ucaucugagagcuggcuggcu

SEQ ID NO: 381494 - RNA, 22 nt, Artificial Sequence
  Synthetic
uucaucugagagcuggcuggcu

SEQ ID NO: 381495 - RNA, 23 nt, Artificial Sequence
  Synthetic
cuucaucugagagcuggcuggcu

SEQ ID NO: 381496 - RNA, 24 nt, Artificial Sequence
  Synthetic
ccuucaucugagagcuggcuggcu

SEQ ID NO: 381497 - RNA, 18 nt, Artificial Sequence
  Synthetic
agauagccccugcuggcu

SEQ ID NO: 381498 - RNA, 19 nt, Artificial Sequence
  Synthetic
aagauagccccugcuggcu

SEQ ID NO: 381499 - RNA, 20 nt, Artificial Sequence
  Synthetic
gaagauagccccugcuggcu

SEQ ID NO: 381500 - RNA, 21 nt, Artificial Sequence
  Synthetic
ugaagauagccccugcuggcu

SEQ ID NO: 381501 - RNA, 22 nt, Artificial Sequence
  Synthetic
augaagauagccccugcuggcu

SEQ ID NO: 381502 - RNA, 23 nt, Artificial Sequence
  Synthetic
gaugaagauagccccugcuggcu

SEQ ID NO: 381503 - RNA, 24 nt, Artificial Sequence
  Synthetic
agaugaagauagccccugcuggcu

SEQ ID NO: 381504 - RNA, 18 nt, Artificial Sequence
  Synthetic
cguuccugccugcuggcu

SEQ ID NO: 381505 - RNA, 19 nt, Artificial Sequence
  Synthetic
acguuccugccugcuggcu

SEQ ID NO: 381506 - RNA, 20 nt, Artificial Sequence
  Synthetic
aacguuccugccugcuggcu

SEQ ID NO: 381507 - RNA, 21 nt, Artificial Sequence
  Synthetic
aaacguuccugccugcuggcu

SEQ ID NO: 381508 - RNA, 22 nt, Artificial Sequence
  Synthetic
uaaacguuccugccugcuggcu

SEQ ID NO: 381509 - RNA, 23 nt, Artificial Sequence
  Synthetic
uuaaacguuccugccugcuggcu

SEQ ID NO: 381510 - RNA, 24 nt, Artificial Sequence
  Synthetic
cuuaaacguuccugccugcuggcu

SEQ ID NO: 381511 - RNA, 18 nt, Artificial Sequence
  Synthetic
ucuaaauauuuucuggcu

SEQ ID NO: 381512 - RNA, 19 nt, Artificial Sequence
  Synthetic
aucuaaauauuuucuggcu

SEQ ID NO: 381513 - RNA, 20 nt, Artificial Sequence
  Synthetic
aaucuaaauauuuucuggcu

SEQ ID NO: 381514 - RNA, 21 nt, Artificial Sequence
  Synthetic
gaaucuaaauauuuucuggcu

SEQ ID NO: 381515 - RNA, 22 nt, Artificial Sequence
  Synthetic
ugaaucuaaauauuuucuggcu

SEQ ID NO: 381516 - RNA, 23 nt, Artificial Sequence
  Synthetic
gugaaucuaaauauuuucuggcu

SEQ ID NO: 381517 - RNA, 24 nt, Artificial Sequence
  Synthetic
agugaaucuaaauauuuucuggcu

SEQ ID NO: 381518 - RNA, 18 nt, Artificial Sequence
  Synthetic
ucaauccaugaaguggcu

SEQ ID NO: 381519 - RNA, 19 nt, Artificial Sequence
  Synthetic
cucaauccaugaaguggcu

SEQ ID NO: 381520 - RNA, 20 nt, Artificial Sequence
  Synthetic
ccucaauccaugaaguggcu

SEQ ID NO: 381521 - RNA, 21 nt, Artificial Sequence
  Synthetic
accucaauccaugaaguggcu

SEQ ID NO: 381522 - RNA, 22 nt, Artificial Sequence
  Synthetic
uaccucaauccaugaaguggcu

SEQ ID NO: 381523 - RNA, 23 nt, Artificial Sequence
  Synthetic
cuaccucaauccaugaaguggcu

SEQ ID NO: 381524 - RNA, 24 nt, Artificial Sequence
  Synthetic
gcuaccucaauccaugaaguggcu

SEQ ID NO: 381525 - RNA, 18 nt, Artificial Sequence
  Synthetic
cuuggcaaaccaguggcu

SEQ ID NO: 381526 - RNA, 19 nt, Artificial Sequence
  Synthetic
ccuuggcaaaccaguggcu

SEQ ID NO: 381527 - RNA, 20 nt, Artificial Sequence
  Synthetic
uccuuggcaaaccaguggcu

SEQ ID NO: 381528 - RNA, 21 nt, Artificial Sequence
  Synthetic
cuccuuggcaaaccaguggcu

SEQ ID NO: 381529 - RNA, 22 nt, Artificial Sequence
  Synthetic
acuccuuggcaaaccaguggcu

SEQ ID NO: 381530 - RNA, 23 nt, Artificial Sequence
  Synthetic
gacuccuuggcaaaccaguggcu

SEQ ID NO: 381531 - RNA, 24 nt, Artificial Sequence
  Synthetic
agacuccuuggcaaaccaguggcu

SEQ ID NO: 381532 - RNA, 18 nt, Artificial Sequence
  Synthetic
ggugaauuuauaguggcu

SEQ ID NO: 381533 - RNA, 19 nt, Artificial Sequence
  Synthetic
gggugaauuuauaguggcu

SEQ ID NO: 381534 - RNA, 20 nt, Artificial Sequence
  Synthetic
agggugaauuuauaguggcu

SEQ ID NO: 381535 - RNA, 21 nt, Artificial Sequence
  Synthetic
aagggugaauuuauaguggcu

SEQ ID NO: 381536 - RNA, 22 nt, Artificial Sequence
  Synthetic
caagggugaauuuauaguggcu

SEQ ID NO: 381537 - RNA, 23 nt, Artificial Sequence
  Synthetic
ucaagggugaauuuauaguggcu

SEQ ID NO: 381538 - RNA, 24 nt, Artificial Sequence
  Synthetic
uucaagggugaauuuauaguggcu

SEQ ID NO: 381539 - RNA, 18 nt, Artificial Sequence
  Synthetic
uaauauagccuaguggcu

SEQ ID NO: 381540 - RNA, 19 nt, Artificial Sequence
  Synthetic
guaauauagccuaguggcu

SEQ ID NO: 381541 - RNA, 20 nt, Artificial Sequence
  Synthetic
gguaauauagccuaguggcu

SEQ ID NO: 381542 - RNA, 21 nt, Artificial Sequence
  Synthetic
agguaauauagccuaguggcu

SEQ ID NO: 381543 - RNA, 22 nt, Artificial Sequence
  Synthetic
aagguaauauagccuaguggcu

SEQ ID NO: 381544 - RNA, 23 nt, Artificial Sequence
  Synthetic
aaagguaauauagccuaguggcu

SEQ ID NO: 381545 - RNA, 24 nt, Artificial Sequence
  Synthetic
gaaagguaauauagccuaguggcu

SEQ ID NO: 381546 - RNA, 18 nt, Artificial Sequence
  Synthetic
gaacuggaauacguggcu

SEQ ID NO: 381547 - RNA, 19 nt, Artificial Sequence
  Synthetic
ugaacuggaauacguggcu

SEQ ID NO: 381548 - RNA, 20 nt, Artificial Sequence
  Synthetic
cugaacuggaauacguggcu

SEQ ID NO: 381549 - RNA, 21 nt, Artificial Sequence
  Synthetic
ccugaacuggaauacguggcu

SEQ ID NO: 381550 - RNA, 22 nt, Artificial Sequence
  Synthetic
cccugaacuggaauacguggcu

SEQ ID NO: 381551 - RNA, 23 nt, Artificial Sequence
  Synthetic
ucccugaacuggaauacguggcu

SEQ ID NO: 381552 - RNA, 24 nt, Artificial Sequence
  Synthetic
gucccugaacuggaauacguggcu

SEQ ID NO: 381553 - RNA, 18 nt, Artificial Sequence
  Synthetic
gcuuuuaaaaauguggcu

SEQ ID NO: 381554 - RNA, 19 nt, Artificial Sequence
  Synthetic
ugcuuuuaaaaauguggcu

SEQ ID NO: 381555 - RNA, 20 nt, Artificial Sequence
  Synthetic
uugcuuuuaaaaauguggcu

SEQ ID NO: 381556 - RNA, 21 nt, Artificial Sequence
  Synthetic
uuugcuuuuaaaaauguggcu

SEQ ID NO: 381557 - RNA, 22 nt, Artificial Sequence
  Synthetic
uuuugcuuuuaaaaauguggcu

SEQ ID NO: 381558 - RNA, 23 nt, Artificial Sequence
  Synthetic
auuuugcuuuuaaaaauguggcu

SEQ ID NO: 381559 - RNA, 24 nt, Artificial Sequence
  Synthetic
cauuuugcuuuuaaaaauguggcu

SEQ ID NO: 381560 - RNA, 18 nt, Artificial Sequence
  Synthetic
ucacaguucuguguggcu

SEQ ID NO: 381561 - RNA, 19 nt, Artificial Sequence
  Synthetic
cucacaguucuguguggcu

SEQ ID NO: 381562 - RNA, 20 nt, Artificial Sequence
  Synthetic
acucacaguucuguguggcu

SEQ ID NO: 381563 - RNA, 21 nt, Artificial Sequence
  Synthetic
gacucacaguucuguguggcu

SEQ ID NO: 381564 - RNA, 22 nt, Artificial Sequence
  Synthetic
ugacucacaguucuguguggcu

SEQ ID NO: 381565 - RNA, 23 nt, Artificial Sequence
  Synthetic
uugacucacaguucuguguggcu

SEQ ID NO: 381566 - RNA, 24 nt, Artificial Sequence
  Synthetic
guugacucacaguucuguguggcu

SEQ ID NO: 381567 - RNA, 18 nt, Artificial Sequence
  Synthetic
ccugcugaccuuguggcu

SEQ ID NO: 381568 - RNA, 19 nt, Artificial Sequence
  Synthetic
cccugcugaccuuguggcu

SEQ ID NO: 381569 - RNA, 20 nt, Artificial Sequence
  Synthetic
acccugcugaccuuguggcu

SEQ ID NO: 381570 - RNA, 21 nt, Artificial Sequence
  Synthetic
uacccugcugaccuuguggcu

SEQ ID NO: 381571 - RNA, 22 nt, Artificial Sequence
  Synthetic
cuacccugcugaccuuguggcu

SEQ ID NO: 381572 - RNA, 23 nt, Artificial Sequence
  Synthetic
ucuacccugcugaccuuguggcu

SEQ ID NO: 381573 - RNA, 24 nt, Artificial Sequence
  Synthetic
cucuacccugcugaccuuguggcu

SEQ ID NO: 381574 - RNA, 18 nt, Artificial Sequence
  Synthetic
gcaagguguuuuguggcu

SEQ ID NO: 381575 - RNA, 19 nt, Artificial Sequence
  Synthetic
agcaagguguuuuguggcu

SEQ ID NO: 381576 - RNA, 20 nt, Artificial Sequence
  Synthetic
cagcaagguguuuuguggcu

SEQ ID NO: 381577 - RNA, 21 nt, Artificial Sequence
  Synthetic
acagcaagguguuuuguggcu

SEQ ID NO: 381578 - RNA, 22 nt, Artificial Sequence
  Synthetic
aacagcaagguguuuuguggcu

SEQ ID NO: 381579 - RNA, 23 nt, Artificial Sequence
  Synthetic
uaacagcaagguguuuuguggcu

SEQ ID NO: 381580 - RNA, 24 nt, Artificial Sequence
  Synthetic
guaacagcaagguguuuuguggcu

SEQ ID NO: 381581 - RNA, 18 nt, Artificial Sequence
  Synthetic
ccauucuggacauuggcu

SEQ ID NO: 381582 - RNA, 19 nt, Artificial Sequence
  Synthetic
accauucuggacauuggcu

SEQ ID NO: 381583 - RNA, 20 nt, Artificial Sequence
  Synthetic
uaccauucuggacauuggcu

SEQ ID NO: 381584 - RNA, 21 nt, Artificial Sequence
  Synthetic
auaccauucuggacauuggcu

SEQ ID NO: 381585 - RNA, 22 nt, Artificial Sequence
  Synthetic
aauaccauucuggacauuggcu

SEQ ID NO: 381586 - RNA, 23 nt, Artificial Sequence
  Synthetic
aaauaccauucuggacauuggcu

SEQ ID NO: 381587 - RNA, 24 nt, Artificial Sequence
  Synthetic
gaaauaccauucuggacauuggcu

SEQ ID NO: 381588 - RNA, 18 nt, Artificial Sequence
  Synthetic
acauaucucagauuggcu

SEQ ID NO: 381589 - RNA, 19 nt, Artificial Sequence
  Synthetic
cacauaucucagauuggcu

SEQ ID NO: 381590 - RNA, 20 nt, Artificial Sequence
  Synthetic
acacauaucucagauuggcu

SEQ ID NO: 381591 - RNA, 21 nt, Artificial Sequence
  Synthetic
uacacauaucucagauuggcu

SEQ ID NO: 381592 - RNA, 22 nt, Artificial Sequence
  Synthetic
auacacauaucucagauuggcu

SEQ ID NO: 381593 - RNA, 23 nt, Artificial Sequence
  Synthetic
uauacacauaucucagauuggcu

SEQ ID NO: 381594 - RNA, 24 nt, Artificial Sequence
  Synthetic
auauacacauaucucagauuggcu

SEQ ID NO: 381595 - RNA, 18 nt, Artificial Sequence
  Synthetic
uuacgguuccacuuggcu

SEQ ID NO: 381596 - RNA, 19 nt, Artificial Sequence
  Synthetic
cuuacgguuccacuuggcu

SEQ ID NO: 381597 - RNA, 20 nt, Artificial Sequence
  Synthetic
acuuacgguuccacuuggcu

SEQ ID NO: 381598 - RNA, 21 nt, Artificial Sequence
  Synthetic
gacuuacgguuccacuuggcu

SEQ ID NO: 381599 - RNA, 22 nt, Artificial Sequence
  Synthetic
ggacuuacgguuccacuuggcu

SEQ ID NO: 381600 - RNA, 23 nt, Artificial Sequence
  Synthetic
uggacuuacgguuccacuuggcu

SEQ ID NO: 381601 - RNA, 24 nt, Artificial Sequence
  Synthetic
auggacuuacgguuccacuuggcu

SEQ ID NO: 381602 - RNA, 18 nt, Artificial Sequence
  Synthetic
cagguuuuagacuuggcu

SEQ ID NO: 381603 - RNA, 19 nt, Artificial Sequence
  Synthetic
gcagguuuuagacuuggcu

SEQ ID NO: 381604 - RNA, 20 nt, Artificial Sequence
  Synthetic
agcagguuuuagacuuggcu

SEQ ID NO: 381605 - RNA, 21 nt, Artificial Sequence
  Synthetic
uagcagguuuuagacuuggcu

SEQ ID NO: 381606 - RNA, 22 nt, Artificial Sequence
  Synthetic
guagcagguuuuagacuuggcu

SEQ ID NO: 381607 - RNA, 23 nt, Artificial Sequence
  Synthetic
aguagcagguuuuagacuuggcu

SEQ ID NO: 381608 - RNA, 24 nt, Artificial Sequence
  Synthetic
aaguagcagguuuuagacuuggcu

SEQ ID NO: 381609 - RNA, 18 nt, Artificial Sequence
  Synthetic
gacuuagggcccuuggcu

SEQ ID NO: 381610 - RNA, 19 nt, Artificial Sequence
  Synthetic
ggacuuagggcccuuggcu

SEQ ID NO: 381611 - RNA, 20 nt, Artificial Sequence
  Synthetic
gggacuuagggcccuuggcu

SEQ ID NO: 381612 - RNA, 21 nt, Artificial Sequence
  Synthetic
agggacuuagggcccuuggcu

SEQ ID NO: 381613 - RNA, 22 nt, Artificial Sequence
  Synthetic
aagggacuuagggcccuuggcu

SEQ ID NO: 381614 - RNA, 23 nt, Artificial Sequence
  Synthetic
aaagggacuuagggcccuuggcu

SEQ ID NO: 381615 - RNA, 24 nt, Artificial Sequence
  Synthetic
caaagggacuuagggcccuuggcu

SEQ ID NO: 381616 - RNA, 18 nt, Artificial Sequence
  Synthetic
acaguuaagagcuuggcu

SEQ ID NO: 381617 - RNA, 19 nt, Artificial Sequence
  Synthetic
cacaguuaagagcuuggcu

SEQ ID NO: 381618 - RNA, 20 nt, Artificial Sequence
  Synthetic
acacaguuaagagcuuggcu

SEQ ID NO: 381619 - RNA, 21 nt, Artificial Sequence
  Synthetic
gacacaguuaagagcuuggcu

SEQ ID NO: 381620 - RNA, 22 nt, Artificial Sequence
  Synthetic
agacacaguuaagagcuuggcu

SEQ ID NO: 381621 - RNA, 23 nt, Artificial Sequence
  Synthetic
cagacacaguuaagagcuuggcu

SEQ ID NO: 381622 - RNA, 24 nt, Artificial Sequence
  Synthetic
ucagacacaguuaagagcuuggcu

SEQ ID NO: 381623 - RNA, 18 nt, Artificial Sequence
  Synthetic
agauguguacauuuggcu

SEQ ID NO: 381624 - RNA, 19 nt, Artificial Sequence
  Synthetic
aagauguguacauuuggcu

SEQ ID NO: 381625 - RNA, 20 nt, Artificial Sequence
  Synthetic
uaagauguguacauuuggcu

SEQ ID NO: 381626 - RNA, 21 nt, Artificial Sequence
  Synthetic
auaagauguguacauuuggcu

SEQ ID NO: 381627 - RNA, 22 nt, Artificial Sequence
  Synthetic
cauaagauguguacauuuggcu

SEQ ID NO: 381628 - RNA, 23 nt, Artificial Sequence
  Synthetic
ucauaagauguguacauuuggcu

SEQ ID NO: 381629 - RNA, 24 nt, Artificial Sequence
  Synthetic
gucauaagauguguacauuuggcu

SEQ ID NO: 381630 - RNA, 18 nt, Artificial Sequence
  Synthetic
aaaauauguccuuuggcu

SEQ ID NO: 381631 - RNA, 19 nt, Artificial Sequence
  Synthetic
caaaauauguccuuuggcu

SEQ ID NO: 381632 - RNA, 20 nt, Artificial Sequence
  Synthetic
gcaaaauauguccuuuggcu

SEQ ID NO: 381633 - RNA, 21 nt, Artificial Sequence
  Synthetic
agcaaaauauguccuuuggcu

SEQ ID NO: 381634 - RNA, 22 nt, Artificial Sequence
  Synthetic
uagcaaaauauguccuuuggcu

SEQ ID NO: 381635 - RNA, 23 nt, Artificial Sequence
  Synthetic
uuagcaaaauauguccuuuggcu

SEQ ID NO: 381636 - RNA, 24 nt, Artificial Sequence
  Synthetic
cuuagcaaaauauguccuuuggcu

SEQ ID NO: 381637 - RNA, 18 nt, Artificial Sequence
  Synthetic
cuggauuaggcuuuggcu

SEQ ID NO: 381638 - RNA, 19 nt, Artificial Sequence
  Synthetic
ucuggauuaggcuuuggcu

SEQ ID NO: 381639 - RNA, 20 nt, Artificial Sequence
  Synthetic
cucuggauuaggcuuuggcu

SEQ ID NO: 381640 - RNA, 21 nt, Artificial Sequence
  Synthetic
gcucuggauuaggcuuuggcu

SEQ ID NO: 381641 - RNA, 22 nt, Artificial Sequence
  Synthetic
ugcucuggauuaggcuuuggcu

SEQ ID NO: 381642 - RNA, 23 nt, Artificial Sequence
  Synthetic
uugcucuggauuaggcuuuggcu

SEQ ID NO: 381643 - RNA, 24 nt, Artificial Sequence
  Synthetic
cuugcucuggauuaggcuuuggcu

SEQ ID NO: 381644 - RNA, 18 nt, Artificial Sequence
  Synthetic
uuugguacaaguuuggcu

SEQ ID NO: 381645 - RNA, 19 nt, Artificial Sequence
  Synthetic
uuuugguacaaguuuggcu

SEQ ID NO: 381646 - RNA, 20 nt, Artificial Sequence
  Synthetic
cuuuugguacaaguuuggcu

SEQ ID NO: 381647 - RNA, 21 nt, Artificial Sequence
  Synthetic
acuuuugguacaaguuuggcu

SEQ ID NO: 381648 - RNA, 22 nt, Artificial Sequence
  Synthetic
gacuuuugguacaaguuuggcu

SEQ ID NO: 381649 - RNA, 23 nt, Artificial Sequence
  Synthetic
ugacuuuugguacaaguuuggcu

SEQ ID NO: 381650 - RNA, 24 nt, Artificial Sequence
  Synthetic
augacuuuugguacaaguuuggcu

SEQ ID NO: 381651 - RNA, 18 nt, Artificial Sequence
  Synthetic
ggagaacaaaaaaaugcu

SEQ ID NO: 381652 - RNA, 19 nt, Artificial Sequence
  Synthetic
aggagaacaaaaaaaugcu

SEQ ID NO: 381653 - RNA, 20 nt, Artificial Sequence
  Synthetic
gaggagaacaaaaaaaugcu

SEQ ID NO: 381654 - RNA, 21 nt, Artificial Sequence
  Synthetic
agaggagaacaaaaaaaugcu

SEQ ID NO: 381655 - RNA, 22 nt, Artificial Sequence
  Synthetic
aagaggagaacaaaaaaaugcu

SEQ ID NO: 381656 - RNA, 23 nt, Artificial Sequence
  Synthetic
aaagaggagaacaaaaaaaugcu

SEQ ID NO: 381657 - RNA, 24 nt, Artificial Sequence
  Synthetic
gaaagaggagaacaaaaaaaugcu

SEQ ID NO: 381658 - RNA, 18 nt, Artificial Sequence
  Synthetic
uccaguuaugaaaaugcu

SEQ ID NO: 381659 - RNA, 19 nt, Artificial Sequence
  Synthetic
auccaguuaugaaaaugcu

SEQ ID NO: 381660 - RNA, 20 nt, Artificial Sequence
  Synthetic
cauccaguuaugaaaaugcu

SEQ ID NO: 381661 - RNA, 21 nt, Artificial Sequence
  Synthetic
ucauccaguuaugaaaaugcu

SEQ ID NO: 381662 - RNA, 22 nt, Artificial Sequence
  Synthetic
aucauccaguuaugaaaaugcu

SEQ ID NO: 381663 - RNA, 23 nt, Artificial Sequence
  Synthetic
gaucauccaguuaugaaaaugcu

SEQ ID NO: 381664 - RNA, 24 nt, Artificial Sequence
  Synthetic
agaucauccaguuaugaaaaugcu

SEQ ID NO: 381665 - RNA, 18 nt, Artificial Sequence
  Synthetic
uacagacaagcaaaugcu

SEQ ID NO: 381666 - RNA, 19 nt, Artificial Sequence
  Synthetic
uuacagacaagcaaaugcu

SEQ ID NO: 381667 - RNA, 20 nt, Artificial Sequence
  Synthetic
uuuacagacaagcaaaugcu

SEQ ID NO: 381668 - RNA, 21 nt, Artificial Sequence
  Synthetic
cuuuacagacaagcaaaugcu

SEQ ID NO: 381669 - RNA, 22 nt, Artificial Sequence
  Synthetic
ccuuuacagacaagcaaaugcu

SEQ ID NO: 381670 - RNA, 23 nt, Artificial Sequence
  Synthetic
uccuuuacagacaagcaaaugcu

SEQ ID NO: 381671 - RNA, 24 nt, Artificial Sequence
  Synthetic
auccuuuacagacaagcaaaugcu

SEQ ID NO: 381672 - RNA, 18 nt, Artificial Sequence
  Synthetic
auuuuaaaccacaaugcu

SEQ ID NO: 381673 - RNA, 19 nt, Artificial Sequence
  Synthetic
uauuuuaaaccacaaugcu

SEQ ID NO: 381674 - RNA, 20 nt, Artificial Sequence
  Synthetic
auauuuuaaaccacaaugcu

SEQ ID NO: 381675 - RNA, 21 nt, Artificial Sequence
  Synthetic
aauauuuuaaaccacaaugcu

SEQ ID NO: 381676 - RNA, 22 nt, Artificial Sequence
  Synthetic
gaauauuuuaaaccacaaugcu

SEQ ID NO: 381677 - RNA, 23 nt, Artificial Sequence
  Synthetic
ugaauauuuuaaaccacaaugcu

SEQ ID NO: 381678 - RNA, 24 nt, Artificial Sequence
  Synthetic
uugaauauuuuaaaccacaaugcu

SEQ ID NO: 381679 - RNA, 18 nt, Artificial Sequence
  Synthetic
ggcuauuuugacaaugcu

SEQ ID NO: 381680 - RNA, 19 nt, Artificial Sequence
  Synthetic
uggcuauuuugacaaugcu

SEQ ID NO: 381681 - RNA, 20 nt, Artificial Sequence
  Synthetic
uuggcuauuuugacaaugcu

SEQ ID NO: 381682 - RNA, 21 nt, Artificial Sequence
  Synthetic
auuggcuauuuugacaaugcu

SEQ ID NO: 381683 - RNA, 22 nt, Artificial Sequence
  Synthetic
cauuggcuauuuugacaaugcu

SEQ ID NO: 381684 - RNA, 23 nt, Artificial Sequence
  Synthetic
ucauuggcuauuuugacaaugcu

SEQ ID NO: 381685 - RNA, 24 nt, Artificial Sequence
  Synthetic
uucauuggcuauuuugacaaugcu

SEQ ID NO: 381686 - RNA, 18 nt, Artificial Sequence
  Synthetic
agcuaaaaacagaaugcu

SEQ ID NO: 381687 - RNA, 19 nt, Artificial Sequence
  Synthetic
aagcuaaaaacagaaugcu

SEQ ID NO: 381688 - RNA, 20 nt, Artificial Sequence
  Synthetic
gaagcuaaaaacagaaugcu

SEQ ID NO: 381689 - RNA, 21 nt, Artificial Sequence
  Synthetic
ugaagcuaaaaacagaaugcu

SEQ ID NO: 381690 - RNA, 22 nt, Artificial Sequence
  Synthetic
gugaagcuaaaaacagaaugcu

SEQ ID NO: 381691 - RNA, 23 nt, Artificial Sequence
  Synthetic
ugugaagcuaaaaacagaaugcu

SEQ ID NO: 381692 - RNA, 24 nt, Artificial Sequence
  Synthetic
augugaagcuaaaaacagaaugcu

SEQ ID NO: 381693 - RNA, 18 nt, Artificial Sequence
  Synthetic
ugaacugaacugaaugcu

SEQ ID NO: 381694 - RNA, 19 nt, Artificial Sequence
  Synthetic
cugaacugaacugaaugcu

SEQ ID NO: 381695 - RNA, 20 nt, Artificial Sequence
  Synthetic
ucugaacugaacugaaugcu

SEQ ID NO: 381696 - RNA, 21 nt, Artificial Sequence
  Synthetic
uucugaacugaacugaaugcu

SEQ ID NO: 381697 - RNA, 22 nt, Artificial Sequence
  Synthetic
cuucugaacugaacugaaugcu

SEQ ID NO: 381698 - RNA, 23 nt, Artificial Sequence
  Synthetic
ucuucugaacugaacugaaugcu

SEQ ID NO: 381699 - RNA, 24 nt, Artificial Sequence
  Synthetic
aucuucugaacugaacugaaugcu

SEQ ID NO: 381700 - RNA, 18 nt, Artificial Sequence
  Synthetic
cagcuuguggugaaugcu

SEQ ID NO: 381701 - RNA, 19 nt, Artificial Sequence
  Synthetic
ucagcuuguggugaaugcu

SEQ ID NO: 381702 - RNA, 20 nt, Artificial Sequence
  Synthetic
aucagcuuguggugaaugcu

SEQ ID NO: 381703 - RNA, 21 nt, Artificial Sequence
  Synthetic
caucagcuuguggugaaugcu

SEQ ID NO: 381704 - RNA, 22 nt, Artificial Sequence
  Synthetic
ccaucagcuuguggugaaugcu

SEQ ID NO: 381705 - RNA, 23 nt, Artificial Sequence
  Synthetic
uccaucagcuuguggugaaugcu

SEQ ID NO: 381706 - RNA, 24 nt, Artificial Sequence
  Synthetic
uuccaucagcuuguggugaaugcu

SEQ ID NO: 381707 - RNA, 18 nt, Artificial Sequence
  Synthetic
uacaugucugugaaugcu

SEQ ID NO: 381708 - RNA, 19 nt, Artificial Sequence
  Synthetic
uuacaugucugugaaugcu

SEQ ID NO: 381709 - RNA, 20 nt, Artificial Sequence
  Synthetic
cuuacaugucugugaaugcu

SEQ ID NO: 381710 - RNA, 21 nt, Artificial Sequence
  Synthetic
acuuacaugucugugaaugcu

SEQ ID NO: 381711 - RNA, 22 nt, Artificial Sequence
  Synthetic
uacuuacaugucugugaaugcu

SEQ ID NO: 381712 - RNA, 23 nt, Artificial Sequence
  Synthetic
uuacuuacaugucugugaaugcu

SEQ ID NO: 381713 - RNA, 24 nt, Artificial Sequence
  Synthetic
uuuacuuacaugucugugaaugcu

SEQ ID NO: 381714 - RNA, 18 nt, Artificial Sequence
  Synthetic
aauacuaaauugaaugcu

SEQ ID NO: 381715 - RNA, 19 nt, Artificial Sequence
  Synthetic
gaauacuaaauugaaugcu

SEQ ID NO: 381716 - RNA, 20 nt, Artificial Sequence
  Synthetic
ugaauacuaaauugaaugcu

SEQ ID NO: 381717 - RNA, 21 nt, Artificial Sequence
  Synthetic
augaauacuaaauugaaugcu

SEQ ID NO: 381718 - RNA, 22 nt, Artificial Sequence
  Synthetic
uaugaauacuaaauugaaugcu

SEQ ID NO: 381719 - RNA, 23 nt, Artificial Sequence
  Synthetic
cuaugaauacuaaauugaaugcu

SEQ ID NO: 381720 - RNA, 24 nt, Artificial Sequence
  Synthetic
ucuaugaauacuaaauugaaugcu

SEQ ID NO: 381721 - RNA, 18 nt, Artificial Sequence
  Synthetic
auggcacaaaauaaugcu

SEQ ID NO: 381722 - RNA, 19 nt, Artificial Sequence
  Synthetic
aauggcacaaaauaaugcu

SEQ ID NO: 381723 - RNA, 20 nt, Artificial Sequence
  Synthetic
aaauggcacaaaauaaugcu

SEQ ID NO: 381724 - RNA, 21 nt, Artificial Sequence
  Synthetic
gaaauggcacaaaauaaugcu

SEQ ID NO: 381725 - RNA, 22 nt, Artificial Sequence
  Synthetic
agaaauggcacaaaauaaugcu

SEQ ID NO: 381726 - RNA, 23 nt, Artificial Sequence
  Synthetic
aagaaauggcacaaaauaaugcu

SEQ ID NO: 381727 - RNA, 24 nt, Artificial Sequence
  Synthetic
aaagaaauggcacaaaauaaugcu

SEQ ID NO: 381728 - RNA, 18 nt, Artificial Sequence
  Synthetic
accucugacuauaaugcu

SEQ ID NO: 381729 - RNA, 19 nt, Artificial Sequence
  Synthetic
aaccucugacuauaaugcu

SEQ ID NO: 381730 - RNA, 20 nt, Artificial Sequence
  Synthetic
gaaccucugacuauaaugcu

SEQ ID NO: 381731 - RNA, 21 nt, Artificial Sequence
  Synthetic
agaaccucugacuauaaugcu

SEQ ID NO: 381732 - RNA, 22 nt, Artificial Sequence
  Synthetic
gagaaccucugacuauaaugcu

SEQ ID NO: 381733 - RNA, 23 nt, Artificial Sequence
  Synthetic
ugagaaccucugacuauaaugcu

SEQ ID NO: 381734 - RNA, 24 nt, Artificial Sequence
  Synthetic
gugagaaccucugacuauaaugcu

SEQ ID NO: 381735 - RNA, 18 nt, Artificial Sequence
  Synthetic
aacugucaugcuaaugcu

SEQ ID NO: 381736 - RNA, 19 nt, Artificial Sequence
  Synthetic
aaacugucaugcuaaugcu

SEQ ID NO: 381737 - RNA, 20 nt, Artificial Sequence
  Synthetic
aaaacugucaugcuaaugcu

SEQ ID NO: 381738 - RNA, 21 nt, Artificial Sequence
  Synthetic
caaaacugucaugcuaaugcu

SEQ ID NO: 381739 - RNA, 22 nt, Artificial Sequence
  Synthetic
ucaaaacugucaugcuaaugcu

SEQ ID NO: 381740 - RNA, 23 nt, Artificial Sequence
  Synthetic
aucaaaacugucaugcuaaugcu

SEQ ID NO: 381741 - RNA, 24 nt, Artificial Sequence
  Synthetic
caucaaaacugucaugcuaaugcu

SEQ ID NO: 381742 - RNA, 18 nt, Artificial Sequence
  Synthetic
ucagaaggcuguaaugcu

SEQ ID NO: 381743 - RNA, 19 nt, Artificial Sequence
  Synthetic
aucagaaggcuguaaugcu

SEQ ID NO: 381744 - RNA, 20 nt, Artificial Sequence
  Synthetic
uaucagaaggcuguaaugcu

SEQ ID NO: 381745 - RNA, 21 nt, Artificial Sequence
  Synthetic
uuaucagaaggcuguaaugcu

SEQ ID NO: 381746 - RNA, 22 nt, Artificial Sequence
  Synthetic
auuaucagaaggcuguaaugcu

SEQ ID NO: 381747 - RNA, 23 nt, Artificial Sequence
  Synthetic
aauuaucagaaggcuguaaugcu

SEQ ID NO: 381748 - RNA, 24 nt, Artificial Sequence
  Synthetic
uaauuaucagaaggcuguaaugcu

SEQ ID NO: 381749 - RNA, 18 nt, Artificial Sequence
  Synthetic
aacucuucuuguaaugcu

SEQ ID NO: 381750 - RNA, 19 nt, Artificial Sequence
  Synthetic
gaacucuucuuguaaugcu

SEQ ID NO: 381751 - RNA, 20 nt, Artificial Sequence
  Synthetic
ugaacucuucuuguaaugcu

SEQ ID NO: 381752 - RNA, 21 nt, Artificial Sequence
  Synthetic
gugaacucuucuuguaaugcu

SEQ ID NO: 381753 - RNA, 22 nt, Artificial Sequence
  Synthetic
agugaacucuucuuguaaugcu

SEQ ID NO: 381754 - RNA, 23 nt, Artificial Sequence
  Synthetic
aagugaacucuucuuguaaugcu

SEQ ID NO: 381755 - RNA, 24 nt, Artificial Sequence
  Synthetic
caagugaacucuucuuguaaugcu

SEQ ID NO: 381756 - RNA, 18 nt, Artificial Sequence
  Synthetic
uauuacaacauuaaugcu

SEQ ID NO: 381757 - RNA, 19 nt, Artificial Sequence
  Synthetic
uuauuacaacauuaaugcu

SEQ ID NO: 381758 - RNA, 20 nt, Artificial Sequence
  Synthetic
auuauuacaacauuaaugcu

SEQ ID NO: 381759 - RNA, 21 nt, Artificial Sequence
  Synthetic
aauuauuacaacauuaaugcu

SEQ ID NO: 381760 - RNA, 22 nt, Artificial Sequence
  Synthetic
gaauuauuacaacauuaaugcu

SEQ ID NO: 381761 - RNA, 23 nt, Artificial Sequence
  Synthetic
ggaauuauuacaacauuaaugcu

SEQ ID NO: 381762 - RNA, 24 nt, Artificial Sequence
  Synthetic
gggaauuauuacaacauuaaugcu

SEQ ID NO: 381763 - RNA, 18 nt, Artificial Sequence
  Synthetic
uaguauuaucuuaaugcu

SEQ ID NO: 381764 - RNA, 19 nt, Artificial Sequence
  Synthetic
uuaguauuaucuuaaugcu

SEQ ID NO: 381765 - RNA, 20 nt, Artificial Sequence
  Synthetic
auuaguauuaucuuaaugcu

SEQ ID NO: 381766 - RNA, 21 nt, Artificial Sequence
  Synthetic
aauuaguauuaucuuaaugcu

SEQ ID NO: 381767 - RNA, 22 nt, Artificial Sequence
  Synthetic
caauuaguauuaucuuaaugcu

SEQ ID NO: 381768 - RNA, 23 nt, Artificial Sequence
  Synthetic
acaauuaguauuaucuuaaugcu

SEQ ID NO: 381769 - RNA, 24 nt, Artificial Sequence
  Synthetic
aacaauuaguauuaucuuaaugcu

SEQ ID NO: 381770 - RNA, 18 nt, Artificial Sequence
  Synthetic
guaaaauuucuuaaugcu

SEQ ID NO: 381771 - RNA, 19 nt, Artificial Sequence
  Synthetic
aguaaaauuucuuaaugcu

SEQ ID NO: 381772 - RNA, 20 nt, Artificial Sequence
  Synthetic
aaguaaaauuucuuaaugcu

SEQ ID NO: 381773 - RNA, 21 nt, Artificial Sequence
  Synthetic
aaaguaaaauuucuuaaugcu

SEQ ID NO: 381774 - RNA, 22 nt, Artificial Sequence
  Synthetic
gaaaguaaaauuucuuaaugcu

SEQ ID NO: 381775 - RNA, 23 nt, Artificial Sequence
  Synthetic
ugaaaguaaaauuucuuaaugcu

SEQ ID NO: 381776 - RNA, 24 nt, Artificial Sequence
  Synthetic
gugaaaguaaaauuucuuaaugcu

SEQ ID NO: 381777 - RNA, 18 nt, Artificial Sequence
  Synthetic
gcuuaccuuaaacaugcu

SEQ ID NO: 381778 - RNA, 19 nt, Artificial Sequence
  Synthetic
agcuuaccuuaaacaugcu

SEQ ID NO: 381779 - RNA, 20 nt, Artificial Sequence
  Synthetic
uagcuuaccuuaaacaugcu

SEQ ID NO: 381780 - RNA, 21 nt, Artificial Sequence
  Synthetic
cuagcuuaccuuaaacaugcu

SEQ ID NO: 381781 - RNA, 22 nt, Artificial Sequence
  Synthetic
ccuagcuuaccuuaaacaugcu

SEQ ID NO: 381782 - RNA, 23 nt, Artificial Sequence
  Synthetic
gccuagcuuaccuuaaacaugcu

SEQ ID NO: 381783 - RNA, 24 nt, Artificial Sequence
  Synthetic
agccuagcuuaccuuaaacaugcu

SEQ ID NO: 381784 - RNA, 18 nt, Artificial Sequence
  Synthetic
accuuuagccaccaugcu

SEQ ID NO: 381785 - RNA, 19 nt, Artificial Sequence
  Synthetic
aaccuuuagccaccaugcu

SEQ ID NO: 381786 - RNA, 20 nt, Artificial Sequence
  Synthetic
aaaccuuuagccaccaugcu

SEQ ID NO: 381787 - RNA, 21 nt, Artificial Sequence
  Synthetic
aaaaccuuuagccaccaugcu

SEQ ID NO: 381788 - RNA, 22 nt, Artificial Sequence
  Synthetic
gaaaaccuuuagccaccaugcu

SEQ ID NO: 381789 - RNA, 23 nt, Artificial Sequence
  Synthetic
ugaaaaccuuuagccaccaugcu

SEQ ID NO: 381790 - RNA, 24 nt, Artificial Sequence
  Synthetic
uugaaaaccuuuagccaccaugcu

SEQ ID NO: 381791 - RNA, 18 nt, Artificial Sequence
  Synthetic
aaaauuuaaaagcaugcu

SEQ ID NO: 381792 - RNA, 19 nt, Artificial Sequence
  Synthetic
aaaaauuuaaaagcaugcu

SEQ ID NO: 381793 - RNA, 20 nt, Artificial Sequence
  Synthetic
aaaaaauuuaaaagcaugcu

SEQ ID NO: 381794 - RNA, 21 nt, Artificial Sequence
  Synthetic
aaaaaaauuuaaaagcaugcu

SEQ ID NO: 381795 - RNA, 22 nt, Artificial Sequence
  Synthetic
aaaaaaaauuuaaaagcaugcu

SEQ ID NO: 381796 - RNA, 23 nt, Artificial Sequence
  Synthetic
aaaaaaaaauuuaaaagcaugcu

SEQ ID NO: 381797 - RNA, 24 nt, Artificial Sequence
  Synthetic
aaaaaaaaaauuuaaaagcaugcu

SEQ ID NO: 381798 - RNA, 18 nt, Artificial Sequence
  Synthetic
gcuggccuugaucaugcu

SEQ ID NO: 381799 - RNA, 19 nt, Artificial Sequence
  Synthetic
ugcuggccuugaucaugcu

SEQ ID NO: 381800 - RNA, 20 nt, Artificial Sequence
  Synthetic
cugcuggccuugaucaugcu

SEQ ID NO: 381801 - RNA, 21 nt, Artificial Sequence
  Synthetic
gcugcuggccuugaucaugcu

SEQ ID NO: 381802 - RNA, 22 nt, Artificial Sequence
  Synthetic
ugcugcuggccuugaucaugcu

SEQ ID NO: 381803 - RNA, 23 nt, Artificial Sequence
  Synthetic
augcugcuggccuugaucaugcu

SEQ ID NO: 381804 - RNA, 24 nt, Artificial Sequence
  Synthetic
gaugcugcuggccuugaucaugcu

SEQ ID NO: 381805 - RNA, 18 nt, Artificial Sequence
  Synthetic
uuaucacuuacucaugcu

SEQ ID NO: 381806 - RNA, 19 nt, Artificial Sequence
  Synthetic
auuaucacuuacucaugcu

SEQ ID NO: 381807 - RNA, 20 nt, Artificial Sequence
  Synthetic
cauuaucacuuacucaugcu

SEQ ID NO: 381808 - RNA, 21 nt, Artificial Sequence
  Synthetic
ccauuaucacuuacucaugcu

SEQ ID NO: 381809 - RNA, 22 nt, Artificial Sequence
  Synthetic
accauuaucacuuacucaugcu

SEQ ID NO: 381810 - RNA, 23 nt, Artificial Sequence
  Synthetic
uaccauuaucacuuacucaugcu

SEQ ID NO: 381811 - RNA, 24 nt, Artificial Sequence
  Synthetic
uuaccauuaucacuuacucaugcu

SEQ ID NO: 381812 - RNA, 18 nt, Artificial Sequence
  Synthetic
agcauaaaaauucaugcu

SEQ ID NO: 381813 - RNA, 19 nt, Artificial Sequence
  Synthetic
uagcauaaaaauucaugcu

SEQ ID NO: 381814 - RNA, 20 nt, Artificial Sequence
  Synthetic
guagcauaaaaauucaugcu

SEQ ID NO: 381815 - RNA, 21 nt, Artificial Sequence
  Synthetic
uguagcauaaaaauucaugcu

SEQ ID NO: 381816 - RNA, 22 nt, Artificial Sequence
  Synthetic
cuguagcauaaaaauucaugcu

SEQ ID NO: 381817 - RNA, 23 nt, Artificial Sequence
  Synthetic
ccuguagcauaaaaauucaugcu

SEQ ID NO: 381818 - RNA, 24 nt, Artificial Sequence
  Synthetic
uccuguagcauaaaaauucaugcu

SEQ ID NO: 381819 - RNA, 18 nt, Artificial Sequence
  Synthetic
uguuaugaauaagaugcu

SEQ ID NO: 381820 - RNA, 19 nt, Artificial Sequence
  Synthetic
cuguuaugaauaagaugcu

SEQ ID NO: 381821 - RNA, 20 nt, Artificial Sequence
  Synthetic
gcuguuaugaauaagaugcu

SEQ ID NO: 381822 - RNA, 21 nt, Artificial Sequence
  Synthetic
ggcuguuaugaauaagaugcu

SEQ ID NO: 381823 - RNA, 22 nt, Artificial Sequence
  Synthetic
uggcuguuaugaauaagaugcu

SEQ ID NO: 381824 - RNA, 23 nt, Artificial Sequence
  Synthetic
uuggcuguuaugaauaagaugcu

SEQ ID NO: 381825 - RNA, 24 nt, Artificial Sequence
  Synthetic
uuuggcuguuaugaauaagaugcu

SEQ ID NO: 381826 - RNA, 18 nt, Artificial Sequence
  Synthetic
uuuaauaguuaagaugcu

SEQ ID NO: 381827 - RNA, 19 nt, Artificial Sequence
  Synthetic
auuuaauaguuaagaugcu

SEQ ID NO: 381828 - RNA, 20 nt, Artificial Sequence
  Synthetic
uauuuaauaguuaagaugcu

SEQ ID NO: 381829 - RNA, 21 nt, Artificial Sequence
  Synthetic
auauuuaauaguuaagaugcu

SEQ ID NO: 381830 - RNA, 22 nt, Artificial Sequence
  Synthetic
cauauuuaauaguuaagaugcu

SEQ ID NO: 381831 - RNA, 23 nt, Artificial Sequence
  Synthetic
acauauuuaauaguuaagaugcu

SEQ ID NO: 381832 - RNA, 24 nt, Artificial Sequence
  Synthetic
gacauauuuaauaguuaagaugcu

SEQ ID NO: 381833 - RNA, 18 nt, Artificial Sequence
  Synthetic
aaaauccuuuaagaugcu

SEQ ID NO: 381834 - RNA, 19 nt, Artificial Sequence
  Synthetic
uaaaauccuuuaagaugcu

SEQ ID NO: 381835 - RNA, 20 nt, Artificial Sequence
  Synthetic
auaaaauccuuuaagaugcu

SEQ ID NO: 381836 - RNA, 21 nt, Artificial Sequence
  Synthetic
aauaaaauccuuuaagaugcu

SEQ ID NO: 381837 - RNA, 22 nt, Artificial Sequence
  Synthetic
aaauaaaauccuuuaagaugcu

SEQ ID NO: 381838 - RNA, 23 nt, Artificial Sequence
  Synthetic
uaaauaaaauccuuuaagaugcu

SEQ ID NO: 381839 - RNA, 24 nt, Artificial Sequence
  Synthetic
guaaauaaaauccuuuaagaugcu

SEQ ID NO: 381840 - RNA, 18 nt, Artificial Sequence
  Synthetic
ccuguaguccuagaugcu

SEQ ID NO: 381841 - RNA, 19 nt, Artificial Sequence
  Synthetic
gccuguaguccuagaugcu

SEQ ID NO: 381842 - RNA, 20 nt, Artificial Sequence
  Synthetic
agccuguaguccuagaugcu

SEQ ID NO: 381843 - RNA, 21 nt, Artificial Sequence
  Synthetic
aagccuguaguccuagaugcu

SEQ ID NO: 381844 - RNA, 22 nt, Artificial Sequence
  Synthetic
caagccuguaguccuagaugcu

SEQ ID NO: 381845 - RNA, 23 nt, Artificial Sequence
  Synthetic
gcaagccuguaguccuagaugcu

SEQ ID NO: 381846 - RNA, 24 nt, Artificial Sequence
  Synthetic
ugcaagccuguaguccuagaugcu

SEQ ID NO: 381847 - RNA, 18 nt, Artificial Sequence
  Synthetic
guaucucucagggaugcu

SEQ ID NO: 381848 - RNA, 19 nt, Artificial Sequence
  Synthetic
gguaucucucagggaugcu

SEQ ID NO: 381849 - RNA, 20 nt, Artificial Sequence
  Synthetic
agguaucucucagggaugcu

SEQ ID NO: 381850 - RNA, 21 nt, Artificial Sequence
  Synthetic
aagguaucucucagggaugcu

SEQ ID NO: 381851 - RNA, 22 nt, Artificial Sequence
  Synthetic
aaagguaucucucagggaugcu

SEQ ID NO: 381852 - RNA, 23 nt, Artificial Sequence
  Synthetic
aaaagguaucucucagggaugcu

SEQ ID NO: 381853 - RNA, 24 nt, Artificial Sequence
  Synthetic
aaaaagguaucucucagggaugcu

SEQ ID NO: 381854 - RNA, 18 nt, Artificial Sequence
  Synthetic
ugaaaucaccuggaugcu

SEQ ID NO: 381855 - RNA, 19 nt, Artificial Sequence
  Synthetic
uugaaaucaccuggaugcu

SEQ ID NO: 381856 - RNA, 20 nt, Artificial Sequence
  Synthetic
auugaaaucaccuggaugcu

SEQ ID NO: 381857 - RNA, 21 nt, Artificial Sequence
  Synthetic
cauugaaaucaccuggaugcu

SEQ ID NO: 381858 - RNA, 22 nt, Artificial Sequence
  Synthetic
acauugaaaucaccuggaugcu

SEQ ID NO: 381859 - RNA, 23 nt, Artificial Sequence
  Synthetic
uacauugaaaucaccuggaugcu

SEQ ID NO: 381860 - RNA, 24 nt, Artificial Sequence
  Synthetic
guacauugaaaucaccuggaugcu

SEQ ID NO: 381861 - RNA, 18 nt, Artificial Sequence
  Synthetic
gccaggaauuuggaugcu

SEQ ID NO: 381862 - RNA, 19 nt, Artificial Sequence
  Synthetic
agccaggaauuuggaugcu

SEQ ID NO: 381863 - RNA, 20 nt, Artificial Sequence
  Synthetic
aagccaggaauuuggaugcu

SEQ ID NO: 381864 - RNA, 21 nt, Artificial Sequence
  Synthetic
gaagccaggaauuuggaugcu

SEQ ID NO: 381865 - RNA, 22 nt, Artificial Sequence
  Synthetic
ggaagccaggaauuuggaugcu

SEQ ID NO: 381866 - RNA, 23 nt, Artificial Sequence
  Synthetic
uggaagccaggaauuuggaugcu

SEQ ID NO: 381867 - RNA, 24 nt, Artificial Sequence
  Synthetic
guggaagccaggaauuuggaugcu

SEQ ID NO: 381868 - RNA, 18 nt, Artificial Sequence
  Synthetic
acucuuggugaugaugcu

SEQ ID NO: 381869 - RNA, 19 nt, Artificial Sequence
  Synthetic
uacucuuggugaugaugcu

SEQ ID NO: 381870 - RNA, 20 nt, Artificial Sequence
  Synthetic
cuacucuuggugaugaugcu

SEQ ID NO: 381871 - RNA, 21 nt, Artificial Sequence
  Synthetic
ucuacucuuggugaugaugcu

SEQ ID NO: 381872 - RNA, 22 nt, Artificial Sequence
  Synthetic
cucuacucuuggugaugaugcu

SEQ ID NO: 381873 - RNA, 23 nt, Artificial Sequence
  Synthetic
acucuacucuuggugaugaugcu

SEQ ID NO: 381874 - RNA, 24 nt, Artificial Sequence
  Synthetic
cacucuacucuuggugaugaugcu

SEQ ID NO: 381875 - RNA, 18 nt, Artificial Sequence
  Synthetic
uuaaaggaaaaauaugcu

SEQ ID NO: 381876 - RNA, 19 nt, Artificial Sequence
  Synthetic
cuuaaaggaaaaauaugcu

SEQ ID NO: 381877 - RNA, 20 nt, Artificial Sequence
  Synthetic
acuuaaaggaaaaauaugcu

SEQ ID NO: 381878 - RNA, 21 nt, Artificial Sequence
  Synthetic
uacuuaaaggaaaaauaugcu

SEQ ID NO: 381879 - RNA, 22 nt, Artificial Sequence
  Synthetic
guacuuaaaggaaaaauaugcu

SEQ ID NO: 381880 - RNA, 23 nt, Artificial Sequence
  Synthetic
gguacuuaaaggaaaaauaugcu

SEQ ID NO: 381881 - RNA, 24 nt, Artificial Sequence
  Synthetic
ugguacuuaaaggaaaaauaugcu

SEQ ID NO: 381882 - RNA, 18 nt, Artificial Sequence
  Synthetic
uuaaauugaaaauaugcu

SEQ ID NO: 381883 - RNA, 19 nt, Artificial Sequence
  Synthetic
guuaaauugaaaauaugcu

SEQ ID NO: 381884 - RNA, 20 nt, Artificial Sequence
  Synthetic
aguuaaauugaaaauaugcu

SEQ ID NO: 381885 - RNA, 21 nt, Artificial Sequence
  Synthetic
aaguuaaauugaaaauaugcu

SEQ ID NO: 381886 - RNA, 22 nt, Artificial Sequence
  Synthetic
uaaguuaaauugaaaauaugcu

SEQ ID NO: 381887 - RNA, 23 nt, Artificial Sequence
  Synthetic
cuaaguuaaauugaaaauaugcu

SEQ ID NO: 381888 - RNA, 24 nt, Artificial Sequence
  Synthetic
gcuaaguuaaauugaaaauaugcu

SEQ ID NO: 381889 - RNA, 18 nt, Artificial Sequence
  Synthetic
gaugaguuggaauaugcu

SEQ ID NO: 381890 - RNA, 19 nt, Artificial Sequence
  Synthetic
agaugaguuggaauaugcu

SEQ ID NO: 381891 - RNA, 20 nt, Artificial Sequence
  Synthetic
gagaugaguuggaauaugcu

SEQ ID NO: 381892 - RNA, 21 nt, Artificial Sequence
  Synthetic
agagaugaguuggaauaugcu

SEQ ID NO: 381893 - RNA, 22 nt, Artificial Sequence
  Synthetic
gagagaugaguuggaauaugcu

SEQ ID NO: 381894 - RNA, 23 nt, Artificial Sequence
  Synthetic
ggagagaugaguuggaauaugcu

SEQ ID NO: 381895 - RNA, 24 nt, Artificial Sequence
  Synthetic
gggagagaugaguuggaauaugcu

SEQ ID NO: 381896 - RNA, 18 nt, Artificial Sequence
  Synthetic
ugaauaaauuaauaugcu

SEQ ID NO: 381897 - RNA, 19 nt, Artificial Sequence
  Synthetic
uugaauaaauuaauaugcu

SEQ ID NO: 381898 - RNA, 20 nt, Artificial Sequence
  Synthetic
uuugaauaaauuaauaugcu

SEQ ID NO: 381899 - RNA, 21 nt, Artificial Sequence
  Synthetic
auuugaauaaauuaauaugcu

SEQ ID NO: 381900 - RNA, 22 nt, Artificial Sequence
  Synthetic
uauuugaauaaauuaauaugcu

SEQ ID NO: 381901 - RNA, 23 nt, Artificial Sequence
  Synthetic
uuauuugaauaaauuaauaugcu

SEQ ID NO: 381902 - RNA, 24 nt, Artificial Sequence
  Synthetic
guuauuugaauaaauuaauaugcu

SEQ ID NO: 381903 - RNA, 18 nt, Artificial Sequence
  Synthetic
ggaaaggcuagauaugcu

SEQ ID NO: 381904 - RNA, 19 nt, Artificial Sequence
  Synthetic
uggaaaggcuagauaugcu

SEQ ID NO: 381905 - RNA, 20 nt, Artificial Sequence
  Synthetic
uuggaaaggcuagauaugcu

SEQ ID NO: 381906 - RNA, 21 nt, Artificial Sequence
  Synthetic
guuggaaaggcuagauaugcu

SEQ ID NO: 381907 - RNA, 22 nt, Artificial Sequence
  Synthetic
uguuggaaaggcuagauaugcu

SEQ ID NO: 381908 - RNA, 23 nt, Artificial Sequence
  Synthetic
auguuggaaaggcuagauaugcu

SEQ ID NO: 381909 - RNA, 24 nt, Artificial Sequence
  Synthetic
cauguuggaaaggcuagauaugcu

SEQ ID NO: 381910 - RNA, 18 nt, Artificial Sequence
  Synthetic
auuucagguugauaugcu

SEQ ID NO: 381911 - RNA, 19 nt, Artificial Sequence
  Synthetic
aauuucagguugauaugcu

SEQ ID NO: 381912 - RNA, 20 nt, Artificial Sequence
  Synthetic
aaauuucagguugauaugcu

SEQ ID NO: 381913 - RNA, 21 nt, Artificial Sequence
  Synthetic
gaaauuucagguugauaugcu

SEQ ID NO: 381914 - RNA, 22 nt, Artificial Sequence
  Synthetic
agaaauuucagguugauaugcu

SEQ ID NO: 381915 - RNA, 23 nt, Artificial Sequence
  Synthetic
uagaaauuucagguugauaugcu

SEQ ID NO: 381916 - RNA, 24 nt, Artificial Sequence
  Synthetic
auagaaauuucagguugauaugcu

SEQ ID NO: 381917 - RNA, 18 nt, Artificial Sequence
  Synthetic
cgcaccaaaauauaugcu

SEQ ID NO: 381918 - RNA, 19 nt, Artificial Sequence
  Synthetic
acgcaccaaaauauaugcu

SEQ ID NO: 381919 - RNA, 20 nt, Artificial Sequence
  Synthetic
aacgcaccaaaauauaugcu

SEQ ID NO: 381920 - RNA, 21 nt, Artificial Sequence
  Synthetic
caacgcaccaaaauauaugcu

SEQ ID NO: 381921 - RNA, 22 nt, Artificial Sequence
  Synthetic
ccaacgcaccaaaauauaugcu

SEQ ID NO: 381922 - RNA, 23 nt, Artificial Sequence
  Synthetic
accaacgcaccaaaauauaugcu

SEQ ID NO: 381923 - RNA, 24 nt, Artificial Sequence
  Synthetic
aaccaacgcaccaaaauauaugcu

SEQ ID NO: 381924 - RNA, 18 nt, Artificial Sequence
  Synthetic
uuauuuguguuauaugcu

SEQ ID NO: 381925 - RNA, 19 nt, Artificial Sequence
  Synthetic
uuuauuuguguuauaugcu

SEQ ID NO: 381926 - RNA, 20 nt, Artificial Sequence
  Synthetic
uuuuauuuguguuauaugcu

SEQ ID NO: 381927 - RNA, 21 nt, Artificial Sequence
  Synthetic
guuuuauuuguguuauaugcu

SEQ ID NO: 381928 - RNA, 22 nt, Artificial Sequence
  Synthetic
uguuuuauuuguguuauaugcu

SEQ ID NO: 381929 - RNA, 23 nt, Artificial Sequence
  Synthetic
auguuuuauuuguguuauaugcu

SEQ ID NO: 381930 - RNA, 24 nt, Artificial Sequence
  Synthetic
uauguuuuauuuguguuauaugcu

SEQ ID NO: 381931 - RNA, 18 nt, Artificial Sequence
  Synthetic
cugaugcuggccuaugcu

SEQ ID NO: 381932 - RNA, 19 nt, Artificial Sequence
  Synthetic
gcugaugcuggccuaugcu

SEQ ID NO: 381933 - RNA, 20 nt, Artificial Sequence
  Synthetic
ugcugaugcuggccuaugcu

SEQ ID NO: 381934 - RNA, 21 nt, Artificial Sequence
  Synthetic
augcugaugcuggccuaugcu

SEQ ID NO: 381935 - RNA, 22 nt, Artificial Sequence
  Synthetic
uaugcugaugcuggccuaugcu

SEQ ID NO: 381936 - RNA, 23 nt, Artificial Sequence
  Synthetic
uuaugcugaugcuggccuaugcu

SEQ ID NO: 381937 - RNA, 24 nt, Artificial Sequence
  Synthetic
guuaugcugaugcuggccuaugcu

SEQ ID NO: 381938 - RNA, 18 nt, Artificial Sequence
  Synthetic
gguuaauaucucuaugcu

SEQ ID NO: 381939 - RNA, 19 nt, Artificial Sequence
  Synthetic
agguuaauaucucuaugcu

SEQ ID NO: 381940 - RNA, 20 nt, Artificial Sequence
  Synthetic
aagguuaauaucucuaugcu

SEQ ID NO: 381941 - RNA, 21 nt, Artificial Sequence
  Synthetic
uaagguuaauaucucuaugcu

SEQ ID NO: 381942 - RNA, 22 nt, Artificial Sequence
  Synthetic
uuaagguuaauaucucuaugcu

SEQ ID NO: 381943 - RNA, 23 nt, Artificial Sequence
  Synthetic
uuuaagguuaauaucucuaugcu

SEQ ID NO: 381944 - RNA, 24 nt, Artificial Sequence
  Synthetic
uuuuaagguuaauaucucuaugcu

SEQ ID NO: 381945 - RNA, 18 nt, Artificial Sequence
  Synthetic
uggagaugcacguaugcu

SEQ ID NO: 381946 - RNA, 19 nt, Artificial Sequence
  Synthetic
auggagaugcacguaugcu

SEQ ID NO: 381947 - RNA, 20 nt, Artificial Sequence
  Synthetic
uauggagaugcacguaugcu

SEQ ID NO: 381948 - RNA, 21 nt, Artificial Sequence
  Synthetic
cuauggagaugcacguaugcu

SEQ ID NO: 381949 - RNA, 22 nt, Artificial Sequence
  Synthetic
ccuauggagaugcacguaugcu

SEQ ID NO: 381950 - RNA, 23 nt, Artificial Sequence
  Synthetic
cccuauggagaugcacguaugcu

SEQ ID NO: 381951 - RNA, 24 nt, Artificial Sequence
  Synthetic
gcccuauggagaugcacguaugcu

SEQ ID NO: 381952 - RNA, 18 nt, Artificial Sequence
  Synthetic
gcaguuggaaauuaugcu

SEQ ID NO: 381953 - RNA, 19 nt, Artificial Sequence
  Synthetic
agcaguuggaaauuaugcu

SEQ ID NO: 381954 - RNA, 20 nt, Artificial Sequence
  Synthetic
aagcaguuggaaauuaugcu

SEQ ID NO: 381955 - RNA, 21 nt, Artificial Sequence
  Synthetic
aaagcaguuggaaauuaugcu

SEQ ID NO: 381956 - RNA, 22 nt, Artificial Sequence
  Synthetic
aaaagcaguuggaaauuaugcu

SEQ ID NO: 381957 - RNA, 23 nt, Artificial Sequence
  Synthetic
caaaagcaguuggaaauuaugcu

SEQ ID NO: 381958 - RNA, 24 nt, Artificial Sequence
  Synthetic
ucaaaagcaguuggaaauuaugcu

SEQ ID NO: 381959 - RNA, 18 nt, Artificial Sequence
  Synthetic
acacgcugaaauuaugcu

SEQ ID NO: 381960 - RNA, 19 nt, Artificial Sequence
  Synthetic
aacacgcugaaauuaugcu

SEQ ID NO: 381961 - RNA, 20 nt, Artificial Sequence
  Synthetic
aaacacgcugaaauuaugcu

SEQ ID NO: 381962 - RNA, 21 nt, Artificial Sequence
  Synthetic
caaacacgcugaaauuaugcu

SEQ ID NO: 381963 - RNA, 22 nt, Artificial Sequence
  Synthetic
ccaaacacgcugaaauuaugcu

SEQ ID NO: 381964 - RNA, 23 nt, Artificial Sequence
  Synthetic
accaaacacgcugaaauuaugcu

SEQ ID NO: 381965 - RNA, 24 nt, Artificial Sequence
  Synthetic
caccaaacacgcugaaauuaugcu

SEQ ID NO: 381966 - RNA, 18 nt, Artificial Sequence
  Synthetic
acugggguuauuuaugcu

SEQ ID NO: 381967 - RNA, 19 nt, Artificial Sequence
  Synthetic
aacugggguuauuuaugcu

SEQ ID NO: 381968 - RNA, 20 nt, Artificial Sequence
  Synthetic
aaacugggguuauuuaugcu

SEQ ID NO: 381969 - RNA, 21 nt, Artificial Sequence
  Synthetic
caaacugggguuauuuaugcu

SEQ ID NO: 381970 - RNA, 22 nt, Artificial Sequence
  Synthetic
acaaacugggguuauuuaugcu

SEQ ID NO: 381971 - RNA, 23 nt, Artificial Sequence
  Synthetic
gacaaacugggguuauuuaugcu

SEQ ID NO: 381972 - RNA, 24 nt, Artificial Sequence
  Synthetic
agacaaacugggguuauuuaugcu

SEQ ID NO: 381973 - RNA, 18 nt, Artificial Sequence
  Synthetic
cacagaguggaaacugcu

SEQ ID NO: 381974 - RNA, 19 nt, Artificial Sequence
  Synthetic
ccacagaguggaaacugcu

SEQ ID NO: 381975 - RNA, 20 nt, Artificial Sequence
  Synthetic
uccacagaguggaaacugcu

SEQ ID NO: 381976 - RNA, 21 nt, Artificial Sequence
  Synthetic
uuccacagaguggaaacugcu

SEQ ID NO: 381977 - RNA, 22 nt, Artificial Sequence
  Synthetic
cuuccacagaguggaaacugcu

SEQ ID NO: 381978 - RNA, 23 nt, Artificial Sequence
  Synthetic
ucuuccacagaguggaaacugcu

SEQ ID NO: 381979 - RNA, 24 nt, Artificial Sequence
  Synthetic
uucuuccacagaguggaaacugcu

SEQ ID NO: 381980 - RNA, 18 nt, Artificial Sequence
  Synthetic
gggucaugugaaacugcu

SEQ ID NO: 381981 - RNA, 19 nt, Artificial Sequence
  Synthetic
agggucaugugaaacugcu

SEQ ID NO: 381982 - RNA, 20 nt, Artificial Sequence
  Synthetic
aagggucaugugaaacugcu

SEQ ID NO: 381983 - RNA, 21 nt, Artificial Sequence
  Synthetic
caagggucaugugaaacugcu

SEQ ID NO: 381984 - RNA, 22 nt, Artificial Sequence
  Synthetic
ccaagggucaugugaaacugcu

SEQ ID NO: 381985 - RNA, 23 nt, Artificial Sequence
  Synthetic
cccaagggucaugugaaacugcu

SEQ ID NO: 381986 - RNA, 24 nt, Artificial Sequence
  Synthetic
ccccaagggucaugugaaacugcu

SEQ ID NO: 381987 - RNA, 18 nt, Artificial Sequence
  Synthetic
aucucccagacaacugcu

SEQ ID NO: 381988 - RNA, 19 nt, Artificial Sequence
  Synthetic
gaucucccagacaacugcu

SEQ ID NO: 381989 - RNA, 20 nt, Artificial Sequence
  Synthetic
ugaucucccagacaacugcu

SEQ ID NO: 381990 - RNA, 21 nt, Artificial Sequence
  Synthetic
uugaucucccagacaacugcu

SEQ ID NO: 381991 - RNA, 22 nt, Artificial Sequence
  Synthetic
guugaucucccagacaacugcu

SEQ ID NO: 381992 - RNA, 23 nt, Artificial Sequence
  Synthetic
uguugaucucccagacaacugcu

SEQ ID NO: 381993 - RNA, 24 nt, Artificial Sequence
  Synthetic
auguugaucucccagacaacugcu

SEQ ID NO: 381994 - RNA, 18 nt, Artificial Sequence
  Synthetic
uugauccaaaccacugcu

SEQ ID NO: 381995 - RNA, 19 nt, Artificial Sequence
  Synthetic
uuugauccaaaccacugcu

SEQ ID NO: 381996 - RNA, 20 nt, Artificial Sequence
  Synthetic
uuuugauccaaaccacugcu

SEQ ID NO: 381997 - RNA, 21 nt, Artificial Sequence
  Synthetic
cuuuugauccaaaccacugcu

SEQ ID NO: 381998 - RNA, 22 nt, Artificial Sequence
  Synthetic
gcuuuugauccaaaccacugcu

SEQ ID NO: 381999 - RNA, 23 nt, Artificial Sequence
  Synthetic
ugcuuuugauccaaaccacugcu

SEQ ID NO: 382000 - RNA, 24 nt, Artificial Sequence
  Synthetic
uugcuuuugauccaaaccacugcu

SEQ ID NO: 382001 - RNA, 18 nt, Artificial Sequence
  Synthetic
uaaccauuaagcacugcu

SEQ ID NO: 382002 - RNA, 19 nt, Artificial Sequence
  Synthetic
uuaaccauuaagcacugcu

SEQ ID NO: 382003 - RNA, 20 nt, Artificial Sequence
  Synthetic
auuaaccauuaagcacugcu

SEQ ID NO: 382004 - RNA, 21 nt, Artificial Sequence
  Synthetic
cauuaaccauuaagcacugcu

SEQ ID NO: 382005 - RNA, 22 nt, Artificial Sequence
  Synthetic
acauuaaccauuaagcacugcu

SEQ ID NO: 382006 - RNA, 23 nt, Artificial Sequence
  Synthetic
cacauuaaccauuaagcacugcu

SEQ ID NO: 382007 - RNA, 24 nt, Artificial Sequence
  Synthetic
acacauuaaccauuaagcacugcu

SEQ ID NO: 382008 - RNA, 18 nt, Artificial Sequence
  Synthetic
ucugugccaggcacugcu

SEQ ID NO: 382009 - RNA, 19 nt, Artificial Sequence
  Synthetic
cucugugccaggcacugcu

SEQ ID NO: 382010 - RNA, 20 nt, Artificial Sequence
  Synthetic
ucucugugccaggcacugcu

SEQ ID NO: 382011 - RNA, 21 nt, Artificial Sequence
  Synthetic
uucucugugccaggcacugcu

SEQ ID NO: 382012 - RNA, 22 nt, Artificial Sequence
  Synthetic
cuucucugugccaggcacugcu

SEQ ID NO: 382013 - RNA, 23 nt, Artificial Sequence
  Synthetic
ccuucucugugccaggcacugcu

SEQ ID NO: 382014 - RNA, 24 nt, Artificial Sequence
  Synthetic
accuucucugugccaggcacugcu

SEQ ID NO: 382015 - RNA, 18 nt, Artificial Sequence
  Synthetic
uuucccucuuucacugcu

SEQ ID NO: 382016 - RNA, 19 nt, Artificial Sequence
  Synthetic
cuuucccucuuucacugcu

SEQ ID NO: 382017 - RNA, 20 nt, Artificial Sequence
  Synthetic
ucuuucccucuuucacugcu

SEQ ID NO: 382018 - RNA, 21 nt, Artificial Sequence
  Synthetic
uucuuucccucuuucacugcu

SEQ ID NO: 382019 - RNA, 22 nt, Artificial Sequence
  Synthetic
uuucuuucccucuuucacugcu

SEQ ID NO: 382020 - RNA, 23 nt, Artificial Sequence
  Synthetic
auuucuuucccucuuucacugcu

SEQ ID NO: 382021 - RNA, 24 nt, Artificial Sequence
  Synthetic
uauuucuuucccucuuucacugcu

SEQ ID NO: 382022 - RNA, 18 nt, Artificial Sequence
  Synthetic
uuauuuucuuucacugcu

SEQ ID NO: 382023 - RNA, 19 nt, Artificial Sequence
  Synthetic
uuuauuuucuuucacugcu

SEQ ID NO: 382024 - RNA, 20 nt, Artificial Sequence
  Synthetic
uuuuauuuucuuucacugcu

SEQ ID NO: 382025 - RNA, 21 nt, Artificial Sequence
  Synthetic
guuuuauuuucuuucacugcu

SEQ ID NO: 382026 - RNA, 22 nt, Artificial Sequence
  Synthetic
uguuuuauuuucuuucacugcu

SEQ ID NO: 382027 - RNA, 23 nt, Artificial Sequence
  Synthetic
uuguuuuauuuucuuucacugcu

SEQ ID NO: 382028 - RNA, 24 nt, Artificial Sequence
  Synthetic
uuuguuuuauuuucuuucacugcu

SEQ ID NO: 382029 - RNA, 18 nt, Artificial Sequence
  Synthetic
ggauuagaaaagacugcu

SEQ ID NO: 382030 - RNA, 19 nt, Artificial Sequence
  Synthetic
aggauuagaaaagacugcu

SEQ ID NO: 382031 - RNA, 20 nt, Artificial Sequence
  Synthetic
aaggauuagaaaagacugcu

SEQ ID NO: 382032 - RNA, 21 nt, Artificial Sequence
  Synthetic
caaggauuagaaaagacugcu

SEQ ID NO: 382033 - RNA, 22 nt, Artificial Sequence
  Synthetic
ccaaggauuagaaaagacugcu

SEQ ID NO: 382034 - RNA, 23 nt, Artificial Sequence
  Synthetic
accaaggauuagaaaagacugcu

SEQ ID NO: 382035 - RNA, 24 nt, Artificial Sequence
  Synthetic
uaccaaggauuagaaaagacugcu

SEQ ID NO: 382036 - RNA, 18 nt, Artificial Sequence
  Synthetic
cauccaggaaagacugcu

SEQ ID NO: 382037 - RNA, 19 nt, Artificial Sequence
  Synthetic
gcauccaggaaagacugcu

SEQ ID NO: 382038 - RNA, 20 nt, Artificial Sequence
  Synthetic
agcauccaggaaagacugcu

SEQ ID NO: 382039 - RNA, 21 nt, Artificial Sequence
  Synthetic
aagcauccaggaaagacugcu

SEQ ID NO: 382040 - RNA, 22 nt, Artificial Sequence
  Synthetic
aaagcauccaggaaagacugcu

SEQ ID NO: 382041 - RNA, 23 nt, Artificial Sequence
  Synthetic
caaagcauccaggaaagacugcu

SEQ ID NO: 382042 - RNA, 24 nt, Artificial Sequence
  Synthetic
ccaaagcauccaggaaagacugcu

SEQ ID NO: 382043 - RNA, 18 nt, Artificial Sequence
  Synthetic
auacugauaaauacugcu

SEQ ID NO: 382044 - RNA, 19 nt, Artificial Sequence
  Synthetic
aauacugauaaauacugcu

SEQ ID NO: 382045 - RNA, 20 nt, Artificial Sequence
  Synthetic
uaauacugauaaauacugcu

SEQ ID NO: 382046 - RNA, 21 nt, Artificial Sequence
  Synthetic
auaauacugauaaauacugcu

SEQ ID NO: 382047 - RNA, 22 nt, Artificial Sequence
  Synthetic
uauaauacugauaaauacugcu

SEQ ID NO: 382048 - RNA, 23 nt, Artificial Sequence
  Synthetic
uuauaauacugauaaauacugcu

SEQ ID NO: 382049 - RNA, 24 nt, Artificial Sequence
  Synthetic
uuuauaauacugauaaauacugcu

SEQ ID NO: 382050 - RNA, 18 nt, Artificial Sequence
  Synthetic
cauaguuuucauacugcu

SEQ ID NO: 382051 - RNA, 19 nt, Artificial Sequence
  Synthetic
ucauaguuuucauacugcu

SEQ ID NO: 382052 - RNA, 20 nt, Artificial Sequence
  Synthetic
uucauaguuuucauacugcu

SEQ ID NO: 382053 - RNA, 21 nt, Artificial Sequence
  Synthetic
cuucauaguuuucauacugcu

SEQ ID NO: 382054 - RNA, 22 nt, Artificial Sequence
  Synthetic
ucuucauaguuuucauacugcu

SEQ ID NO: 382055 - RNA, 23 nt, Artificial Sequence
  Synthetic
gucuucauaguuuucauacugcu

SEQ ID NO: 382056 - RNA, 24 nt, Artificial Sequence
  Synthetic
ggucuucauaguuuucauacugcu

SEQ ID NO: 382057 - RNA, 18 nt, Artificial Sequence
  Synthetic
guucauuuuccuacugcu

SEQ ID NO: 382058 - RNA, 19 nt, Artificial Sequence
  Synthetic
aguucauuuuccuacugcu

SEQ ID NO: 382059 - RNA, 20 nt, Artificial Sequence
  Synthetic
uaguucauuuuccuacugcu

SEQ ID NO: 382060 - RNA, 21 nt, Artificial Sequence
  Synthetic
uuaguucauuuuccuacugcu

SEQ ID NO: 382061 - RNA, 22 nt, Artificial Sequence
  Synthetic
auuaguucauuuuccuacugcu

SEQ ID NO: 382062 - RNA, 23 nt, Artificial Sequence
  Synthetic
uauuaguucauuuuccuacugcu

SEQ ID NO: 382063 - RNA, 24 nt, Artificial Sequence
  Synthetic
guauuaguucauuuuccuacugcu

SEQ ID NO: 382064 - RNA, 18 nt, Artificial Sequence
  Synthetic
uagauuuaagcuacugcu

SEQ ID NO: 382065 - RNA, 19 nt, Artificial Sequence
  Synthetic
uuagauuuaagcuacugcu

SEQ ID NO: 382066 - RNA, 20 nt, Artificial Sequence
  Synthetic
cuuagauuuaagcuacugcu

SEQ ID NO: 382067 - RNA, 21 nt, Artificial Sequence
  Synthetic
acuuagauuuaagcuacugcu

SEQ ID NO: 382068 - RNA, 22 nt, Artificial Sequence
  Synthetic
gacuuagauuuaagcuacugcu

SEQ ID NO: 382069 - RNA, 23 nt, Artificial Sequence
  Synthetic
ugacuuagauuuaagcuacugcu

SEQ ID NO: 382070 - RNA, 24 nt, Artificial Sequence
  Synthetic
cugacuuagauuuaagcuacugcu

SEQ ID NO: 382071 - RNA, 18 nt, Artificial Sequence
  Synthetic
gccggaaaauuuacugcu

SEQ ID NO: 382072 - RNA, 19 nt, Artificial Sequence
  Synthetic
agccggaaaauuuacugcu

SEQ ID NO: 382073 - RNA, 20 nt, Artificial Sequence
  Synthetic
cagccggaaaauuuacugcu

SEQ ID NO: 382074 - RNA, 21 nt, Artificial Sequence
  Synthetic
ucagccggaaaauuuacugcu

SEQ ID NO: 382075 - RNA, 22 nt, Artificial Sequence
  Synthetic
aucagccggaaaauuuacugcu

SEQ ID NO: 382076 - RNA, 23 nt, Artificial Sequence
  Synthetic
aaucagccggaaaauuuacugcu

SEQ ID NO: 382077 - RNA, 24 nt, Artificial Sequence
  Synthetic
gaaucagccggaaaauuuacugcu

SEQ ID NO: 382078 - RNA, 18 nt, Artificial Sequence
  Synthetic
ucaugaucuuuuacugcu

SEQ ID NO: 382079 - RNA, 19 nt, Artificial Sequence
  Synthetic
cucaugaucuuuuacugcu

SEQ ID NO: 382080 - RNA, 20 nt, Artificial Sequence
  Synthetic
ucucaugaucuuuuacugcu

SEQ ID NO: 382081 - RNA, 21 nt, Artificial Sequence
  Synthetic
aucucaugaucuuuuacugcu

SEQ ID NO: 382082 - RNA, 22 nt, Artificial Sequence
  Synthetic
aaucucaugaucuuuuacugcu

SEQ ID NO: 382083 - RNA, 23 nt, Artificial Sequence
  Synthetic
uaaucucaugaucuuuuacugcu

SEQ ID NO: 382084 - RNA, 24 nt, Artificial Sequence
  Synthetic
auaaucucaugaucuuuuacugcu

SEQ ID NO: 382085 - RNA, 18 nt, Artificial Sequence
  Synthetic
auaucccuucucccugcu

SEQ ID NO: 382086 - RNA, 19 nt, Artificial Sequence
  Synthetic
cauaucccuucucccugcu

SEQ ID NO: 382087 - RNA, 20 nt, Artificial Sequence
  Synthetic
gcauaucccuucucccugcu

SEQ ID NO: 382088 - RNA, 21 nt, Artificial Sequence
  Synthetic
agcauaucccuucucccugcu

SEQ ID NO: 382089 - RNA, 22 nt, Artificial Sequence
  Synthetic
aagcauaucccuucucccugcu

SEQ ID NO: 382090 - RNA, 23 nt, Artificial Sequence
  Synthetic
aaagcauaucccuucucccugcu

SEQ ID NO: 382091 - RNA, 24 nt, Artificial Sequence
  Synthetic
gaaagcauaucccuucucccugcu

SEQ ID NO: 382092 - RNA, 18 nt, Artificial Sequence
  Synthetic
uuagacucagucccugcu

SEQ ID NO: 382093 - RNA, 19 nt, Artificial Sequence
  Synthetic
auuagacucagucccugcu

SEQ ID NO: 382094 - RNA, 20 nt, Artificial Sequence
  Synthetic
aauuagacucagucccugcu

SEQ ID NO: 382095 - RNA, 21 nt, Artificial Sequence
  Synthetic
gaauuagacucagucccugcu

SEQ ID NO: 382096 - RNA, 22 nt, Artificial Sequence
  Synthetic
agaauuagacucagucccugcu

SEQ ID NO: 382097 - RNA, 23 nt, Artificial Sequence
  Synthetic
aagaauuagacucagucccugcu

SEQ ID NO: 382098 - RNA, 24 nt, Artificial Sequence
  Synthetic
gaagaauuagacucagucccugcu

SEQ ID NO: 382099 - RNA, 18 nt, Artificial Sequence
  Synthetic
uuuuaagagacuccugcu

SEQ ID NO: 382100 - RNA, 19 nt, Artificial Sequence
  Synthetic
uuuuuaagagacuccugcu

SEQ ID NO: 382101 - RNA, 20 nt, Artificial Sequence
  Synthetic
uuuuuuaagagacuccugcu

SEQ ID NO: 382102 - RNA, 21 nt, Artificial Sequence
  Synthetic
guuuuuuaagagacuccugcu

SEQ ID NO: 382103 - RNA, 22 nt, Artificial Sequence
  Synthetic
uguuuuuuaagagacuccugcu

SEQ ID NO: 382104 - RNA, 23 nt, Artificial Sequence
  Synthetic
guguuuuuuaagagacuccugcu

SEQ ID NO: 382105 - RNA, 24 nt, Artificial Sequence
  Synthetic
gguguuuuuuaagagacuccugcu

SEQ ID NO: 382106 - RNA, 18 nt, Artificial Sequence
  Synthetic
aaaauggagucuccugcu

SEQ ID NO: 382107 - RNA, 19 nt, Artificial Sequence
  Synthetic
uaaaauggagucuccugcu

SEQ ID NO: 382108 - RNA, 20 nt, Artificial Sequence
  Synthetic
uuaaaauggagucuccugcu

SEQ ID NO: 382109 - RNA, 21 nt, Artificial Sequence
  Synthetic
auuaaaauggagucuccugcu

SEQ ID NO: 382110 - RNA, 22 nt, Artificial Sequence
  Synthetic
aauuaaaauggagucuccugcu

SEQ ID NO: 382111 - RNA, 23 nt, Artificial Sequence
  Synthetic
aaauuaaaauggagucuccugcu

SEQ ID NO: 382112 - RNA, 24 nt, Artificial Sequence
  Synthetic
aaaauuaaaauggagucuccugcu

SEQ ID NO: 382113 - RNA, 18 nt, Artificial Sequence
  Synthetic
cuucaaacuuguccugcu

SEQ ID NO: 382114 - RNA, 19 nt, Artificial Sequence
  Synthetic
ccuucaaacuuguccugcu

SEQ ID NO: 382115 - RNA, 20 nt, Artificial Sequence
  Synthetic
cccuucaaacuuguccugcu

SEQ ID NO: 382116 - RNA, 21 nt, Artificial Sequence
  Synthetic
gcccuucaaacuuguccugcu

SEQ ID NO: 382117 - RNA, 22 nt, Artificial Sequence
  Synthetic
agcccuucaaacuuguccugcu

SEQ ID NO: 382118 - RNA, 23 nt, Artificial Sequence
  Synthetic
uagcccuucaaacuuguccugcu

SEQ ID NO: 382119 - RNA, 24 nt, Artificial Sequence
  Synthetic
guagcccuucaaacuuguccugcu

SEQ ID NO: 382120 - RNA, 18 nt, Artificial Sequence
  Synthetic
aaguggaaaccagcugcu

SEQ ID NO: 382121 - RNA, 19 nt, Artificial Sequence
  Synthetic
uaaguggaaaccagcugcu

SEQ ID NO: 382122 - RNA, 20 nt, Artificial Sequence
  Synthetic
uuaaguggaaaccagcugcu

SEQ ID NO: 382123 - RNA, 21 nt, Artificial Sequence
  Synthetic
guuaaguggaaaccagcugcu

SEQ ID NO: 382124 - RNA, 22 nt, Artificial Sequence
  Synthetic
gguuaaguggaaaccagcugcu

SEQ ID NO: 382125 - RNA, 23 nt, Artificial Sequence
  Synthetic
agguuaaguggaaaccagcugcu

SEQ ID NO: 382126 - RNA, 24 nt, Artificial Sequence
  Synthetic
aagguuaaguggaaaccagcugcu

SEQ ID NO: 382127 - RNA, 18 nt, Artificial Sequence
  Synthetic
ccuguagucccagcugcu

SEQ ID NO: 382128 - RNA, 19 nt, Artificial Sequence
  Synthetic
accuguagucccagcugcu

SEQ ID NO: 382129 - RNA, 20 nt, Artificial Sequence
  Synthetic
caccuguagucccagcugcu

SEQ ID NO: 382130 - RNA, 21 nt, Artificial Sequence
  Synthetic
acaccuguagucccagcugcu

SEQ ID NO: 382131 - RNA, 22 nt, Artificial Sequence
  Synthetic
cacaccuguagucccagcugcu

SEQ ID NO: 382132 - RNA, 23 nt, Artificial Sequence
  Synthetic
acacaccuguagucccagcugcu

SEQ ID NO: 382133 - RNA, 24 nt, Artificial Sequence
  Synthetic
cacacaccuguagucccagcugcu

SEQ ID NO: 382134 - RNA, 18 nt, Artificial Sequence
  Synthetic
gaagggaccugagcugcu

SEQ ID NO: 382135 - RNA, 19 nt, Artificial Sequence
  Synthetic
cgaagggaccugagcugcu

SEQ ID NO: 382136 - RNA, 20 nt, Artificial Sequence
  Synthetic
ucgaagggaccugagcugcu

SEQ ID NO: 382137 - RNA, 21 nt, Artificial Sequence
  Synthetic
aucgaagggaccugagcugcu

SEQ ID NO: 382138 - RNA, 22 nt, Artificial Sequence
  Synthetic
uaucgaagggaccugagcugcu

SEQ ID NO: 382139 - RNA, 23 nt, Artificial Sequence
  Synthetic
uuaucgaagggaccugagcugcu

SEQ ID NO: 382140 - RNA, 24 nt, Artificial Sequence
  Synthetic
uuuaucgaagggaccugagcugcu

SEQ ID NO: 382141 - RNA, 18 nt, Artificial Sequence
  Synthetic
ggcuggcugugagcugcu

SEQ ID NO: 382142 - RNA, 19 nt, Artificial Sequence
  Synthetic
uggcuggcugugagcugcu

SEQ ID NO: 382143 - RNA, 20 nt, Artificial Sequence
  Synthetic
cuggcuggcugugagcugcu

SEQ ID NO: 382144 - RNA, 21 nt, Artificial Sequence
  Synthetic
gcuggcuggcugugagcugcu

SEQ ID NO: 382145 - RNA, 22 nt, Artificial Sequence
  Synthetic
agcuggcuggcugugagcugcu

SEQ ID NO: 382146 - RNA, 23 nt, Artificial Sequence
  Synthetic
gagcuggcuggcugugagcugcu

SEQ ID NO: 382147 - RNA, 24 nt, Artificial Sequence
  Synthetic
agagcuggcuggcugugagcugcu

SEQ ID NO: 382148 - RNA, 18 nt, Artificial Sequence
  Synthetic
agugagcgagaggcugcu

SEQ ID NO: 382149 - RNA, 19 nt, Artificial Sequence
  Synthetic
gagugagcgagaggcugcu

SEQ ID NO: 382150 - RNA, 20 nt, Artificial Sequence
  Synthetic
ugagugagcgagaggcugcu

SEQ ID NO: 382151 - RNA, 21 nt, Artificial Sequence
  Synthetic
gugagugagcgagaggcugcu

SEQ ID NO: 382152 - RNA, 22 nt, Artificial Sequence
  Synthetic
ggugagugagcgagaggcugcu

SEQ ID NO: 382153 - RNA, 23 nt, Artificial Sequence
  Synthetic
gggugagugagcgagaggcugcu

SEQ ID NO: 382154 - RNA, 24 nt, Artificial Sequence
  Synthetic
agggugagugagcgagaggcugcu

SEQ ID NO: 382155 - RNA, 18 nt, Artificial Sequence
  Synthetic
gaggcauugcuggcugcu

SEQ ID NO: 382156 - RNA, 19 nt, Artificial Sequence
  Synthetic
ggaggcauugcuggcugcu

SEQ ID NO: 382157 - RNA, 20 nt, Artificial Sequence
  Synthetic
cggaggcauugcuggcugcu

SEQ ID NO: 382158 - RNA, 21 nt, Artificial Sequence
  Synthetic
gcggaggcauugcuggcugcu

SEQ ID NO: 382159 - RNA, 22 nt, Artificial Sequence
  Synthetic
ugcggaggcauugcuggcugcu

SEQ ID NO: 382160 - RNA, 23 nt, Artificial Sequence
  Synthetic
gugcggaggcauugcuggcugcu

SEQ ID NO: 382161 - RNA, 24 nt, Artificial Sequence
  Synthetic
ugugcggaggcauugcuggcugcu

SEQ ID NO: 382162 - RNA, 18 nt, Artificial Sequence
  Synthetic
uuuugagcaaaugcugcu

SEQ ID NO: 382163 - RNA, 19 nt, Artificial Sequence
  Synthetic
auuuugagcaaaugcugcu

SEQ ID NO: 382164 - RNA, 20 nt, Artificial Sequence
  Synthetic
uauuuugagcaaaugcugcu

SEQ ID NO: 382165 - RNA, 21 nt, Artificial Sequence
  Synthetic
uuauuuugagcaaaugcugcu

SEQ ID NO: 382166 - RNA, 22 nt, Artificial Sequence
  Synthetic
guuauuuugagcaaaugcugcu

SEQ ID NO: 382167 - RNA, 23 nt, Artificial Sequence
  Synthetic
uguuauuuugagcaaaugcugcu

SEQ ID NO: 382168 - RNA, 24 nt, Artificial Sequence
  Synthetic
auguuauuuugagcaaaugcugcu

SEQ ID NO: 382169 - RNA, 18 nt, Artificial Sequence
  Synthetic
agaacuuucucugcugcu

SEQ ID NO: 382170 - RNA, 19 nt, Artificial Sequence
  Synthetic
cagaacuuucucugcugcu

SEQ ID NO: 382171 - RNA, 20 nt, Artificial Sequence
  Synthetic
acagaacuuucucugcugcu

SEQ ID NO: 382172 - RNA, 21 nt, Artificial Sequence
  Synthetic
uacagaacuuucucugcugcu

SEQ ID NO: 382173 - RNA, 22 nt, Artificial Sequence
  Synthetic
uuacagaacuuucucugcugcu

SEQ ID NO: 382174 - RNA, 23 nt, Artificial Sequence
  Synthetic
cuuacagaacuuucucugcugcu

SEQ ID NO: 382175 - RNA, 24 nt, Artificial Sequence
  Synthetic
acuuacagaacuuucucugcugcu

SEQ ID NO: 382176 - RNA, 18 nt, Artificial Sequence
  Synthetic
uacccuuuuauugcugcu

SEQ ID NO: 382177 - RNA, 19 nt, Artificial Sequence
  Synthetic
uuacccuuuuauugcugcu

SEQ ID NO: 382178 - RNA, 20 nt, Artificial Sequence
  Synthetic
guuacccuuuuauugcugcu

SEQ ID NO: 382179 - RNA, 21 nt, Artificial Sequence
  Synthetic
uguuacccuuuuauugcugcu

SEQ ID NO: 382180 - RNA, 22 nt, Artificial Sequence
  Synthetic
uuguuacccuuuuauugcugcu

SEQ ID NO: 382181 - RNA, 23 nt, Artificial Sequence
  Synthetic
auuguuacccuuuuauugcugcu

SEQ ID NO: 382182 - RNA, 24 nt, Artificial Sequence
  Synthetic
uauuguuacccuuuuauugcugcu

SEQ ID NO: 382183 - RNA, 18 nt, Artificial Sequence
  Synthetic
agacauagccuugcugcu

SEQ ID NO: 382184 - RNA, 19 nt, Artificial Sequence
  Synthetic
aagacauagccuugcugcu

SEQ ID NO: 382185 - RNA, 20 nt, Artificial Sequence
  Synthetic
aaagacauagccuugcugcu

SEQ ID NO: 382186 - RNA, 21 nt, Artificial Sequence
  Synthetic
uaaagacauagccuugcugcu

SEQ ID NO: 382187 - RNA, 22 nt, Artificial Sequence
  Synthetic
auaaagacauagccuugcugcu

SEQ ID NO: 382188 - RNA, 23 nt, Artificial Sequence
  Synthetic
aauaaagacauagccuugcugcu

SEQ ID NO: 382189 - RNA, 24 nt, Artificial Sequence
  Synthetic
gaauaaagacauagccuugcugcu

SEQ ID NO: 382190 - RNA, 18 nt, Artificial Sequence
  Synthetic
aaguugacucuugcugcu

SEQ ID NO: 382191 - RNA, 19 nt, Artificial Sequence
  Synthetic
gaaguugacucuugcugcu

SEQ ID NO: 382192 - RNA, 20 nt, Artificial Sequence
  Synthetic
agaaguugacucuugcugcu

SEQ ID NO: 382193 - RNA, 21 nt, Artificial Sequence
  Synthetic
uagaaguugacucuugcugcu

SEQ ID NO: 382194 - RNA, 22 nt, Artificial Sequence
  Synthetic
uuagaaguugacucuugcugcu

SEQ ID NO: 382195 - RNA, 23 nt, Artificial Sequence
  Synthetic
uuuagaaguugacucuugcugcu

SEQ ID NO: 382196 - RNA, 24 nt, Artificial Sequence
  Synthetic
guuuagaaguugacucuugcugcu

SEQ ID NO: 382197 - RNA, 18 nt, Artificial Sequence
  Synthetic
cuugaaugcuuugcugcu

SEQ ID NO: 382198 - RNA, 19 nt, Artificial Sequence
  Synthetic
ucuugaaugcuuugcugcu

SEQ ID NO: 382199 - RNA, 20 nt, Artificial Sequence
  Synthetic
cucuugaaugcuuugcugcu

SEQ ID NO: 382200 - RNA, 21 nt, Artificial Sequence
  Synthetic
ccucuugaaugcuuugcugcu

SEQ ID NO: 382201 - RNA, 22 nt, Artificial Sequence
  Synthetic
accucuugaaugcuuugcugcu

SEQ ID NO: 382202 - RNA, 23 nt, Artificial Sequence
  Synthetic
gaccucuugaaugcuuugcugcu

SEQ ID NO: 382203 - RNA, 24 nt, Artificial Sequence
  Synthetic
ugaccucuugaaugcuuugcugcu

SEQ ID NO: 382204 - RNA, 18 nt, Artificial Sequence
  Synthetic
caaggaauuaaaucugcu

SEQ ID NO: 382205 - RNA, 19 nt, Artificial Sequence
  Synthetic
ccaaggaauuaaaucugcu

SEQ ID NO: 382206 - RNA, 20 nt, Artificial Sequence
  Synthetic
cccaaggaauuaaaucugcu

SEQ ID NO: 382207 - RNA, 21 nt, Artificial Sequence
  Synthetic
acccaaggaauuaaaucugcu

SEQ ID NO: 382208 - RNA, 22 nt, Artificial Sequence
  Synthetic
gacccaaggaauuaaaucugcu

SEQ ID NO: 382209 - RNA, 23 nt, Artificial Sequence
  Synthetic
agacccaaggaauuaaaucugcu

SEQ ID NO: 382210 - RNA, 24 nt, Artificial Sequence
  Synthetic
uagacccaaggaauuaaaucugcu

SEQ ID NO: 382211 - RNA, 18 nt, Artificial Sequence
  Synthetic
uuugaaagcugaucugcu

SEQ ID NO: 382212 - RNA, 19 nt, Artificial Sequence
  Synthetic
auuugaaagcugaucugcu

SEQ ID NO: 382213 - RNA, 20 nt, Artificial Sequence
  Synthetic
uauuugaaagcugaucugcu

SEQ ID NO: 382214 - RNA, 21 nt, Artificial Sequence
  Synthetic
guauuugaaagcugaucugcu

SEQ ID NO: 382215 - RNA, 22 nt, Artificial Sequence
  Synthetic
aguauuugaaagcugaucugcu

SEQ ID NO: 382216 - RNA, 23 nt, Artificial Sequence
  Synthetic
aaguauuugaaagcugaucugcu

SEQ ID NO: 382217 - RNA, 24 nt, Artificial Sequence
  Synthetic
aaaguauuugaaagcugaucugcu

SEQ ID NO: 382218 - RNA, 18 nt, Artificial Sequence
  Synthetic
gaggaugauauaucugcu

SEQ ID NO: 382219 - RNA, 19 nt, Artificial Sequence
  Synthetic
ugaggaugauauaucugcu

SEQ ID NO: 382220 - RNA, 20 nt, Artificial Sequence
  Synthetic
augaggaugauauaucugcu

SEQ ID NO: 382221 - RNA, 21 nt, Artificial Sequence
  Synthetic
caugaggaugauauaucugcu

SEQ ID NO: 382222 - RNA, 22 nt, Artificial Sequence
  Synthetic
ccaugaggaugauauaucugcu

SEQ ID NO: 382223 - RNA, 23 nt, Artificial Sequence
  Synthetic
cccaugaggaugauauaucugcu

SEQ ID NO: 382224 - RNA, 24 nt, Artificial Sequence
  Synthetic
ccccaugaggaugauauaucugcu

SEQ ID NO: 382225 - RNA, 18 nt, Artificial Sequence
  Synthetic
aacuuaaaaaccucugcu

SEQ ID NO: 382226 - RNA, 19 nt, Artificial Sequence
  Synthetic
caacuuaaaaaccucugcu

SEQ ID NO: 382227 - RNA, 20 nt, Artificial Sequence
  Synthetic
acaacuuaaaaaccucugcu

SEQ ID NO: 382228 - RNA, 21 nt, Artificial Sequence
  Synthetic
cacaacuuaaaaaccucugcu

SEQ ID NO: 382229 - RNA, 22 nt, Artificial Sequence
  Synthetic
ucacaacuuaaaaaccucugcu

SEQ ID NO: 382230 - RNA, 23 nt, Artificial Sequence
  Synthetic
aucacaacuuaaaaaccucugcu

SEQ ID NO: 382231 - RNA, 24 nt, Artificial Sequence
  Synthetic
aaucacaacuuaaaaaccucugcu

SEQ ID NO: 382232 - RNA, 18 nt, Artificial Sequence
  Synthetic
cauugaaaugccucugcu

SEQ ID NO: 382233 - RNA, 19 nt, Artificial Sequence
  Synthetic
ucauugaaaugccucugcu

SEQ ID NO: 382234 - RNA, 20 nt, Artificial Sequence
  Synthetic
aucauugaaaugccucugcu

SEQ ID NO: 382235 - RNA, 21 nt, Artificial Sequence
  Synthetic
aaucauugaaaugccucugcu

SEQ ID NO: 382236 - RNA, 22 nt, Artificial Sequence
  Synthetic
uaaucauugaaaugccucugcu

SEQ ID NO: 382237 - RNA, 23 nt, Artificial Sequence
  Synthetic
uuaaucauugaaaugccucugcu

SEQ ID NO: 382238 - RNA, 24 nt, Artificial Sequence
  Synthetic
uuuaaucauugaaaugccucugcu

SEQ ID NO: 382239 - RNA, 18 nt, Artificial Sequence
  Synthetic
cagcacucgagcucugcu

SEQ ID NO: 382240 - RNA, 19 nt, Artificial Sequence
  Synthetic
acagcacucgagcucugcu

SEQ ID NO: 382241 - RNA, 20 nt, Artificial Sequence
  Synthetic
cacagcacucgagcucugcu

SEQ ID NO: 382242 - RNA, 21 nt, Artificial Sequence
  Synthetic
gcacagcacucgagcucugcu

SEQ ID NO: 382243 - RNA, 22 nt, Artificial Sequence
  Synthetic
agcacagcacucgagcucugcu

SEQ ID NO: 382244 - RNA, 23 nt, Artificial Sequence
  Synthetic
cagcacagcacucgagcucugcu

SEQ ID NO: 382245 - RNA, 24 nt, Artificial Sequence
  Synthetic
ccagcacagcacucgagcucugcu

SEQ ID NO: 382246 - RNA, 18 nt, Artificial Sequence
  Synthetic
ucuagaaccuucucugcu

SEQ ID NO: 382247 - RNA, 19 nt, Artificial Sequence
  Synthetic
uucuagaaccuucucugcu

SEQ ID NO: 382248 - RNA, 20 nt, Artificial Sequence
  Synthetic
uuucuagaaccuucucugcu

SEQ ID NO: 382249 - RNA, 21 nt, Artificial Sequence
  Synthetic
cuuucuagaaccuucucugcu

SEQ ID NO: 382250 - RNA, 22 nt, Artificial Sequence
  Synthetic
acuuucuagaaccuucucugcu

SEQ ID NO: 382251 - RNA, 23 nt, Artificial Sequence
  Synthetic
uacuuucuagaaccuucucugcu

SEQ ID NO: 382252 - RNA, 24 nt, Artificial Sequence
  Synthetic
uuacuuucuagaaccuucucugcu

SEQ ID NO: 382253 - RNA, 18 nt, Artificial Sequence
  Synthetic
guacuuguuuucucugcu

SEQ ID NO: 382254 - RNA, 19 nt, Artificial Sequence
  Synthetic
uguacuuguuuucucugcu

SEQ ID NO: 382255 - RNA, 20 nt, Artificial Sequence
  Synthetic
uuguacuuguuuucucugcu

SEQ ID NO: 382256 - RNA, 21 nt, Artificial Sequence
  Synthetic
uuuguacuuguuuucucugcu

SEQ ID NO: 382257 - RNA, 22 nt, Artificial Sequence
  Synthetic
cuuuguacuuguuuucucugcu

SEQ ID NO: 382258 - RNA, 23 nt, Artificial Sequence
  Synthetic
ccuuuguacuuguuuucucugcu

SEQ ID NO: 382259 - RNA, 24 nt, Artificial Sequence
  Synthetic
gccuuuguacuuguuuucucugcu

SEQ ID NO: 382260 - RNA, 18 nt, Artificial Sequence
  Synthetic
aagaagugccugucugcu

SEQ ID NO: 382261 - RNA, 19 nt, Artificial Sequence
  Synthetic
aaagaagugccugucugcu

SEQ ID NO: 382262 - RNA, 20 nt, Artificial Sequence
  Synthetic
caaagaagugccugucugcu

SEQ ID NO: 382263 - RNA, 21 nt, Artificial Sequence
  Synthetic
ucaaagaagugccugucugcu

SEQ ID NO: 382264 - RNA, 22 nt, Artificial Sequence
  Synthetic
gucaaagaagugccugucugcu

SEQ ID NO: 382265 - RNA, 23 nt, Artificial Sequence
  Synthetic
ggucaaagaagugccugucugcu

SEQ ID NO: 382266 - RNA, 24 nt, Artificial Sequence
  Synthetic
uggucaaagaagugccugucugcu

SEQ ID NO: 382267 - RNA, 18 nt, Artificial Sequence
  Synthetic
ugugcguugcauucugcu

SEQ ID NO: 382268 - RNA, 19 nt, Artificial Sequence
  Synthetic
uugugcguugcauucugcu

SEQ ID NO: 382269 - RNA, 20 nt, Artificial Sequence
  Synthetic
guugugcguugcauucugcu

SEQ ID NO: 382270 - RNA, 21 nt, Artificial Sequence
  Synthetic
aguugugcguugcauucugcu

SEQ ID NO: 382271 - RNA, 22 nt, Artificial Sequence
  Synthetic
caguugugcguugcauucugcu

SEQ ID NO: 382272 - RNA, 23 nt, Artificial Sequence
  Synthetic
acaguugugcguugcauucugcu

SEQ ID NO: 382273 - RNA, 24 nt, Artificial Sequence
  Synthetic
aacaguugugcguugcauucugcu

SEQ ID NO: 382274 - RNA, 18 nt, Artificial Sequence
  Synthetic
augauucuugauucugcu

SEQ ID NO: 382275 - RNA, 19 nt, Artificial Sequence
  Synthetic
caugauucuugauucugcu

SEQ ID NO: 382276 - RNA, 20 nt, Artificial Sequence
  Synthetic
ucaugauucuugauucugcu

SEQ ID NO: 382277 - RNA, 21 nt, Artificial Sequence
  Synthetic
cucaugauucuugauucugcu

SEQ ID NO: 382278 - RNA, 22 nt, Artificial Sequence
  Synthetic
gcucaugauucuugauucugcu

SEQ ID NO: 382279 - RNA, 23 nt, Artificial Sequence
  Synthetic
agcucaugauucuugauucugcu

SEQ ID NO: 382280 - RNA, 24 nt, Artificial Sequence
  Synthetic
uagcucaugauucuugauucugcu

SEQ ID NO: 382281 - RNA, 18 nt, Artificial Sequence
  Synthetic
ggcuuugacuauucugcu

SEQ ID NO: 382282 - RNA, 19 nt, Artificial Sequence
  Synthetic
uggcuuugacuauucugcu

SEQ ID NO: 382283 - RNA, 20 nt, Artificial Sequence
  Synthetic
uuggcuuugacuauucugcu

SEQ ID NO: 382284 - RNA, 21 nt, Artificial Sequence
  Synthetic
cuuggcuuugacuauucugcu

SEQ ID NO: 382285 - RNA, 22 nt, Artificial Sequence
  Synthetic
ccuuggcuuugacuauucugcu

SEQ ID NO: 382286 - RNA, 23 nt, Artificial Sequence
  Synthetic
cccuuggcuuugacuauucugcu

SEQ ID NO: 382287 - RNA, 24 nt, Artificial Sequence
  Synthetic
ucccuuggcuuugacuauucugcu

SEQ ID NO: 382288 - RNA, 18 nt, Artificial Sequence
  Synthetic
uccaaaacauuuucugcu

SEQ ID NO: 382289 - RNA, 19 nt, Artificial Sequence
  Synthetic
auccaaaacauuuucugcu

SEQ ID NO: 382290 - RNA, 20 nt, Artificial Sequence
  Synthetic
uauccaaaacauuuucugcu

SEQ ID NO: 382291 - RNA, 21 nt, Artificial Sequence
  Synthetic
cuauccaaaacauuuucugcu

SEQ ID NO: 382292 - RNA, 22 nt, Artificial Sequence
  Synthetic
ucuauccaaaacauuuucugcu

SEQ ID NO: 382293 - RNA, 23 nt, Artificial Sequence
  Synthetic
cucuauccaaaacauuuucugcu

SEQ ID NO: 382294 - RNA, 24 nt, Artificial Sequence
  Synthetic
ucucuauccaaaacauuuucugcu

SEQ ID NO: 382295 - RNA, 18 nt, Artificial Sequence
  Synthetic
uuggcuuuggaaagugcu

SEQ ID NO: 382296 - RNA, 19 nt, Artificial Sequence
  Synthetic
uuuggcuuuggaaagugcu

SEQ ID NO: 382297 - RNA, 20 nt, Artificial Sequence
  Synthetic
guuuggcuuuggaaagugcu

SEQ ID NO: 382298 - RNA, 21 nt, Artificial Sequence
  Synthetic
aguuuggcuuuggaaagugcu

SEQ ID NO: 382299 - RNA, 22 nt, Artificial Sequence
  Synthetic
aaguuuggcuuuggaaagugcu

SEQ ID NO: 382300 - RNA, 23 nt, Artificial Sequence
  Synthetic
caaguuuggcuuuggaaagugcu

SEQ ID NO: 382301 - RNA, 24 nt, Artificial Sequence
  Synthetic
acaaguuuggcuuuggaaagugcu

SEQ ID NO: 382302 - RNA, 18 nt, Artificial Sequence
  Synthetic
ugacccuucagaagugcu

SEQ ID NO: 382303 - RNA, 19 nt, Artificial Sequence
  Synthetic
augacccuucagaagugcu

SEQ ID NO: 382304 - RNA, 20 nt, Artificial Sequence
  Synthetic
aaugacccuucagaagugcu

SEQ ID NO: 382305 - RNA, 21 nt, Artificial Sequence
  Synthetic
gaaugacccuucagaagugcu

SEQ ID NO: 382306 - RNA, 22 nt, Artificial Sequence
  Synthetic
ggaaugacccuucagaagugcu

SEQ ID NO: 382307 - RNA, 23 nt, Artificial Sequence
  Synthetic
uggaaugacccuucagaagugcu

SEQ ID NO: 382308 - RNA, 24 nt, Artificial Sequence
  Synthetic
cuggaaugacccuucagaagugcu

SEQ ID NO: 382309 - RNA, 18 nt, Artificial Sequence
  Synthetic
uacaguaugauaagugcu

SEQ ID NO: 382310 - RNA, 19 nt, Artificial Sequence
  Synthetic
auacaguaugauaagugcu

SEQ ID NO: 382311 - RNA, 20 nt, Artificial Sequence
  Synthetic
aauacaguaugauaagugcu

SEQ ID NO: 382312 - RNA, 21 nt, Artificial Sequence
  Synthetic
caauacaguaugauaagugcu

SEQ ID NO: 382313 - RNA, 22 nt, Artificial Sequence
  Synthetic
acaauacaguaugauaagugcu

SEQ ID NO: 382314 - RNA, 23 nt, Artificial Sequence
  Synthetic
aacaauacaguaugauaagugcu

SEQ ID NO: 382315 - RNA, 24 nt, Artificial Sequence
  Synthetic
aaacaauacaguaugauaagugcu

SEQ ID NO: 382316 - RNA, 18 nt, Artificial Sequence
  Synthetic
ucaaaagugauaagugcu

SEQ ID NO: 382317 - RNA, 19 nt, Artificial Sequence
  Synthetic
uucaaaagugauaagugcu

SEQ ID NO: 382318 - RNA, 20 nt, Artificial Sequence
  Synthetic
guucaaaagugauaagugcu

SEQ ID NO: 382319 - RNA, 21 nt, Artificial Sequence
  Synthetic
uguucaaaagugauaagugcu

SEQ ID NO: 382320 - RNA, 22 nt, Artificial Sequence
  Synthetic
auguucaaaagugauaagugcu

SEQ ID NO: 382321 - RNA, 23 nt, Artificial Sequence
  Synthetic
uauguucaaaagugauaagugcu

SEQ ID NO: 382322 - RNA, 24 nt, Artificial Sequence
  Synthetic
guauguucaaaagugauaagugcu

SEQ ID NO: 382323 - RNA, 18 nt, Artificial Sequence
  Synthetic
uguuggguaguaagugcu

SEQ ID NO: 382324 - RNA, 19 nt, Artificial Sequence
  Synthetic
auguuggguaguaagugcu

SEQ ID NO: 382325 - RNA, 20 nt, Artificial Sequence
  Synthetic
uauguuggguaguaagugcu

SEQ ID NO: 382326 - RNA, 21 nt, Artificial Sequence
  Synthetic
uuauguuggguaguaagugcu

SEQ ID NO: 382327 - RNA, 22 nt, Artificial Sequence
  Synthetic
auuauguuggguaguaagugcu

SEQ ID NO: 382328 - RNA, 23 nt, Artificial Sequence
  Synthetic
aauuauguuggguaguaagugcu

SEQ ID NO: 382329 - RNA, 24 nt, Artificial Sequence
  Synthetic
aaauuauguuggguaguaagugcu

SEQ ID NO: 382330 - RNA, 18 nt, Artificial Sequence
  Synthetic
uuccaaggaaacagugcu

SEQ ID NO: 382331 - RNA, 19 nt, Artificial Sequence
  Synthetic
uuuccaaggaaacagugcu

SEQ ID NO: 382332 - RNA, 20 nt, Artificial Sequence
  Synthetic
guuuccaaggaaacagugcu

SEQ ID NO: 382333 - RNA, 21 nt, Artificial Sequence
  Synthetic
uguuuccaaggaaacagugcu

SEQ ID NO: 382334 - RNA, 22 nt, Artificial Sequence
  Synthetic
guguuuccaaggaaacagugcu

SEQ ID NO: 382335 - RNA, 23 nt, Artificial Sequence
  Synthetic
aguguuuccaaggaaacagugcu

SEQ ID NO: 382336 - RNA, 24 nt, Artificial Sequence
  Synthetic
uaguguuuccaaggaaacagugcu

SEQ ID NO: 382337 - RNA, 18 nt, Artificial Sequence
  Synthetic
agaacauggaacagugcu

SEQ ID NO: 382338 - RNA, 19 nt, Artificial Sequence
  Synthetic
uagaacauggaacagugcu

SEQ ID NO: 382339 - RNA, 20 nt, Artificial Sequence
  Synthetic
uuagaacauggaacagugcu

SEQ ID NO: 382340 - RNA, 21 nt, Artificial Sequence
  Synthetic
uuuagaacauggaacagugcu

SEQ ID NO: 382341 - RNA, 22 nt, Artificial Sequence
  Synthetic
cuuuagaacauggaacagugcu

SEQ ID NO: 382342 - RNA, 23 nt, Artificial Sequence
  Synthetic
ucuuuagaacauggaacagugcu

SEQ ID NO: 382343 - RNA, 24 nt, Artificial Sequence
  Synthetic
aucuuuagaacauggaacagugcu

SEQ ID NO: 382344 - RNA, 18 nt, Artificial Sequence
  Synthetic
ucauguauauacagugcu

SEQ ID NO: 382345 - RNA, 19 nt, Artificial Sequence
  Synthetic
cucauguauauacagugcu

SEQ ID NO: 382346 - RNA, 20 nt, Artificial Sequence
  Synthetic
gcucauguauauacagugcu

SEQ ID NO: 382347 - RNA, 21 nt, Artificial Sequence
  Synthetic
agcucauguauauacagugcu

SEQ ID NO: 382348 - RNA, 22 nt, Artificial Sequence
  Synthetic
gagcucauguauauacagugcu

SEQ ID NO: 382349 - RNA, 23 nt, Artificial Sequence
  Synthetic
ugagcucauguauauacagugcu

SEQ ID NO: 382350 - RNA, 24 nt, Artificial Sequence
  Synthetic
augagcucauguauauacagugcu

SEQ ID NO: 382351 - RNA, 18 nt, Artificial Sequence
  Synthetic
acuuguaaucccagugcu

SEQ ID NO: 382352 - RNA, 19 nt, Artificial Sequence
  Synthetic
cacuuguaaucccagugcu

SEQ ID NO: 382353 - RNA, 20 nt, Artificial Sequence
  Synthetic
acacuuguaaucccagugcu

SEQ ID NO: 382354 - RNA, 21 nt, Artificial Sequence
  Synthetic
cacacuuguaaucccagugcu

SEQ ID NO: 382355 - RNA, 22 nt, Artificial Sequence
  Synthetic
ucacacuuguaaucccagugcu

SEQ ID NO: 382356 - RNA, 23 nt, Artificial Sequence
  Synthetic
cucacacuuguaaucccagugcu

SEQ ID NO: 382357 - RNA, 24 nt, Artificial Sequence
  Synthetic
gcucacacuuguaaucccagugcu

SEQ ID NO: 382358 - RNA, 18 nt, Artificial Sequence
  Synthetic
aucuauuuaagcagugcu

SEQ ID NO: 382359 - RNA, 19 nt, Artificial Sequence
  Synthetic
aaucuauuuaagcagugcu

SEQ ID NO: 382360 - RNA, 20 nt, Artificial Sequence
  Synthetic
uaaucuauuuaagcagugcu

SEQ ID NO: 382361 - RNA, 21 nt, Artificial Sequence
  Synthetic
auaaucuauuuaagcagugcu

SEQ ID NO: 382362 - RNA, 22 nt, Artificial Sequence
  Synthetic
cauaaucuauuuaagcagugcu

SEQ ID NO: 382363 - RNA, 23 nt, Artificial Sequence
  Synthetic
ucauaaucuauuuaagcagugcu

SEQ ID NO: 382364 - RNA, 24 nt, Artificial Sequence
  Synthetic
aucauaaucuauuuaagcagugcu

SEQ ID NO: 382365 - RNA, 18 nt, Artificial Sequence
  Synthetic
cuuaaacacagcagugcu

SEQ ID NO: 382366 - RNA, 19 nt, Artificial Sequence
  Synthetic
acuuaaacacagcagugcu

SEQ ID NO: 382367 - RNA, 20 nt, Artificial Sequence
  Synthetic
cacuuaaacacagcagugcu

SEQ ID NO: 382368 - RNA, 21 nt, Artificial Sequence
  Synthetic
acacuuaaacacagcagugcu

SEQ ID NO: 382369 - RNA, 22 nt, Artificial Sequence
  Synthetic
gacacuuaaacacagcagugcu

SEQ ID NO: 382370 - RNA, 23 nt, Artificial Sequence
  Synthetic
agacacuuaaacacagcagugcu

SEQ ID NO: 382371 - RNA, 24 nt, Artificial Sequence
  Synthetic
gagacacuuaaacacagcagugcu

SEQ ID NO: 382372 - RNA, 18 nt, Artificial Sequence
  Synthetic
accauuccuaucagugcu

SEQ ID NO: 382373 - RNA, 19 nt, Artificial Sequence
  Synthetic
gaccauuccuaucagugcu

SEQ ID NO: 382374 - RNA, 20 nt, Artificial Sequence
  Synthetic
ugaccauuccuaucagugcu

SEQ ID NO: 382375 - RNA, 21 nt, Artificial Sequence
  Synthetic
uugaccauuccuaucagugcu

SEQ ID NO: 382376 - RNA, 22 nt, Artificial Sequence
  Synthetic
guugaccauuccuaucagugcu

SEQ ID NO: 382377 - RNA, 23 nt, Artificial Sequence
  Synthetic
uguugaccauuccuaucagugcu

SEQ ID NO: 382378 - RNA, 24 nt, Artificial Sequence
  Synthetic
uuguugaccauuccuaucagugcu

SEQ ID NO: 382379 - RNA, 18 nt, Artificial Sequence
  Synthetic
gccugucaucucagugcu

SEQ ID NO: 382380 - RNA, 19 nt, Artificial Sequence
  Synthetic
ugccugucaucucagugcu

SEQ ID NO: 382381 - RNA, 20 nt, Artificial Sequence
  Synthetic
augccugucaucucagugcu

SEQ ID NO: 382382 - RNA, 21 nt, Artificial Sequence
  Synthetic
caugccugucaucucagugcu

SEQ ID NO: 382383 - RNA, 22 nt, Artificial Sequence
  Synthetic
ucaugccugucaucucagugcu

SEQ ID NO: 382384 - RNA, 23 nt, Artificial Sequence
  Synthetic
cucaugccugucaucucagugcu

SEQ ID NO: 382385 - RNA, 24 nt, Artificial Sequence
  Synthetic
gcucaugccugucaucucagugcu

SEQ ID NO: 382386 - RNA, 18 nt, Artificial Sequence
  Synthetic
cgauuaauccggagugcu

SEQ ID NO: 382387 - RNA, 19 nt, Artificial Sequence
  Synthetic
gcgauuaauccggagugcu

SEQ ID NO: 382388 - RNA, 20 nt, Artificial Sequence
  Synthetic
ugcgauuaauccggagugcu

SEQ ID NO: 382389 - RNA, 21 nt, Artificial Sequence
  Synthetic
gugcgauuaauccggagugcu

SEQ ID NO: 382390 - RNA, 22 nt, Artificial Sequence
  Synthetic
ugugcgauuaauccggagugcu

SEQ ID NO: 382391 - RNA, 23 nt, Artificial Sequence
  Synthetic
augugcgauuaauccggagugcu

SEQ ID NO: 382392 - RNA, 24 nt, Artificial Sequence
  Synthetic
uaugugcgauuaauccggagugcu

SEQ ID NO: 382393 - RNA, 18 nt, Artificial Sequence
  Synthetic
caacagccugauagugcu

SEQ ID NO: 382394 - RNA, 19 nt, Artificial Sequence
  Synthetic
ccaacagccugauagugcu

SEQ ID NO: 382395 - RNA, 20 nt, Artificial Sequence
  Synthetic
gccaacagccugauagugcu

SEQ ID NO: 382396 - RNA, 21 nt, Artificial Sequence
  Synthetic
agccaacagccugauagugcu

SEQ ID NO: 382397 - RNA, 22 nt, Artificial Sequence
  Synthetic
gagccaacagccugauagugcu

SEQ ID NO: 382398 - RNA, 23 nt, Artificial Sequence
  Synthetic
ugagccaacagccugauagugcu

SEQ ID NO: 382399 - RNA, 24 nt, Artificial Sequence
  Synthetic
uugagccaacagccugauagugcu

SEQ ID NO: 382400 - RNA, 18 nt, Artificial Sequence
  Synthetic
ugcugagauguuagugcu

SEQ ID NO: 382401 - RNA, 19 nt, Artificial Sequence
  Synthetic
uugcugagauguuagugcu

SEQ ID NO: 382402 - RNA, 20 nt, Artificial Sequence
  Synthetic
auugcugagauguuagugcu

SEQ ID NO: 382403 - RNA, 21 nt, Artificial Sequence
  Synthetic
uauugcugagauguuagugcu

SEQ ID NO: 382404 - RNA, 22 nt, Artificial Sequence
  Synthetic
guauugcugagauguuagugcu

SEQ ID NO: 382405 - RNA, 23 nt, Artificial Sequence
  Synthetic
cguauugcugagauguuagugcu

SEQ ID NO: 382406 - RNA, 24 nt, Artificial Sequence
  Synthetic
acguauugcugagauguuagugcu

SEQ ID NO: 382407 - RNA, 18 nt, Artificial Sequence
  Synthetic
gcuggccuugaucgugcu

SEQ ID NO: 382408 - RNA, 19 nt, Artificial Sequence
  Synthetic
ugcuggccuugaucgugcu

SEQ ID NO: 382409 - RNA, 20 nt, Artificial Sequence
  Synthetic
cugcuggccuugaucgugcu

SEQ ID NO: 382410 - RNA, 21 nt, Artificial Sequence
  Synthetic
gcugcuggccuugaucgugcu

SEQ ID NO: 382411 - RNA, 22 nt, Artificial Sequence
  Synthetic
ugcugcuggccuugaucgugcu

SEQ ID NO: 382412 - RNA, 23 nt, Artificial Sequence
  Synthetic
augcugcuggccuugaucgugcu

SEQ ID NO: 382413 - RNA, 24 nt, Artificial Sequence
  Synthetic
gaugcugcuggccuugaucgugcu

SEQ ID NO: 382414 - RNA, 18 nt, Artificial Sequence
  Synthetic
uaccuaccccaaggugcu

SEQ ID NO: 382415 - RNA, 19 nt, Artificial Sequence
  Synthetic
guaccuaccccaaggugcu

SEQ ID NO: 382416 - RNA, 20 nt, Artificial Sequence
  Synthetic
aguaccuaccccaaggugcu

SEQ ID NO: 382417 - RNA, 21 nt, Artificial Sequence
  Synthetic
uaguaccuaccccaaggugcu

SEQ ID NO: 382418 - RNA, 22 nt, Artificial Sequence
  Synthetic
auaguaccuaccccaaggugcu

SEQ ID NO: 382419 - RNA, 23 nt, Artificial Sequence
  Synthetic
gauaguaccuaccccaaggugcu

SEQ ID NO: 382420 - RNA, 24 nt, Artificial Sequence
  Synthetic
ugauaguaccuaccccaaggugcu

SEQ ID NO: 382421 - RNA, 18 nt, Artificial Sequence
  Synthetic
aacacugugccaggugcu

SEQ ID NO: 382422 - RNA, 19 nt, Artificial Sequence
  Synthetic
uaacacugugccaggugcu

SEQ ID NO: 382423 - RNA, 20 nt, Artificial Sequence
  Synthetic
uuaacacugugccaggugcu

SEQ ID NO: 382424 - RNA, 21 nt, Artificial Sequence
  Synthetic
cuuaacacugugccaggugcu

SEQ ID NO: 382425 - RNA, 22 nt, Artificial Sequence
  Synthetic
acuuaacacugugccaggugcu

SEQ ID NO: 382426 - RNA, 23 nt, Artificial Sequence
  Synthetic
uacuuaacacugugccaggugcu

SEQ ID NO: 382427 - RNA, 24 nt, Artificial Sequence
  Synthetic
guacuuaacacugugccaggugcu

SEQ ID NO: 382428 - RNA, 18 nt, Artificial Sequence
  Synthetic
caggaaacaucaggugcu

SEQ ID NO: 382429 - RNA, 19 nt, Artificial Sequence
  Synthetic
ucaggaaacaucaggugcu

SEQ ID NO: 382430 - RNA, 20 nt, Artificial Sequence
  Synthetic
gucaggaaacaucaggugcu

SEQ ID NO: 382431 - RNA, 21 nt, Artificial Sequence
  Synthetic
agucaggaaacaucaggugcu

SEQ ID NO: 382432 - RNA, 22 nt, Artificial Sequence
  Synthetic
aagucaggaaacaucaggugcu

SEQ ID NO: 382433 - RNA, 23 nt, Artificial Sequence
  Synthetic
aaagucaggaaacaucaggugcu

SEQ ID NO: 382434 - RNA, 24 nt, Artificial Sequence
  Synthetic
aaaagucaggaaacaucaggugcu

SEQ ID NO: 382435 - RNA, 18 nt, Artificial Sequence
  Synthetic
aacucucuaucaggugcu

SEQ ID NO: 382436 - RNA, 19 nt, Artificial Sequence
  Synthetic
gaacucucuaucaggugcu

SEQ ID NO: 382437 - RNA, 20 nt, Artificial Sequence
  Synthetic
agaacucucuaucaggugcu

SEQ ID NO: 382438 - RNA, 21 nt, Artificial Sequence
  Synthetic
uagaacucucuaucaggugcu

SEQ ID NO: 382439 - RNA, 22 nt, Artificial Sequence
  Synthetic
guagaacucucuaucaggugcu

SEQ ID NO: 382440 - RNA, 23 nt, Artificial Sequence
  Synthetic
gguagaacucucuaucaggugcu

SEQ ID NO: 382441 - RNA, 24 nt, Artificial Sequence
  Synthetic
agguagaacucucuaucaggugcu

SEQ ID NO: 382442 - RNA, 18 nt, Artificial Sequence
  Synthetic
agcacaugaguaggugcu

SEQ ID NO: 382443 - RNA, 19 nt, Artificial Sequence
  Synthetic
cagcacaugaguaggugcu

SEQ ID NO: 382444 - RNA, 20 nt, Artificial Sequence
  Synthetic
ccagcacaugaguaggugcu

SEQ ID NO: 382445 - RNA, 21 nt, Artificial Sequence
  Synthetic
cccagcacaugaguaggugcu

SEQ ID NO: 382446 - RNA, 22 nt, Artificial Sequence
  Synthetic
gcccagcacaugaguaggugcu

SEQ ID NO: 382447 - RNA, 23 nt, Artificial Sequence
  Synthetic
ugcccagcacaugaguaggugcu

SEQ ID NO: 382448 - RNA, 24 nt, Artificial Sequence
  Synthetic
augcccagcacaugaguaggugcu

SEQ ID NO: 382449 - RNA, 18 nt, Artificial Sequence
  Synthetic
auauuagagcacggugcu

SEQ ID NO: 382450 - RNA, 19 nt, Artificial Sequence
  Synthetic
aauauuagagcacggugcu

SEQ ID NO: 382451 - RNA, 20 nt, Artificial Sequence
  Synthetic
uaauauuagagcacggugcu

SEQ ID NO: 382452 - RNA, 21 nt, Artificial Sequence
  Synthetic
auaauauuagagcacggugcu

SEQ ID NO: 382453 - RNA, 22 nt, Artificial Sequence
  Synthetic
gauaauauuagagcacggugcu

SEQ ID NO: 382454 - RNA, 23 nt, Artificial Sequence
  Synthetic
ugauaauauuagagcacggugcu

SEQ ID NO: 382455 - RNA, 24 nt, Artificial Sequence
  Synthetic
augauaauauuagagcacggugcu

SEQ ID NO: 382456 - RNA, 18 nt, Artificial Sequence
  Synthetic
gaggaugaagagggugcu

SEQ ID NO: 382457 - RNA, 19 nt, Artificial Sequence
  Synthetic
agaggaugaagagggugcu

SEQ ID NO: 382458 - RNA, 20 nt, Artificial Sequence
  Synthetic
uagaggaugaagagggugcu

SEQ ID NO: 382459 - RNA, 21 nt, Artificial Sequence
  Synthetic
auagaggaugaagagggugcu

SEQ ID NO: 382460 - RNA, 22 nt, Artificial Sequence
  Synthetic
aauagaggaugaagagggugcu

SEQ ID NO: 382461 - RNA, 23 nt, Artificial Sequence
  Synthetic
uaauagaggaugaagagggugcu

SEQ ID NO: 382462 - RNA, 24 nt, Artificial Sequence
  Synthetic
auaauagaggaugaagagggugcu

SEQ ID NO: 382463 - RNA, 18 nt, Artificial Sequence
  Synthetic
auaaucuauuggggugcu

SEQ ID NO: 382464 - RNA, 19 nt, Artificial Sequence
  Synthetic
uauaaucuauuggggugcu

SEQ ID NO: 382465 - RNA, 20 nt, Artificial Sequence
  Synthetic
uuauaaucuauuggggugcu

SEQ ID NO: 382466 - RNA, 21 nt, Artificial Sequence
  Synthetic
auuauaaucuauuggggugcu

SEQ ID NO: 382467 - RNA, 22 nt, Artificial Sequence
  Synthetic
aauuauaaucuauuggggugcu

SEQ ID NO: 382468 - RNA, 23 nt, Artificial Sequence
  Synthetic
uaauuauaaucuauuggggugcu

SEQ ID NO: 382469 - RNA, 24 nt, Artificial Sequence
  Synthetic
uuaauuauaaucuauuggggugcu

SEQ ID NO: 382470 - RNA, 18 nt, Artificial Sequence
  Synthetic
ggccuuguggugggugcu

SEQ ID NO: 382471 - RNA, 19 nt, Artificial Sequence
  Synthetic
gggccuuguggugggugcu

SEQ ID NO: 382472 - RNA, 20 nt, Artificial Sequence
  Synthetic
agggccuuguggugggugcu

SEQ ID NO: 382473 - RNA, 21 nt, Artificial Sequence
  Synthetic
cagggccuuguggugggugcu

SEQ ID NO: 382474 - RNA, 22 nt, Artificial Sequence
  Synthetic
acagggccuuguggugggugcu

SEQ ID NO: 382475 - RNA, 23 nt, Artificial Sequence
  Synthetic
uacagggccuuguggugggugcu

SEQ ID NO: 382476 - RNA, 24 nt, Artificial Sequence
  Synthetic
auacagggccuuguggugggugcu

SEQ ID NO: 382477 - RNA, 18 nt, Artificial Sequence
  Synthetic
uucagaagagauggugcu

SEQ ID NO: 382478 - RNA, 19 nt, Artificial Sequence
  Synthetic
auucagaagagauggugcu

SEQ ID NO: 382479 - RNA, 20 nt, Artificial Sequence
  Synthetic
aauucagaagagauggugcu

SEQ ID NO: 382480 - RNA, 21 nt, Artificial Sequence
  Synthetic
caauucagaagagauggugcu

SEQ ID NO: 382481 - RNA, 22 nt, Artificial Sequence
  Synthetic
ucaauucagaagagauggugcu

SEQ ID NO: 382482 - RNA, 23 nt, Artificial Sequence
  Synthetic
aucaauucagaagagauggugcu

SEQ ID NO: 382483 - RNA, 24 nt, Artificial Sequence
  Synthetic
aaucaauucagaagagauggugcu

SEQ ID NO: 382484 - RNA, 18 nt, Artificial Sequence
  Synthetic
aaagagcacacuggugcu

SEQ ID NO: 382485 - RNA, 19 nt, Artificial Sequence
  Synthetic
gaaagagcacacuggugcu

SEQ ID NO: 382486 - RNA, 20 nt, Artificial Sequence
  Synthetic
agaaagagcacacuggugcu

SEQ ID NO: 382487 - RNA, 21 nt, Artificial Sequence
  Synthetic
aagaaagagcacacuggugcu

SEQ ID NO: 382488 - RNA, 22 nt, Artificial Sequence
  Synthetic
aaagaaagagcacacuggugcu

SEQ ID NO: 382489 - RNA, 23 nt, Artificial Sequence
  Synthetic
gaaagaaagagcacacuggugcu

SEQ ID NO: 382490 - RNA, 24 nt, Artificial Sequence
  Synthetic
agaaagaaagagcacacuggugcu

SEQ ID NO: 382491 - RNA, 18 nt, Artificial Sequence
  Synthetic
gccccaagaccuggugcu

SEQ ID NO: 382492 - RNA, 19 nt, Artificial Sequence
  Synthetic
agccccaagaccuggugcu

SEQ ID NO: 382493 - RNA, 20 nt, Artificial Sequence
  Synthetic
aagccccaagaccuggugcu

SEQ ID NO: 382494 - RNA, 21 nt, Artificial Sequence
  Synthetic
aaagccccaagaccuggugcu

SEQ ID NO: 382495 - RNA, 22 nt, Artificial Sequence
  Synthetic
aaaagccccaagaccuggugcu

SEQ ID NO: 382496 - RNA, 23 nt, Artificial Sequence
  Synthetic
caaaagccccaagaccuggugcu

SEQ ID NO: 382497 - RNA, 24 nt, Artificial Sequence
  Synthetic
ucaaaagccccaagaccuggugcu

SEQ ID NO: 382498 - RNA, 18 nt, Artificial Sequence
  Synthetic
caggaaugugcuggugcu

SEQ ID NO: 382499 - RNA, 19 nt, Artificial Sequence
  Synthetic
ccaggaaugugcuggugcu

SEQ ID NO: 382500 - RNA, 20 nt, Artificial Sequence
  Synthetic
cccaggaaugugcuggugcu

SEQ ID NO: 382501 - RNA, 21 nt, Artificial Sequence
  Synthetic
ucccaggaaugugcuggugcu

SEQ ID NO: 382502 - RNA, 22 nt, Artificial Sequence
  Synthetic
cucccaggaaugugcuggugcu

SEQ ID NO: 382503 - RNA, 23 nt, Artificial Sequence
  Synthetic
acucccaggaaugugcuggugcu

SEQ ID NO: 382504 - RNA, 24 nt, Artificial Sequence
  Synthetic
gacucccaggaaugugcuggugcu

SEQ ID NO: 382505 - RNA, 18 nt, Artificial Sequence
  Synthetic
uccuccuuauaaugugcu

SEQ ID NO: 382506 - RNA, 19 nt, Artificial Sequence
  Synthetic
guccuccuuauaaugugcu

SEQ ID NO: 382507 - RNA, 20 nt, Artificial Sequence
  Synthetic
uguccuccuuauaaugugcu

SEQ ID NO: 382508 - RNA, 21 nt, Artificial Sequence
  Synthetic
auguccuccuuauaaugugcu

SEQ ID NO: 382509 - RNA, 22 nt, Artificial Sequence
  Synthetic
uauguccuccuuauaaugugcu

SEQ ID NO: 382510 - RNA, 23 nt, Artificial Sequence
  Synthetic
uuauguccuccuuauaaugugcu

SEQ ID NO: 382511 - RNA, 24 nt, Artificial Sequence
  Synthetic
uuuauguccuccuuauaaugugcu

SEQ ID NO: 382512 - RNA, 18 nt, Artificial Sequence
  Synthetic
uuagauaucuaaugugcu

SEQ ID NO: 382513 - RNA, 19 nt, Artificial Sequence
  Synthetic
cuuagauaucuaaugugcu

SEQ ID NO: 382514 - RNA, 20 nt, Artificial Sequence
  Synthetic
ucuuagauaucuaaugugcu

SEQ ID NO: 382515 - RNA, 21 nt, Artificial Sequence
  Synthetic
uucuuagauaucuaaugugcu

SEQ ID NO: 382516 - RNA, 22 nt, Artificial Sequence
  Synthetic
uuucuuagauaucuaaugugcu

SEQ ID NO: 382517 - RNA, 23 nt, Artificial Sequence
  Synthetic
uuuucuuagauaucuaaugugcu

SEQ ID NO: 382518 - RNA, 24 nt, Artificial Sequence
  Synthetic
uuuuucuuagauaucuaaugugcu

SEQ ID NO: 382519 - RNA, 18 nt, Artificial Sequence
  Synthetic
aagaauagucuaugugcu

SEQ ID NO: 382520 - RNA, 19 nt, Artificial Sequence
  Synthetic
uaagaauagucuaugugcu

SEQ ID NO: 382521 - RNA, 20 nt, Artificial Sequence
  Synthetic
uuaagaauagucuaugugcu

SEQ ID NO: 382522 - RNA, 21 nt, Artificial Sequence
  Synthetic
auuaagaauagucuaugugcu

SEQ ID NO: 382523 - RNA, 22 nt, Artificial Sequence
  Synthetic
uauuaagaauagucuaugugcu

SEQ ID NO: 382524 - RNA, 23 nt, Artificial Sequence
  Synthetic
guauuaagaauagucuaugugcu

SEQ ID NO: 382525 - RNA, 24 nt, Artificial Sequence
  Synthetic
cguauuaagaauagucuaugugcu

SEQ ID NO: 382526 - RNA, 18 nt, Artificial Sequence
  Synthetic
gaauucuuagacugugcu

SEQ ID NO: 382527 - RNA, 19 nt, Artificial Sequence
  Synthetic
ggaauucuuagacugugcu

SEQ ID NO: 382528 - RNA, 20 nt, Artificial Sequence
  Synthetic
uggaauucuuagacugugcu

SEQ ID NO: 382529 - RNA, 21 nt, Artificial Sequence
  Synthetic
auggaauucuuagacugugcu

SEQ ID NO: 382530 - RNA, 22 nt, Artificial Sequence
  Synthetic
cauggaauucuuagacugugcu

SEQ ID NO: 382531 - RNA, 23 nt, Artificial Sequence
  Synthetic
ucauggaauucuuagacugugcu

SEQ ID NO: 382532 - RNA, 24 nt, Artificial Sequence
  Synthetic
cucauggaauucuuagacugugcu

SEQ ID NO: 382533 - RNA, 18 nt, Artificial Sequence
  Synthetic
auuaaugacuacugugcu

SEQ ID NO: 382534 - RNA, 19 nt, Artificial Sequence
  Synthetic
aauuaaugacuacugugcu

SEQ ID NO: 382535 - RNA, 20 nt, Artificial Sequence
  Synthetic
caauuaaugacuacugugcu

SEQ ID NO: 382536 - RNA, 21 nt, Artificial Sequence
  Synthetic
gcaauuaaugacuacugugcu

SEQ ID NO: 382537 - RNA, 22 nt, Artificial Sequence
  Synthetic
agcaauuaaugacuacugugcu

SEQ ID NO: 382538 - RNA, 23 nt, Artificial Sequence
  Synthetic
uagcaauuaaugacuacugugcu

SEQ ID NO: 382539 - RNA, 24 nt, Artificial Sequence
  Synthetic
auagcaauuaaugacuacugugcu

SEQ ID NO: 382540 - RNA, 18 nt, Artificial Sequence
  Synthetic
gccuguaaucccugugcu

SEQ ID NO: 382541 - RNA, 19 nt, Artificial Sequence
  Synthetic
ugccuguaaucccugugcu

SEQ ID NO: 382542 - RNA, 20 nt, Artificial Sequence
  Synthetic
augccuguaaucccugugcu

SEQ ID NO: 382543 - RNA, 21 nt, Artificial Sequence
  Synthetic
caugccuguaaucccugugcu

SEQ ID NO: 382544 - RNA, 22 nt, Artificial Sequence
  Synthetic
ucaugccuguaaucccugugcu

SEQ ID NO: 382545 - RNA, 23 nt, Artificial Sequence
  Synthetic
cucaugccuguaaucccugugcu

SEQ ID NO: 382546 - RNA, 24 nt, Artificial Sequence
  Synthetic
gcucaugccuguaaucccugugcu

SEQ ID NO: 382547 - RNA, 18 nt, Artificial Sequence
  Synthetic
aggauuaauaugugugcu

SEQ ID NO: 382548 - RNA, 19 nt, Artificial Sequence
  Synthetic
caggauuaauaugugugcu

SEQ ID NO: 382549 - RNA, 20 nt, Artificial Sequence
  Synthetic
gcaggauuaauaugugugcu

SEQ ID NO: 382550 - RNA, 21 nt, Artificial Sequence
  Synthetic
agcaggauuaauaugugugcu

SEQ ID NO: 382551 - RNA, 22 nt, Artificial Sequence
  Synthetic
aagcaggauuaauaugugugcu

SEQ ID NO: 382552 - RNA, 23 nt, Artificial Sequence
  Synthetic
gaagcaggauuaauaugugugcu

SEQ ID NO: 382553 - RNA, 24 nt, Artificial Sequence
  Synthetic
ugaagcaggauuaauaugugugcu

SEQ ID NO: 382554 - RNA, 18 nt, Artificial Sequence
  Synthetic
gauaauaaucugugugcu

SEQ ID NO: 382555 - RNA, 19 nt, Artificial Sequence
  Synthetic
ugauaauaaucugugugcu

SEQ ID NO: 382556 - RNA, 20 nt, Artificial Sequence
  Synthetic
uugauaauaaucugugugcu

SEQ ID NO: 382557 - RNA, 21 nt, Artificial Sequence
  Synthetic
uuugauaauaaucugugugcu

SEQ ID NO: 382558 - RNA, 22 nt, Artificial Sequence
  Synthetic
cuuugauaauaaucugugugcu

SEQ ID NO: 382559 - RNA, 23 nt, Artificial Sequence
  Synthetic
ucuuugauaauaaucugugugcu

SEQ ID NO: 382560 - RNA, 24 nt, Artificial Sequence
  Synthetic
aucuuugauaauaaucugugugcu

SEQ ID NO: 382561 - RNA, 18 nt, Artificial Sequence
  Synthetic
ugaaauucagugugugcu

SEQ ID NO: 382562 - RNA, 19 nt, Artificial Sequence
  Synthetic
augaaauucagugugugcu

SEQ ID NO: 382563 - RNA, 20 nt, Artificial Sequence
  Synthetic
uaugaaauucagugugugcu

SEQ ID NO: 382564 - RNA, 21 nt, Artificial Sequence
  Synthetic
auaugaaauucagugugugcu

SEQ ID NO: 382565 - RNA, 22 nt, Artificial Sequence
  Synthetic
gauaugaaauucagugugugcu

SEQ ID NO: 382566 - RNA, 23 nt, Artificial Sequence
  Synthetic
agauaugaaauucagugugugcu

SEQ ID NO: 382567 - RNA, 24 nt, Artificial Sequence
  Synthetic
uagauaugaaauucagugugugcu

SEQ ID NO: 382568 - RNA, 18 nt, Artificial Sequence
  Synthetic
ugugccaaacauugugcu

SEQ ID NO: 382569 - RNA, 19 nt, Artificial Sequence
  Synthetic
augugccaaacauugugcu

SEQ ID NO: 382570 - RNA, 20 nt, Artificial Sequence
  Synthetic
uaugugccaaacauugugcu

SEQ ID NO: 382571 - RNA, 21 nt, Artificial Sequence
  Synthetic
guaugugccaaacauugugcu

SEQ ID NO: 382572 - RNA, 22 nt, Artificial Sequence
  Synthetic
aguaugugccaaacauugugcu

SEQ ID NO: 382573 - RNA, 23 nt, Artificial Sequence
  Synthetic
aaguaugugccaaacauugugcu

SEQ ID NO: 382574 - RNA, 24 nt, Artificial Sequence
  Synthetic
caaguaugugccaaacauugugcu

SEQ ID NO: 382575 - RNA, 18 nt, Artificial Sequence
  Synthetic
gauggaggcgauugugcu

SEQ ID NO: 382576 - RNA, 19 nt, Artificial Sequence
  Synthetic
agauggaggcgauugugcu

SEQ ID NO: 382577 - RNA, 20 nt, Artificial Sequence
  Synthetic
gagauggaggcgauugugcu

SEQ ID NO: 382578 - RNA, 21 nt, Artificial Sequence
  Synthetic
ggagauggaggcgauugugcu

SEQ ID NO: 382579 - RNA, 22 nt, Artificial Sequence
  Synthetic
gggagauggaggcgauugugcu

SEQ ID NO: 382580 - RNA, 23 nt, Artificial Sequence
  Synthetic
agggagauggaggcgauugugcu

SEQ ID NO: 382581 - RNA, 24 nt, Artificial Sequence
  Synthetic
cagggagauggaggcgauugugcu

SEQ ID NO: 382582 - RNA, 18 nt, Artificial Sequence
  Synthetic
uagcaacccuauugugcu

SEQ ID NO: 382583 - RNA, 19 nt, Artificial Sequence
  Synthetic
auagcaacccuauugugcu

SEQ ID NO: 382584 - RNA, 20 nt, Artificial Sequence
  Synthetic
uauagcaacccuauugugcu

SEQ ID NO: 382585 - RNA, 21 nt, Artificial Sequence
  Synthetic
cuauagcaacccuauugugcu

SEQ ID NO: 382586 - RNA, 22 nt, Artificial Sequence
  Synthetic
acuauagcaacccuauugugcu

SEQ ID NO: 382587 - RNA, 23 nt, Artificial Sequence
  Synthetic
gacuauagcaacccuauugugcu

SEQ ID NO: 382588 - RNA, 24 nt, Artificial Sequence
  Synthetic
ugacuauagcaacccuauugugcu

SEQ ID NO: 382589 - RNA, 18 nt, Artificial Sequence
  Synthetic
uccaguuaggguugugcu

SEQ ID NO: 382590 - RNA, 19 nt, Artificial Sequence
  Synthetic
uuccaguuaggguugugcu

SEQ ID NO: 382591 - RNA, 20 nt, Artificial Sequence
  Synthetic
uuuccaguuaggguugugcu

SEQ ID NO: 382592 - RNA, 21 nt, Artificial Sequence
  Synthetic
auuuccaguuaggguugugcu

SEQ ID NO: 382593 - RNA, 22 nt, Artificial Sequence
  Synthetic
cauuuccaguuaggguugugcu

SEQ ID NO: 382594 - RNA, 23 nt, Artificial Sequence
  Synthetic
ccauuuccaguuaggguugugcu

SEQ ID NO: 382595 - RNA, 24 nt, Artificial Sequence
  Synthetic
accauuuccaguuaggguugugcu

SEQ ID NO: 382596 - RNA, 18 nt, Artificial Sequence
  Synthetic
uuuguauuuuuuugugcu

SEQ ID NO: 382597 - RNA, 19 nt, Artificial Sequence
  Synthetic
cuuuguauuuuuuugugcu

SEQ ID NO: 382598 - RNA, 20 nt, Artificial Sequence
  Synthetic
gcuuuguauuuuuuugugcu

SEQ ID NO: 382599 - RNA, 21 nt, Artificial Sequence
  Synthetic
agcuuuguauuuuuuugugcu

SEQ ID NO: 382600 - RNA, 22 nt, Artificial Sequence
  Synthetic
aagcuuuguauuuuuuugugcu

SEQ ID NO: 382601 - RNA, 23 nt, Artificial Sequence
  Synthetic
uaagcuuuguauuuuuuugugcu

SEQ ID NO: 382602 - RNA, 24 nt, Artificial Sequence
  Synthetic
auaagcuuuguauuuuuuugugcu

SEQ ID NO: 382603 - RNA, 18 nt, Artificial Sequence
  Synthetic
aacauaaguaaaauugcu

SEQ ID NO: 382604 - RNA, 19 nt, Artificial Sequence
  Synthetic
aaacauaaguaaaauugcu

SEQ ID NO: 382605 - RNA, 20 nt, Artificial Sequence
  Synthetic
uaaacauaaguaaaauugcu

SEQ ID NO: 382606 - RNA, 21 nt, Artificial Sequence
  Synthetic
auaaacauaaguaaaauugcu

SEQ ID NO: 382607 - RNA, 22 nt, Artificial Sequence
  Synthetic
cauaaacauaaguaaaauugcu

SEQ ID NO: 382608 - RNA, 23 nt, Artificial Sequence
  Synthetic
acauaaacauaaguaaaauugcu

SEQ ID NO: 382609 - RNA, 24 nt, Artificial Sequence
  Synthetic
cacauaaacauaaguaaaauugcu

SEQ ID NO: 382610 - RNA, 18 nt, Artificial Sequence
  Synthetic
cagagggcccacauugcu

SEQ ID NO: 382611 - RNA, 19 nt, Artificial Sequence
  Synthetic
ccagagggcccacauugcu

SEQ ID NO: 382612 - RNA, 20 nt, Artificial Sequence
  Synthetic
uccagagggcccacauugcu

SEQ ID NO: 382613 - RNA, 21 nt, Artificial Sequence
  Synthetic
guccagagggcccacauugcu

SEQ ID NO: 382614 - RNA, 22 nt, Artificial Sequence
  Synthetic
uguccagagggcccacauugcu

SEQ ID NO: 382615 - RNA, 23 nt, Artificial Sequence
  Synthetic
guguccagagggcccacauugcu

SEQ ID NO: 382616 - RNA, 24 nt, Artificial Sequence
  Synthetic
uguguccagagggcccacauugcu

SEQ ID NO: 382617 - RNA, 18 nt, Artificial Sequence
  Synthetic
aaacuguaauacauugcu

SEQ ID NO: 382618 - RNA, 19 nt, Artificial Sequence
  Synthetic
aaaacuguaauacauugcu

SEQ ID NO: 382619 - RNA, 20 nt, Artificial Sequence
  Synthetic
gaaaacuguaauacauugcu

SEQ ID NO: 382620 - RNA, 21 nt, Artificial Sequence
  Synthetic
ugaaaacuguaauacauugcu

SEQ ID NO: 382621 - RNA, 22 nt, Artificial Sequence
  Synthetic
cugaaaacuguaauacauugcu

SEQ ID NO: 382622 - RNA, 23 nt, Artificial Sequence
  Synthetic
ucugaaaacuguaauacauugcu

SEQ ID NO: 382623 - RNA, 24 nt, Artificial Sequence
  Synthetic
cucugaaaacuguaauacauugcu

SEQ ID NO: 382624 - RNA, 18 nt, Artificial Sequence
  Synthetic
uguaagauuuucauugcu

SEQ ID NO: 382625 - RNA, 19 nt, Artificial Sequence
  Synthetic
auguaagauuuucauugcu

SEQ ID NO: 382626 - RNA, 20 nt, Artificial Sequence
  Synthetic
uauguaagauuuucauugcu

SEQ ID NO: 382627 - RNA, 21 nt, Artificial Sequence
  Synthetic
uuauguaagauuuucauugcu

SEQ ID NO: 382628 - RNA, 22 nt, Artificial Sequence
  Synthetic
auuauguaagauuuucauugcu

SEQ ID NO: 382629 - RNA, 23 nt, Artificial Sequence
  Synthetic
gauuauguaagauuuucauugcu

SEQ ID NO: 382630 - RNA, 24 nt, Artificial Sequence
  Synthetic
ugauuauguaagauuuucauugcu

SEQ ID NO: 382631 - RNA, 18 nt, Artificial Sequence
  Synthetic
aaugguaauaguauugcu

SEQ ID NO: 382632 - RNA, 19 nt, Artificial Sequence
  Synthetic
aaaugguaauaguauugcu

SEQ ID NO: 382633 - RNA, 20 nt, Artificial Sequence
  Synthetic
aaaaugguaauaguauugcu

SEQ ID NO: 382634 - RNA, 21 nt, Artificial Sequence
  Synthetic
aaaaaugguaauaguauugcu

SEQ ID NO: 382635 - RNA, 22 nt, Artificial Sequence
  Synthetic
aaaaaaugguaauaguauugcu

SEQ ID NO: 382636 - RNA, 23 nt, Artificial Sequence
  Synthetic
gaaaaaaugguaauaguauugcu

SEQ ID NO: 382637 - RNA, 24 nt, Artificial Sequence
  Synthetic
ugaaaaaaugguaauaguauugcu

SEQ ID NO: 382638 - RNA, 18 nt, Artificial Sequence
  Synthetic
guguuagcauguauugcu

SEQ ID NO: 382639 - RNA, 19 nt, Artificial Sequence
  Synthetic
uguguuagcauguauugcu

SEQ ID NO: 382640 - RNA, 20 nt, Artificial Sequence
  Synthetic
cuguguuagcauguauugcu

SEQ ID NO: 382641 - RNA, 21 nt, Artificial Sequence
  Synthetic
ucuguguuagcauguauugcu

SEQ ID NO: 382642 - RNA, 22 nt, Artificial Sequence
  Synthetic
gucuguguuagcauguauugcu

SEQ ID NO: 382643 - RNA, 23 nt, Artificial Sequence
  Synthetic
ggucuguguuagcauguauugcu

SEQ ID NO: 382644 - RNA, 24 nt, Artificial Sequence
  Synthetic
gggucuguguuagcauguauugcu

SEQ ID NO: 382645 - RNA, 18 nt, Artificial Sequence
  Synthetic
uuggauuguuguauugcu

SEQ ID NO: 382646 - RNA, 19 nt, Artificial Sequence
  Synthetic
cuuggauuguuguauugcu

SEQ ID NO: 382647 - RNA, 20 nt, Artificial Sequence
  Synthetic
ucuuggauuguuguauugcu

SEQ ID NO: 382648 - RNA, 21 nt, Artificial Sequence
  Synthetic
uucuuggauuguuguauugcu

SEQ ID NO: 382649 - RNA, 22 nt, Artificial Sequence
  Synthetic
uuucuuggauuguuguauugcu

SEQ ID NO: 382650 - RNA, 23 nt, Artificial Sequence
  Synthetic
uuuucuuggauuguuguauugcu

SEQ ID NO: 382651 - RNA, 24 nt, Artificial Sequence
  Synthetic
guuuucuuggauuguuguauugcu

SEQ ID NO: 382652 - RNA, 18 nt, Artificial Sequence
  Synthetic
auggaacuaguuauugcu

SEQ ID NO: 382653 - RNA, 19 nt, Artificial Sequence
  Synthetic
uauggaacuaguuauugcu

SEQ ID NO: 382654 - RNA, 20 nt, Artificial Sequence
  Synthetic
uuauggaacuaguuauugcu

SEQ ID NO: 382655 - RNA, 21 nt, Artificial Sequence
  Synthetic
guuauggaacuaguuauugcu

SEQ ID NO: 382656 - RNA, 22 nt, Artificial Sequence
  Synthetic
aguuauggaacuaguuauugcu

SEQ ID NO: 382657 - RNA, 23 nt, Artificial Sequence
  Synthetic
caguuauggaacuaguuauugcu

SEQ ID NO: 382658 - RNA, 24 nt, Artificial Sequence
  Synthetic
ccaguuauggaacuaguuauugcu

SEQ ID NO: 382659 - RNA, 18 nt, Artificial Sequence
  Synthetic
gaucgguugucacuugcu

SEQ ID NO: 382660 - RNA, 19 nt, Artificial Sequence
  Synthetic
ugaucgguugucacuugcu

SEQ ID NO: 382661 - RNA, 20 nt, Artificial Sequence
  Synthetic
uugaucgguugucacuugcu

SEQ ID NO: 382662 - RNA, 21 nt, Artificial Sequence
  Synthetic
cuugaucgguugucacuugcu

SEQ ID NO: 382663 - RNA, 22 nt, Artificial Sequence
  Synthetic
ucuugaucgguugucacuugcu

SEQ ID NO: 382664 - RNA, 23 nt, Artificial Sequence
  Synthetic
gucuugaucgguugucacuugcu

SEQ ID NO: 382665 - RNA, 24 nt, Artificial Sequence
  Synthetic
ggucuugaucgguugucacuugcu

SEQ ID NO: 382666 - RNA, 18 nt, Artificial Sequence
  Synthetic
aggcuucuaugacuugcu

SEQ ID NO: 382667 - RNA, 19 nt, Artificial Sequence
  Synthetic
gaggcuucuaugacuugcu

SEQ ID NO: 382668 - RNA, 20 nt, Artificial Sequence
  Synthetic
ggaggcuucuaugacuugcu

SEQ ID NO: 382669 - RNA, 21 nt, Artificial Sequence
  Synthetic
uggaggcuucuaugacuugcu

SEQ ID NO: 382670 - RNA, 22 nt, Artificial Sequence
  Synthetic
cuggaggcuucuaugacuugcu

SEQ ID NO: 382671 - RNA, 23 nt, Artificial Sequence
  Synthetic
gcuggaggcuucuaugacuugcu

SEQ ID NO: 382672 - RNA, 24 nt, Artificial Sequence
  Synthetic
ugcuggaggcuucuaugacuugcu

SEQ ID NO: 382673 - RNA, 18 nt, Artificial Sequence
  Synthetic
ucucaauuagaccuugcu

SEQ ID NO: 382674 - RNA, 19 nt, Artificial Sequence
  Synthetic
aucucaauuagaccuugcu

SEQ ID NO: 382675 - RNA, 20 nt, Artificial Sequence
  Synthetic
aaucucaauuagaccuugcu

SEQ ID NO: 382676 - RNA, 21 nt, Artificial Sequence
  Synthetic
aaaucucaauuagaccuugcu

SEQ ID NO: 382677 - RNA, 22 nt, Artificial Sequence
  Synthetic
caaaucucaauuagaccuugcu

SEQ ID NO: 382678 - RNA, 23 nt, Artificial Sequence
  Synthetic
ucaaaucucaauuagaccuugcu

SEQ ID NO: 382679 - RNA, 24 nt, Artificial Sequence
  Synthetic
cucaaaucucaauuagaccuugcu

SEQ ID NO: 382680 - RNA, 18 nt, Artificial Sequence
  Synthetic
auugcucauuaucuugcu

SEQ ID NO: 382681 - RNA, 19 nt, Artificial Sequence
  Synthetic
uauugcucauuaucuugcu

SEQ ID NO: 382682 - RNA, 20 nt, Artificial Sequence
  Synthetic
cuauugcucauuaucuugcu

SEQ ID NO: 382683 - RNA, 21 nt, Artificial Sequence
  Synthetic
ucuauugcucauuaucuugcu

SEQ ID NO: 382684 - RNA, 22 nt, Artificial Sequence
  Synthetic
uucuauugcucauuaucuugcu

SEQ ID NO: 382685 - RNA, 23 nt, Artificial Sequence
  Synthetic
auucuauugcucauuaucuugcu

SEQ ID NO: 382686 - RNA, 24 nt, Artificial Sequence
  Synthetic
uauucuauugcucauuaucuugcu

SEQ ID NO: 382687 - RNA, 18 nt, Artificial Sequence
  Synthetic
uugaacagacuucuugcu

SEQ ID NO: 382688 - RNA, 19 nt, Artificial Sequence
  Synthetic
cuugaacagacuucuugcu

SEQ ID NO: 382689 - RNA, 20 nt, Artificial Sequence
  Synthetic
acuugaacagacuucuugcu

SEQ ID NO: 382690 - RNA, 21 nt, Artificial Sequence
  Synthetic
gacuugaacagacuucuugcu

SEQ ID NO: 382691 - RNA, 22 nt, Artificial Sequence
  Synthetic
ggacuugaacagacuucuugcu

SEQ ID NO: 382692 - RNA, 23 nt, Artificial Sequence
  Synthetic
aggacuugaacagacuucuugcu

SEQ ID NO: 382693 - RNA, 24 nt, Artificial Sequence
  Synthetic
aaggacuugaacagacuucuugcu

SEQ ID NO: 382694 - RNA, 18 nt, Artificial Sequence
  Synthetic
agagaaagugaaguugcu

SEQ ID NO: 382695 - RNA, 19 nt, Artificial Sequence
  Synthetic
cagagaaagugaaguugcu

SEQ ID NO: 382696 - RNA, 20 nt, Artificial Sequence
  Synthetic
ccagagaaagugaaguugcu

SEQ ID NO: 382697 - RNA, 21 nt, Artificial Sequence
  Synthetic
cccagagaaagugaaguugcu

SEQ ID NO: 382698 - RNA, 22 nt, Artificial Sequence
  Synthetic
ucccagagaaagugaaguugcu

SEQ ID NO: 382699 - RNA, 23 nt, Artificial Sequence
  Synthetic
cucccagagaaagugaaguugcu

SEQ ID NO: 382700 - RNA, 24 nt, Artificial Sequence
  Synthetic
ucucccagagaaagugaaguugcu

SEQ ID NO: 382701 - RNA, 18 nt, Artificial Sequence
  Synthetic
auaggaagcagaguugcu

SEQ ID NO: 382702 - RNA, 19 nt, Artificial Sequence
  Synthetic
aauaggaagcagaguugcu

SEQ ID NO: 382703 - RNA, 20 nt, Artificial Sequence
  Synthetic
gaauaggaagcagaguugcu

SEQ ID NO: 382704 - RNA, 21 nt, Artificial Sequence
  Synthetic
agaauaggaagcagaguugcu

SEQ ID NO: 382705 - RNA, 22 nt, Artificial Sequence
  Synthetic
uagaauaggaagcagaguugcu

SEQ ID NO: 382706 - RNA, 23 nt, Artificial Sequence
  Synthetic
uuagaauaggaagcagaguugcu

SEQ ID NO: 382707 - RNA, 24 nt, Artificial Sequence
  Synthetic
guuagaauaggaagcagaguugcu

SEQ ID NO: 382708 - RNA, 18 nt, Artificial Sequence
  Synthetic
caucaccugggaguugcu

SEQ ID NO: 382709 - RNA, 19 nt, Artificial Sequence
  Synthetic
acaucaccugggaguugcu

SEQ ID NO: 382710 - RNA, 20 nt, Artificial Sequence
  Synthetic
gacaucaccugggaguugcu

SEQ ID NO: 382711 - RNA, 21 nt, Artificial Sequence
  Synthetic
agacaucaccugggaguugcu

SEQ ID NO: 382712 - RNA, 22 nt, Artificial Sequence
  Synthetic
cagacaucaccugggaguugcu

SEQ ID NO: 382713 - RNA, 23 nt, Artificial Sequence
  Synthetic
acagacaucaccugggaguugcu

SEQ ID NO: 382714 - RNA, 24 nt, Artificial Sequence
  Synthetic
cacagacaucaccugggaguugcu

SEQ ID NO: 382715 - RNA, 18 nt, Artificial Sequence
  Synthetic
agaauuaagcuaguugcu

SEQ ID NO: 382716 - RNA, 19 nt, Artificial Sequence
  Synthetic
aagaauuaagcuaguugcu

SEQ ID NO: 382717 - RNA, 20 nt, Artificial Sequence
  Synthetic
caagaauuaagcuaguugcu

SEQ ID NO: 382718 - RNA, 21 nt, Artificial Sequence
  Synthetic
ucaagaauuaagcuaguugcu

SEQ ID NO: 382719 - RNA, 22 nt, Artificial Sequence
  Synthetic
uucaagaauuaagcuaguugcu

SEQ ID NO: 382720 - RNA, 23 nt, Artificial Sequence
  Synthetic
cuucaagaauuaagcuaguugcu

SEQ ID NO: 382721 - RNA, 24 nt, Artificial Sequence
  Synthetic
ucuucaagaauuaagcuaguugcu

SEQ ID NO: 382722 - RNA, 18 nt, Artificial Sequence
  Synthetic
cgacaggagaagguugcu

SEQ ID NO: 382723 - RNA, 19 nt, Artificial Sequence
  Synthetic
ccgacaggagaagguugcu

SEQ ID NO: 382724 - RNA, 20 nt, Artificial Sequence
  Synthetic
accgacaggagaagguugcu

SEQ ID NO: 382725 - RNA, 21 nt, Artificial Sequence
  Synthetic
gaccgacaggagaagguugcu

SEQ ID NO: 382726 - RNA, 22 nt, Artificial Sequence
  Synthetic
agaccgacaggagaagguugcu

SEQ ID NO: 382727 - RNA, 23 nt, Artificial Sequence
  Synthetic
aagaccgacaggagaagguugcu

SEQ ID NO: 382728 - RNA, 24 nt, Artificial Sequence
  Synthetic
aaagaccgacaggagaagguugcu

SEQ ID NO: 382729 - RNA, 18 nt, Artificial Sequence
  Synthetic
caggagguggagguugcu

SEQ ID NO: 382730 - RNA, 19 nt, Artificial Sequence
  Synthetic
ccaggagguggagguugcu

SEQ ID NO: 382731 - RNA, 20 nt, Artificial Sequence
  Synthetic
cccaggagguggagguugcu

SEQ ID NO: 382732 - RNA, 21 nt, Artificial Sequence
  Synthetic
acccaggagguggagguugcu

SEQ ID NO: 382733 - RNA, 22 nt, Artificial Sequence
  Synthetic
aacccaggagguggagguugcu

SEQ ID NO: 382734 - RNA, 23 nt, Artificial Sequence
  Synthetic
gaacccaggagguggagguugcu

SEQ ID NO: 382735 - RNA, 24 nt, Artificial Sequence
  Synthetic
ugaacccaggagguggagguugcu

SEQ ID NO: 382736 - RNA, 18 nt, Artificial Sequence
  Synthetic
uacaauuagaaauuugcu

SEQ ID NO: 382737 - RNA, 19 nt, Artificial Sequence
  Synthetic
guacaauuagaaauuugcu

SEQ ID NO: 382738 - RNA, 20 nt, Artificial Sequence
  Synthetic
uguacaauuagaaauuugcu

SEQ ID NO: 382739 - RNA, 21 nt, Artificial Sequence
  Synthetic
cuguacaauuagaaauuugcu

SEQ ID NO: 382740 - RNA, 22 nt, Artificial Sequence
  Synthetic
acuguacaauuagaaauuugcu

SEQ ID NO: 382741 - RNA, 23 nt, Artificial Sequence
  Synthetic
uacuguacaauuagaaauuugcu

SEQ ID NO: 382742 - RNA, 24 nt, Artificial Sequence
  Synthetic
guacuguacaauuagaaauuugcu

SEQ ID NO: 382743 - RNA, 18 nt, Artificial Sequence
  Synthetic
cuccaaucuaaauuugcu

SEQ ID NO: 382744 - RNA, 19 nt, Artificial Sequence
  Synthetic
ucuccaaucuaaauuugcu

SEQ ID NO: 382745 - RNA, 20 nt, Artificial Sequence
  Synthetic
uucuccaaucuaaauuugcu

SEQ ID NO: 382746 - RNA, 21 nt, Artificial Sequence
  Synthetic
uuucuccaaucuaaauuugcu

SEQ ID NO: 382747 - RNA, 22 nt, Artificial Sequence
  Synthetic
uuuucuccaaucuaaauuugcu

SEQ ID NO: 382748 - RNA, 23 nt, Artificial Sequence
  Synthetic
auuuucuccaaucuaaauuugcu

SEQ ID NO: 382749 - RNA, 24 nt, Artificial Sequence
  Synthetic
aauuuucuccaaucuaaauuugcu

SEQ ID NO: 382750 - RNA, 18 nt, Artificial Sequence
  Synthetic
uguucuuuuacauuugcu

SEQ ID NO: 382751 - RNA, 19 nt, Artificial Sequence
  Synthetic
cuguucuuuuacauuugcu

SEQ ID NO: 382752 - RNA, 20 nt, Artificial Sequence
  Synthetic
ucuguucuuuuacauuugcu

SEQ ID NO: 382753 - RNA, 21 nt, Artificial Sequence
  Synthetic
uucuguucuuuuacauuugcu

SEQ ID NO: 382754 - RNA, 22 nt, Artificial Sequence
  Synthetic
uuucuguucuuuuacauuugcu

SEQ ID NO: 382755 - RNA, 23 nt, Artificial Sequence
  Synthetic
auuucuguucuuuuacauuugcu

SEQ ID NO: 382756 - RNA, 24 nt, Artificial Sequence
  Synthetic
aauuucuguucuuuuacauuugcu

SEQ ID NO: 382757 - RNA, 18 nt, Artificial Sequence
  Synthetic
cuuuaaucgucauuugcu

SEQ ID NO: 382758 - RNA, 19 nt, Artificial Sequence
  Synthetic
acuuuaaucgucauuugcu

SEQ ID NO: 382759 - RNA, 20 nt, Artificial Sequence
  Synthetic
aacuuuaaucgucauuugcu

SEQ ID NO: 382760 - RNA, 21 nt, Artificial Sequence
  Synthetic
aaacuuuaaucgucauuugcu

SEQ ID NO: 382761 - RNA, 22 nt, Artificial Sequence
  Synthetic
gaaacuuuaaucgucauuugcu

SEQ ID NO: 382762 - RNA, 23 nt, Artificial Sequence
  Synthetic
agaaacuuuaaucgucauuugcu

SEQ ID NO: 382763 - RNA, 24 nt, Artificial Sequence
  Synthetic
cagaaacuuuaaucgucauuugcu

SEQ ID NO: 382764 - RNA, 18 nt, Artificial Sequence
  Synthetic
gauugaaauggauuugcu

SEQ ID NO: 382765 - RNA, 19 nt, Artificial Sequence
  Synthetic
agauugaaauggauuugcu

SEQ ID NO: 382766 - RNA, 20 nt, Artificial Sequence
  Synthetic
gagauugaaauggauuugcu

SEQ ID NO: 382767 - RNA, 21 nt, Artificial Sequence
  Synthetic
ggagauugaaauggauuugcu

SEQ ID NO: 382768 - RNA, 22 nt, Artificial Sequence
  Synthetic
uggagauugaaauggauuugcu

SEQ ID NO: 382769 - RNA, 23 nt, Artificial Sequence
  Synthetic
guggagauugaaauggauuugcu

SEQ ID NO: 382770 - RNA, 24 nt, Artificial Sequence
  Synthetic
aguggagauugaaauggauuugcu

SEQ ID NO: 382771 - RNA, 18 nt, Artificial Sequence
  Synthetic
auuauauagauauuugcu

SEQ ID NO: 382772 - RNA, 19 nt, Artificial Sequence
  Synthetic
uauuauauagauauuugcu

SEQ ID NO: 382773 - RNA, 20 nt, Artificial Sequence
  Synthetic
uuauuauauagauauuugcu

SEQ ID NO: 382774 - RNA, 21 nt, Artificial Sequence
  Synthetic
auuauuauauagauauuugcu

SEQ ID NO: 382775 - RNA, 22 nt, Artificial Sequence
  Synthetic
uauuauuauauagauauuugcu

SEQ ID NO: 382776 - RNA, 23 nt, Artificial Sequence
  Synthetic
cuauuauuauauagauauuugcu

SEQ ID NO: 382777 - RNA, 24 nt, Artificial Sequence
  Synthetic
gcuauuauuauauagauauuugcu

SEQ ID NO: 382778 - RNA, 18 nt, Artificial Sequence
  Synthetic
uauauuuaaaacuuugcu

SEQ ID NO: 382779 - RNA, 19 nt, Artificial Sequence
  Synthetic
uuauauuuaaaacuuugcu

SEQ ID NO: 382780 - RNA, 20 nt, Artificial Sequence
  Synthetic
uuuauauuuaaaacuuugcu

SEQ ID NO: 382781 - RNA, 21 nt, Artificial Sequence
  Synthetic
uuuuauauuuaaaacuuugcu

SEQ ID NO: 382782 - RNA, 22 nt, Artificial Sequence
  Synthetic
guuuuauauuuaaaacuuugcu

SEQ ID NO: 382783 - RNA, 23 nt, Artificial Sequence
  Synthetic
uguuuuauauuuaaaacuuugcu

SEQ ID NO: 382784 - RNA, 24 nt, Artificial Sequence
  Synthetic
auguuuuauauuuaaaacuuugcu

SEQ ID NO: 382785 - RNA, 18 nt, Artificial Sequence
  Synthetic
ucaaggagaaacuuugcu

SEQ ID NO: 382786 - RNA, 19 nt, Artificial Sequence
  Synthetic
gucaaggagaaacuuugcu

SEQ ID NO: 382787 - RNA, 20 nt, Artificial Sequence
  Synthetic
ggucaaggagaaacuuugcu

SEQ ID NO: 382788 - RNA, 21 nt, Artificial Sequence
  Synthetic
cggucaaggagaaacuuugcu

SEQ ID NO: 382789 - RNA, 22 nt, Artificial Sequence
  Synthetic
ucggucaaggagaaacuuugcu

SEQ ID NO: 382790 - RNA, 23 nt, Artificial Sequence
  Synthetic
uucggucaaggagaaacuuugcu

SEQ ID NO: 382791 - RNA, 24 nt, Artificial Sequence
  Synthetic
cuucggucaaggagaaacuuugcu

SEQ ID NO: 382792 - RNA, 18 nt, Artificial Sequence
  Synthetic
gaagacagagacuuugcu

SEQ ID NO: 382793 - RNA, 19 nt, Artificial Sequence
  Synthetic
ggaagacagagacuuugcu

SEQ ID NO: 382794 - RNA, 20 nt, Artificial Sequence
  Synthetic
aggaagacagagacuuugcu

SEQ ID NO: 382795 - RNA, 21 nt, Artificial Sequence
  Synthetic
caggaagacagagacuuugcu

SEQ ID NO: 382796 - RNA, 22 nt, Artificial Sequence
  Synthetic
acaggaagacagagacuuugcu

SEQ ID NO: 382797 - RNA, 23 nt, Artificial Sequence
  Synthetic
uacaggaagacagagacuuugcu

SEQ ID NO: 382798 - RNA, 24 nt, Artificial Sequence
  Synthetic
auacaggaagacagagacuuugcu

SEQ ID NO: 382799 - RNA, 18 nt, Artificial Sequence
  Synthetic
auaaaacccugcuuugcu

SEQ ID NO: 382800 - RNA, 19 nt, Artificial Sequence
  Synthetic
cauaaaacccugcuuugcu

SEQ ID NO: 382801 - RNA, 20 nt, Artificial Sequence
  Synthetic
ucauaaaacccugcuuugcu

SEQ ID NO: 382802 - RNA, 21 nt, Artificial Sequence
  Synthetic
aucauaaaacccugcuuugcu

SEQ ID NO: 382803 - RNA, 22 nt, Artificial Sequence
  Synthetic
uaucauaaaacccugcuuugcu

SEQ ID NO: 382804 - RNA, 23 nt, Artificial Sequence
  Synthetic
uuaucauaaaacccugcuuugcu

SEQ ID NO: 382805 - RNA, 24 nt, Artificial Sequence
  Synthetic
uuuaucauaaaacccugcuuugcu

SEQ ID NO: 382806 - RNA, 18 nt, Artificial Sequence
  Synthetic
uaaagcaucaucuuugcu

SEQ ID NO: 382807 - RNA, 19 nt, Artificial Sequence
  Synthetic
uuaaagcaucaucuuugcu

SEQ ID NO: 382808 - RNA, 20 nt, Artificial Sequence
  Synthetic
guuaaagcaucaucuuugcu

SEQ ID NO: 382809 - RNA, 21 nt, Artificial Sequence
  Synthetic
uguuaaagcaucaucuuugcu

SEQ ID NO: 382810 - RNA, 22 nt, Artificial Sequence
  Synthetic
auguuaaagcaucaucuuugcu

SEQ ID NO: 382811 - RNA, 23 nt, Artificial Sequence
  Synthetic
gauguuaaagcaucaucuuugcu

SEQ ID NO: 382812 - RNA, 24 nt, Artificial Sequence
  Synthetic
ggauguuaaagcaucaucuuugcu

SEQ ID NO: 382813 - RNA, 18 nt, Artificial Sequence
  Synthetic
uuacuacaacucuuugcu

SEQ ID NO: 382814 - RNA, 19 nt, Artificial Sequence
  Synthetic
guuacuacaacucuuugcu

SEQ ID NO: 382815 - RNA, 20 nt, Artificial Sequence
  Synthetic
aguuacuacaacucuuugcu

SEQ ID NO: 382816 - RNA, 21 nt, Artificial Sequence
  Synthetic
caguuacuacaacucuuugcu

SEQ ID NO: 382817 - RNA, 22 nt, Artificial Sequence
  Synthetic
acaguuacuacaacucuuugcu

SEQ ID NO: 382818 - RNA, 23 nt, Artificial Sequence
  Synthetic
gacaguuacuacaacucuuugcu

SEQ ID NO: 382819 - RNA, 24 nt, Artificial Sequence
  Synthetic
agacaguuacuacaacucuuugcu

SEQ ID NO: 382820 - RNA, 18 nt, Artificial Sequence
  Synthetic
uacuugcaucucuuugcu

SEQ ID NO: 382821 - RNA, 19 nt, Artificial Sequence
  Synthetic
guacuugcaucucuuugcu

SEQ ID NO: 382822 - RNA, 20 nt, Artificial Sequence
  Synthetic
uguacuugcaucucuuugcu

SEQ ID NO: 382823 - RNA, 21 nt, Artificial Sequence
  Synthetic
cuguacuugcaucucuuugcu

SEQ ID NO: 382824 - RNA, 22 nt, Artificial Sequence
  Synthetic
ccuguacuugcaucucuuugcu

SEQ ID NO: 382825 - RNA, 23 nt, Artificial Sequence
  Synthetic
uccuguacuugcaucucuuugcu

SEQ ID NO: 382826 - RNA, 24 nt, Artificial Sequence
  Synthetic
uuccuguacuugcaucucuuugcu

SEQ ID NO: 382827 - RNA, 18 nt, Artificial Sequence
  Synthetic
gcuauauaugucuuugcu

SEQ ID NO: 382828 - RNA, 19 nt, Artificial Sequence
  Synthetic
ugcuauauaugucuuugcu

SEQ ID NO: 382829 - RNA, 20 nt, Artificial Sequence
  Synthetic
cugcuauauaugucuuugcu

SEQ ID NO: 382830 - RNA, 21 nt, Artificial Sequence
  Synthetic
ucugcuauauaugucuuugcu

SEQ ID NO: 382831 - RNA, 22 nt, Artificial Sequence
  Synthetic
gucugcuauauaugucuuugcu

SEQ ID NO: 382832 - RNA, 23 nt, Artificial Sequence
  Synthetic
ggucugcuauauaugucuuugcu

SEQ ID NO: 382833 - RNA, 24 nt, Artificial Sequence
  Synthetic
aggucugcuauauaugucuuugcu

SEQ ID NO: 382834 - RNA, 18 nt, Artificial Sequence
  Synthetic
uuauccauauucuuugcu

SEQ ID NO: 382835 - RNA, 19 nt, Artificial Sequence
  Synthetic
auuauccauauucuuugcu

SEQ ID NO: 382836 - RNA, 20 nt, Artificial Sequence
  Synthetic
gauuauccauauucuuugcu

SEQ ID NO: 382837 - RNA, 21 nt, Artificial Sequence
  Synthetic
agauuauccauauucuuugcu

SEQ ID NO: 382838 - RNA, 22 nt, Artificial Sequence
  Synthetic
uagauuauccauauucuuugcu

SEQ ID NO: 382839 - RNA, 23 nt, Artificial Sequence
  Synthetic
auagauuauccauauucuuugcu

SEQ ID NO: 382840 - RNA, 24 nt, Artificial Sequence
  Synthetic
cauagauuauccauauucuuugcu

SEQ ID NO: 382841 - RNA, 18 nt, Artificial Sequence
  Synthetic
auuucuaaguucuuugcu

SEQ ID NO: 382842 - RNA, 19 nt, Artificial Sequence
  Synthetic
uauuucuaaguucuuugcu

SEQ ID NO: 382843 - RNA, 20 nt, Artificial Sequence
  Synthetic
uuauuucuaaguucuuugcu

SEQ ID NO: 382844 - RNA, 21 nt, Artificial Sequence
  Synthetic
auuauuucuaaguucuuugcu

SEQ ID NO: 382845 - RNA, 22 nt, Artificial Sequence
  Synthetic
aauuauuucuaaguucuuugcu

SEQ ID NO: 382846 - RNA, 23 nt, Artificial Sequence
  Synthetic
gaauuauuucuaaguucuuugcu

SEQ ID NO: 382847 - RNA, 24 nt, Artificial Sequence
  Synthetic
agaauuauuucuaaguucuuugcu

SEQ ID NO: 382848 - RNA, 18 nt, Artificial Sequence
  Synthetic
acccaauaaaaguuugcu

SEQ ID NO: 382849 - RNA, 19 nt, Artificial Sequence
  Synthetic
gacccaauaaaaguuugcu

SEQ ID NO: 382850 - RNA, 20 nt, Artificial Sequence
  Synthetic
agacccaauaaaaguuugcu

SEQ ID NO: 382851 - RNA, 21 nt, Artificial Sequence
  Synthetic
gagacccaauaaaaguuugcu

SEQ ID NO: 382852 - RNA, 22 nt, Artificial Sequence
  Synthetic
ugagacccaauaaaaguuugcu

SEQ ID NO: 382853 - RNA, 23 nt, Artificial Sequence
  Synthetic
augagacccaauaaaaguuugcu

SEQ ID NO: 382854 - RNA, 24 nt, Artificial Sequence
  Synthetic
gaugagacccaauaaaaguuugcu

SEQ ID NO: 382855 - RNA, 18 nt, Artificial Sequence
  Synthetic
uccuugcgauaguuugcu

SEQ ID NO: 382856 - RNA, 19 nt, Artificial Sequence
  Synthetic
guccuugcgauaguuugcu

SEQ ID NO: 382857 - RNA, 20 nt, Artificial Sequence
  Synthetic
uguccuugcgauaguuugcu

SEQ ID NO: 382858 - RNA, 21 nt, Artificial Sequence
  Synthetic
uuguccuugcgauaguuugcu

SEQ ID NO: 382859 - RNA, 22 nt, Artificial Sequence
  Synthetic
uuuguccuugcgauaguuugcu

SEQ ID NO: 382860 - RNA, 23 nt, Artificial Sequence
  Synthetic
uuuuguccuugcgauaguuugcu

SEQ ID NO: 382861 - RNA, 24 nt, Artificial Sequence
  Synthetic
uuuuuguccuugcgauaguuugcu

SEQ ID NO: 382862 - RNA, 18 nt, Artificial Sequence
  Synthetic
uuccugcauuaguuugcu

SEQ ID NO: 382863 - RNA, 19 nt, Artificial Sequence
  Synthetic
guuccugcauuaguuugcu

SEQ ID NO: 382864 - RNA, 20 nt, Artificial Sequence
  Synthetic
uguuccugcauuaguuugcu

SEQ ID NO: 382865 - RNA, 21 nt, Artificial Sequence
  Synthetic
cuguuccugcauuaguuugcu

SEQ ID NO: 382866 - RNA, 22 nt, Artificial Sequence
  Synthetic
ucuguuccugcauuaguuugcu

SEQ ID NO: 382867 - RNA, 23 nt, Artificial Sequence
  Synthetic
uucuguuccugcauuaguuugcu

SEQ ID NO: 382868 - RNA, 24 nt, Artificial Sequence
  Synthetic
uuucuguuccugcauuaguuugcu

SEQ ID NO: 382869 - RNA, 18 nt, Artificial Sequence
  Synthetic
uucucuuuuugguuugcu

SEQ ID NO: 382870 - RNA, 19 nt, Artificial Sequence
  Synthetic
auucucuuuuugguuugcu

SEQ ID NO: 382871 - RNA, 20 nt, Artificial Sequence
  Synthetic
uauucucuuuuugguuugcu

SEQ ID NO: 382872 - RNA, 21 nt, Artificial Sequence
  Synthetic
uuauucucuuuuugguuugcu

SEQ ID NO: 382873 - RNA, 22 nt, Artificial Sequence
  Synthetic
uuuauucucuuuuugguuugcu

SEQ ID NO: 382874 - RNA, 23 nt, Artificial Sequence
  Synthetic
uuuuauucucuuuuugguuugcu

SEQ ID NO: 382875 - RNA, 24 nt, Artificial Sequence
  Synthetic
uuuuuauucucuuuuugguuugcu

SEQ ID NO: 382876 - RNA, 18 nt, Artificial Sequence
  Synthetic
auuggcaggauguuugcu

SEQ ID NO: 382877 - RNA, 19 nt, Artificial Sequence
  Synthetic
cauuggcaggauguuugcu

SEQ ID NO: 382878 - RNA, 20 nt, Artificial Sequence
  Synthetic
ucauuggcaggauguuugcu

SEQ ID NO: 382879 - RNA, 21 nt, Artificial Sequence
  Synthetic
uucauuggcaggauguuugcu

SEQ ID NO: 382880 - RNA, 22 nt, Artificial Sequence
  Synthetic
guucauuggcaggauguuugcu

SEQ ID NO: 382881 - RNA, 23 nt, Artificial Sequence
  Synthetic
aguucauuggcaggauguuugcu

SEQ ID NO: 382882 - RNA, 24 nt, Artificial Sequence
  Synthetic
caguucauuggcaggauguuugcu

SEQ ID NO: 382883 - RNA, 18 nt, Artificial Sequence
  Synthetic
uugugccauguguuugcu

SEQ ID NO: 382884 - RNA, 19 nt, Artificial Sequence
  Synthetic
uuugugccauguguuugcu

SEQ ID NO: 382885 - RNA, 20 nt, Artificial Sequence
  Synthetic
auuugugccauguguuugcu

SEQ ID NO: 382886 - RNA, 21 nt, Artificial Sequence
  Synthetic
cauuugugccauguguuugcu

SEQ ID NO: 382887 - RNA, 22 nt, Artificial Sequence
  Synthetic
ucauuugugccauguguuugcu

SEQ ID NO: 382888 - RNA, 23 nt, Artificial Sequence
  Synthetic
uucauuugugccauguguuugcu

SEQ ID NO: 382889 - RNA, 24 nt, Artificial Sequence
  Synthetic
cuucauuugugccauguguuugcu

SEQ ID NO: 382890 - RNA, 18 nt, Artificial Sequence
  Synthetic
gcugucucguuguuugcu

SEQ ID NO: 382891 - RNA, 19 nt, Artificial Sequence
  Synthetic
ugcugucucguuguuugcu

SEQ ID NO: 382892 - RNA, 20 nt, Artificial Sequence
  Synthetic
cugcugucucguuguuugcu

SEQ ID NO: 382893 - RNA, 21 nt, Artificial Sequence
  Synthetic
ccugcugucucguuguuugcu

SEQ ID NO: 382894 - RNA, 22 nt, Artificial Sequence
  Synthetic
uccugcugucucguuguuugcu

SEQ ID NO: 382895 - RNA, 23 nt, Artificial Sequence
  Synthetic
cuccugcugucucguuguuugcu

SEQ ID NO: 382896 - RNA, 24 nt, Artificial Sequence
  Synthetic
ccuccugcugucucguuguuugcu

SEQ ID NO: 382897 - RNA, 18 nt, Artificial Sequence
  Synthetic
gccagcuugcauuuugcu

SEQ ID NO: 382898 - RNA, 19 nt, Artificial Sequence
  Synthetic
ugccagcuugcauuuugcu

SEQ ID NO: 382899 - RNA, 20 nt, Artificial Sequence
  Synthetic
augccagcuugcauuuugcu

SEQ ID NO: 382900 - RNA, 21 nt, Artificial Sequence
  Synthetic
caugccagcuugcauuuugcu

SEQ ID NO: 382901 - RNA, 22 nt, Artificial Sequence
  Synthetic
ccaugccagcuugcauuuugcu

SEQ ID NO: 382902 - RNA, 23 nt, Artificial Sequence
  Synthetic
uccaugccagcuugcauuuugcu

SEQ ID NO: 382903 - RNA, 24 nt, Artificial Sequence
  Synthetic
uuccaugccagcuugcauuuugcu

SEQ ID NO: 382904 - RNA, 18 nt, Artificial Sequence
  Synthetic
ucacgcacaacuuuugcu

SEQ ID NO: 382905 - RNA, 19 nt, Artificial Sequence
  Synthetic
cucacgcacaacuuuugcu

SEQ ID NO: 382906 - RNA, 20 nt, Artificial Sequence
  Synthetic
acucacgcacaacuuuugcu

SEQ ID NO: 382907 - RNA, 21 nt, Artificial Sequence
  Synthetic
gacucacgcacaacuuuugcu

SEQ ID NO: 382908 - RNA, 22 nt, Artificial Sequence
  Synthetic
ugacucacgcacaacuuuugcu

SEQ ID NO: 382909 - RNA, 23 nt, Artificial Sequence
  Synthetic
uugacucacgcacaacuuuugcu

SEQ ID NO: 382910 - RNA, 24 nt, Artificial Sequence
  Synthetic
guugacucacgcacaacuuuugcu

SEQ ID NO: 382911 - RNA, 18 nt, Artificial Sequence
  Synthetic
uauguccuggguuuugcu

SEQ ID NO: 382912 - RNA, 19 nt, Artificial Sequence
  Synthetic
auauguccuggguuuugcu

SEQ ID NO: 382913 - RNA, 20 nt, Artificial Sequence
  Synthetic
aauauguccuggguuuugcu

SEQ ID NO: 382914 - RNA, 21 nt, Artificial Sequence
  Synthetic
aaauauguccuggguuuugcu

SEQ ID NO: 382915 - RNA, 22 nt, Artificial Sequence
  Synthetic
aaaauauguccuggguuuugcu

SEQ ID NO: 382916 - RNA, 23 nt, Artificial Sequence
  Synthetic
aaaaauauguccuggguuuugcu

SEQ ID NO: 382917 - RNA, 24 nt, Artificial Sequence
  Synthetic
gaaaaauauguccuggguuuugcu

SEQ ID NO: 382918 - RNA, 18 nt, Artificial Sequence
  Synthetic
uuuuuucucuuuuuugcu

SEQ ID NO: 382919 - RNA, 19 nt, Artificial Sequence
  Synthetic
uuuuuuucucuuuuuugcu

SEQ ID NO: 382920 - RNA, 20 nt, Artificial Sequence
  Synthetic
guuuuuuucucuuuuuugcu

SEQ ID NO: 382921 - RNA, 21 nt, Artificial Sequence
  Synthetic
uguuuuuuucucuuuuuugcu

SEQ ID NO: 382922 - RNA, 22 nt, Artificial Sequence
  Synthetic
guguuuuuuucucuuuuuugcu

SEQ ID NO: 382923 - RNA, 23 nt, Artificial Sequence
  Synthetic
aguguuuuuuucucuuuuuugcu

SEQ ID NO: 382924 - RNA, 24 nt, Artificial Sequence
  Synthetic
uaguguuuuuuucucuuuuuugcu

SEQ ID NO: 382925 - RNA, 18 nt, Artificial Sequence
  Synthetic
uuuuccagguuuuuugcu

SEQ ID NO: 382926 - RNA, 19 nt, Artificial Sequence
  Synthetic
cuuuuccagguuuuuugcu

SEQ ID NO: 382927 - RNA, 20 nt, Artificial Sequence
  Synthetic
ccuuuuccagguuuuuugcu

SEQ ID NO: 382928 - RNA, 21 nt, Artificial Sequence
  Synthetic
cccuuuuccagguuuuuugcu

SEQ ID NO: 382929 - RNA, 22 nt, Artificial Sequence
  Synthetic
ucccuuuuccagguuuuuugcu

SEQ ID NO: 382930 - RNA, 23 nt, Artificial Sequence
  Synthetic
aucccuuuuccagguuuuuugcu

SEQ ID NO: 382931 - RNA, 24 nt, Artificial Sequence
  Synthetic
gaucccuuuuccagguuuuuugcu

SEQ ID NO: 382932 - RNA, 18 nt, Artificial Sequence
  Synthetic
acaaagagaaaaaaaucu

SEQ ID NO: 382933 - RNA, 19 nt, Artificial Sequence
  Synthetic
cacaaagagaaaaaaaucu

SEQ ID NO: 382934 - RNA, 20 nt, Artificial Sequence
  Synthetic
ccacaaagagaaaaaaaucu

SEQ ID NO: 382935 - RNA, 21 nt, Artificial Sequence
  Synthetic
accacaaagagaaaaaaaucu

SEQ ID NO: 382936 - RNA, 22 nt, Artificial Sequence
  Synthetic
uaccacaaagagaaaaaaaucu

SEQ ID NO: 382937 - RNA, 23 nt, Artificial Sequence
  Synthetic
uuaccacaaagagaaaaaaaucu

SEQ ID NO: 382938 - RNA, 24 nt, Artificial Sequence
  Synthetic
uuuaccacaaagagaaaaaaaucu

SEQ ID NO: 382939 - RNA, 18 nt, Artificial Sequence
  Synthetic
cagcacacacaaaaaucu

SEQ ID NO: 382940 - RNA, 19 nt, Artificial Sequence
  Synthetic
acagcacacacaaaaaucu

SEQ ID NO: 382941 - RNA, 20 nt, Artificial Sequence
  Synthetic
gacagcacacacaaaaaucu

SEQ ID NO: 382942 - RNA, 21 nt, Artificial Sequence
  Synthetic
agacagcacacacaaaaaucu

SEQ ID NO: 382943 - RNA, 22 nt, Artificial Sequence
  Synthetic
uagacagcacacacaaaaaucu

SEQ ID NO: 382944 - RNA, 23 nt, Artificial Sequence
  Synthetic
guagacagcacacacaaaaaucu

SEQ ID NO: 382945 - RNA, 24 nt, Artificial Sequence
  Synthetic
uguagacagcacacacaaaaaucu

SEQ ID NO: 382946 - RNA, 18 nt, Artificial Sequence
  Synthetic
gaguugaaaacaaaaucu

SEQ ID NO: 382947 - RNA, 19 nt, Artificial Sequence
  Synthetic
agaguugaaaacaaaaucu

SEQ ID NO: 382948 - RNA, 20 nt, Artificial Sequence
  Synthetic
cagaguugaaaacaaaaucu

SEQ ID NO: 382949 - RNA, 21 nt, Artificial Sequence
  Synthetic
acagaguugaaaacaaaaucu

SEQ ID NO: 382950 - RNA, 22 nt, Artificial Sequence
  Synthetic
cacagaguugaaaacaaaaucu

SEQ ID NO: 382951 - RNA, 23 nt, Artificial Sequence
  Synthetic
ucacagaguugaaaacaaaaucu

SEQ ID NO: 382952 - RNA, 24 nt, Artificial Sequence
  Synthetic
aucacagaguugaaaacaaaaucu

SEQ ID NO: 382953 - RNA, 18 nt, Artificial Sequence
  Synthetic
ccagaaagaacaaaaucu

SEQ ID NO: 382954 - RNA, 19 nt, Artificial Sequence
  Synthetic
accagaaagaacaaaaucu

SEQ ID NO: 382955 - RNA, 20 nt, Artificial Sequence
  Synthetic
aaccagaaagaacaaaaucu

SEQ ID NO: 382956 - RNA, 21 nt, Artificial Sequence
  Synthetic
caaccagaaagaacaaaaucu

SEQ ID NO: 382957 - RNA, 22 nt, Artificial Sequence
  Synthetic
ccaaccagaaagaacaaaaucu

SEQ ID NO: 382958 - RNA, 23 nt, Artificial Sequence
  Synthetic
cccaaccagaaagaacaaaaucu

SEQ ID NO: 382959 - RNA, 24 nt, Artificial Sequence
  Synthetic
ucccaaccagaaagaacaaaaucu

SEQ ID NO: 382960 - RNA, 18 nt, Artificial Sequence
  Synthetic
uauccaguaacaaaaucu

SEQ ID NO: 382961 - RNA, 19 nt, Artificial Sequence
  Synthetic
cuauccaguaacaaaaucu

SEQ ID NO: 382962 - RNA, 20 nt, Artificial Sequence
  Synthetic
gcuauccaguaacaaaaucu

SEQ ID NO: 382963 - RNA, 21 nt, Artificial Sequence
  Synthetic
agcuauccaguaacaaaaucu

SEQ ID NO: 382964 - RNA, 22 nt, Artificial Sequence
  Synthetic
uagcuauccaguaacaaaaucu

SEQ ID NO: 382965 - RNA, 23 nt, Artificial Sequence
  Synthetic
uuagcuauccaguaacaaaaucu

SEQ ID NO: 382966 - RNA, 24 nt, Artificial Sequence
  Synthetic
cuuagcuauccaguaacaaaaucu

SEQ ID NO: 382967 - RNA, 18 nt, Artificial Sequence
  Synthetic
aaugcauucucaaaaucu

SEQ ID NO: 382968 - RNA, 19 nt, Artificial Sequence
  Synthetic
caaugcauucucaaaaucu

SEQ ID NO: 382969 - RNA, 20 nt, Artificial Sequence
  Synthetic
gcaaugcauucucaaaaucu

SEQ ID NO: 382970 - RNA, 21 nt, Artificial Sequence
  Synthetic
ugcaaugcauucucaaaaucu

SEQ ID NO: 382971 - RNA, 22 nt, Artificial Sequence
  Synthetic
augcaaugcauucucaaaaucu

SEQ ID NO: 382972 - RNA, 23 nt, Artificial Sequence
  Synthetic
uaugcaaugcauucucaaaaucu

SEQ ID NO: 382973 - RNA, 24 nt, Artificial Sequence
  Synthetic
guaugcaaugcauucucaaaaucu

SEQ ID NO: 382974 - RNA, 18 nt, Artificial Sequence
  Synthetic
aaaggaaugucaaaaucu

SEQ ID NO: 382975 - RNA, 19 nt, Artificial Sequence
  Synthetic
gaaaggaaugucaaaaucu

SEQ ID NO: 382976 - RNA, 20 nt, Artificial Sequence
  Synthetic
ugaaaggaaugucaaaaucu

SEQ ID NO: 382977 - RNA, 21 nt, Artificial Sequence
  Synthetic
uugaaaggaaugucaaaaucu

SEQ ID NO: 382978 - RNA, 22 nt, Artificial Sequence
  Synthetic
uuugaaaggaaugucaaaaucu

SEQ ID NO: 382979 - RNA, 23 nt, Artificial Sequence
  Synthetic
uuuugaaaggaaugucaaaaucu

SEQ ID NO: 382980 - RNA, 24 nt, Artificial Sequence
  Synthetic
auuuugaaaggaaugucaaaaucu

SEQ ID NO: 382981 - RNA, 18 nt, Artificial Sequence
  Synthetic
guuugaaaucgaaaaucu

SEQ ID NO: 382982 - RNA, 19 nt, Artificial Sequence
  Synthetic
gguuugaaaucgaaaaucu

SEQ ID NO: 382983 - RNA, 20 nt, Artificial Sequence
  Synthetic
agguuugaaaucgaaaaucu

SEQ ID NO: 382984 - RNA, 21 nt, Artificial Sequence
  Synthetic
cagguuugaaaucgaaaaucu

SEQ ID NO: 382985 - RNA, 22 nt, Artificial Sequence
  Synthetic
acagguuugaaaucgaaaaucu

SEQ ID NO: 382986 - RNA, 23 nt, Artificial Sequence
  Synthetic
aacagguuugaaaucgaaaaucu

SEQ ID NO: 382987 - RNA, 24 nt, Artificial Sequence
  Synthetic
caacagguuugaaaucgaaaaucu

SEQ ID NO: 382988 - RNA, 18 nt, Artificial Sequence
  Synthetic
gcaugucucugaaaaucu

SEQ ID NO: 382989 - RNA, 19 nt, Artificial Sequence
  Synthetic
ggcaugucucugaaaaucu

SEQ ID NO: 382990 - RNA, 20 nt, Artificial Sequence
  Synthetic
aggcaugucucugaaaaucu

SEQ ID NO: 382991 - RNA, 21 nt, Artificial Sequence
  Synthetic
aaggcaugucucugaaaaucu

SEQ ID NO: 382992 - RNA, 22 nt, Artificial Sequence
  Synthetic
aaaggcaugucucugaaaaucu

SEQ ID NO: 382993 - RNA, 23 nt, Artificial Sequence
  Synthetic
aaaaggcaugucucugaaaaucu

SEQ ID NO: 382994 - RNA, 24 nt, Artificial Sequence
  Synthetic
gaaaaggcaugucucugaaaaucu

SEQ ID NO: 382995 - RNA, 18 nt, Artificial Sequence
  Synthetic
aauccuagaauaaaaucu

SEQ ID NO: 382996 - RNA, 19 nt, Artificial Sequence
  Synthetic
gaauccuagaauaaaaucu

SEQ ID NO: 382997 - RNA, 20 nt, Artificial Sequence
  Synthetic
agaauccuagaauaaaaucu

SEQ ID NO: 382998 - RNA, 21 nt, Artificial Sequence
  Synthetic
aagaauccuagaauaaaaucu

SEQ ID NO: 382999 - RNA, 22 nt, Artificial Sequence
  Synthetic
uaagaauccuagaauaaaaucu

SEQ ID NO: 383000 - RNA, 23 nt, Artificial Sequence
  Synthetic
auaagaauccuagaauaaaaucu

SEQ ID NO: 383001 - RNA, 24 nt, Artificial Sequence
  Synthetic
uauaagaauccuagaauaaaaucu

SEQ ID NO: 383002 - RNA, 18 nt, Artificial Sequence
  Synthetic
auagguacaguaaaaucu

SEQ ID NO: 383003 - RNA, 19 nt, Artificial Sequence
  Synthetic
gauagguacaguaaaaucu

SEQ ID NO: 383004 - RNA, 20 nt, Artificial Sequence
  Synthetic
agauagguacaguaaaaucu

SEQ ID NO: 383005 - RNA, 21 nt, Artificial Sequence
  Synthetic
aagauagguacaguaaaaucu

SEQ ID NO: 383006 - RNA, 22 nt, Artificial Sequence
  Synthetic
caagauagguacaguaaaaucu

SEQ ID NO: 383007 - RNA, 23 nt, Artificial Sequence
  Synthetic
ccaagauagguacaguaaaaucu

SEQ ID NO: 383008 - RNA, 24 nt, Artificial Sequence
  Synthetic
cccaagauagguacaguaaaaucu

SEQ ID NO: 383009 - RNA, 18 nt, Artificial Sequence
  Synthetic
guaaaugaauuaaaaucu

SEQ ID NO: 383010 - RNA, 19 nt, Artificial Sequence
  Synthetic
uguaaaugaauuaaaaucu

SEQ ID NO: 383011 - RNA, 20 nt, Artificial Sequence
  Synthetic
auguaaaugaauuaaaaucu

SEQ ID NO: 383012 - RNA, 21 nt, Artificial Sequence
  Synthetic
uauguaaaugaauuaaaaucu

SEQ ID NO: 383013 - RNA, 22 nt, Artificial Sequence
  Synthetic
guauguaaaugaauuaaaaucu

SEQ ID NO: 383014 - RNA, 23 nt, Artificial Sequence
  Synthetic
aguauguaaaugaauuaaaaucu

SEQ ID NO: 383015 - RNA, 24 nt, Artificial Sequence
  Synthetic
aaguauguaaaugaauuaaaaucu

SEQ ID NO: 383016 - RNA, 18 nt, Artificial Sequence
  Synthetic
ugaagcacauuaaaaucu

SEQ ID NO: 383017 - RNA, 19 nt, Artificial Sequence
  Synthetic
cugaagcacauuaaaaucu

SEQ ID NO: 383018 - RNA, 20 nt, Artificial Sequence
  Synthetic
gcugaagcacauuaaaaucu

SEQ ID NO: 383019 - RNA, 21 nt, Artificial Sequence
  Synthetic
ugcugaagcacauuaaaaucu

SEQ ID NO: 383020 - RNA, 22 nt, Artificial Sequence
  Synthetic
uugcugaagcacauuaaaaucu

SEQ ID NO: 383021 - RNA, 23 nt, Artificial Sequence
  Synthetic
cuugcugaagcacauuaaaaucu

SEQ ID NO: 383022 - RNA, 24 nt, Artificial Sequence
  Synthetic
acuugcugaagcacauuaaaaucu

SEQ ID NO: 383023 - RNA, 18 nt, Artificial Sequence
  Synthetic
acauauuauuuaaaaucu

SEQ ID NO: 383024 - RNA, 19 nt, Artificial Sequence
  Synthetic
gacauauuauuuaaaaucu

SEQ ID NO: 383025 - RNA, 20 nt, Artificial Sequence
  Synthetic
ggacauauuauuuaaaaucu

SEQ ID NO: 383026 - RNA, 21 nt, Artificial Sequence
  Synthetic
uggacauauuauuuaaaaucu

SEQ ID NO: 383027 - RNA, 22 nt, Artificial Sequence
  Synthetic
guggacauauuauuuaaaaucu

SEQ ID NO: 383028 - RNA, 23 nt, Artificial Sequence
  Synthetic
aguggacauauuauuuaaaaucu

SEQ ID NO: 383029 - RNA, 24 nt, Artificial Sequence
  Synthetic
caguggacauauuauuuaaaaucu

SEQ ID NO: 383030 - RNA, 18 nt, Artificial Sequence
  Synthetic
gacucaauuuuaaaaucu

SEQ ID NO: 383031 - RNA, 19 nt, Artificial Sequence
  Synthetic
agacucaauuuuaaaaucu

SEQ ID NO: 383032 - RNA, 20 nt, Artificial Sequence
  Synthetic
gagacucaauuuuaaaaucu

SEQ ID NO: 383033 - RNA, 21 nt, Artificial Sequence
  Synthetic
ggagacucaauuuuaaaaucu

SEQ ID NO: 383034 - RNA, 22 nt, Artificial Sequence
  Synthetic
aggagacucaauuuuaaaaucu

SEQ ID NO: 383035 - RNA, 23 nt, Artificial Sequence
  Synthetic
uaggagacucaauuuuaaaaucu

SEQ ID NO: 383036 - RNA, 24 nt, Artificial Sequence
  Synthetic
cuaggagacucaauuuuaaaaucu

SEQ ID NO: 383037 - RNA, 18 nt, Artificial Sequence
  Synthetic
gaacagaguaacaaaucu

SEQ ID NO: 383038 - RNA, 19 nt, Artificial Sequence
  Synthetic
ugaacagaguaacaaaucu

SEQ ID NO: 383039 - RNA, 20 nt, Artificial Sequence
  Synthetic
uugaacagaguaacaaaucu

SEQ ID NO: 383040 - RNA, 21 nt, Artificial Sequence
  Synthetic
guugaacagaguaacaaaucu

SEQ ID NO: 383041 - RNA, 22 nt, Artificial Sequence
  Synthetic
gguugaacagaguaacaaaucu

SEQ ID NO: 383042 - RNA, 23 nt, Artificial Sequence
  Synthetic
ugguugaacagaguaacaaaucu

SEQ ID NO: 383043 - RNA, 24 nt, Artificial Sequence
  Synthetic
augguugaacagaguaacaaaucu

SEQ ID NO: 383044 - RNA, 18 nt, Artificial Sequence
  Synthetic
auugaucaggacaaaucu

SEQ ID NO: 383045 - RNA, 19 nt, Artificial Sequence
  Synthetic
gauugaucaggacaaaucu

SEQ ID NO: 383046 - RNA, 20 nt, Artificial Sequence
  Synthetic
agauugaucaggacaaaucu

SEQ ID NO: 383047 - RNA, 21 nt, Artificial Sequence
  Synthetic
aagauugaucaggacaaaucu

SEQ ID NO: 383048 - RNA, 22 nt, Artificial Sequence
  Synthetic
gaagauugaucaggacaaaucu

SEQ ID NO: 383049 - RNA, 23 nt, Artificial Sequence
  Synthetic
agaagauugaucaggacaaaucu

SEQ ID NO: 383050 - RNA, 24 nt, Artificial Sequence
  Synthetic
uagaagauugaucaggacaaaucu

SEQ ID NO: 383051 - RNA, 18 nt, Artificial Sequence
  Synthetic
auugcugcaaccaaaucu

SEQ ID NO: 383052 - RNA, 19 nt, Artificial Sequence
  Synthetic
cauugcugcaaccaaaucu

SEQ ID NO: 383053 - RNA, 20 nt, Artificial Sequence
  Synthetic
ucauugcugcaaccaaaucu

SEQ ID NO: 383054 - RNA, 21 nt, Artificial Sequence
  Synthetic
uucauugcugcaaccaaaucu

SEQ ID NO: 383055 - RNA, 22 nt, Artificial Sequence
  Synthetic
auucauugcugcaaccaaaucu

SEQ ID NO: 383056 - RNA, 23 nt, Artificial Sequence
  Synthetic
cauucauugcugcaaccaaaucu

SEQ ID NO: 383057 - RNA, 24 nt, Artificial Sequence
  Synthetic
ucauucauugcugcaaccaaaucu

SEQ ID NO: 383058 - RNA, 18 nt, Artificial Sequence
  Synthetic
agguaaucucccaaaucu

SEQ ID NO: 383059 - RNA, 19 nt, Artificial Sequence
  Synthetic
cagguaaucucccaaaucu

SEQ ID NO: 383060 - RNA, 20 nt, Artificial Sequence
  Synthetic
acagguaaucucccaaaucu

SEQ ID NO: 383061 - RNA, 21 nt, Artificial Sequence
  Synthetic
aacagguaaucucccaaaucu

SEQ ID NO: 383062 - RNA, 22 nt, Artificial Sequence
  Synthetic
uaacagguaaucucccaaaucu

SEQ ID NO: 383063 - RNA, 23 nt, Artificial Sequence
  Synthetic
auaacagguaaucucccaaaucu

SEQ ID NO: 383064 - RNA, 24 nt, Artificial Sequence
  Synthetic
uauaacagguaaucucccaaaucu

SEQ ID NO: 383065 - RNA, 18 nt, Artificial Sequence
  Synthetic
auggaagcugccaaaucu

SEQ ID NO: 383066 - RNA, 19 nt, Artificial Sequence
  Synthetic
cauggaagcugccaaaucu

SEQ ID NO: 383067 - RNA, 20 nt, Artificial Sequence
  Synthetic
acauggaagcugccaaaucu

SEQ ID NO: 383068 - RNA, 21 nt, Artificial Sequence
  Synthetic
cacauggaagcugccaaaucu

SEQ ID NO: 383069 - RNA, 22 nt, Artificial Sequence
  Synthetic
ccacauggaagcugccaaaucu

SEQ ID NO: 383070 - RNA, 23 nt, Artificial Sequence
  Synthetic
accacauggaagcugccaaaucu

SEQ ID NO: 383071 - RNA, 24 nt, Artificial Sequence
  Synthetic
caccacauggaagcugccaaaucu

SEQ ID NO: 383072 - RNA, 18 nt, Artificial Sequence
  Synthetic
uugaaaggcagcaaaucu

SEQ ID NO: 383073 - RNA, 19 nt, Artificial Sequence
  Synthetic
uuugaaaggcagcaaaucu

SEQ ID NO: 383074 - RNA, 20 nt, Artificial Sequence
  Synthetic
auuugaaaggcagcaaaucu

SEQ ID NO: 383075 - RNA, 21 nt, Artificial Sequence
  Synthetic
aauuugaaaggcagcaaaucu

SEQ ID NO: 383076 - RNA, 22 nt, Artificial Sequence
  Synthetic
aaauuugaaaggcagcaaaucu

SEQ ID NO: 383077 - RNA, 23 nt, Artificial Sequence
  Synthetic
aaaauuugaaaggcagcaaaucu

SEQ ID NO: 383078 - RNA, 24 nt, Artificial Sequence
  Synthetic
uaaaauuugaaaggcagcaaaucu

SEQ ID NO: 383079 - RNA, 18 nt, Artificial Sequence
  Synthetic
gauggcaucugcaaaucu

SEQ ID NO: 383080 - RNA, 19 nt, Artificial Sequence
  Synthetic
ugauggcaucugcaaaucu

SEQ ID NO: 383081 - RNA, 20 nt, Artificial Sequence
  Synthetic
augauggcaucugcaaaucu

SEQ ID NO: 383082 - RNA, 21 nt, Artificial Sequence
  Synthetic
uaugauggcaucugcaaaucu

SEQ ID NO: 383083 - RNA, 22 nt, Artificial Sequence
  Synthetic
guaugauggcaucugcaaaucu

SEQ ID NO: 383084 - RNA, 23 nt, Artificial Sequence
  Synthetic
uguaugauggcaucugcaaaucu

SEQ ID NO: 383085 - RNA, 24 nt, Artificial Sequence
  Synthetic
uuguaugauggcaucugcaaaucu

SEQ ID NO: 383086 - RNA, 18 nt, Artificial Sequence
  Synthetic
uugacaggugagaaaucu

SEQ ID NO: 383087 - RNA, 19 nt, Artificial Sequence
  Synthetic
uuugacaggugagaaaucu

SEQ ID NO: 383088 - RNA, 20 nt, Artificial Sequence
  Synthetic
auuugacaggugagaaaucu

SEQ ID NO: 383089 - RNA, 21 nt, Artificial Sequence
  Synthetic
cauuugacaggugagaaaucu

SEQ ID NO: 383090 - RNA, 22 nt, Artificial Sequence
  Synthetic
ucauuugacaggugagaaaucu

SEQ ID NO: 383091 - RNA, 23 nt, Artificial Sequence
  Synthetic
uucauuugacaggugagaaaucu

SEQ ID NO: 383092 - RNA, 24 nt, Artificial Sequence
  Synthetic
uuucauuugacaggugagaaaucu

SEQ ID NO: 383093 - RNA, 18 nt, Artificial Sequence
  Synthetic
uuaucaguaaggaaaucu

SEQ ID NO: 383094 - RNA, 19 nt, Artificial Sequence
  Synthetic
guuaucaguaaggaaaucu

SEQ ID NO: 383095 - RNA, 20 nt, Artificial Sequence
  Synthetic
uguuaucaguaaggaaaucu

SEQ ID NO: 383096 - RNA, 21 nt, Artificial Sequence
  Synthetic
guguuaucaguaaggaaaucu

SEQ ID NO: 383097 - RNA, 22 nt, Artificial Sequence
  Synthetic
aguguuaucaguaaggaaaucu

SEQ ID NO: 383098 - RNA, 23 nt, Artificial Sequence
  Synthetic
uaguguuaucaguaaggaaaucu

SEQ ID NO: 383099 - RNA, 24 nt, Artificial Sequence
  Synthetic
auaguguuaucaguaaggaaaucu

SEQ ID NO: 383100 - RNA, 18 nt, Artificial Sequence
  Synthetic
aucuaugaugugaaaucu

SEQ ID NO: 383101 - RNA, 19 nt, Artificial Sequence
  Synthetic
caucuaugaugugaaaucu

SEQ ID NO: 383102 - RNA, 20 nt, Artificial Sequence
  Synthetic
acaucuaugaugugaaaucu

SEQ ID NO: 383103 - RNA, 21 nt, Artificial Sequence
  Synthetic
aacaucuaugaugugaaaucu

SEQ ID NO: 383104 - RNA, 22 nt, Artificial Sequence
  Synthetic
uaacaucuaugaugugaaaucu

SEQ ID NO: 383105 - RNA, 23 nt, Artificial Sequence
  Synthetic
auaacaucuaugaugugaaaucu

SEQ ID NO: 383106 - RNA, 24 nt, Artificial Sequence
  Synthetic
uauaacaucuaugaugugaaaucu

SEQ ID NO: 383107 - RNA, 18 nt, Artificial Sequence
  Synthetic
uucugagaguugaaaucu

SEQ ID NO: 383108 - RNA, 19 nt, Artificial Sequence
  Synthetic
guucugagaguugaaaucu

SEQ ID NO: 383109 - RNA, 20 nt, Artificial Sequence
  Synthetic
gguucugagaguugaaaucu

SEQ ID NO: 383110 - RNA, 21 nt, Artificial Sequence
  Synthetic
agguucugagaguugaaaucu

SEQ ID NO: 383111 - RNA, 22 nt, Artificial Sequence
  Synthetic
cagguucugagaguugaaaucu

SEQ ID NO: 383112 - RNA, 23 nt, Artificial Sequence
  Synthetic
ccagguucugagaguugaaaucu

SEQ ID NO: 383113 - RNA, 24 nt, Artificial Sequence
  Synthetic
accagguucugagaguugaaaucu

SEQ ID NO: 383114 - RNA, 18 nt, Artificial Sequence
  Synthetic
guacuacaaacuaaaucu

SEQ ID NO: 383115 - RNA, 19 nt, Artificial Sequence
  Synthetic
uguacuacaaacuaaaucu

SEQ ID NO: 383116 - RNA, 20 nt, Artificial Sequence
  Synthetic
uuguacuacaaacuaaaucu

SEQ ID NO: 383117 - RNA, 21 nt, Artificial Sequence
  Synthetic
uuuguacuacaaacuaaaucu

SEQ ID NO: 383118 - RNA, 22 nt, Artificial Sequence
  Synthetic
uuuuguacuacaaacuaaaucu

SEQ ID NO: 383119 - RNA, 23 nt, Artificial Sequence
  Synthetic
auuuuguacuacaaacuaaaucu

SEQ ID NO: 383120 - RNA, 24 nt, Artificial Sequence
  Synthetic
gauuuuguacuacaaacuaaaucu

SEQ ID NO: 383121 - RNA, 18 nt, Artificial Sequence
  Synthetic
aaugauuuaucuaaaucu

SEQ ID NO: 383122 - RNA, 19 nt, Artificial Sequence
  Synthetic
aaaugauuuaucuaaaucu

SEQ ID NO: 383123 - RNA, 20 nt, Artificial Sequence
  Synthetic
aaaaugauuuaucuaaaucu

SEQ ID NO: 383124 - RNA, 21 nt, Artificial Sequence
  Synthetic
aaaaaugauuuaucuaaaucu

SEQ ID NO: 383125 - RNA, 22 nt, Artificial Sequence
  Synthetic
aaaaaaugauuuaucuaaaucu

SEQ ID NO: 383126 - RNA, 23 nt, Artificial Sequence
  Synthetic
gaaaaaaugauuuaucuaaaucu

SEQ ID NO: 383127 - RNA, 24 nt, Artificial Sequence
  Synthetic
ugaaaaaaugauuuaucuaaaucu

SEQ ID NO: 383128 - RNA, 18 nt, Artificial Sequence
  Synthetic
cuugcugacuguaaaucu

SEQ ID NO: 383129 - RNA, 19 nt, Artificial Sequence
  Synthetic
gcuugcugacuguaaaucu

SEQ ID NO: 383130 - RNA, 20 nt, Artificial Sequence
  Synthetic
agcuugcugacuguaaaucu

SEQ ID NO: 383131 - RNA, 21 nt, Artificial Sequence
  Synthetic
cagcuugcugacuguaaaucu

SEQ ID NO: 383132 - RNA, 22 nt, Artificial Sequence
  Synthetic
ccagcuugcugacuguaaaucu

SEQ ID NO: 383133 - RNA, 23 nt, Artificial Sequence
  Synthetic
uccagcuugcugacuguaaaucu

SEQ ID NO: 383134 - RNA, 24 nt, Artificial Sequence
  Synthetic
cuccagcuugcugacuguaaaucu

SEQ ID NO: 383135 - RNA, 18 nt, Artificial Sequence
  Synthetic
ugacucuuaccacaaucu

SEQ ID NO: 383136 - RNA, 19 nt, Artificial Sequence
  Synthetic
uugacucuuaccacaaucu

SEQ ID NO: 383137 - RNA, 20 nt, Artificial Sequence
  Synthetic
uuugacucuuaccacaaucu

SEQ ID NO: 383138 - RNA, 21 nt, Artificial Sequence
  Synthetic
auuugacucuuaccacaaucu

SEQ ID NO: 383139 - RNA, 22 nt, Artificial Sequence
  Synthetic
cauuugacucuuaccacaaucu

SEQ ID NO: 383140 - RNA, 23 nt, Artificial Sequence
  Synthetic
ucauuugacucuuaccacaaucu

SEQ ID NO: 383141 - RNA, 24 nt, Artificial Sequence
  Synthetic
uucauuugacucuuaccacaaucu

SEQ ID NO: 383142 - RNA, 18 nt, Artificial Sequence
  Synthetic
aaagaagcccuacaaucu

SEQ ID NO: 383143 - RNA, 19 nt, Artificial Sequence
  Synthetic
aaaagaagcccuacaaucu

SEQ ID NO: 383144 - RNA, 20 nt, Artificial Sequence
  Synthetic
uaaaagaagcccuacaaucu

SEQ ID NO: 383145 - RNA, 21 nt, Artificial Sequence
  Synthetic
uuaaaagaagcccuacaaucu

SEQ ID NO: 383146 - RNA, 22 nt, Artificial Sequence
  Synthetic
auuaaaagaagcccuacaaucu

SEQ ID NO: 383147 - RNA, 23 nt, Artificial Sequence
  Synthetic
gauuaaaagaagcccuacaaucu

SEQ ID NO: 383148 - RNA, 24 nt, Artificial Sequence
  Synthetic
ggauuaaaagaagcccuacaaucu

SEQ ID NO: 383149 - RNA, 18 nt, Artificial Sequence
  Synthetic
uuuuaacuaaagcaaucu

SEQ ID NO: 383150 - RNA, 19 nt, Artificial Sequence
  Synthetic
cuuuuaacuaaagcaaucu

SEQ ID NO: 383151 - RNA, 20 nt, Artificial Sequence
  Synthetic
gcuuuuaacuaaagcaaucu

SEQ ID NO: 383152 - RNA, 21 nt, Artificial Sequence
  Synthetic
ggcuuuuaacuaaagcaaucu

SEQ ID NO: 383153 - RNA, 22 nt, Artificial Sequence
  Synthetic
aggcuuuuaacuaaagcaaucu

SEQ ID NO: 383154 - RNA, 23 nt, Artificial Sequence
  Synthetic
gaggcuuuuaacuaaagcaaucu

SEQ ID NO: 383155 - RNA, 24 nt, Artificial Sequence
  Synthetic
ggaggcuuuuaacuaaagcaaucu

SEQ ID NO: 383156 - RNA, 18 nt, Artificial Sequence
  Synthetic
uucuauuagaagcaaucu

SEQ ID NO: 383157 - RNA, 19 nt, Artificial Sequence
  Synthetic
auucuauuagaagcaaucu

SEQ ID NO: 383158 - RNA, 20 nt, Artificial Sequence
  Synthetic
cauucuauuagaagcaaucu

SEQ ID NO: 383159 - RNA, 21 nt, Artificial Sequence
  Synthetic
ucauucuauuagaagcaaucu

SEQ ID NO: 383160 - RNA, 22 nt, Artificial Sequence
  Synthetic
cucauucuauuagaagcaaucu

SEQ ID NO: 383161 - RNA, 23 nt, Artificial Sequence
  Synthetic
ucucauucuauuagaagcaaucu

SEQ ID NO: 383162 - RNA, 24 nt, Artificial Sequence
  Synthetic
cucucauucuauuagaagcaaucu

SEQ ID NO: 383163 - RNA, 18 nt, Artificial Sequence
  Synthetic
gaguaugcguagcaaucu

SEQ ID NO: 383164 - RNA, 19 nt, Artificial Sequence
  Synthetic
ugaguaugcguagcaaucu

SEQ ID NO: 383165 - RNA, 20 nt, Artificial Sequence
  Synthetic
augaguaugcguagcaaucu

SEQ ID NO: 383166 - RNA, 21 nt, Artificial Sequence
  Synthetic
gaugaguaugcguagcaaucu

SEQ ID NO: 383167 - RNA, 22 nt, Artificial Sequence
  Synthetic
ggaugaguaugcguagcaaucu

SEQ ID NO: 383168 - RNA, 23 nt, Artificial Sequence
  Synthetic
aggaugaguaugcguagcaaucu

SEQ ID NO: 383169 - RNA, 24 nt, Artificial Sequence
  Synthetic
uaggaugaguaugcguagcaaucu

SEQ ID NO: 383170 - RNA, 18 nt, Artificial Sequence
  Synthetic
uuuacuucuagucaaucu

SEQ ID NO: 383171 - RNA, 19 nt, Artificial Sequence
  Synthetic
cuuuacuucuagucaaucu

SEQ ID NO: 383172 - RNA, 20 nt, Artificial Sequence
  Synthetic
ucuuuacuucuagucaaucu

SEQ ID NO: 383173 - RNA, 21 nt, Artificial Sequence
  Synthetic
aucuuuacuucuagucaaucu

SEQ ID NO: 383174 - RNA, 22 nt, Artificial Sequence
  Synthetic
aaucuuuacuucuagucaaucu

SEQ ID NO: 383175 - RNA, 23 nt, Artificial Sequence
  Synthetic
aaaucuuuacuucuagucaaucu

SEQ ID NO: 383176 - RNA, 24 nt, Artificial Sequence
  Synthetic
gaaaucuuuacuucuagucaaucu

SEQ ID NO: 383177 - RNA, 18 nt, Artificial Sequence
  Synthetic
auauaaaacugucaaucu

SEQ ID NO: 383178 - RNA, 19 nt, Artificial Sequence
  Synthetic
uauauaaaacugucaaucu

SEQ ID NO: 383179 - RNA, 20 nt, Artificial Sequence
  Synthetic
auauauaaaacugucaaucu

SEQ ID NO: 383180 - RNA, 21 nt, Artificial Sequence
  Synthetic
cauauauaaaacugucaaucu

SEQ ID NO: 383181 - RNA, 22 nt, Artificial Sequence
  Synthetic
gcauauauaaaacugucaaucu

SEQ ID NO: 383182 - RNA, 23 nt, Artificial Sequence
  Synthetic
ugcauauauaaaacugucaaucu

SEQ ID NO: 383183 - RNA, 24 nt, Artificial Sequence
  Synthetic
uugcauauauaaaacugucaaucu

SEQ ID NO: 383184 - RNA, 18 nt, Artificial Sequence
  Synthetic
uuaguaaguuuucaaucu

SEQ ID NO: 383185 - RNA, 19 nt, Artificial Sequence
  Synthetic
auuaguaaguuuucaaucu

SEQ ID NO: 383186 - RNA, 20 nt, Artificial Sequence
  Synthetic
gauuaguaaguuuucaaucu

SEQ ID NO: 383187 - RNA, 21 nt, Artificial Sequence
  Synthetic
agauuaguaaguuuucaaucu

SEQ ID NO: 383188 - RNA, 22 nt, Artificial Sequence
  Synthetic
aagauuaguaaguuuucaaucu

SEQ ID NO: 383189 - RNA, 23 nt, Artificial Sequence
  Synthetic
gaagauuaguaaguuuucaaucu

SEQ ID NO: 383190 - RNA, 24 nt, Artificial Sequence
  Synthetic
ggaagauuaguaaguuuucaaucu

SEQ ID NO: 383191 - RNA, 18 nt, Artificial Sequence
  Synthetic
gaaaauuuugaagaaucu

SEQ ID NO: 383192 - RNA, 19 nt, Artificial Sequence
  Synthetic
agaaaauuuugaagaaucu

SEQ ID NO: 383193 - RNA, 20 nt, Artificial Sequence
  Synthetic
uagaaaauuuugaagaaucu

SEQ ID NO: 383194 - RNA, 21 nt, Artificial Sequence
  Synthetic
uuagaaaauuuugaagaaucu

SEQ ID NO: 383195 - RNA, 22 nt, Artificial Sequence
  Synthetic
auuagaaaauuuugaagaaucu

SEQ ID NO: 383196 - RNA, 23 nt, Artificial Sequence
  Synthetic
aauuagaaaauuuugaagaaucu

SEQ ID NO: 383197 - RNA, 24 nt, Artificial Sequence
  Synthetic
uaauuagaaaauuuugaagaaucu

SEQ ID NO: 383198 - RNA, 18 nt, Artificial Sequence
  Synthetic
gggagaguauaagaaucu

SEQ ID NO: 383199 - RNA, 19 nt, Artificial Sequence
  Synthetic
ugggagaguauaagaaucu

SEQ ID NO: 383200 - RNA, 20 nt, Artificial Sequence
  Synthetic
augggagaguauaagaaucu

SEQ ID NO: 383201 - RNA, 21 nt, Artificial Sequence
  Synthetic
aaugggagaguauaagaaucu

SEQ ID NO: 383202 - RNA, 22 nt, Artificial Sequence
  Synthetic
aaaugggagaguauaagaaucu

SEQ ID NO: 383203 - RNA, 23 nt, Artificial Sequence
  Synthetic
aaaaugggagaguauaagaaucu

SEQ ID NO: 383204 - RNA, 24 nt, Artificial Sequence
  Synthetic
gaaaaugggagaguauaagaaucu

SEQ ID NO: 383205 - RNA, 18 nt, Artificial Sequence
  Synthetic
cacaacggaccagaaucu

SEQ ID NO: 383206 - RNA, 19 nt, Artificial Sequence
  Synthetic
acacaacggaccagaaucu

SEQ ID NO: 383207 - RNA, 20 nt, Artificial Sequence
  Synthetic
uacacaacggaccagaaucu

SEQ ID NO: 383208 - RNA, 21 nt, Artificial Sequence
  Synthetic
auacacaacggaccagaaucu

SEQ ID NO: 383209 - RNA, 22 nt, Artificial Sequence
  Synthetic
aauacacaacggaccagaaucu

SEQ ID NO: 383210 - RNA, 23 nt, Artificial Sequence
  Synthetic
aaauacacaacggaccagaaucu

SEQ ID NO: 383211 - RNA, 24 nt, Artificial Sequence
  Synthetic
uaaauacacaacggaccagaaucu

SEQ ID NO: 383212 - RNA, 18 nt, Artificial Sequence
  Synthetic
guguaauauccagaaucu

SEQ ID NO: 383213 - RNA, 19 nt, Artificial Sequence
  Synthetic
gguguaauauccagaaucu

SEQ ID NO: 383214 - RNA, 20 nt, Artificial Sequence
  Synthetic
ugguguaauauccagaaucu

SEQ ID NO: 383215 - RNA, 21 nt, Artificial Sequence
  Synthetic
gugguguaauauccagaaucu

SEQ ID NO: 383216 - RNA, 22 nt, Artificial Sequence
  Synthetic
ggugguguaauauccagaaucu

SEQ ID NO: 383217 - RNA, 23 nt, Artificial Sequence
  Synthetic
cggugguguaauauccagaaucu

SEQ ID NO: 383218 - RNA, 24 nt, Artificial Sequence
  Synthetic
acggugguguaauauccagaaucu

SEQ ID NO: 383219 - RNA, 18 nt, Artificial Sequence
  Synthetic
ccaacuaaaucagaaucu

SEQ ID NO: 383220 - RNA, 19 nt, Artificial Sequence
  Synthetic
uccaacuaaaucagaaucu

SEQ ID NO: 383221 - RNA, 20 nt, Artificial Sequence
  Synthetic
auccaacuaaaucagaaucu

SEQ ID NO: 383222 - RNA, 21 nt, Artificial Sequence
  Synthetic
cauccaacuaaaucagaaucu

SEQ ID NO: 383223 - RNA, 22 nt, Artificial Sequence
  Synthetic
ccauccaacuaaaucagaaucu

SEQ ID NO: 383224 - RNA, 23 nt, Artificial Sequence
  Synthetic
cccauccaacuaaaucagaaucu

SEQ ID NO: 383225 - RNA, 24 nt, Artificial Sequence
  Synthetic
ccccauccaacuaaaucagaaucu

SEQ ID NO: 383226 - RNA, 18 nt, Artificial Sequence
  Synthetic
ccaauugaaucagaaucu

SEQ ID NO: 383227 - RNA, 19 nt, Artificial Sequence
  Synthetic
accaauugaaucagaaucu

SEQ ID NO: 383228 - RNA, 20 nt, Artificial Sequence
  Synthetic
gaccaauugaaucagaaucu

SEQ ID NO: 383229 - RNA, 21 nt, Artificial Sequence
  Synthetic
agaccaauugaaucagaaucu

SEQ ID NO: 383230 - RNA, 22 nt, Artificial Sequence
  Synthetic
uagaccaauugaaucagaaucu

SEQ ID NO: 383231 - RNA, 23 nt, Artificial Sequence
  Synthetic
cuagaccaauugaaucagaaucu

SEQ ID NO: 383232 - RNA, 24 nt, Artificial Sequence
  Synthetic
ucuagaccaauugaaucagaaucu

SEQ ID NO: 383233 - RNA, 18 nt, Artificial Sequence
  Synthetic
auucuaaggucagaaucu

SEQ ID NO: 383234 - RNA, 19 nt, Artificial Sequence
  Synthetic
gauucuaaggucagaaucu

SEQ ID NO: 383235 - RNA, 20 nt, Artificial Sequence
  Synthetic
ugauucuaaggucagaaucu

SEQ ID NO: 383236 - RNA, 21 nt, Artificial Sequence
  Synthetic
uugauucuaaggucagaaucu

SEQ ID NO: 383237 - RNA, 22 nt, Artificial Sequence
  Synthetic
auugauucuaaggucagaaucu

SEQ ID NO: 383238 - RNA, 23 nt, Artificial Sequence
  Synthetic
aauugauucuaaggucagaaucu

SEQ ID NO: 383239 - RNA, 24 nt, Artificial Sequence
  Synthetic
caauugauucuaaggucagaaucu

SEQ ID NO: 383240 - RNA, 18 nt, Artificial Sequence
  Synthetic
gaugcaagaggagaaucu

SEQ ID NO: 383241 - RNA, 19 nt, Artificial Sequence
  Synthetic
agaugcaagaggagaaucu

SEQ ID NO: 383242 - RNA, 20 nt, Artificial Sequence
  Synthetic
uagaugcaagaggagaaucu

SEQ ID NO: 383243 - RNA, 21 nt, Artificial Sequence
  Synthetic
guagaugcaagaggagaaucu

SEQ ID NO: 383244 - RNA, 22 nt, Artificial Sequence
  Synthetic
uguagaugcaagaggagaaucu

SEQ ID NO: 383245 - RNA, 23 nt, Artificial Sequence
  Synthetic
guguagaugcaagaggagaaucu

SEQ ID NO: 383246 - RNA, 24 nt, Artificial Sequence
  Synthetic
aguguagaugcaagaggagaaucu

SEQ ID NO: 383247 - RNA, 18 nt, Artificial Sequence
  Synthetic
ucccuuauccuagaaucu

SEQ ID NO: 383248 - RNA, 19 nt, Artificial Sequence
  Synthetic
uucccuuauccuagaaucu

SEQ ID NO: 383249 - RNA, 20 nt, Artificial Sequence
  Synthetic
uuucccuuauccuagaaucu

SEQ ID NO: 383250 - RNA, 21 nt, Artificial Sequence
  Synthetic
uuuucccuuauccuagaaucu

SEQ ID NO: 383251 - RNA, 22 nt, Artificial Sequence
  Synthetic
cuuuucccuuauccuagaaucu

SEQ ID NO: 383252 - RNA, 23 nt, Artificial Sequence
  Synthetic
acuuuucccuuauccuagaaucu

SEQ ID NO: 383253 - RNA, 24 nt, Artificial Sequence
  Synthetic
aacuuuucccuuauccuagaaucu

SEQ ID NO: 383254 - RNA, 18 nt, Artificial Sequence
  Synthetic
auacagcuugaggaaucu

SEQ ID NO: 383255 - RNA, 19 nt, Artificial Sequence
  Synthetic
cauacagcuugaggaaucu

SEQ ID NO: 383256 - RNA, 20 nt, Artificial Sequence
  Synthetic
gcauacagcuugaggaaucu

SEQ ID NO: 383257 - RNA, 21 nt, Artificial Sequence
  Synthetic
ugcauacagcuugaggaaucu

SEQ ID NO: 383258 - RNA, 22 nt, Artificial Sequence
  Synthetic
cugcauacagcuugaggaaucu

SEQ ID NO: 383259 - RNA, 23 nt, Artificial Sequence
  Synthetic
ccugcauacagcuugaggaaucu

SEQ ID NO: 383260 - RNA, 24 nt, Artificial Sequence
  Synthetic
gccugcauacagcuugaggaaucu

SEQ ID NO: 383261 - RNA, 18 nt, Artificial Sequence
  Synthetic
acugaaaugagggaaucu

SEQ ID NO: 383262 - RNA, 19 nt, Artificial Sequence
  Synthetic
uacugaaaugagggaaucu

SEQ ID NO: 383263 - RNA, 20 nt, Artificial Sequence
  Synthetic
uuacugaaaugagggaaucu

SEQ ID NO: 383264 - RNA, 21 nt, Artificial Sequence
  Synthetic
uuuacugaaaugagggaaucu

SEQ ID NO: 383265 - RNA, 22 nt, Artificial Sequence
  Synthetic
auuuacugaaaugagggaaucu

SEQ ID NO: 383266 - RNA, 23 nt, Artificial Sequence
  Synthetic
cauuuacugaaaugagggaaucu

SEQ ID NO: 383267 - RNA, 24 nt, Artificial Sequence
  Synthetic
ccauuuacugaaaugagggaaucu

SEQ ID NO: 383268 - RNA, 18 nt, Artificial Sequence
  Synthetic
aauucucauaaugaaucu

SEQ ID NO: 383269 - RNA, 19 nt, Artificial Sequence
  Synthetic
uaauucucauaaugaaucu

SEQ ID NO: 383270 - RNA, 20 nt, Artificial Sequence
  Synthetic
uuaauucucauaaugaaucu

SEQ ID NO: 383271 - RNA, 21 nt, Artificial Sequence
  Synthetic
auuaauucucauaaugaaucu

SEQ ID NO: 383272 - RNA, 22 nt, Artificial Sequence
  Synthetic
uauuaauucucauaaugaaucu

SEQ ID NO: 383273 - RNA, 23 nt, Artificial Sequence
  Synthetic
cuauuaauucucauaaugaaucu

SEQ ID NO: 383274 - RNA, 24 nt, Artificial Sequence
  Synthetic
ucuauuaauucucauaaugaaucu

SEQ ID NO: 383275 - RNA, 18 nt, Artificial Sequence
  Synthetic
gcuaauaugggugaaucu

SEQ ID NO: 383276 - RNA, 19 nt, Artificial Sequence
  Synthetic
agcuaauaugggugaaucu

SEQ ID NO: 383277 - RNA, 20 nt, Artificial Sequence
  Synthetic
gagcuaauaugggugaaucu

SEQ ID NO: 383278 - RNA, 21 nt, Artificial Sequence
  Synthetic
ugagcuaauaugggugaaucu

SEQ ID NO: 383279 - RNA, 22 nt, Artificial Sequence
  Synthetic
augagcuaauaugggugaaucu

SEQ ID NO: 383280 - RNA, 23 nt, Artificial Sequence
  Synthetic
gaugagcuaauaugggugaaucu

SEQ ID NO: 383281 - RNA, 24 nt, Artificial Sequence
  Synthetic
agaugagcuaauaugggugaaucu

SEQ ID NO: 383282 - RNA, 18 nt, Artificial Sequence
  Synthetic
guuccugggguugaaucu

SEQ ID NO: 383283 - RNA, 19 nt, Artificial Sequence
  Synthetic
uguuccugggguugaaucu

SEQ ID NO: 383284 - RNA, 20 nt, Artificial Sequence
  Synthetic
uuguuccugggguugaaucu

SEQ ID NO: 383285 - RNA, 21 nt, Artificial Sequence
  Synthetic
auuguuccugggguugaaucu

SEQ ID NO: 383286 - RNA, 22 nt, Artificial Sequence
  Synthetic
aauuguuccugggguugaaucu

SEQ ID NO: 383287 - RNA, 23 nt, Artificial Sequence
  Synthetic
caauuguuccugggguugaaucu

SEQ ID NO: 383288 - RNA, 24 nt, Artificial Sequence
  Synthetic
gcaauuguuccugggguugaaucu

SEQ ID NO: 383289 - RNA, 18 nt, Artificial Sequence
  Synthetic
gggaugccauuugaaucu

SEQ ID NO: 383290 - RNA, 19 nt, Artificial Sequence
  Synthetic
ggggaugccauuugaaucu

SEQ ID NO: 383291 - RNA, 20 nt, Artificial Sequence
  Synthetic
aggggaugccauuugaaucu

SEQ ID NO: 383292 - RNA, 21 nt, Artificial Sequence
  Synthetic
uaggggaugccauuugaaucu

SEQ ID NO: 383293 - RNA, 22 nt, Artificial Sequence
  Synthetic
uuaggggaugccauuugaaucu

SEQ ID NO: 383294 - RNA, 23 nt, Artificial Sequence
  Synthetic
auuaggggaugccauuugaaucu

SEQ ID NO: 383295 - RNA, 24 nt, Artificial Sequence
  Synthetic
aauuaggggaugccauuugaaucu

SEQ ID NO: 383296 - RNA, 18 nt, Artificial Sequence
  Synthetic
uccagcacauaauaaucu

SEQ ID NO: 383297 - RNA, 19 nt, Artificial Sequence
  Synthetic
uuccagcacauaauaaucu

SEQ ID NO: 383298 - RNA, 20 nt, Artificial Sequence
  Synthetic
uuuccagcacauaauaaucu

SEQ ID NO: 383299 - RNA, 21 nt, Artificial Sequence
  Synthetic
uuuuccagcacauaauaaucu

SEQ ID NO: 383300 - RNA, 22 nt, Artificial Sequence
  Synthetic
auuuuccagcacauaauaaucu

SEQ ID NO: 383301 - RNA, 23 nt, Artificial Sequence
  Synthetic
gauuuuccagcacauaauaaucu

SEQ ID NO: 383302 - RNA, 24 nt, Artificial Sequence
  Synthetic
cgauuuuccagcacauaauaaucu

SEQ ID NO: 383303 - RNA, 18 nt, Artificial Sequence
  Synthetic
gggacagaugcauaaucu

SEQ ID NO: 383304 - RNA, 19 nt, Artificial Sequence
  Synthetic
agggacagaugcauaaucu

SEQ ID NO: 383305 - RNA, 20 nt, Artificial Sequence
  Synthetic
gagggacagaugcauaaucu

SEQ ID NO: 383306 - RNA, 21 nt, Artificial Sequence
  Synthetic
agagggacagaugcauaaucu

SEQ ID NO: 383307 - RNA, 22 nt, Artificial Sequence
  Synthetic
uagagggacagaugcauaaucu

SEQ ID NO: 383308 - RNA, 23 nt, Artificial Sequence
  Synthetic
cuagagggacagaugcauaaucu

SEQ ID NO: 383309 - RNA, 24 nt, Artificial Sequence
  Synthetic
gcuagagggacagaugcauaaucu

SEQ ID NO: 383310 - RNA, 18 nt, Artificial Sequence
  Synthetic
uaaagaaguugauaaucu

SEQ ID NO: 383311 - RNA, 19 nt, Artificial Sequence
  Synthetic
cuaaagaaguugauaaucu

SEQ ID NO: 383312 - RNA, 20 nt, Artificial Sequence
  Synthetic
ucuaaagaaguugauaaucu

SEQ ID NO: 383313 - RNA, 21 nt, Artificial Sequence
  Synthetic
uucuaaagaaguugauaaucu

SEQ ID NO: 383314 - RNA, 22 nt, Artificial Sequence
  Synthetic
uuucuaaagaaguugauaaucu

SEQ ID NO: 383315 - RNA, 23 nt, Artificial Sequence
  Synthetic
uuuucuaaagaaguugauaaucu

SEQ ID NO: 383316 - RNA, 24 nt, Artificial Sequence
  Synthetic
auuuucuaaagaaguugauaaucu

SEQ ID NO: 383317 - RNA, 18 nt, Artificial Sequence
  Synthetic
aaaguaacaauauaaucu

SEQ ID NO: 383318 - RNA, 19 nt, Artificial Sequence
  Synthetic
aaaaguaacaauauaaucu

SEQ ID NO: 383319 - RNA, 20 nt, Artificial Sequence
  Synthetic
caaaaguaacaauauaaucu

SEQ ID NO: 383320 - RNA, 21 nt, Artificial Sequence
  Synthetic
ucaaaaguaacaauauaaucu

SEQ ID NO: 383321 - RNA, 22 nt, Artificial Sequence
  Synthetic
aucaaaaguaacaauauaaucu

SEQ ID NO: 383322 - RNA, 23 nt, Artificial Sequence
  Synthetic
uaucaaaaguaacaauauaaucu

SEQ ID NO: 383323 - RNA, 24 nt, Artificial Sequence
  Synthetic
auaucaaaaguaacaauauaaucu

SEQ ID NO: 383324 - RNA, 18 nt, Artificial Sequence
  Synthetic
uauuaaaagcucuaaucu

SEQ ID NO: 383325 - RNA, 19 nt, Artificial Sequence
  Synthetic
auauuaaaagcucuaaucu

SEQ ID NO: 383326 - RNA, 20 nt, Artificial Sequence
  Synthetic
cauauuaaaagcucuaaucu

SEQ ID NO: 383327 - RNA, 21 nt, Artificial Sequence
  Synthetic
ucauauuaaaagcucuaaucu

SEQ ID NO: 383328 - RNA, 22 nt, Artificial Sequence
  Synthetic
gucauauuaaaagcucuaaucu

SEQ ID NO: 383329 - RNA, 23 nt, Artificial Sequence
  Synthetic
ugucauauuaaaagcucuaaucu

SEQ ID NO: 383330 - RNA, 24 nt, Artificial Sequence
  Synthetic
gugucauauuaaaagcucuaaucu

SEQ ID NO: 383331 - RNA, 18 nt, Artificial Sequence
  Synthetic
aggcugccacgguaaucu

SEQ ID NO: 383332 - RNA, 19 nt, Artificial Sequence
  Synthetic
gaggcugccacgguaaucu

SEQ ID NO: 383333 - RNA, 20 nt, Artificial Sequence
  Synthetic
agaggcugccacgguaaucu

SEQ ID NO: 383334 - RNA, 21 nt, Artificial Sequence
  Synthetic
aagaggcugccacgguaaucu

SEQ ID NO: 383335 - RNA, 22 nt, Artificial Sequence
  Synthetic
uaagaggcugccacgguaaucu

SEQ ID NO: 383336 - RNA, 23 nt, Artificial Sequence
  Synthetic
auaagaggcugccacgguaaucu

SEQ ID NO: 383337 - RNA, 24 nt, Artificial Sequence
  Synthetic
aauaagaggcugccacgguaaucu

SEQ ID NO: 383338 - RNA, 18 nt, Artificial Sequence
  Synthetic
acaacucauuuguaaucu

SEQ ID NO: 383339 - RNA, 19 nt, Artificial Sequence
  Synthetic
cacaacucauuuguaaucu

SEQ ID NO: 383340 - RNA, 20 nt, Artificial Sequence
  Synthetic
acacaacucauuuguaaucu

SEQ ID NO: 383341 - RNA, 21 nt, Artificial Sequence
  Synthetic
aacacaacucauuuguaaucu

SEQ ID NO: 383342 - RNA, 22 nt, Artificial Sequence
  Synthetic
gaacacaacucauuuguaaucu

SEQ ID NO: 383343 - RNA, 23 nt, Artificial Sequence
  Synthetic
agaacacaacucauuuguaaucu

SEQ ID NO: 383344 - RNA, 24 nt, Artificial Sequence
  Synthetic
cagaacacaacucauuuguaaucu

SEQ ID NO: 383345 - RNA, 18 nt, Artificial Sequence
  Synthetic
gaaaccauacauuaaucu

SEQ ID NO: 383346 - RNA, 19 nt, Artificial Sequence
  Synthetic
ugaaaccauacauuaaucu

SEQ ID NO: 383347 - RNA, 20 nt, Artificial Sequence
  Synthetic
augaaaccauacauuaaucu

SEQ ID NO: 383348 - RNA, 21 nt, Artificial Sequence
  Synthetic
aaugaaaccauacauuaaucu

SEQ ID NO: 383349 - RNA, 22 nt, Artificial Sequence
  Synthetic
caaugaaaccauacauuaaucu

SEQ ID NO: 383350 - RNA, 23 nt, Artificial Sequence
  Synthetic
ucaaugaaaccauacauuaaucu

SEQ ID NO: 383351 - RNA, 24 nt, Artificial Sequence
  Synthetic
aucaaugaaaccauacauuaaucu

SEQ ID NO: 383352 - RNA, 18 nt, Artificial Sequence
  Synthetic
ucacuuucuaaaacaucu

SEQ ID NO: 383353 - RNA, 19 nt, Artificial Sequence
  Synthetic
cucacuuucuaaaacaucu

SEQ ID NO: 383354 - RNA, 20 nt, Artificial Sequence
  Synthetic
ccucacuuucuaaaacaucu

SEQ ID NO: 383355 - RNA, 21 nt, Artificial Sequence
  Synthetic
uccucacuuucuaaaacaucu

SEQ ID NO: 383356 - RNA, 22 nt, Artificial Sequence
  Synthetic
uuccucacuuucuaaaacaucu

SEQ ID NO: 383357 - RNA, 23 nt, Artificial Sequence
  Synthetic
cuuccucacuuucuaaaacaucu

SEQ ID NO: 383358 - RNA, 24 nt, Artificial Sequence
  Synthetic
gcuuccucacuuucuaaaacaucu

SEQ ID NO: 383359 - RNA, 18 nt, Artificial Sequence
  Synthetic
cacuuuaguuaaacaucu

SEQ ID NO: 383360 - RNA, 19 nt, Artificial Sequence
  Synthetic
ucacuuuaguuaaacaucu

SEQ ID NO: 383361 - RNA, 20 nt, Artificial Sequence
  Synthetic
aucacuuuaguuaaacaucu

SEQ ID NO: 383362 - RNA, 21 nt, Artificial Sequence
  Synthetic
aaucacuuuaguuaaacaucu

SEQ ID NO: 383363 - RNA, 22 nt, Artificial Sequence
  Synthetic
uaaucacuuuaguuaaacaucu

SEQ ID NO: 383364 - RNA, 23 nt, Artificial Sequence
  Synthetic
uuaaucacuuuaguuaaacaucu

SEQ ID NO: 383365 - RNA, 24 nt, Artificial Sequence
  Synthetic
uuuaaucacuuuaguuaaacaucu

SEQ ID NO: 383366 - RNA, 18 nt, Artificial Sequence
  Synthetic
auuguugacauaacaucu

SEQ ID NO: 383367 - RNA, 19 nt, Artificial Sequence
  Synthetic
aauuguugacauaacaucu

SEQ ID NO: 383368 - RNA, 20 nt, Artificial Sequence
  Synthetic
gaauuguugacauaacaucu

SEQ ID NO: 383369 - RNA, 21 nt, Artificial Sequence
  Synthetic
ggaauuguugacauaacaucu

SEQ ID NO: 383370 - RNA, 22 nt, Artificial Sequence
  Synthetic
aggaauuguugacauaacaucu

SEQ ID NO: 383371 - RNA, 23 nt, Artificial Sequence
  Synthetic
aaggaauuguugacauaacaucu

SEQ ID NO: 383372 - RNA, 24 nt, Artificial Sequence
  Synthetic
uaaggaauuguugacauaacaucu

SEQ ID NO: 383373 - RNA, 18 nt, Artificial Sequence
  Synthetic
cuuauuuuucuaacaucu

SEQ ID NO: 383374 - RNA, 19 nt, Artificial Sequence
  Synthetic
ucuuauuuuucuaacaucu

SEQ ID NO: 383375 - RNA, 20 nt, Artificial Sequence
  Synthetic
uucuuauuuuucuaacaucu

SEQ ID NO: 383376 - RNA, 21 nt, Artificial Sequence
  Synthetic
auucuuauuuuucuaacaucu

SEQ ID NO: 383377 - RNA, 22 nt, Artificial Sequence
  Synthetic
uauucuuauuuuucuaacaucu

SEQ ID NO: 383378 - RNA, 23 nt, Artificial Sequence
  Synthetic
uuauucuuauuuuucuaacaucu

SEQ ID NO: 383379 - RNA, 24 nt, Artificial Sequence
  Synthetic
cuuauucuuauuuuucuaacaucu

SEQ ID NO: 383380 - RNA, 18 nt, Artificial Sequence
  Synthetic
uaugaggaaguaacaucu

SEQ ID NO: 383381 - RNA, 19 nt, Artificial Sequence
  Synthetic
uuaugaggaaguaacaucu

SEQ ID NO: 383382 - RNA, 20 nt, Artificial Sequence
  Synthetic
uuuaugaggaaguaacaucu

SEQ ID NO: 383383 - RNA, 21 nt, Artificial Sequence
  Synthetic
cuuuaugaggaaguaacaucu

SEQ ID NO: 383384 - RNA, 22 nt, Artificial Sequence
  Synthetic
ucuuuaugaggaaguaacaucu

SEQ ID NO: 383385 - RNA, 23 nt, Artificial Sequence
  Synthetic
gucuuuaugaggaaguaacaucu

SEQ ID NO: 383386 - RNA, 24 nt, Artificial Sequence
  Synthetic
ggucuuuaugaggaaguaacaucu

SEQ ID NO: 383387 - RNA, 18 nt, Artificial Sequence
  Synthetic
aaccagaugaccacaucu

SEQ ID NO: 383388 - RNA, 19 nt, Artificial Sequence
  Synthetic
uaaccagaugaccacaucu

SEQ ID NO: 383389 - RNA, 20 nt, Artificial Sequence
  Synthetic
auaaccagaugaccacaucu

SEQ ID NO: 383390 - RNA, 21 nt, Artificial Sequence
  Synthetic
uauaaccagaugaccacaucu

SEQ ID NO: 383391 - RNA, 22 nt, Artificial Sequence
  Synthetic
cuauaaccagaugaccacaucu

SEQ ID NO: 383392 - RNA, 23 nt, Artificial Sequence
  Synthetic
acuauaaccagaugaccacaucu

SEQ ID NO: 383393 - RNA, 24 nt, Artificial Sequence
  Synthetic
uacuauaaccagaugaccacaucu

SEQ ID NO: 383394 - RNA, 18 nt, Artificial Sequence
  Synthetic
uaugaagccagcacaucu

SEQ ID NO: 383395 - RNA, 19 nt, Artificial Sequence
  Synthetic
cuaugaagccagcacaucu

SEQ ID NO: 383396 - RNA, 20 nt, Artificial Sequence
  Synthetic
ccuaugaagccagcacaucu

SEQ ID NO: 383397 - RNA, 21 nt, Artificial Sequence
  Synthetic
accuaugaagccagcacaucu

SEQ ID NO: 383398 - RNA, 22 nt, Artificial Sequence
  Synthetic
gaccuaugaagccagcacaucu

SEQ ID NO: 383399 - RNA, 23 nt, Artificial Sequence
  Synthetic
ugaccuaugaagccagcacaucu

SEQ ID NO: 383400 - RNA, 24 nt, Artificial Sequence
  Synthetic
gugaccuaugaagccagcacaucu

SEQ ID NO: 383401 - RNA, 18 nt, Artificial Sequence
  Synthetic
uuuuuggaaaucacaucu

SEQ ID NO: 383402 - RNA, 19 nt, Artificial Sequence
  Synthetic
uuuuuuggaaaucacaucu

SEQ ID NO: 383403 - RNA, 20 nt, Artificial Sequence
  Synthetic
uuuuuuuggaaaucacaucu

SEQ ID NO: 383404 - RNA, 21 nt, Artificial Sequence
  Synthetic
uuuuuuuuggaaaucacaucu

SEQ ID NO: 383405 - RNA, 22 nt, Artificial Sequence
  Synthetic
uuuuuuuuuggaaaucacaucu

SEQ ID NO: 383406 - RNA, 23 nt, Artificial Sequence
  Synthetic
uuuuuuuuuuggaaaucacaucu

SEQ ID NO: 383407 - RNA, 24 nt, Artificial Sequence
  Synthetic
uuuuuuuuuuuggaaaucacaucu

SEQ ID NO: 383408 - RNA, 18 nt, Artificial Sequence
  Synthetic
ucucugguugucacaucu

SEQ ID NO: 383409 - RNA, 19 nt, Artificial Sequence
  Synthetic
cucucugguugucacaucu

SEQ ID NO: 383410 - RNA, 20 nt, Artificial Sequence
  Synthetic
ccucucugguugucacaucu

SEQ ID NO: 383411 - RNA, 21 nt, Artificial Sequence
  Synthetic
gccucucugguugucacaucu

SEQ ID NO: 383412 - RNA, 22 nt, Artificial Sequence
  Synthetic
agccucucugguugucacaucu

SEQ ID NO: 383413 - RNA, 23 nt, Artificial Sequence
  Synthetic
cagccucucugguugucacaucu

SEQ ID NO: 383414 - RNA, 24 nt, Artificial Sequence
  Synthetic
ccagccucucugguugucacaucu

SEQ ID NO: 383415 - RNA, 18 nt, Artificial Sequence
  Synthetic
aauuauuugaugacaucu

SEQ ID NO: 383416 - RNA, 19 nt, Artificial Sequence
  Synthetic
caauuauuugaugacaucu

SEQ ID NO: 383417 - RNA, 20 nt, Artificial Sequence
  Synthetic
ucaauuauuugaugacaucu

SEQ ID NO: 383418 - RNA, 21 nt, Artificial Sequence
  Synthetic
gucaauuauuugaugacaucu

SEQ ID NO: 383419 - RNA, 22 nt, Artificial Sequence
  Synthetic
ugucaauuauuugaugacaucu

SEQ ID NO: 383420 - RNA, 23 nt, Artificial Sequence
  Synthetic
uugucaauuauuugaugacaucu

SEQ ID NO: 383421 - RNA, 24 nt, Artificial Sequence
  Synthetic
uuugucaauuauuugaugacaucu

SEQ ID NO: 383422 - RNA, 18 nt, Artificial Sequence
  Synthetic
uuaugucuugugacaucu

SEQ ID NO: 383423 - RNA, 19 nt, Artificial Sequence
  Synthetic
auuaugucuugugacaucu

SEQ ID NO: 383424 - RNA, 20 nt, Artificial Sequence
  Synthetic
uauuaugucuugugacaucu

SEQ ID NO: 383425 - RNA, 21 nt, Artificial Sequence
  Synthetic
uuauuaugucuugugacaucu

SEQ ID NO: 383426 - RNA, 22 nt, Artificial Sequence
  Synthetic
uuuauuaugucuugugacaucu

SEQ ID NO: 383427 - RNA, 23 nt, Artificial Sequence
  Synthetic
uuuuauuaugucuugugacaucu

SEQ ID NO: 383428 - RNA, 24 nt, Artificial Sequence
  Synthetic
uuuuuauuaugucuugugacaucu

SEQ ID NO: 383429 - RNA, 18 nt, Artificial Sequence
  Synthetic
uuguccaaggauacaucu

SEQ ID NO: 383430 - RNA, 19 nt, Artificial Sequence
  Synthetic
uuuguccaaggauacaucu

SEQ ID NO: 383431 - RNA, 20 nt, Artificial Sequence
  Synthetic
auuuguccaaggauacaucu

SEQ ID NO: 383432 - RNA, 21 nt, Artificial Sequence
  Synthetic
gauuuguccaaggauacaucu

SEQ ID NO: 383433 - RNA, 22 nt, Artificial Sequence
  Synthetic
agauuuguccaaggauacaucu

SEQ ID NO: 383434 - RNA, 23 nt, Artificial Sequence
  Synthetic
gagauuuguccaaggauacaucu

SEQ ID NO: 383435 - RNA, 24 nt, Artificial Sequence
  Synthetic
agagauuuguccaaggauacaucu

SEQ ID NO: 383436 - RNA, 18 nt, Artificial Sequence
  Synthetic
aaugccuauuauacaucu

SEQ ID NO: 383437 - RNA, 19 nt, Artificial Sequence
  Synthetic
aaaugccuauuauacaucu

SEQ ID NO: 383438 - RNA, 20 nt, Artificial Sequence
  Synthetic
gaaaugccuauuauacaucu

SEQ ID NO: 383439 - RNA, 21 nt, Artificial Sequence
  Synthetic
ugaaaugccuauuauacaucu

SEQ ID NO: 383440 - RNA, 22 nt, Artificial Sequence
  Synthetic
uugaaaugccuauuauacaucu

SEQ ID NO: 383441 - RNA, 23 nt, Artificial Sequence
  Synthetic
uuugaaaugccuauuauacaucu

SEQ ID NO: 383442 - RNA, 24 nt, Artificial Sequence
  Synthetic
auuugaaaugccuauuauacaucu

SEQ ID NO: 383443 - RNA, 18 nt, Artificial Sequence
  Synthetic
ggaucaugcuguacaucu

SEQ ID NO: 383444 - RNA, 19 nt, Artificial Sequence
  Synthetic
aggaucaugcuguacaucu

SEQ ID NO: 383445 - RNA, 20 nt, Artificial Sequence
  Synthetic
aaggaucaugcuguacaucu

SEQ ID NO: 383446 - RNA, 21 nt, Artificial Sequence
  Synthetic
caaggaucaugcuguacaucu

SEQ ID NO: 383447 - RNA, 22 nt, Artificial Sequence
  Synthetic
gcaaggaucaugcuguacaucu

SEQ ID NO: 383448 - RNA, 23 nt, Artificial Sequence
  Synthetic
agcaaggaucaugcuguacaucu

SEQ ID NO: 383449 - RNA, 24 nt, Artificial Sequence
  Synthetic
gagcaaggaucaugcuguacaucu

SEQ ID NO: 383450 - RNA, 18 nt, Artificial Sequence
  Synthetic
auuuuugguuguacaucu

SEQ ID NO: 383451 - RNA, 19 nt, Artificial Sequence
  Synthetic
cauuuuugguuguacaucu

SEQ ID NO: 383452 - RNA, 20 nt, Artificial Sequence
  Synthetic
acauuuuugguuguacaucu

SEQ ID NO: 383453 - RNA, 21 nt, Artificial Sequence
  Synthetic
gacauuuuugguuguacaucu

SEQ ID NO: 383454 - RNA, 22 nt, Artificial Sequence
  Synthetic
agacauuuuugguuguacaucu

SEQ ID NO: 383455 - RNA, 23 nt, Artificial Sequence
  Synthetic
gagacauuuuugguuguacaucu

SEQ ID NO: 383456 - RNA, 24 nt, Artificial Sequence
  Synthetic
ggagacauuuuugguuguacaucu

SEQ ID NO: 383457 - RNA, 18 nt, Artificial Sequence
  Synthetic
aauaagaaacuaccaucu

SEQ ID NO: 383458 - RNA, 19 nt, Artificial Sequence
  Synthetic
caauaagaaacuaccaucu

SEQ ID NO: 383459 - RNA, 20 nt, Artificial Sequence
  Synthetic
ccaauaagaaacuaccaucu

SEQ ID NO: 383460 - RNA, 21 nt, Artificial Sequence
  Synthetic
uccaauaagaaacuaccaucu

SEQ ID NO: 383461 - RNA, 22 nt, Artificial Sequence
  Synthetic
auccaauaagaaacuaccaucu

SEQ ID NO: 383462 - RNA, 23 nt, Artificial Sequence
  Synthetic
gauccaauaagaaacuaccaucu

SEQ ID NO: 383463 - RNA, 24 nt, Artificial Sequence
  Synthetic
ugauccaauaagaaacuaccaucu

SEQ ID NO: 383464 - RNA, 18 nt, Artificial Sequence
  Synthetic
auaaugauguugccaucu

SEQ ID NO: 383465 - RNA, 19 nt, Artificial Sequence
  Synthetic
aauaaugauguugccaucu

SEQ ID NO: 383466 - RNA, 20 nt, Artificial Sequence
  Synthetic
aaauaaugauguugccaucu

SEQ ID NO: 383467 - RNA, 21 nt, Artificial Sequence
  Synthetic
aaaauaaugauguugccaucu

SEQ ID NO: 383468 - RNA, 22 nt, Artificial Sequence
  Synthetic
uaaaauaaugauguugccaucu

SEQ ID NO: 383469 - RNA, 23 nt, Artificial Sequence
  Synthetic
auaaaauaaugauguugccaucu

SEQ ID NO: 383470 - RNA, 24 nt, Artificial Sequence
  Synthetic
aauaaaauaaugauguugccaucu

SEQ ID NO: 383471 - RNA, 19 nt, Artificial Sequence
  Synthetic
acagagugagacuccaucu

SEQ ID NO: 383472 - RNA, 20 nt, Artificial Sequence
  Synthetic
gacagagugagacuccaucu

SEQ ID NO: 383473 - RNA, 21 nt, Artificial Sequence
  Synthetic
ugacagagugagacuccaucu

SEQ ID NO: 383474 - RNA, 22 nt, Artificial Sequence
  Synthetic
gugacagagugagacuccaucu

SEQ ID NO: 383475 - RNA, 23 nt, Artificial Sequence
  Synthetic
agugacagagugagacuccaucu

SEQ ID NO: 383476 - RNA, 24 nt, Artificial Sequence
  Synthetic
gagugacagagugagacuccaucu

SEQ ID NO: 383477 - RNA, 18 nt, Artificial Sequence
  Synthetic
gcaaauucccuuccaucu

SEQ ID NO: 383478 - RNA, 19 nt, Artificial Sequence
  Synthetic
ggcaaauucccuuccaucu

SEQ ID NO: 383479 - RNA, 20 nt, Artificial Sequence
  Synthetic
aggcaaauucccuuccaucu

SEQ ID NO: 383480 - RNA, 21 nt, Artificial Sequence
  Synthetic
gaggcaaauucccuuccaucu

SEQ ID NO: 383481 - RNA, 22 nt, Artificial Sequence
  Synthetic
ugaggcaaauucccuuccaucu

SEQ ID NO: 383482 - RNA, 23 nt, Artificial Sequence
  Synthetic
gugaggcaaauucccuuccaucu

SEQ ID NO: 383483 - RNA, 24 nt, Artificial Sequence
  Synthetic
cgugaggcaaauucccuuccaucu

SEQ ID NO: 383484 - RNA, 18 nt, Artificial Sequence
  Synthetic
ggcuacucuuuuccaucu

SEQ ID NO: 383485 - RNA, 19 nt, Artificial Sequence
  Synthetic
aggcuacucuuuuccaucu

SEQ ID NO: 383486 - RNA, 20 nt, Artificial Sequence
  Synthetic
caggcuacucuuuuccaucu

SEQ ID NO: 383487 - RNA, 21 nt, Artificial Sequence
  Synthetic
ucaggcuacucuuuuccaucu

SEQ ID NO: 383488 - RNA, 22 nt, Artificial Sequence
  Synthetic
aucaggcuacucuuuuccaucu

SEQ ID NO: 383489 - RNA, 23 nt, Artificial Sequence
  Synthetic
gaucaggcuacucuuuuccaucu

SEQ ID NO: 383490 - RNA, 24 nt, Artificial Sequence
  Synthetic
cgaucaggcuacucuuuuccaucu

SEQ ID NO: 383491 - RNA, 18 nt, Artificial Sequence
  Synthetic
aauuacucaaaagcaucu

SEQ ID NO: 383492 - RNA, 19 nt, Artificial Sequence
  Synthetic
uaauuacucaaaagcaucu

SEQ ID NO: 383493 - RNA, 20 nt, Artificial Sequence
  Synthetic
uuaauuacucaaaagcaucu

SEQ ID NO: 383494 - RNA, 21 nt, Artificial Sequence
  Synthetic
auuaauuacucaaaagcaucu

SEQ ID NO: 383495 - RNA, 22 nt, Artificial Sequence
  Synthetic
cauuaauuacucaaaagcaucu

SEQ ID NO: 383496 - RNA, 23 nt, Artificial Sequence
  Synthetic
ucauuaauuacucaaaagcaucu

SEQ ID NO: 383497 - RNA, 24 nt, Artificial Sequence
  Synthetic
aucauuaauuacucaaaagcaucu

SEQ ID NO: 383498 - RNA, 18 nt, Artificial Sequence
  Synthetic
uuguaaugagaagcaucu

SEQ ID NO: 383499 - RNA, 19 nt, Artificial Sequence
  Synthetic
auuguaaugagaagcaucu

SEQ ID NO: 383500 - RNA, 20 nt, Artificial Sequence
  Synthetic
aauuguaaugagaagcaucu

SEQ ID NO: 383501 - RNA, 21 nt, Artificial Sequence
  Synthetic
uaauuguaaugagaagcaucu

SEQ ID NO: 383502 - RNA, 22 nt, Artificial Sequence
  Synthetic
guaauuguaaugagaagcaucu

SEQ ID NO: 383503 - RNA, 23 nt, Artificial Sequence
  Synthetic
gguaauuguaaugagaagcaucu

SEQ ID NO: 383504 - RNA, 24 nt, Artificial Sequence
  Synthetic
agguaauuguaaugagaagcaucu

SEQ ID NO: 383505 - RNA, 18 nt, Artificial Sequence
  Synthetic
gcagccaaggaagcaucu

SEQ ID NO: 383506 - RNA, 19 nt, Artificial Sequence
  Synthetic
ugcagccaaggaagcaucu

SEQ ID NO: 383507 - RNA, 20 nt, Artificial Sequence
  Synthetic
augcagccaaggaagcaucu

SEQ ID NO: 383508 - RNA, 21 nt, Artificial Sequence
  Synthetic
gaugcagccaaggaagcaucu

SEQ ID NO: 383509 - RNA, 22 nt, Artificial Sequence
  Synthetic
ugaugcagccaaggaagcaucu

SEQ ID NO: 383510 - RNA, 23 nt, Artificial Sequence
  Synthetic
gugaugcagccaaggaagcaucu

SEQ ID NO: 383511 - RNA, 24 nt, Artificial Sequence
  Synthetic
ggugaugcagccaaggaagcaucu

SEQ ID NO: 383512 - RNA, 18 nt, Artificial Sequence
  Synthetic
cucucaauugcagcaucu

SEQ ID NO: 383513 - RNA, 19 nt, Artificial Sequence
  Synthetic
ucucucaauugcagcaucu

SEQ ID NO: 383514 - RNA, 20 nt, Artificial Sequence
  Synthetic
cucucucaauugcagcaucu

SEQ ID NO: 383515 - RNA, 21 nt, Artificial Sequence
  Synthetic
ucucucucaauugcagcaucu

SEQ ID NO: 383516 - RNA, 22 nt, Artificial Sequence
  Synthetic
aucucucucaauugcagcaucu

SEQ ID NO: 383517 - RNA, 23 nt, Artificial Sequence
  Synthetic
aaucucucucaauugcagcaucu

SEQ ID NO: 383518 - RNA, 24 nt, Artificial Sequence
  Synthetic
uaaucucucucaauugcagcaucu

SEQ ID NO: 383519 - RNA, 18 nt, Artificial Sequence
  Synthetic
gcaucaaucuccgcaucu

SEQ ID NO: 383520 - RNA, 19 nt, Artificial Sequence
  Synthetic
agcaucaaucuccgcaucu

SEQ ID NO: 383521 - RNA, 20 nt, Artificial Sequence
  Synthetic
cagcaucaaucuccgcaucu

SEQ ID NO: 383522 - RNA, 21 nt, Artificial Sequence
  Synthetic
ucagcaucaaucuccgcaucu

SEQ ID NO: 383523 - RNA, 22 nt, Artificial Sequence
  Synthetic
cucagcaucaaucuccgcaucu

SEQ ID NO: 383524 - RNA, 23 nt, Artificial Sequence
  Synthetic
ucucagcaucaaucuccgcaucu

SEQ ID NO: 383525 - RNA, 24 nt, Artificial Sequence
  Synthetic
cucucagcaucaaucuccgcaucu

SEQ ID NO: 383526 - RNA, 18 nt, Artificial Sequence
  Synthetic
gaauuucucaaggcaucu

SEQ ID NO: 383527 - RNA, 19 nt, Artificial Sequence
  Synthetic
agaauuucucaaggcaucu

SEQ ID NO: 383528 - RNA, 20 nt, Artificial Sequence
  Synthetic
gagaauuucucaaggcaucu

SEQ ID NO: 383529 - RNA, 21 nt, Artificial Sequence
  Synthetic
ggagaauuucucaaggcaucu

SEQ ID NO: 383530 - RNA, 22 nt, Artificial Sequence
  Synthetic
uggagaauuucucaaggcaucu

SEQ ID NO: 383531 - RNA, 23 nt, Artificial Sequence
  Synthetic
cuggagaauuucucaaggcaucu

SEQ ID NO: 383532 - RNA, 24 nt, Artificial Sequence
  Synthetic
ccuggagaauuucucaaggcaucu

SEQ ID NO: 383533 - RNA, 18 nt, Artificial Sequence
  Synthetic
ucucugggcagggcaucu

SEQ ID NO: 383534 - RNA, 19 nt, Artificial Sequence
  Synthetic
cucucugggcagggcaucu

SEQ ID NO: 383535 - RNA, 20 nt, Artificial Sequence
  Synthetic
ucucucugggcagggcaucu

SEQ ID NO: 383536 - RNA, 21 nt, Artificial Sequence
  Synthetic
uucucucugggcagggcaucu

SEQ ID NO: 383537 - RNA, 22 nt, Artificial Sequence
  Synthetic
cuucucucugggcagggcaucu

SEQ ID NO: 383538 - RNA, 23 nt, Artificial Sequence
  Synthetic
ccuucucucugggcagggcaucu

SEQ ID NO: 383539 - RNA, 24 nt, Artificial Sequence
  Synthetic
uccuucucucugggcagggcaucu

SEQ ID NO: 383540 - RNA, 18 nt, Artificial Sequence
  Synthetic
cagccaagacuugcaucu

SEQ ID NO: 383541 - RNA, 19 nt, Artificial Sequence
  Synthetic
ccagccaagacuugcaucu

SEQ ID NO: 383542 - RNA, 20 nt, Artificial Sequence
  Synthetic
cccagccaagacuugcaucu

SEQ ID NO: 383543 - RNA, 21 nt, Artificial Sequence
  Synthetic
gcccagccaagacuugcaucu

SEQ ID NO: 383544 - RNA, 22 nt, Artificial Sequence
  Synthetic
ugcccagccaagacuugcaucu

SEQ ID NO: 383545 - RNA, 23 nt, Artificial Sequence
  Synthetic
gugcccagccaagacuugcaucu

SEQ ID NO: 383546 - RNA, 24 nt, Artificial Sequence
  Synthetic
ugugcccagccaagacuugcaucu

SEQ ID NO: 383547 - RNA, 18 nt, Artificial Sequence
  Synthetic
ugaucauuagcaucaucu

SEQ ID NO: 383548 - RNA, 19 nt, Artificial Sequence
  Synthetic
augaucauuagcaucaucu

SEQ ID NO: 383549 - RNA, 20 nt, Artificial Sequence
  Synthetic
aaugaucauuagcaucaucu

SEQ ID NO: 383550 - RNA, 21 nt, Artificial Sequence
  Synthetic
uaaugaucauuagcaucaucu

SEQ ID NO: 383551 - RNA, 22 nt, Artificial Sequence
  Synthetic
cuaaugaucauuagcaucaucu

SEQ ID NO: 383552 - RNA, 23 nt, Artificial Sequence
  Synthetic
gcuaaugaucauuagcaucaucu

SEQ ID NO: 383553 - RNA, 24 nt, Artificial Sequence
  Synthetic
cgcuaaugaucauuagcaucaucu

SEQ ID NO: 383554 - RNA, 18 nt, Artificial Sequence
  Synthetic
aauuucauacccucaucu

SEQ ID NO: 383555 - RNA, 19 nt, Artificial Sequence
  Synthetic
gaauuucauacccucaucu

SEQ ID NO: 383556 - RNA, 20 nt, Artificial Sequence
  Synthetic
ggaauuucauacccucaucu

SEQ ID NO: 383557 - RNA, 21 nt, Artificial Sequence
  Synthetic
cggaauuucauacccucaucu

SEQ ID NO: 383558 - RNA, 22 nt, Artificial Sequence
  Synthetic
acggaauuucauacccucaucu

SEQ ID NO: 383559 - RNA, 23 nt, Artificial Sequence
  Synthetic
gacggaauuucauacccucaucu

SEQ ID NO: 383560 - RNA, 24 nt, Artificial Sequence
  Synthetic
ugacggaauuucauacccucaucu

SEQ ID NO: 383561 - RNA, 18 nt, Artificial Sequence
  Synthetic
ugguagauuagcucaucu

SEQ ID NO: 383562 - RNA, 19 nt, Artificial Sequence
  Synthetic
gugguagauuagcucaucu

SEQ ID NO: 383563 - RNA, 20 nt, Artificial Sequence
  Synthetic
ggugguagauuagcucaucu

SEQ ID NO: 383564 - RNA, 21 nt, Artificial Sequence
  Synthetic
aggugguagauuagcucaucu

SEQ ID NO: 383565 - RNA, 22 nt, Artificial Sequence
  Synthetic
aaggugguagauuagcucaucu

SEQ ID NO: 383566 - RNA, 23 nt, Artificial Sequence
  Synthetic
gaaggugguagauuagcucaucu

SEQ ID NO: 383567 - RNA, 24 nt, Artificial Sequence
  Synthetic
agaaggugguagauuagcucaucu

SEQ ID NO: 383568 - RNA, 18 nt, Artificial Sequence
  Synthetic
agggugguggagucaucu

SEQ ID NO: 383569 - RNA, 19 nt, Artificial Sequence
  Synthetic
gagggugguggagucaucu

SEQ ID NO: 383570 - RNA, 20 nt, Artificial Sequence
  Synthetic
ggagggugguggagucaucu

SEQ ID NO: 383571 - RNA, 21 nt, Artificial Sequence
  Synthetic
aggagggugguggagucaucu

SEQ ID NO: 383572 - RNA, 22 nt, Artificial Sequence
  Synthetic
aaggagggugguggagucaucu

SEQ ID NO: 383573 - RNA, 23 nt, Artificial Sequence
  Synthetic
aaaggagggugguggagucaucu

SEQ ID NO: 383574 - RNA, 24 nt, Artificial Sequence
  Synthetic
aaaaggagggugguggagucaucu

SEQ ID NO: 383575 - RNA, 18 nt, Artificial Sequence
  Synthetic
aaauugguuaugucaucu

SEQ ID NO: 383576 - RNA, 19 nt, Artificial Sequence
  Synthetic
caaauugguuaugucaucu

SEQ ID NO: 383577 - RNA, 20 nt, Artificial Sequence
  Synthetic
ucaaauugguuaugucaucu

SEQ ID NO: 383578 - RNA, 21 nt, Artificial Sequence
  Synthetic
cucaaauugguuaugucaucu

SEQ ID NO: 383579 - RNA, 22 nt, Artificial Sequence
  Synthetic
ucucaaauugguuaugucaucu

SEQ ID NO: 383580 - RNA, 23 nt, Artificial Sequence
  Synthetic
uucucaaauugguuaugucaucu

SEQ ID NO: 383581 - RNA, 24 nt, Artificial Sequence
  Synthetic
auucucaaauugguuaugucaucu

SEQ ID NO: 383582 - RNA, 18 nt, Artificial Sequence
  Synthetic
aaacuuccucugucaucu

SEQ ID NO: 383583 - RNA, 19 nt, Artificial Sequence
  Synthetic
uaaacuuccucugucaucu

SEQ ID NO: 383584 - RNA, 20 nt, Artificial Sequence
  Synthetic
auaaacuuccucugucaucu

SEQ ID NO: 383585 - RNA, 21 nt, Artificial Sequence
  Synthetic
gauaaacuuccucugucaucu

SEQ ID NO: 383586 - RNA, 22 nt, Artificial Sequence
  Synthetic
ugauaaacuuccucugucaucu

SEQ ID NO: 383587 - RNA, 23 nt, Artificial Sequence
  Synthetic
augauaaacuuccucugucaucu

SEQ ID NO: 383588 - RNA, 24 nt, Artificial Sequence
  Synthetic
uaugauaaacuuccucugucaucu

SEQ ID NO: 383589 - RNA, 18 nt, Artificial Sequence
  Synthetic
accuuuuguuugucaucu

SEQ ID NO: 383590 - RNA, 19 nt, Artificial Sequence
  Synthetic
gaccuuuuguuugucaucu

SEQ ID NO: 383591 - RNA, 20 nt, Artificial Sequence
  Synthetic
agaccuuuuguuugucaucu

SEQ ID NO: 383592 - RNA, 21 nt, Artificial Sequence
  Synthetic
uagaccuuuuguuugucaucu

SEQ ID NO: 383593 - RNA, 22 nt, Artificial Sequence
  Synthetic
guagaccuuuuguuugucaucu

SEQ ID NO: 383594 - RNA, 23 nt, Artificial Sequence
  Synthetic
uguagaccuuuuguuugucaucu

SEQ ID NO: 383595 - RNA, 24 nt, Artificial Sequence
  Synthetic
uuguagaccuuuuguuugucaucu

SEQ ID NO: 383596 - RNA, 18 nt, Artificial Sequence
  Synthetic
gcugacguaccuucaucu

SEQ ID NO: 383597 - RNA, 19 nt, Artificial Sequence
  Synthetic
agcugacguaccuucaucu

SEQ ID NO: 383598 - RNA, 20 nt, Artificial Sequence
  Synthetic
gagcugacguaccuucaucu

SEQ ID NO: 383599 - RNA, 21 nt, Artificial Sequence
  Synthetic
agagcugacguaccuucaucu

SEQ ID NO: 383600 - RNA, 22 nt, Artificial Sequence
  Synthetic
gagagcugacguaccuucaucu

SEQ ID NO: 383601 - RNA, 23 nt, Artificial Sequence
  Synthetic
agagagcugacguaccuucaucu

SEQ ID NO: 383602 - RNA, 24 nt, Artificial Sequence
  Synthetic
gagagagcugacguaccuucaucu

SEQ ID NO: 383603 - RNA, 18 nt, Artificial Sequence
  Synthetic
uugcaugaagcuucaucu

SEQ ID NO: 383604 - RNA, 19 nt, Artificial Sequence
  Synthetic
uuugcaugaagcuucaucu

SEQ ID NO: 383605 - RNA, 20 nt, Artificial Sequence
  Synthetic
uuuugcaugaagcuucaucu

SEQ ID NO: 383606 - RNA, 21 nt, Artificial Sequence
  Synthetic
uuuuugcaugaagcuucaucu

SEQ ID NO: 383607 - RNA, 22 nt, Artificial Sequence
  Synthetic
auuuuugcaugaagcuucaucu

SEQ ID NO: 383608 - RNA, 23 nt, Artificial Sequence
  Synthetic
cauuuuugcaugaagcuucaucu

SEQ ID NO: 383609 - RNA, 24 nt, Artificial Sequence
  Synthetic
ucauuuuugcaugaagcuucaucu

SEQ ID NO: 383610 - RNA, 18 nt, Artificial Sequence
  Synthetic
uaaagugaagcuucaucu

SEQ ID NO: 383611 - RNA, 19 nt, Artificial Sequence
  Synthetic
auaaagugaagcuucaucu

SEQ ID NO: 383612 - RNA, 20 nt, Artificial Sequence
  Synthetic
gauaaagugaagcuucaucu

SEQ ID NO: 383613 - RNA, 21 nt, Artificial Sequence
  Synthetic
ugauaaagugaagcuucaucu

SEQ ID NO: 383614 - RNA, 22 nt, Artificial Sequence
  Synthetic
cugauaaagugaagcuucaucu

SEQ ID NO: 383615 - RNA, 23 nt, Artificial Sequence
  Synthetic
acugauaaagugaagcuucaucu

SEQ ID NO: 383616 - RNA, 24 nt, Artificial Sequence
  Synthetic
aacugauaaagugaagcuucaucu

SEQ ID NO: 383617 - RNA, 18 nt, Artificial Sequence
  Synthetic
ugggcauuguguucaucu

SEQ ID NO: 383618 - RNA, 19 nt, Artificial Sequence
  Synthetic
augggcauuguguucaucu

SEQ ID NO: 383619 - RNA, 20 nt, Artificial Sequence
  Synthetic
uaugggcauuguguucaucu

SEQ ID NO: 383620 - RNA, 21 nt, Artificial Sequence
  Synthetic
auaugggcauuguguucaucu

SEQ ID NO: 383621 - RNA, 22 nt, Artificial Sequence
  Synthetic
uauaugggcauuguguucaucu

SEQ ID NO: 383622 - RNA, 23 nt, Artificial Sequence
  Synthetic
auauaugggcauuguguucaucu

SEQ ID NO: 383623 - RNA, 24 nt, Artificial Sequence
  Synthetic
uauauaugggcauuguguucaucu

SEQ ID NO: 383624 - RNA, 18 nt, Artificial Sequence
  Synthetic
uggcaaauccuuucaucu

SEQ ID NO: 383625 - RNA, 19 nt, Artificial Sequence
  Synthetic
uuggcaaauccuuucaucu

SEQ ID NO: 383626 - RNA, 20 nt, Artificial Sequence
  Synthetic
uuuggcaaauccuuucaucu

SEQ ID NO: 383627 - RNA, 21 nt, Artificial Sequence
  Synthetic
uuuuggcaaauccuuucaucu

SEQ ID NO: 383628 - RNA, 22 nt, Artificial Sequence
  Synthetic
uuuuuggcaaauccuuucaucu

SEQ ID NO: 383629 - RNA, 23 nt, Artificial Sequence
  Synthetic
guuuuuggcaaauccuuucaucu

SEQ ID NO: 383630 - RNA, 24 nt, Artificial Sequence
  Synthetic
aguuuuuggcaaauccuuucaucu

SEQ ID NO: 383631 - RNA, 18 nt, Artificial Sequence
  Synthetic
ugguucucauuuucaucu

SEQ ID NO: 383632 - RNA, 19 nt, Artificial Sequence
  Synthetic
augguucucauuuucaucu

SEQ ID NO: 383633 - RNA, 20 nt, Artificial Sequence
  Synthetic
caugguucucauuuucaucu

SEQ ID NO: 383634 - RNA, 21 nt, Artificial Sequence
  Synthetic
ucaugguucucauuuucaucu

SEQ ID NO: 383635 - RNA, 22 nt, Artificial Sequence
  Synthetic
uucaugguucucauuuucaucu

SEQ ID NO: 383636 - RNA, 23 nt, Artificial Sequence
  Synthetic
cuucaugguucucauuuucaucu

SEQ ID NO: 383637 - RNA, 24 nt, Artificial Sequence
  Synthetic
gcuucaugguucucauuuucaucu

SEQ ID NO: 383638 - RNA, 18 nt, Artificial Sequence
  Synthetic
auagugucuuuuucaucu

SEQ ID NO: 383639 - RNA, 19 nt, Artificial Sequence
  Synthetic
aauagugucuuuuucaucu

SEQ ID NO: 383640 - RNA, 20 nt, Artificial Sequence
  Synthetic
caauagugucuuuuucaucu

SEQ ID NO: 383641 - RNA, 21 nt, Artificial Sequence
  Synthetic
gcaauagugucuuuuucaucu

SEQ ID NO: 383642 - RNA, 22 nt, Artificial Sequence
  Synthetic
agcaauagugucuuuuucaucu

SEQ ID NO: 383643 - RNA, 23 nt, Artificial Sequence
  Synthetic
uagcaauagugucuuuuucaucu

SEQ ID NO: 383644 - RNA, 24 nt, Artificial Sequence
  Synthetic
auagcaauagugucuuuuucaucu

SEQ ID NO: 383645 - RNA, 18 nt, Artificial Sequence
  Synthetic
cuagguaaugaaagaucu

SEQ ID NO: 383646 - RNA, 19 nt, Artificial Sequence
  Synthetic
ucuagguaaugaaagaucu

SEQ ID NO: 383647 - RNA, 20 nt, Artificial Sequence
  Synthetic
aucuagguaaugaaagaucu

SEQ ID NO: 383648 - RNA, 21 nt, Artificial Sequence
  Synthetic
caucuagguaaugaaagaucu

SEQ ID NO: 383649 - RNA, 22 nt, Artificial Sequence
  Synthetic
ucaucuagguaaugaaagaucu

SEQ ID NO: 383650 - RNA, 23 nt, Artificial Sequence
  Synthetic
gucaucuagguaaugaaagaucu

SEQ ID NO: 383651 - RNA, 24 nt, Artificial Sequence
  Synthetic
ugucaucuagguaaugaaagaucu

SEQ ID NO: 383652 - RNA, 18 nt, Artificial Sequence
  Synthetic
gcugaguucuaaagaucu

SEQ ID NO: 383653 - RNA, 19 nt, Artificial Sequence
  Synthetic
ggcugaguucuaaagaucu

SEQ ID NO: 383654 - RNA, 20 nt, Artificial Sequence
  Synthetic
uggcugaguucuaaagaucu

SEQ ID NO: 383655 - RNA, 21 nt, Artificial Sequence
  Synthetic
auggcugaguucuaaagaucu

SEQ ID NO: 383656 - RNA, 22 nt, Artificial Sequence
  Synthetic
cauggcugaguucuaaagaucu

SEQ ID NO: 383657 - RNA, 23 nt, Artificial Sequence
  Synthetic
ccauggcugaguucuaaagaucu

SEQ ID NO: 383658 - RNA, 24 nt, Artificial Sequence
  Synthetic
uccauggcugaguucuaaagaucu

SEQ ID NO: 383659 - RNA, 18 nt, Artificial Sequence
  Synthetic
gugggaaagacaagaucu

SEQ ID NO: 383660 - RNA, 19 nt, Artificial Sequence
  Synthetic
ggugggaaagacaagaucu

SEQ ID NO: 383661 - RNA, 20 nt, Artificial Sequence
  Synthetic
uggugggaaagacaagaucu

SEQ ID NO: 383662 - RNA, 21 nt, Artificial Sequence
  Synthetic
auggugggaaagacaagaucu

SEQ ID NO: 383663 - RNA, 22 nt, Artificial Sequence
  Synthetic
gauggugggaaagacaagaucu

SEQ ID NO: 383664 - RNA, 23 nt, Artificial Sequence
  Synthetic
ugauggugggaaagacaagaucu

SEQ ID NO: 383665 - RNA, 24 nt, Artificial Sequence
  Synthetic
augauggugggaaagacaagaucu

SEQ ID NO: 383666 - RNA, 18 nt, Artificial Sequence
  Synthetic
cauucauuuuuaagaucu

SEQ ID NO: 383667 - RNA, 19 nt, Artificial Sequence
  Synthetic
ucauucauuuuuaagaucu

SEQ ID NO: 383668 - RNA, 20 nt, Artificial Sequence
  Synthetic
aucauucauuuuuaagaucu

SEQ ID NO: 383669 - RNA, 21 nt, Artificial Sequence
  Synthetic
uaucauucauuuuuaagaucu

SEQ ID NO: 383670 - RNA, 22 nt, Artificial Sequence
  Synthetic
uuaucauucauuuuuaagaucu

SEQ ID NO: 383671 - RNA, 23 nt, Artificial Sequence
  Synthetic
uuuaucauucauuuuuaagaucu

SEQ ID NO: 383672 - RNA, 24 nt, Artificial Sequence
  Synthetic
guuuaucauucauuuuuaagaucu

SEQ ID NO: 383673 - RNA, 18 nt, Artificial Sequence
  Synthetic
uaagagcuucacagaucu

SEQ ID NO: 383674 - RNA, 19 nt, Artificial Sequence
  Synthetic
auaagagcuucacagaucu

SEQ ID NO: 383675 - RNA, 20 nt, Artificial Sequence
  Synthetic
aauaagagcuucacagaucu

SEQ ID NO: 383676 - RNA, 21 nt, Artificial Sequence
  Synthetic
aaauaagagcuucacagaucu

SEQ ID NO: 383677 - RNA, 22 nt, Artificial Sequence
  Synthetic
aaaauaagagcuucacagaucu

SEQ ID NO: 383678 - RNA, 23 nt, Artificial Sequence
  Synthetic
uaaaauaagagcuucacagaucu

SEQ ID NO: 383679 - RNA, 24 nt, Artificial Sequence
  Synthetic
guaaaauaagagcuucacagaucu

SEQ ID NO: 383680 - RNA, 18 nt, Artificial Sequence
  Synthetic
uuuuaaacaaccagaucu

SEQ ID NO: 383681 - RNA, 19 nt, Artificial Sequence
  Synthetic
cuuuuaaacaaccagaucu

SEQ ID NO: 383682 - RNA, 20 nt, Artificial Sequence
  Synthetic
acuuuuaaacaaccagaucu

SEQ ID NO: 383683 - RNA, 21 nt, Artificial Sequence
  Synthetic
uacuuuuaaacaaccagaucu

SEQ ID NO: 383684 - RNA, 22 nt, Artificial Sequence
  Synthetic
cuacuuuuaaacaaccagaucu

SEQ ID NO: 383685 - RNA, 23 nt, Artificial Sequence
  Synthetic
ccuacuuuuaaacaaccagaucu

SEQ ID NO: 383686 - RNA, 24 nt, Artificial Sequence
  Synthetic
accuacuuuuaaacaaccagaucu

SEQ ID NO: 383687 - RNA, 18 nt, Artificial Sequence
  Synthetic
guguaaacagccagaucu

SEQ ID NO: 383688 - RNA, 19 nt, Artificial Sequence
  Synthetic
cguguaaacagccagaucu

SEQ ID NO: 383689 - RNA, 20 nt, Artificial Sequence
  Synthetic
acguguaaacagccagaucu

SEQ ID NO: 383690 - RNA, 21 nt, Artificial Sequence
  Synthetic
cacguguaaacagccagaucu

SEQ ID NO: 383691 - RNA, 22 nt, Artificial Sequence
  Synthetic
acacguguaaacagccagaucu

SEQ ID NO: 383692 - RNA, 23 nt, Artificial Sequence
  Synthetic
cacacguguaaacagccagaucu

SEQ ID NO: 383693 - RNA, 24 nt, Artificial Sequence
  Synthetic
acacacguguaaacagccagaucu

SEQ ID NO: 383694 - RNA, 18 nt, Artificial Sequence
  Synthetic
uacuaggccugcagaucu

SEQ ID NO: 383695 - RNA, 19 nt, Artificial Sequence
  Synthetic
uuacuaggccugcagaucu

SEQ ID NO: 383696 - RNA, 20 nt, Artificial Sequence
  Synthetic
guuacuaggccugcagaucu

SEQ ID NO: 383697 - RNA, 21 nt, Artificial Sequence
  Synthetic
uguuacuaggccugcagaucu

SEQ ID NO: 383698 - RNA, 22 nt, Artificial Sequence
  Synthetic
uuguuacuaggccugcagaucu

SEQ ID NO: 383699 - RNA, 23 nt, Artificial Sequence
  Synthetic
uuuguuacuaggccugcagaucu

SEQ ID NO: 383700 - RNA, 24 nt, Artificial Sequence
  Synthetic
uuuuguuacuaggccugcagaucu

SEQ ID NO: 383701 - RNA, 18 nt, Artificial Sequence
  Synthetic
ccccuggccuagagaucu

SEQ ID NO: 383702 - RNA, 19 nt, Artificial Sequence
  Synthetic
uccccuggccuagagaucu

SEQ ID NO: 383703 - RNA, 20 nt, Artificial Sequence
  Synthetic
uuccccuggccuagagaucu

SEQ ID NO: 383704 - RNA, 21 nt, Artificial Sequence
  Synthetic
uuuccccuggccuagagaucu

SEQ ID NO: 383705 - RNA, 22 nt, Artificial Sequence
  Synthetic
uuuuccccuggccuagagaucu

SEQ ID NO: 383706 - RNA, 23 nt, Artificial Sequence
  Synthetic
auuuuccccuggccuagagaucu

SEQ ID NO: 383707 - RNA, 24 nt, Artificial Sequence
  Synthetic
cauuuuccccuggccuagagaucu

SEQ ID NO: 383708 - RNA, 18 nt, Artificial Sequence
  Synthetic
uugauuacaaauagaucu

SEQ ID NO: 383709 - RNA, 19 nt, Artificial Sequence
  Synthetic
uuugauuacaaauagaucu

SEQ ID NO: 383710 - RNA, 20 nt, Artificial Sequence
  Synthetic
auuugauuacaaauagaucu

SEQ ID NO: 383711 - RNA, 21 nt, Artificial Sequence
  Synthetic
aauuugauuacaaauagaucu

SEQ ID NO: 383712 - RNA, 22 nt, Artificial Sequence
  Synthetic
aaauuugauuacaaauagaucu

SEQ ID NO: 383713 - RNA, 23 nt, Artificial Sequence
  Synthetic
caaauuugauuacaaauagaucu

SEQ ID NO: 383714 - RNA, 24 nt, Artificial Sequence
  Synthetic
acaaauuugauuacaaauagaucu

SEQ ID NO: 383715 - RNA, 18 nt, Artificial Sequence
  Synthetic
auuucugguucuagaucu

SEQ ID NO: 383716 - RNA, 19 nt, Artificial Sequence
  Synthetic
uauuucugguucuagaucu

SEQ ID NO: 383717 - RNA, 20 nt, Artificial Sequence
  Synthetic
guauuucugguucuagaucu

SEQ ID NO: 383718 - RNA, 21 nt, Artificial Sequence
  Synthetic
gguauuucugguucuagaucu

SEQ ID NO: 383719 - RNA, 22 nt, Artificial Sequence
  Synthetic
ugguauuucugguucuagaucu

SEQ ID NO: 383720 - RNA, 23 nt, Artificial Sequence
  Synthetic
augguauuucugguucuagaucu

SEQ ID NO: 383721 - RNA, 24 nt, Artificial Sequence
  Synthetic
aaugguauuucugguucuagaucu

SEQ ID NO: 383722 - RNA, 18 nt, Artificial Sequence
  Synthetic
cugaauuccuguagaucu

SEQ ID NO: 383723 - RNA, 19 nt, Artificial Sequence
  Synthetic
ccugaauuccuguagaucu

SEQ ID NO: 383724 - RNA, 20 nt, Artificial Sequence
  Synthetic
cccugaauuccuguagaucu

SEQ ID NO: 383725 - RNA, 21 nt, Artificial Sequence
  Synthetic
acccugaauuccuguagaucu

SEQ ID NO: 383726 - RNA, 22 nt, Artificial Sequence
  Synthetic
gacccugaauuccuguagaucu

SEQ ID NO: 383727 - RNA, 23 nt, Artificial Sequence
  Synthetic
ggacccugaauuccuguagaucu

SEQ ID NO: 383728 - RNA, 24 nt, Artificial Sequence
  Synthetic
gggacccugaauuccuguagaucu

SEQ ID NO: 383729 - RNA, 18 nt, Artificial Sequence
  Synthetic
ccaaauagaaaaggaucu

SEQ ID NO: 383730 - RNA, 19 nt, Artificial Sequence
  Synthetic
accaaauagaaaaggaucu

SEQ ID NO: 383731 - RNA, 20 nt, Artificial Sequence
  Synthetic
aaccaaauagaaaaggaucu

SEQ ID NO: 383732 - RNA, 21 nt, Artificial Sequence
  Synthetic
gaaccaaauagaaaaggaucu

SEQ ID NO: 383733 - RNA, 22 nt, Artificial Sequence
  Synthetic
ugaaccaaauagaaaaggaucu

SEQ ID NO: 383734 - RNA, 23 nt, Artificial Sequence
  Synthetic
gugaaccaaauagaaaaggaucu

SEQ ID NO: 383735 - RNA, 24 nt, Artificial Sequence
  Synthetic
agugaaccaaauagaaaaggaucu

SEQ ID NO: 383736 - RNA, 18 nt, Artificial Sequence
  Synthetic
aagauuuaugaaggaucu

SEQ ID NO: 383737 - RNA, 19 nt, Artificial Sequence
  Synthetic
gaagauuuaugaaggaucu

SEQ ID NO: 383738 - RNA, 20 nt, Artificial Sequence
  Synthetic
agaagauuuaugaaggaucu

SEQ ID NO: 383739 - RNA, 21 nt, Artificial Sequence
  Synthetic
aagaagauuuaugaaggaucu

SEQ ID NO: 383740 - RNA, 22 nt, Artificial Sequence
  Synthetic
uaagaagauuuaugaaggaucu

SEQ ID NO: 383741 - RNA, 23 nt, Artificial Sequence
  Synthetic
guaagaagauuuaugaaggaucu

SEQ ID NO: 383742 - RNA, 24 nt, Artificial Sequence
  Synthetic
aguaagaagauuuaugaaggaucu

SEQ ID NO: 383743 - RNA, 18 nt, Artificial Sequence
  Synthetic
ccuaacuucuaaggaucu

SEQ ID NO: 383744 - RNA, 19 nt, Artificial Sequence
  Synthetic
uccuaacuucuaaggaucu

SEQ ID NO: 383745 - RNA, 20 nt, Artificial Sequence
  Synthetic
uuccuaacuucuaaggaucu

SEQ ID NO: 383746 - RNA, 21 nt, Artificial Sequence
  Synthetic
auuccuaacuucuaaggaucu

SEQ ID NO: 383747 - RNA, 22 nt, Artificial Sequence
  Synthetic
cauuccuaacuucuaaggaucu

SEQ ID NO: 383748 - RNA, 23 nt, Artificial Sequence
  Synthetic
ccauuccuaacuucuaaggaucu

SEQ ID NO: 383749 - RNA, 24 nt, Artificial Sequence
  Synthetic
accauuccuaacuucuaaggaucu

SEQ ID NO: 383750 - RNA, 18 nt, Artificial Sequence
  Synthetic
ccuuccccaggaggaucu

SEQ ID NO: 383751 - RNA, 19 nt, Artificial Sequence
  Synthetic
gccuuccccaggaggaucu

SEQ ID NO: 383752 - RNA, 20 nt, Artificial Sequence
  Synthetic
agccuuccccaggaggaucu

SEQ ID NO: 383753 - RNA, 21 nt, Artificial Sequence
  Synthetic
uagccuuccccaggaggaucu

SEQ ID NO: 383754 - RNA, 22 nt, Artificial Sequence
  Synthetic
cuagccuuccccaggaggaucu

SEQ ID NO: 383755 - RNA, 23 nt, Artificial Sequence
  Synthetic
ccuagccuuccccaggaggaucu

SEQ ID NO: 383756 - RNA, 24 nt, Artificial Sequence
  Synthetic
uccuagccuuccccaggaggaucu

SEQ ID NO: 383757 - RNA, 18 nt, Artificial Sequence
  Synthetic
uggguagagaauggaucu

SEQ ID NO: 383758 - RNA, 19 nt, Artificial Sequence
  Synthetic
auggguagagaauggaucu

SEQ ID NO: 383759 - RNA, 20 nt, Artificial Sequence
  Synthetic
aauggguagagaauggaucu

SEQ ID NO: 383760 - RNA, 21 nt, Artificial Sequence
  Synthetic
aaauggguagagaauggaucu

SEQ ID NO: 383761 - RNA, 22 nt, Artificial Sequence
  Synthetic
gaaauggguagagaauggaucu

SEQ ID NO: 383762 - RNA, 23 nt, Artificial Sequence
  Synthetic
ggaaauggguagagaauggaucu

SEQ ID NO: 383763 - RNA, 24 nt, Artificial Sequence
  Synthetic
aggaaauggguagagaauggaucu

SEQ ID NO: 383764 - RNA, 18 nt, Artificial Sequence
  Synthetic
ucccagaauuguggaucu

SEQ ID NO: 383765 - RNA, 19 nt, Artificial Sequence
  Synthetic
aucccagaauuguggaucu

SEQ ID NO: 383766 - RNA, 20 nt, Artificial Sequence
  Synthetic
aaucccagaauuguggaucu

SEQ ID NO: 383767 - RNA, 21 nt, Artificial Sequence
  Synthetic
aaaucccagaauuguggaucu

SEQ ID NO: 383768 - RNA, 22 nt, Artificial Sequence
  Synthetic
gaaaucccagaauuguggaucu

SEQ ID NO: 383769 - RNA, 23 nt, Artificial Sequence
  Synthetic
agaaaucccagaauuguggaucu

SEQ ID NO: 383770 - RNA, 24 nt, Artificial Sequence
  Synthetic
gagaaaucccagaauuguggaucu

SEQ ID NO: 383771 - RNA, 18 nt, Artificial Sequence
  Synthetic
uucuuccuaacaugaucu

SEQ ID NO: 383772 - RNA, 19 nt, Artificial Sequence
  Synthetic
uuucuuccuaacaugaucu

SEQ ID NO: 383773 - RNA, 20 nt, Artificial Sequence
  Synthetic
cuuucuuccuaacaugaucu

SEQ ID NO: 383774 - RNA, 21 nt, Artificial Sequence
  Synthetic
gcuuucuuccuaacaugaucu

SEQ ID NO: 383775 - RNA, 22 nt, Artificial Sequence
  Synthetic
agcuuucuuccuaacaugaucu

SEQ ID NO: 383776 - RNA, 23 nt, Artificial Sequence
  Synthetic
uagcuuucuuccuaacaugaucu

SEQ ID NO: 383777 - RNA, 24 nt, Artificial Sequence
  Synthetic
guagcuuucuuccuaacaugaucu

SEQ ID NO: 383778 - RNA, 18 nt, Artificial Sequence
  Synthetic
cagcuccauccaugaucu

SEQ ID NO: 383779 - RNA, 19 nt, Artificial Sequence
  Synthetic
gcagcuccauccaugaucu

SEQ ID NO: 383780 - RNA, 20 nt, Artificial Sequence
  Synthetic
ugcagcuccauccaugaucu

SEQ ID NO: 383781 - RNA, 21 nt, Artificial Sequence
  Synthetic
cugcagcuccauccaugaucu

SEQ ID NO: 383782 - RNA, 22 nt, Artificial Sequence
  Synthetic
ccugcagcuccauccaugaucu

SEQ ID NO: 383783 - RNA, 23 nt, Artificial Sequence
  Synthetic
gccugcagcuccauccaugaucu

SEQ ID NO: 383784 - RNA, 24 nt, Artificial Sequence
  Synthetic
ggccugcagcuccauccaugaucu

SEQ ID NO: 383785 - RNA, 18 nt, Artificial Sequence
  Synthetic
cucaaaugcagaugaucu

SEQ ID NO: 383786 - RNA, 19 nt, Artificial Sequence
  Synthetic
ucucaaaugcagaugaucu

SEQ ID NO: 383787 - RNA, 20 nt, Artificial Sequence
  Synthetic
uucucaaaugcagaugaucu

SEQ ID NO: 383788 - RNA, 21 nt, Artificial Sequence
  Synthetic
guucucaaaugcagaugaucu

SEQ ID NO: 383789 - RNA, 22 nt, Artificial Sequence
  Synthetic
gguucucaaaugcagaugaucu

SEQ ID NO: 383790 - RNA, 23 nt, Artificial Sequence
  Synthetic
agguucucaaaugcagaugaucu

SEQ ID NO: 383791 - RNA, 24 nt, Artificial Sequence
  Synthetic
gagguucucaaaugcagaugaucu

SEQ ID NO: 383792 - RNA, 18 nt, Artificial Sequence
  Synthetic
uugucuugcuccugaucu

SEQ ID NO: 383793 - RNA, 19 nt, Artificial Sequence
  Synthetic
uuugucuugcuccugaucu

SEQ ID NO: 383794 - RNA, 20 nt, Artificial Sequence
  Synthetic
cuuugucuugcuccugaucu

SEQ ID NO: 383795 - RNA, 21 nt, Artificial Sequence
  Synthetic
ucuuugucuugcuccugaucu

SEQ ID NO: 383796 - RNA, 22 nt, Artificial Sequence
  Synthetic
aucuuugucuugcuccugaucu

SEQ ID NO: 383797 - RNA, 23 nt, Artificial Sequence
  Synthetic
caucuuugucuugcuccugaucu

SEQ ID NO: 383798 - RNA, 24 nt, Artificial Sequence
  Synthetic
gcaucuuugucuugcuccugaucu

SEQ ID NO: 383799 - RNA, 18 nt, Artificial Sequence
  Synthetic
gccccaaagagcugaucu

SEQ ID NO: 383800 - RNA, 19 nt, Artificial Sequence
  Synthetic
agccccaaagagcugaucu

SEQ ID NO: 383801 - RNA, 20 nt, Artificial Sequence
  Synthetic
uagccccaaagagcugaucu

SEQ ID NO: 383802 - RNA, 21 nt, Artificial Sequence
  Synthetic
auagccccaaagagcugaucu

SEQ ID NO: 383803 - RNA, 22 nt, Artificial Sequence
  Synthetic
aauagccccaaagagcugaucu

SEQ ID NO: 383804 - RNA, 23 nt, Artificial Sequence
  Synthetic
aaauagccccaaagagcugaucu

SEQ ID NO: 383805 - RNA, 24 nt, Artificial Sequence
  Synthetic
caaauagccccaaagagcugaucu

SEQ ID NO: 383806 - RNA, 18 nt, Artificial Sequence
  Synthetic
uguuagggaacgugaucu

SEQ ID NO: 383807 - RNA, 19 nt, Artificial Sequence
  Synthetic
uuguuagggaacgugaucu

SEQ ID NO: 383808 - RNA, 20 nt, Artificial Sequence
  Synthetic
uuuguuagggaacgugaucu

SEQ ID NO: 383809 - RNA, 21 nt, Artificial Sequence
  Synthetic
guuuguuagggaacgugaucu

SEQ ID NO: 383810 - RNA, 22 nt, Artificial Sequence
  Synthetic
aguuuguuagggaacgugaucu

SEQ ID NO: 383811 - RNA, 23 nt, Artificial Sequence
  Synthetic
gaguuuguuagggaacgugaucu

SEQ ID NO: 383812 - RNA, 24 nt, Artificial Sequence
  Synthetic
agaguuuguuagggaacgugaucu

SEQ ID NO: 383813 - RNA, 18 nt, Artificial Sequence
  Synthetic
uauuuuugaaggugaucu

SEQ ID NO: 383814 - RNA, 19 nt, Artificial Sequence
  Synthetic
guauuuuugaaggugaucu

SEQ ID NO: 383815 - RNA, 20 nt, Artificial Sequence
  Synthetic
aguauuuuugaaggugaucu

SEQ ID NO: 383816 - RNA, 21 nt, Artificial Sequence
  Synthetic
caguauuuuugaaggugaucu

SEQ ID NO: 383817 - RNA, 22 nt, Artificial Sequence
  Synthetic
gcaguauuuuugaaggugaucu

SEQ ID NO: 383818 - RNA, 23 nt, Artificial Sequence
  Synthetic
ggcaguauuuuugaaggugaucu

SEQ ID NO: 383819 - RNA, 24 nt, Artificial Sequence
  Synthetic
uggcaguauuuuugaaggugaucu

SEQ ID NO: 383820 - RNA, 18 nt, Artificial Sequence
  Synthetic
uguauguccuauugaucu

SEQ ID NO: 383821 - RNA, 19 nt, Artificial Sequence
  Synthetic
cuguauguccuauugaucu

SEQ ID NO: 383822 - RNA, 20 nt, Artificial Sequence
  Synthetic
gcuguauguccuauugaucu

SEQ ID NO: 383823 - RNA, 21 nt, Artificial Sequence
  Synthetic
ugcuguauguccuauugaucu

SEQ ID NO: 383824 - RNA, 22 nt, Artificial Sequence
  Synthetic
cugcuguauguccuauugaucu

SEQ ID NO: 383825 - RNA, 23 nt, Artificial Sequence
  Synthetic
ucugcuguauguccuauugaucu

SEQ ID NO: 383826 - RNA, 24 nt, Artificial Sequence
  Synthetic
gucugcuguauguccuauugaucu

SEQ ID NO: 383827 - RNA, 18 nt, Artificial Sequence
  Synthetic
agcccgugcccuugaucu

SEQ ID NO: 383828 - RNA, 19 nt, Artificial Sequence
  Synthetic
uagcccgugcccuugaucu

SEQ ID NO: 383829 - RNA, 20 nt, Artificial Sequence
  Synthetic
cuagcccgugcccuugaucu

SEQ ID NO: 383830 - RNA, 21 nt, Artificial Sequence
  Synthetic
ucuagcccgugcccuugaucu

SEQ ID NO: 383831 - RNA, 22 nt, Artificial Sequence
  Synthetic
uucuagcccgugcccuugaucu

SEQ ID NO: 383832 - RNA, 23 nt, Artificial Sequence
  Synthetic
auucuagcccgugcccuugaucu

SEQ ID NO: 383833 - RNA, 24 nt, Artificial Sequence
  Synthetic
uauucuagcccgugcccuugaucu

SEQ ID NO: 383834 - RNA, 18 nt, Artificial Sequence
  Synthetic
acaauguauuaaauaucu

SEQ ID NO: 383835 - RNA, 19 nt, Artificial Sequence
  Synthetic
aacaauguauuaaauaucu

SEQ ID NO: 383836 - RNA, 20 nt, Artificial Sequence
  Synthetic
aaacaauguauuaaauaucu

SEQ ID NO: 383837 - RNA, 21 nt, Artificial Sequence
  Synthetic
aaaacaauguauuaaauaucu

SEQ ID NO: 383838 - RNA, 22 nt, Artificial Sequence
  Synthetic
aaaaacaauguauuaaauaucu

SEQ ID NO: 383839 - RNA, 23 nt, Artificial Sequence
  Synthetic
aaaaaacaauguauuaaauaucu

SEQ ID NO: 383840 - RNA, 24 nt, Artificial Sequence
  Synthetic
caaaaaacaauguauuaaauaucu

SEQ ID NO: 383841 - RNA, 18 nt, Artificial Sequence
  Synthetic
cugacuaacccaauaucu

SEQ ID NO: 383842 - RNA, 19 nt, Artificial Sequence
  Synthetic
ucugacuaacccaauaucu

SEQ ID NO: 383843 - RNA, 20 nt, Artificial Sequence
  Synthetic
aucugacuaacccaauaucu

SEQ ID NO: 383844 - RNA, 21 nt, Artificial Sequence
  Synthetic
aaucugacuaacccaauaucu

SEQ ID NO: 383845 - RNA, 22 nt, Artificial Sequence
  Synthetic
aaaucugacuaacccaauaucu

SEQ ID NO: 383846 - RNA, 23 nt, Artificial Sequence
  Synthetic
gaaaucugacuaacccaauaucu

SEQ ID NO: 383847 - RNA, 24 nt, Artificial Sequence
  Synthetic
ugaaaucugacuaacccaauaucu

SEQ ID NO: 383848 - RNA, 18 nt, Artificial Sequence
  Synthetic
ucaauuagaauaauaucu

SEQ ID NO: 383849 - RNA, 19 nt, Artificial Sequence
  Synthetic
aucaauuagaauaauaucu

SEQ ID NO: 383850 - RNA, 20 nt, Artificial Sequence
  Synthetic
uaucaauuagaauaauaucu

SEQ ID NO: 383851 - RNA, 21 nt, Artificial Sequence
  Synthetic
guaucaauuagaauaauaucu

SEQ ID NO: 383852 - RNA, 22 nt, Artificial Sequence
  Synthetic
uguaucaauuagaauaauaucu

SEQ ID NO: 383853 - RNA, 23 nt, Artificial Sequence
  Synthetic
cuguaucaauuagaauaauaucu

SEQ ID NO: 383854 - RNA, 24 nt, Artificial Sequence
  Synthetic
acuguaucaauuagaauaauaucu

SEQ ID NO: 383855 - RNA, 18 nt, Artificial Sequence
  Synthetic
ccuuuagaguuaauaucu

SEQ ID NO: 383856 - RNA, 19 nt, Artificial Sequence
  Synthetic
accuuuagaguuaauaucu

SEQ ID NO: 383857 - RNA, 20 nt, Artificial Sequence
  Synthetic
aaccuuuagaguuaauaucu

SEQ ID NO: 383858 - RNA, 21 nt, Artificial Sequence
  Synthetic
uaaccuuuagaguuaauaucu

SEQ ID NO: 383859 - RNA, 22 nt, Artificial Sequence
  Synthetic
auaaccuuuagaguuaauaucu

SEQ ID NO: 383860 - RNA, 23 nt, Artificial Sequence
  Synthetic
uauaaccuuuagaguuaauaucu

SEQ ID NO: 383861 - RNA, 24 nt, Artificial Sequence
  Synthetic
auauaaccuuuagaguuaauaucu

SEQ ID NO: 383862 - RNA, 18 nt, Artificial Sequence
  Synthetic
gagauuccagacauaucu

SEQ ID NO: 383863 - RNA, 19 nt, Artificial Sequence
  Synthetic
ggagauuccagacauaucu

SEQ ID NO: 383864 - RNA, 20 nt, Artificial Sequence
  Synthetic
aggagauuccagacauaucu

SEQ ID NO: 383865 - RNA, 21 nt, Artificial Sequence
  Synthetic
aaggagauuccagacauaucu

SEQ ID NO: 383866 - RNA, 22 nt, Artificial Sequence
  Synthetic
aaaggagauuccagacauaucu

SEQ ID NO: 383867 - RNA, 23 nt, Artificial Sequence
  Synthetic
aaaaggagauuccagacauaucu

SEQ ID NO: 383868 - RNA, 24 nt, Artificial Sequence
  Synthetic
aaaaaggagauuccagacauaucu

SEQ ID NO: 383869 - RNA, 18 nt, Artificial Sequence
  Synthetic
cuauauauggccauaucu

SEQ ID NO: 383870 - RNA, 19 nt, Artificial Sequence
  Synthetic
acuauauauggccauaucu

SEQ ID NO: 383871 - RNA, 20 nt, Artificial Sequence
  Synthetic
cacuauauauggccauaucu

SEQ ID NO: 383872 - RNA, 21 nt, Artificial Sequence
  Synthetic
ccacuauauauggccauaucu

SEQ ID NO: 383873 - RNA, 22 nt, Artificial Sequence
  Synthetic
cccacuauauauggccauaucu

SEQ ID NO: 383874 - RNA, 23 nt, Artificial Sequence
  Synthetic
acccacuauauauggccauaucu

SEQ ID NO: 383875 - RNA, 24 nt, Artificial Sequence
  Synthetic
uacccacuauauauggccauaucu

SEQ ID NO: 383876 - RNA, 18 nt, Artificial Sequence
  Synthetic
ggaggaguuagcauaucu

SEQ ID NO: 383877 - RNA, 19 nt, Artificial Sequence
  Synthetic
uggaggaguuagcauaucu

SEQ ID NO: 383878 - RNA, 20 nt, Artificial Sequence
  Synthetic
auggaggaguuagcauaucu

SEQ ID NO: 383879 - RNA, 21 nt, Artificial Sequence
  Synthetic
aauggaggaguuagcauaucu

SEQ ID NO: 383880 - RNA, 22 nt, Artificial Sequence
  Synthetic
gaauggaggaguuagcauaucu

SEQ ID NO: 383881 - RNA, 23 nt, Artificial Sequence
  Synthetic
agaauggaggaguuagcauaucu

SEQ ID NO: 383882 - RNA, 24 nt, Artificial Sequence
  Synthetic
gagaauggaggaguuagcauaucu

SEQ ID NO: 383883 - RNA, 18 nt, Artificial Sequence
  Synthetic
aaaaaguaucucauaucu

SEQ ID NO: 383884 - RNA, 19 nt, Artificial Sequence
  Synthetic
gaaaaaguaucucauaucu

SEQ ID NO: 383885 - RNA, 20 nt, Artificial Sequence
  Synthetic
agaaaaaguaucucauaucu

SEQ ID NO: 383886 - RNA, 21 nt, Artificial Sequence
  Synthetic
gagaaaaaguaucucauaucu

SEQ ID NO: 383887 - RNA, 22 nt, Artificial Sequence
  Synthetic
ggagaaaaaguaucucauaucu

SEQ ID NO: 383888 - RNA, 23 nt, Artificial Sequence
  Synthetic
uggagaaaaaguaucucauaucu

SEQ ID NO: 383889 - RNA, 24 nt, Artificial Sequence
  Synthetic
auggagaaaaaguaucucauaucu

SEQ ID NO: 383890 - RNA, 18 nt, Artificial Sequence
  Synthetic
augaaaacuaagauaucu

SEQ ID NO: 383891 - RNA, 19 nt, Artificial Sequence
  Synthetic
aaugaaaacuaagauaucu

SEQ ID NO: 383892 - RNA, 20 nt, Artificial Sequence
  Synthetic
caaugaaaacuaagauaucu

SEQ ID NO: 383893 - RNA, 21 nt, Artificial Sequence
  Synthetic
acaaugaaaacuaagauaucu

SEQ ID NO: 383894 - RNA, 22 nt, Artificial Sequence
  Synthetic
aacaaugaaaacuaagauaucu

SEQ ID NO: 383895 - RNA, 23 nt, Artificial Sequence
  Synthetic
uaacaaugaaaacuaagauaucu

SEQ ID NO: 383896 - RNA, 24 nt, Artificial Sequence
  Synthetic
guaacaaugaaaacuaagauaucu

SEQ ID NO: 383897 - RNA, 18 nt, Artificial Sequence
  Synthetic
guucuuaucuagauaucu

SEQ ID NO: 383898 - RNA, 19 nt, Artificial Sequence
  Synthetic
aguucuuaucuagauaucu

SEQ ID NO: 383899 - RNA, 20 nt, Artificial Sequence
  Synthetic
uaguucuuaucuagauaucu

SEQ ID NO: 383900 - RNA, 21 nt, Artificial Sequence
  Synthetic
uuaguucuuaucuagauaucu

SEQ ID NO: 383901 - RNA, 22 nt, Artificial Sequence
  Synthetic
uuuaguucuuaucuagauaucu

SEQ ID NO: 383902 - RNA, 23 nt, Artificial Sequence
  Synthetic
uuuuaguucuuaucuagauaucu

SEQ ID NO: 383903 - RNA, 24 nt, Artificial Sequence
  Synthetic
cuuuuaguucuuaucuagauaucu

SEQ ID NO: 383904 - RNA, 18 nt, Artificial Sequence
  Synthetic
uguuauacaaggauaucu

SEQ ID NO: 383905 - RNA, 19 nt, Artificial Sequence
  Synthetic
auguuauacaaggauaucu

SEQ ID NO: 383906 - RNA, 20 nt, Artificial Sequence
  Synthetic
uauguuauacaaggauaucu

SEQ ID NO: 383907 - RNA, 21 nt, Artificial Sequence
  Synthetic
uuauguuauacaaggauaucu

SEQ ID NO: 383908 - RNA, 22 nt, Artificial Sequence
  Synthetic
cuuauguuauacaaggauaucu

SEQ ID NO: 383909 - RNA, 23 nt, Artificial Sequence
  Synthetic
acuuauguuauacaaggauaucu

SEQ ID NO: 383910 - RNA, 24 nt, Artificial Sequence
  Synthetic
gacuuauguuauacaaggauaucu

SEQ ID NO: 383911 - RNA, 18 nt, Artificial Sequence
  Synthetic
auauauauauauauaucu

SEQ ID NO: 383912 - RNA, 19 nt, Artificial Sequence
  Synthetic
cauauauauauauauaucu

SEQ ID NO: 383913 - RNA, 20 nt, Artificial Sequence
  Synthetic
acauauauauauauauaucu

SEQ ID NO: 383914 - RNA, 21 nt, Artificial Sequence
  Synthetic
uacauauauauauauauaucu

SEQ ID NO: 383915 - RNA, 22 nt, Artificial Sequence
  Synthetic
auacauauauauauauauaucu

SEQ ID NO: 383916 - RNA, 23 nt, Artificial Sequence
  Synthetic
uauacauauauauauauauaucu

SEQ ID NO: 383917 - RNA, 24 nt, Artificial Sequence
  Synthetic
auauacauauauauauauauaucu

SEQ ID NO: 383918 - RNA, 18 nt, Artificial Sequence
  Synthetic
auaaaccaaaaacuaucu

SEQ ID NO: 383919 - RNA, 19 nt, Artificial Sequence
  Synthetic
cauaaaccaaaaacuaucu

SEQ ID NO: 383920 - RNA, 20 nt, Artificial Sequence
  Synthetic
gcauaaaccaaaaacuaucu

SEQ ID NO: 383921 - RNA, 21 nt, Artificial Sequence
  Synthetic
agcauaaaccaaaaacuaucu

SEQ ID NO: 383922 - RNA, 22 nt, Artificial Sequence
  Synthetic
cagcauaaaccaaaaacuaucu

SEQ ID NO: 383923 - RNA, 23 nt, Artificial Sequence
  Synthetic
ucagcauaaaccaaaaacuaucu

SEQ ID NO: 383924 - RNA, 24 nt, Artificial Sequence
  Synthetic
aucagcauaaaccaaaaacuaucu

SEQ ID NO: 383925 - RNA, 18 nt, Artificial Sequence
  Synthetic
cauuuacauaaacuaucu

SEQ ID NO: 383926 - RNA, 19 nt, Artificial Sequence
  Synthetic
gcauuuacauaaacuaucu

SEQ ID NO: 383927 - RNA, 20 nt, Artificial Sequence
  Synthetic
ggcauuuacauaaacuaucu

SEQ ID NO: 383928 - RNA, 21 nt, Artificial Sequence
  Synthetic
aggcauuuacauaaacuaucu

SEQ ID NO: 383929 - RNA, 22 nt, Artificial Sequence
  Synthetic
aaggcauuuacauaaacuaucu

SEQ ID NO: 383930 - RNA, 23 nt, Artificial Sequence
  Synthetic
aaaggcauuuacauaaacuaucu

SEQ ID NO: 383931 - RNA, 24 nt, Artificial Sequence
  Synthetic
aaaaggcauuuacauaaacuaucu

SEQ ID NO: 383932 - RNA, 18 nt, Artificial Sequence
  Synthetic
cuuucuuuuccacuaucu

SEQ ID NO: 383933 - RNA, 19 nt, Artificial Sequence
  Synthetic
ucuuucuuuuccacuaucu

SEQ ID NO: 383934 - RNA, 20 nt, Artificial Sequence
  Synthetic
uucuuucuuuuccacuaucu

SEQ ID NO: 383935 - RNA, 21 nt, Artificial Sequence
  Synthetic
auucuuucuuuuccacuaucu

SEQ ID NO: 383936 - RNA, 22 nt, Artificial Sequence
  Synthetic
cauucuuucuuuuccacuaucu

SEQ ID NO: 383937 - RNA, 23 nt, Artificial Sequence
  Synthetic
ucauucuuucuuuuccacuaucu

SEQ ID NO: 383938 - RNA, 24 nt, Artificial Sequence
  Synthetic
gucauucuuucuuuuccacuaucu

SEQ ID NO: 383939 - RNA, 18 nt, Artificial Sequence
  Synthetic
uuaauaacugaccuaucu

SEQ ID NO: 383940 - RNA, 19 nt, Artificial Sequence
  Synthetic
cuuaauaacugaccuaucu

SEQ ID NO: 383941 - RNA, 20 nt, Artificial Sequence
  Synthetic
ccuuaauaacugaccuaucu

SEQ ID NO: 383942 - RNA, 21 nt, Artificial Sequence
  Synthetic
cccuuaauaacugaccuaucu

SEQ ID NO: 383943 - RNA, 22 nt, Artificial Sequence
  Synthetic
gcccuuaauaacugaccuaucu

SEQ ID NO: 383944 - RNA, 23 nt, Artificial Sequence
  Synthetic
ugcccuuaauaacugaccuaucu

SEQ ID NO: 383945 - RNA, 24 nt, Artificial Sequence
  Synthetic
uugcccuuaauaacugaccuaucu

SEQ ID NO: 383946 - RNA, 18 nt, Artificial Sequence
  Synthetic
aaaggaacuaaucuaucu

SEQ ID NO: 383947 - RNA, 19 nt, Artificial Sequence
  Synthetic
aaaaggaacuaaucuaucu

SEQ ID NO: 383948 - RNA, 20 nt, Artificial Sequence
  Synthetic
uaaaaggaacuaaucuaucu

SEQ ID NO: 383949 - RNA, 21 nt, Artificial Sequence
  Synthetic
uuaaaaggaacuaaucuaucu

SEQ ID NO: 383950 - RNA, 22 nt, Artificial Sequence
  Synthetic
cuuaaaaggaacuaaucuaucu

SEQ ID NO: 383951 - RNA, 23 nt, Artificial Sequence
  Synthetic
gcuuaaaaggaacuaaucuaucu

SEQ ID NO: 383952 - RNA, 24 nt, Artificial Sequence
  Synthetic
ugcuuaaaaggaacuaaucuaucu

SEQ ID NO: 383953 - RNA, 18 nt, Artificial Sequence
  Synthetic
cuccaccacuuucuaucu

SEQ ID NO: 383954 - RNA, 19 nt, Artificial Sequence
  Synthetic
gcuccaccacuuucuaucu

SEQ ID NO: 383955 - RNA, 20 nt, Artificial Sequence
  Synthetic
ggcuccaccacuuucuaucu

SEQ ID NO: 383956 - RNA, 21 nt, Artificial Sequence
  Synthetic
uggcuccaccacuuucuaucu

SEQ ID NO: 383957 - RNA, 22 nt, Artificial Sequence
  Synthetic
uuggcuccaccacuuucuaucu

SEQ ID NO: 383958 - RNA, 23 nt, Artificial Sequence
  Synthetic
cuuggcuccaccacuuucuaucu

SEQ ID NO: 383959 - RNA, 24 nt, Artificial Sequence
  Synthetic
ccuuggcuccaccacuuucuaucu

SEQ ID NO: 383960 - RNA, 18 nt, Artificial Sequence
  Synthetic
uuuuucuacuuucuaucu

SEQ ID NO: 383961 - RNA, 19 nt, Artificial Sequence
  Synthetic
auuuuucuacuuucuaucu

SEQ ID NO: 383962 - RNA, 20 nt, Artificial Sequence
  Synthetic
cauuuuucuacuuucuaucu

SEQ ID NO: 383963 - RNA, 21 nt, Artificial Sequence
  Synthetic
ccauuuuucuacuuucuaucu

SEQ ID NO: 383964 - RNA, 22 nt, Artificial Sequence
  Synthetic
cccauuuuucuacuuucuaucu

SEQ ID NO: 383965 - RNA, 23 nt, Artificial Sequence
  Synthetic
ucccauuuuucuacuuucuaucu

SEQ ID NO: 383966 - RNA, 24 nt, Artificial Sequence
  Synthetic
cucccauuuuucuacuuucuaucu

SEQ ID NO: 383967 - RNA, 18 nt, Artificial Sequence
  Synthetic
aaauaaucgcaaguaucu

SEQ ID NO: 383968 - RNA, 19 nt, Artificial Sequence
  Synthetic
uaaauaaucgcaaguaucu

SEQ ID NO: 383969 - RNA, 20 nt, Artificial Sequence
  Synthetic
auaaauaaucgcaaguaucu

SEQ ID NO: 383970 - RNA, 21 nt, Artificial Sequence
  Synthetic
aauaaauaaucgcaaguaucu

SEQ ID NO: 383971 - RNA, 22 nt, Artificial Sequence
  Synthetic
uaauaaauaaucgcaaguaucu

SEQ ID NO: 383972 - RNA, 23 nt, Artificial Sequence
  Synthetic
auaauaaauaaucgcaaguaucu

SEQ ID NO: 383973 - RNA, 24 nt, Artificial Sequence
  Synthetic
aauaauaaauaaucgcaaguaucu

SEQ ID NO: 383974 - RNA, 18 nt, Artificial Sequence
  Synthetic
agggauccagaaguaucu

SEQ ID NO: 383975 - RNA, 19 nt, Artificial Sequence
  Synthetic
gagggauccagaaguaucu

SEQ ID NO: 383976 - RNA, 20 nt, Artificial Sequence
  Synthetic
cgagggauccagaaguaucu

SEQ ID NO: 383977 - RNA, 21 nt, Artificial Sequence
  Synthetic
ccgagggauccagaaguaucu

SEQ ID NO: 383978 - RNA, 22 nt, Artificial Sequence
  Synthetic
accgagggauccagaaguaucu

SEQ ID NO: 383979 - RNA, 23 nt, Artificial Sequence
  Synthetic
uaccgagggauccagaaguaucu

SEQ ID NO: 383980 - RNA, 24 nt, Artificial Sequence
  Synthetic
auaccgagggauccagaaguaucu

SEQ ID NO: 383981 - RNA, 18 nt, Artificial Sequence
  Synthetic
gucuuuaucccaguaucu

SEQ ID NO: 383982 - RNA, 19 nt, Artificial Sequence
  Synthetic
agucuuuaucccaguaucu

SEQ ID NO: 383983 - RNA, 20 nt, Artificial Sequence
  Synthetic
gagucuuuaucccaguaucu

SEQ ID NO: 383984 - RNA, 21 nt, Artificial Sequence
  Synthetic
ggagucuuuaucccaguaucu

SEQ ID NO: 383985 - RNA, 22 nt, Artificial Sequence
  Synthetic
aggagucuuuaucccaguaucu

SEQ ID NO: 383986 - RNA, 23 nt, Artificial Sequence
  Synthetic
aaggagucuuuaucccaguaucu

SEQ ID NO: 383987 - RNA, 24 nt, Artificial Sequence
  Synthetic
gaaggagucuuuaucccaguaucu

SEQ ID NO: 383988 - RNA, 18 nt, Artificial Sequence
  Synthetic
aaaaggaaaucaguaucu

SEQ ID NO: 383989 - RNA, 19 nt, Artificial Sequence
  Synthetic
gaaaaggaaaucaguaucu

SEQ ID NO: 383990 - RNA, 20 nt, Artificial Sequence
  Synthetic
agaaaaggaaaucaguaucu

SEQ ID NO: 383991 - RNA, 21 nt, Artificial Sequence
  Synthetic
aagaaaaggaaaucaguaucu

SEQ ID NO: 383992 - RNA, 22 nt, Artificial Sequence
  Synthetic
aaagaaaaggaaaucaguaucu

SEQ ID NO: 383993 - RNA, 23 nt, Artificial Sequence
  Synthetic
caaagaaaaggaaaucaguaucu

SEQ ID NO: 383994 - RNA, 24 nt, Artificial Sequence
  Synthetic
ccaaagaaaaggaaaucaguaucu

SEQ ID NO: 383995 - RNA, 18 nt, Artificial Sequence
  Synthetic
auuuccauaucaguaucu

SEQ ID NO: 383996 - RNA, 19 nt, Artificial Sequence
  Synthetic
cauuuccauaucaguaucu

SEQ ID NO: 383997 - RNA, 20 nt, Artificial Sequence
  Synthetic
ucauuuccauaucaguaucu

SEQ ID NO: 383998 - RNA, 21 nt, Artificial Sequence
  Synthetic
uucauuuccauaucaguaucu

SEQ ID NO: 383999 - RNA, 22 nt, Artificial Sequence
  Synthetic
uuucauuuccauaucaguaucu

SEQ ID NO: 384000 - RNA, 23 nt, Artificial Sequence
  Synthetic
auuucauuuccauaucaguaucu

SEQ ID NO: 384001 - RNA, 24 nt, Artificial Sequence
  Synthetic
aauuucauuuccauaucaguaucu

SEQ ID NO: 384002 - RNA, 18 nt, Artificial Sequence
  Synthetic
gcuucuaaauauguaucu

SEQ ID NO: 384003 - RNA, 19 nt, Artificial Sequence
  Synthetic
ugcuucuaaauauguaucu

SEQ ID NO: 384004 - RNA, 20 nt, Artificial Sequence
  Synthetic
uugcuucuaaauauguaucu

SEQ ID NO: 384005 - RNA, 21 nt, Artificial Sequence
  Synthetic
guugcuucuaaauauguaucu

SEQ ID NO: 384006 - RNA, 22 nt, Artificial Sequence
  Synthetic
uguugcuucuaaauauguaucu

SEQ ID NO: 384007 - RNA, 23 nt, Artificial Sequence
  Synthetic
auguugcuucuaaauauguaucu

SEQ ID NO: 384008 - RNA, 24 nt, Artificial Sequence
  Synthetic
cauguugcuucuaaauauguaucu

SEQ ID NO: 384009 - RNA, 18 nt, Artificial Sequence
  Synthetic
acuguuuuugcuguaucu

SEQ ID NO: 384010 - RNA, 19 nt, Artificial Sequence
  Synthetic
cacuguuuuugcuguaucu

SEQ ID NO: 384011 - RNA, 20 nt, Artificial Sequence
  Synthetic
gcacuguuuuugcuguaucu

SEQ ID NO: 384012 - RNA, 21 nt, Artificial Sequence
  Synthetic
agcacuguuuuugcuguaucu

SEQ ID NO: 384013 - RNA, 22 nt, Artificial Sequence
  Synthetic
uagcacuguuuuugcuguaucu

SEQ ID NO: 384014 - RNA, 23 nt, Artificial Sequence
  Synthetic
uuagcacuguuuuugcuguaucu

SEQ ID NO: 384015 - RNA, 24 nt, Artificial Sequence
  Synthetic
cuuagcacuguuuuugcuguaucu

SEQ ID NO: 384016 - RNA, 18 nt, Artificial Sequence
  Synthetic
cagucuguaaaauuaucu

SEQ ID NO: 384017 - RNA, 19 nt, Artificial Sequence
  Synthetic
ucagucuguaaaauuaucu

SEQ ID NO: 384018 - RNA, 20 nt, Artificial Sequence
  Synthetic
gucagucuguaaaauuaucu

SEQ ID NO: 384019 - RNA, 21 nt, Artificial Sequence
  Synthetic
ugucagucuguaaaauuaucu

SEQ ID NO: 384020 - RNA, 22 nt, Artificial Sequence
  Synthetic
augucagucuguaaaauuaucu

SEQ ID NO: 384021 - RNA, 23 nt, Artificial Sequence
  Synthetic
caugucagucuguaaaauuaucu

SEQ ID NO: 384022 - RNA, 24 nt, Artificial Sequence
  Synthetic
ucaugucagucuguaaaauuaucu

SEQ ID NO: 384023 - RNA, 18 nt, Artificial Sequence
  Synthetic
caccaagcagaauuaucu

SEQ ID NO: 384024 - RNA, 19 nt, Artificial Sequence
  Synthetic
acaccaagcagaauuaucu

SEQ ID NO: 384025 - RNA, 20 nt, Artificial Sequence
  Synthetic
aacaccaagcagaauuaucu

SEQ ID NO: 384026 - RNA, 21 nt, Artificial Sequence
  Synthetic
gaacaccaagcagaauuaucu

SEQ ID NO: 384027 - RNA, 22 nt, Artificial Sequence
  Synthetic
agaacaccaagcagaauuaucu

SEQ ID NO: 384028 - RNA, 23 nt, Artificial Sequence
  Synthetic
uagaacaccaagcagaauuaucu

SEQ ID NO: 384029 - RNA, 24 nt, Artificial Sequence
  Synthetic
auagaacaccaagcagaauuaucu

SEQ ID NO: 384030 - RNA, 18 nt, Artificial Sequence
  Synthetic
gacugagaguaauuaucu

SEQ ID NO: 384031 - RNA, 19 nt, Artificial Sequence
  Synthetic
agacugagaguaauuaucu

SEQ ID NO: 384032 - RNA, 20 nt, Artificial Sequence
  Synthetic
gagacugagaguaauuaucu

SEQ ID NO: 384033 - RNA, 21 nt, Artificial Sequence
  Synthetic
agagacugagaguaauuaucu

SEQ ID NO: 384034 - RNA, 22 nt, Artificial Sequence
  Synthetic
uagagacugagaguaauuaucu

SEQ ID NO: 384035 - RNA, 23 nt, Artificial Sequence
  Synthetic
cuagagacugagaguaauuaucu

SEQ ID NO: 384036 - RNA, 24 nt, Artificial Sequence
  Synthetic
ucuagagacugagaguaauuaucu

SEQ ID NO: 384037 - RNA, 18 nt, Artificial Sequence
  Synthetic
uuaaguguguaauuaucu

SEQ ID NO: 384038 - RNA, 19 nt, Artificial Sequence
  Synthetic
uuuaaguguguaauuaucu

SEQ ID NO: 384039 - RNA, 20 nt, Artificial Sequence
  Synthetic
uuuuaaguguguaauuaucu

SEQ ID NO: 384040 - RNA, 21 nt, Artificial Sequence
  Synthetic
auuuuaaguguguaauuaucu

SEQ ID NO: 384041 - RNA, 22 nt, Artificial Sequence
  Synthetic
aauuuuaaguguguaauuaucu

SEQ ID NO: 384042 - RNA, 23 nt, Artificial Sequence
  Synthetic
caauuuuaaguguguaauuaucu

SEQ ID NO: 384043 - RNA, 24 nt, Artificial Sequence
  Synthetic
ccaauuuuaaguguguaauuaucu

SEQ ID NO: 384044 - RNA, 18 nt, Artificial Sequence
  Synthetic
cuggggaggagauuaucu

SEQ ID NO: 384045 - RNA, 19 nt, Artificial Sequence
  Synthetic
gcuggggaggagauuaucu

SEQ ID NO: 384046 - RNA, 20 nt, Artificial Sequence
  Synthetic
agcuggggaggagauuaucu

SEQ ID NO: 384047 - RNA, 21 nt, Artificial Sequence
  Synthetic
aagcuggggaggagauuaucu

SEQ ID NO: 384048 - RNA, 22 nt, Artificial Sequence
  Synthetic
gaagcuggggaggagauuaucu

SEQ ID NO: 384049 - RNA, 23 nt, Artificial Sequence
  Synthetic
ggaagcuggggaggagauuaucu

SEQ ID NO: 384050 - RNA, 24 nt, Artificial Sequence
  Synthetic
uggaagcuggggaggagauuaucu

SEQ ID NO: 384051 - RNA, 18 nt, Artificial Sequence
  Synthetic
caauguuuuguauuaucu

SEQ ID NO: 384052 - RNA, 19 nt, Artificial Sequence
  Synthetic
acaauguuuuguauuaucu

SEQ ID NO: 384053 - RNA, 20 nt, Artificial Sequence
  Synthetic
cacaauguuuuguauuaucu

SEQ ID NO: 384054 - RNA, 21 nt, Artificial Sequence
  Synthetic
ucacaauguuuuguauuaucu

SEQ ID NO: 384055 - RNA, 22 nt, Artificial Sequence
  Synthetic
aucacaauguuuuguauuaucu

SEQ ID NO: 384056 - RNA, 23 nt, Artificial Sequence
  Synthetic
uaucacaauguuuuguauuaucu

SEQ ID NO: 384057 - RNA, 24 nt, Artificial Sequence
  Synthetic
uuaucacaauguuuuguauuaucu

SEQ ID NO: 384058 - RNA, 18 nt, Artificial Sequence
  Synthetic
uaagaugugaacuuaucu

SEQ ID NO: 384059 - RNA, 19 nt, Artificial Sequence
  Synthetic
auaagaugugaacuuaucu

SEQ ID NO: 384060 - RNA, 20 nt, Artificial Sequence
  Synthetic
aauaagaugugaacuuaucu

SEQ ID NO: 384061 - RNA, 21 nt, Artificial Sequence
  Synthetic
uaauaagaugugaacuuaucu

SEQ ID NO: 384062 - RNA, 22 nt, Artificial Sequence
  Synthetic
auaauaagaugugaacuuaucu

SEQ ID NO: 384063 - RNA, 23 nt, Artificial Sequence
  Synthetic
aauaauaagaugugaacuuaucu

SEQ ID NO: 384064 - RNA, 24 nt, Artificial Sequence
  Synthetic
uaauaauaagaugugaacuuaucu

SEQ ID NO: 384065 - RNA, 18 nt, Artificial Sequence
  Synthetic
auuccgaguuucuuaucu

SEQ ID NO: 384066 - RNA, 19 nt, Artificial Sequence
  Synthetic
cauuccgaguuucuuaucu

SEQ ID NO: 384067 - RNA, 20 nt, Artificial Sequence
  Synthetic
acauuccgaguuucuuaucu

SEQ ID NO: 384068 - RNA, 21 nt, Artificial Sequence
  Synthetic
cacauuccgaguuucuuaucu

SEQ ID NO: 384069 - RNA, 22 nt, Artificial Sequence
  Synthetic
gcacauuccgaguuucuuaucu

SEQ ID NO: 384070 - RNA, 23 nt, Artificial Sequence
  Synthetic
agcacauuccgaguuucuuaucu

SEQ ID NO: 384071 - RNA, 24 nt, Artificial Sequence
  Synthetic
gagcacauuccgaguuucuuaucu

SEQ ID NO: 384072 - RNA, 18 nt, Artificial Sequence
  Synthetic
aaacaaagggaguuaucu

SEQ ID NO: 384073 - RNA, 19 nt, Artificial Sequence
  Synthetic
uaaacaaagggaguuaucu

SEQ ID NO: 384074 - RNA, 20 nt, Artificial Sequence
  Synthetic
auaaacaaagggaguuaucu

SEQ ID NO: 384075 - RNA, 21 nt, Artificial Sequence
  Synthetic
aauaaacaaagggaguuaucu

SEQ ID NO: 384076 - RNA, 22 nt, Artificial Sequence
  Synthetic
uaauaaacaaagggaguuaucu

SEQ ID NO: 384077 - RNA, 23 nt, Artificial Sequence
  Synthetic
auaauaaacaaagggaguuaucu

SEQ ID NO: 384078 - RNA, 24 nt, Artificial Sequence
  Synthetic
aauaauaaacaaagggaguuaucu

SEQ ID NO: 384079 - RNA, 18 nt, Artificial Sequence
  Synthetic
uuacauuuuuaguuaucu

SEQ ID NO: 384080 - RNA, 19 nt, Artificial Sequence
  Synthetic
cuuacauuuuuaguuaucu

SEQ ID NO: 384081 - RNA, 20 nt, Artificial Sequence
  Synthetic
ccuuacauuuuuaguuaucu

SEQ ID NO: 384082 - RNA, 21 nt, Artificial Sequence
  Synthetic
gccuuacauuuuuaguuaucu

SEQ ID NO: 384083 - RNA, 22 nt, Artificial Sequence
  Synthetic
ugccuuacauuuuuaguuaucu

SEQ ID NO: 384084 - RNA, 23 nt, Artificial Sequence
  Synthetic
gugccuuacauuuuuaguuaucu

SEQ ID NO: 384085 - RNA, 24 nt, Artificial Sequence
  Synthetic
agugccuuacauuuuuaguuaucu

SEQ ID NO: 384086 - RNA, 18 nt, Artificial Sequence
  Synthetic
cauaccuaauauuuaucu

SEQ ID NO: 384087 - RNA, 19 nt, Artificial Sequence
  Synthetic
acauaccuaauauuuaucu

SEQ ID NO: 384088 - RNA, 20 nt, Artificial Sequence
  Synthetic
aacauaccuaauauuuaucu

SEQ ID NO: 384089 - RNA, 21 nt, Artificial Sequence
  Synthetic
gaacauaccuaauauuuaucu

SEQ ID NO: 384090 - RNA, 22 nt, Artificial Sequence
  Synthetic
cgaacauaccuaauauuuaucu

SEQ ID NO: 384091 - RNA, 23 nt, Artificial Sequence
  Synthetic
ccgaacauaccuaauauuuaucu

SEQ ID NO: 384092 - RNA, 24 nt, Artificial Sequence
  Synthetic
cccgaacauaccuaauauuuaucu

SEQ ID NO: 384093 - RNA, 18 nt, Artificial Sequence
  Synthetic
gggagauuaccuuuaucu

SEQ ID NO: 384094 - RNA, 19 nt, Artificial Sequence
  Synthetic
agggagauuaccuuuaucu

SEQ ID NO: 384095 - RNA, 20 nt, Artificial Sequence
  Synthetic
cagggagauuaccuuuaucu

SEQ ID NO: 384096 - RNA, 21 nt, Artificial Sequence
  Synthetic
ccagggagauuaccuuuaucu

SEQ ID NO: 384097 - RNA, 22 nt, Artificial Sequence
  Synthetic
accagggagauuaccuuuaucu

SEQ ID NO: 384098 - RNA, 23 nt, Artificial Sequence
  Synthetic
caccagggagauuaccuuuaucu

SEQ ID NO: 384099 - RNA, 24 nt, Artificial Sequence
  Synthetic
acaccagggagauuaccuuuaucu

SEQ ID NO: 384100 - RNA, 18 nt, Artificial Sequence
  Synthetic
cauauuagagcuuuaucu

SEQ ID NO: 384101 - RNA, 19 nt, Artificial Sequence
  Synthetic
ucauauuagagcuuuaucu

SEQ ID NO: 384102 - RNA, 20 nt, Artificial Sequence
  Synthetic
cucauauuagagcuuuaucu

SEQ ID NO: 384103 - RNA, 21 nt, Artificial Sequence
  Synthetic
ucucauauuagagcuuuaucu

SEQ ID NO: 384104 - RNA, 22 nt, Artificial Sequence
  Synthetic
uucucauauuagagcuuuaucu

SEQ ID NO: 384105 - RNA, 23 nt, Artificial Sequence
  Synthetic
uuucucauauuagagcuuuaucu

SEQ ID NO: 384106 - RNA, 24 nt, Artificial Sequence
  Synthetic
guuucucauauuagagcuuuaucu

SEQ ID NO: 384107 - RNA, 18 nt, Artificial Sequence
  Synthetic
auuauucaggcuuuaucu

SEQ ID NO: 384108 - RNA, 19 nt, Artificial Sequence
  Synthetic
aauuauucaggcuuuaucu

SEQ ID NO: 384109 - RNA, 20 nt, Artificial Sequence
  Synthetic
aaauuauucaggcuuuaucu

SEQ ID NO: 384110 - RNA, 21 nt, Artificial Sequence
  Synthetic
gaaauuauucaggcuuuaucu

SEQ ID NO: 384111 - RNA, 22 nt, Artificial Sequence
  Synthetic
cgaaauuauucaggcuuuaucu

SEQ ID NO: 384112 - RNA, 23 nt, Artificial Sequence
  Synthetic
gcgaaauuauucaggcuuuaucu

SEQ ID NO: 384113 - RNA, 24 nt, Artificial Sequence
  Synthetic
agcgaaauuauucaggcuuuaucu

SEQ ID NO: 384114 - RNA, 18 nt, Artificial Sequence
  Synthetic
caaagcugugguuuaucu

SEQ ID NO: 384115 - RNA, 19 nt, Artificial Sequence
  Synthetic
ucaaagcugugguuuaucu

SEQ ID NO: 384116 - RNA, 20 nt, Artificial Sequence
  Synthetic
uucaaagcugugguuuaucu

SEQ ID NO: 384117 - RNA, 21 nt, Artificial Sequence
  Synthetic
cuucaaagcugugguuuaucu

SEQ ID NO: 384118 - RNA, 22 nt, Artificial Sequence
  Synthetic
gcuucaaagcugugguuuaucu

SEQ ID NO: 384119 - RNA, 23 nt, Artificial Sequence
  Synthetic
agcuucaaagcugugguuuaucu

SEQ ID NO: 384120 - RNA, 24 nt, Artificial Sequence
  Synthetic
uagcuucaaagcugugguuuaucu

SEQ ID NO: 384121 - RNA, 18 nt, Artificial Sequence
  Synthetic
cuuccuggcauuuuaucu

SEQ ID NO: 384122 - RNA, 19 nt, Artificial Sequence
  Synthetic
ucuuccuggcauuuuaucu

SEQ ID NO: 384123 - RNA, 20 nt, Artificial Sequence
  Synthetic
uucuuccuggcauuuuaucu

SEQ ID NO: 384124 - RNA, 21 nt, Artificial Sequence
  Synthetic
uuucuuccuggcauuuuaucu

SEQ ID NO: 384125 - RNA, 22 nt, Artificial Sequence
  Synthetic
auuucuuccuggcauuuuaucu

SEQ ID NO: 384126 - RNA, 23 nt, Artificial Sequence
  Synthetic
gauuucuuccuggcauuuuaucu

SEQ ID NO: 384127 - RNA, 24 nt, Artificial Sequence
  Synthetic
ugauuucuuccuggcauuuuaucu

SEQ ID NO: 384128 - RNA, 18 nt, Artificial Sequence
  Synthetic
acuagaaucauuuuaucu

SEQ ID NO: 384129 - RNA, 19 nt, Artificial Sequence
  Synthetic
gacuagaaucauuuuaucu

SEQ ID NO: 384130 - RNA, 20 nt, Artificial Sequence
  Synthetic
ggacuagaaucauuuuaucu

SEQ ID NO: 384131 - RNA, 21 nt, Artificial Sequence
  Synthetic
uggacuagaaucauuuuaucu

SEQ ID NO: 384132 - RNA, 22 nt, Artificial Sequence
  Synthetic
auggacuagaaucauuuuaucu

SEQ ID NO: 384133 - RNA, 23 nt, Artificial Sequence
  Synthetic
gauggacuagaaucauuuuaucu

SEQ ID NO: 384134 - RNA, 24 nt, Artificial Sequence
  Synthetic
ugauggacuagaaucauuuuaucu

SEQ ID NO: 384135 - RNA, 18 nt, Artificial Sequence
  Synthetic
cuauacuguguuuuaucu

SEQ ID NO: 384136 - RNA, 19 nt, Artificial Sequence
  Synthetic
ucuauacuguguuuuaucu

SEQ ID NO: 384137 - RNA, 20 nt, Artificial Sequence
  Synthetic
cucuauacuguguuuuaucu

SEQ ID NO: 384138 - RNA, 21 nt, Artificial Sequence
  Synthetic
ccucuauacuguguuuuaucu

SEQ ID NO: 384139 - RNA, 22 nt, Artificial Sequence
  Synthetic
accucuauacuguguuuuaucu

SEQ ID NO: 384140 - RNA, 23 nt, Artificial Sequence
  Synthetic
aaccucuauacuguguuuuaucu

SEQ ID NO: 384141 - RNA, 24 nt, Artificial Sequence
  Synthetic
gaaccucuauacuguguuuuaucu

SEQ ID NO: 384142 - RNA, 18 nt, Artificial Sequence
  Synthetic
aucucacuugaaaacucu

SEQ ID NO: 384143 - RNA, 19 nt, Artificial Sequence
  Synthetic
gaucucacuugaaaacucu

SEQ ID NO: 384144 - RNA, 20 nt, Artificial Sequence
  Synthetic
agaucucacuugaaaacucu

SEQ ID NO: 384145 - RNA, 21 nt, Artificial Sequence
  Synthetic
cagaucucacuugaaaacucu

SEQ ID NO: 384146 - RNA, 22 nt, Artificial Sequence
  Synthetic
ccagaucucacuugaaaacucu

SEQ ID NO: 384147 - RNA, 23 nt, Artificial Sequence
  Synthetic
uccagaucucacuugaaaacucu

SEQ ID NO: 384148 - RNA, 24 nt, Artificial Sequence
  Synthetic
uuccagaucucacuugaaaacucu

SEQ ID NO: 384149 - RNA, 18 nt, Artificial Sequence
  Synthetic
cacaucuuuuaaaacucu

SEQ ID NO: 384150 - RNA, 19 nt, Artificial Sequence
  Synthetic
gcacaucuuuuaaaacucu

SEQ ID NO: 384151 - RNA, 20 nt, Artificial Sequence
  Synthetic
agcacaucuuuuaaaacucu

SEQ ID NO: 384152 - RNA, 21 nt, Artificial Sequence
  Synthetic
aagcacaucuuuuaaaacucu

SEQ ID NO: 384153 - RNA, 22 nt, Artificial Sequence
  Synthetic
aaagcacaucuuuuaaaacucu

SEQ ID NO: 384154 - RNA, 23 nt, Artificial Sequence
  Synthetic
caaagcacaucuuuuaaaacucu

SEQ ID NO: 384155 - RNA, 24 nt, Artificial Sequence
  Synthetic
ccaaagcacaucuuuuaaaacucu

SEQ ID NO: 384156 - RNA, 18 nt, Artificial Sequence
  Synthetic
uauauaugaugaaacucu

SEQ ID NO: 384157 - RNA, 19 nt, Artificial Sequence
  Synthetic
auauauaugaugaaacucu

SEQ ID NO: 384158 - RNA, 20 nt, Artificial Sequence
  Synthetic
uauauauaugaugaaacucu

SEQ ID NO: 384159 - RNA, 21 nt, Artificial Sequence
  Synthetic
auauauauaugaugaaacucu

SEQ ID NO: 384160 - RNA, 22 nt, Artificial Sequence
  Synthetic
uauauauauaugaugaaacucu

SEQ ID NO: 384161 - RNA, 23 nt, Artificial Sequence
  Synthetic
auauauauauaugaugaaacucu

SEQ ID NO: 384162 - RNA, 24 nt, Artificial Sequence
  Synthetic
uauauauauauaugaugaaacucu

SEQ ID NO: 384163 - RNA, 18 nt, Artificial Sequence
  Synthetic
guucuagauugaaacucu

SEQ ID NO: 384164 - RNA, 19 nt, Artificial Sequence
  Synthetic
aguucuagauugaaacucu

SEQ ID NO: 384165 - RNA, 20 nt, Artificial Sequence
  Synthetic
aaguucuagauugaaacucu

SEQ ID NO: 384166 - RNA, 21 nt, Artificial Sequence
  Synthetic
gaaguucuagauugaaacucu

SEQ ID NO: 384167 - RNA, 22 nt, Artificial Sequence
  Synthetic
ugaaguucuagauugaaacucu

SEQ ID NO: 384168 - RNA, 23 nt, Artificial Sequence
  Synthetic
augaaguucuagauugaaacucu

SEQ ID NO: 384169 - RNA, 24 nt, Artificial Sequence
  Synthetic
gaugaaguucuagauugaaacucu

SEQ ID NO: 384170 - RNA, 18 nt, Artificial Sequence
  Synthetic
auaacagaaauaaacucu

SEQ ID NO: 384171 - RNA, 19 nt, Artificial Sequence
  Synthetic
aauaacagaaauaaacucu

SEQ ID NO: 384172 - RNA, 20 nt, Artificial Sequence
  Synthetic
gaauaacagaaauaaacucu

SEQ ID NO: 384173 - RNA, 21 nt, Artificial Sequence
  Synthetic
agaauaacagaaauaaacucu

SEQ ID NO: 384174 - RNA, 22 nt, Artificial Sequence
  Synthetic
gagaauaacagaaauaaacucu

SEQ ID NO: 384175 - RNA, 23 nt, Artificial Sequence
  Synthetic
ugagaauaacagaaauaaacucu

SEQ ID NO: 384176 - RNA, 24 nt, Artificial Sequence
  Synthetic
uugagaauaacagaaauaaacucu

SEQ ID NO: 384177 - RNA, 18 nt, Artificial Sequence
  Synthetic
aauacuuauaacaacucu

SEQ ID NO: 384178 - RNA, 19 nt, Artificial Sequence
  Synthetic
caauacuuauaacaacucu

SEQ ID NO: 384179 - RNA, 20 nt, Artificial Sequence
  Synthetic
ucaauacuuauaacaacucu

SEQ ID NO: 384180 - RNA, 21 nt, Artificial Sequence
  Synthetic
cucaauacuuauaacaacucu

SEQ ID NO: 384181 - RNA, 22 nt, Artificial Sequence
  Synthetic
gcucaauacuuauaacaacucu

SEQ ID NO: 384182 - RNA, 23 nt, Artificial Sequence
  Synthetic
agcucaauacuuauaacaacucu

SEQ ID NO: 384183 - RNA, 24 nt, Artificial Sequence
  Synthetic
uagcucaauacuuauaacaacucu

SEQ ID NO: 384184 - RNA, 18 nt, Artificial Sequence
  Synthetic
aaaucucaccccaacucu

SEQ ID NO: 384185 - RNA, 19 nt, Artificial Sequence
  Synthetic
gaaaucucaccccaacucu

SEQ ID NO: 384186 - RNA, 20 nt, Artificial Sequence
  Synthetic
ugaaaucucaccccaacucu

SEQ ID NO: 384187 - RNA, 21 nt, Artificial Sequence
  Synthetic
cugaaaucucaccccaacucu

SEQ ID NO: 384188 - RNA, 22 nt, Artificial Sequence
  Synthetic
gcugaaaucucaccccaacucu

SEQ ID NO: 384189 - RNA, 23 nt, Artificial Sequence
  Synthetic
cgcugaaaucucaccccaacucu

SEQ ID NO: 384190 - RNA, 24 nt, Artificial Sequence
  Synthetic
ucgcugaaaucucaccccaacucu

SEQ ID NO: 384191 - RNA, 18 nt, Artificial Sequence
  Synthetic
accacuucacucaacucu

SEQ ID NO: 384192 - RNA, 19 nt, Artificial Sequence
  Synthetic
aaccacuucacucaacucu

SEQ ID NO: 384193 - RNA, 20 nt, Artificial Sequence
  Synthetic
uaaccacuucacucaacucu

SEQ ID NO: 384194 - RNA, 21 nt, Artificial Sequence
  Synthetic
auaaccacuucacucaacucu

SEQ ID NO: 384195 - RNA, 22 nt, Artificial Sequence
  Synthetic
uauaaccacuucacucaacucu

SEQ ID NO: 384196 - RNA, 23 nt, Artificial Sequence
  Synthetic
uuauaaccacuucacucaacucu

SEQ ID NO: 384197 - RNA, 24 nt, Artificial Sequence
  Synthetic
uuuauaaccacuucacucaacucu

SEQ ID NO: 384198 - RNA, 18 nt, Artificial Sequence
  Synthetic
augaagcauaagaacucu

SEQ ID NO: 384199 - RNA, 19 nt, Artificial Sequence
  Synthetic
uaugaagcauaagaacucu

SEQ ID NO: 384200 - RNA, 20 nt, Artificial Sequence
  Synthetic
uuaugaagcauaagaacucu

SEQ ID NO: 384201 - RNA, 21 nt, Artificial Sequence
  Synthetic
auuaugaagcauaagaacucu

SEQ ID NO: 384202 - RNA, 22 nt, Artificial Sequence
  Synthetic
gauuaugaagcauaagaacucu

SEQ ID NO: 384203 - RNA, 23 nt, Artificial Sequence
  Synthetic
ugauuaugaagcauaagaacucu

SEQ ID NO: 384204 - RNA, 24 nt, Artificial Sequence
  Synthetic
cugauuaugaagcauaagaacucu

SEQ ID NO: 384205 - RNA, 18 nt, Artificial Sequence
  Synthetic
ugggauucaaugaacucu

SEQ ID NO: 384206 - RNA, 19 nt, Artificial Sequence
  Synthetic
uugggauucaaugaacucu

SEQ ID NO: 384207 - RNA, 20 nt, Artificial Sequence
  Synthetic
uuugggauucaaugaacucu

SEQ ID NO: 384208 - RNA, 21 nt, Artificial Sequence
  Synthetic
cuuugggauucaaugaacucu

SEQ ID NO: 384209 - RNA, 22 nt, Artificial Sequence
  Synthetic
gcuuugggauucaaugaacucu

SEQ ID NO: 384210 - RNA, 23 nt, Artificial Sequence
  Synthetic
ugcuuugggauucaaugaacucu

SEQ ID NO: 384211 - RNA, 24 nt, Artificial Sequence
  Synthetic
augcuuugggauucaaugaacucu

SEQ ID NO: 384212 - RNA, 18 nt, Artificial Sequence
  Synthetic
ucccaagcccugaacucu

SEQ ID NO: 384213 - RNA, 19 nt, Artificial Sequence
  Synthetic
cucccaagcccugaacucu

SEQ ID NO: 384214 - RNA, 20 nt, Artificial Sequence
  Synthetic
acucccaagcccugaacucu

SEQ ID NO: 384215 - RNA, 21 nt, Artificial Sequence
  Synthetic
cacucccaagcccugaacucu

SEQ ID NO: 384216 - RNA, 22 nt, Artificial Sequence
  Synthetic
ccacucccaagcccugaacucu

SEQ ID NO: 384217 - RNA, 23 nt, Artificial Sequence
  Synthetic
cccacucccaagcccugaacucu

SEQ ID NO: 384218 - RNA, 24 nt, Artificial Sequence
  Synthetic
ccccacucccaagcccugaacucu

SEQ ID NO: 384219 - RNA, 18 nt, Artificial Sequence
  Synthetic
cauuuugcaaauaacucu

SEQ ID NO: 384220 - RNA, 19 nt, Artificial Sequence
  Synthetic
gcauuuugcaaauaacucu

SEQ ID NO: 384221 - RNA, 20 nt, Artificial Sequence
  Synthetic
ugcauuuugcaaauaacucu

SEQ ID NO: 384222 - RNA, 21 nt, Artificial Sequence
  Synthetic
uugcauuuugcaaauaacucu

SEQ ID NO: 384223 - RNA, 22 nt, Artificial Sequence
  Synthetic
auugcauuuugcaaauaacucu

SEQ ID NO: 384224 - RNA, 23 nt, Artificial Sequence
  Synthetic
cauugcauuuugcaaauaacucu

SEQ ID NO: 384225 - RNA, 24 nt, Artificial Sequence
  Synthetic
gcauugcauuuugcaaauaacucu

SEQ ID NO: 384226 - RNA, 18 nt, Artificial Sequence
  Synthetic
uaguaccgcaauaacucu

SEQ ID NO: 384227 - RNA, 19 nt, Artificial Sequence
  Synthetic
auaguaccgcaauaacucu

SEQ ID NO: 384228 - RNA, 20 nt, Artificial Sequence
  Synthetic
cauaguaccgcaauaacucu

SEQ ID NO: 384229 - RNA, 21 nt, Artificial Sequence
  Synthetic
acauaguaccgcaauaacucu

SEQ ID NO: 384230 - RNA, 22 nt, Artificial Sequence
  Synthetic
aacauaguaccgcaauaacucu

SEQ ID NO: 384231 - RNA, 23 nt, Artificial Sequence
  Synthetic
uaacauaguaccgcaauaacucu

SEQ ID NO: 384232 - RNA, 24 nt, Artificial Sequence
  Synthetic
uuaacauaguaccgcaauaacucu

SEQ ID NO: 384233 - RNA, 18 nt, Artificial Sequence
  Synthetic
guggucaugccuaacucu

SEQ ID NO: 384234 - RNA, 19 nt, Artificial Sequence
  Synthetic
cguggucaugccuaacucu

SEQ ID NO: 384235 - RNA, 20 nt, Artificial Sequence
  Synthetic
acguggucaugccuaacucu

SEQ ID NO: 384236 - RNA, 21 nt, Artificial Sequence
  Synthetic
cacguggucaugccuaacucu

SEQ ID NO: 384237 - RNA, 22 nt, Artificial Sequence
  Synthetic
ucacguggucaugccuaacucu

SEQ ID NO: 384238 - RNA, 23 nt, Artificial Sequence
  Synthetic
gucacguggucaugccuaacucu

SEQ ID NO: 384239 - RNA, 24 nt, Artificial Sequence
  Synthetic
agucacguggucaugccuaacucu

SEQ ID NO: 384240 - RNA, 18 nt, Artificial Sequence
  Synthetic
uccuuucaaaaacacucu

SEQ ID NO: 384241 - RNA, 19 nt, Artificial Sequence
  Synthetic
auccuuucaaaaacacucu

SEQ ID NO: 384242 - RNA, 20 nt, Artificial Sequence
  Synthetic
cauccuuucaaaaacacucu

SEQ ID NO: 384243 - RNA, 21 nt, Artificial Sequence
  Synthetic
ucauccuuucaaaaacacucu

SEQ ID NO: 384244 - RNA, 22 nt, Artificial Sequence
  Synthetic
uucauccuuucaaaaacacucu

SEQ ID NO: 384245 - RNA, 23 nt, Artificial Sequence
  Synthetic
uuucauccuuucaaaaacacucu

SEQ ID NO: 384246 - RNA, 24 nt, Artificial Sequence
  Synthetic
auuucauccuuucaaaaacacucu

SEQ ID NO: 384247 - RNA, 18 nt, Artificial Sequence
  Synthetic
aggggaacaucacacucu

SEQ ID NO: 384248 - RNA, 19 nt, Artificial Sequence
  Synthetic
aaggggaacaucacacucu

SEQ ID NO: 384249 - RNA, 20 nt, Artificial Sequence
  Synthetic
gaaggggaacaucacacucu

SEQ ID NO: 384250 - RNA, 21 nt, Artificial Sequence
  Synthetic
ggaaggggaacaucacacucu

SEQ ID NO: 384251 - RNA, 22 nt, Artificial Sequence
  Synthetic
aggaaggggaacaucacacucu

SEQ ID NO: 384252 - RNA, 23 nt, Artificial Sequence
  Synthetic
caggaaggggaacaucacacucu

SEQ ID NO: 384253 - RNA, 24 nt, Artificial Sequence
  Synthetic
acaggaaggggaacaucacacucu

SEQ ID NO: 384254 - RNA, 18 nt, Artificial Sequence
  Synthetic
aggggaauaucacacucu

SEQ ID NO: 384255 - RNA, 19 nt, Artificial Sequence
  Synthetic
aaggggaauaucacacucu

SEQ ID NO: 384256 - RNA, 20 nt, Artificial Sequence
  Synthetic
gaaggggaauaucacacucu

SEQ ID NO: 384257 - RNA, 21 nt, Artificial Sequence
  Synthetic
ggaaggggaauaucacacucu

SEQ ID NO: 384258 - RNA, 22 nt, Artificial Sequence
  Synthetic
aggaaggggaauaucacacucu

SEQ ID NO: 384259 - RNA, 23 nt, Artificial Sequence
  Synthetic
caggaaggggaauaucacacucu

SEQ ID NO: 384260 - RNA, 24 nt, Artificial Sequence
  Synthetic
acaggaaggggaauaucacacucu

SEQ ID NO: 384261 - RNA, 18 nt, Artificial Sequence
  Synthetic
ggauguucauuccacucu

SEQ ID NO: 384262 - RNA, 19 nt, Artificial Sequence
  Synthetic
gggauguucauuccacucu

SEQ ID NO: 384263 - RNA, 20 nt, Artificial Sequence
  Synthetic
ugggauguucauuccacucu

SEQ ID NO: 384264 - RNA, 21 nt, Artificial Sequence
  Synthetic
uugggauguucauuccacucu

SEQ ID NO: 384265 - RNA, 22 nt, Artificial Sequence
  Synthetic
uuugggauguucauuccacucu

SEQ ID NO: 384266 - RNA, 23 nt, Artificial Sequence
  Synthetic
uuuugggauguucauuccacucu

SEQ ID NO: 384267 - RNA, 24 nt, Artificial Sequence
  Synthetic
cuuuugggauguucauuccacucu

SEQ ID NO: 384268 - RNA, 18 nt, Artificial Sequence
  Synthetic
cuguaaucccagcacucu

SEQ ID NO: 384269 - RNA, 19 nt, Artificial Sequence
  Synthetic
ccuguaaucccagcacucu

SEQ ID NO: 384270 - RNA, 20 nt, Artificial Sequence
  Synthetic
gccuguaaucccagcacucu

SEQ ID NO: 384271 - RNA, 18 nt, Artificial Sequence
  Synthetic
cucucucucucucacucu

SEQ ID NO: 384272 - RNA, 19 nt, Artificial Sequence
  Synthetic
ucucucucucucucacucu

SEQ ID NO: 384273 - RNA, 20 nt, Artificial Sequence
  Synthetic
cucucucucucucucacucu

SEQ ID NO: 384274 - RNA, 21 nt, Artificial Sequence
  Synthetic
ucucucucucucucucacucu

SEQ ID NO: 384275 - RNA, 22 nt, Artificial Sequence
  Synthetic
cucucucucucucucucacucu

SEQ ID NO: 384276 - RNA, 23 nt, Artificial Sequence
  Synthetic
ucucucucucucucucucacucu

SEQ ID NO: 384277 - RNA, 24 nt, Artificial Sequence
  Synthetic
cucucucucucucucucucacucu

SEQ ID NO: 384278 - RNA, 18 nt, Artificial Sequence
  Synthetic
aagagccauuuucacucu

SEQ ID NO: 384279 - RNA, 19 nt, Artificial Sequence
  Synthetic
caagagccauuuucacucu

SEQ ID NO: 384280 - RNA, 20 nt, Artificial Sequence
  Synthetic
ccaagagccauuuucacucu

SEQ ID NO: 384281 - RNA, 21 nt, Artificial Sequence
  Synthetic
accaagagccauuuucacucu

SEQ ID NO: 384282 - RNA, 22 nt, Artificial Sequence
  Synthetic
uaccaagagccauuuucacucu

SEQ ID NO: 384283 - RNA, 23 nt, Artificial Sequence
  Synthetic
uuaccaagagccauuuucacucu

SEQ ID NO: 384284 - RNA, 24 nt, Artificial Sequence
  Synthetic
guuaccaagagccauuuucacucu

SEQ ID NO: 384285 - RNA, 18 nt, Artificial Sequence
  Synthetic
cuacucauuuuucacucu

SEQ ID NO: 384286 - RNA, 19 nt, Artificial Sequence
  Synthetic
ccuacucauuuuucacucu

SEQ ID NO: 384287 - RNA, 20 nt, Artificial Sequence
  Synthetic
gccuacucauuuuucacucu

SEQ ID NO: 384288 - RNA, 21 nt, Artificial Sequence
  Synthetic
ugccuacucauuuuucacucu

SEQ ID NO: 384289 - RNA, 22 nt, Artificial Sequence
  Synthetic
uugccuacucauuuuucacucu

SEQ ID NO: 384290 - RNA, 23 nt, Artificial Sequence
  Synthetic
uuugccuacucauuuuucacucu

SEQ ID NO: 384291 - RNA, 24 nt, Artificial Sequence
  Synthetic
auuugccuacucauuuuucacucu

SEQ ID NO: 384292 - RNA, 18 nt, Artificial Sequence
  Synthetic
aauugaucuacagacucu

SEQ ID NO: 384293 - RNA, 19 nt, Artificial Sequence
  Synthetic
caauugaucuacagacucu

SEQ ID NO: 384294 - RNA, 20 nt, Artificial Sequence
  Synthetic
ccaauugaucuacagacucu

SEQ ID NO: 384295 - RNA, 21 nt, Artificial Sequence
  Synthetic
cccaauugaucuacagacucu

SEQ ID NO: 384296 - RNA, 22 nt, Artificial Sequence
  Synthetic
ccccaauugaucuacagacucu

SEQ ID NO: 384297 - RNA, 23 nt, Artificial Sequence
  Synthetic
cccccaauugaucuacagacucu

SEQ ID NO: 384298 - RNA, 24 nt, Artificial Sequence
  Synthetic
ccccccaauugaucuacagacucu

SEQ ID NO: 384299 - RNA, 18 nt, Artificial Sequence
  Synthetic
aucaucucaccugacucu

SEQ ID NO: 384300 - RNA, 19 nt, Artificial Sequence
  Synthetic
caucaucucaccugacucu

SEQ ID NO: 384301 - RNA, 20 nt, Artificial Sequence
  Synthetic
ccaucaucucaccugacucu

SEQ ID NO: 384302 - RNA, 21 nt, Artificial Sequence
  Synthetic
uccaucaucucaccugacucu

SEQ ID NO: 384303 - RNA, 22 nt, Artificial Sequence
  Synthetic
guccaucaucucaccugacucu

SEQ ID NO: 384304 - RNA, 23 nt, Artificial Sequence
  Synthetic
cguccaucaucucaccugacucu

SEQ ID NO: 384305 - RNA, 24 nt, Artificial Sequence
  Synthetic
acguccaucaucucaccugacucu

SEQ ID NO: 384306 - RNA, 18 nt, Artificial Sequence
  Synthetic
aaagcguauccugacucu

SEQ ID NO: 384307 - RNA, 19 nt, Artificial Sequence
  Synthetic
uaaagcguauccugacucu

SEQ ID NO: 384308 - RNA, 20 nt, Artificial Sequence
  Synthetic
cuaaagcguauccugacucu

SEQ ID NO: 384309 - RNA, 21 nt, Artificial Sequence
  Synthetic
acuaaagcguauccugacucu

SEQ ID NO: 384310 - RNA, 22 nt, Artificial Sequence
  Synthetic
cacuaaagcguauccugacucu

SEQ ID NO: 384311 - RNA, 23 nt, Artificial Sequence
  Synthetic
acacuaaagcguauccugacucu

SEQ ID NO: 384312 - RNA, 24 nt, Artificial Sequence
  Synthetic
aacacuaaagcguauccugacucu

SEQ ID NO: 384313 - RNA, 18 nt, Artificial Sequence
  Synthetic
aaugcuggcuuugacucu

SEQ ID NO: 384314 - RNA, 19 nt, Artificial Sequence
  Synthetic
uaaugcuggcuuugacucu

SEQ ID NO: 384315 - RNA, 20 nt, Artificial Sequence
  Synthetic
uuaaugcuggcuuugacucu

SEQ ID NO: 384316 - RNA, 21 nt, Artificial Sequence
  Synthetic
guuaaugcuggcuuugacucu

SEQ ID NO: 384317 - RNA, 22 nt, Artificial Sequence
  Synthetic
uguuaaugcuggcuuugacucu

SEQ ID NO: 384318 - RNA, 23 nt, Artificial Sequence
  Synthetic
auguuaaugcuggcuuugacucu

SEQ ID NO: 384319 - RNA, 24 nt, Artificial Sequence
  Synthetic
aauguuaaugcuggcuuugacucu

SEQ ID NO: 384320 - RNA, 18 nt, Artificial Sequence
  Synthetic
uucugcagggucuacucu

SEQ ID NO: 384321 - RNA, 19 nt, Artificial Sequence
  Synthetic
uuucugcagggucuacucu

SEQ ID NO: 384322 - RNA, 20 nt, Artificial Sequence
  Synthetic
auuucugcagggucuacucu

SEQ ID NO: 384323 - RNA, 21 nt, Artificial Sequence
  Synthetic
uauuucugcagggucuacucu

SEQ ID NO: 384324 - RNA, 22 nt, Artificial Sequence
  Synthetic
auauuucugcagggucuacucu

SEQ ID NO: 384325 - RNA, 23 nt, Artificial Sequence
  Synthetic
uauauuucugcagggucuacucu

SEQ ID NO: 384326 - RNA, 24 nt, Artificial Sequence
  Synthetic
auauauuucugcagggucuacucu

SEQ ID NO: 384327 - RNA, 18 nt, Artificial Sequence
  Synthetic
acggaccuggucuacucu

SEQ ID NO: 384328 - RNA, 19 nt, Artificial Sequence
  Synthetic
gacggaccuggucuacucu

SEQ ID NO: 384329 - RNA, 20 nt, Artificial Sequence
  Synthetic
ggacggaccuggucuacucu

SEQ ID NO: 384330 - RNA, 21 nt, Artificial Sequence
  Synthetic
uggacggaccuggucuacucu

SEQ ID NO: 384331 - RNA, 22 nt, Artificial Sequence
  Synthetic
guggacggaccuggucuacucu

SEQ ID NO: 384332 - RNA, 23 nt, Artificial Sequence
  Synthetic
gguggacggaccuggucuacucu

SEQ ID NO: 384333 - RNA, 24 nt, Artificial Sequence
  Synthetic
ugguggacggaccuggucuacucu

SEQ ID NO: 384334 - RNA, 18 nt, Artificial Sequence
  Synthetic
guaccuccauucuacucu

SEQ ID NO: 384335 - RNA, 19 nt, Artificial Sequence
  Synthetic
aguaccuccauucuacucu

SEQ ID NO: 384336 - RNA, 20 nt, Artificial Sequence
  Synthetic
aaguaccuccauucuacucu

SEQ ID NO: 384337 - RNA, 21 nt, Artificial Sequence
  Synthetic
aaaguaccuccauucuacucu

SEQ ID NO: 384338 - RNA, 22 nt, Artificial Sequence
  Synthetic
aaaaguaccuccauucuacucu

SEQ ID NO: 384339 - RNA, 23 nt, Artificial Sequence
  Synthetic
uaaaaguaccuccauucuacucu

SEQ ID NO: 384340 - RNA, 24 nt, Artificial Sequence
  Synthetic
guaaaaguaccuccauucuacucu

SEQ ID NO: 384341 - RNA, 18 nt, Artificial Sequence
  Synthetic
ggaacucuggcguacucu

SEQ ID NO: 384342 - RNA, 19 nt, Artificial Sequence
  Synthetic
uggaacucuggcguacucu

SEQ ID NO: 384343 - RNA, 20 nt, Artificial Sequence
  Synthetic
cuggaacucuggcguacucu

SEQ ID NO: 384344 - RNA, 21 nt, Artificial Sequence
  Synthetic
ccuggaacucuggcguacucu

SEQ ID NO: 384345 - RNA, 22 nt, Artificial Sequence
  Synthetic
accuggaacucuggcguacucu

SEQ ID NO: 384346 - RNA, 23 nt, Artificial Sequence
  Synthetic
uaccuggaacucuggcguacucu

SEQ ID NO: 384347 - RNA, 24 nt, Artificial Sequence
  Synthetic
cuaccuggaacucuggcguacucu

SEQ ID NO: 384348 - RNA, 18 nt, Artificial Sequence
  Synthetic
cuucuuugggauuacucu

SEQ ID NO: 384349 - RNA, 19 nt, Artificial Sequence
  Synthetic
acuucuuugggauuacucu

SEQ ID NO: 384350 - RNA, 20 nt, Artificial Sequence
  Synthetic
aacuucuuugggauuacucu

SEQ ID NO: 384351 - RNA, 21 nt, Artificial Sequence
  Synthetic
gaacuucuuugggauuacucu

SEQ ID NO: 384352 - RNA, 22 nt, Artificial Sequence
  Synthetic
ugaacuucuuugggauuacucu

SEQ ID NO: 384353 - RNA, 23 nt, Artificial Sequence
  Synthetic
cugaacuucuuugggauuacucu

SEQ ID NO: 384354 - RNA, 24 nt, Artificial Sequence
  Synthetic
ccugaacuucuuugggauuacucu

SEQ ID NO: 384355 - RNA, 18 nt, Artificial Sequence
  Synthetic
guuuugugcauuuacucu

SEQ ID NO: 384356 - RNA, 19 nt, Artificial Sequence
  Synthetic
aguuuugugcauuuacucu

SEQ ID NO: 384357 - RNA, 20 nt, Artificial Sequence
  Synthetic
aaguuuugugcauuuacucu

SEQ ID NO: 384358 - RNA, 21 nt, Artificial Sequence
  Synthetic
uaaguuuugugcauuuacucu

SEQ ID NO: 384359 - RNA, 22 nt, Artificial Sequence
  Synthetic
cuaaguuuugugcauuuacucu

SEQ ID NO: 384360 - RNA, 23 nt, Artificial Sequence
  Synthetic
acuaaguuuugugcauuuacucu

SEQ ID NO: 384361 - RNA, 24 nt, Artificial Sequence
  Synthetic
cacuaaguuuugugcauuuacucu

SEQ ID NO: 384362 - RNA, 18 nt, Artificial Sequence
  Synthetic
augcaaaucaaaaccucu

SEQ ID NO: 384363 - RNA, 19 nt, Artificial Sequence
  Synthetic
aaugcaaaucaaaaccucu

SEQ ID NO: 384364 - RNA, 20 nt, Artificial Sequence
  Synthetic
aaaugcaaaucaaaaccucu

SEQ ID NO: 384365 - RNA, 21 nt, Artificial Sequence
  Synthetic
gaaaugcaaaucaaaaccucu

SEQ ID NO: 384366 - RNA, 22 nt, Artificial Sequence
  Synthetic
ggaaaugcaaaucaaaaccucu

SEQ ID NO: 384367 - RNA, 23 nt, Artificial Sequence
  Synthetic
gggaaaugcaaaucaaaaccucu

SEQ ID NO: 384368 - RNA, 24 nt, Artificial Sequence
  Synthetic
agggaaaugcaaaucaaaaccucu

SEQ ID NO: 384369 - RNA, 18 nt, Artificial Sequence
  Synthetic
cuucaagguagaaccucu

SEQ ID NO: 384370 - RNA, 19 nt, Artificial Sequence
  Synthetic
ucuucaagguagaaccucu

SEQ ID NO: 384371 - RNA, 20 nt, Artificial Sequence
  Synthetic
uucuucaagguagaaccucu

SEQ ID NO: 384372 - RNA, 21 nt, Artificial Sequence
  Synthetic
uuucuucaagguagaaccucu

SEQ ID NO: 384373 - RNA, 22 nt, Artificial Sequence
  Synthetic
cuuucuucaagguagaaccucu

SEQ ID NO: 384374 - RNA, 23 nt, Artificial Sequence
  Synthetic
ucuuucuucaagguagaaccucu

SEQ ID NO: 384375 - RNA, 24 nt, Artificial Sequence
  Synthetic
uucuuucuucaagguagaaccucu

SEQ ID NO: 384376 - RNA, 18 nt, Artificial Sequence
  Synthetic
aauaauuuuaucaccucu

SEQ ID NO: 384377 - RNA, 19 nt, Artificial Sequence
  Synthetic
caauaauuuuaucaccucu

SEQ ID NO: 384378 - RNA, 20 nt, Artificial Sequence
  Synthetic
ccaauaauuuuaucaccucu

SEQ ID NO: 384379 - RNA, 21 nt, Artificial Sequence
  Synthetic
gccaauaauuuuaucaccucu

SEQ ID NO: 384380 - RNA, 22 nt, Artificial Sequence
  Synthetic
ugccaauaauuuuaucaccucu

SEQ ID NO: 384381 - RNA, 23 nt, Artificial Sequence
  Synthetic
uugccaauaauuuuaucaccucu

SEQ ID NO: 384382 - RNA, 24 nt, Artificial Sequence
  Synthetic
auugccaauaauuuuaucaccucu

SEQ ID NO: 384383 - RNA, 18 nt, Artificial Sequence
  Synthetic
ccagacccccagaccucu

SEQ ID NO: 384384 - RNA, 19 nt, Artificial Sequence
  Synthetic
cccagacccccagaccucu

SEQ ID NO: 384385 - RNA, 20 nt, Artificial Sequence
  Synthetic
acccagacccccagaccucu

SEQ ID NO: 384386 - RNA, 21 nt, Artificial Sequence
  Synthetic
aacccagacccccagaccucu

SEQ ID NO: 384387 - RNA, 22 nt, Artificial Sequence
  Synthetic
aaacccagacccccagaccucu

SEQ ID NO: 384388 - RNA, 23 nt, Artificial Sequence
  Synthetic
uaaacccagacccccagaccucu

SEQ ID NO: 384389 - RNA, 24 nt, Artificial Sequence
  Synthetic
auaaacccagacccccagaccucu

SEQ ID NO: 384390 - RNA, 18 nt, Artificial Sequence
  Synthetic
cacucugggcagaccucu

SEQ ID NO: 384391 - RNA, 19 nt, Artificial Sequence
  Synthetic
acacucugggcagaccucu

SEQ ID NO: 384392 - RNA, 20 nt, Artificial Sequence
  Synthetic
gacacucugggcagaccucu

SEQ ID NO: 384393 - RNA, 21 nt, Artificial Sequence
  Synthetic
ugacacucugggcagaccucu

SEQ ID NO: 384394 - RNA, 22 nt, Artificial Sequence
  Synthetic
augacacucugggcagaccucu

SEQ ID NO: 384395 - RNA, 23 nt, Artificial Sequence
  Synthetic
uaugacacucugggcagaccucu

SEQ ID NO: 384396 - RNA, 24 nt, Artificial Sequence
  Synthetic
guaugacacucugggcagaccucu

SEQ ID NO: 384397 - RNA, 18 nt, Artificial Sequence
  Synthetic
uuccuggaugagaccucu

SEQ ID NO: 384398 - RNA, 19 nt, Artificial Sequence
  Synthetic
guuccuggaugagaccucu

SEQ ID NO: 384399 - RNA, 20 nt, Artificial Sequence
  Synthetic
uguuccuggaugagaccucu

SEQ ID NO: 384400 - RNA, 21 nt, Artificial Sequence
  Synthetic
guguuccuggaugagaccucu

SEQ ID NO: 384401 - RNA, 22 nt, Artificial Sequence
  Synthetic
aguguuccuggaugagaccucu

SEQ ID NO: 384402 - RNA, 23 nt, Artificial Sequence
  Synthetic
caguguuccuggaugagaccucu

SEQ ID NO: 384403 - RNA, 24 nt, Artificial Sequence
  Synthetic
ucaguguuccuggaugagaccucu

SEQ ID NO: 384404 - RNA, 18 nt, Artificial Sequence
  Synthetic
gaaauucuauugaccucu

SEQ ID NO: 384405 - RNA, 19 nt, Artificial Sequence
  Synthetic
ugaaauucuauugaccucu

SEQ ID NO: 384406 - RNA, 20 nt, Artificial Sequence
  Synthetic
cugaaauucuauugaccucu

SEQ ID NO: 384407 - RNA, 21 nt, Artificial Sequence
  Synthetic
ccugaaauucuauugaccucu

SEQ ID NO: 384408 - RNA, 22 nt, Artificial Sequence
  Synthetic
accugaaauucuauugaccucu

SEQ ID NO: 384409 - RNA, 23 nt, Artificial Sequence
  Synthetic
caccugaaauucuauugaccucu

SEQ ID NO: 384410 - RNA, 24 nt, Artificial Sequence
  Synthetic
acaccugaaauucuauugaccucu

SEQ ID NO: 384411 - RNA, 18 nt, Artificial Sequence
  Synthetic
accuguaaaucuaccucu

SEQ ID NO: 384412 - RNA, 19 nt, Artificial Sequence
  Synthetic
caccuguaaaucuaccucu

SEQ ID NO: 384413 - RNA, 20 nt, Artificial Sequence
  Synthetic
ucaccuguaaaucuaccucu

SEQ ID NO: 384414 - RNA, 21 nt, Artificial Sequence
  Synthetic
aucaccuguaaaucuaccucu

SEQ ID NO: 384415 - RNA, 22 nt, Artificial Sequence
  Synthetic
aaucaccuguaaaucuaccucu

SEQ ID NO: 384416 - RNA, 23 nt, Artificial Sequence
  Synthetic
aaaucaccuguaaaucuaccucu

SEQ ID NO: 384417 - RNA, 24 nt, Artificial Sequence
  Synthetic
uaaaucaccuguaaaucuaccucu

SEQ ID NO: 384418 - RNA, 18 nt, Artificial Sequence
  Synthetic
uaagcuaugcuuaccucu

SEQ ID NO: 384419 - RNA, 19 nt, Artificial Sequence
  Synthetic
uuaagcuaugcuuaccucu

SEQ ID NO: 384420 - RNA, 20 nt, Artificial Sequence
  Synthetic
auuaagcuaugcuuaccucu

SEQ ID NO: 384421 - RNA, 21 nt, Artificial Sequence
  Synthetic
aauuaagcuaugcuuaccucu

SEQ ID NO: 384422 - RNA, 22 nt, Artificial Sequence
  Synthetic
aaauuaagcuaugcuuaccucu

SEQ ID NO: 384423 - RNA, 23 nt, Artificial Sequence
  Synthetic
caaauuaagcuaugcuuaccucu

SEQ ID NO: 384424 - RNA, 24 nt, Artificial Sequence
  Synthetic
gcaaauuaagcuaugcuuaccucu

SEQ ID NO: 384425 - RNA, 18 nt, Artificial Sequence
  Synthetic
ccacaucaggcccccucu

SEQ ID NO: 384426 - RNA, 19 nt, Artificial Sequence
  Synthetic
gccacaucaggcccccucu

SEQ ID NO: 384427 - RNA, 20 nt, Artificial Sequence
  Synthetic
ugccacaucaggcccccucu

SEQ ID NO: 384428 - RNA, 21 nt, Artificial Sequence
  Synthetic
cugccacaucaggcccccucu

SEQ ID NO: 384429 - RNA, 22 nt, Artificial Sequence
  Synthetic
acugccacaucaggcccccucu

SEQ ID NO: 384430 - RNA, 23 nt, Artificial Sequence
  Synthetic
uacugccacaucaggcccccucu

SEQ ID NO: 384431 - RNA, 24 nt, Artificial Sequence
  Synthetic
auacugccacaucaggcccccucu

SEQ ID NO: 384432 - RNA, 18 nt, Artificial Sequence
  Synthetic
gaaucagaaguccccucu

SEQ ID NO: 384433 - RNA, 19 nt, Artificial Sequence
  Synthetic
agaaucagaaguccccucu

SEQ ID NO: 384434 - RNA, 20 nt, Artificial Sequence
  Synthetic
uagaaucagaaguccccucu

SEQ ID NO: 384435 - RNA, 21 nt, Artificial Sequence
  Synthetic
auagaaucagaaguccccucu

SEQ ID NO: 384436 - RNA, 22 nt, Artificial Sequence
  Synthetic
gauagaaucagaaguccccucu

SEQ ID NO: 384437 - RNA, 23 nt, Artificial Sequence
  Synthetic
agauagaaucagaaguccccucu

SEQ ID NO: 384438 - RNA, 24 nt, Artificial Sequence
  Synthetic
cagauagaaucagaaguccccucu

SEQ ID NO: 384439 - RNA, 18 nt, Artificial Sequence
  Synthetic
caaaauaagcagcccucu

SEQ ID NO: 384440 - RNA, 19 nt, Artificial Sequence
  Synthetic
ccaaaauaagcagcccucu

SEQ ID NO: 384441 - RNA, 20 nt, Artificial Sequence
  Synthetic
uccaaaauaagcagcccucu

SEQ ID NO: 384442 - RNA, 21 nt, Artificial Sequence
  Synthetic
guccaaaauaagcagcccucu

SEQ ID NO: 384443 - RNA, 22 nt, Artificial Sequence
  Synthetic
aguccaaaauaagcagcccucu

SEQ ID NO: 384444 - RNA, 23 nt, Artificial Sequence
  Synthetic
caguccaaaauaagcagcccucu

SEQ ID NO: 384445 - RNA, 24 nt, Artificial Sequence
  Synthetic
gcaguccaaaauaagcagcccucu

SEQ ID NO: 384446 - RNA, 18 nt, Artificial Sequence
  Synthetic
aguucugcaucagccucu

SEQ ID NO: 384447 - RNA, 19 nt, Artificial Sequence
  Synthetic
aaguucugcaucagccucu

SEQ ID NO: 384448 - RNA, 20 nt, Artificial Sequence
  Synthetic
uaaguucugcaucagccucu

SEQ ID NO: 384449 - RNA, 21 nt, Artificial Sequence
  Synthetic
uuaaguucugcaucagccucu

SEQ ID NO: 384450 - RNA, 22 nt, Artificial Sequence
  Synthetic
auuaaguucugcaucagccucu

SEQ ID NO: 384451 - RNA, 23 nt, Artificial Sequence
  Synthetic
uauuaaguucugcaucagccucu

SEQ ID NO: 384452 - RNA, 24 nt, Artificial Sequence
  Synthetic
uuauuaaguucugcaucagccucu

SEQ ID NO: 384453 - RNA, 18 nt, Artificial Sequence
  Synthetic
uuaggacuuagagccucu

SEQ ID NO: 384454 - RNA, 19 nt, Artificial Sequence
  Synthetic
guuaggacuuagagccucu

SEQ ID NO: 384455 - RNA, 20 nt, Artificial Sequence
  Synthetic
uguuaggacuuagagccucu

SEQ ID NO: 384456 - RNA, 21 nt, Artificial Sequence
  Synthetic
auguuaggacuuagagccucu

SEQ ID NO: 384457 - RNA, 22 nt, Artificial Sequence
  Synthetic
aauguuaggacuuagagccucu

SEQ ID NO: 384458 - RNA, 23 nt, Artificial Sequence
  Synthetic
gaauguuaggacuuagagccucu

SEQ ID NO: 384459 - RNA, 24 nt, Artificial Sequence
  Synthetic
ggaauguuaggacuuagagccucu

SEQ ID NO: 384460 - RNA, 18 nt, Artificial Sequence
  Synthetic
auuuuguauuuagccucu

SEQ ID NO: 384461 - RNA, 19 nt, Artificial Sequence
  Synthetic
uauuuuguauuuagccucu

SEQ ID NO: 384462 - RNA, 20 nt, Artificial Sequence
  Synthetic
auauuuuguauuuagccucu

SEQ ID NO: 384463 - RNA, 21 nt, Artificial Sequence
  Synthetic
uauauuuuguauuuagccucu

SEQ ID NO: 384464 - RNA, 22 nt, Artificial Sequence
  Synthetic
guauauuuuguauuuagccucu

SEQ ID NO: 384465 - RNA, 23 nt, Artificial Sequence
  Synthetic
uguauauuuuguauuuagccucu

SEQ ID NO: 384466 - RNA, 24 nt, Artificial Sequence
  Synthetic
guguauauuuuguauuuagccucu

SEQ ID NO: 384467 - RNA, 18 nt, Artificial Sequence
  Synthetic
aucccugcaagggccucu

SEQ ID NO: 384468 - RNA, 19 nt, Artificial Sequence
  Synthetic
aaucccugcaagggccucu

SEQ ID NO: 384469 - RNA, 20 nt, Artificial Sequence
  Synthetic
caaucccugcaagggccucu

SEQ ID NO: 384470 - RNA, 21 nt, Artificial Sequence
  Synthetic
ccaaucccugcaagggccucu

SEQ ID NO: 384471 - RNA, 22 nt, Artificial Sequence
  Synthetic
cccaaucccugcaagggccucu

SEQ ID NO: 384472 - RNA, 23 nt, Artificial Sequence
  Synthetic
ucccaaucccugcaagggccucu

SEQ ID NO: 384473 - RNA, 24 nt, Artificial Sequence
  Synthetic
aucccaaucccugcaagggccucu

SEQ ID NO: 384474 - RNA, 18 nt, Artificial Sequence
  Synthetic
acugucaaauuggccucu

SEQ ID NO: 384475 - RNA, 19 nt, Artificial Sequence
  Synthetic
gacugucaaauuggccucu

SEQ ID NO: 384476 - RNA, 20 nt, Artificial Sequence
  Synthetic
ugacugucaaauuggccucu

SEQ ID NO: 384477 - RNA, 21 nt, Artificial Sequence
  Synthetic
cugacugucaaauuggccucu

SEQ ID NO: 384478 - RNA, 22 nt, Artificial Sequence
  Synthetic
ucugacugucaaauuggccucu

SEQ ID NO: 384479 - RNA, 23 nt, Artificial Sequence
  Synthetic
uucugacugucaaauuggccucu

SEQ ID NO: 384480 - RNA, 24 nt, Artificial Sequence
  Synthetic
cuucugacugucaaauuggccucu

SEQ ID NO: 384481 - RNA, 18 nt, Artificial Sequence
  Synthetic
gagaauaucaaugccucu

SEQ ID NO: 384482 - RNA, 19 nt, Artificial Sequence
  Synthetic
agagaauaucaaugccucu

SEQ ID NO: 384483 - RNA, 20 nt, Artificial Sequence
  Synthetic
cagagaauaucaaugccucu

SEQ ID NO: 384484 - RNA, 21 nt, Artificial Sequence
  Synthetic
acagagaauaucaaugccucu

SEQ ID NO: 384485 - RNA, 22 nt, Artificial Sequence
  Synthetic
aacagagaauaucaaugccucu

SEQ ID NO: 384486 - RNA, 23 nt, Artificial Sequence
  Synthetic
uaacagagaauaucaaugccucu

SEQ ID NO: 384487 - RNA, 24 nt, Artificial Sequence
  Synthetic
auaacagagaauaucaaugccucu

SEQ ID NO: 384488 - RNA, 18 nt, Artificial Sequence
  Synthetic
uauauacaggcugccucu

SEQ ID NO: 384489 - RNA, 19 nt, Artificial Sequence
  Synthetic
uuauauacaggcugccucu

SEQ ID NO: 384490 - RNA, 20 nt, Artificial Sequence
  Synthetic
auuauauacaggcugccucu

SEQ ID NO: 384491 - RNA, 21 nt, Artificial Sequence
  Synthetic
cauuauauacaggcugccucu

SEQ ID NO: 384492 - RNA, 22 nt, Artificial Sequence
  Synthetic
ucauuauauacaggcugccucu

SEQ ID NO: 384493 - RNA, 23 nt, Artificial Sequence
  Synthetic
gucauuauauacaggcugccucu

SEQ ID NO: 384494 - RNA, 24 nt, Artificial Sequence
  Synthetic
agucauuauauacaggcugccucu

SEQ ID NO: 384495 - RNA, 18 nt, Artificial Sequence
  Synthetic
ucaaaugagauauccucu

SEQ ID NO: 384496 - RNA, 19 nt, Artificial Sequence
  Synthetic
uucaaaugagauauccucu

SEQ ID NO: 384497 - RNA, 20 nt, Artificial Sequence
  Synthetic
auucaaaugagauauccucu

SEQ ID NO: 384498 - RNA, 21 nt, Artificial Sequence
  Synthetic
aauucaaaugagauauccucu

SEQ ID NO: 384499 - RNA, 22 nt, Artificial Sequence
  Synthetic
aaauucaaaugagauauccucu

SEQ ID NO: 384500 - RNA, 23 nt, Artificial Sequence
  Synthetic
aaaauucaaaugagauauccucu

SEQ ID NO: 384501 - RNA, 24 nt, Artificial Sequence
  Synthetic
gaaaauucaaaugagauauccucu

SEQ ID NO: 384502 - RNA, 18 nt, Artificial Sequence
  Synthetic
ucacagccacacuccucu

SEQ ID NO: 384503 - RNA, 19 nt, Artificial Sequence
  Synthetic
cucacagccacacuccucu

SEQ ID NO: 384504 - RNA, 20 nt, Artificial Sequence
  Synthetic
gcucacagccacacuccucu

SEQ ID NO: 384505 - RNA, 21 nt, Artificial Sequence
  Synthetic
agcucacagccacacuccucu

SEQ ID NO: 384506 - RNA, 22 nt, Artificial Sequence
  Synthetic
cagcucacagccacacuccucu

SEQ ID NO: 384507 - RNA, 23 nt, Artificial Sequence
  Synthetic
ucagcucacagccacacuccucu

SEQ ID NO: 384508 - RNA, 24 nt, Artificial Sequence
  Synthetic
uucagcucacagccacacuccucu

SEQ ID NO: 384509 - RNA, 18 nt, Artificial Sequence
  Synthetic
auauaugaaaccuccucu

SEQ ID NO: 384510 - RNA, 19 nt, Artificial Sequence
  Synthetic
uauauaugaaaccuccucu

SEQ ID NO: 384511 - RNA, 20 nt, Artificial Sequence
  Synthetic
auauauaugaaaccuccucu

SEQ ID NO: 384512 - RNA, 21 nt, Artificial Sequence
  Synthetic
uauauauaugaaaccuccucu

SEQ ID NO: 384513 - RNA, 22 nt, Artificial Sequence
  Synthetic
auauauauaugaaaccuccucu

SEQ ID NO: 384514 - RNA, 23 nt, Artificial Sequence
  Synthetic
cauauauauaugaaaccuccucu

SEQ ID NO: 384515 - RNA, 24 nt, Artificial Sequence
  Synthetic
acauauauauaugaaaccuccucu

SEQ ID NO: 384516 - RNA, 18 nt, Artificial Sequence
  Synthetic
uggacucaagccuccucu

SEQ ID NO: 384517 - RNA, 19 nt, Artificial Sequence
  Synthetic
cuggacucaagccuccucu

SEQ ID NO: 384518 - RNA, 20 nt, Artificial Sequence
  Synthetic
ucuggacucaagccuccucu

SEQ ID NO: 384519 - RNA, 21 nt, Artificial Sequence
  Synthetic
gucuggacucaagccuccucu

SEQ ID NO: 384520 - RNA, 22 nt, Artificial Sequence
  Synthetic
ugucuggacucaagccuccucu

SEQ ID NO: 384521 - RNA, 23 nt, Artificial Sequence
  Synthetic
gugucuggacucaagccuccucu

SEQ ID NO: 384522 - RNA, 24 nt, Artificial Sequence
  Synthetic
ugugucuggacucaagccuccucu

SEQ ID NO: 384523 - RNA, 18 nt, Artificial Sequence
  Synthetic
acucuuugcaauuccucu

SEQ ID NO: 384524 - RNA, 19 nt, Artificial Sequence
  Synthetic
cacucuuugcaauuccucu

SEQ ID NO: 384525 - RNA, 20 nt, Artificial Sequence
  Synthetic
gcacucuuugcaauuccucu

SEQ ID NO: 384526 - RNA, 21 nt, Artificial Sequence
  Synthetic
agcacucuuugcaauuccucu

SEQ ID NO: 384527 - RNA, 22 nt, Artificial Sequence
  Synthetic
cagcacucuuugcaauuccucu

SEQ ID NO: 384528 - RNA, 23 nt, Artificial Sequence
  Synthetic
ccagcacucuuugcaauuccucu

SEQ ID NO: 384529 - RNA, 24 nt, Artificial Sequence
  Synthetic
gccagcacucuuugcaauuccucu

SEQ ID NO: 384530 - RNA, 18 nt, Artificial Sequence
  Synthetic
caaauauguccuuccucu

SEQ ID NO: 384531 - RNA, 19 nt, Artificial Sequence
  Synthetic
ucaaauauguccuuccucu

SEQ ID NO: 384532 - RNA, 20 nt, Artificial Sequence
  Synthetic
uucaaauauguccuuccucu

SEQ ID NO: 384533 - RNA, 21 nt, Artificial Sequence
  Synthetic
auucaaauauguccuuccucu

SEQ ID NO: 384534 - RNA, 22 nt, Artificial Sequence
  Synthetic
uauucaaauauguccuuccucu

SEQ ID NO: 384535 - RNA, 23 nt, Artificial Sequence
  Synthetic
auauucaaauauguccuuccucu

SEQ ID NO: 384536 - RNA, 24 nt, Artificial Sequence
  Synthetic
aauauucaaauauguccuuccucu

SEQ ID NO: 384537 - RNA, 18 nt, Artificial Sequence
  Synthetic
cauugugucagaagcucu

SEQ ID NO: 384538 - RNA, 19 nt, Artificial Sequence
  Synthetic
gcauugugucagaagcucu

SEQ ID NO: 384539 - RNA, 20 nt, Artificial Sequence
  Synthetic
ugcauugugucagaagcucu

SEQ ID NO: 384540 - RNA, 21 nt, Artificial Sequence
  Synthetic
augcauugugucagaagcucu

SEQ ID NO: 384541 - RNA, 22 nt, Artificial Sequence
  Synthetic
aaugcauugugucagaagcucu

SEQ ID NO: 384542 - RNA, 23 nt, Artificial Sequence
  Synthetic
aaaugcauugugucagaagcucu

SEQ ID NO: 384543 - RNA, 24 nt, Artificial Sequence
  Synthetic
aaaaugcauugugucagaagcucu

SEQ ID NO: 384544 - RNA, 18 nt, Artificial Sequence
  Synthetic
aaugugcagcgaagcucu

SEQ ID NO: 384545 - RNA, 19 nt, Artificial Sequence
  Synthetic
uaaugugcagcgaagcucu

SEQ ID NO: 384546 - RNA, 20 nt, Artificial Sequence
  Synthetic
cuaaugugcagcgaagcucu

SEQ ID NO: 384547 - RNA, 21 nt, Artificial Sequence
  Synthetic
ucuaaugugcagcgaagcucu

SEQ ID NO: 384548 - RNA, 22 nt, Artificial Sequence
  Synthetic
aucuaaugugcagcgaagcucu

SEQ ID NO: 384549 - RNA, 23 nt, Artificial Sequence
  Synthetic
aaucuaaugugcagcgaagcucu

SEQ ID NO: 384550 - RNA, 24 nt, Artificial Sequence
  Synthetic
caaucuaaugugcagcgaagcucu

SEQ ID NO: 384551 - RNA, 18 nt, Artificial Sequence
  Synthetic
uaaagugcuuuaagcucu

SEQ ID NO: 384552 - RNA, 19 nt, Artificial Sequence
  Synthetic
auaaagugcuuuaagcucu

SEQ ID NO: 384553 - RNA, 20 nt, Artificial Sequence
  Synthetic
cauaaagugcuuuaagcucu

SEQ ID NO: 384554 - RNA, 21 nt, Artificial Sequence
  Synthetic
ccauaaagugcuuuaagcucu

SEQ ID NO: 384555 - RNA, 22 nt, Artificial Sequence
  Synthetic
uccauaaagugcuuuaagcucu

SEQ ID NO: 384556 - RNA, 23 nt, Artificial Sequence
  Synthetic
uuccauaaagugcuuuaagcucu

SEQ ID NO: 384557 - RNA, 24 nt, Artificial Sequence
  Synthetic
auuccauaaagugcuuuaagcucu

SEQ ID NO: 384558 - RNA, 18 nt, Artificial Sequence
  Synthetic
acuuuuauuuuaagcucu

SEQ ID NO: 384559 - RNA, 19 nt, Artificial Sequence
  Synthetic
cacuuuuauuuuaagcucu

SEQ ID NO: 384560 - RNA, 20 nt, Artificial Sequence
  Synthetic
ucacuuuuauuuuaagcucu

SEQ ID NO: 384561 - RNA, 21 nt, Artificial Sequence
  Synthetic
uucacuuuuauuuuaagcucu

SEQ ID NO: 384562 - RNA, 22 nt, Artificial Sequence
  Synthetic
uuucacuuuuauuuuaagcucu

SEQ ID NO: 384563 - RNA, 23 nt, Artificial Sequence
  Synthetic
uuuucacuuuuauuuuaagcucu

SEQ ID NO: 384564 - RNA, 24 nt, Artificial Sequence
  Synthetic
uuuuucacuuuuauuuuaagcucu

SEQ ID NO: 384565 - RNA, 18 nt, Artificial Sequence
  Synthetic
cugguacccggcagcucu

SEQ ID NO: 384566 - RNA, 19 nt, Artificial Sequence
  Synthetic
gcugguacccggcagcucu

SEQ ID NO: 384567 - RNA, 20 nt, Artificial Sequence
  Synthetic
ugcugguacccggcagcucu

SEQ ID NO: 384568 - RNA, 21 nt, Artificial Sequence
  Synthetic
augcugguacccggcagcucu

SEQ ID NO: 384569 - RNA, 22 nt, Artificial Sequence
  Synthetic
aaugcugguacccggcagcucu

SEQ ID NO: 384570 - RNA, 23 nt, Artificial Sequence
  Synthetic
gaaugcugguacccggcagcucu

SEQ ID NO: 384571 - RNA, 24 nt, Artificial Sequence
  Synthetic
ggaaugcugguacccggcagcucu

SEQ ID NO: 384572 - RNA, 18 nt, Artificial Sequence
  Synthetic
aauaaucacaucagcucu

SEQ ID NO: 384573 - RNA, 19 nt, Artificial Sequence
  Synthetic
uaauaaucacaucagcucu

SEQ ID NO: 384574 - RNA, 20 nt, Artificial Sequence
  Synthetic
uuaauaaucacaucagcucu

SEQ ID NO: 384575 - RNA, 21 nt, Artificial Sequence
  Synthetic
uuuaauaaucacaucagcucu

SEQ ID NO: 384576 - RNA, 22 nt, Artificial Sequence
  Synthetic
uuuuaauaaucacaucagcucu

SEQ ID NO: 384577 - RNA, 23 nt, Artificial Sequence
  Synthetic
cuuuuaauaaucacaucagcucu

SEQ ID NO: 384578 - RNA, 24 nt, Artificial Sequence
  Synthetic
gcuuuuaauaaucacaucagcucu

SEQ ID NO: 384579 - RNA, 18 nt, Artificial Sequence
  Synthetic
uguacuucaaagagcucu

SEQ ID NO: 384580 - RNA, 19 nt, Artificial Sequence
  Synthetic
cuguacuucaaagagcucu

SEQ ID NO: 384581 - RNA, 20 nt, Artificial Sequence
  Synthetic
ccuguacuucaaagagcucu

SEQ ID NO: 384582 - RNA, 21 nt, Artificial Sequence
  Synthetic
cccuguacuucaaagagcucu

SEQ ID NO: 384583 - RNA, 22 nt, Artificial Sequence
  Synthetic
ucccuguacuucaaagagcucu

SEQ ID NO: 384584 - RNA, 23 nt, Artificial Sequence
  Synthetic
gucccuguacuucaaagagcucu

SEQ ID NO: 384585 - RNA, 24 nt, Artificial Sequence
  Synthetic
agucccuguacuucaaagagcucu

SEQ ID NO: 384586 - RNA, 18 nt, Artificial Sequence
  Synthetic
uccugaugaaggagcucu

SEQ ID NO: 384587 - RNA, 19 nt, Artificial Sequence
  Synthetic
auccugaugaaggagcucu

SEQ ID NO: 384588 - RNA, 20 nt, Artificial Sequence
  Synthetic
gauccugaugaaggagcucu

SEQ ID NO: 384589 - RNA, 21 nt, Artificial Sequence
  Synthetic
ugauccugaugaaggagcucu

SEQ ID NO: 384590 - RNA, 22 nt, Artificial Sequence
  Synthetic
uugauccugaugaaggagcucu

SEQ ID NO: 384591 - RNA, 23 nt, Artificial Sequence
  Synthetic
uuugauccugaugaaggagcucu

SEQ ID NO: 384592 - RNA, 24 nt, Artificial Sequence
  Synthetic
guuugauccugaugaaggagcucu

SEQ ID NO: 384593 - RNA, 18 nt, Artificial Sequence
  Synthetic
auagucuuaaggagcucu

SEQ ID NO: 384594 - RNA, 19 nt, Artificial Sequence
  Synthetic
aauagucuuaaggagcucu

SEQ ID NO: 384595 - RNA, 20 nt, Artificial Sequence
  Synthetic
uaauagucuuaaggagcucu

SEQ ID NO: 384596 - RNA, 21 nt, Artificial Sequence
  Synthetic
auaauagucuuaaggagcucu

SEQ ID NO: 384597 - RNA, 22 nt, Artificial Sequence
  Synthetic
uauaauagucuuaaggagcucu

SEQ ID NO: 384598 - RNA, 23 nt, Artificial Sequence
  Synthetic
auauaauagucuuaaggagcucu

SEQ ID NO: 384599 - RNA, 24 nt, Artificial Sequence
  Synthetic
gauauaauagucuuaaggagcucu

SEQ ID NO: 384600 - RNA, 18 nt, Artificial Sequence
  Synthetic
aaugcccaauugagcucu

SEQ ID NO: 384601 - RNA, 19 nt, Artificial Sequence
  Synthetic
uaaugcccaauugagcucu

SEQ ID NO: 384602 - RNA, 20 nt, Artificial Sequence
  Synthetic
cuaaugcccaauugagcucu

SEQ ID NO: 384603 - RNA, 21 nt, Artificial Sequence
  Synthetic
ccuaaugcccaauugagcucu

SEQ ID NO: 384604 - RNA, 22 nt, Artificial Sequence
  Synthetic
uccuaaugcccaauugagcucu

SEQ ID NO: 384605 - RNA, 23 nt, Artificial Sequence
  Synthetic
auccuaaugcccaauugagcucu

SEQ ID NO: 384606 - RNA, 24 nt, Artificial Sequence
  Synthetic
aauccuaaugcccaauugagcucu

SEQ ID NO: 384607 - RNA, 18 nt, Artificial Sequence
  Synthetic
auuauaagcuauagcucu

SEQ ID NO: 384608 - RNA, 19 nt, Artificial Sequence
  Synthetic
uauuauaagcuauagcucu

SEQ ID NO: 384609 - RNA, 20 nt, Artificial Sequence
  Synthetic
auauuauaagcuauagcucu

SEQ ID NO: 384610 - RNA, 21 nt, Artificial Sequence
  Synthetic
uauauuauaagcuauagcucu

SEQ ID NO: 384611 - RNA, 22 nt, Artificial Sequence
  Synthetic
auauauuauaagcuauagcucu

SEQ ID NO: 384612 - RNA, 23 nt, Artificial Sequence
  Synthetic
cauauauuauaagcuauagcucu

SEQ ID NO: 384613 - RNA, 24 nt, Artificial Sequence
  Synthetic
ccauauauuauaagcuauagcucu

SEQ ID NO: 384614 - RNA, 18 nt, Artificial Sequence
  Synthetic
aaggagcuagcuagcucu

SEQ ID NO: 384615 - RNA, 19 nt, Artificial Sequence
  Synthetic
aaaggagcuagcuagcucu

SEQ ID NO: 384616 - RNA, 20 nt, Artificial Sequence
  Synthetic
gaaaggagcuagcuagcucu

SEQ ID NO: 384617 - RNA, 21 nt, Artificial Sequence
  Synthetic
ugaaaggagcuagcuagcucu

SEQ ID NO: 384618 - RNA, 22 nt, Artificial Sequence
  Synthetic
cugaaaggagcuagcuagcucu

SEQ ID NO: 384619 - RNA, 23 nt, Artificial Sequence
  Synthetic
gcugaaaggagcuagcuagcucu

SEQ ID NO: 384620 - RNA, 24 nt, Artificial Sequence
  Synthetic
ugcugaaaggagcuagcuagcucu

SEQ ID NO: 384621 - RNA, 18 nt, Artificial Sequence
  Synthetic
caagcacaaugccgcucu

SEQ ID NO: 384622 - RNA, 19 nt, Artificial Sequence
  Synthetic
acaagcacaaugccgcucu

SEQ ID NO: 384623 - RNA, 20 nt, Artificial Sequence
  Synthetic
uacaagcacaaugccgcucu

SEQ ID NO: 384624 - RNA, 21 nt, Artificial Sequence
  Synthetic
auacaagcacaaugccgcucu

SEQ ID NO: 384625 - RNA, 22 nt, Artificial Sequence
  Synthetic
cauacaagcacaaugccgcucu

SEQ ID NO: 384626 - RNA, 23 nt, Artificial Sequence
  Synthetic
ucauacaagcacaaugccgcucu

SEQ ID NO: 384627 - RNA, 24 nt, Artificial Sequence
  Synthetic
gucauacaagcacaaugccgcucu

SEQ ID NO: 384628 - RNA, 18 nt, Artificial Sequence
  Synthetic
uaagggcacuuucgcucu

SEQ ID NO: 384629 - RNA, 19 nt, Artificial Sequence
  Synthetic
uuaagggcacuuucgcucu

SEQ ID NO: 384630 - RNA, 20 nt, Artificial Sequence
  Synthetic
uuuaagggcacuuucgcucu

SEQ ID NO: 384631 - RNA, 21 nt, Artificial Sequence
  Synthetic
guuuaagggcacuuucgcucu

SEQ ID NO: 384632 - RNA, 22 nt, Artificial Sequence
  Synthetic
uguuuaagggcacuuucgcucu

SEQ ID NO: 384633 - RNA, 23 nt, Artificial Sequence
  Synthetic
auguuuaagggcacuuucgcucu

SEQ ID NO: 384634 - RNA, 24 nt, Artificial Sequence
  Synthetic
aauguuuaagggcacuuucgcucu

SEQ ID NO: 384635 - RNA, 18 nt, Artificial Sequence
  Synthetic
uaucccucugaaggcucu

SEQ ID NO: 384636 - RNA, 19 nt, Artificial Sequence
  Synthetic
uuaucccucugaaggcucu

SEQ ID NO: 384637 - RNA, 20 nt, Artificial Sequence
  Synthetic
auuaucccucugaaggcucu

SEQ ID NO: 384638 - RNA, 21 nt, Artificial Sequence
  Synthetic
aauuaucccucugaaggcucu

SEQ ID NO: 384639 - RNA, 22 nt, Artificial Sequence
  Synthetic
caauuaucccucugaaggcucu

SEQ ID NO: 384640 - RNA, 23 nt, Artificial Sequence
  Synthetic
ucaauuaucccucugaaggcucu

SEQ ID NO: 384641 - RNA, 24 nt, Artificial Sequence
  Synthetic
gucaauuaucccucugaaggcucu

SEQ ID NO: 384642 - RNA, 18 nt, Artificial Sequence
  Synthetic
uagagaugaucaggcucu

SEQ ID NO: 384643 - RNA, 19 nt, Artificial Sequence
  Synthetic
cuagagaugaucaggcucu

SEQ ID NO: 384644 - RNA, 20 nt, Artificial Sequence
  Synthetic
ccuagagaugaucaggcucu

SEQ ID NO: 384645 - RNA, 21 nt, Artificial Sequence
  Synthetic
accuagagaugaucaggcucu

SEQ ID NO: 384646 - RNA, 22 nt, Artificial Sequence
  Synthetic
uaccuagagaugaucaggcucu

SEQ ID NO: 384647 - RNA, 23 nt, Artificial Sequence
  Synthetic
uuaccuagagaugaucaggcucu

SEQ ID NO: 384648 - RNA, 24 nt, Artificial Sequence
  Synthetic
uuuaccuagagaugaucaggcucu

SEQ ID NO: 384649 - RNA, 18 nt, Artificial Sequence
  Synthetic
gagacauuaugaggcucu

SEQ ID NO: 384650 - RNA, 19 nt, Artificial Sequence
  Synthetic
ugagacauuaugaggcucu

SEQ ID NO: 384651 - RNA, 20 nt, Artificial Sequence
  Synthetic
uugagacauuaugaggcucu

SEQ ID NO: 384652 - RNA, 21 nt, Artificial Sequence
  Synthetic
auugagacauuaugaggcucu

SEQ ID NO: 384653 - RNA, 22 nt, Artificial Sequence
  Synthetic
cauugagacauuaugaggcucu

SEQ ID NO: 384654 - RNA, 23 nt, Artificial Sequence
  Synthetic
acauugagacauuaugaggcucu

SEQ ID NO: 384655 - RNA, 24 nt, Artificial Sequence
  Synthetic
cacauugagacauuaugaggcucu

SEQ ID NO: 384656 - RNA, 18 nt, Artificial Sequence
  Synthetic
auguaaucaaagggcucu

SEQ ID NO: 384657 - RNA, 19 nt, Artificial Sequence
  Synthetic
aauguaaucaaagggcucu

SEQ ID NO: 384658 - RNA, 20 nt, Artificial Sequence
  Synthetic
aaauguaaucaaagggcucu

SEQ ID NO: 384659 - RNA, 21 nt, Artificial Sequence
  Synthetic
gaaauguaaucaaagggcucu

SEQ ID NO: 384660 - RNA, 22 nt, Artificial Sequence
  Synthetic
ugaaauguaaucaaagggcucu

SEQ ID NO: 384661 - RNA, 23 nt, Artificial Sequence
  Synthetic
uugaaauguaaucaaagggcucu

SEQ ID NO: 384662 - RNA, 24 nt, Artificial Sequence
  Synthetic
guugaaauguaaucaaagggcucu

SEQ ID NO: 384663 - RNA, 18 nt, Artificial Sequence
  Synthetic
aguuguaaauauggcucu

SEQ ID NO: 384664 - RNA, 19 nt, Artificial Sequence
  Synthetic
aaguuguaaauauggcucu

SEQ ID NO: 384665 - RNA, 20 nt, Artificial Sequence
  Synthetic
aaaguuguaaauauggcucu

SEQ ID NO: 384666 - RNA, 21 nt, Artificial Sequence
  Synthetic
caaaguuguaaauauggcucu

SEQ ID NO: 384667 - RNA, 22 nt, Artificial Sequence
  Synthetic
ucaaaguuguaaauauggcucu

SEQ ID NO: 384668 - RNA, 23 nt, Artificial Sequence
  Synthetic
aucaaaguuguaaauauggcucu

SEQ ID NO: 384669 - RNA, 24 nt, Artificial Sequence
  Synthetic
aaucaaaguuguaaauauggcucu

SEQ ID NO: 384670 - RNA, 18 nt, Artificial Sequence
  Synthetic
uauuaacauacuggcucu

SEQ ID NO: 384671 - RNA, 19 nt, Artificial Sequence
  Synthetic
guauuaacauacuggcucu

SEQ ID NO: 384672 - RNA, 20 nt, Artificial Sequence
  Synthetic
cguauuaacauacuggcucu

SEQ ID NO: 384673 - RNA, 21 nt, Artificial Sequence
  Synthetic
gcguauuaacauacuggcucu

SEQ ID NO: 384674 - RNA, 22 nt, Artificial Sequence
  Synthetic
agcguauuaacauacuggcucu

SEQ ID NO: 384675 - RNA, 23 nt, Artificial Sequence
  Synthetic
uagcguauuaacauacuggcucu

SEQ ID NO: 384676 - RNA, 24 nt, Artificial Sequence
  Synthetic
uuagcguauuaacauacuggcucu

SEQ ID NO: 384677 - RNA, 18 nt, Artificial Sequence
  Synthetic
ugggccacagcuggcucu

SEQ ID NO: 384678 - RNA, 19 nt, Artificial Sequence
  Synthetic
cugggccacagcuggcucu

SEQ ID NO: 384679 - RNA, 20 nt, Artificial Sequence
  Synthetic
ccugggccacagcuggcucu

SEQ ID NO: 384680 - RNA, 21 nt, Artificial Sequence
  Synthetic
cccugggccacagcuggcucu

SEQ ID NO: 384681 - RNA, 22 nt, Artificial Sequence
  Synthetic
gcccugggccacagcuggcucu

SEQ ID NO: 384682 - RNA, 23 nt, Artificial Sequence
  Synthetic
ugcccugggccacagcuggcucu

SEQ ID NO: 384683 - RNA, 24 nt, Artificial Sequence
  Synthetic
uugcccugggccacagcuggcucu

SEQ ID NO: 384684 - RNA, 18 nt, Artificial Sequence
  Synthetic
auaucucagauuggcucu

SEQ ID NO: 384685 - RNA, 19 nt, Artificial Sequence
  Synthetic
cauaucucagauuggcucu

SEQ ID NO: 384686 - RNA, 20 nt, Artificial Sequence
  Synthetic
acauaucucagauuggcucu

SEQ ID NO: 384687 - RNA, 21 nt, Artificial Sequence
  Synthetic
cacauaucucagauuggcucu

SEQ ID NO: 384688 - RNA, 22 nt, Artificial Sequence
  Synthetic
acacauaucucagauuggcucu

SEQ ID NO: 384689 - RNA, 23 nt, Artificial Sequence
  Synthetic
uacacauaucucagauuggcucu

SEQ ID NO: 384690 - RNA, 24 nt, Artificial Sequence
  Synthetic
auacacauaucucagauuggcucu

SEQ ID NO: 384691 - RNA, 18 nt, Artificial Sequence
  Synthetic
uucuagaguaaaugcucu

SEQ ID NO: 384692 - RNA, 19 nt, Artificial Sequence
  Synthetic
uuucuagaguaaaugcucu

SEQ ID NO: 384693 - RNA, 20 nt, Artificial Sequence
  Synthetic
uuuucuagaguaaaugcucu

SEQ ID NO: 384694 - RNA, 21 nt, Artificial Sequence
  Synthetic
guuuucuagaguaaaugcucu

SEQ ID NO: 384695 - RNA, 22 nt, Artificial Sequence
  Synthetic
aguuuucuagaguaaaugcucu

SEQ ID NO: 384696 - RNA, 23 nt, Artificial Sequence
  Synthetic
aaguuuucuagaguaaaugcucu

SEQ ID NO: 384697 - RNA, 24 nt, Artificial Sequence
  Synthetic
aaaguuuucuagaguaaaugcucu

SEQ ID NO: 384698 - RNA, 18 nt, Artificial Sequence
  Synthetic
uauaaggcauaaugcucu

SEQ ID NO: 384699 - RNA, 19 nt, Artificial Sequence
  Synthetic
auauaaggcauaaugcucu

SEQ ID NO: 384700 - RNA, 20 nt, Artificial Sequence
  Synthetic
uauauaaggcauaaugcucu

SEQ ID NO: 384701 - RNA, 21 nt, Artificial Sequence
  Synthetic
auauauaaggcauaaugcucu

SEQ ID NO: 384702 - RNA, 22 nt, Artificial Sequence
  Synthetic
uauauauaaggcauaaugcucu

SEQ ID NO: 384703 - RNA, 23 nt, Artificial Sequence
  Synthetic
auauauauaaggcauaaugcucu

SEQ ID NO: 384704 - RNA, 24 nt, Artificial Sequence
  Synthetic
aauauauauaaggcauaaugcucu

SEQ ID NO: 384705 - RNA, 18 nt, Artificial Sequence
  Synthetic
cugucaugcuaaugcucu

SEQ ID NO: 384706 - RNA, 19 nt, Artificial Sequence
  Synthetic
acugucaugcuaaugcucu

SEQ ID NO: 384707 - RNA, 20 nt, Artificial Sequence
  Synthetic
aacugucaugcuaaugcucu

SEQ ID NO: 384708 - RNA, 21 nt, Artificial Sequence
  Synthetic
aaacugucaugcuaaugcucu

SEQ ID NO: 384709 - RNA, 22 nt, Artificial Sequence
  Synthetic
aaaacugucaugcuaaugcucu

SEQ ID NO: 384710 - RNA, 23 nt, Artificial Sequence
  Synthetic
caaaacugucaugcuaaugcucu

SEQ ID NO: 384711 - RNA, 24 nt, Artificial Sequence
  Synthetic
ucaaaacugucaugcuaaugcucu

SEQ ID NO: 384712 - RNA, 18 nt, Artificial Sequence
  Synthetic
ccaaaauauacaugcucu

SEQ ID NO: 384713 - RNA, 19 nt, Artificial Sequence
  Synthetic
uccaaaauauacaugcucu

SEQ ID NO: 384714 - RNA, 20 nt, Artificial Sequence
  Synthetic
uuccaaaauauacaugcucu

SEQ ID NO: 384715 - RNA, 21 nt, Artificial Sequence
  Synthetic
uuuccaaaauauacaugcucu

SEQ ID NO: 384716 - RNA, 22 nt, Artificial Sequence
  Synthetic
auuuccaaaauauacaugcucu

SEQ ID NO: 384717 - RNA, 23 nt, Artificial Sequence
  Synthetic
cauuuccaaaauauacaugcucu

SEQ ID NO: 384718 - RNA, 24 nt, Artificial Sequence
  Synthetic
acauuuccaaaauauacaugcucu

SEQ ID NO: 384719 - RNA, 18 nt, Artificial Sequence
  Synthetic
aaaggcuagauaugcucu

SEQ ID NO: 384720 - RNA, 19 nt, Artificial Sequence
  Synthetic
gaaaggcuagauaugcucu

SEQ ID NO: 384721 - RNA, 20 nt, Artificial Sequence
  Synthetic
ggaaaggcuagauaugcucu

SEQ ID NO: 384722 - RNA, 21 nt, Artificial Sequence
  Synthetic
uggaaaggcuagauaugcucu

SEQ ID NO: 384723 - RNA, 22 nt, Artificial Sequence
  Synthetic
uuggaaaggcuagauaugcucu

SEQ ID NO: 384724 - RNA, 23 nt, Artificial Sequence
  Synthetic
guuggaaaggcuagauaugcucu

SEQ ID NO: 384725 - RNA, 24 nt, Artificial Sequence
  Synthetic
uguuggaaaggcuagauaugcucu

SEQ ID NO: 384726 - RNA, 18 nt, Artificial Sequence
  Synthetic
ccaaaugugcuaugcucu

SEQ ID NO: 384727 - RNA, 19 nt, Artificial Sequence
  Synthetic
accaaaugugcuaugcucu

SEQ ID NO: 384728 - RNA, 20 nt, Artificial Sequence
  Synthetic
uaccaaaugugcuaugcucu

SEQ ID NO: 384729 - RNA, 21 nt, Artificial Sequence
  Synthetic
uuaccaaaugugcuaugcucu

SEQ ID NO: 384730 - RNA, 22 nt, Artificial Sequence
  Synthetic
uuuaccaaaugugcuaugcucu

SEQ ID NO: 384731 - RNA, 23 nt, Artificial Sequence
  Synthetic
uuuuaccaaaugugcuaugcucu

SEQ ID NO: 384732 - RNA, 24 nt, Artificial Sequence
  Synthetic
uuuuuaccaaaugugcuaugcucu

SEQ ID NO: 384733 - RNA, 18 nt, Artificial Sequence
  Synthetic
uuaaucaggagcugcucu

SEQ ID NO: 384734 - RNA, 19 nt, Artificial Sequence
  Synthetic
guuaaucaggagcugcucu

SEQ ID NO: 384735 - RNA, 20 nt, Artificial Sequence
  Synthetic
gguuaaucaggagcugcucu

SEQ ID NO: 384736 - RNA, 21 nt, Artificial Sequence
  Synthetic
ggguuaaucaggagcugcucu

SEQ ID NO: 384737 - RNA, 22 nt, Artificial Sequence
  Synthetic
cggguuaaucaggagcugcucu

SEQ ID NO: 384738 - RNA, 23 nt, Artificial Sequence
  Synthetic
acggguuaaucaggagcugcucu

SEQ ID NO: 384739 - RNA, 24 nt, Artificial Sequence
  Synthetic
uacggguuaaucaggagcugcucu

SEQ ID NO: 384740 - RNA, 18 nt, Artificial Sequence
  Synthetic
aucaguguuaucugcucu

SEQ ID NO: 384741 - RNA, 19 nt, Artificial Sequence
  Synthetic
caucaguguuaucugcucu

SEQ ID NO: 384742 - RNA, 20 nt, Artificial Sequence
  Synthetic
gcaucaguguuaucugcucu

SEQ ID NO: 384743 - RNA, 21 nt, Artificial Sequence
  Synthetic
ggcaucaguguuaucugcucu

SEQ ID NO: 384744 - RNA, 22 nt, Artificial Sequence
  Synthetic
aggcaucaguguuaucugcucu

SEQ ID NO: 384745 - RNA, 23 nt, Artificial Sequence
  Synthetic
aaggcaucaguguuaucugcucu

SEQ ID NO: 384746 - RNA, 24 nt, Artificial Sequence
  Synthetic
aaaggcaucaguguuaucugcucu

SEQ ID NO: 384747 - RNA, 18 nt, Artificial Sequence
  Synthetic
ccucugacccucugcucu

SEQ ID NO: 384748 - RNA, 19 nt, Artificial Sequence
  Synthetic
uccucugacccucugcucu

SEQ ID NO: 384749 - RNA, 20 nt, Artificial Sequence
  Synthetic
cuccucugacccucugcucu

SEQ ID NO: 384750 - RNA, 21 nt, Artificial Sequence
  Synthetic
ucuccucugacccucugcucu

SEQ ID NO: 384751 - RNA, 22 nt, Artificial Sequence
  Synthetic
gucuccucugacccucugcucu

SEQ ID NO: 384752 - RNA, 23 nt, Artificial Sequence
  Synthetic
agucuccucugacccucugcucu

SEQ ID NO: 384753 - RNA, 24 nt, Artificial Sequence
  Synthetic
cagucuccucugacccucugcucu

SEQ ID NO: 384754 - RNA, 18 nt, Artificial Sequence
  Synthetic
uuauagagggucugcucu

SEQ ID NO: 384755 - RNA, 19 nt, Artificial Sequence
  Synthetic
uuuauagagggucugcucu

SEQ ID NO: 384756 - RNA, 20 nt, Artificial Sequence
  Synthetic
auuuauagagggucugcucu

SEQ ID NO: 384757 - RNA, 21 nt, Artificial Sequence
  Synthetic
gauuuauagagggucugcucu

SEQ ID NO: 384758 - RNA, 22 nt, Artificial Sequence
  Synthetic
ugauuuauagagggucugcucu

SEQ ID NO: 384759 - RNA, 23 nt, Artificial Sequence
  Synthetic
gugauuuauagagggucugcucu

SEQ ID NO: 384760 - RNA, 24 nt, Artificial Sequence
  Synthetic
ugugauuuauagagggucugcucu

SEQ ID NO: 384761 - RNA, 18 nt, Artificial Sequence
  Synthetic
uagucuucucagugcucu

SEQ ID NO: 384762 - RNA, 19 nt, Artificial Sequence
  Synthetic
guagucuucucagugcucu

SEQ ID NO: 384763 - RNA, 20 nt, Artificial Sequence
  Synthetic
aguagucuucucagugcucu

SEQ ID NO: 384764 - RNA, 21 nt, Artificial Sequence
  Synthetic
uaguagucuucucagugcucu

SEQ ID NO: 384765 - RNA, 22 nt, Artificial Sequence
  Synthetic
auaguagucuucucagugcucu

SEQ ID NO: 384766 - RNA, 23 nt, Artificial Sequence
  Synthetic
uauaguagucuucucagugcucu

SEQ ID NO: 384767 - RNA, 24 nt, Artificial Sequence
  Synthetic
cuauaguagucuucucagugcucu

SEQ ID NO: 384768 - RNA, 18 nt, Artificial Sequence
  Synthetic
uuaggguuuaauugcucu

SEQ ID NO: 384769 - RNA, 19 nt, Artificial Sequence
  Synthetic
guuaggguuuaauugcucu

SEQ ID NO: 384770 - RNA, 20 nt, Artificial Sequence
  Synthetic
gguuaggguuuaauugcucu

SEQ ID NO: 384771 - RNA, 21 nt, Artificial Sequence
  Synthetic
ugguuaggguuuaauugcucu

SEQ ID NO: 384772 - RNA, 22 nt, Artificial Sequence
  Synthetic
augguuaggguuuaauugcucu

SEQ ID NO: 384773 - RNA, 23 nt, Artificial Sequence
  Synthetic
aaugguuaggguuuaauugcucu

SEQ ID NO: 384774 - RNA, 24 nt, Artificial Sequence
  Synthetic
gaaugguuaggguuuaauugcucu

SEQ ID NO: 384775 - RNA, 18 nt, Artificial Sequence
  Synthetic
cagcauuucaguugcucu

SEQ ID NO: 384776 - RNA, 19 nt, Artificial Sequence
  Synthetic
gcagcauuucaguugcucu

SEQ ID NO: 384777 - RNA, 20 nt, Artificial Sequence
  Synthetic
agcagcauuucaguugcucu

SEQ ID NO: 384778 - RNA, 21 nt, Artificial Sequence
  Synthetic
aagcagcauuucaguugcucu

SEQ ID NO: 384779 - RNA, 22 nt, Artificial Sequence
  Synthetic
gaagcagcauuucaguugcucu

SEQ ID NO: 384780 - RNA, 23 nt, Artificial Sequence
  Synthetic
ggaagcagcauuucaguugcucu

SEQ ID NO: 384781 - RNA, 24 nt, Artificial Sequence
  Synthetic
aggaagcagcauuucaguugcucu

SEQ ID NO: 384782 - RNA, 18 nt, Artificial Sequence
  Synthetic
agaagcauacaaaucucu

SEQ ID NO: 384783 - RNA, 19 nt, Artificial Sequence
  Synthetic
cagaagcauacaaaucucu

SEQ ID NO: 384784 - RNA, 20 nt, Artificial Sequence
  Synthetic
acagaagcauacaaaucucu

SEQ ID NO: 384785 - RNA, 21 nt, Artificial Sequence
  Synthetic
aacagaagcauacaaaucucu

SEQ ID NO: 384786 - RNA, 22 nt, Artificial Sequence
  Synthetic
gaacagaagcauacaaaucucu

SEQ ID NO: 384787 - RNA, 23 nt, Artificial Sequence
  Synthetic
ugaacagaagcauacaaaucucu

SEQ ID NO: 384788 - RNA, 24 nt, Artificial Sequence
  Synthetic
uugaacagaagcauacaaaucucu

SEQ ID NO: 384789 - RNA, 18 nt, Artificial Sequence
  Synthetic
aauggaaacuaaaucucu

SEQ ID NO: 384790 - RNA, 19 nt, Artificial Sequence
  Synthetic
caauggaaacuaaaucucu

SEQ ID NO: 384791 - RNA, 20 nt, Artificial Sequence
  Synthetic
acaauggaaacuaaaucucu

SEQ ID NO: 384792 - RNA, 21 nt, Artificial Sequence
  Synthetic
aacaauggaaacuaaaucucu

SEQ ID NO: 384793 - RNA, 22 nt, Artificial Sequence
  Synthetic
uaacaauggaaacuaaaucucu

SEQ ID NO: 384794 - RNA, 23 nt, Artificial Sequence
  Synthetic
auaacaauggaaacuaaaucucu

SEQ ID NO: 384795 - RNA, 24 nt, Artificial Sequence
  Synthetic
aauaacaauggaaacuaaaucucu

SEQ ID NO: 384796 - RNA, 18 nt, Artificial Sequence
  Synthetic
agugaaaacagaaucucu

SEQ ID NO: 384797 - RNA, 19 nt, Artificial Sequence
  Synthetic
aagugaaaacagaaucucu

SEQ ID NO: 384798 - RNA, 20 nt, Artificial Sequence
  Synthetic
uaagugaaaacagaaucucu

SEQ ID NO: 384799 - RNA, 21 nt, Artificial Sequence
  Synthetic
auaagugaaaacagaaucucu

SEQ ID NO: 384800 - RNA, 22 nt, Artificial Sequence
  Synthetic
aauaagugaaaacagaaucucu

SEQ ID NO: 384801 - RNA, 23 nt, Artificial Sequence
  Synthetic
uaauaagugaaaacagaaucucu

SEQ ID NO: 384802 - RNA, 24 nt, Artificial Sequence
  Synthetic
uuaauaagugaaaacagaaucucu

SEQ ID NO: 384803 - RNA, 18 nt, Artificial Sequence
  Synthetic
uuauuuauuugaaucucu

SEQ ID NO: 384804 - RNA, 19 nt, Artificial Sequence
  Synthetic
cuuauuuauuugaaucucu

SEQ ID NO: 384805 - RNA, 20 nt, Artificial Sequence
  Synthetic
gcuuauuuauuugaaucucu

SEQ ID NO: 384806 - RNA, 21 nt, Artificial Sequence
  Synthetic
ugcuuauuuauuugaaucucu

SEQ ID NO: 384807 - RNA, 22 nt, Artificial Sequence
  Synthetic
gugcuuauuuauuugaaucucu

SEQ ID NO: 384808 - RNA, 23 nt, Artificial Sequence
  Synthetic
ugugcuuauuuauuugaaucucu

SEQ ID NO: 384809 - RNA, 24 nt, Artificial Sequence
  Synthetic
uugugcuuauuuauuugaaucucu

SEQ ID NO: 384810 - RNA, 18 nt, Artificial Sequence
  Synthetic
ugaagccucaacaucucu

SEQ ID NO: 384811 - RNA, 19 nt, Artificial Sequence
  Synthetic
uugaagccucaacaucucu

SEQ ID NO: 384812 - RNA, 20 nt, Artificial Sequence
  Synthetic
auugaagccucaacaucucu

SEQ ID NO: 384813 - RNA, 21 nt, Artificial Sequence
  Synthetic
gauugaagccucaacaucucu

SEQ ID NO: 384814 - RNA, 22 nt, Artificial Sequence
  Synthetic
ugauugaagccucaacaucucu

SEQ ID NO: 384815 - RNA, 23 nt, Artificial Sequence
  Synthetic
gugauugaagccucaacaucucu

SEQ ID NO: 384816 - RNA, 24 nt, Artificial Sequence
  Synthetic
ugugauugaagccucaacaucucu

SEQ ID NO: 384817 - RNA, 18 nt, Artificial Sequence
  Synthetic
gucuaucuuaacaucucu

SEQ ID NO: 384818 - RNA, 19 nt, Artificial Sequence
  Synthetic
agucuaucuuaacaucucu

SEQ ID NO: 384819 - RNA, 20 nt, Artificial Sequence
  Synthetic
uagucuaucuuaacaucucu

SEQ ID NO: 384820 - RNA, 21 nt, Artificial Sequence
  Synthetic
auagucuaucuuaacaucucu

SEQ ID NO: 384821 - RNA, 22 nt, Artificial Sequence
  Synthetic
aauagucuaucuuaacaucucu

SEQ ID NO: 384822 - RNA, 23 nt, Artificial Sequence
  Synthetic
aaauagucuaucuuaacaucucu

SEQ ID NO: 384823 - RNA, 24 nt, Artificial Sequence
  Synthetic
uaaauagucuaucuuaacaucucu

SEQ ID NO: 384824 - RNA, 18 nt, Artificial Sequence
  Synthetic
agccaaggaagcaucucu

SEQ ID NO: 384825 - RNA, 19 nt, Artificial Sequence
  Synthetic
cagccaaggaagcaucucu

SEQ ID NO: 384826 - RNA, 20 nt, Artificial Sequence
  Synthetic
gcagccaaggaagcaucucu

SEQ ID NO: 384827 - RNA, 21 nt, Artificial Sequence
  Synthetic
ugcagccaaggaagcaucucu

SEQ ID NO: 384828 - RNA, 22 nt, Artificial Sequence
  Synthetic
augcagccaaggaagcaucucu

SEQ ID NO: 384829 - RNA, 23 nt, Artificial Sequence
  Synthetic
gaugcagccaaggaagcaucucu

SEQ ID NO: 384830 - RNA, 24 nt, Artificial Sequence
  Synthetic
ugaugcagccaaggaagcaucucu

SEQ ID NO: 384831 - RNA, 18 nt, Artificial Sequence
  Synthetic
uuaccugucgucaucucu

SEQ ID NO: 384832 - RNA, 19 nt, Artificial Sequence
  Synthetic
auuaccugucgucaucucu

SEQ ID NO: 384833 - RNA, 20 nt, Artificial Sequence
  Synthetic
uauuaccugucgucaucucu

SEQ ID NO: 384834 - RNA, 21 nt, Artificial Sequence
  Synthetic
auauuaccugucgucaucucu

SEQ ID NO: 384835 - RNA, 22 nt, Artificial Sequence
  Synthetic
uauauuaccugucgucaucucu

SEQ ID NO: 384836 - RNA, 23 nt, Artificial Sequence
  Synthetic
guauauuaccugucgucaucucu

SEQ ID NO: 384837 - RNA, 24 nt, Artificial Sequence
  Synthetic
cguauauuaccugucgucaucucu

SEQ ID NO: 384838 - RNA, 18 nt, Artificial Sequence
  Synthetic
ucagacauuuucaucucu

SEQ ID NO: 384839 - RNA, 19 nt, Artificial Sequence
  Synthetic
aucagacauuuucaucucu

SEQ ID NO: 384840 - RNA, 20 nt, Artificial Sequence
  Synthetic
caucagacauuuucaucucu

SEQ ID NO: 384841 - RNA, 21 nt, Artificial Sequence
  Synthetic
acaucagacauuuucaucucu

SEQ ID NO: 384842 - RNA, 22 nt, Artificial Sequence
  Synthetic
aacaucagacauuuucaucucu

SEQ ID NO: 384843 - RNA, 23 nt, Artificial Sequence
  Synthetic
uaacaucagacauuuucaucucu

SEQ ID NO: 384844 - RNA, 24 nt, Artificial Sequence
  Synthetic
uuaacaucagacauuuucaucucu

SEQ ID NO: 384845 - RNA, 18 nt, Artificial Sequence
  Synthetic
uguaaaggaaagaucucu

SEQ ID NO: 384846 - RNA, 19 nt, Artificial Sequence
  Synthetic
auguaaaggaaagaucucu

SEQ ID NO: 384847 - RNA, 20 nt, Artificial Sequence
  Synthetic
cauguaaaggaaagaucucu

SEQ ID NO: 384848 - RNA, 21 nt, Artificial Sequence
  Synthetic
gcauguaaaggaaagaucucu

SEQ ID NO: 384849 - RNA, 22 nt, Artificial Sequence
  Synthetic
agcauguaaaggaaagaucucu

SEQ ID NO: 384850 - RNA, 23 nt, Artificial Sequence
  Synthetic
gagcauguaaaggaaagaucucu

SEQ ID NO: 384851 - RNA, 24 nt, Artificial Sequence
  Synthetic
ugagcauguaaaggaaagaucucu

SEQ ID NO: 384852 - RNA, 18 nt, Artificial Sequence
  Synthetic
ucacaccacaggaucucu

SEQ ID NO: 384853 - RNA, 19 nt, Artificial Sequence
  Synthetic
cucacaccacaggaucucu

SEQ ID NO: 384854 - RNA, 20 nt, Artificial Sequence
  Synthetic
gcucacaccacaggaucucu

SEQ ID NO: 384855 - RNA, 21 nt, Artificial Sequence
  Synthetic
cgcucacaccacaggaucucu

SEQ ID NO: 384856 - RNA, 22 nt, Artificial Sequence
  Synthetic
acgcucacaccacaggaucucu

SEQ ID NO: 384857 - RNA, 23 nt, Artificial Sequence
  Synthetic
aacgcucacaccacaggaucucu

SEQ ID NO: 384858 - RNA, 24 nt, Artificial Sequence
  Synthetic
aaacgcucacaccacaggaucucu

SEQ ID NO: 384859 - RNA, 18 nt, Artificial Sequence
  Synthetic
auaauauaccauaucucu

SEQ ID NO: 384860 - RNA, 19 nt, Artificial Sequence
  Synthetic
uauaauauaccauaucucu

SEQ ID NO: 384861 - RNA, 20 nt, Artificial Sequence
  Synthetic
guauaauauaccauaucucu

SEQ ID NO: 384862 - RNA, 21 nt, Artificial Sequence
  Synthetic
uguauaauauaccauaucucu

SEQ ID NO: 384863 - RNA, 22 nt, Artificial Sequence
  Synthetic
guguauaauauaccauaucucu

SEQ ID NO: 384864 - RNA, 23 nt, Artificial Sequence
  Synthetic
uguguauaauauaccauaucucu

SEQ ID NO: 384865 - RNA, 24 nt, Artificial Sequence
  Synthetic
auguguauaauauaccauaucucu

SEQ ID NO: 384866 - RNA, 18 nt, Artificial Sequence
  Synthetic
gccuaaaaagguaucucu

SEQ ID NO: 384867 - RNA, 19 nt, Artificial Sequence
  Synthetic
agccuaaaaagguaucucu

SEQ ID NO: 384868 - RNA, 20 nt, Artificial Sequence
  Synthetic
aagccuaaaaagguaucucu

SEQ ID NO: 384869 - RNA, 21 nt, Artificial Sequence
  Synthetic
gaagccuaaaaagguaucucu

SEQ ID NO: 384870 - RNA, 22 nt, Artificial Sequence
  Synthetic
agaagccuaaaaagguaucucu

SEQ ID NO: 384871 - RNA, 23 nt, Artificial Sequence
  Synthetic
aagaagccuaaaaagguaucucu

SEQ ID NO: 384872 - RNA, 24 nt, Artificial Sequence
  Synthetic
uaagaagccuaaaaagguaucucu

SEQ ID NO: 384873 - RNA, 18 nt, Artificial Sequence
  Synthetic
cucucucucucacucucu

SEQ ID NO: 384874 - RNA, 19 nt, Artificial Sequence
  Synthetic
ucucucucucucacucucu

SEQ ID NO: 384875 - RNA, 20 nt, Artificial Sequence
  Synthetic
cucucucucucucacucucu

SEQ ID NO: 384876 - RNA, 21 nt, Artificial Sequence
  Synthetic
ucucucucucucucacucucu

SEQ ID NO: 384877 - RNA, 22 nt, Artificial Sequence
  Synthetic
cucucucucucucucacucucu

SEQ ID NO: 384878 - RNA, 23 nt, Artificial Sequence
  Synthetic
ucucucucucucucucacucucu

SEQ ID NO: 384879 - RNA, 24 nt, Artificial Sequence
  Synthetic
cucucucucucucucucacucucu

SEQ ID NO: 384880 - RNA, 18 nt, Artificial Sequence
  Synthetic
auuccaggccuccucucu

SEQ ID NO: 384881 - RNA, 19 nt, Artificial Sequence
  Synthetic
uauuccaggccuccucucu

SEQ ID NO: 384882 - RNA, 20 nt, Artificial Sequence
  Synthetic
auauuccaggccuccucucu

SEQ ID NO: 384883 - RNA, 21 nt, Artificial Sequence
  Synthetic
cauauuccaggccuccucucu

SEQ ID NO: 384884 - RNA, 22 nt, Artificial Sequence
  Synthetic
gcauauuccaggccuccucucu

SEQ ID NO: 384885 - RNA, 23 nt, Artificial Sequence
  Synthetic
ugcauauuccaggccuccucucu

SEQ ID NO: 384886 - RNA, 24 nt, Artificial Sequence
  Synthetic
uugcauauuccaggccuccucucu

SEQ ID NO: 384887 - RNA, 18 nt, Artificial Sequence
  Synthetic
gguacccggcagcucucu

SEQ ID NO: 384888 - RNA, 19 nt, Artificial Sequence
  Synthetic
ugguacccggcagcucucu

SEQ ID NO: 384889 - RNA, 20 nt, Artificial Sequence
  Synthetic
cugguacccggcagcucucu

SEQ ID NO: 384890 - RNA, 21 nt, Artificial Sequence
  Synthetic
gcugguacccggcagcucucu

SEQ ID NO: 384891 - RNA, 22 nt, Artificial Sequence
  Synthetic
ugcugguacccggcagcucucu

SEQ ID NO: 384892 - RNA, 23 nt, Artificial Sequence
  Synthetic
augcugguacccggcagcucucu

SEQ ID NO: 384893 - RNA, 24 nt, Artificial Sequence
  Synthetic
aaugcugguacccggcagcucucu

SEQ ID NO: 384894 - RNA, 18 nt, Artificial Sequence
  Synthetic
aaucaggagcugcucucu

SEQ ID NO: 384895 - RNA, 19 nt, Artificial Sequence
  Synthetic
uaaucaggagcugcucucu

SEQ ID NO: 384896 - RNA, 20 nt, Artificial Sequence
  Synthetic
uuaaucaggagcugcucucu

SEQ ID NO: 384897 - RNA, 21 nt, Artificial Sequence
  Synthetic
guuaaucaggagcugcucucu

SEQ ID NO: 384898 - RNA, 22 nt, Artificial Sequence
  Synthetic
gguuaaucaggagcugcucucu

SEQ ID NO: 384899 - RNA, 23 nt, Artificial Sequence
  Synthetic
ggguuaaucaggagcugcucucu

SEQ ID NO: 384900 - RNA, 24 nt, Artificial Sequence
  Synthetic
cggguuaaucaggagcugcucucu

SEQ ID NO: 384901 - RNA, 18 nt, Artificial Sequence
  Synthetic
aaauuuaaaaaucucucu

SEQ ID NO: 384902 - RNA, 19 nt, Artificial Sequence
  Synthetic
caaauuuaaaaaucucucu

SEQ ID NO: 384903 - RNA, 20 nt, Artificial Sequence
  Synthetic
gcaaauuuaaaaaucucucu

SEQ ID NO: 384904 - RNA, 21 nt, Artificial Sequence
  Synthetic
ugcaaauuuaaaaaucucucu

SEQ ID NO: 384905 - RNA, 22 nt, Artificial Sequence
  Synthetic
cugcaaauuuaaaaaucucucu

SEQ ID NO: 384906 - RNA, 23 nt, Artificial Sequence
  Synthetic
acugcaaauuuaaaaaucucucu

SEQ ID NO: 384907 - RNA, 24 nt, Artificial Sequence
  Synthetic
aacugcaaauuuaaaaaucucucu

SEQ ID NO: 384908 - RNA, 18 nt, Artificial Sequence
  Synthetic
aucuuugaagaucucucu

SEQ ID NO: 384909 - RNA, 19 nt, Artificial Sequence
  Synthetic
caucuuugaagaucucucu

SEQ ID NO: 384910 - RNA, 20 nt, Artificial Sequence
  Synthetic
ucaucuuugaagaucucucu

SEQ ID NO: 384911 - RNA, 21 nt, Artificial Sequence
  Synthetic
gucaucuuugaagaucucucu

SEQ ID NO: 384912 - RNA, 22 nt, Artificial Sequence
  Synthetic
ugucaucuuugaagaucucucu

SEQ ID NO: 384913 - RNA, 23 nt, Artificial Sequence
  Synthetic
uugucaucuuugaagaucucucu

SEQ ID NO: 384914 - RNA, 24 nt, Artificial Sequence
  Synthetic
uuugucaucuuugaagaucucucu

SEQ ID NO: 384915 - RNA, 18 nt, Artificial Sequence
  Synthetic
auguaauacccucucucu

SEQ ID NO: 384916 - RNA, 19 nt, Artificial Sequence
  Synthetic
uauguaauacccucucucu

SEQ ID NO: 384917 - RNA, 20 nt, Artificial Sequence
  Synthetic
auauguaauacccucucucu

SEQ ID NO: 384918 - RNA, 21 nt, Artificial Sequence
  Synthetic
aauauguaauacccucucucu

SEQ ID NO: 384919 - RNA, 22 nt, Artificial Sequence
  Synthetic
aaauauguaauacccucucucu

SEQ ID NO: 384920 - RNA, 23 nt, Artificial Sequence
  Synthetic
aaaauauguaauacccucucucu

SEQ ID NO: 384921 - RNA, 24 nt, Artificial Sequence
  Synthetic
aaaaauauguaauacccucucucu

SEQ ID NO: 384922 - RNA, 18 nt, Artificial Sequence
  Synthetic
aguuauuuugcucucucu

SEQ ID NO: 384923 - RNA, 19 nt, Artificial Sequence
  Synthetic
caguuauuuugcucucucu

SEQ ID NO: 384924 - RNA, 20 nt, Artificial Sequence
  Synthetic
ucaguuauuuugcucucucu

SEQ ID NO: 384925 - RNA, 21 nt, Artificial Sequence
  Synthetic
cucaguuauuuugcucucucu

SEQ ID NO: 384926 - RNA, 22 nt, Artificial Sequence
  Synthetic
ucucaguuauuuugcucucucu

SEQ ID NO: 384927 - RNA, 23 nt, Artificial Sequence
  Synthetic
gucucaguuauuuugcucucucu

SEQ ID NO: 384928 - RNA, 24 nt, Artificial Sequence
  Synthetic
ggucucaguuauuuugcucucucu

SEQ ID NO: 384929 - RNA, 18 nt, Artificial Sequence
  Synthetic
cuuaucuugggucucucu

SEQ ID NO: 384930 - RNA, 19 nt, Artificial Sequence
  Synthetic
ucuuaucuugggucucucu

SEQ ID NO: 384931 - RNA, 20 nt, Artificial Sequence
  Synthetic
aucuuaucuugggucucucu

SEQ ID NO: 384932 - RNA, 21 nt, Artificial Sequence
  Synthetic
caucuuaucuugggucucucu

SEQ ID NO: 384933 - RNA, 22 nt, Artificial Sequence
  Synthetic
ucaucuuaucuugggucucucu

SEQ ID NO: 384934 - RNA, 23 nt, Artificial Sequence
  Synthetic
aucaucuuaucuugggucucucu

SEQ ID NO: 384935 - RNA, 24 nt, Artificial Sequence
  Synthetic
aaucaucuuaucuugggucucucu

SEQ ID NO: 384936 - RNA, 18 nt, Artificial Sequence
  Synthetic
acguuguugugucucucu

SEQ ID NO: 384937 - RNA, 19 nt, Artificial Sequence
  Synthetic
aacguuguugugucucucu

SEQ ID NO: 384938 - RNA, 20 nt, Artificial Sequence
  Synthetic
caacguuguugugucucucu

SEQ ID NO: 384939 - RNA, 21 nt, Artificial Sequence
  Synthetic
ucaacguuguugugucucucu

SEQ ID NO: 384940 - RNA, 22 nt, Artificial Sequence
  Synthetic
uucaacguuguugugucucucu

SEQ ID NO: 384941 - RNA, 23 nt, Artificial Sequence
  Synthetic
uuucaacguuguugugucucucu

SEQ ID NO: 384942 - RNA, 24 nt, Artificial Sequence
  Synthetic
auuucaacguuguugugucucucu

SEQ ID NO: 384943 - RNA, 18 nt, Artificial Sequence
  Synthetic
cuaguagagguucucucu

SEQ ID NO: 384944 - RNA, 19 nt, Artificial Sequence
  Synthetic
ccuaguagagguucucucu

SEQ ID NO: 384945 - RNA, 20 nt, Artificial Sequence
  Synthetic
accuaguagagguucucucu

SEQ ID NO: 384946 - RNA, 21 nt, Artificial Sequence
  Synthetic
gaccuaguagagguucucucu

SEQ ID NO: 384947 - RNA, 22 nt, Artificial Sequence
  Synthetic
ugaccuaguagagguucucucu

SEQ ID NO: 384948 - RNA, 23 nt, Artificial Sequence
  Synthetic
cugaccuaguagagguucucucu

SEQ ID NO: 384949 - RNA, 24 nt, Artificial Sequence
  Synthetic
acugaccuaguagagguucucucu

SEQ ID NO: 384950 - RNA, 18 nt, Artificial Sequence
  Synthetic
accauucaacaagucucu

SEQ ID NO: 384951 - RNA, 19 nt, Artificial Sequence
  Synthetic
aaccauucaacaagucucu

SEQ ID NO: 384952 - RNA, 20 nt, Artificial Sequence
  Synthetic
aaaccauucaacaagucucu

SEQ ID NO: 384953 - RNA, 21 nt, Artificial Sequence
  Synthetic
aaaaccauucaacaagucucu

SEQ ID NO: 384954 - RNA, 22 nt, Artificial Sequence
  Synthetic
caaaaccauucaacaagucucu

SEQ ID NO: 384955 - RNA, 23 nt, Artificial Sequence
  Synthetic
ucaaaaccauucaacaagucucu

SEQ ID NO: 384956 - RNA, 24 nt, Artificial Sequence
  Synthetic
gucaaaaccauucaacaagucucu

SEQ ID NO: 384957 - RNA, 18 nt, Artificial Sequence
  Synthetic
gccauucaacaagucucu

SEQ ID NO: 384958 - RNA, 19 nt, Artificial Sequence
  Synthetic
agccauucaacaagucucu

SEQ ID NO: 384959 - RNA, 20 nt, Artificial Sequence
  Synthetic
aagccauucaacaagucucu

SEQ ID NO: 384960 - RNA, 21 nt, Artificial Sequence
  Synthetic
aaagccauucaacaagucucu

SEQ ID NO: 384961 - RNA, 22 nt, Artificial Sequence
  Synthetic
caaagccauucaacaagucucu

SEQ ID NO: 384962 - RNA, 23 nt, Artificial Sequence
  Synthetic
ucaaagccauucaacaagucucu

SEQ ID NO: 384963 - RNA, 24 nt, Artificial Sequence
  Synthetic
gucaaagccauucaacaagucucu

SEQ ID NO: 384964 - RNA, 18 nt, Artificial Sequence
  Synthetic
uuuucccuuacagucucu

SEQ ID NO: 384965 - RNA, 19 nt, Artificial Sequence
  Synthetic
auuuucccuuacagucucu

SEQ ID NO: 384966 - RNA, 20 nt, Artificial Sequence
  Synthetic
uauuuucccuuacagucucu

SEQ ID NO: 384967 - RNA, 21 nt, Artificial Sequence
  Synthetic
cuauuuucccuuacagucucu

SEQ ID NO: 384968 - RNA, 22 nt, Artificial Sequence
  Synthetic
ucuauuuucccuuacagucucu

SEQ ID NO: 384969 - RNA, 23 nt, Artificial Sequence
  Synthetic
cucuauuuucccuuacagucucu

SEQ ID NO: 384970 - RNA, 24 nt, Artificial Sequence
  Synthetic
ucucuauuuucccuuacagucucu

SEQ ID NO: 384971 - RNA, 18 nt, Artificial Sequence
  Synthetic
ugcaggauaauagucucu

SEQ ID NO: 384972 - RNA, 19 nt, Artificial Sequence
  Synthetic
cugcaggauaauagucucu

SEQ ID NO: 384973 - RNA, 20 nt, Artificial Sequence
  Synthetic
ccugcaggauaauagucucu

SEQ ID NO: 384974 - RNA, 21 nt, Artificial Sequence
  Synthetic
cccugcaggauaauagucucu

SEQ ID NO: 384975 - RNA, 22 nt, Artificial Sequence
  Synthetic
acccugcaggauaauagucucu

SEQ ID NO: 384976 - RNA, 23 nt, Artificial Sequence
  Synthetic
aacccugcaggauaauagucucu

SEQ ID NO: 384977 - RNA, 24 nt, Artificial Sequence
  Synthetic
aaacccugcaggauaauagucucu

SEQ ID NO: 384978 - RNA, 18 nt, Artificial Sequence
  Synthetic
cugagagcaguagucucu

SEQ ID NO: 384979 - RNA, 19 nt, Artificial Sequence
  Synthetic
gcugagagcaguagucucu

SEQ ID NO: 384980 - RNA, 20 nt, Artificial Sequence
  Synthetic
ugcugagagcaguagucucu

SEQ ID NO: 384981 - RNA, 21 nt, Artificial Sequence
  Synthetic
uugcugagagcaguagucucu

SEQ ID NO: 384982 - RNA, 22 nt, Artificial Sequence
  Synthetic
uuugcugagagcaguagucucu

SEQ ID NO: 384983 - RNA, 23 nt, Artificial Sequence
  Synthetic
guuugcugagagcaguagucucu

SEQ ID NO: 384984 - RNA, 24 nt, Artificial Sequence
  Synthetic
gguuugcugagagcaguagucucu

SEQ ID NO: 384985 - RNA, 18 nt, Artificial Sequence
  Synthetic
aucuuaucuugggucucu

SEQ ID NO: 384986 - RNA, 19 nt, Artificial Sequence
  Synthetic
caucuuaucuugggucucu

SEQ ID NO: 384987 - RNA, 20 nt, Artificial Sequence
  Synthetic
ucaucuuaucuugggucucu

SEQ ID NO: 384988 - RNA, 21 nt, Artificial Sequence
  Synthetic
aucaucuuaucuugggucucu

SEQ ID NO: 384989 - RNA, 22 nt, Artificial Sequence
  Synthetic
aaucaucuuaucuugggucucu

SEQ ID NO: 384990 - RNA, 23 nt, Artificial Sequence
  Synthetic
uaaucaucuuaucuugggucucu

SEQ ID NO: 384991 - RNA, 24 nt, Artificial Sequence
  Synthetic
cuaaucaucuuaucuugggucucu

SEQ ID NO: 384992 - RNA, 18 nt, Artificial Sequence
  Synthetic
aaaugaacaauggucucu

SEQ ID NO: 384993 - RNA, 19 nt, Artificial Sequence
  Synthetic
gaaaugaacaauggucucu

SEQ ID NO: 384994 - RNA, 20 nt, Artificial Sequence
  Synthetic
ugaaaugaacaauggucucu

SEQ ID NO: 384995 - RNA, 21 nt, Artificial Sequence
  Synthetic
gugaaaugaacaauggucucu

SEQ ID NO: 384996 - RNA, 22 nt, Artificial Sequence
  Synthetic
agugaaaugaacaauggucucu

SEQ ID NO: 384997 - RNA, 23 nt, Artificial Sequence
  Synthetic
gagugaaaugaacaauggucucu

SEQ ID NO: 384998 - RNA, 24 nt, Artificial Sequence
  Synthetic
ugagugaaaugaacaauggucucu

SEQ ID NO: 384999 - RNA, 18 nt, Artificial Sequence
  Synthetic
caagggcugauggucucu

SEQ ID NO: 385000 - RNA, 19 nt, Artificial Sequence
  Synthetic
gcaagggcugauggucucu

SEQ ID NO: 385001 - RNA, 20 nt, Artificial Sequence
  Synthetic
ggcaagggcugauggucucu

SEQ ID NO: 385002 - RNA, 21 nt, Artificial Sequence
  Synthetic
uggcaagggcugauggucucu

SEQ ID NO: 385003 - RNA, 22 nt, Artificial Sequence
  Synthetic
auggcaagggcugauggucucu

SEQ ID NO: 385004 - RNA, 23 nt, Artificial Sequence
  Synthetic
uauggcaagggcugauggucucu

SEQ ID NO: 385005 - RNA, 24 nt, Artificial Sequence
  Synthetic
guauggcaagggcugauggucucu

SEQ ID NO: 385006 - RNA, 18 nt, Artificial Sequence
  Synthetic
aauuugcagagugucucu

SEQ ID NO: 385007 - RNA, 19 nt, Artificial Sequence
  Synthetic
caauuugcagagugucucu

SEQ ID NO: 385008 - RNA, 20 nt, Artificial Sequence
  Synthetic
acaauuugcagagugucucu

SEQ ID NO: 385009 - RNA, 21 nt, Artificial Sequence
  Synthetic
uacaauuugcagagugucucu

SEQ ID NO: 385010 - RNA, 22 nt, Artificial Sequence
  Synthetic
auacaauuugcagagugucucu

SEQ ID NO: 385011 - RNA, 23 nt, Artificial Sequence
  Synthetic
aauacaauuugcagagugucucu

SEQ ID NO: 385012 - RNA, 24 nt, Artificial Sequence
  Synthetic
uaauacaauuugcagagugucucu

SEQ ID NO: 385013 - RNA, 18 nt, Artificial Sequence
  Synthetic
uaauagagacgugucucu

SEQ ID NO: 385014 - RNA, 19 nt, Artificial Sequence
  Synthetic
cuaauagagacgugucucu

SEQ ID NO: 385015 - RNA, 20 nt, Artificial Sequence
  Synthetic
acuaauagagacgugucucu

SEQ ID NO: 385016 - RNA, 21 nt, Artificial Sequence
  Synthetic
gacuaauagagacgugucucu

SEQ ID NO: 385017 - RNA, 22 nt, Artificial Sequence
  Synthetic
ggacuaauagagacgugucucu

SEQ ID NO: 385018 - RNA, 23 nt, Artificial Sequence
  Synthetic
uggacuaauagagacgugucucu

SEQ ID NO: 385019 - RNA, 24 nt, Artificial Sequence
  Synthetic
auggacuaauagagacgugucucu

SEQ ID NO: 385020 - RNA, 18 nt, Artificial Sequence
  Synthetic
uaagauugacgugucucu

SEQ ID NO: 385021 - RNA, 19 nt, Artificial Sequence
  Synthetic
uuaagauugacgugucucu

SEQ ID NO: 385022 - RNA, 20 nt, Artificial Sequence
  Synthetic
uuuaagauugacgugucucu

SEQ ID NO: 385023 - RNA, 21 nt, Artificial Sequence
  Synthetic
cuuuaagauugacgugucucu

SEQ ID NO: 385024 - RNA, 22 nt, Artificial Sequence
  Synthetic
ccuuuaagauugacgugucucu

SEQ ID NO: 385025 - RNA, 23 nt, Artificial Sequence
  Synthetic
uccuuuaagauugacgugucucu

SEQ ID NO: 385026 - RNA, 24 nt, Artificial Sequence
  Synthetic
auccuuuaagauugacgugucucu

SEQ ID NO: 385027 - RNA, 18 nt, Artificial Sequence
  Synthetic
caacguuguugugucucu

SEQ ID NO: 385028 - RNA, 19 nt, Artificial Sequence
  Synthetic
ucaacguuguugugucucu

SEQ ID NO: 385029 - RNA, 20 nt, Artificial Sequence
  Synthetic
uucaacguuguugugucucu

SEQ ID NO: 385030 - RNA, 21 nt, Artificial Sequence
  Synthetic
uuucaacguuguugugucucu

SEQ ID NO: 385031 - RNA, 22 nt, Artificial Sequence
  Synthetic
auuucaacguuguugugucucu

SEQ ID NO: 385032 - RNA, 23 nt, Artificial Sequence
  Synthetic
aauuucaacguuguugugucucu

SEQ ID NO: 385033 - RNA, 24 nt, Artificial Sequence
  Synthetic
gaauuucaacguuguugugucucu

SEQ ID NO: 385034 - RNA, 18 nt, Artificial Sequence
  Synthetic
auagggacaauugucucu

SEQ ID NO: 385035 - RNA, 19 nt, Artificial Sequence
  Synthetic
aauagggacaauugucucu

SEQ ID NO: 385036 - RNA, 20 nt, Artificial Sequence
  Synthetic
uaauagggacaauugucucu

SEQ ID NO: 385037 - RNA, 21 nt, Artificial Sequence
  Synthetic
auaauagggacaauugucucu

SEQ ID NO: 385038 - RNA, 22 nt, Artificial Sequence
  Synthetic
cauaauagggacaauugucucu

SEQ ID NO: 385039 - RNA, 23 nt, Artificial Sequence
  Synthetic
ucauaauagggacaauugucucu

SEQ ID NO: 385040 - RNA, 24 nt, Artificial Sequence
  Synthetic
gucauaauagggacaauugucucu

SEQ ID NO: 385041 - RNA, 18 nt, Artificial Sequence
  Synthetic
ugaccccuccaauucucu

SEQ ID NO: 385042 - RNA, 19 nt, Artificial Sequence
  Synthetic
cugaccccuccaauucucu

SEQ ID NO: 385043 - RNA, 20 nt, Artificial Sequence
  Synthetic
ucugaccccuccaauucucu

SEQ ID NO: 385044 - RNA, 21 nt, Artificial Sequence
  Synthetic
uucugaccccuccaauucucu

SEQ ID NO: 385045 - RNA, 22 nt, Artificial Sequence
  Synthetic
cuucugaccccuccaauucucu

SEQ ID NO: 385046 - RNA, 23 nt, Artificial Sequence
  Synthetic
ucuucugaccccuccaauucucu

SEQ ID NO: 385047 - RNA, 24 nt, Artificial Sequence
  Synthetic
gucuucugaccccuccaauucucu

SEQ ID NO: 385048 - RNA, 18 nt, Artificial Sequence
  Synthetic
gugaaucuuccauucucu

SEQ ID NO: 385049 - RNA, 19 nt, Artificial Sequence
  Synthetic
ugugaaucuuccauucucu

SEQ ID NO: 385050 - RNA, 20 nt, Artificial Sequence
  Synthetic
augugaaucuuccauucucu

SEQ ID NO: 385051 - RNA, 21 nt, Artificial Sequence
  Synthetic
uaugugaaucuuccauucucu

SEQ ID NO: 385052 - RNA, 22 nt, Artificial Sequence
  Synthetic
cuaugugaaucuuccauucucu

SEQ ID NO: 385053 - RNA, 23 nt, Artificial Sequence
  Synthetic
acuaugugaaucuuccauucucu

SEQ ID NO: 385054 - RNA, 24 nt, Artificial Sequence
  Synthetic
gacuaugugaaucuuccauucucu

SEQ ID NO: 385055 - RNA, 18 nt, Artificial Sequence
  Synthetic
aaugcuauuucauucucu

SEQ ID NO: 385056 - RNA, 19 nt, Artificial Sequence
  Synthetic
aaaugcuauuucauucucu

SEQ ID NO: 385057 - RNA, 20 nt, Artificial Sequence
  Synthetic
aaaaugcuauuucauucucu

SEQ ID NO: 385058 - RNA, 21 nt, Artificial Sequence
  Synthetic
uaaaaugcuauuucauucucu

SEQ ID NO: 385059 - RNA, 22 nt, Artificial Sequence
  Synthetic
uuaaaaugcuauuucauucucu

SEQ ID NO: 385060 - RNA, 23 nt, Artificial Sequence
  Synthetic
uuuaaaaugcuauuucauucucu

SEQ ID NO: 385061 - RNA, 24 nt, Artificial Sequence
  Synthetic
uuuuaaaaugcuauuucauucucu

SEQ ID NO: 385062 - RNA, 18 nt, Artificial Sequence
  Synthetic
uauucuccauuauucucu

SEQ ID NO: 385063 - RNA, 19 nt, Artificial Sequence
  Synthetic
uuauucuccauuauucucu

SEQ ID NO: 385064 - RNA, 20 nt, Artificial Sequence
  Synthetic
auuauucuccauuauucucu

SEQ ID NO: 385065 - RNA, 21 nt, Artificial Sequence
  Synthetic
cauuauucuccauuauucucu

SEQ ID NO: 385066 - RNA, 22 nt, Artificial Sequence
  Synthetic
ucauuauucuccauuauucucu

SEQ ID NO: 385067 - RNA, 23 nt, Artificial Sequence
  Synthetic
aucauuauucuccauuauucucu

SEQ ID NO: 385068 - RNA, 24 nt, Artificial Sequence
  Synthetic
uaucauuauucuccauuauucucu

SEQ ID NO: 385069 - RNA, 18 nt, Artificial Sequence
  Synthetic
cuagguauuuuauucucu

SEQ ID NO: 385070 - RNA, 19 nt, Artificial Sequence
  Synthetic
ccuagguauuuuauucucu

SEQ ID NO: 385071 - RNA, 20 nt, Artificial Sequence
  Synthetic
uccuagguauuuuauucucu

SEQ ID NO: 385072 - RNA, 21 nt, Artificial Sequence
  Synthetic
uuccuagguauuuuauucucu

SEQ ID NO: 385073 - RNA, 22 nt, Artificial Sequence
  Synthetic
auuccuagguauuuuauucucu

SEQ ID NO: 385074 - RNA, 23 nt, Artificial Sequence
  Synthetic
gauuccuagguauuuuauucucu

SEQ ID NO: 385075 - RNA, 24 nt, Artificial Sequence
  Synthetic
ggauuccuagguauuuuauucucu

SEQ ID NO: 385076 - RNA, 18 nt, Artificial Sequence
  Synthetic
guagguauuuuauucucu

SEQ ID NO: 385077 - RNA, 19 nt, Artificial Sequence
  Synthetic
uguagguauuuuauucucu

SEQ ID NO: 385078 - RNA, 20 nt, Artificial Sequence
  Synthetic
uuguagguauuuuauucucu

SEQ ID NO: 385079 - RNA, 21 nt, Artificial Sequence
  Synthetic
uuuguagguauuuuauucucu

SEQ ID NO: 385080 - RNA, 22 nt, Artificial Sequence
  Synthetic
auuuguagguauuuuauucucu

SEQ ID NO: 385081 - RNA, 23 nt, Artificial Sequence
  Synthetic
uauuuguagguauuuuauucucu

SEQ ID NO: 385082 - RNA, 24 nt, Artificial Sequence
  Synthetic
guauuuguagguauuuuauucucu

SEQ ID NO: 385083 - RNA, 18 nt, Artificial Sequence
  Synthetic
aguaacauuaacuucucu

SEQ ID NO: 385084 - RNA, 19 nt, Artificial Sequence
  Synthetic
aaguaacauuaacuucucu

SEQ ID NO: 385085 - RNA, 20 nt, Artificial Sequence
  Synthetic
gaaguaacauuaacuucucu

SEQ ID NO: 385086 - RNA, 21 nt, Artificial Sequence
  Synthetic
ugaaguaacauuaacuucucu

SEQ ID NO: 385087 - RNA, 22 nt, Artificial Sequence
  Synthetic
augaaguaacauuaacuucucu

SEQ ID NO: 385088 - RNA, 23 nt, Artificial Sequence
  Synthetic
aaugaaguaacauuaacuucucu

SEQ ID NO: 385089 - RNA, 24 nt, Artificial Sequence
  Synthetic
aaaugaaguaacauuaacuucucu

SEQ ID NO: 385090 - RNA, 18 nt, Artificial Sequence
  Synthetic
caacugaaacacuucucu

SEQ ID NO: 385091 - RNA, 19 nt, Artificial Sequence
  Synthetic
ccaacugaaacacuucucu

SEQ ID NO: 385092 - RNA, 20 nt, Artificial Sequence
  Synthetic
cccaacugaaacacuucucu

SEQ ID NO: 385093 - RNA, 21 nt, Artificial Sequence
  Synthetic
ucccaacugaaacacuucucu

SEQ ID NO: 385094 - RNA, 22 nt, Artificial Sequence
  Synthetic
cucccaacugaaacacuucucu

SEQ ID NO: 385095 - RNA, 23 nt, Artificial Sequence
  Synthetic
ccucccaacugaaacacuucucu

SEQ ID NO: 385096 - RNA, 24 nt, Artificial Sequence
  Synthetic
gccucccaacugaaacacuucucu

SEQ ID NO: 385097 - RNA, 18 nt, Artificial Sequence
  Synthetic
aaaaauguugacuucucu

SEQ ID NO: 385098 - RNA, 19 nt, Artificial Sequence
  Synthetic
aaaaaauguugacuucucu

SEQ ID NO: 385099 - RNA, 20 nt, Artificial Sequence
  Synthetic
aaaaaaauguugacuucucu

SEQ ID NO: 385100 - RNA, 21 nt, Artificial Sequence
  Synthetic
aaaaaaaauguugacuucucu

SEQ ID NO: 385101 - RNA, 22 nt, Artificial Sequence
  Synthetic
aaaaaaaaauguugacuucucu

SEQ ID NO: 385102 - RNA, 23 nt, Artificial Sequence
  Synthetic
aaaaaaaaaauguugacuucucu

SEQ ID NO: 385103 - RNA, 24 nt, Artificial Sequence
  Synthetic
gaaaaaaaaaauguugacuucucu

SEQ ID NO: 385104 - RNA, 18 nt, Artificial Sequence
  Synthetic
ucucuagauuccuucucu

SEQ ID NO: 385105 - RNA, 19 nt, Artificial Sequence
  Synthetic
cucucuagauuccuucucu

SEQ ID NO: 385106 - RNA, 20 nt, Artificial Sequence
  Synthetic
ccucucuagauuccuucucu

SEQ ID NO: 385107 - RNA, 21 nt, Artificial Sequence
  Synthetic
gccucucuagauuccuucucu

SEQ ID NO: 385108 - RNA, 22 nt, Artificial Sequence
  Synthetic
ugccucucuagauuccuucucu

SEQ ID NO: 385109 - RNA, 23 nt, Artificial Sequence
  Synthetic
uugccucucuagauuccuucucu

SEQ ID NO: 385110 - RNA, 24 nt, Artificial Sequence
  Synthetic
auugccucucuagauuccuucucu

SEQ ID NO: 385111 - RNA, 18 nt, Artificial Sequence
  Synthetic
gauuggcauggcuucucu

SEQ ID NO: 385112 - RNA, 19 nt, Artificial Sequence
  Synthetic
ggauuggcauggcuucucu

SEQ ID NO: 385113 - RNA, 20 nt, Artificial Sequence
  Synthetic
uggauuggcauggcuucucu

SEQ ID NO: 385114 - RNA, 21 nt, Artificial Sequence
  Synthetic
guggauuggcauggcuucucu

SEQ ID NO: 385115 - RNA, 22 nt, Artificial Sequence
  Synthetic
gguggauuggcauggcuucucu

SEQ ID NO: 385116 - RNA, 23 nt, Artificial Sequence
  Synthetic
ggguggauuggcauggcuucucu

SEQ ID NO: 385117 - RNA, 24 nt, Artificial Sequence
  Synthetic
uggguggauuggcauggcuucucu

SEQ ID NO: 385118 - RNA, 18 nt, Artificial Sequence
  Synthetic
gauuaagcaaucuucucu

SEQ ID NO: 385119 - RNA, 19 nt, Artificial Sequence
  Synthetic
ggauuaagcaaucuucucu

SEQ ID NO: 385120 - RNA, 20 nt, Artificial Sequence
  Synthetic
gggauuaagcaaucuucucu

SEQ ID NO: 385121 - RNA, 21 nt, Artificial Sequence
  Synthetic
agggauuaagcaaucuucucu

SEQ ID NO: 385122 - RNA, 22 nt, Artificial Sequence
  Synthetic
gagggauuaagcaaucuucucu

SEQ ID NO: 385123 - RNA, 23 nt, Artificial Sequence
  Synthetic
agagggauuaagcaaucuucucu

SEQ ID NO: 385124 - RNA, 24 nt, Artificial Sequence
  Synthetic
cagagggauuaagcaaucuucucu

SEQ ID NO: 385125 - RNA, 18 nt, Artificial Sequence
  Synthetic
uuuaauuuuaucuucucu

SEQ ID NO: 385126 - RNA, 19 nt, Artificial Sequence
  Synthetic
guuuaauuuuaucuucucu

SEQ ID NO: 385127 - RNA, 20 nt, Artificial Sequence
  Synthetic
gguuuaauuuuaucuucucu

SEQ ID NO: 385128 - RNA, 21 nt, Artificial Sequence
  Synthetic
ugguuuaauuuuaucuucucu

SEQ ID NO: 385129 - RNA, 22 nt, Artificial Sequence
  Synthetic
augguuuaauuuuaucuucucu

SEQ ID NO: 385130 - RNA, 23 nt, Artificial Sequence
  Synthetic
caugguuuaauuuuaucuucucu

SEQ ID NO: 385131 - RNA, 24 nt, Artificial Sequence
  Synthetic
ucaugguuuaauuuuaucuucucu

SEQ ID NO: 385132 - RNA, 18 nt, Artificial Sequence
  Synthetic
cuuacgguuuucuucucu

SEQ ID NO: 385133 - RNA, 19 nt, Artificial Sequence
  Synthetic
ccuuacgguuuucuucucu

SEQ ID NO: 385134 - RNA, 20 nt, Artificial Sequence
  Synthetic
cccuuacgguuuucuucucu

SEQ ID NO: 385135 - RNA, 21 nt, Artificial Sequence
  Synthetic
acccuuacgguuuucuucucu

SEQ ID NO: 385136 - RNA, 22 nt, Artificial Sequence
  Synthetic
aacccuuacgguuuucuucucu

SEQ ID NO: 385137 - RNA, 23 nt, Artificial Sequence
  Synthetic
gaacccuuacgguuuucuucucu

SEQ ID NO: 385138 - RNA, 24 nt, Artificial Sequence
  Synthetic
ugaacccuuacgguuuucuucucu

SEQ ID NO: 385139 - RNA, 18 nt, Artificial Sequence
  Synthetic
cauucugaaagguucucu

SEQ ID NO: 385140 - RNA, 19 nt, Artificial Sequence
  Synthetic
ucauucugaaagguucucu

SEQ ID NO: 385141 - RNA, 20 nt, Artificial Sequence
  Synthetic
cucauucugaaagguucucu

SEQ ID NO: 385142 - RNA, 21 nt, Artificial Sequence
  Synthetic
ucucauucugaaagguucucu

SEQ ID NO: 385143 - RNA, 22 nt, Artificial Sequence
  Synthetic
cucucauucugaaagguucucu

SEQ ID NO: 385144 - RNA, 23 nt, Artificial Sequence
  Synthetic
ucucucauucugaaagguucucu

SEQ ID NO: 385145 - RNA, 24 nt, Artificial Sequence
  Synthetic
aucucucauucugaaagguucucu

SEQ ID NO: 385146 - RNA, 18 nt, Artificial Sequence
  Synthetic
accuaguagagguucucu

SEQ ID NO: 385147 - RNA, 19 nt, Artificial Sequence
  Synthetic
gaccuaguagagguucucu

SEQ ID NO: 385148 - RNA, 20 nt, Artificial Sequence
  Synthetic
ugaccuaguagagguucucu

SEQ ID NO: 385149 - RNA, 21 nt, Artificial Sequence
  Synthetic
cugaccuaguagagguucucu

SEQ ID NO: 385150 - RNA, 22 nt, Artificial Sequence
  Synthetic
acugaccuaguagagguucucu

SEQ ID NO: 385151 - RNA, 23 nt, Artificial Sequence
  Synthetic
cacugaccuaguagagguucucu

SEQ ID NO: 385152 - RNA, 24 nt, Artificial Sequence
  Synthetic
gcacugaccuaguagagguucucu

SEQ ID NO: 385153 - RNA, 18 nt, Artificial Sequence
  Synthetic
uuacagguuggguucucu

SEQ ID NO: 385154 - RNA, 19 nt, Artificial Sequence
  Synthetic
guuacagguuggguucucu

SEQ ID NO: 385155 - RNA, 20 nt, Artificial Sequence
  Synthetic
uguuacagguuggguucucu

SEQ ID NO: 385156 - RNA, 21 nt, Artificial Sequence
  Synthetic
guguuacagguuggguucucu

SEQ ID NO: 385157 - RNA, 22 nt, Artificial Sequence
  Synthetic
gguguuacagguuggguucucu

SEQ ID NO: 385158 - RNA, 23 nt, Artificial Sequence
  Synthetic
agguguuacagguuggguucucu

SEQ ID NO: 385159 - RNA, 24 nt, Artificial Sequence
  Synthetic
uagguguuacagguuggguucucu

SEQ ID NO: 385160 - RNA, 18 nt, Artificial Sequence
  Synthetic
ucugaguuuuuguucucu

SEQ ID NO: 385161 - RNA, 19 nt, Artificial Sequence
  Synthetic
uucugaguuuuuguucucu

SEQ ID NO: 385162 - RNA, 20 nt, Artificial Sequence
  Synthetic
cuucugaguuuuuguucucu

SEQ ID NO: 385163 - RNA, 21 nt, Artificial Sequence
  Synthetic
gcuucugaguuuuuguucucu

SEQ ID NO: 385164 - RNA, 22 nt, Artificial Sequence
  Synthetic
agcuucugaguuuuuguucucu

SEQ ID NO: 385165 - RNA, 23 nt, Artificial Sequence
  Synthetic
uagcuucugaguuuuuguucucu

SEQ ID NO: 385166 - RNA, 24 nt, Artificial Sequence
  Synthetic
guagcuucugaguuuuuguucucu

SEQ ID NO: 385167 - RNA, 18 nt, Artificial Sequence
  Synthetic
aaacaggccuauuucucu

SEQ ID NO: 385168 - RNA, 19 nt, Artificial Sequence
  Synthetic
gaaacaggccuauuucucu

SEQ ID NO: 385169 - RNA, 20 nt, Artificial Sequence
  Synthetic
agaaacaggccuauuucucu

SEQ ID NO: 385170 - RNA, 21 nt, Artificial Sequence
  Synthetic
aagaaacaggccuauuucucu

SEQ ID NO: 385171 - RNA, 22 nt, Artificial Sequence
  Synthetic
aaagaaacaggccuauuucucu

SEQ ID NO: 385172 - RNA, 23 nt, Artificial Sequence
  Synthetic
uaaagaaacaggccuauuucucu

SEQ ID NO: 385173 - RNA, 24 nt, Artificial Sequence
  Synthetic
uuaaagaaacaggccuauuucucu

SEQ ID NO: 385174 - RNA, 18 nt, Artificial Sequence
  Synthetic
cuguuuuuaacuuucucu

SEQ ID NO: 385175 - RNA, 19 nt, Artificial Sequence
  Synthetic
ccuguuuuuaacuuucucu

SEQ ID NO: 385176 - RNA, 20 nt, Artificial Sequence
  Synthetic
cccuguuuuuaacuuucucu

SEQ ID NO: 385177 - RNA, 21 nt, Artificial Sequence
  Synthetic
ccccuguuuuuaacuuucucu

SEQ ID NO: 385178 - RNA, 22 nt, Artificial Sequence
  Synthetic
uccccuguuuuuaacuuucucu

SEQ ID NO: 385179 - RNA, 23 nt, Artificial Sequence
  Synthetic
uuccccuguuuuuaacuuucucu

SEQ ID NO: 385180 - RNA, 24 nt, Artificial Sequence
  Synthetic
uuuccccuguuuuuaacuuucucu

SEQ ID NO: 385181 - RNA, 18 nt, Artificial Sequence
  Synthetic
gggagguucacuuucucu

SEQ ID NO: 385182 - RNA, 19 nt, Artificial Sequence
  Synthetic
ugggagguucacuuucucu

SEQ ID NO: 385183 - RNA, 20 nt, Artificial Sequence
  Synthetic
augggagguucacuuucucu

SEQ ID NO: 385184 - RNA, 21 nt, Artificial Sequence
  Synthetic
uaugggagguucacuuucucu

SEQ ID NO: 385185 - RNA, 22 nt, Artificial Sequence
  Synthetic
guaugggagguucacuuucucu

SEQ ID NO: 385186 - RNA, 23 nt, Artificial Sequence
  Synthetic
gguaugggagguucacuuucucu

SEQ ID NO: 385187 - RNA, 24 nt, Artificial Sequence
  Synthetic
agguaugggagguucacuuucucu

SEQ ID NO: 385188 - RNA, 18 nt, Artificial Sequence
  Synthetic
acuaacccuacuuucucu

SEQ ID NO: 385189 - RNA, 19 nt, Artificial Sequence
  Synthetic
aacuaacccuacuuucucu

SEQ ID NO: 385190 - RNA, 20 nt, Artificial Sequence
  Synthetic
aaacuaacccuacuuucucu

SEQ ID NO: 385191 - RNA, 21 nt, Artificial Sequence
  Synthetic
uaaacuaacccuacuuucucu

SEQ ID NO: 385192 - RNA, 22 nt, Artificial Sequence
  Synthetic
guaaacuaacccuacuuucucu

SEQ ID NO: 385193 - RNA, 23 nt, Artificial Sequence
  Synthetic
aguaaacuaacccuacuuucucu

SEQ ID NO: 385194 - RNA, 24 nt, Artificial Sequence
  Synthetic
uaguaaacuaacccuacuuucucu

SEQ ID NO: 385195 - RNA, 18 nt, Artificial Sequence
  Synthetic
gugaucagugguuucucu

SEQ ID NO: 385196 - RNA, 19 nt, Artificial Sequence
  Synthetic
ugugaucagugguuucucu

SEQ ID NO: 385197 - RNA, 20 nt, Artificial Sequence
  Synthetic
augugaucagugguuucucu

SEQ ID NO: 385198 - RNA, 21 nt, Artificial Sequence
  Synthetic
aaugugaucagugguuucucu

SEQ ID NO: 385199 - RNA, 22 nt, Artificial Sequence
  Synthetic
uaaugugaucagugguuucucu

SEQ ID NO: 385200 - RNA, 23 nt, Artificial Sequence
  Synthetic
auaaugugaucagugguuucucu

SEQ ID NO: 385201 - RNA, 24 nt, Artificial Sequence
  Synthetic
aauaaugugaucagugguuucucu

SEQ ID NO: 385202 - RNA, 18 nt, Artificial Sequence
  Synthetic
auuaacucuuguuucucu

SEQ ID NO: 385203 - RNA, 19 nt, Artificial Sequence
  Synthetic
aauuaacucuuguuucucu

SEQ ID NO: 385204 - RNA, 20 nt, Artificial Sequence
  Synthetic
aaauuaacucuuguuucucu

SEQ ID NO: 385205 - RNA, 21 nt, Artificial Sequence
  Synthetic
caaauuaacucuuguuucucu

SEQ ID NO: 385206 - RNA, 22 nt, Artificial Sequence
  Synthetic
ucaaauuaacucuuguuucucu

SEQ ID NO: 385207 - RNA, 23 nt, Artificial Sequence
  Synthetic
cucaaauuaacucuuguuucucu

SEQ ID NO: 385208 - RNA, 24 nt, Artificial Sequence
  Synthetic
ccucaaauuaacucuuguuucucu

SEQ ID NO: 385209 - RNA, 18 nt, Artificial Sequence
  Synthetic
uauuccuuuuguuucucu

SEQ ID NO: 385210 - RNA, 19 nt, Artificial Sequence
  Synthetic
uuauuccuuuuguuucucu

SEQ ID NO: 385211 - RNA, 20 nt, Artificial Sequence
  Synthetic
cuuauuccuuuuguuucucu

SEQ ID NO: 385212 - RNA, 21 nt, Artificial Sequence
  Synthetic
ucuuauuccuuuuguuucucu

SEQ ID NO: 385213 - RNA, 22 nt, Artificial Sequence
  Synthetic
cucuuauuccuuuuguuucucu

SEQ ID NO: 385214 - RNA, 23 nt, Artificial Sequence
  Synthetic
ucucuuauuccuuuuguuucucu

SEQ ID NO: 385215 - RNA, 24 nt, Artificial Sequence
  Synthetic
uucucuuauuccuuuuguuucucu

SEQ ID NO: 385216 - RNA, 18 nt, Artificial Sequence
  Synthetic
uacuuuccuguuuucucu

SEQ ID NO: 385217 - RNA, 19 nt, Artificial Sequence
  Synthetic
auacuuuccuguuuucucu

SEQ ID NO: 385218 - RNA, 20 nt, Artificial Sequence
  Synthetic
cauacuuuccuguuuucucu

SEQ ID NO: 385219 - RNA, 21 nt, Artificial Sequence
  Synthetic
ccauacuuuccuguuuucucu

SEQ ID NO: 385220 - RNA, 22 nt, Artificial Sequence
  Synthetic
cccauacuuuccuguuuucucu

SEQ ID NO: 385221 - RNA, 23 nt, Artificial Sequence
  Synthetic
ucccauacuuuccuguuuucucu

SEQ ID NO: 385222 - RNA, 24 nt, Artificial Sequence
  Synthetic
cucccauacuuuccuguuuucucu

SEQ ID NO: 385223 - RNA, 18 nt, Artificial Sequence
  Synthetic
uacucguuuguuuucucu

SEQ ID NO: 385224 - RNA, 19 nt, Artificial Sequence
  Synthetic
cuacucguuuguuuucucu

SEQ ID NO: 385225 - RNA, 20 nt, Artificial Sequence
  Synthetic
acuacucguuuguuuucucu

SEQ ID NO: 385226 - RNA, 21 nt, Artificial Sequence
  Synthetic
cacuacucguuuguuuucucu

SEQ ID NO: 385227 - RNA, 22 nt, Artificial Sequence
  Synthetic
ucacuacucguuuguuuucucu

SEQ ID NO: 385228 - RNA, 23 nt, Artificial Sequence
  Synthetic
aucacuacucguuuguuuucucu

SEQ ID NO: 385229 - RNA, 24 nt, Artificial Sequence
  Synthetic
caucacuacucguuuguuuucucu

SEQ ID NO: 385230 - RNA, 18 nt, Artificial Sequence
  Synthetic
uaugaaauauuuuucucu

SEQ ID NO: 385231 - RNA, 19 nt, Artificial Sequence
  Synthetic
uuaugaaauauuuuucucu

SEQ ID NO: 385232 - RNA, 20 nt, Artificial Sequence
  Synthetic
auuaugaaauauuuuucucu

SEQ ID NO: 385233 - RNA, 21 nt, Artificial Sequence
  Synthetic
gauuaugaaauauuuuucucu

SEQ ID NO: 385234 - RNA, 22 nt, Artificial Sequence
  Synthetic
ggauuaugaaauauuuuucucu

SEQ ID NO: 385235 - RNA, 23 nt, Artificial Sequence
  Synthetic
uggauuaugaaauauuuuucucu

SEQ ID NO: 385236 - RNA, 24 nt, Artificial Sequence
  Synthetic
auggauuaugaaauauuuuucucu

SEQ ID NO: 385237 - RNA, 18 nt, Artificial Sequence
  Synthetic
ccaucuuuuuuuuucucu

SEQ ID NO: 385238 - RNA, 19 nt, Artificial Sequence
  Synthetic
gccaucuuuuuuuuucucu

SEQ ID NO: 385239 - RNA, 20 nt, Artificial Sequence
  Synthetic
agccaucuuuuuuuuucucu

SEQ ID NO: 385240 - RNA, 21 nt, Artificial Sequence
  Synthetic
cagccaucuuuuuuuuucucu

SEQ ID NO: 385241 - RNA, 22 nt, Artificial Sequence
  Synthetic
ucagccaucuuuuuuuuucucu

SEQ ID NO: 385242 - RNA, 23 nt, Artificial Sequence
  Synthetic
uucagccaucuuuuuuuuucucu

SEQ ID NO: 385243 - RNA, 24 nt, Artificial Sequence
  Synthetic
uuucagccaucuuuuuuuuucucu

SEQ ID NO: 385244 - RNA, 18 nt, Artificial Sequence
  Synthetic
aaaaaaaaaaaaaagucu

SEQ ID NO: 385245 - RNA, 19 nt, Artificial Sequence
  Synthetic
aaaaaaaaaaaaaaagucu

SEQ ID NO: 385246 - RNA, 20 nt, Artificial Sequence
  Synthetic
aaaaaaaaaaaaaaaagucu

SEQ ID NO: 385247 - RNA, 21 nt, Artificial Sequence
  Synthetic
aaaaaaaaaaaaaaaaagucu

SEQ ID NO: 385248 - RNA, 22 nt, Artificial Sequence
  Synthetic
caaaaaaaaaaaaaaaaagucu

SEQ ID NO: 385249 - RNA, 23 nt, Artificial Sequence
  Synthetic
ccaaaaaaaaaaaaaaaaagucu

SEQ ID NO: 385250 - RNA, 24 nt, Artificial Sequence
  Synthetic
accaaaaaaaaaaaaaaaaagucu

SEQ ID NO: 385251 - RNA, 18 nt, Artificial Sequence
  Synthetic
gggugcaaaaaaaagucu

SEQ ID NO: 385252 - RNA, 19 nt, Artificial Sequence
  Synthetic
ugggugcaaaaaaaagucu

SEQ ID NO: 385253 - RNA, 20 nt, Artificial Sequence
  Synthetic
augggugcaaaaaaaagucu

SEQ ID NO: 385254 - RNA, 21 nt, Artificial Sequence
  Synthetic
aaugggugcaaaaaaaagucu

SEQ ID NO: 385255 - RNA, 22 nt, Artificial Sequence
  Synthetic
aaaugggugcaaaaaaaagucu

SEQ ID NO: 385256 - RNA, 23 nt, Artificial Sequence
  Synthetic
aaaaugggugcaaaaaaaagucu

SEQ ID NO: 385257 - RNA, 24 nt, Artificial Sequence
  Synthetic
uaaaaugggugcaaaaaaaagucu

SEQ ID NO: 385258 - RNA, 18 nt, Artificial Sequence
  Synthetic
uaaugaaugaaaaagucu

SEQ ID NO: 385259 - RNA, 19 nt, Artificial Sequence
  Synthetic
uuaaugaaugaaaaagucu

SEQ ID NO: 385260 - RNA, 20 nt, Artificial Sequence
  Synthetic
guuaaugaaugaaaaagucu

SEQ ID NO: 385261 - RNA, 21 nt, Artificial Sequence
  Synthetic
aguuaaugaaugaaaaagucu

SEQ ID NO: 385262 - RNA, 22 nt, Artificial Sequence
  Synthetic
gaguuaaugaaugaaaaagucu

SEQ ID NO: 385263 - RNA, 23 nt, Artificial Sequence
  Synthetic
agaguuaaugaaugaaaaagucu

SEQ ID NO: 385264 - RNA, 24 nt, Artificial Sequence
  Synthetic
aagaguuaaugaaugaaaaagucu

SEQ ID NO: 385265 - RNA, 18 nt, Artificial Sequence
  Synthetic
guaauuauaccaaagucu

SEQ ID NO: 385266 - RNA, 19 nt, Artificial Sequence
  Synthetic
gguaauuauaccaaagucu

SEQ ID NO: 385267 - RNA, 20 nt, Artificial Sequence
  Synthetic
ugguaauuauaccaaagucu

SEQ ID NO: 385268 - RNA, 21 nt, Artificial Sequence
  Synthetic
cugguaauuauaccaaagucu

SEQ ID NO: 385269 - RNA, 22 nt, Artificial Sequence
  Synthetic
acugguaauuauaccaaagucu

SEQ ID NO: 385270 - RNA, 23 nt, Artificial Sequence
  Synthetic
gacugguaauuauaccaaagucu

SEQ ID NO: 385271 - RNA, 24 nt, Artificial Sequence
  Synthetic
ugacugguaauuauaccaaagucu

SEQ ID NO: 385272 - RNA, 18 nt, Artificial Sequence
  Synthetic
guaguuauaccaaagucu

SEQ ID NO: 385273 - RNA, 19 nt, Artificial Sequence
  Synthetic
gguaguuauaccaaagucu

SEQ ID NO: 385274 - RNA, 20 nt, Artificial Sequence
  Synthetic
ugguaguuauaccaaagucu

SEQ ID NO: 385275 - RNA, 21 nt, Artificial Sequence
  Synthetic
cugguaguuauaccaaagucu

SEQ ID NO: 385276 - RNA, 22 nt, Artificial Sequence
  Synthetic
acugguaguuauaccaaagucu

SEQ ID NO: 385277 - RNA, 23 nt, Artificial Sequence
  Synthetic
gacugguaguuauaccaaagucu

SEQ ID NO: 385278 - RNA, 24 nt, Artificial Sequence
  Synthetic
ugacugguaguuauaccaaagucu

SEQ ID NO: 385279 - RNA, 18 nt, Artificial Sequence
  Synthetic
auucccuggagaaagucu

SEQ ID NO: 385280 - RNA, 19 nt, Artificial Sequence
  Synthetic
aauucccuggagaaagucu

SEQ ID NO: 385281 - RNA, 20 nt, Artificial Sequence
  Synthetic
uaauucccuggagaaagucu

SEQ ID NO: 385282 - RNA, 21 nt, Artificial Sequence
  Synthetic
uuaauucccuggagaaagucu

SEQ ID NO: 385283 - RNA, 22 nt, Artificial Sequence
  Synthetic
cuuaauucccuggagaaagucu

SEQ ID NO: 385284 - RNA, 23 nt, Artificial Sequence
  Synthetic
gcuuaauucccuggagaaagucu

SEQ ID NO: 385285 - RNA, 24 nt, Artificial Sequence
  Synthetic
ggcuuaauucccuggagaaagucu

SEQ ID NO: 385286 - RNA, 18 nt, Artificial Sequence
  Synthetic
cucaugccacuaaagucu

SEQ ID NO: 385287 - RNA, 19 nt, Artificial Sequence
  Synthetic
ccucaugccacuaaagucu

SEQ ID NO: 385288 - RNA, 20 nt, Artificial Sequence
  Synthetic
gccucaugccacuaaagucu

SEQ ID NO: 385289 - RNA, 21 nt, Artificial Sequence
  Synthetic
agccucaugccacuaaagucu

SEQ ID NO: 385290 - RNA, 22 nt, Artificial Sequence
  Synthetic
uagccucaugccacuaaagucu

SEQ ID NO: 385291 - RNA, 23 nt, Artificial Sequence
  Synthetic
cuagccucaugccacuaaagucu

SEQ ID NO: 385292 - RNA, 24 nt, Artificial Sequence
  Synthetic
ccuagccucaugccacuaaagucu

SEQ ID NO: 385293 - RNA, 18 nt, Artificial Sequence
  Synthetic
ggacucaugcuaaagucu

SEQ ID NO: 385294 - RNA, 19 nt, Artificial Sequence
  Synthetic
uggacucaugcuaaagucu

SEQ ID NO: 385295 - RNA, 20 nt, Artificial Sequence
  Synthetic
cuggacucaugcuaaagucu

SEQ ID NO: 385296 - RNA, 21 nt, Artificial Sequence
  Synthetic
ucuggacucaugcuaaagucu

SEQ ID NO: 385297 - RNA, 22 nt, Artificial Sequence
  Synthetic
aucuggacucaugcuaaagucu

SEQ ID NO: 385298 - RNA, 23 nt, Artificial Sequence
  Synthetic
caucuggacucaugcuaaagucu

SEQ ID NO: 385299 - RNA, 24 nt, Artificial Sequence
  Synthetic
ucaucuggacucaugcuaaagucu

SEQ ID NO: 385300 - RNA, 18 nt, Artificial Sequence
  Synthetic
guaugcgcauuaaagucu

SEQ ID NO: 385301 - RNA, 19 nt, Artificial Sequence
  Synthetic
uguaugcgcauuaaagucu

SEQ ID NO: 385302 - RNA, 20 nt, Artificial Sequence
  Synthetic
uuguaugcgcauuaaagucu

SEQ ID NO: 385303 - RNA, 21 nt, Artificial Sequence
  Synthetic
uuuguaugcgcauuaaagucu

SEQ ID NO: 385304 - RNA, 22 nt, Artificial Sequence
  Synthetic
auuuguaugcgcauuaaagucu

SEQ ID NO: 385305 - RNA, 23 nt, Artificial Sequence
  Synthetic
gauuuguaugcgcauuaaagucu

SEQ ID NO: 385306 - RNA, 24 nt, Artificial Sequence
  Synthetic
agauuuguaugcgcauuaaagucu

SEQ ID NO: 385307 - RNA, 18 nt, Artificial Sequence
  Synthetic
uugggugaggagaagucu

SEQ ID NO: 385308 - RNA, 19 nt, Artificial Sequence
  Synthetic
auugggugaggagaagucu

SEQ ID NO: 385309 - RNA, 20 nt, Artificial Sequence
  Synthetic
cauugggugaggagaagucu

SEQ ID NO: 385310 - RNA, 21 nt, Artificial Sequence
  Synthetic
ucauugggugaggagaagucu

SEQ ID NO: 385311 - RNA, 22 nt, Artificial Sequence
  Synthetic
aucauugggugaggagaagucu

SEQ ID NO: 385312 - RNA, 23 nt, Artificial Sequence
  Synthetic
aaucauugggugaggagaagucu

SEQ ID NO: 385313 - RNA, 24 nt, Artificial Sequence
  Synthetic
caaucauugggugaggagaagucu

SEQ ID NO: 385314 - RNA, 18 nt, Artificial Sequence
  Synthetic
uuaacgggugagaagucu

SEQ ID NO: 385315 - RNA, 19 nt, Artificial Sequence
  Synthetic
cuuaacgggugagaagucu

SEQ ID NO: 385316 - RNA, 20 nt, Artificial Sequence
  Synthetic
ccuuaacgggugagaagucu

SEQ ID NO: 385317 - RNA, 21 nt, Artificial Sequence
  Synthetic
accuuaacgggugagaagucu

SEQ ID NO: 385318 - RNA, 22 nt, Artificial Sequence
  Synthetic
aaccuuaacgggugagaagucu

SEQ ID NO: 385319 - RNA, 23 nt, Artificial Sequence
  Synthetic
caaccuuaacgggugagaagucu

SEQ ID NO: 385320 - RNA, 24 nt, Artificial Sequence
  Synthetic
ccaaccuuaacgggugagaagucu

SEQ ID NO: 385321 - RNA, 18 nt, Artificial Sequence
  Synthetic
acuaagaguaggaagucu

SEQ ID NO: 385322 - RNA, 19 nt, Artificial Sequence
  Synthetic
aacuaagaguaggaagucu

SEQ ID NO: 385323 - RNA, 20 nt, Artificial Sequence
  Synthetic
gaacuaagaguaggaagucu

SEQ ID NO: 385324 - RNA, 21 nt, Artificial Sequence
  Synthetic
ugaacuaagaguaggaagucu

SEQ ID NO: 385325 - RNA, 22 nt, Artificial Sequence
  Synthetic
uugaacuaagaguaggaagucu

SEQ ID NO: 385326 - RNA, 23 nt, Artificial Sequence
  Synthetic
uuugaacuaagaguaggaagucu

SEQ ID NO: 385327 - RNA, 24 nt, Artificial Sequence
  Synthetic
uuuugaacuaagaguaggaagucu

SEQ ID NO: 385328 - RNA, 18 nt, Artificial Sequence
  Synthetic
agauaaugauggaagucu

SEQ ID NO: 385329 - RNA, 19 nt, Artificial Sequence
  Synthetic
cagauaaugauggaagucu

SEQ ID NO: 385330 - RNA, 20 nt, Artificial Sequence
  Synthetic
acagauaaugauggaagucu

SEQ ID NO: 385331 - RNA, 21 nt, Artificial Sequence
  Synthetic
uacagauaaugauggaagucu

SEQ ID NO: 385332 - RNA, 22 nt, Artificial Sequence
  Synthetic
uuacagauaaugauggaagucu

SEQ ID NO: 385333 - RNA, 23 nt, Artificial Sequence
  Synthetic
auuacagauaaugauggaagucu

SEQ ID NO: 385334 - RNA, 24 nt, Artificial Sequence
  Synthetic
aauuacagauaaugauggaagucu

SEQ ID NO: 385335 - RNA, 18 nt, Artificial Sequence
  Synthetic
uuuuuccauucuaagucu

SEQ ID NO: 385336 - RNA, 19 nt, Artificial Sequence
  Synthetic
cuuuuuccauucuaagucu

SEQ ID NO: 385337 - RNA, 20 nt, Artificial Sequence
  Synthetic
gcuuuuuccauucuaagucu

SEQ ID NO: 385338 - RNA, 21 nt, Artificial Sequence
  Synthetic
ugcuuuuuccauucuaagucu

SEQ ID NO: 385339 - RNA, 22 nt, Artificial Sequence
  Synthetic
uugcuuuuuccauucuaagucu

SEQ ID NO: 385340 - RNA, 23 nt, Artificial Sequence
  Synthetic
uuugcuuuuuccauucuaagucu

SEQ ID NO: 385341 - RNA, 24 nt, Artificial Sequence
  Synthetic
auuugcuuuuuccauucuaagucu

SEQ ID NO: 385342 - RNA, 18 nt, Artificial Sequence
  Synthetic
ccuucuuuuucuaagucu

SEQ ID NO: 385343 - RNA, 19 nt, Artificial Sequence
  Synthetic
uccuucuuuuucuaagucu

SEQ ID NO: 385344 - RNA, 20 nt, Artificial Sequence
  Synthetic
guccuucuuuuucuaagucu

SEQ ID NO: 385345 - RNA, 21 nt, Artificial Sequence
  Synthetic
uguccuucuuuuucuaagucu

SEQ ID NO: 385346 - RNA, 22 nt, Artificial Sequence
  Synthetic
uuguccuucuuuuucuaagucu

SEQ ID NO: 385347 - RNA, 23 nt, Artificial Sequence
  Synthetic
uuuguccuucuuuuucuaagucu

SEQ ID NO: 385348 - RNA, 24 nt, Artificial Sequence
  Synthetic
guuuguccuucuuuuucuaagucu

SEQ ID NO: 385349 - RNA, 18 nt, Artificial Sequence
  Synthetic
uuuuucuuuaguaagucu

SEQ ID NO: 385350 - RNA, 19 nt, Artificial Sequence
  Synthetic
cuuuuucuuuaguaagucu

SEQ ID NO: 385351 - RNA, 20 nt, Artificial Sequence
  Synthetic
ccuuuuucuuuaguaagucu

SEQ ID NO: 385352 - RNA, 21 nt, Artificial Sequence
  Synthetic
accuuuuucuuuaguaagucu

SEQ ID NO: 385353 - RNA, 22 nt, Artificial Sequence
  Synthetic
aaccuuuuucuuuaguaagucu

SEQ ID NO: 385354 - RNA, 23 nt, Artificial Sequence
  Synthetic
uaaccuuuuucuuuaguaagucu

SEQ ID NO: 385355 - RNA, 24 nt, Artificial Sequence
  Synthetic
uuaaccuuuuucuuuaguaagucu

SEQ ID NO: 385356 - RNA, 18 nt, Artificial Sequence
  Synthetic
auuccuuggcaacagucu

SEQ ID NO: 385357 - RNA, 19 nt, Artificial Sequence
  Synthetic
gauuccuuggcaacagucu

SEQ ID NO: 385358 - RNA, 20 nt, Artificial Sequence
  Synthetic
agauuccuuggcaacagucu

SEQ ID NO: 385359 - RNA, 21 nt, Artificial Sequence
  Synthetic
gagauuccuuggcaacagucu

SEQ ID NO: 385360 - RNA, 22 nt, Artificial Sequence
  Synthetic
ugagauuccuuggcaacagucu

SEQ ID NO: 385361 - RNA, 23 nt, Artificial Sequence
  Synthetic
augagauuccuuggcaacagucu

SEQ ID NO: 385362 - RNA, 24 nt, Artificial Sequence
  Synthetic
gaugagauuccuuggcaacagucu

SEQ ID NO: 385363 - RNA, 18 nt, Artificial Sequence
  Synthetic
uauaauugcacacagucu

SEQ ID NO: 385364 - RNA, 19 nt, Artificial Sequence
  Synthetic
uuauaauugcacacagucu

SEQ ID NO: 385365 - RNA, 20 nt, Artificial Sequence
  Synthetic
uuuauaauugcacacagucu

SEQ ID NO: 385366 - RNA, 21 nt, Artificial Sequence
  Synthetic
auuuauaauugcacacagucu

SEQ ID NO: 385367 - RNA, 22 nt, Artificial Sequence
  Synthetic
cauuuauaauugcacacagucu

SEQ ID NO: 385368 - RNA, 23 nt, Artificial Sequence
  Synthetic
ccauuuauaauugcacacagucu

SEQ ID NO: 385369 - RNA, 24 nt, Artificial Sequence
  Synthetic
accauuuauaauugcacacagucu

SEQ ID NO: 385370 - RNA, 18 nt, Artificial Sequence
  Synthetic
ugaagagcuucacagucu

SEQ ID NO: 385371 - RNA, 19 nt, Artificial Sequence
  Synthetic
uugaagagcuucacagucu

SEQ ID NO: 385372 - RNA, 20 nt, Artificial Sequence
  Synthetic
uuugaagagcuucacagucu

SEQ ID NO: 385373 - RNA, 21 nt, Artificial Sequence
  Synthetic
cuuugaagagcuucacagucu

SEQ ID NO: 385374 - RNA, 22 nt, Artificial Sequence
  Synthetic
gcuuugaagagcuucacagucu

SEQ ID NO: 385375 - RNA, 23 nt, Artificial Sequence
  Synthetic
ugcuuugaagagcuucacagucu

SEQ ID NO: 385376 - RNA, 24 nt, Artificial Sequence
  Synthetic
cugcuuugaagagcuucacagucu

SEQ ID NO: 385377 - RNA, 18 nt, Artificial Sequence
  Synthetic
auguuggauaaccagucu

SEQ ID NO: 385378 - RNA, 19 nt, Artificial Sequence
  Synthetic
cauguuggauaaccagucu

SEQ ID NO: 385379 - RNA, 20 nt, Artificial Sequence
  Synthetic
ucauguuggauaaccagucu

SEQ ID NO: 385380 - RNA, 21 nt, Artificial Sequence
  Synthetic
gucauguuggauaaccagucu

SEQ ID NO: 385381 - RNA, 22 nt, Artificial Sequence
  Synthetic
agucauguuggauaaccagucu

SEQ ID NO: 385382 - RNA, 23 nt, Artificial Sequence
  Synthetic
gagucauguuggauaaccagucu

SEQ ID NO: 385383 - RNA, 24 nt, Artificial Sequence
  Synthetic
ugagucauguuggauaaccagucu

SEQ ID NO: 385384 - RNA, 18 nt, Artificial Sequence
  Synthetic
ggaguucgagaccagucu

SEQ ID NO: 385385 - RNA, 19 nt, Artificial Sequence
  Synthetic
aggaguucgagaccagucu

SEQ ID NO: 385386 - RNA, 20 nt, Artificial Sequence
  Synthetic
caggaguucgagaccagucu

SEQ ID NO: 385387 - RNA, 21 nt, Artificial Sequence
  Synthetic
ccaggaguucgagaccagucu

SEQ ID NO: 385388 - RNA, 22 nt, Artificial Sequence
  Synthetic
cccaggaguucgagaccagucu

SEQ ID NO: 385389 - RNA, 23 nt, Artificial Sequence
  Synthetic
gcccaggaguucgagaccagucu

SEQ ID NO: 385390 - RNA, 24 nt, Artificial Sequence
  Synthetic
agcccaggaguucgagaccagucu

SEQ ID NO: 385391 - RNA, 18 nt, Artificial Sequence
  Synthetic
gaaguuugagaccagucu

SEQ ID NO: 385392 - RNA, 19 nt, Artificial Sequence
  Synthetic
agaaguuugagaccagucu

SEQ ID NO: 385393 - RNA, 20 nt, Artificial Sequence
  Synthetic
cagaaguuugagaccagucu

SEQ ID NO: 385394 - RNA, 21 nt, Artificial Sequence
  Synthetic
ccagaaguuugagaccagucu

SEQ ID NO: 385395 - RNA, 22 nt, Artificial Sequence
  Synthetic
cccagaaguuugagaccagucu

SEQ ID NO: 385396 - RNA, 23 nt, Artificial Sequence
  Synthetic
gcccagaaguuugagaccagucu

SEQ ID NO: 385397 - RNA, 24 nt, Artificial Sequence
  Synthetic
agcccagaaguuugagaccagucu

SEQ ID NO: 385398 - RNA, 18 nt, Artificial Sequence
  Synthetic
ugcucuuucuuccagucu

SEQ ID NO: 385399 - RNA, 19 nt, Artificial Sequence
  Synthetic
cugcucuuucuuccagucu

SEQ ID NO: 385400 - RNA, 20 nt, Artificial Sequence
  Synthetic
ucugcucuuucuuccagucu

SEQ ID NO: 385401 - RNA, 21 nt, Artificial Sequence
  Synthetic
uucugcucuuucuuccagucu

SEQ ID NO: 385402 - RNA, 22 nt, Artificial Sequence
  Synthetic
cuucugcucuuucuuccagucu

SEQ ID NO: 385403 - RNA, 23 nt, Artificial Sequence
  Synthetic
acuucugcucuuucuuccagucu

SEQ ID NO: 385404 - RNA, 24 nt, Artificial Sequence
  Synthetic
gacuucugcucuuucuuccagucu

SEQ ID NO: 385405 - RNA, 18 nt, Artificial Sequence
  Synthetic
cuaauuagaaagcagucu

SEQ ID NO: 385406 - RNA, 19 nt, Artificial Sequence
  Synthetic
gcuaauuagaaagcagucu

SEQ ID NO: 385407 - RNA, 20 nt, Artificial Sequence
  Synthetic
agcuaauuagaaagcagucu

SEQ ID NO: 385408 - RNA, 21 nt, Artificial Sequence
  Synthetic
gagcuaauuagaaagcagucu

SEQ ID NO: 385409 - RNA, 22 nt, Artificial Sequence
  Synthetic
cgagcuaauuagaaagcagucu

SEQ ID NO: 385410 - RNA, 23 nt, Artificial Sequence
  Synthetic
acgagcuaauuagaaagcagucu

SEQ ID NO: 385411 - RNA, 24 nt, Artificial Sequence
  Synthetic
cacgagcuaauuagaaagcagucu

SEQ ID NO: 385412 - RNA, 18 nt, Artificial Sequence
  Synthetic
uucaauacauagcagucu

SEQ ID NO: 385413 - RNA, 19 nt, Artificial Sequence
  Synthetic
cuucaauacauagcagucu

SEQ ID NO: 385414 - RNA, 20 nt, Artificial Sequence
  Synthetic
ccuucaauacauagcagucu

SEQ ID NO: 385415 - RNA, 21 nt, Artificial Sequence
  Synthetic
accuucaauacauagcagucu

SEQ ID NO: 385416 - RNA, 22 nt, Artificial Sequence
  Synthetic
gaccuucaauacauagcagucu

SEQ ID NO: 385417 - RNA, 23 nt, Artificial Sequence
  Synthetic
agaccuucaauacauagcagucu

SEQ ID NO: 385418 - RNA, 24 nt, Artificial Sequence
  Synthetic
uagaccuucaauacauagcagucu

SEQ ID NO: 385419 - RNA, 18 nt, Artificial Sequence
  Synthetic
uucaacucaaugcagucu

SEQ ID NO: 385420 - RNA, 19 nt, Artificial Sequence
  Synthetic
auucaacucaaugcagucu

SEQ ID NO: 385421 - RNA, 20 nt, Artificial Sequence
  Synthetic
uauucaacucaaugcagucu

SEQ ID NO: 385422 - RNA, 21 nt, Artificial Sequence
  Synthetic
auauucaacucaaugcagucu

SEQ ID NO: 385423 - RNA, 22 nt, Artificial Sequence
  Synthetic
gauauucaacucaaugcagucu

SEQ ID NO: 385424 - RNA, 23 nt, Artificial Sequence
  Synthetic
ugauauucaacucaaugcagucu

SEQ ID NO: 385425 - RNA, 24 nt, Artificial Sequence
  Synthetic
augauauucaacucaaugcagucu

SEQ ID NO: 385426 - RNA, 18 nt, Artificial Sequence
  Synthetic
gacuuaggaaaucagucu

SEQ ID NO: 385427 - RNA, 19 nt, Artificial Sequence
  Synthetic
agacuuaggaaaucagucu

SEQ ID NO: 385428 - RNA, 20 nt, Artificial Sequence
  Synthetic
aagacuuaggaaaucagucu

SEQ ID NO: 385429 - RNA, 21 nt, Artificial Sequence
  Synthetic
gaagacuuaggaaaucagucu

SEQ ID NO: 385430 - RNA, 22 nt, Artificial Sequence
  Synthetic
ggaagacuuaggaaaucagucu

SEQ ID NO: 385431 - RNA, 23 nt, Artificial Sequence
  Synthetic
uggaagacuuaggaaaucagucu

SEQ ID NO: 385432 - RNA, 24 nt, Artificial Sequence
  Synthetic
uuggaagacuuaggaaaucagucu

SEQ ID NO: 385433 - RNA, 18 nt, Artificial Sequence
  Synthetic
ggagcuuuaccucagucu

SEQ ID NO: 385434 - RNA, 19 nt, Artificial Sequence
  Synthetic
gggagcuuuaccucagucu

SEQ ID NO: 385435 - RNA, 20 nt, Artificial Sequence
  Synthetic
agggagcuuuaccucagucu

SEQ ID NO: 385436 - RNA, 21 nt, Artificial Sequence
  Synthetic
aagggagcuuuaccucagucu

SEQ ID NO: 385437 - RNA, 22 nt, Artificial Sequence
  Synthetic
uaagggagcuuuaccucagucu

SEQ ID NO: 385438 - RNA, 23 nt, Artificial Sequence
  Synthetic
cuaagggagcuuuaccucagucu

SEQ ID NO: 385439 - RNA, 24 nt, Artificial Sequence
  Synthetic
ucuaagggagcuuuaccucagucu

SEQ ID NO: 385440 - RNA, 18 nt, Artificial Sequence
  Synthetic
gacggaaucccucagucu

SEQ ID NO: 385441 - RNA, 19 nt, Artificial Sequence
  Synthetic
agacggaaucccucagucu

SEQ ID NO: 385442 - RNA, 20 nt, Artificial Sequence
  Synthetic
aagacggaaucccucagucu

SEQ ID NO: 385443 - RNA, 21 nt, Artificial Sequence
  Synthetic
caagacggaaucccucagucu

SEQ ID NO: 385444 - RNA, 22 nt, Artificial Sequence
  Synthetic
ccaagacggaaucccucagucu

SEQ ID NO: 385445 - RNA, 23 nt, Artificial Sequence
  Synthetic
accaagacggaaucccucagucu

SEQ ID NO: 385446 - RNA, 24 nt, Artificial Sequence
  Synthetic
caccaagacggaaucccucagucu

SEQ ID NO: 385447 - RNA, 18 nt, Artificial Sequence
  Synthetic
aaauaaaaucaagagucu

SEQ ID NO: 385448 - RNA, 19 nt, Artificial Sequence
  Synthetic
uaaauaaaaucaagagucu

SEQ ID NO: 385449 - RNA, 20 nt, Artificial Sequence
  Synthetic
guaaauaaaaucaagagucu

SEQ ID NO: 385450 - RNA, 21 nt, Artificial Sequence
  Synthetic
gguaaauaaaaucaagagucu

SEQ ID NO: 385451 - RNA, 22 nt, Artificial Sequence
  Synthetic
agguaaauaaaaucaagagucu

SEQ ID NO: 385452 - RNA, 23 nt, Artificial Sequence
  Synthetic
aagguaaauaaaaucaagagucu

SEQ ID NO: 385453 - RNA, 24 nt, Artificial Sequence
  Synthetic
aaagguaaauaaaaucaagagucu

SEQ ID NO: 385454 - RNA, 18 nt, Artificial Sequence
  Synthetic
accaugaagagagagucu

SEQ ID NO: 385455 - RNA, 19 nt, Artificial Sequence
  Synthetic
caccaugaagagagagucu

SEQ ID NO: 385456 - RNA, 20 nt, Artificial Sequence
  Synthetic
ucaccaugaagagagagucu

SEQ ID NO: 385457 - RNA, 21 nt, Artificial Sequence
  Synthetic
cucaccaugaagagagagucu

SEQ ID NO: 385458 - RNA, 22 nt, Artificial Sequence
  Synthetic
ccucaccaugaagagagagucu

SEQ ID NO: 385459 - RNA, 23 nt, Artificial Sequence
  Synthetic
cccucaccaugaagagagagucu

SEQ ID NO: 385460 - RNA, 24 nt, Artificial Sequence
  Synthetic
ucccucaccaugaagagagagucu

SEQ ID NO: 385461 - RNA, 18 nt, Artificial Sequence
  Synthetic
uaugugaaacgagagucu

SEQ ID NO: 385462 - RNA, 19 nt, Artificial Sequence
  Synthetic
guaugugaaacgagagucu

SEQ ID NO: 385463 - RNA, 20 nt, Artificial Sequence
  Synthetic
uguaugugaaacgagagucu

SEQ ID NO: 385464 - RNA, 21 nt, Artificial Sequence
  Synthetic
auguaugugaaacgagagucu

SEQ ID NO: 385465 - RNA, 22 nt, Artificial Sequence
  Synthetic
aauguaugugaaacgagagucu

SEQ ID NO: 385466 - RNA, 23 nt, Artificial Sequence
  Synthetic
aaauguaugugaaacgagagucu

SEQ ID NO: 385467 - RNA, 24 nt, Artificial Sequence
  Synthetic
gaaauguaugugaaacgagagucu

SEQ ID NO: 385468 - RNA, 18 nt, Artificial Sequence
  Synthetic
uuuaagcaagaggagucu

SEQ ID NO: 385469 - RNA, 19 nt, Artificial Sequence
  Synthetic
cuuuaagcaagaggagucu

SEQ ID NO: 385470 - RNA, 20 nt, Artificial Sequence
  Synthetic
ucuuuaagcaagaggagucu

SEQ ID NO: 385471 - RNA, 21 nt, Artificial Sequence
  Synthetic
cucuuuaagcaagaggagucu

SEQ ID NO: 385472 - RNA, 22 nt, Artificial Sequence
  Synthetic
ucucuuuaagcaagaggagucu

SEQ ID NO: 385473 - RNA, 23 nt, Artificial Sequence
  Synthetic
aucucuuuaagcaagaggagucu

SEQ ID NO: 385474 - RNA, 24 nt, Artificial Sequence
  Synthetic
gaucucuuuaagcaagaggagucu

SEQ ID NO: 385475 - RNA, 18 nt, Artificial Sequence
  Synthetic
ucaguagcccuggagucu

SEQ ID NO: 385476 - RNA, 19 nt, Artificial Sequence
  Synthetic
aucaguagcccuggagucu

SEQ ID NO: 385477 - RNA, 20 nt, Artificial Sequence
  Synthetic
aaucaguagcccuggagucu

SEQ ID NO: 385478 - RNA, 21 nt, Artificial Sequence
  Synthetic
uaaucaguagcccuggagucu

SEQ ID NO: 385479 - RNA, 22 nt, Artificial Sequence
  Synthetic
cuaaucaguagcccuggagucu

SEQ ID NO: 385480 - RNA, 23 nt, Artificial Sequence
  Synthetic
ucuaaucaguagcccuggagucu

SEQ ID NO: 385481 - RNA, 24 nt, Artificial Sequence
  Synthetic
cucuaaucaguagcccuggagucu

SEQ ID NO: 385482 - RNA, 18 nt, Artificial Sequence
  Synthetic
ugcugcuuuguggagucu

SEQ ID NO: 385483 - RNA, 19 nt, Artificial Sequence
  Synthetic
gugcugcuuuguggagucu

SEQ ID NO: 385484 - RNA, 20 nt, Artificial Sequence
  Synthetic
cgugcugcuuuguggagucu

SEQ ID NO: 385485 - RNA, 21 nt, Artificial Sequence
  Synthetic
ccgugcugcuuuguggagucu

SEQ ID NO: 385486 - RNA, 22 nt, Artificial Sequence
  Synthetic
gccgugcugcuuuguggagucu

SEQ ID NO: 385487 - RNA, 23 nt, Artificial Sequence
  Synthetic
ggccgugcugcuuuguggagucu

SEQ ID NO: 385488 - RNA, 24 nt, Artificial Sequence
  Synthetic
gggccgugcugcuuuguggagucu

SEQ ID NO: 385489 - RNA, 18 nt, Artificial Sequence
  Synthetic
cuucuuuucaaugagucu

SEQ ID NO: 385490 - RNA, 19 nt, Artificial Sequence
  Synthetic
gcuucuuuucaaugagucu

SEQ ID NO: 385491 - RNA, 20 nt, Artificial Sequence
  Synthetic
ugcuucuuuucaaugagucu

SEQ ID NO: 385492 - RNA, 21 nt, Artificial Sequence
  Synthetic
uugcuucuuuucaaugagucu

SEQ ID NO: 385493 - RNA, 22 nt, Artificial Sequence
  Synthetic
guugcuucuuuucaaugagucu

SEQ ID NO: 385494 - RNA, 23 nt, Artificial Sequence
  Synthetic
gguugcuucuuuucaaugagucu

SEQ ID NO: 385495 - RNA, 24 nt, Artificial Sequence
  Synthetic
agguugcuucuuuucaaugagucu

SEQ ID NO: 385496 - RNA, 18 nt, Artificial Sequence
  Synthetic
ccauuggcauaugagucu

SEQ ID NO: 385497 - RNA, 19 nt, Artificial Sequence
  Synthetic
uccauuggcauaugagucu

SEQ ID NO: 385498 - RNA, 20 nt, Artificial Sequence
  Synthetic
guccauuggcauaugagucu

SEQ ID NO: 385499 - RNA, 21 nt, Artificial Sequence
  Synthetic
aguccauuggcauaugagucu

SEQ ID NO: 385500 - RNA, 22 nt, Artificial Sequence
  Synthetic
aaguccauuggcauaugagucu

SEQ ID NO: 385501 - RNA, 23 nt, Artificial Sequence
  Synthetic
gaaguccauuggcauaugagucu

SEQ ID NO: 385502 - RNA, 24 nt, Artificial Sequence
  Synthetic
agaaguccauuggcauaugagucu

SEQ ID NO: 385503 - RNA, 18 nt, Artificial Sequence
  Synthetic
uggaagcguguugagucu

SEQ ID NO: 385504 - RNA, 19 nt, Artificial Sequence
  Synthetic
uuggaagcguguugagucu

SEQ ID NO: 385505 - RNA, 20 nt, Artificial Sequence
  Synthetic
uuuggaagcguguugagucu

SEQ ID NO: 385506 - RNA, 21 nt, Artificial Sequence
  Synthetic
auuuggaagcguguugagucu

SEQ ID NO: 385507 - RNA, 22 nt, Artificial Sequence
  Synthetic
aauuuggaagcguguugagucu

SEQ ID NO: 385508 - RNA, 23 nt, Artificial Sequence
  Synthetic
aaauuuggaagcguguugagucu

SEQ ID NO: 385509 - RNA, 24 nt, Artificial Sequence
  Synthetic
caaauuuggaagcguguugagucu

SEQ ID NO: 385510 - RNA, 18 nt, Artificial Sequence
  Synthetic
ccugcaggauaauagucu

SEQ ID NO: 385511 - RNA, 19 nt, Artificial Sequence
  Synthetic
cccugcaggauaauagucu

SEQ ID NO: 385512 - RNA, 20 nt, Artificial Sequence
  Synthetic
acccugcaggauaauagucu

SEQ ID NO: 385513 - RNA, 21 nt, Artificial Sequence
  Synthetic
aacccugcaggauaauagucu

SEQ ID NO: 385514 - RNA, 22 nt, Artificial Sequence
  Synthetic
aaacccugcaggauaauagucu

SEQ ID NO: 385515 - RNA, 23 nt, Artificial Sequence
  Synthetic
caaacccugcaggauaauagucu

SEQ ID NO: 385516 - RNA, 24 nt, Artificial Sequence
  Synthetic
acaaacccugcaggauaauagucu

SEQ ID NO: 385517 - RNA, 18 nt, Artificial Sequence
  Synthetic
agaaauaagauauagucu

SEQ ID NO: 385518 - RNA, 19 nt, Artificial Sequence
  Synthetic
uagaaauaagauauagucu

SEQ ID NO: 385519 - RNA, 20 nt, Artificial Sequence
  Synthetic
guagaaauaagauauagucu

SEQ ID NO: 385520 - RNA, 21 nt, Artificial Sequence
  Synthetic
aguagaaauaagauauagucu

SEQ ID NO: 385521 - RNA, 22 nt, Artificial Sequence
  Synthetic
aaguagaaauaagauauagucu

SEQ ID NO: 385522 - RNA, 23 nt, Artificial Sequence
  Synthetic
gaaguagaaauaagauauagucu

SEQ ID NO: 385523 - RNA, 24 nt, Artificial Sequence
  Synthetic
agaaguagaaauaagauauagucu

SEQ ID NO: 385524 - RNA, 18 nt, Artificial Sequence
  Synthetic
caugggguacacuagucu

SEQ ID NO: 385525 - RNA, 19 nt, Artificial Sequence
  Synthetic
gcaugggguacacuagucu

SEQ ID NO: 385526 - RNA, 20 nt, Artificial Sequence
  Synthetic
ugcaugggguacacuagucu

SEQ ID NO: 385527 - RNA, 21 nt, Artificial Sequence
  Synthetic
augcaugggguacacuagucu

SEQ ID NO: 385528 - RNA, 22 nt, Artificial Sequence
  Synthetic
caugcaugggguacacuagucu

SEQ ID NO: 385529 - RNA, 23 nt, Artificial Sequence
  Synthetic
ucaugcaugggguacacuagucu

SEQ ID NO: 385530 - RNA, 24 nt, Artificial Sequence
  Synthetic
aucaugcaugggguacacuagucu

SEQ ID NO: 385531 - RNA, 18 nt, Artificial Sequence
  Synthetic
aauuugugacccuagucu

SEQ ID NO: 385532 - RNA, 19 nt, Artificial Sequence
  Synthetic
gaauuugugacccuagucu

SEQ ID NO: 385533 - RNA, 20 nt, Artificial Sequence
  Synthetic
ugaauuugugacccuagucu

SEQ ID NO: 385534 - RNA, 21 nt, Artificial Sequence
  Synthetic
cugaauuugugacccuagucu

SEQ ID NO: 385535 - RNA, 22 nt, Artificial Sequence
  Synthetic
ccugaauuugugacccuagucu

SEQ ID NO: 385536 - RNA, 23 nt, Artificial Sequence
  Synthetic
accugaauuugugacccuagucu

SEQ ID NO: 385537 - RNA, 24 nt, Artificial Sequence
  Synthetic
gaccugaauuugugacccuagucu

SEQ ID NO: 385538 - RNA, 18 nt, Artificial Sequence
  Synthetic
cuucccaaccccuagucu

SEQ ID NO: 385539 - RNA, 19 nt, Artificial Sequence
  Synthetic
acuucccaaccccuagucu

SEQ ID NO: 385540 - RNA, 20 nt, Artificial Sequence
  Synthetic
uacuucccaaccccuagucu

SEQ ID NO: 385541 - RNA, 21 nt, Artificial Sequence
  Synthetic
guacuucccaaccccuagucu

SEQ ID NO: 385542 - RNA, 22 nt, Artificial Sequence
  Synthetic
uguacuucccaaccccuagucu

SEQ ID NO: 385543 - RNA, 23 nt, Artificial Sequence
  Synthetic
auguacuucccaaccccuagucu

SEQ ID NO: 385544 - RNA, 24 nt, Artificial Sequence
  Synthetic
aauguacuucccaaccccuagucu

SEQ ID NO: 385545 - RNA, 18 nt, Artificial Sequence
  Synthetic
gaagaauacccuuagucu

SEQ ID NO: 385546 - RNA, 19 nt, Artificial Sequence
  Synthetic
agaagaauacccuuagucu

SEQ ID NO: 385547 - RNA, 20 nt, Artificial Sequence
  Synthetic
gagaagaauacccuuagucu

SEQ ID NO: 385548 - RNA, 21 nt, Artificial Sequence
  Synthetic
ugagaagaauacccuuagucu

SEQ ID NO: 385549 - RNA, 22 nt, Artificial Sequence
  Synthetic
uugagaagaauacccuuagucu

SEQ ID NO: 385550 - RNA, 23 nt, Artificial Sequence
  Synthetic
cuugagaagaauacccuuagucu

SEQ ID NO: 385551 - RNA, 24 nt, Artificial Sequence
  Synthetic
acuugagaagaauacccuuagucu

SEQ ID NO: 385552 - RNA, 18 nt, Artificial Sequence
  Synthetic
uauuuagucccuuagucu

SEQ ID NO: 385553 - RNA, 19 nt, Artificial Sequence
  Synthetic
uuauuuagucccuuagucu

SEQ ID NO: 385554 - RNA, 20 nt, Artificial Sequence
  Synthetic
guuauuuagucccuuagucu

SEQ ID NO: 385555 - RNA, 21 nt, Artificial Sequence
  Synthetic
aguuauuuagucccuuagucu

SEQ ID NO: 385556 - RNA, 22 nt, Artificial Sequence
  Synthetic
gaguuauuuagucccuuagucu

SEQ ID NO: 385557 - RNA, 23 nt, Artificial Sequence
  Synthetic
ugaguuauuuagucccuuagucu

SEQ ID NO: 385558 - RNA, 24 nt, Artificial Sequence
  Synthetic
augaguuauuuagucccuuagucu

SEQ ID NO: 385559 - RNA, 19 nt, Artificial Sequence
  Synthetic
cuucuuccugguuuagucu

SEQ ID NO: 385560 - RNA, 20 nt, Artificial Sequence
  Synthetic
acuucuuccugguuuagucu

SEQ ID NO: 385561 - RNA, 21 nt, Artificial Sequence
  Synthetic
aacuucuuccugguuuagucu

SEQ ID NO: 385562 - RNA, 22 nt, Artificial Sequence
  Synthetic
caacuucuuccugguuuagucu

SEQ ID NO: 385563 - RNA, 23 nt, Artificial Sequence
  Synthetic
ucaacuucuuccugguuuagucu

SEQ ID NO: 385564 - RNA, 24 nt, Artificial Sequence
  Synthetic
uucaacuucuuccugguuuagucu

SEQ ID NO: 385565 - RNA, 18 nt, Artificial Sequence
  Synthetic
guaaaucacuuuuagucu

SEQ ID NO: 385566 - RNA, 19 nt, Artificial Sequence
  Synthetic
uguaaaucacuuuuagucu

SEQ ID NO: 385567 - RNA, 20 nt, Artificial Sequence
  Synthetic
auguaaaucacuuuuagucu

SEQ ID NO: 385568 - RNA, 21 nt, Artificial Sequence
  Synthetic
cauguaaaucacuuuuagucu

SEQ ID NO: 385569 - RNA, 22 nt, Artificial Sequence
  Synthetic
gcauguaaaucacuuuuagucu

SEQ ID NO: 385570 - RNA, 23 nt, Artificial Sequence
  Synthetic
ugcauguaaaucacuuuuagucu

SEQ ID NO: 385571 - RNA, 24 nt, Artificial Sequence
  Synthetic
uugcauguaaaucacuuuuagucu

SEQ ID NO: 385572 - RNA, 18 nt, Artificial Sequence
  Synthetic
aauacgugcagcccgucu

SEQ ID NO: 385573 - RNA, 19 nt, Artificial Sequence
  Synthetic
caauacgugcagcccgucu

SEQ ID NO: 385574 - RNA, 20 nt, Artificial Sequence
  Synthetic
ccaauacgugcagcccgucu

SEQ ID NO: 385575 - RNA, 21 nt, Artificial Sequence
  Synthetic
accaauacgugcagcccgucu

SEQ ID NO: 385576 - RNA, 22 nt, Artificial Sequence
  Synthetic
aaccaauacgugcagcccgucu

SEQ ID NO: 385577 - RNA, 23 nt, Artificial Sequence
  Synthetic
caaccaauacgugcagcccgucu

SEQ ID NO: 385578 - RNA, 24 nt, Artificial Sequence
  Synthetic
ucaaccaauacgugcagcccgucu

SEQ ID NO: 385579 - RNA, 18 nt, Artificial Sequence
  Synthetic
aagagcaaaacuccgucu

SEQ ID NO: 385580 - RNA, 19 nt, Artificial Sequence
  Synthetic
caagagcaaaacuccgucu

SEQ ID NO: 385581 - RNA, 20 nt, Artificial Sequence
  Synthetic
acaagagcaaaacuccgucu

SEQ ID NO: 385582 - RNA, 21 nt, Artificial Sequence
  Synthetic
gacaagagcaaaacuccgucu

SEQ ID NO: 385583 - RNA, 22 nt, Artificial Sequence
  Synthetic
cgacaagagcaaaacuccgucu

SEQ ID NO: 385584 - RNA, 23 nt, Artificial Sequence
  Synthetic
gcgacaagagcaaaacuccgucu

SEQ ID NO: 385585 - RNA, 24 nt, Artificial Sequence
  Synthetic
ggcgacaagagcaaaacuccgucu

SEQ ID NO: 385586 - RNA, 18 nt, Artificial Sequence
  Synthetic
caaaacacaucaucgucu

SEQ ID NO: 385587 - RNA, 19 nt, Artificial Sequence
  Synthetic
acaaaacacaucaucgucu

SEQ ID NO: 385588 - RNA, 20 nt, Artificial Sequence
  Synthetic
uacaaaacacaucaucgucu

SEQ ID NO: 385589 - RNA, 21 nt, Artificial Sequence
  Synthetic
guacaaaacacaucaucgucu

SEQ ID NO: 385590 - RNA, 22 nt, Artificial Sequence
  Synthetic
cguacaaaacacaucaucgucu

SEQ ID NO: 385591 - RNA, 23 nt, Artificial Sequence
  Synthetic
gcguacaaaacacaucaucgucu

SEQ ID NO: 385592 - RNA, 24 nt, Artificial Sequence
  Synthetic
ugcguacaaaacacaucaucgucu

SEQ ID NO: 385593 - RNA, 18 nt, Artificial Sequence
  Synthetic
cacuuaacacccucgucu

SEQ ID NO: 385594 - RNA, 19 nt, Artificial Sequence
  Synthetic
ccacuuaacacccucgucu

SEQ ID NO: 385595 - RNA, 20 nt, Artificial Sequence
  Synthetic
uccacuuaacacccucgucu

SEQ ID NO: 385596 - RNA, 21 nt, Artificial Sequence
  Synthetic
uuccacuuaacacccucgucu

SEQ ID NO: 385597 - RNA, 22 nt, Artificial Sequence
  Synthetic
auuccacuuaacacccucgucu

SEQ ID NO: 385598 - RNA, 23 nt, Artificial Sequence
  Synthetic
aauuccacuuaacacccucgucu

SEQ ID NO: 385599 - RNA, 24 nt, Artificial Sequence
  Synthetic
uaauuccacuuaacacccucgucu

SEQ ID NO: 385600 - RNA, 18 nt, Artificial Sequence
  Synthetic
cccaaaucuguaaggucu

SEQ ID NO: 385601 - RNA, 19 nt, Artificial Sequence
  Synthetic
gcccaaaucuguaaggucu

SEQ ID NO: 385602 - RNA, 20 nt, Artificial Sequence
  Synthetic
agcccaaaucuguaaggucu

SEQ ID NO: 385603 - RNA, 21 nt, Artificial Sequence
  Synthetic
uagcccaaaucuguaaggucu

SEQ ID NO: 385604 - RNA, 22 nt, Artificial Sequence
  Synthetic
guagcccaaaucuguaaggucu

SEQ ID NO: 385605 - RNA, 23 nt, Artificial Sequence
  Synthetic
aguagcccaaaucuguaaggucu

SEQ ID NO: 385606 - RNA, 24 nt, Artificial Sequence
  Synthetic
aaguagcccaaaucuguaaggucu

SEQ ID NO: 385607 - RNA, 18 nt, Artificial Sequence
  Synthetic
uuuuagagauacaggucu

SEQ ID NO: 385608 - RNA, 19 nt, Artificial Sequence
  Synthetic
cuuuuagagauacaggucu

SEQ ID NO: 385609 - RNA, 20 nt, Artificial Sequence
  Synthetic
ucuuuuagagauacaggucu

SEQ ID NO: 385610 - RNA, 21 nt, Artificial Sequence
  Synthetic
uucuuuuagagauacaggucu

SEQ ID NO: 385611 - RNA, 22 nt, Artificial Sequence
  Synthetic
uuucuuuuagagauacaggucu

SEQ ID NO: 385612 - RNA, 23 nt, Artificial Sequence
  Synthetic
uuuucuuuuagagauacaggucu

SEQ ID NO: 385613 - RNA, 24 nt, Artificial Sequence
  Synthetic
guuuucuuuuagagauacaggucu

SEQ ID NO: 385614 - RNA, 18 nt, Artificial Sequence
  Synthetic
uucuaauuggggaggucu

SEQ ID NO: 385615 - RNA, 19 nt, Artificial Sequence
  Synthetic
cuucuaauuggggaggucu

SEQ ID NO: 385616 - RNA, 20 nt, Artificial Sequence
  Synthetic
gcuucuaauuggggaggucu

SEQ ID NO: 385617 - RNA, 21 nt, Artificial Sequence
  Synthetic
agcuucuaauuggggaggucu

SEQ ID NO: 385618 - RNA, 22 nt, Artificial Sequence
  Synthetic
aagcuucuaauuggggaggucu

SEQ ID NO: 385619 - RNA, 23 nt, Artificial Sequence
  Synthetic
uaagcuucuaauuggggaggucu

SEQ ID NO: 385620 - RNA, 24 nt, Artificial Sequence
  Synthetic
uuaagcuucuaauuggggaggucu

SEQ ID NO: 385621 - RNA, 18 nt, Artificial Sequence
  Synthetic
uggugauuuuggaggucu

SEQ ID NO: 385622 - RNA, 19 nt, Artificial Sequence
  Synthetic
auggugauuuuggaggucu

SEQ ID NO: 385623 - RNA, 20 nt, Artificial Sequence
  Synthetic
cauggugauuuuggaggucu

SEQ ID NO: 385624 - RNA, 21 nt, Artificial Sequence
  Synthetic
ccauggugauuuuggaggucu

SEQ ID NO: 385625 - RNA, 22 nt, Artificial Sequence
  Synthetic
accauggugauuuuggaggucu

SEQ ID NO: 385626 - RNA, 23 nt, Artificial Sequence
  Synthetic
caccauggugauuuuggaggucu

SEQ ID NO: 385627 - RNA, 24 nt, Artificial Sequence
  Synthetic
acaccauggugauuuuggaggucu

SEQ ID NO: 385628 - RNA, 18 nt, Artificial Sequence
  Synthetic
auucacugggguaggucu

SEQ ID NO: 385629 - RNA, 19 nt, Artificial Sequence
  Synthetic
uauucacugggguaggucu

SEQ ID NO: 385630 - RNA, 20 nt, Artificial Sequence
  Synthetic
uuauucacugggguaggucu

SEQ ID NO: 385631 - RNA, 21 nt, Artificial Sequence
  Synthetic
uuuauucacugggguaggucu

SEQ ID NO: 385632 - RNA, 22 nt, Artificial Sequence
  Synthetic
auuuauucacugggguaggucu

SEQ ID NO: 385633 - RNA, 23 nt, Artificial Sequence
  Synthetic
cauuuauucacugggguaggucu

SEQ ID NO: 385634 - RNA, 24 nt, Artificial Sequence
  Synthetic
ucauuuauucacugggguaggucu

SEQ ID NO: 385635 - RNA, 18 nt, Artificial Sequence
  Synthetic
guaacuugucuagggucu

SEQ ID NO: 385636 - RNA, 19 nt, Artificial Sequence
  Synthetic
cguaacuugucuagggucu

SEQ ID NO: 385637 - RNA, 20 nt, Artificial Sequence
  Synthetic
acguaacuugucuagggucu

SEQ ID NO: 385638 - RNA, 21 nt, Artificial Sequence
  Synthetic
aacguaacuugucuagggucu

SEQ ID NO: 385639 - RNA, 22 nt, Artificial Sequence
  Synthetic
uaacguaacuugucuagggucu

SEQ ID NO: 385640 - RNA, 23 nt, Artificial Sequence
  Synthetic
cuaacguaacuugucuagggucu

SEQ ID NO: 385641 - RNA, 24 nt, Artificial Sequence
  Synthetic
gcuaacguaacuugucuagggucu

SEQ ID NO: 385642 - RNA, 18 nt, Artificial Sequence
  Synthetic
augagagguuuagggucu

SEQ ID NO: 385643 - RNA, 19 nt, Artificial Sequence
  Synthetic
gaugagagguuuagggucu

SEQ ID NO: 385644 - RNA, 20 nt, Artificial Sequence
  Synthetic
ugaugagagguuuagggucu

SEQ ID NO: 385645 - RNA, 21 nt, Artificial Sequence
  Synthetic
cugaugagagguuuagggucu

SEQ ID NO: 385646 - RNA, 22 nt, Artificial Sequence
  Synthetic
gcugaugagagguuuagggucu

SEQ ID NO: 385647 - RNA, 23 nt, Artificial Sequence
  Synthetic
agcugaugagagguuuagggucu

SEQ ID NO: 385648 - RNA, 24 nt, Artificial Sequence
  Synthetic
gagcugaugagagguuuagggucu

SEQ ID NO: 385649 - RNA, 18 nt, Artificial Sequence
  Synthetic
auucuuaaaauggggucu

SEQ ID NO: 385650 - RNA, 19 nt, Artificial Sequence
  Synthetic
cauucuuaaaauggggucu

SEQ ID NO: 385651 - RNA, 20 nt, Artificial Sequence
  Synthetic
ucauucuuaaaauggggucu

SEQ ID NO: 385652 - RNA, 21 nt, Artificial Sequence
  Synthetic
uucauucuuaaaauggggucu

SEQ ID NO: 385653 - RNA, 22 nt, Artificial Sequence
  Synthetic
uuucauucuuaaaauggggucu

SEQ ID NO: 385654 - RNA, 23 nt, Artificial Sequence
  Synthetic
guuucauucuuaaaauggggucu

SEQ ID NO: 385655 - RNA, 24 nt, Artificial Sequence
  Synthetic
uguuucauucuuaaaauggggucu

SEQ ID NO: 385656 - RNA, 18 nt, Artificial Sequence
  Synthetic
ggaauaaaaguggggucu

SEQ ID NO: 385657 - RNA, 19 nt, Artificial Sequence
  Synthetic
aggaauaaaaguggggucu

SEQ ID NO: 385658 - RNA, 20 nt, Artificial Sequence
  Synthetic
aaggaauaaaaguggggucu

SEQ ID NO: 385659 - RNA, 21 nt, Artificial Sequence
  Synthetic
caaggaauaaaaguggggucu

SEQ ID NO: 385660 - RNA, 22 nt, Artificial Sequence
  Synthetic
acaaggaauaaaaguggggucu

SEQ ID NO: 385661 - RNA, 23 nt, Artificial Sequence
  Synthetic
uacaaggaauaaaaguggggucu

SEQ ID NO: 385662 - RNA, 24 nt, Artificial Sequence
  Synthetic
uuacaaggaauaaaaguggggucu

SEQ ID NO: 385663 - RNA, 18 nt, Artificial Sequence
  Synthetic
gaaccacugcaugggucu

SEQ ID NO: 385664 - RNA, 19 nt, Artificial Sequence
  Synthetic
agaaccacugcaugggucu

SEQ ID NO: 385665 - RNA, 20 nt, Artificial Sequence
  Synthetic
cagaaccacugcaugggucu

SEQ ID NO: 385666 - RNA, 21 nt, Artificial Sequence
  Synthetic
acagaaccacugcaugggucu

SEQ ID NO: 385667 - RNA, 22 nt, Artificial Sequence
  Synthetic
cacagaaccacugcaugggucu

SEQ ID NO: 385668 - RNA, 23 nt, Artificial Sequence
  Synthetic
ucacagaaccacugcaugggucu

SEQ ID NO: 385669 - RNA, 24 nt, Artificial Sequence
  Synthetic
cucacagaaccacugcaugggucu

SEQ ID NO: 385670 - RNA, 18 nt, Artificial Sequence
  Synthetic
ccuggagccccugggucu

SEQ ID NO: 385671 - RNA, 19 nt, Artificial Sequence
  Synthetic
accuggagccccugggucu

SEQ ID NO: 385672 - RNA, 20 nt, Artificial Sequence
  Synthetic
uaccuggagccccugggucu

SEQ ID NO: 385673 - RNA, 21 nt, Artificial Sequence
  Synthetic
uuaccuggagccccugggucu

SEQ ID NO: 385674 - RNA, 22 nt, Artificial Sequence
  Synthetic
guuaccuggagccccugggucu

SEQ ID NO: 385675 - RNA, 23 nt, Artificial Sequence
  Synthetic
uguuaccuggagccccugggucu

SEQ ID NO: 385676 - RNA, 24 nt, Artificial Sequence
  Synthetic
cuguuaccuggagccccugggucu

SEQ ID NO: 385677 - RNA, 18 nt, Artificial Sequence
  Synthetic
aaacagagauuugggucu

SEQ ID NO: 385678 - RNA, 19 nt, Artificial Sequence
  Synthetic
aaaacagagauuugggucu

SEQ ID NO: 385679 - RNA, 20 nt, Artificial Sequence
  Synthetic
uaaaacagagauuugggucu

SEQ ID NO: 385680 - RNA, 21 nt, Artificial Sequence
  Synthetic
cuaaaacagagauuugggucu

SEQ ID NO: 385681 - RNA, 22 nt, Artificial Sequence
  Synthetic
ucuaaaacagagauuugggucu

SEQ ID NO: 385682 - RNA, 23 nt, Artificial Sequence
  Synthetic
uucuaaaacagagauuugggucu

SEQ ID NO: 385683 - RNA, 24 nt, Artificial Sequence
  Synthetic
auucuaaaacagagauuugggucu

SEQ ID NO: 385684 - RNA, 18 nt, Artificial Sequence
  Synthetic
guugaaaaucacuggucu

SEQ ID NO: 385685 - RNA, 19 nt, Artificial Sequence
  Synthetic
aguugaaaaucacuggucu

SEQ ID NO: 385686 - RNA, 20 nt, Artificial Sequence
  Synthetic
uaguugaaaaucacuggucu

SEQ ID NO: 385687 - RNA, 21 nt, Artificial Sequence
  Synthetic
cuaguugaaaaucacuggucu

SEQ ID NO: 385688 - RNA, 22 nt, Artificial Sequence
  Synthetic
ccuaguugaaaaucacuggucu

SEQ ID NO: 385689 - RNA, 23 nt, Artificial Sequence
  Synthetic
cccuaguugaaaaucacuggucu

SEQ ID NO: 385690 - RNA, 24 nt, Artificial Sequence
  Synthetic
ucccuaguugaaaaucacuggucu

SEQ ID NO: 385691 - RNA, 18 nt, Artificial Sequence
  Synthetic
caucuaggcugcuggucu

SEQ ID NO: 385692 - RNA, 19 nt, Artificial Sequence
  Synthetic
ccaucuaggcugcuggucu

SEQ ID NO: 385693 - RNA, 20 nt, Artificial Sequence
  Synthetic
uccaucuaggcugcuggucu

SEQ ID NO: 385694 - RNA, 21 nt, Artificial Sequence
  Synthetic
guccaucuaggcugcuggucu

SEQ ID NO: 385695 - RNA, 22 nt, Artificial Sequence
  Synthetic
cguccaucuaggcugcuggucu

SEQ ID NO: 385696 - RNA, 23 nt, Artificial Sequence
  Synthetic
acguccaucuaggcugcuggucu

SEQ ID NO: 385697 - RNA, 24 nt, Artificial Sequence
  Synthetic
cacguccaucuaggcugcuggucu

SEQ ID NO: 385698 - RNA, 18 nt, Artificial Sequence
  Synthetic
gacacagaauucuggucu

SEQ ID NO: 385699 - RNA, 19 nt, Artificial Sequence
  Synthetic
agacacagaauucuggucu

SEQ ID NO: 385700 - RNA, 20 nt, Artificial Sequence
  Synthetic
gagacacagaauucuggucu

SEQ ID NO: 385701 - RNA, 21 nt, Artificial Sequence
  Synthetic
ugagacacagaauucuggucu

SEQ ID NO: 385702 - RNA, 22 nt, Artificial Sequence
  Synthetic
cugagacacagaauucuggucu

SEQ ID NO: 385703 - RNA, 23 nt, Artificial Sequence
  Synthetic
gcugagacacagaauucuggucu

SEQ ID NO: 385704 - RNA, 24 nt, Artificial Sequence
  Synthetic
ugcugagacacagaauucuggucu

SEQ ID NO: 385705 - RNA, 18 nt, Artificial Sequence
  Synthetic
aacuguuauuucuggucu

SEQ ID NO: 385706 - RNA, 19 nt, Artificial Sequence
  Synthetic
aaacuguuauuucuggucu

SEQ ID NO: 385707 - RNA, 20 nt, Artificial Sequence
  Synthetic
gaaacuguuauuucuggucu

SEQ ID NO: 385708 - RNA, 21 nt, Artificial Sequence
  Synthetic
ugaaacuguuauuucuggucu

SEQ ID NO: 385709 - RNA, 22 nt, Artificial Sequence
  Synthetic
gugaaacuguuauuucuggucu

SEQ ID NO: 385710 - RNA, 23 nt, Artificial Sequence
  Synthetic
ugugaaacuguuauuucuggucu

SEQ ID NO: 385711 - RNA, 24 nt, Artificial Sequence
  Synthetic
augugaaacuguuauuucuggucu

SEQ ID NO: 385712 - RNA, 18 nt, Artificial Sequence
  Synthetic
uaauaaauuuucuggucu

SEQ ID NO: 385713 - RNA, 19 nt, Artificial Sequence
  Synthetic
uuaauaaauuuucuggucu

SEQ ID NO: 385714 - RNA, 20 nt, Artificial Sequence
  Synthetic
cuuaauaaauuuucuggucu

SEQ ID NO: 385715 - RNA, 21 nt, Artificial Sequence
  Synthetic
ccuuaauaaauuuucuggucu

SEQ ID NO: 385716 - RNA, 22 nt, Artificial Sequence
  Synthetic
gccuuaauaaauuuucuggucu

SEQ ID NO: 385717 - RNA, 23 nt, Artificial Sequence
  Synthetic
ugccuuaauaaauuuucuggucu

SEQ ID NO: 385718 - RNA, 24 nt, Artificial Sequence
  Synthetic
uugccuuaauaaauuuucuggucu

SEQ ID NO: 385719 - RNA, 18 nt, Artificial Sequence
  Synthetic
uuuauuccacuguggucu

SEQ ID NO: 385720 - RNA, 19 nt, Artificial Sequence
  Synthetic
uuuuauuccacuguggucu

SEQ ID NO: 385721 - RNA, 20 nt, Artificial Sequence
  Synthetic
guuuuauuccacuguggucu

SEQ ID NO: 385722 - RNA, 21 nt, Artificial Sequence
  Synthetic
aguuuuauuccacuguggucu

SEQ ID NO: 385723 - RNA, 22 nt, Artificial Sequence
  Synthetic
uaguuuuauuccacuguggucu

SEQ ID NO: 385724 - RNA, 23 nt, Artificial Sequence
  Synthetic
uuaguuuuauuccacuguggucu

SEQ ID NO: 385725 - RNA, 24 nt, Artificial Sequence
  Synthetic
uuuaguuuuauuccacuguggucu

SEQ ID NO: 385726 - RNA, 18 nt, Artificial Sequence
  Synthetic
uugauugcacuguggucu

SEQ ID NO: 385727 - RNA, 19 nt, Artificial Sequence
  Synthetic
uuugauugcacuguggucu

SEQ ID NO: 385728 - RNA, 20 nt, Artificial Sequence
  Synthetic
guuugauugcacuguggucu

SEQ ID NO: 385729 - RNA, 21 nt, Artificial Sequence
  Synthetic
aguuugauugcacuguggucu

SEQ ID NO: 385730 - RNA, 22 nt, Artificial Sequence
  Synthetic
uaguuugauugcacuguggucu

SEQ ID NO: 385731 - RNA, 23 nt, Artificial Sequence
  Synthetic
cuaguuugauugcacuguggucu

SEQ ID NO: 385732 - RNA, 24 nt, Artificial Sequence
  Synthetic
ucuaguuugauugcacuguggucu

SEQ ID NO: 385733 - RNA, 18 nt, Artificial Sequence
  Synthetic
cgcaaauugcuguggucu

SEQ ID NO: 385734 - RNA, 19 nt, Artificial Sequence
  Synthetic
acgcaaauugcuguggucu

SEQ ID NO: 385735 - RNA, 20 nt, Artificial Sequence
  Synthetic
aacgcaaauugcuguggucu

SEQ ID NO: 385736 - RNA, 21 nt, Artificial Sequence
  Synthetic
aaacgcaaauugcuguggucu

SEQ ID NO: 385737 - RNA, 22 nt, Artificial Sequence
  Synthetic
gaaacgcaaauugcuguggucu

SEQ ID NO: 385738 - RNA, 23 nt, Artificial Sequence
  Synthetic
ugaaacgcaaauugcuguggucu

SEQ ID NO: 385739 - RNA, 24 nt, Artificial Sequence
  Synthetic
augaaacgcaaauugcuguggucu

SEQ ID NO: 385740 - RNA, 18 nt, Artificial Sequence
  Synthetic
uuuuaggguuauuggucu

SEQ ID NO: 385741 - RNA, 19 nt, Artificial Sequence
  Synthetic
uuuuuaggguuauuggucu

SEQ ID NO: 385742 - RNA, 20 nt, Artificial Sequence
  Synthetic
uuuuuuaggguuauuggucu

SEQ ID NO: 385743 - RNA, 21 nt, Artificial Sequence
  Synthetic
auuuuuuaggguuauuggucu

SEQ ID NO: 385744 - RNA, 22 nt, Artificial Sequence
  Synthetic
aauuuuuuaggguuauuggucu

SEQ ID NO: 385745 - RNA, 23 nt, Artificial Sequence
  Synthetic
uaauuuuuuaggguuauuggucu

SEQ ID NO: 385746 - RNA, 24 nt, Artificial Sequence
  Synthetic
auaauuuuuuaggguuauuggucu

SEQ ID NO: 385747 - RNA, 18 nt, Artificial Sequence
  Synthetic
caaaugacuaaaaugucu

SEQ ID NO: 385748 - RNA, 19 nt, Artificial Sequence
  Synthetic
ccaaaugacuaaaaugucu

SEQ ID NO: 385749 - RNA, 20 nt, Artificial Sequence
  Synthetic
gccaaaugacuaaaaugucu

SEQ ID NO: 385750 - RNA, 21 nt, Artificial Sequence
  Synthetic
ggccaaaugacuaaaaugucu

SEQ ID NO: 385751 - RNA, 22 nt, Artificial Sequence
  Synthetic
gggccaaaugacuaaaaugucu

SEQ ID NO: 385752 - RNA, 23 nt, Artificial Sequence
  Synthetic
agggccaaaugacuaaaaugucu

SEQ ID NO: 385753 - RNA, 24 nt, Artificial Sequence
  Synthetic
aagggccaaaugacuaaaaugucu

SEQ ID NO: 385754 - RNA, 18 nt, Artificial Sequence
  Synthetic
auacaguuagaaaugucu

SEQ ID NO: 385755 - RNA, 19 nt, Artificial Sequence
  Synthetic
gauacaguuagaaaugucu

SEQ ID NO: 385756 - RNA, 20 nt, Artificial Sequence
  Synthetic
agauacaguuagaaaugucu

SEQ ID NO: 385757 - RNA, 21 nt, Artificial Sequence
  Synthetic
uagauacaguuagaaaugucu

SEQ ID NO: 385758 - RNA, 22 nt, Artificial Sequence
  Synthetic
cuagauacaguuagaaaugucu

SEQ ID NO: 385759 - RNA, 23 nt, Artificial Sequence
  Synthetic
ucuagauacaguuagaaaugucu

SEQ ID NO: 385760 - RNA, 24 nt, Artificial Sequence
  Synthetic
cucuagauacaguuagaaaugucu

SEQ ID NO: 385761 - RNA, 18 nt, Artificial Sequence
  Synthetic
gaugguguuugaaugucu

SEQ ID NO: 385762 - RNA, 19 nt, Artificial Sequence
  Synthetic
ugaugguguuugaaugucu

SEQ ID NO: 385763 - RNA, 20 nt, Artificial Sequence
  Synthetic
augaugguguuugaaugucu

SEQ ID NO: 385764 - RNA, 21 nt, Artificial Sequence
  Synthetic
gaugaugguguuugaaugucu

SEQ ID NO: 385765 - RNA, 22 nt, Artificial Sequence
  Synthetic
agaugaugguguuugaaugucu

SEQ ID NO: 385766 - RNA, 23 nt, Artificial Sequence
  Synthetic
aagaugaugguguuugaaugucu

SEQ ID NO: 385767 - RNA, 24 nt, Artificial Sequence
  Synthetic
gaagaugaugguguuugaaugucu

SEQ ID NO: 385768 - RNA, 18 nt, Artificial Sequence
  Synthetic
ucuucauuguuaaugucu

SEQ ID NO: 385769 - RNA, 19 nt, Artificial Sequence
  Synthetic
aucuucauuguuaaugucu

SEQ ID NO: 385770 - RNA, 20 nt, Artificial Sequence
  Synthetic
gaucuucauuguuaaugucu

SEQ ID NO: 385771 - RNA, 21 nt, Artificial Sequence
  Synthetic
cgaucuucauuguuaaugucu

SEQ ID NO: 385772 - RNA, 22 nt, Artificial Sequence
  Synthetic
acgaucuucauuguuaaugucu

SEQ ID NO: 385773 - RNA, 23 nt, Artificial Sequence
  Synthetic
aacgaucuucauuguuaaugucu

SEQ ID NO: 385774 - RNA, 24 nt, Artificial Sequence
  Synthetic
caacgaucuucauuguuaaugucu

SEQ ID NO: 385775 - RNA, 18 nt, Artificial Sequence
  Synthetic
gaaaaaauagccaugucu

SEQ ID NO: 385776 - RNA, 19 nt, Artificial Sequence
  Synthetic
ugaaaaaauagccaugucu

SEQ ID NO: 385777 - RNA, 20 nt, Artificial Sequence
  Synthetic
augaaaaaauagccaugucu

SEQ ID NO: 385778 - RNA, 21 nt, Artificial Sequence
  Synthetic
aaugaaaaaauagccaugucu

SEQ ID NO: 385779 - RNA, 22 nt, Artificial Sequence
  Synthetic
aaaugaaaaaauagccaugucu

SEQ ID NO: 385780 - RNA, 23 nt, Artificial Sequence
  Synthetic
gaaaugaaaaaauagccaugucu

SEQ ID NO: 385781 - RNA, 24 nt, Artificial Sequence
  Synthetic
agaaaugaaaaaauagccaugucu

SEQ ID NO: 385782 - RNA, 18 nt, Artificial Sequence
  Synthetic
uauggaaaaggcaugucu

SEQ ID NO: 385783 - RNA, 19 nt, Artificial Sequence
  Synthetic
guauggaaaaggcaugucu

SEQ ID NO: 385784 - RNA, 20 nt, Artificial Sequence
  Synthetic
aguauggaaaaggcaugucu

SEQ ID NO: 385785 - RNA, 21 nt, Artificial Sequence
  Synthetic
caguauggaaaaggcaugucu

SEQ ID NO: 385786 - RNA, 22 nt, Artificial Sequence
  Synthetic
ucaguauggaaaaggcaugucu

SEQ ID NO: 385787 - RNA, 23 nt, Artificial Sequence
  Synthetic
aucaguauggaaaaggcaugucu

SEQ ID NO: 385788 - RNA, 24 nt, Artificial Sequence
  Synthetic
gaucaguauggaaaaggcaugucu

SEQ ID NO: 385789 - RNA, 18 nt, Artificial Sequence
  Synthetic
aaaguaauuaagaugucu

SEQ ID NO: 385790 - RNA, 19 nt, Artificial Sequence
  Synthetic
uaaaguaauuaagaugucu

SEQ ID NO: 385791 - RNA, 20 nt, Artificial Sequence
  Synthetic
auaaaguaauuaagaugucu

SEQ ID NO: 385792 - RNA, 21 nt, Artificial Sequence
  Synthetic
uauaaaguaauuaagaugucu

SEQ ID NO: 385793 - RNA, 22 nt, Artificial Sequence
  Synthetic
auauaaaguaauuaagaugucu

SEQ ID NO: 385794 - RNA, 23 nt, Artificial Sequence
  Synthetic
uauauaaaguaauuaagaugucu

SEQ ID NO: 385795 - RNA, 24 nt, Artificial Sequence
  Synthetic
uuauauaaaguaauuaagaugucu

SEQ ID NO: 385796 - RNA, 18 nt, Artificial Sequence
  Synthetic
gcaaggaaugagaugucu

SEQ ID NO: 385797 - RNA, 19 nt, Artificial Sequence
  Synthetic
agcaaggaaugagaugucu

SEQ ID NO: 385798 - RNA, 20 nt, Artificial Sequence
  Synthetic
gagcaaggaaugagaugucu

SEQ ID NO: 385799 - RNA, 21 nt, Artificial Sequence
  Synthetic
ggagcaaggaaugagaugucu

SEQ ID NO: 385800 - RNA, 22 nt, Artificial Sequence
  Synthetic
uggagcaaggaaugagaugucu

SEQ ID NO: 385801 - RNA, 23 nt, Artificial Sequence
  Synthetic
auggagcaaggaaugagaugucu

SEQ ID NO: 385802 - RNA, 24 nt, Artificial Sequence
  Synthetic
aauggagcaaggaaugagaugucu

SEQ ID NO: 385803 - RNA, 18 nt, Artificial Sequence
  Synthetic
auucccuaguagaugucu

SEQ ID NO: 385804 - RNA, 19 nt, Artificial Sequence
  Synthetic
aauucccuaguagaugucu

SEQ ID NO: 385805 - RNA, 20 nt, Artificial Sequence
  Synthetic
uaauucccuaguagaugucu

SEQ ID NO: 385806 - RNA, 21 nt, Artificial Sequence
  Synthetic
uuaauucccuaguagaugucu

SEQ ID NO: 385807 - RNA, 22 nt, Artificial Sequence
  Synthetic
uuuaauucccuaguagaugucu

SEQ ID NO: 385808 - RNA, 23 nt, Artificial Sequence
  Synthetic
cuuuaauucccuaguagaugucu

SEQ ID NO: 385809 - RNA, 24 nt, Artificial Sequence
  Synthetic
ucuuuaauucccuaguagaugucu

SEQ ID NO: 385810 - RNA, 18 nt, Artificial Sequence
  Synthetic
guguauggauggaugucu

SEQ ID NO: 385811 - RNA, 19 nt, Artificial Sequence
  Synthetic
aguguauggauggaugucu

SEQ ID NO: 385812 - RNA, 20 nt, Artificial Sequence
  Synthetic
caguguauggauggaugucu

SEQ ID NO: 385813 - RNA, 21 nt, Artificial Sequence
  Synthetic
ccaguguauggauggaugucu

SEQ ID NO: 385814 - RNA, 22 nt, Artificial Sequence
  Synthetic
uccaguguauggauggaugucu

SEQ ID NO: 385815 - RNA, 23 nt, Artificial Sequence
  Synthetic
cuccaguguauggauggaugucu

SEQ ID NO: 385816 - RNA, 24 nt, Artificial Sequence
  Synthetic
ucuccaguguauggauggaugucu

SEQ ID NO: 385817 - RNA, 18 nt, Artificial Sequence
  Synthetic
aaaaaaaugaugaugucu

SEQ ID NO: 385818 - RNA, 19 nt, Artificial Sequence
  Synthetic
gaaaaaaaugaugaugucu

SEQ ID NO: 385819 - RNA, 20 nt, Artificial Sequence
  Synthetic
agaaaaaaaugaugaugucu

SEQ ID NO: 385820 - RNA, 21 nt, Artificial Sequence
  Synthetic
aagaaaaaaaugaugaugucu

SEQ ID NO: 385821 - RNA, 22 nt, Artificial Sequence
  Synthetic
aaagaaaaaaaugaugaugucu

SEQ ID NO: 385822 - RNA, 23 nt, Artificial Sequence
  Synthetic
aaaagaaaaaaaugaugaugucu

SEQ ID NO: 385823 - RNA, 24 nt, Artificial Sequence
  Synthetic
aaaaagaaaaaaaugaugaugucu

SEQ ID NO: 385824 - RNA, 18 nt, Artificial Sequence
  Synthetic
gauuguuaguugaugucu

SEQ ID NO: 385825 - RNA, 19 nt, Artificial Sequence
  Synthetic
ggauuguuaguugaugucu

SEQ ID NO: 385826 - RNA, 20 nt, Artificial Sequence
  Synthetic
uggauuguuaguugaugucu

SEQ ID NO: 385827 - RNA, 21 nt, Artificial Sequence
  Synthetic
guggauuguuaguugaugucu

SEQ ID NO: 385828 - RNA, 22 nt, Artificial Sequence
  Synthetic
uguggauuguuaguugaugucu

SEQ ID NO: 385829 - RNA, 23 nt, Artificial Sequence
  Synthetic
auguggauuguuaguugaugucu

SEQ ID NO: 385830 - RNA, 24 nt, Artificial Sequence
  Synthetic
gauguggauuguuaguugaugucu

SEQ ID NO: 385831 - RNA, 18 nt, Artificial Sequence
  Synthetic
cuuuacuuauauaugucu

SEQ ID NO: 385832 - RNA, 19 nt, Artificial Sequence
  Synthetic
ucuuuacuuauauaugucu

SEQ ID NO: 385833 - RNA, 20 nt, Artificial Sequence
  Synthetic
cucuuuacuuauauaugucu

SEQ ID NO: 385834 - RNA, 21 nt, Artificial Sequence
  Synthetic
ucucuuuacuuauauaugucu

SEQ ID NO: 385835 - RNA, 22 nt, Artificial Sequence
  Synthetic
uucucuuuacuuauauaugucu

SEQ ID NO: 385836 - RNA, 23 nt, Artificial Sequence
  Synthetic
guucucuuuacuuauauaugucu

SEQ ID NO: 385837 - RNA, 24 nt, Artificial Sequence
  Synthetic
uguucucuuuacuuauauaugucu

SEQ ID NO: 385838 - RNA, 18 nt, Artificial Sequence
  Synthetic
gugcuuccucuuaugucu

SEQ ID NO: 385839 - RNA, 19 nt, Artificial Sequence
  Synthetic
ugugcuuccucuuaugucu

SEQ ID NO: 385840 - RNA, 20 nt, Artificial Sequence
  Synthetic
augugcuuccucuuaugucu

SEQ ID NO: 385841 - RNA, 21 nt, Artificial Sequence
  Synthetic
uaugugcuuccucuuaugucu

SEQ ID NO: 385842 - RNA, 22 nt, Artificial Sequence
  Synthetic
auaugugcuuccucuuaugucu

SEQ ID NO: 385843 - RNA, 23 nt, Artificial Sequence
  Synthetic
gauaugugcuuccucuuaugucu

SEQ ID NO: 385844 - RNA, 24 nt, Artificial Sequence
  Synthetic
agauaugugcuuccucuuaugucu

SEQ ID NO: 385845 - RNA, 18 nt, Artificial Sequence
  Synthetic
ucucuagagcaacugucu

SEQ ID NO: 385846 - RNA, 19 nt, Artificial Sequence
  Synthetic
uucucuagagcaacugucu

SEQ ID NO: 385847 - RNA, 20 nt, Artificial Sequence
  Synthetic
cuucucuagagcaacugucu

SEQ ID NO: 385848 - RNA, 21 nt, Artificial Sequence
  Synthetic
ccuucucuagagcaacugucu

SEQ ID NO: 385849 - RNA, 22 nt, Artificial Sequence
  Synthetic
uccuucucuagagcaacugucu

SEQ ID NO: 385850 - RNA, 23 nt, Artificial Sequence
  Synthetic
uuccuucucuagagcaacugucu

SEQ ID NO: 385851 - RNA, 24 nt, Artificial Sequence
  Synthetic
auuccuucucuagagcaacugucu

SEQ ID NO: 385852 - RNA, 18 nt, Artificial Sequence
  Synthetic
cucuuguaugaccugucu

SEQ ID NO: 385853 - RNA, 19 nt, Artificial Sequence
  Synthetic
ucucuuguaugaccugucu

SEQ ID NO: 385854 - RNA, 20 nt, Artificial Sequence
  Synthetic
gucucuuguaugaccugucu

SEQ ID NO: 385855 - RNA, 21 nt, Artificial Sequence
  Synthetic
ggucucuuguaugaccugucu

SEQ ID NO: 385856 - RNA, 22 nt, Artificial Sequence
  Synthetic
uggucucuuguaugaccugucu

SEQ ID NO: 385857 - RNA, 23 nt, Artificial Sequence
  Synthetic
guggucucuuguaugaccugucu

SEQ ID NO: 385858 - RNA, 24 nt, Artificial Sequence
  Synthetic
uguggucucuuguaugaccugucu

SEQ ID NO: 385859 - RNA, 18 nt, Artificial Sequence
  Synthetic
uaagggcuaacccugucu

SEQ ID NO: 385860 - RNA, 19 nt, Artificial Sequence
  Synthetic
cuaagggcuaacccugucu

SEQ ID NO: 385861 - RNA, 20 nt, Artificial Sequence
  Synthetic
ccuaagggcuaacccugucu

SEQ ID NO: 385862 - RNA, 21 nt, Artificial Sequence
  Synthetic
uccuaagggcuaacccugucu

SEQ ID NO: 385863 - RNA, 22 nt, Artificial Sequence
  Synthetic
uuccuaagggcuaacccugucu

SEQ ID NO: 385864 - RNA, 23 nt, Artificial Sequence
  Synthetic
uuuccuaagggcuaacccugucu

SEQ ID NO: 385865 - RNA, 24 nt, Artificial Sequence
  Synthetic
cuuuccuaagggcuaacccugucu

SEQ ID NO: 385866 - RNA, 18 nt, Artificial Sequence
  Synthetic
cauauauauccccugucu

SEQ ID NO: 385867 - RNA, 19 nt, Artificial Sequence
  Synthetic
acauauauauccccugucu

SEQ ID NO: 385868 - RNA, 20 nt, Artificial Sequence
  Synthetic
aacauauauauccccugucu

SEQ ID NO: 385869 - RNA, 21 nt, Artificial Sequence
  Synthetic
aaacauauauauccccugucu

SEQ ID NO: 385870 - RNA, 22 nt, Artificial Sequence
  Synthetic
uaaacauauauauccccugucu

SEQ ID NO: 385871 - RNA, 23 nt, Artificial Sequence
  Synthetic
auaaacauauauauccccugucu

SEQ ID NO: 385872 - RNA, 24 nt, Artificial Sequence
  Synthetic
uauaaacauauauauccccugucu

SEQ ID NO: 385873 - RNA, 18 nt, Artificial Sequence
  Synthetic
ucucucaaggcccugucu

SEQ ID NO: 385874 - RNA, 19 nt, Artificial Sequence
  Synthetic
uucucucaaggcccugucu

SEQ ID NO: 385875 - RNA, 20 nt, Artificial Sequence
  Synthetic
guucucucaaggcccugucu

SEQ ID NO: 385876 - RNA, 21 nt, Artificial Sequence
  Synthetic
aguucucucaaggcccugucu

SEQ ID NO: 385877 - RNA, 22 nt, Artificial Sequence
  Synthetic
uaguucucucaaggcccugucu

SEQ ID NO: 385878 - RNA, 23 nt, Artificial Sequence
  Synthetic
guaguucucucaaggcccugucu

SEQ ID NO: 385879 - RNA, 24 nt, Artificial Sequence
  Synthetic
uguaguucucucaaggcccugucu

SEQ ID NO: 385880 - RNA, 18 nt, Artificial Sequence
  Synthetic
cuaacuggcuggcugucu

SEQ ID NO: 385881 - RNA, 19 nt, Artificial Sequence
  Synthetic
ccuaacuggcuggcugucu

SEQ ID NO: 385882 - RNA, 20 nt, Artificial Sequence
  Synthetic
uccuaacuggcuggcugucu

SEQ ID NO: 385883 - RNA, 21 nt, Artificial Sequence
  Synthetic
auccuaacuggcuggcugucu

SEQ ID NO: 385884 - RNA, 22 nt, Artificial Sequence
  Synthetic
gauccuaacuggcuggcugucu

SEQ ID NO: 385885 - RNA, 23 nt, Artificial Sequence
  Synthetic
ugauccuaacuggcuggcugucu

SEQ ID NO: 385886 - RNA, 24 nt, Artificial Sequence
  Synthetic
cugauccuaacuggcuggcugucu

SEQ ID NO: 385887 - RNA, 18 nt, Artificial Sequence
  Synthetic
ccuugggucuggcugucu

SEQ ID NO: 385888 - RNA, 19 nt, Artificial Sequence
  Synthetic
cccuugggucuggcugucu

SEQ ID NO: 385889 - RNA, 20 nt, Artificial Sequence
  Synthetic
acccuugggucuggcugucu

SEQ ID NO: 385890 - RNA, 21 nt, Artificial Sequence
  Synthetic
gacccuugggucuggcugucu

SEQ ID NO: 385891 - RNA, 22 nt, Artificial Sequence
  Synthetic
ggacccuugggucuggcugucu

SEQ ID NO: 385892 - RNA, 23 nt, Artificial Sequence
  Synthetic
uggacccuugggucuggcugucu

SEQ ID NO: 385893 - RNA, 24 nt, Artificial Sequence
  Synthetic
uuggacccuugggucuggcugucu

SEQ ID NO: 385894 - RNA, 18 nt, Artificial Sequence
  Synthetic
uauccagagaugcugucu

SEQ ID NO: 385895 - RNA, 19 nt, Artificial Sequence
  Synthetic
auauccagagaugcugucu

SEQ ID NO: 385896 - RNA, 20 nt, Artificial Sequence
  Synthetic
cauauccagagaugcugucu

SEQ ID NO: 385897 - RNA, 21 nt, Artificial Sequence
  Synthetic
gcauauccagagaugcugucu

SEQ ID NO: 385898 - RNA, 22 nt, Artificial Sequence
  Synthetic
ggcauauccagagaugcugucu

SEQ ID NO: 385899 - RNA, 23 nt, Artificial Sequence
  Synthetic
gggcauauccagagaugcugucu

SEQ ID NO: 385900 - RNA, 24 nt, Artificial Sequence
  Synthetic
cgggcauauccagagaugcugucu

SEQ ID NO: 385901 - RNA, 18 nt, Artificial Sequence
  Synthetic
cacacauaaacucugucu

SEQ ID NO: 385902 - RNA, 19 nt, Artificial Sequence
  Synthetic
ucacacauaaacucugucu

SEQ ID NO: 385903 - RNA, 20 nt, Artificial Sequence
  Synthetic
gucacacauaaacucugucu

SEQ ID NO: 385904 - RNA, 21 nt, Artificial Sequence
  Synthetic
agucacacauaaacucugucu

SEQ ID NO: 385905 - RNA, 22 nt, Artificial Sequence
  Synthetic
gagucacacauaaacucugucu

SEQ ID NO: 385906 - RNA, 23 nt, Artificial Sequence
  Synthetic
agagucacacauaaacucugucu

SEQ ID NO: 385907 - RNA, 24 nt, Artificial Sequence
  Synthetic
uagagucacacauaaacucugucu

SEQ ID NO: 385908 - RNA, 18 nt, Artificial Sequence
  Synthetic
cagagcgagacucugucu

SEQ ID NO: 385909 - RNA, 19 nt, Artificial Sequence
  Synthetic
acagagcgagacucugucu

SEQ ID NO: 385910 - RNA, 20 nt, Artificial Sequence
  Synthetic
gacagagcgagacucugucu

SEQ ID NO: 385911 - RNA, 21 nt, Artificial Sequence
  Synthetic
ugacagagcgagacucugucu

SEQ ID NO: 385912 - RNA, 22 nt, Artificial Sequence
  Synthetic
gugacagagcgagacucugucu

SEQ ID NO: 385913 - RNA, 23 nt, Artificial Sequence
  Synthetic
ggugacagagcgagacucugucu

SEQ ID NO: 385914 - RNA, 24 nt, Artificial Sequence
  Synthetic
uggugacagagcgagacucugucu

SEQ ID NO: 385915 - RNA, 18 nt, Artificial Sequence
  Synthetic
uugguugagcuucugucu

SEQ ID NO: 385916 - RNA, 19 nt, Artificial Sequence
  Synthetic
uuugguugagcuucugucu

SEQ ID NO: 385917 - RNA, 20 nt, Artificial Sequence
  Synthetic
cuuugguugagcuucugucu

SEQ ID NO: 385918 - RNA, 21 nt, Artificial Sequence
  Synthetic
acuuugguugagcuucugucu

SEQ ID NO: 385919 - RNA, 22 nt, Artificial Sequence
  Synthetic
uacuuugguugagcuucugucu

SEQ ID NO: 385920 - RNA, 23 nt, Artificial Sequence
  Synthetic
cuacuuugguugagcuucugucu

SEQ ID NO: 385921 - RNA, 24 nt, Artificial Sequence
  Synthetic
acuacuuugguugagcuucugucu

SEQ ID NO: 385922 - RNA, 18 nt, Artificial Sequence
  Synthetic
agucauccuucagugucu

SEQ ID NO: 385923 - RNA, 19 nt, Artificial Sequence
  Synthetic
cagucauccuucagugucu

SEQ ID NO: 385924 - RNA, 20 nt, Artificial Sequence
  Synthetic
acagucauccuucagugucu

SEQ ID NO: 385925 - RNA, 21 nt, Artificial Sequence
  Synthetic
cacagucauccuucagugucu

SEQ ID NO: 385926 - RNA, 22 nt, Artificial Sequence
  Synthetic
acacagucauccuucagugucu

SEQ ID NO: 385927 - RNA, 23 nt, Artificial Sequence
  Synthetic
uacacagucauccuucagugucu

SEQ ID NO: 385928 - RNA, 24 nt, Artificial Sequence
  Synthetic
uuacacagucauccuucagugucu

SEQ ID NO: 385929 - RNA, 18 nt, Artificial Sequence
  Synthetic
uuuaagauugacgugucu

SEQ ID NO: 385930 - RNA, 19 nt, Artificial Sequence
  Synthetic
cuuuaagauugacgugucu

SEQ ID NO: 385931 - RNA, 20 nt, Artificial Sequence
  Synthetic
ccuuuaagauugacgugucu

SEQ ID NO: 385932 - RNA, 21 nt, Artificial Sequence
  Synthetic
uccuuuaagauugacgugucu

SEQ ID NO: 385933 - RNA, 22 nt, Artificial Sequence
  Synthetic
auccuuuaagauugacgugucu

SEQ ID NO: 385934 - RNA, 23 nt, Artificial Sequence
  Synthetic
cauccuuuaagauugacgugucu

SEQ ID NO: 385935 - RNA, 24 nt, Artificial Sequence
  Synthetic
gcauccuuuaagauugacgugucu

SEQ ID NO: 385936 - RNA, 18 nt, Artificial Sequence
  Synthetic
ucaugcugggccgugucu

SEQ ID NO: 385937 - RNA, 19 nt, Artificial Sequence
  Synthetic
uucaugcugggccgugucu

SEQ ID NO: 385938 - RNA, 20 nt, Artificial Sequence
  Synthetic
auucaugcugggccgugucu

SEQ ID NO: 385939 - RNA, 21 nt, Artificial Sequence
  Synthetic
aauucaugcugggccgugucu

SEQ ID NO: 385940 - RNA, 22 nt, Artificial Sequence
  Synthetic
aaauucaugcugggccgugucu

SEQ ID NO: 385941 - RNA, 23 nt, Artificial Sequence
  Synthetic
caaauucaugcugggccgugucu

SEQ ID NO: 385942 - RNA, 24 nt, Artificial Sequence
  Synthetic
acaaauucaugcugggccgugucu

SEQ ID NO: 385943 - RNA, 18 nt, Artificial Sequence
  Synthetic
ccagcagauuuggugucu

SEQ ID NO: 385944 - RNA, 19 nt, Artificial Sequence
  Synthetic
accagcagauuuggugucu

SEQ ID NO: 385945 - RNA, 20 nt, Artificial Sequence
  Synthetic
uaccagcagauuuggugucu

SEQ ID NO: 385946 - RNA, 21 nt, Artificial Sequence
  Synthetic
auaccagcagauuuggugucu

SEQ ID NO: 385947 - RNA, 22 nt, Artificial Sequence
  Synthetic
aauaccagcagauuuggugucu

SEQ ID NO: 385948 - RNA, 23 nt, Artificial Sequence
  Synthetic
aaauaccagcagauuuggugucu

SEQ ID NO: 385949 - RNA, 24 nt, Artificial Sequence
  Synthetic
aaaauaccagcagauuuggugucu

SEQ ID NO: 385950 - RNA, 18 nt, Artificial Sequence
  Synthetic
aaacuuaagcaugugucu

SEQ ID NO: 385951 - RNA, 19 nt, Artificial Sequence
  Synthetic
gaaacuuaagcaugugucu

SEQ ID NO: 385952 - RNA, 20 nt, Artificial Sequence
  Synthetic
agaaacuuaagcaugugucu

SEQ ID NO: 385953 - RNA, 21 nt, Artificial Sequence
  Synthetic
cagaaacuuaagcaugugucu

SEQ ID NO: 385954 - RNA, 22 nt, Artificial Sequence
  Synthetic
acagaaacuuaagcaugugucu

SEQ ID NO: 385955 - RNA, 23 nt, Artificial Sequence
  Synthetic
uacagaaacuuaagcaugugucu

SEQ ID NO: 385956 - RNA, 24 nt, Artificial Sequence
  Synthetic
auacagaaacuuaagcaugugucu

SEQ ID NO: 385957 - RNA, 18 nt, Artificial Sequence
  Synthetic
gggauaagaccugugucu

SEQ ID NO: 385958 - RNA, 19 nt, Artificial Sequence
  Synthetic
agggauaagaccugugucu

SEQ ID NO: 385959 - RNA, 20 nt, Artificial Sequence
  Synthetic
gagggauaagaccugugucu

SEQ ID NO: 385960 - RNA, 21 nt, Artificial Sequence
  Synthetic
ggagggauaagaccugugucu

SEQ ID NO: 385961 - RNA, 22 nt, Artificial Sequence
  Synthetic
uggagggauaagaccugugucu

SEQ ID NO: 385962 - RNA, 23 nt, Artificial Sequence
  Synthetic
uuggagggauaagaccugugucu

SEQ ID NO: 385963 - RNA, 24 nt, Artificial Sequence
  Synthetic
auuggagggauaagaccugugucu

SEQ ID NO: 385964 - RNA, 18 nt, Artificial Sequence
  Synthetic
auaauauaauuugugucu

SEQ ID NO: 385965 - RNA, 19 nt, Artificial Sequence
  Synthetic
aauaauauaauuugugucu

SEQ ID NO: 385966 - RNA, 20 nt, Artificial Sequence
  Synthetic
uaauaauauaauuugugucu

SEQ ID NO: 385967 - RNA, 21 nt, Artificial Sequence
  Synthetic
guaauaauauaauuugugucu

SEQ ID NO: 385968 - RNA, 22 nt, Artificial Sequence
  Synthetic
uguaauaauauaauuugugucu

SEQ ID NO: 385969 - RNA, 23 nt, Artificial Sequence
  Synthetic
cuguaauaauauaauuugugucu

SEQ ID NO: 385970 - RNA, 24 nt, Artificial Sequence
  Synthetic
ccuguaauaauauaauuugugucu

SEQ ID NO: 385971 - RNA, 18 nt, Artificial Sequence
  Synthetic
ucguucaacaaauugucu

SEQ ID NO: 385972 - RNA, 19 nt, Artificial Sequence
  Synthetic
uucguucaacaaauugucu

SEQ ID NO: 385973 - RNA, 20 nt, Artificial Sequence
  Synthetic
cuucguucaacaaauugucu

SEQ ID NO: 385974 - RNA, 21 nt, Artificial Sequence
  Synthetic
ccuucguucaacaaauugucu

SEQ ID NO: 385975 - RNA, 22 nt, Artificial Sequence
  Synthetic
uccuucguucaacaaauugucu

SEQ ID NO: 385976 - RNA, 23 nt, Artificial Sequence
  Synthetic
uuccuucguucaacaaauugucu

SEQ ID NO: 385977 - RNA, 24 nt, Artificial Sequence
  Synthetic
auuccuucguucaacaaauugucu

SEQ ID NO: 385978 - RNA, 18 nt, Artificial Sequence
  Synthetic
gauaaacugaaauugucu

SEQ ID NO: 385979 - RNA, 19 nt, Artificial Sequence
  Synthetic
ggauaaacugaaauugucu

SEQ ID NO: 385980 - RNA, 20 nt, Artificial Sequence
  Synthetic
aggauaaacugaaauugucu

SEQ ID NO: 385981 - RNA, 21 nt, Artificial Sequence
  Synthetic
gaggauaaacugaaauugucu

SEQ ID NO: 385982 - RNA, 22 nt, Artificial Sequence
  Synthetic
ugaggauaaacugaaauugucu

SEQ ID NO: 385983 - RNA, 23 nt, Artificial Sequence
  Synthetic
augaggauaaacugaaauugucu

SEQ ID NO: 385984 - RNA, 24 nt, Artificial Sequence
  Synthetic
aaugaggauaaacugaaauugucu

SEQ ID NO: 385985 - RNA, 18 nt, Artificial Sequence
  Synthetic
ugguuaagcacauugucu

SEQ ID NO: 385986 - RNA, 19 nt, Artificial Sequence
  Synthetic
gugguuaagcacauugucu

SEQ ID NO: 385987 - RNA, 20 nt, Artificial Sequence
  Synthetic
agugguuaagcacauugucu

SEQ ID NO: 385988 - RNA, 21 nt, Artificial Sequence
  Synthetic
cagugguuaagcacauugucu

SEQ ID NO: 385989 - RNA, 22 nt, Artificial Sequence
  Synthetic
gcagugguuaagcacauugucu

SEQ ID NO: 385990 - RNA, 23 nt, Artificial Sequence
  Synthetic
ugcagugguuaagcacauugucu

SEQ ID NO: 385991 - RNA, 24 nt, Artificial Sequence
  Synthetic
gugcagugguuaagcacauugucu

SEQ ID NO: 385992 - RNA, 18 nt, Artificial Sequence
  Synthetic
auguggguaaucuugucu

SEQ ID NO: 385993 - RNA, 19 nt, Artificial Sequence
  Synthetic
uauguggguaaucuugucu

SEQ ID NO: 385994 - RNA, 20 nt, Artificial Sequence
  Synthetic
uuauguggguaaucuugucu

SEQ ID NO: 385995 - RNA, 21 nt, Artificial Sequence
  Synthetic
auuauguggguaaucuugucu

SEQ ID NO: 385996 - RNA, 22 nt, Artificial Sequence
  Synthetic
cauuauguggguaaucuugucu

SEQ ID NO: 385997 - RNA, 23 nt, Artificial Sequence
  Synthetic
acauuauguggguaaucuugucu

SEQ ID NO: 385998 - RNA, 24 nt, Artificial Sequence
  Synthetic
gacauuauguggguaaucuugucu

SEQ ID NO: 385999 - RNA, 18 nt, Artificial Sequence
  Synthetic
uuccaacaugucuugucu

SEQ ID NO: 386000 - RNA, 19 nt, Artificial Sequence
  Synthetic
uuuccaacaugucuugucu

SEQ ID NO: 386001 - RNA, 20 nt, Artificial Sequence
  Synthetic
guuuccaacaugucuugucu

SEQ ID NO: 386002 - RNA, 21 nt, Artificial Sequence
  Synthetic
uguuuccaacaugucuugucu

SEQ ID NO: 386003 - RNA, 22 nt, Artificial Sequence
  Synthetic
guguuuccaacaugucuugucu

SEQ ID NO: 386004 - RNA, 23 nt, Artificial Sequence
  Synthetic
uguguuuccaacaugucuugucu

SEQ ID NO: 386005 - RNA, 24 nt, Artificial Sequence
  Synthetic
auguguuuccaacaugucuugucu

SEQ ID NO: 386006 - RNA, 18 nt, Artificial Sequence
  Synthetic
aaguaaggccaguugucu

SEQ ID NO: 386007 - RNA, 19 nt, Artificial Sequence
  Synthetic
aaaguaaggccaguugucu

SEQ ID NO: 386008 - RNA, 20 nt, Artificial Sequence
  Synthetic
aaaaguaaggccaguugucu

SEQ ID NO: 386009 - RNA, 21 nt, Artificial Sequence
  Synthetic
aaaaaguaaggccaguugucu

SEQ ID NO: 386010 - RNA, 22 nt, Artificial Sequence
  Synthetic
gaaaaaguaaggccaguugucu

SEQ ID NO: 386011 - RNA, 23 nt, Artificial Sequence
  Synthetic
ggaaaaaguaaggccaguugucu

SEQ ID NO: 386012 - RNA, 24 nt, Artificial Sequence
  Synthetic
aggaaaaaguaaggccaguugucu

SEQ ID NO: 386013 - RNA, 18 nt, Artificial Sequence
  Synthetic
gaaaauagugcuuugucu

SEQ ID NO: 386014 - RNA, 19 nt, Artificial Sequence
  Synthetic
agaaaauagugcuuugucu

SEQ ID NO: 386015 - RNA, 20 nt, Artificial Sequence
  Synthetic
uagaaaauagugcuuugucu

SEQ ID NO: 386016 - RNA, 21 nt, Artificial Sequence
  Synthetic
auagaaaauagugcuuugucu

SEQ ID NO: 386017 - RNA, 22 nt, Artificial Sequence
  Synthetic
aauagaaaauagugcuuugucu

SEQ ID NO: 386018 - RNA, 23 nt, Artificial Sequence
  Synthetic
aaauagaaaauagugcuuugucu

SEQ ID NO: 386019 - RNA, 24 nt, Artificial Sequence
  Synthetic
uaaauagaaaauagugcuuugucu

SEQ ID NO: 386020 - RNA, 18 nt, Artificial Sequence
  Synthetic
gaaugaauaaguuugucu

SEQ ID NO: 386021 - RNA, 19 nt, Artificial Sequence
  Synthetic
ggaaugaauaaguuugucu

SEQ ID NO: 386022 - RNA, 20 nt, Artificial Sequence
  Synthetic
aggaaugaauaaguuugucu

SEQ ID NO: 386023 - RNA, 21 nt, Artificial Sequence
  Synthetic
gaggaaugaauaaguuugucu

SEQ ID NO: 386024 - RNA, 22 nt, Artificial Sequence
  Synthetic
ggaggaaugaauaaguuugucu

SEQ ID NO: 386025 - RNA, 23 nt, Artificial Sequence
  Synthetic
aggaggaaugaauaaguuugucu

SEQ ID NO: 386026 - RNA, 24 nt, Artificial Sequence
  Synthetic
gaggaggaaugaauaaguuugucu

SEQ ID NO: 386027 - RNA, 18 nt, Artificial Sequence
  Synthetic
uauuucuugcuuuugucu

SEQ ID NO: 386028 - RNA, 19 nt, Artificial Sequence
  Synthetic
auauuucuugcuuuugucu

SEQ ID NO: 386029 - RNA, 20 nt, Artificial Sequence
  Synthetic
uauauuucuugcuuuugucu

SEQ ID NO: 386030 - RNA, 21 nt, Artificial Sequence
  Synthetic
auauauuucuugcuuuugucu

SEQ ID NO: 386031 - RNA, 22 nt, Artificial Sequence
  Synthetic
cauauauuucuugcuuuugucu

SEQ ID NO: 386032 - RNA, 23 nt, Artificial Sequence
  Synthetic
ucauauauuucuugcuuuugucu

SEQ ID NO: 386033 - RNA, 24 nt, Artificial Sequence
  Synthetic
uucauauauuucuugcuuuugucu

SEQ ID NO: 386034 - RNA, 18 nt, Artificial Sequence
  Synthetic
auuaaaugaaaaaauucu

SEQ ID NO: 386035 - RNA, 19 nt, Artificial Sequence
  Synthetic
uauuaaaugaaaaaauucu

SEQ ID NO: 386036 - RNA, 20 nt, Artificial Sequence
  Synthetic
auauuaaaugaaaaaauucu

SEQ ID NO: 386037 - RNA, 21 nt, Artificial Sequence
  Synthetic
cauauuaaaugaaaaaauucu

SEQ ID NO: 386038 - RNA, 22 nt, Artificial Sequence
  Synthetic
acauauuaaaugaaaaaauucu

SEQ ID NO: 386039 - RNA, 23 nt, Artificial Sequence
  Synthetic
aacauauuaaaugaaaaaauucu

SEQ ID NO: 386040 - RNA, 24 nt, Artificial Sequence
  Synthetic
aaacauauuaaaugaaaaaauucu

SEQ ID NO: 386041 - RNA, 18 nt, Artificial Sequence
  Synthetic
cagacaauuaaaaauucu

SEQ ID NO: 386042 - RNA, 19 nt, Artificial Sequence
  Synthetic
acagacaauuaaaaauucu

SEQ ID NO: 386043 - RNA, 20 nt, Artificial Sequence
  Synthetic
gacagacaauuaaaaauucu

SEQ ID NO: 386044 - RNA, 21 nt, Artificial Sequence
  Synthetic
agacagacaauuaaaaauucu

SEQ ID NO: 386045 - RNA, 22 nt, Artificial Sequence
  Synthetic
cagacagacaauuaaaaauucu

SEQ ID NO: 386046 - RNA, 23 nt, Artificial Sequence
  Synthetic
ucagacagacaauuaaaaauucu

SEQ ID NO: 386047 - RNA, 24 nt, Artificial Sequence
  Synthetic
cucagacagacaauuaaaaauucu

SEQ ID NO: 386048 - RNA, 18 nt, Artificial Sequence
  Synthetic
uugauugcucaaaauucu

SEQ ID NO: 386049 - RNA, 19 nt, Artificial Sequence
  Synthetic
uuugauugcucaaaauucu

SEQ ID NO: 386050 - RNA, 20 nt, Artificial Sequence
  Synthetic
guuugauugcucaaaauucu

SEQ ID NO: 386051 - RNA, 21 nt, Artificial Sequence
  Synthetic
aguuugauugcucaaaauucu

SEQ ID NO: 386052 - RNA, 22 nt, Artificial Sequence
  Synthetic
gaguuugauugcucaaaauucu

SEQ ID NO: 386053 - RNA, 23 nt, Artificial Sequence
  Synthetic
ggaguuugauugcucaaaauucu

SEQ ID NO: 386054 - RNA, 24 nt, Artificial Sequence
  Synthetic
aggaguuugauugcucaaaauucu

SEQ ID NO: 386055 - RNA, 18 nt, Artificial Sequence
  Synthetic
ggcuuuuuaacaaauucu

SEQ ID NO: 386056 - RNA, 19 nt, Artificial Sequence
  Synthetic
uggcuuuuuaacaaauucu

SEQ ID NO: 386057 - RNA, 20 nt, Artificial Sequence
  Synthetic
uuggcuuuuuaacaaauucu

SEQ ID NO: 386058 - RNA, 21 nt, Artificial Sequence
  Synthetic
uuuggcuuuuuaacaaauucu

SEQ ID NO: 386059 - RNA, 22 nt, Artificial Sequence
  Synthetic
guuuggcuuuuuaacaaauucu

SEQ ID NO: 386060 - RNA, 23 nt, Artificial Sequence
  Synthetic
uguuuggcuuuuuaacaaauucu

SEQ ID NO: 386061 - RNA, 24 nt, Artificial Sequence
  Synthetic
uuguuuggcuuuuuaacaaauucu

SEQ ID NO: 386062 - RNA, 18 nt, Artificial Sequence
  Synthetic
ucaaacaucccaaauucu

SEQ ID NO: 386063 - RNA, 19 nt, Artificial Sequence
  Synthetic
aucaaacaucccaaauucu

SEQ ID NO: 386064 - RNA, 20 nt, Artificial Sequence
  Synthetic
caucaaacaucccaaauucu

SEQ ID NO: 386065 - RNA, 21 nt, Artificial Sequence
  Synthetic
ucaucaaacaucccaaauucu

SEQ ID NO: 386066 - RNA, 22 nt, Artificial Sequence
  Synthetic
uucaucaaacaucccaaauucu

SEQ ID NO: 386067 - RNA, 23 nt, Artificial Sequence
  Synthetic
cuucaucaaacaucccaaauucu

SEQ ID NO: 386068 - RNA, 24 nt, Artificial Sequence
  Synthetic
gcuucaucaaacaucccaaauucu

SEQ ID NO: 386069 - RNA, 18 nt, Artificial Sequence
  Synthetic
uaucugagaagaaauucu

SEQ ID NO: 386070 - RNA, 19 nt, Artificial Sequence
  Synthetic
auaucugagaagaaauucu

SEQ ID NO: 386071 - RNA, 20 nt, Artificial Sequence
  Synthetic
cauaucugagaagaaauucu

SEQ ID NO: 386072 - RNA, 21 nt, Artificial Sequence
  Synthetic
acauaucugagaagaaauucu

SEQ ID NO: 386073 - RNA, 22 nt, Artificial Sequence
  Synthetic
gacauaucugagaagaaauucu

SEQ ID NO: 386074 - RNA, 23 nt, Artificial Sequence
  Synthetic
agacauaucugagaagaaauucu

SEQ ID NO: 386075 - RNA, 24 nt, Artificial Sequence
  Synthetic
cagacauaucugagaagaaauucu

SEQ ID NO: 386076 - RNA, 18 nt, Artificial Sequence
  Synthetic
uacugaaacagaaauucu

SEQ ID NO: 386077 - RNA, 19 nt, Artificial Sequence
  Synthetic
cuacugaaacagaaauucu

SEQ ID NO: 386078 - RNA, 20 nt, Artificial Sequence
  Synthetic
ccuacugaaacagaaauucu

SEQ ID NO: 386079 - RNA, 21 nt, Artificial Sequence
  Synthetic
accuacugaaacagaaauucu

SEQ ID NO: 386080 - RNA, 22 nt, Artificial Sequence
  Synthetic
gaccuacugaaacagaaauucu

SEQ ID NO: 386081 - RNA, 23 nt, Artificial Sequence
  Synthetic
agaccuacugaaacagaaauucu

SEQ ID NO: 386082 - RNA, 24 nt, Artificial Sequence
  Synthetic
cagaccuacugaaacagaaauucu

SEQ ID NO: 386083 - RNA, 18 nt, Artificial Sequence
  Synthetic
uuuacguagagaaauucu

SEQ ID NO: 386084 - RNA, 19 nt, Artificial Sequence
  Synthetic
auuuacguagagaaauucu

SEQ ID NO: 386085 - RNA, 20 nt, Artificial Sequence
  Synthetic
cauuuacguagagaaauucu

SEQ ID NO: 386086 - RNA, 21 nt, Artificial Sequence
  Synthetic
gcauuuacguagagaaauucu

SEQ ID NO: 386087 - RNA, 22 nt, Artificial Sequence
  Synthetic
agcauuuacguagagaaauucu

SEQ ID NO: 386088 - RNA, 23 nt, Artificial Sequence
  Synthetic
uagcauuuacguagagaaauucu

SEQ ID NO: 386089 - RNA, 24 nt, Artificial Sequence
  Synthetic
uuagcauuuacguagagaaauucu

SEQ ID NO: 386090 - RNA, 18 nt, Artificial Sequence
  Synthetic
uaguuuaugugaaauucu

SEQ ID NO: 386091 - RNA, 19 nt, Artificial Sequence
  Synthetic
auaguuuaugugaaauucu

SEQ ID NO: 386092 - RNA, 20 nt, Artificial Sequence
  Synthetic
cauaguuuaugugaaauucu

SEQ ID NO: 386093 - RNA, 21 nt, Artificial Sequence
  Synthetic
ucauaguuuaugugaaauucu

SEQ ID NO: 386094 - RNA, 22 nt, Artificial Sequence
  Synthetic
uucauaguuuaugugaaauucu

SEQ ID NO: 386095 - RNA, 23 nt, Artificial Sequence
  Synthetic
auucauaguuuaugugaaauucu

SEQ ID NO: 386096 - RNA, 24 nt, Artificial Sequence
  Synthetic
gauucauaguuuaugugaaauucu

SEQ ID NO: 386097 - RNA, 18 nt, Artificial Sequence
  Synthetic
caagguagauuaaauucu

SEQ ID NO: 386098 - RNA, 19 nt, Artificial Sequence
  Synthetic
ucaagguagauuaaauucu

SEQ ID NO: 386099 - RNA, 20 nt, Artificial Sequence
  Synthetic
uucaagguagauuaaauucu

SEQ ID NO: 386100 - RNA, 21 nt, Artificial Sequence
  Synthetic
cuucaagguagauuaaauucu

SEQ ID NO: 386101 - RNA, 22 nt, Artificial Sequence
  Synthetic
ccuucaagguagauuaaauucu

SEQ ID NO: 386102 - RNA, 23 nt, Artificial Sequence
  Synthetic
accuucaagguagauuaaauucu

SEQ ID NO: 386103 - RNA, 24 nt, Artificial Sequence
  Synthetic
caccuucaagguagauuaaauucu

SEQ ID NO: 386104 - RNA, 18 nt, Artificial Sequence
  Synthetic
guaguuuuuuccaauucu

SEQ ID NO: 386105 - RNA, 19 nt, Artificial Sequence
  Synthetic
aguaguuuuuuccaauucu

SEQ ID NO: 386106 - RNA, 20 nt, Artificial Sequence
  Synthetic
aaguaguuuuuuccaauucu

SEQ ID NO: 386107 - RNA, 18 nt, Artificial Sequence
  Synthetic
aacccaguccagaauucu

SEQ ID NO: 386108 - RNA, 19 nt, Artificial Sequence
  Synthetic
caacccaguccagaauucu

SEQ ID NO: 386109 - RNA, 20 nt, Artificial Sequence
  Synthetic
ucaacccaguccagaauucu

SEQ ID NO: 386110 - RNA, 21 nt, Artificial Sequence
  Synthetic
uucaacccaguccagaauucu

SEQ ID NO: 386111 - RNA, 22 nt, Artificial Sequence
  Synthetic
uuucaacccaguccagaauucu

SEQ ID NO: 386112 - RNA, 23 nt, Artificial Sequence
  Synthetic
uuuucaacccaguccagaauucu

SEQ ID NO: 386113 - RNA, 24 nt, Artificial Sequence
  Synthetic
uuuuucaacccaguccagaauucu

SEQ ID NO: 386114 - RNA, 18 nt, Artificial Sequence
  Synthetic
aguuggagauugaauucu

SEQ ID NO: 386115 - RNA, 19 nt, Artificial Sequence
  Synthetic
gaguuggagauugaauucu

SEQ ID NO: 386116 - RNA, 20 nt, Artificial Sequence
  Synthetic
agaguuggagauugaauucu

SEQ ID NO: 386117 - RNA, 21 nt, Artificial Sequence
  Synthetic
aagaguuggagauugaauucu

SEQ ID NO: 386118 - RNA, 22 nt, Artificial Sequence
  Synthetic
uaagaguuggagauugaauucu

SEQ ID NO: 386119 - RNA, 23 nt, Artificial Sequence
  Synthetic
cuaagaguuggagauugaauucu

SEQ ID NO: 386120 - RNA, 24 nt, Artificial Sequence
  Synthetic
ucuaagaguuggagauugaauucu

SEQ ID NO: 386121 - RNA, 18 nt, Artificial Sequence
  Synthetic
aauuuguuuaauaauucu

SEQ ID NO: 386122 - RNA, 19 nt, Artificial Sequence
  Synthetic
aaauuuguuuaauaauucu

SEQ ID NO: 386123 - RNA, 20 nt, Artificial Sequence
  Synthetic
caaauuuguuuaauaauucu

SEQ ID NO: 386124 - RNA, 21 nt, Artificial Sequence
  Synthetic
gcaaauuuguuuaauaauucu

SEQ ID NO: 386125 - RNA, 22 nt, Artificial Sequence
  Synthetic
agcaaauuuguuuaauaauucu

SEQ ID NO: 386126 - RNA, 23 nt, Artificial Sequence
  Synthetic
cagcaaauuuguuuaauaauucu

SEQ ID NO: 386127 - RNA, 24 nt, Artificial Sequence
  Synthetic
ucagcaaauuuguuuaauaauucu

SEQ ID NO: 386128 - RNA, 18 nt, Artificial Sequence
  Synthetic
uuaaggaucccuaauucu

SEQ ID NO: 386129 - RNA, 19 nt, Artificial Sequence
  Synthetic
uuuaaggaucccuaauucu

SEQ ID NO: 386130 - RNA, 20 nt, Artificial Sequence
  Synthetic
auuuaaggaucccuaauucu

SEQ ID NO: 386131 - RNA, 21 nt, Artificial Sequence
  Synthetic
aauuuaaggaucccuaauucu

SEQ ID NO: 386132 - RNA, 22 nt, Artificial Sequence
  Synthetic
caauuuaaggaucccuaauucu

SEQ ID NO: 386133 - RNA, 23 nt, Artificial Sequence
  Synthetic
gcaauuuaaggaucccuaauucu

SEQ ID NO: 386134 - RNA, 24 nt, Artificial Sequence
  Synthetic
ggcaauuuaaggaucccuaauucu

SEQ ID NO: 386135 - RNA, 18 nt, Artificial Sequence
  Synthetic
gaaugaacuucuaauucu

SEQ ID NO: 386136 - RNA, 19 nt, Artificial Sequence
  Synthetic
agaaugaacuucuaauucu

SEQ ID NO: 386137 - RNA, 20 nt, Artificial Sequence
  Synthetic
uagaaugaacuucuaauucu

SEQ ID NO: 386138 - RNA, 21 nt, Artificial Sequence
  Synthetic
auagaaugaacuucuaauucu

SEQ ID NO: 386139 - RNA, 22 nt, Artificial Sequence
  Synthetic
aauagaaugaacuucuaauucu

SEQ ID NO: 386140 - RNA, 23 nt, Artificial Sequence
  Synthetic
aaauagaaugaacuucuaauucu

SEQ ID NO: 386141 - RNA, 24 nt, Artificial Sequence
  Synthetic
gaaauagaaugaacuucuaauucu

SEQ ID NO: 386142 - RNA, 18 nt, Artificial Sequence
  Synthetic
guaguuuguucuaauucu

SEQ ID NO: 386143 - RNA, 19 nt, Artificial Sequence
  Synthetic
aguaguuuguucuaauucu

SEQ ID NO: 386144 - RNA, 20 nt, Artificial Sequence
  Synthetic
aaguaguuuguucuaauucu

SEQ ID NO: 386145 - RNA, 21 nt, Artificial Sequence
  Synthetic
aaaguaguuuguucuaauucu

SEQ ID NO: 386146 - RNA, 22 nt, Artificial Sequence
  Synthetic
uaaaguaguuuguucuaauucu

SEQ ID NO: 386147 - RNA, 23 nt, Artificial Sequence
  Synthetic
guaaaguaguuuguucuaauucu

SEQ ID NO: 386148 - RNA, 24 nt, Artificial Sequence
  Synthetic
uguaaaguaguuuguucuaauucu

SEQ ID NO: 386149 - RNA, 18 nt, Artificial Sequence
  Synthetic
uaucauauuauuaauucu

SEQ ID NO: 386150 - RNA, 19 nt, Artificial Sequence
  Synthetic
uuaucauauuauuaauucu

SEQ ID NO: 386151 - RNA, 20 nt, Artificial Sequence
  Synthetic
auuaucauauuauuaauucu

SEQ ID NO: 386152 - RNA, 21 nt, Artificial Sequence
  Synthetic
cauuaucauauuauuaauucu

SEQ ID NO: 386153 - RNA, 22 nt, Artificial Sequence
  Synthetic
ucauuaucauauuauuaauucu

SEQ ID NO: 386154 - RNA, 23 nt, Artificial Sequence
  Synthetic
uucauuaucauauuauuaauucu

SEQ ID NO: 386155 - RNA, 24 nt, Artificial Sequence
  Synthetic
auucauuaucauauuauuaauucu

SEQ ID NO: 386156 - RNA, 18 nt, Artificial Sequence
  Synthetic
cuaauuuauguuaauucu

SEQ ID NO: 386157 - RNA, 19 nt, Artificial Sequence
  Synthetic
acuaauuuauguuaauucu

SEQ ID NO: 386158 - RNA, 20 nt, Artificial Sequence
  Synthetic
uacuaauuuauguuaauucu

SEQ ID NO: 386159 - RNA, 21 nt, Artificial Sequence
  Synthetic
uuacuaauuuauguuaauucu

SEQ ID NO: 386160 - RNA, 22 nt, Artificial Sequence
  Synthetic
guuacuaauuuauguuaauucu

SEQ ID NO: 386161 - RNA, 23 nt, Artificial Sequence
  Synthetic
aguuacuaauuuauguuaauucu

SEQ ID NO: 386162 - RNA, 24 nt, Artificial Sequence
  Synthetic
aaguuacuaauuuauguuaauucu

SEQ ID NO: 386163 - RNA, 18 nt, Artificial Sequence
  Synthetic
auucaauaaccacauucu

SEQ ID NO: 386164 - RNA, 19 nt, Artificial Sequence
  Synthetic
uauucaauaaccacauucu

SEQ ID NO: 386165 - RNA, 20 nt, Artificial Sequence
  Synthetic
cuauucaauaaccacauucu

SEQ ID NO: 386166 - RNA, 21 nt, Artificial Sequence
  Synthetic
ucuauucaauaaccacauucu

SEQ ID NO: 386167 - RNA, 22 nt, Artificial Sequence
  Synthetic
gucuauucaauaaccacauucu

SEQ ID NO: 386168 - RNA, 23 nt, Artificial Sequence
  Synthetic
agucuauucaauaaccacauucu

SEQ ID NO: 386169 - RNA, 24 nt, Artificial Sequence
  Synthetic
uagucuauucaauaaccacauucu

SEQ ID NO: 386170 - RNA, 18 nt, Artificial Sequence
  Synthetic
uauaugaguccacauucu

SEQ ID NO: 386171 - RNA, 19 nt, Artificial Sequence
  Synthetic
auauaugaguccacauucu

SEQ ID NO: 386172 - RNA, 20 nt, Artificial Sequence
  Synthetic
uauauaugaguccacauucu

SEQ ID NO: 386173 - RNA, 21 nt, Artificial Sequence
  Synthetic
auauauaugaguccacauucu

SEQ ID NO: 386174 - RNA, 22 nt, Artificial Sequence
  Synthetic
cauauauaugaguccacauucu

SEQ ID NO: 386175 - RNA, 23 nt, Artificial Sequence
  Synthetic
acauauauaugaguccacauucu

SEQ ID NO: 386176 - RNA, 24 nt, Artificial Sequence
  Synthetic
uacauauauaugaguccacauucu

SEQ ID NO: 386177 - RNA, 18 nt, Artificial Sequence
  Synthetic
gguucagagauacauucu

SEQ ID NO: 386178 - RNA, 19 nt, Artificial Sequence
  Synthetic
ugguucagagauacauucu

SEQ ID NO: 386179 - RNA, 20 nt, Artificial Sequence
  Synthetic
cugguucagagauacauucu

SEQ ID NO: 386180 - RNA, 21 nt, Artificial Sequence
  Synthetic
gcugguucagagauacauucu

SEQ ID NO: 386181 - RNA, 22 nt, Artificial Sequence
  Synthetic
ugcugguucagagauacauucu

SEQ ID NO: 386182 - RNA, 23 nt, Artificial Sequence
  Synthetic
cugcugguucagagauacauucu

SEQ ID NO: 386183 - RNA, 24 nt, Artificial Sequence
  Synthetic
gcugcugguucagagauacauucu

SEQ ID NO: 386184 - RNA, 18 nt, Artificial Sequence
  Synthetic
ucugaguaccuacauucu

SEQ ID NO: 386185 - RNA, 19 nt, Artificial Sequence
  Synthetic
cucugaguaccuacauucu

SEQ ID NO: 386186 - RNA, 20 nt, Artificial Sequence
  Synthetic
ucucugaguaccuacauucu

SEQ ID NO: 386187 - RNA, 21 nt, Artificial Sequence
  Synthetic
uucucugaguaccuacauucu

SEQ ID NO: 386188 - RNA, 22 nt, Artificial Sequence
  Synthetic
cuucucugaguaccuacauucu

SEQ ID NO: 386189 - RNA, 23 nt, Artificial Sequence
  Synthetic
ucuucucugaguaccuacauucu

SEQ ID NO: 386190 - RNA, 24 nt, Artificial Sequence
  Synthetic
cucuucucugaguaccuacauucu

SEQ ID NO: 386191 - RNA, 18 nt, Artificial Sequence
  Synthetic
guacagggcccccauucu

SEQ ID NO: 386192 - RNA, 19 nt, Artificial Sequence
  Synthetic
aguacagggcccccauucu

SEQ ID NO: 386193 - RNA, 20 nt, Artificial Sequence
  Synthetic
uaguacagggcccccauucu

SEQ ID NO: 386194 - RNA, 21 nt, Artificial Sequence
  Synthetic
cuaguacagggcccccauucu

SEQ ID NO: 386195 - RNA, 22 nt, Artificial Sequence
  Synthetic
ccuaguacagggcccccauucu

SEQ ID NO: 386196 - RNA, 23 nt, Artificial Sequence
  Synthetic
cccuaguacagggcccccauucu

SEQ ID NO: 386197 - RNA, 24 nt, Artificial Sequence
  Synthetic
ucccuaguacagggcccccauucu

SEQ ID NO: 386198 - RNA, 18 nt, Artificial Sequence
  Synthetic
cuaagggauucccauucu

SEQ ID NO: 386199 - RNA, 19 nt, Artificial Sequence
  Synthetic
ccuaagggauucccauucu

SEQ ID NO: 386200 - RNA, 20 nt, Artificial Sequence
  Synthetic
cccuaagggauucccauucu

SEQ ID NO: 386201 - RNA, 21 nt, Artificial Sequence
  Synthetic
ucccuaagggauucccauucu

SEQ ID NO: 386202 - RNA, 22 nt, Artificial Sequence
  Synthetic
aucccuaagggauucccauucu

SEQ ID NO: 386203 - RNA, 23 nt, Artificial Sequence
  Synthetic
caucccuaagggauucccauucu

SEQ ID NO: 386204 - RNA, 24 nt, Artificial Sequence
  Synthetic
ucaucccuaagggauucccauucu

SEQ ID NO: 386205 - RNA, 18 nt, Artificial Sequence
  Synthetic
agguugacaagccauucu

SEQ ID NO: 386206 - RNA, 19 nt, Artificial Sequence
  Synthetic
gagguugacaagccauucu

SEQ ID NO: 386207 - RNA, 20 nt, Artificial Sequence
  Synthetic
agagguugacaagccauucu

SEQ ID NO: 386208 - RNA, 21 nt, Artificial Sequence
  Synthetic
uagagguugacaagccauucu

SEQ ID NO: 386209 - RNA, 22 nt, Artificial Sequence
  Synthetic
guagagguugacaagccauucu

SEQ ID NO: 386210 - RNA, 23 nt, Artificial Sequence
  Synthetic
aguagagguugacaagccauucu

SEQ ID NO: 386211 - RNA, 24 nt, Artificial Sequence
  Synthetic
caguagagguugacaagccauucu

SEQ ID NO: 386212 - RNA, 18 nt, Artificial Sequence
  Synthetic
gcauaaaucagccauucu

SEQ ID NO: 386213 - RNA, 19 nt, Artificial Sequence
  Synthetic
ugcauaaaucagccauucu

SEQ ID NO: 386214 - RNA, 20 nt, Artificial Sequence
  Synthetic
gugcauaaaucagccauucu

SEQ ID NO: 386215 - RNA, 21 nt, Artificial Sequence
  Synthetic
ugugcauaaaucagccauucu

SEQ ID NO: 386216 - RNA, 22 nt, Artificial Sequence
  Synthetic
cugugcauaaaucagccauucu

SEQ ID NO: 386217 - RNA, 23 nt, Artificial Sequence
  Synthetic
ucugugcauaaaucagccauucu

SEQ ID NO: 386218 - RNA, 24 nt, Artificial Sequence
  Synthetic
gucugugcauaaaucagccauucu

SEQ ID NO: 386219 - RNA, 18 nt, Artificial Sequence
  Synthetic
aauuuaacacagcauucu

SEQ ID NO: 386220 - RNA, 19 nt, Artificial Sequence
  Synthetic
gaauuuaacacagcauucu

SEQ ID NO: 386221 - RNA, 20 nt, Artificial Sequence
  Synthetic
agaauuuaacacagcauucu

SEQ ID NO: 386222 - RNA, 21 nt, Artificial Sequence
  Synthetic
aagaauuuaacacagcauucu

SEQ ID NO: 386223 - RNA, 22 nt, Artificial Sequence
  Synthetic
aaagaauuuaacacagcauucu

SEQ ID NO: 386224 - RNA, 23 nt, Artificial Sequence
  Synthetic
gaaagaauuuaacacagcauucu

SEQ ID NO: 386225 - RNA, 24 nt, Artificial Sequence
  Synthetic
ggaaagaauuuaacacagcauucu

SEQ ID NO: 386226 - RNA, 18 nt, Artificial Sequence
  Synthetic
caauuuugacagcauucu

SEQ ID NO: 386227 - RNA, 19 nt, Artificial Sequence
  Synthetic
ccaauuuugacagcauucu

SEQ ID NO: 386228 - RNA, 20 nt, Artificial Sequence
  Synthetic
gccaauuuugacagcauucu

SEQ ID NO: 386229 - RNA, 21 nt, Artificial Sequence
  Synthetic
agccaauuuugacagcauucu

SEQ ID NO: 386230 - RNA, 22 nt, Artificial Sequence
  Synthetic
cagccaauuuugacagcauucu

SEQ ID NO: 386231 - RNA, 23 nt, Artificial Sequence
  Synthetic
ccagccaauuuugacagcauucu

SEQ ID NO: 386232 - RNA, 24 nt, Artificial Sequence
  Synthetic
uccagccaauuuugacagcauucu

SEQ ID NO: 386233 - RNA, 18 nt, Artificial Sequence
  Synthetic
aaauuugaaacgcauucu

SEQ ID NO: 386234 - RNA, 19 nt, Artificial Sequence
  Synthetic
gaaauuugaaacgcauucu

SEQ ID NO: 386235 - RNA, 20 nt, Artificial Sequence
  Synthetic
agaaauuugaaacgcauucu

SEQ ID NO: 386236 - RNA, 21 nt, Artificial Sequence
  Synthetic
cagaaauuugaaacgcauucu

SEQ ID NO: 386237 - RNA, 22 nt, Artificial Sequence
  Synthetic
ccagaaauuugaaacgcauucu

SEQ ID NO: 386238 - RNA, 23 nt, Artificial Sequence
  Synthetic
uccagaaauuugaaacgcauucu

SEQ ID NO: 386239 - RNA, 24 nt, Artificial Sequence
  Synthetic
uuccagaaauuugaaacgcauucu

SEQ ID NO: 386240 - RNA, 18 nt, Artificial Sequence
  Synthetic
cccggguaauugcauucu

SEQ ID NO: 386241 - RNA, 19 nt, Artificial Sequence
  Synthetic
ucccggguaauugcauucu

SEQ ID NO: 386242 - RNA, 20 nt, Artificial Sequence
  Synthetic
uucccggguaauugcauucu

SEQ ID NO: 386243 - RNA, 21 nt, Artificial Sequence
  Synthetic
auucccggguaauugcauucu

SEQ ID NO: 386244 - RNA, 22 nt, Artificial Sequence
  Synthetic
aauucccggguaauugcauucu

SEQ ID NO: 386245 - RNA, 23 nt, Artificial Sequence
  Synthetic
caauucccggguaauugcauucu

SEQ ID NO: 386246 - RNA, 24 nt, Artificial Sequence
  Synthetic
ccaauucccggguaauugcauucu

SEQ ID NO: 386247 - RNA, 18 nt, Artificial Sequence
  Synthetic
ugcuucugcuaucauucu

SEQ ID NO: 386248 - RNA, 19 nt, Artificial Sequence
  Synthetic
gugcuucugcuaucauucu

SEQ ID NO: 386249 - RNA, 20 nt, Artificial Sequence
  Synthetic
ugugcuucugcuaucauucu

SEQ ID NO: 386250 - RNA, 21 nt, Artificial Sequence
  Synthetic
uugugcuucugcuaucauucu

SEQ ID NO: 386251 - RNA, 22 nt, Artificial Sequence
  Synthetic
uuugugcuucugcuaucauucu

SEQ ID NO: 386252 - RNA, 23 nt, Artificial Sequence
  Synthetic
guuugugcuucugcuaucauucu

SEQ ID NO: 386253 - RNA, 24 nt, Artificial Sequence
  Synthetic
uguuugugcuucugcuaucauucu

SEQ ID NO: 386254 - RNA, 18 nt, Artificial Sequence
  Synthetic
uucuaucuguaucauucu

SEQ ID NO: 386255 - RNA, 19 nt, Artificial Sequence
  Synthetic
uuucuaucuguaucauucu

SEQ ID NO: 386256 - RNA, 20 nt, Artificial Sequence
  Synthetic
auuucuaucuguaucauucu

SEQ ID NO: 386257 - RNA, 21 nt, Artificial Sequence
  Synthetic
uauuucuaucuguaucauucu

SEQ ID NO: 386258 - RNA, 22 nt, Artificial Sequence
  Synthetic
uuauuucuaucuguaucauucu

SEQ ID NO: 386259 - RNA, 23 nt, Artificial Sequence
  Synthetic
uuuauuucuaucuguaucauucu

SEQ ID NO: 386260 - RNA, 24 nt, Artificial Sequence
  Synthetic
uuuuauuucuaucuguaucauucu

SEQ ID NO: 386261 - RNA, 18 nt, Artificial Sequence
  Synthetic
ucucuuuauccucauucu

SEQ ID NO: 386262 - RNA, 19 nt, Artificial Sequence
  Synthetic
cucucuuuauccucauucu

SEQ ID NO: 386263 - RNA, 20 nt, Artificial Sequence
  Synthetic
ucucucuuuauccucauucu

SEQ ID NO: 386264 - RNA, 21 nt, Artificial Sequence
  Synthetic
aucucucuuuauccucauucu

SEQ ID NO: 386265 - RNA, 22 nt, Artificial Sequence
  Synthetic
gaucucucuuuauccucauucu

SEQ ID NO: 386266 - RNA, 23 nt, Artificial Sequence
  Synthetic
ugaucucucuuuauccucauucu

SEQ ID NO: 386267 - RNA, 24 nt, Artificial Sequence
  Synthetic
uugaucucucuuuauccucauucu

SEQ ID NO: 386268 - RNA, 18 nt, Artificial Sequence
  Synthetic
gcuaucucugcucauucu

SEQ ID NO: 386269 - RNA, 19 nt, Artificial Sequence
  Synthetic
ggcuaucucugcucauucu

SEQ ID NO: 386270 - RNA, 20 nt, Artificial Sequence
  Synthetic
gggcuaucucugcucauucu

SEQ ID NO: 386271 - RNA, 21 nt, Artificial Sequence
  Synthetic
ggggcuaucucugcucauucu

SEQ ID NO: 386272 - RNA, 22 nt, Artificial Sequence
  Synthetic
uggggcuaucucugcucauucu

SEQ ID NO: 386273 - RNA, 23 nt, Artificial Sequence
  Synthetic
uuggggcuaucucugcucauucu

SEQ ID NO: 386274 - RNA, 24 nt, Artificial Sequence
  Synthetic
cuuggggcuaucucugcucauucu

SEQ ID NO: 386275 - RNA, 18 nt, Artificial Sequence
  Synthetic
agaucaggaagucauucu

SEQ ID NO: 386276 - RNA, 19 nt, Artificial Sequence
  Synthetic
gagaucaggaagucauucu

SEQ ID NO: 386277 - RNA, 20 nt, Artificial Sequence
  Synthetic
ggagaucaggaagucauucu

SEQ ID NO: 386278 - RNA, 21 nt, Artificial Sequence
  Synthetic
aggagaucaggaagucauucu

SEQ ID NO: 386279 - RNA, 22 nt, Artificial Sequence
  Synthetic
caggagaucaggaagucauucu

SEQ ID NO: 386280 - RNA, 23 nt, Artificial Sequence
  Synthetic
ccaggagaucaggaagucauucu

SEQ ID NO: 386281 - RNA, 24 nt, Artificial Sequence
  Synthetic
accaggagaucaggaagucauucu

SEQ ID NO: 386282 - RNA, 18 nt, Artificial Sequence
  Synthetic
aaauguaagagucauucu

SEQ ID NO: 386283 - RNA, 19 nt, Artificial Sequence
  Synthetic
uaaauguaagagucauucu

SEQ ID NO: 386284 - RNA, 20 nt, Artificial Sequence
  Synthetic
guaaauguaagagucauucu

SEQ ID NO: 386285 - RNA, 21 nt, Artificial Sequence
  Synthetic
uguaaauguaagagucauucu

SEQ ID NO: 386286 - RNA, 22 nt, Artificial Sequence
  Synthetic
auguaaauguaagagucauucu

SEQ ID NO: 386287 - RNA, 23 nt, Artificial Sequence
  Synthetic
aauguaaauguaagagucauucu

SEQ ID NO: 386288 - RNA, 24 nt, Artificial Sequence
  Synthetic
uaauguaaauguaagagucauucu

SEQ ID NO: 386289 - RNA, 18 nt, Artificial Sequence
  Synthetic
agaacauuaauucauucu

SEQ ID NO: 386290 - RNA, 19 nt, Artificial Sequence
  Synthetic
uagaacauuaauucauucu

SEQ ID NO: 386291 - RNA, 20 nt, Artificial Sequence
  Synthetic
auagaacauuaauucauucu

SEQ ID NO: 386292 - RNA, 21 nt, Artificial Sequence
  Synthetic
uauagaacauuaauucauucu

SEQ ID NO: 386293 - RNA, 22 nt, Artificial Sequence
  Synthetic
uuauagaacauuaauucauucu

SEQ ID NO: 386294 - RNA, 23 nt, Artificial Sequence
  Synthetic
uuuauagaacauuaauucauucu

SEQ ID NO: 386295 - RNA, 24 nt, Artificial Sequence
  Synthetic
auuuauagaacauuaauucauucu

SEQ ID NO: 386296 - RNA, 18 nt, Artificial Sequence
  Synthetic
uuaaaccauauucauucu

SEQ ID NO: 386297 - RNA, 19 nt, Artificial Sequence
  Synthetic
guuaaaccauauucauucu

SEQ ID NO: 386298 - RNA, 20 nt, Artificial Sequence
  Synthetic
aguuaaaccauauucauucu

SEQ ID NO: 386299 - RNA, 21 nt, Artificial Sequence
  Synthetic
aaguuaaaccauauucauucu

SEQ ID NO: 386300 - RNA, 22 nt, Artificial Sequence
  Synthetic
caaguuaaaccauauucauucu

SEQ ID NO: 386301 - RNA, 23 nt, Artificial Sequence
  Synthetic
ucaaguuaaaccauauucauucu

SEQ ID NO: 386302 - RNA, 24 nt, Artificial Sequence
  Synthetic
cucaaguuaaaccauauucauucu

SEQ ID NO: 386303 - RNA, 18 nt, Artificial Sequence
  Synthetic
uucgacaguguucauucu

SEQ ID NO: 386304 - RNA, 19 nt, Artificial Sequence
  Synthetic
uuucgacaguguucauucu

SEQ ID NO: 386305 - RNA, 20 nt, Artificial Sequence
  Synthetic
auuucgacaguguucauucu

SEQ ID NO: 386306 - RNA, 21 nt, Artificial Sequence
  Synthetic
cauuucgacaguguucauucu

SEQ ID NO: 386307 - RNA, 22 nt, Artificial Sequence
  Synthetic
acauuucgacaguguucauucu

SEQ ID NO: 386308 - RNA, 23 nt, Artificial Sequence
  Synthetic
uacauuucgacaguguucauucu

SEQ ID NO: 386309 - RNA, 24 nt, Artificial Sequence
  Synthetic
guacauuucgacaguguucauucu

SEQ ID NO: 386310 - RNA, 18 nt, Artificial Sequence
  Synthetic
uuguuauuucaagauucu

SEQ ID NO: 386311 - RNA, 19 nt, Artificial Sequence
  Synthetic
uuuguuauuucaagauucu

SEQ ID NO: 386312 - RNA, 20 nt, Artificial Sequence
  Synthetic
cuuuguuauuucaagauucu

SEQ ID NO: 386313 - RNA, 21 nt, Artificial Sequence
  Synthetic
acuuuguuauuucaagauucu

SEQ ID NO: 386314 - RNA, 22 nt, Artificial Sequence
  Synthetic
cacuuuguuauuucaagauucu

SEQ ID NO: 386315 - RNA, 23 nt, Artificial Sequence
  Synthetic
ccacuuuguuauuucaagauucu

SEQ ID NO: 386316 - RNA, 24 nt, Artificial Sequence
  Synthetic
uccacuuuguuauuucaagauucu

SEQ ID NO: 386317 - RNA, 18 nt, Artificial Sequence
  Synthetic
ucccagaaagcagauucu

SEQ ID NO: 386318 - RNA, 19 nt, Artificial Sequence
  Synthetic
cucccagaaagcagauucu

SEQ ID NO: 386319 - RNA, 20 nt, Artificial Sequence
  Synthetic
ucucccagaaagcagauucu

SEQ ID NO: 386320 - RNA, 21 nt, Artificial Sequence
  Synthetic
uucucccagaaagcagauucu

SEQ ID NO: 386321 - RNA, 22 nt, Artificial Sequence
  Synthetic
guucucccagaaagcagauucu

SEQ ID NO: 386322 - RNA, 23 nt, Artificial Sequence
  Synthetic
aguucucccagaaagcagauucu

SEQ ID NO: 386323 - RNA, 24 nt, Artificial Sequence
  Synthetic
aaguucucccagaaagcagauucu

SEQ ID NO: 386324 - RNA, 18 nt, Artificial Sequence
  Synthetic
ugaaucucaugagauucu

SEQ ID NO: 386325 - RNA, 19 nt, Artificial Sequence
  Synthetic
augaaucucaugagauucu

SEQ ID NO: 386326 - RNA, 20 nt, Artificial Sequence
  Synthetic
gaugaaucucaugagauucu

SEQ ID NO: 386327 - RNA, 21 nt, Artificial Sequence
  Synthetic
ugaugaaucucaugagauucu

SEQ ID NO: 386328 - RNA, 22 nt, Artificial Sequence
  Synthetic
augaugaaucucaugagauucu

SEQ ID NO: 386329 - RNA, 23 nt, Artificial Sequence
  Synthetic
caugaugaaucucaugagauucu

SEQ ID NO: 386330 - RNA, 24 nt, Artificial Sequence
  Synthetic
ccaugaugaaucucaugagauucu

SEQ ID NO: 386331 - RNA, 18 nt, Artificial Sequence
  Synthetic
cuccccaacauagauucu

SEQ ID NO: 386332 - RNA, 19 nt, Artificial Sequence
  Synthetic
acuccccaacauagauucu

SEQ ID NO: 386333 - RNA, 20 nt, Artificial Sequence
  Synthetic
uacuccccaacauagauucu

SEQ ID NO: 386334 - RNA, 21 nt, Artificial Sequence
  Synthetic
uuacuccccaacauagauucu

SEQ ID NO: 386335 - RNA, 22 nt, Artificial Sequence
  Synthetic
guuacuccccaacauagauucu

SEQ ID NO: 386336 - RNA, 23 nt, Artificial Sequence
  Synthetic
uguuacuccccaacauagauucu

SEQ ID NO: 386337 - RNA, 24 nt, Artificial Sequence
  Synthetic
cuguuacuccccaacauagauucu

SEQ ID NO: 386338 - RNA, 18 nt, Artificial Sequence
  Synthetic
uuagguaggagggauucu

SEQ ID NO: 386339 - RNA, 19 nt, Artificial Sequence
  Synthetic
uuuagguaggagggauucu

SEQ ID NO: 386340 - RNA, 20 nt, Artificial Sequence
  Synthetic
uuuuagguaggagggauucu

SEQ ID NO: 386341 - RNA, 21 nt, Artificial Sequence
  Synthetic
uuuuuagguaggagggauucu

SEQ ID NO: 386342 - RNA, 22 nt, Artificial Sequence
  Synthetic
cuuuuuagguaggagggauucu

SEQ ID NO: 386343 - RNA, 23 nt, Artificial Sequence
  Synthetic
gcuuuuuagguaggagggauucu

SEQ ID NO: 386344 - RNA, 24 nt, Artificial Sequence
  Synthetic
agcuuuuuagguaggagggauucu

SEQ ID NO: 386345 - RNA, 18 nt, Artificial Sequence
  Synthetic
aacuuggcaauggauucu

SEQ ID NO: 386346 - RNA, 19 nt, Artificial Sequence
  Synthetic
aaacuuggcaauggauucu

SEQ ID NO: 386347 - RNA, 20 nt, Artificial Sequence
  Synthetic
caaacuuggcaauggauucu

SEQ ID NO: 386348 - RNA, 21 nt, Artificial Sequence
  Synthetic
ccaaacuuggcaauggauucu

SEQ ID NO: 386349 - RNA, 22 nt, Artificial Sequence
  Synthetic
uccaaacuuggcaauggauucu

SEQ ID NO: 386350 - RNA, 23 nt, Artificial Sequence
  Synthetic
guccaaacuuggcaauggauucu

SEQ ID NO: 386351 - RNA, 24 nt, Artificial Sequence
  Synthetic
gguccaaacuuggcaauggauucu

SEQ ID NO: 386352 - RNA, 18 nt, Artificial Sequence
  Synthetic
ugcugggaccuggauucu

SEQ ID NO: 386353 - RNA, 19 nt, Artificial Sequence
  Synthetic
cugcugggaccuggauucu

SEQ ID NO: 386354 - RNA, 20 nt, Artificial Sequence
  Synthetic
acugcugggaccuggauucu

SEQ ID NO: 386355 - RNA, 21 nt, Artificial Sequence
  Synthetic
cacugcugggaccuggauucu

SEQ ID NO: 386356 - RNA, 22 nt, Artificial Sequence
  Synthetic
gcacugcugggaccuggauucu

SEQ ID NO: 386357 - RNA, 23 nt, Artificial Sequence
  Synthetic
ggcacugcugggaccuggauucu

SEQ ID NO: 386358 - RNA, 24 nt, Artificial Sequence
  Synthetic
gggcacugcugggaccuggauucu

SEQ ID NO: 386359 - RNA, 18 nt, Artificial Sequence
  Synthetic
guaugcccucuggauucu

SEQ ID NO: 386360 - RNA, 19 nt, Artificial Sequence
  Synthetic
uguaugcccucuggauucu

SEQ ID NO: 386361 - RNA, 20 nt, Artificial Sequence
  Synthetic
auguaugcccucuggauucu

SEQ ID NO: 386362 - RNA, 21 nt, Artificial Sequence
  Synthetic
gauguaugcccucuggauucu

SEQ ID NO: 386363 - RNA, 22 nt, Artificial Sequence
  Synthetic
agauguaugcccucuggauucu

SEQ ID NO: 386364 - RNA, 23 nt, Artificial Sequence
  Synthetic
aagauguaugcccucuggauucu

SEQ ID NO: 386365 - RNA, 24 nt, Artificial Sequence
  Synthetic
aaagauguaugcccucuggauucu

SEQ ID NO: 386366 - RNA, 18 nt, Artificial Sequence
  Synthetic
agcuggcugcaugauucu

SEQ ID NO: 386367 - RNA, 19 nt, Artificial Sequence
  Synthetic
cagcuggcugcaugauucu

SEQ ID NO: 386368 - RNA, 20 nt, Artificial Sequence
  Synthetic
ucagcuggcugcaugauucu

SEQ ID NO: 386369 - RNA, 21 nt, Artificial Sequence
  Synthetic
uucagcuggcugcaugauucu

SEQ ID NO: 386370 - RNA, 22 nt, Artificial Sequence
  Synthetic
guucagcuggcugcaugauucu

SEQ ID NO: 386371 - RNA, 23 nt, Artificial Sequence
  Synthetic
aguucagcuggcugcaugauucu

SEQ ID NO: 386372 - RNA, 24 nt, Artificial Sequence
  Synthetic
gaguucagcuggcugcaugauucu

SEQ ID NO: 386373 - RNA, 18 nt, Artificial Sequence
  Synthetic
gccucccaggaugauucu

SEQ ID NO: 386374 - RNA, 19 nt, Artificial Sequence
  Synthetic
ugccucccaggaugauucu

SEQ ID NO: 386375 - RNA, 20 nt, Artificial Sequence
  Synthetic
cugccucccaggaugauucu

SEQ ID NO: 386376 - RNA, 21 nt, Artificial Sequence
  Synthetic
ccugccucccaggaugauucu

SEQ ID NO: 386377 - RNA, 22 nt, Artificial Sequence
  Synthetic
gccugccucccaggaugauucu

SEQ ID NO: 386378 - RNA, 23 nt, Artificial Sequence
  Synthetic
agccugccucccaggaugauucu

SEQ ID NO: 386379 - RNA, 24 nt, Artificial Sequence
  Synthetic
cagccugccucccaggaugauucu

SEQ ID NO: 386380 - RNA, 18 nt, Artificial Sequence
  Synthetic
ugacccuacuaugauucu

SEQ ID NO: 386381 - RNA, 19 nt, Artificial Sequence
  Synthetic
gugacccuacuaugauucu

SEQ ID NO: 386382 - RNA, 20 nt, Artificial Sequence
  Synthetic
ugugacccuacuaugauucu

SEQ ID NO: 386383 - RNA, 21 nt, Artificial Sequence
  Synthetic
gugugacccuacuaugauucu

SEQ ID NO: 386384 - RNA, 22 nt, Artificial Sequence
  Synthetic
agugugacccuacuaugauucu

SEQ ID NO: 386385 - RNA, 23 nt, Artificial Sequence
  Synthetic
uagugugacccuacuaugauucu

SEQ ID NO: 386386 - RNA, 24 nt, Artificial Sequence
  Synthetic
uuagugugacccuacuaugauucu

SEQ ID NO: 386387 - RNA, 18 nt, Artificial Sequence
  Synthetic
cugauguccuaugauucu

SEQ ID NO: 386388 - RNA, 19 nt, Artificial Sequence
  Synthetic
ccugauguccuaugauucu

SEQ ID NO: 386389 - RNA, 20 nt, Artificial Sequence
  Synthetic
accugauguccuaugauucu

SEQ ID NO: 386390 - RNA, 21 nt, Artificial Sequence
  Synthetic
uaccugauguccuaugauucu

SEQ ID NO: 386391 - RNA, 22 nt, Artificial Sequence
  Synthetic
auaccugauguccuaugauucu

SEQ ID NO: 386392 - RNA, 23 nt, Artificial Sequence
  Synthetic
gauaccugauguccuaugauucu

SEQ ID NO: 386393 - RNA, 24 nt, Artificial Sequence
  Synthetic
agauaccugauguccuaugauucu

SEQ ID NO: 386394 - RNA, 18 nt, Artificial Sequence
  Synthetic
guguucagaccugauucu

SEQ ID NO: 386395 - RNA, 19 nt, Artificial Sequence
  Synthetic
uguguucagaccugauucu

SEQ ID NO: 386396 - RNA, 20 nt, Artificial Sequence
  Synthetic
uuguguucagaccugauucu

SEQ ID NO: 386397 - RNA, 21 nt, Artificial Sequence
  Synthetic
uuuguguucagaccugauucu

SEQ ID NO: 386398 - RNA, 22 nt, Artificial Sequence
  Synthetic
uuuuguguucagaccugauucu

SEQ ID NO: 386399 - RNA, 23 nt, Artificial Sequence
  Synthetic
uuuuuguguucagaccugauucu

SEQ ID NO: 386400 - RNA, 24 nt, Artificial Sequence
  Synthetic
uuuuuuguguucagaccugauucu

SEQ ID NO: 386401 - RNA, 18 nt, Artificial Sequence
  Synthetic
uugaaccacagugauucu

SEQ ID NO: 386402 - RNA, 19 nt, Artificial Sequence
  Synthetic
cuugaaccacagugauucu

SEQ ID NO: 386403 - RNA, 20 nt, Artificial Sequence
  Synthetic
ccuugaaccacagugauucu

SEQ ID NO: 386404 - RNA, 21 nt, Artificial Sequence
  Synthetic
accuugaaccacagugauucu

SEQ ID NO: 386405 - RNA, 22 nt, Artificial Sequence
  Synthetic
aaccuugaaccacagugauucu

SEQ ID NO: 386406 - RNA, 23 nt, Artificial Sequence
  Synthetic
caaccuugaaccacagugauucu

SEQ ID NO: 386407 - RNA, 24 nt, Artificial Sequence
  Synthetic
acaaccuugaaccacagugauucu

SEQ ID NO: 386408 - RNA, 18 nt, Artificial Sequence
  Synthetic
ucuuugggcagugauucu

SEQ ID NO: 386409 - RNA, 19 nt, Artificial Sequence
  Synthetic
uucuuugggcagugauucu

SEQ ID NO: 386410 - RNA, 20 nt, Artificial Sequence
  Synthetic
uuucuuugggcagugauucu

SEQ ID NO: 386411 - RNA, 21 nt, Artificial Sequence
  Synthetic
guuucuuugggcagugauucu

SEQ ID NO: 386412 - RNA, 22 nt, Artificial Sequence
  Synthetic
aguuucuuugggcagugauucu

SEQ ID NO: 386413 - RNA, 23 nt, Artificial Sequence
  Synthetic
uaguuucuuugggcagugauucu

SEQ ID NO: 386414 - RNA, 24 nt, Artificial Sequence
  Synthetic
auaguuucuuugggcagugauucu

SEQ ID NO: 386415 - RNA, 18 nt, Artificial Sequence
  Synthetic
ggaauucucugugauucu

SEQ ID NO: 386416 - RNA, 19 nt, Artificial Sequence
  Synthetic
gggaauucucugugauucu

SEQ ID NO: 386417 - RNA, 20 nt, Artificial Sequence
  Synthetic
ggggaauucucugugauucu

SEQ ID NO: 386418 - RNA, 21 nt, Artificial Sequence
  Synthetic
aggggaauucucugugauucu

SEQ ID NO: 386419 - RNA, 22 nt, Artificial Sequence
  Synthetic
aaggggaauucucugugauucu

SEQ ID NO: 386420 - RNA, 23 nt, Artificial Sequence
  Synthetic
caaggggaauucucugugauucu

SEQ ID NO: 386421 - RNA, 24 nt, Artificial Sequence
  Synthetic
gcaaggggaauucucugugauucu

SEQ ID NO: 386422 - RNA, 18 nt, Artificial Sequence
  Synthetic
cuuccacuguaauauucu

SEQ ID NO: 386423 - RNA, 19 nt, Artificial Sequence
  Synthetic
acuuccacuguaauauucu

SEQ ID NO: 386424 - RNA, 20 nt, Artificial Sequence
  Synthetic
uacuuccacuguaauauucu

SEQ ID NO: 386425 - RNA, 21 nt, Artificial Sequence
  Synthetic
auacuuccacuguaauauucu

SEQ ID NO: 386426 - RNA, 22 nt, Artificial Sequence
  Synthetic
gauacuuccacuguaauauucu

SEQ ID NO: 386427 - RNA, 23 nt, Artificial Sequence
  Synthetic
ggauacuuccacuguaauauucu

SEQ ID NO: 386428 - RNA, 24 nt, Artificial Sequence
  Synthetic
uggauacuuccacuguaauauucu

SEQ ID NO: 386429 - RNA, 18 nt, Artificial Sequence
  Synthetic
uuguauggaacauauucu

SEQ ID NO: 386430 - RNA, 19 nt, Artificial Sequence
  Synthetic
auuguauggaacauauucu

SEQ ID NO: 386431 - RNA, 20 nt, Artificial Sequence
  Synthetic
cauuguauggaacauauucu

SEQ ID NO: 386432 - RNA, 21 nt, Artificial Sequence
  Synthetic
ucauuguauggaacauauucu

SEQ ID NO: 386433 - RNA, 22 nt, Artificial Sequence
  Synthetic
cucauuguauggaacauauucu

SEQ ID NO: 386434 - RNA, 23 nt, Artificial Sequence
  Synthetic
ucucauuguauggaacauauucu

SEQ ID NO: 386435 - RNA, 24 nt, Artificial Sequence
  Synthetic
cucucauuguauggaacauauucu

SEQ ID NO: 386436 - RNA, 18 nt, Artificial Sequence
  Synthetic
agauugaucccauauucu

SEQ ID NO: 386437 - RNA, 19 nt, Artificial Sequence
  Synthetic
gagauugaucccauauucu

SEQ ID NO: 386438 - RNA, 20 nt, Artificial Sequence
  Synthetic
agagauugaucccauauucu

SEQ ID NO: 386439 - RNA, 21 nt, Artificial Sequence
  Synthetic
aagagauugaucccauauucu

SEQ ID NO: 386440 - RNA, 22 nt, Artificial Sequence
  Synthetic
aaagagauugaucccauauucu

SEQ ID NO: 386441 - RNA, 23 nt, Artificial Sequence
  Synthetic
gaaagagauugaucccauauucu

SEQ ID NO: 386442 - RNA, 24 nt, Artificial Sequence
  Synthetic
agaaagagauugaucccauauucu

SEQ ID NO: 386443 - RNA, 18 nt, Artificial Sequence
  Synthetic
aauugcaagugauauucu

SEQ ID NO: 386444 - RNA, 19 nt, Artificial Sequence
  Synthetic
caauugcaagugauauucu

SEQ ID NO: 386445 - RNA, 20 nt, Artificial Sequence
  Synthetic
acaauugcaagugauauucu

SEQ ID NO: 386446 - RNA, 21 nt, Artificial Sequence
  Synthetic
cacaauugcaagugauauucu

SEQ ID NO: 386447 - RNA, 22 nt, Artificial Sequence
  Synthetic
ucacaauugcaagugauauucu

SEQ ID NO: 386448 - RNA, 23 nt, Artificial Sequence
  Synthetic
uucacaauugcaagugauauucu

SEQ ID NO: 386449 - RNA, 24 nt, Artificial Sequence
  Synthetic
auucacaauugcaagugauauucu

SEQ ID NO: 386450 - RNA, 18 nt, Artificial Sequence
  Synthetic
augaggcuaguauauucu

SEQ ID NO: 386451 - RNA, 19 nt, Artificial Sequence
  Synthetic
aaugaggcuaguauauucu

SEQ ID NO: 386452 - RNA, 20 nt, Artificial Sequence
  Synthetic
aaaugaggcuaguauauucu

SEQ ID NO: 386453 - RNA, 21 nt, Artificial Sequence
  Synthetic
aaaaugaggcuaguauauucu

SEQ ID NO: 386454 - RNA, 22 nt, Artificial Sequence
  Synthetic
gaaaaugaggcuaguauauucu

SEQ ID NO: 386455 - RNA, 23 nt, Artificial Sequence
  Synthetic
agaaaaugaggcuaguauauucu

SEQ ID NO: 386456 - RNA, 24 nt, Artificial Sequence
  Synthetic
uagaaaaugaggcuaguauauucu

SEQ ID NO: 386457 - RNA, 18 nt, Artificial Sequence
  Synthetic
ugaccacuuguauauucu

SEQ ID NO: 386458 - RNA, 19 nt, Artificial Sequence
  Synthetic
gugaccacuuguauauucu

SEQ ID NO: 386459 - RNA, 20 nt, Artificial Sequence
  Synthetic
agugaccacuuguauauucu

SEQ ID NO: 386460 - RNA, 21 nt, Artificial Sequence
  Synthetic
gagugaccacuuguauauucu

SEQ ID NO: 386461 - RNA, 22 nt, Artificial Sequence
  Synthetic
ugagugaccacuuguauauucu

SEQ ID NO: 386462 - RNA, 23 nt, Artificial Sequence
  Synthetic
augagugaccacuuguauauucu

SEQ ID NO: 386463 - RNA, 24 nt, Artificial Sequence
  Synthetic
aaugagugaccacuuguauauucu

SEQ ID NO: 386464 - RNA, 18 nt, Artificial Sequence
  Synthetic
ucauaaagcuuauauucu

SEQ ID NO: 386465 - RNA, 19 nt, Artificial Sequence
  Synthetic
cucauaaagcuuauauucu

SEQ ID NO: 386466 - RNA, 20 nt, Artificial Sequence
  Synthetic
ccucauaaagcuuauauucu

SEQ ID NO: 386467 - RNA, 21 nt, Artificial Sequence
  Synthetic
cccucauaaagcuuauauucu

SEQ ID NO: 386468 - RNA, 22 nt, Artificial Sequence
  Synthetic
acccucauaaagcuuauauucu

SEQ ID NO: 386469 - RNA, 23 nt, Artificial Sequence
  Synthetic
uacccucauaaagcuuauauucu

SEQ ID NO: 386470 - RNA, 24 nt, Artificial Sequence
  Synthetic
cuacccucauaaagcuuauauucu

SEQ ID NO: 386471 - RNA, 18 nt, Artificial Sequence
  Synthetic
uuugcauucuuauauucu

SEQ ID NO: 386472 - RNA, 19 nt, Artificial Sequence
  Synthetic
cuuugcauucuuauauucu

SEQ ID NO: 386473 - RNA, 20 nt, Artificial Sequence
  Synthetic
acuuugcauucuuauauucu

SEQ ID NO: 386474 - RNA, 21 nt, Artificial Sequence
  Synthetic
uacuuugcauucuuauauucu

SEQ ID NO: 386475 - RNA, 22 nt, Artificial Sequence
  Synthetic
uuacuuugcauucuuauauucu

SEQ ID NO: 386476 - RNA, 23 nt, Artificial Sequence
  Synthetic
uuuacuuugcauucuuauauucu

SEQ ID NO: 386477 - RNA, 24 nt, Artificial Sequence
  Synthetic
uuuuacuuugcauucuuauauucu

SEQ ID NO: 386478 - RNA, 18 nt, Artificial Sequence
  Synthetic
ugagucuucaacuauucu

SEQ ID NO: 386479 - RNA, 19 nt, Artificial Sequence
  Synthetic
augagucuucaacuauucu

SEQ ID NO: 386480 - RNA, 20 nt, Artificial Sequence
  Synthetic
uaugagucuucaacuauucu

SEQ ID NO: 386481 - RNA, 21 nt, Artificial Sequence
  Synthetic
uuaugagucuucaacuauucu

SEQ ID NO: 386482 - RNA, 22 nt, Artificial Sequence
  Synthetic
auuaugagucuucaacuauucu

SEQ ID NO: 386483 - RNA, 23 nt, Artificial Sequence
  Synthetic
uauuaugagucuucaacuauucu

SEQ ID NO: 386484 - RNA, 24 nt, Artificial Sequence
  Synthetic
uuauuaugagucuucaacuauucu

SEQ ID NO: 386485 - RNA, 18 nt, Artificial Sequence
  Synthetic
uguuucaccuucuauucu

SEQ ID NO: 386486 - RNA, 19 nt, Artificial Sequence
  Synthetic
uuguuucaccuucuauucu

SEQ ID NO: 386487 - RNA, 20 nt, Artificial Sequence
  Synthetic
cuuguuucaccuucuauucu

SEQ ID NO: 386488 - RNA, 21 nt, Artificial Sequence
  Synthetic
gcuuguuucaccuucuauucu

SEQ ID NO: 386489 - RNA, 22 nt, Artificial Sequence
  Synthetic
ugcuuguuucaccuucuauucu

SEQ ID NO: 386490 - RNA, 23 nt, Artificial Sequence
  Synthetic
uugcuuguuucaccuucuauucu

SEQ ID NO: 386491 - RNA, 24 nt, Artificial Sequence
  Synthetic
cuugcuuguuucaccuucuauucu

SEQ ID NO: 386492 - RNA, 18 nt, Artificial Sequence
  Synthetic
caaucagauuucuauucu

SEQ ID NO: 386493 - RNA, 19 nt, Artificial Sequence
  Synthetic
acaaucagauuucuauucu

SEQ ID NO: 386494 - RNA, 20 nt, Artificial Sequence
  Synthetic
aacaaucagauuucuauucu

SEQ ID NO: 386495 - RNA, 21 nt, Artificial Sequence
  Synthetic
gaacaaucagauuucuauucu

SEQ ID NO: 386496 - RNA, 22 nt, Artificial Sequence
  Synthetic
ugaacaaucagauuucuauucu

SEQ ID NO: 386497 - RNA, 23 nt, Artificial Sequence
  Synthetic
cugaacaaucagauuucuauucu

SEQ ID NO: 386498 - RNA, 24 nt, Artificial Sequence
  Synthetic
gcugaacaaucagauuucuauucu

SEQ ID NO: 386499 - RNA, 18 nt, Artificial Sequence
  Synthetic
uuucuucuggaguauucu

SEQ ID NO: 386500 - RNA, 19 nt, Artificial Sequence
  Synthetic
uuuucuucuggaguauucu

SEQ ID NO: 386501 - RNA, 20 nt, Artificial Sequence
  Synthetic
cuuuucuucuggaguauucu

SEQ ID NO: 386502 - RNA, 21 nt, Artificial Sequence
  Synthetic
ccuuuucuucuggaguauucu

SEQ ID NO: 386503 - RNA, 22 nt, Artificial Sequence
  Synthetic
uccuuuucuucuggaguauucu

SEQ ID NO: 386504 - RNA, 23 nt, Artificial Sequence
  Synthetic
cuccuuuucuucuggaguauucu

SEQ ID NO: 386505 - RNA, 24 nt, Artificial Sequence
  Synthetic
acuccuuuucuucuggaguauucu

SEQ ID NO: 386506 - RNA, 18 nt, Artificial Sequence
  Synthetic
uucauuacaugguauucu

SEQ ID NO: 386507 - RNA, 19 nt, Artificial Sequence
  Synthetic
cuucauuacaugguauucu

SEQ ID NO: 386508 - RNA, 20 nt, Artificial Sequence
  Synthetic
gcuucauuacaugguauucu

SEQ ID NO: 386509 - RNA, 21 nt, Artificial Sequence
  Synthetic
ggcuucauuacaugguauucu

SEQ ID NO: 386510 - RNA, 22 nt, Artificial Sequence
  Synthetic
aggcuucauuacaugguauucu

SEQ ID NO: 386511 - RNA, 23 nt, Artificial Sequence
  Synthetic
uaggcuucauuacaugguauucu

SEQ ID NO: 386512 - RNA, 24 nt, Artificial Sequence
  Synthetic
uuaggcuucauuacaugguauucu

SEQ ID NO: 386513 - RNA, 18 nt, Artificial Sequence
  Synthetic
cucaugauuauguauucu

SEQ ID NO: 386514 - RNA, 19 nt, Artificial Sequence
  Synthetic
gcucaugauuauguauucu

SEQ ID NO: 386515 - RNA, 20 nt, Artificial Sequence
  Synthetic
agcucaugauuauguauucu

SEQ ID NO: 386516 - RNA, 21 nt, Artificial Sequence
  Synthetic
cagcucaugauuauguauucu

SEQ ID NO: 386517 - RNA, 22 nt, Artificial Sequence
  Synthetic
ucagcucaugauuauguauucu

SEQ ID NO: 386518 - RNA, 23 nt, Artificial Sequence
  Synthetic
uucagcucaugauuauguauucu

SEQ ID NO: 386519 - RNA, 24 nt, Artificial Sequence
  Synthetic
guucagcucaugauuauguauucu

SEQ ID NO: 386520 - RNA, 18 nt, Artificial Sequence
  Synthetic
gcagaguuuuuguauucu

SEQ ID NO: 386521 - RNA, 19 nt, Artificial Sequence
  Synthetic
ugcagaguuuuuguauucu

SEQ ID NO: 386522 - RNA, 20 nt, Artificial Sequence
  Synthetic
uugcagaguuuuuguauucu

SEQ ID NO: 386523 - RNA, 21 nt, Artificial Sequence
  Synthetic
uuugcagaguuuuuguauucu

SEQ ID NO: 386524 - RNA, 22 nt, Artificial Sequence
  Synthetic
auuugcagaguuuuuguauucu

SEQ ID NO: 386525 - RNA, 23 nt, Artificial Sequence
  Synthetic
uauuugcagaguuuuuguauucu

SEQ ID NO: 386526 - RNA, 24 nt, Artificial Sequence
  Synthetic
auauuugcagaguuuuuguauucu

SEQ ID NO: 386527 - RNA, 18 nt, Artificial Sequence
  Synthetic
aacaguuuaaauuauucu

SEQ ID NO: 386528 - RNA, 19 nt, Artificial Sequence
  Synthetic
uaacaguuuaaauuauucu

SEQ ID NO: 386529 - RNA, 20 nt, Artificial Sequence
  Synthetic
uuaacaguuuaaauuauucu

SEQ ID NO: 386530 - RNA, 21 nt, Artificial Sequence
  Synthetic
uuuaacaguuuaaauuauucu

SEQ ID NO: 386531 - RNA, 22 nt, Artificial Sequence
  Synthetic
auuuaacaguuuaaauuauucu

SEQ ID NO: 386532 - RNA, 23 nt, Artificial Sequence
  Synthetic
uauuuaacaguuuaaauuauucu

SEQ ID NO: 386533 - RNA, 24 nt, Artificial Sequence
  Synthetic
auauuuaacaguuuaaauuauucu

SEQ ID NO: 386534 - RNA, 18 nt, Artificial Sequence
  Synthetic
aggcuucuuaauuauucu

SEQ ID NO: 386535 - RNA, 19 nt, Artificial Sequence
  Synthetic
uaggcuucuuaauuauucu

SEQ ID NO: 386536 - RNA, 20 nt, Artificial Sequence
  Synthetic
guaggcuucuuaauuauucu

SEQ ID NO: 386537 - RNA, 21 nt, Artificial Sequence
  Synthetic
gguaggcuucuuaauuauucu

SEQ ID NO: 386538 - RNA, 22 nt, Artificial Sequence
  Synthetic
agguaggcuucuuaauuauucu

SEQ ID NO: 386539 - RNA, 23 nt, Artificial Sequence
  Synthetic
aagguaggcuucuuaauuauucu

SEQ ID NO: 386540 - RNA, 24 nt, Artificial Sequence
  Synthetic
caagguaggcuucuuaauuauucu

SEQ ID NO: 386541 - RNA, 18 nt, Artificial Sequence
  Synthetic
cugaguuuuaauuauucu

SEQ ID NO: 386542 - RNA, 19 nt, Artificial Sequence
  Synthetic
acugaguuuuaauuauucu

SEQ ID NO: 386543 - RNA, 20 nt, Artificial Sequence
  Synthetic
uacugaguuuuaauuauucu

SEQ ID NO: 386544 - RNA, 21 nt, Artificial Sequence
  Synthetic
uuacugaguuuuaauuauucu

SEQ ID NO: 386545 - RNA, 22 nt, Artificial Sequence
  Synthetic
cuuacugaguuuuaauuauucu

SEQ ID NO: 386546 - RNA, 23 nt, Artificial Sequence
  Synthetic
acuuacugaguuuuaauuauucu

SEQ ID NO: 386547 - RNA, 24 nt, Artificial Sequence
  Synthetic
cacuuacugaguuuuaauuauucu

SEQ ID NO: 386548 - RNA, 18 nt, Artificial Sequence
  Synthetic
gcuuuaaaacauuauucu

SEQ ID NO: 386549 - RNA, 19 nt, Artificial Sequence
  Synthetic
ggcuuuaaaacauuauucu

SEQ ID NO: 386550 - RNA, 20 nt, Artificial Sequence
  Synthetic
gggcuuuaaaacauuauucu

SEQ ID NO: 386551 - RNA, 21 nt, Artificial Sequence
  Synthetic
ugggcuuuaaaacauuauucu

SEQ ID NO: 386552 - RNA, 22 nt, Artificial Sequence
  Synthetic
uugggcuuuaaaacauuauucu

SEQ ID NO: 386553 - RNA, 23 nt, Artificial Sequence
  Synthetic
guugggcuuuaaaacauuauucu

SEQ ID NO: 386554 - RNA, 24 nt, Artificial Sequence
  Synthetic
uguugggcuuuaaaacauuauucu

SEQ ID NO: 386555 - RNA, 18 nt, Artificial Sequence
  Synthetic
uugcaaauauauuauucu

SEQ ID NO: 386556 - RNA, 19 nt, Artificial Sequence
  Synthetic
uuugcaaauauauuauucu

SEQ ID NO: 386557 - RNA, 20 nt, Artificial Sequence
  Synthetic
cuuugcaaauauauuauucu

SEQ ID NO: 386558 - RNA, 21 nt, Artificial Sequence
  Synthetic
ccuuugcaaauauauuauucu

SEQ ID NO: 386559 - RNA, 22 nt, Artificial Sequence
  Synthetic
accuuugcaaauauauuauucu

SEQ ID NO: 386560 - RNA, 23 nt, Artificial Sequence
  Synthetic
caccuuugcaaauauauuauucu

SEQ ID NO: 386561 - RNA, 24 nt, Artificial Sequence
  Synthetic
acaccuuugcaaauauauuauucu

SEQ ID NO: 386562 - RNA, 18 nt, Artificial Sequence
  Synthetic
aaacaucuuccuuauucu

SEQ ID NO: 386563 - RNA, 19 nt, Artificial Sequence
  Synthetic
aaaacaucuuccuuauucu

SEQ ID NO: 386564 - RNA, 20 nt, Artificial Sequence
  Synthetic
uaaaacaucuuccuuauucu

SEQ ID NO: 386565 - RNA, 21 nt, Artificial Sequence
  Synthetic
auaaaacaucuuccuuauucu

SEQ ID NO: 386566 - RNA, 22 nt, Artificial Sequence
  Synthetic
cauaaaacaucuuccuuauucu

SEQ ID NO: 386567 - RNA, 23 nt, Artificial Sequence
  Synthetic
gcauaaaacaucuuccuuauucu

SEQ ID NO: 386568 - RNA, 24 nt, Artificial Sequence
  Synthetic
ugcauaaaacaucuuccuuauucu

SEQ ID NO: 386569 - RNA, 18 nt, Artificial Sequence
  Synthetic
caauguaauucuuauucu

SEQ ID NO: 386570 - RNA, 19 nt, Artificial Sequence
  Synthetic
acaauguaauucuuauucu

SEQ ID NO: 386571 - RNA, 20 nt, Artificial Sequence
  Synthetic
aacaauguaauucuuauucu

SEQ ID NO: 386572 - RNA, 21 nt, Artificial Sequence
  Synthetic
aaacaauguaauucuuauucu

SEQ ID NO: 386573 - RNA, 22 nt, Artificial Sequence
  Synthetic
caaacaauguaauucuuauucu

SEQ ID NO: 386574 - RNA, 23 nt, Artificial Sequence
  Synthetic
acaaacaauguaauucuuauucu

SEQ ID NO: 386575 - RNA, 24 nt, Artificial Sequence
  Synthetic
uacaaacaauguaauucuuauucu

SEQ ID NO: 386576 - RNA, 18 nt, Artificial Sequence
  Synthetic
ucccuugcucuuuauucu

SEQ ID NO: 386577 - RNA, 19 nt, Artificial Sequence
  Synthetic
cucccuugcucuuuauucu

SEQ ID NO: 386578 - RNA, 20 nt, Artificial Sequence
  Synthetic
ucucccuugcucuuuauucu

SEQ ID NO: 386579 - RNA, 21 nt, Artificial Sequence
  Synthetic
cucucccuugcucuuuauucu

SEQ ID NO: 386580 - RNA, 22 nt, Artificial Sequence
  Synthetic
ucucucccuugcucuuuauucu

SEQ ID NO: 386581 - RNA, 23 nt, Artificial Sequence
  Synthetic
uucucucccuugcucuuuauucu

SEQ ID NO: 386582 - RNA, 24 nt, Artificial Sequence
  Synthetic
cuucucucccuugcucuuuauucu

SEQ ID NO: 386583 - RNA, 18 nt, Artificial Sequence
  Synthetic
cauccugauuuuuauucu

SEQ ID NO: 386584 - RNA, 19 nt, Artificial Sequence
  Synthetic
ucauccugauuuuuauucu

SEQ ID NO: 386585 - RNA, 20 nt, Artificial Sequence
  Synthetic
aucauccugauuuuuauucu

SEQ ID NO: 386586 - RNA, 21 nt, Artificial Sequence
  Synthetic
caucauccugauuuuuauucu

SEQ ID NO: 386587 - RNA, 22 nt, Artificial Sequence
  Synthetic
ucaucauccugauuuuuauucu

SEQ ID NO: 386588 - RNA, 23 nt, Artificial Sequence
  Synthetic
uucaucauccugauuuuuauucu

SEQ ID NO: 386589 - RNA, 24 nt, Artificial Sequence
  Synthetic
cuucaucauccugauuuuuauucu

SEQ ID NO: 386590 - RNA, 18 nt, Artificial Sequence
  Synthetic
aucucugauucaacuucu

SEQ ID NO: 386591 - RNA, 19 nt, Artificial Sequence
  Synthetic
aaucucugauucaacuucu

SEQ ID NO: 386592 - RNA, 20 nt, Artificial Sequence
  Synthetic
uaaucucugauucaacuucu

SEQ ID NO: 386593 - RNA, 21 nt, Artificial Sequence
  Synthetic
guaaucucugauucaacuucu

SEQ ID NO: 386594 - RNA, 22 nt, Artificial Sequence
  Synthetic
gguaaucucugauucaacuucu

SEQ ID NO: 386595 - RNA, 23 nt, Artificial Sequence
  Synthetic
agguaaucucugauucaacuucu

SEQ ID NO: 386596 - RNA, 24 nt, Artificial Sequence
  Synthetic
aagguaaucucugauucaacuucu

SEQ ID NO: 386597 - RNA, 18 nt, Artificial Sequence
  Synthetic
uggagauuaggaacuucu

SEQ ID NO: 386598 - RNA, 19 nt, Artificial Sequence
  Synthetic
auggagauuaggaacuucu

SEQ ID NO: 386599 - RNA, 20 nt, Artificial Sequence
  Synthetic
gauggagauuaggaacuucu

SEQ ID NO: 386600 - RNA, 21 nt, Artificial Sequence
  Synthetic
agauggagauuaggaacuucu

SEQ ID NO: 386601 - RNA, 22 nt, Artificial Sequence
  Synthetic
cagauggagauuaggaacuucu

SEQ ID NO: 386602 - RNA, 23 nt, Artificial Sequence
  Synthetic
ucagauggagauuaggaacuucu

SEQ ID NO: 386603 - RNA, 24 nt, Artificial Sequence
  Synthetic
cucagauggagauuaggaacuucu

SEQ ID NO: 386604 - RNA, 18 nt, Artificial Sequence
  Synthetic
caucacuugggaacuucu

SEQ ID NO: 386605 - RNA, 19 nt, Artificial Sequence
  Synthetic
gcaucacuugggaacuucu

SEQ ID NO: 386606 - RNA, 20 nt, Artificial Sequence
  Synthetic
ggcaucacuugggaacuucu

SEQ ID NO: 386607 - RNA, 21 nt, Artificial Sequence
  Synthetic
cggcaucacuugggaacuucu

SEQ ID NO: 386608 - RNA, 22 nt, Artificial Sequence
  Synthetic
ucggcaucacuugggaacuucu

SEQ ID NO: 386609 - RNA, 23 nt, Artificial Sequence
  Synthetic
aucggcaucacuugggaacuucu

SEQ ID NO: 386610 - RNA, 24 nt, Artificial Sequence
  Synthetic
uaucggcaucacuugggaacuucu

SEQ ID NO: 386611 - RNA, 18 nt, Artificial Sequence
  Synthetic
ggugucuccugaacuucu

SEQ ID NO: 386612 - RNA, 19 nt, Artificial Sequence
  Synthetic
aggugucuccugaacuucu

SEQ ID NO: 386613 - RNA, 20 nt, Artificial Sequence
  Synthetic
caggugucuccugaacuucu

SEQ ID NO: 386614 - RNA, 21 nt, Artificial Sequence
  Synthetic
acaggugucuccugaacuucu

SEQ ID NO: 386615 - RNA, 22 nt, Artificial Sequence
  Synthetic
uacaggugucuccugaacuucu

SEQ ID NO: 386616 - RNA, 23 nt, Artificial Sequence
  Synthetic
guacaggugucuccugaacuucu

SEQ ID NO: 386617 - RNA, 24 nt, Artificial Sequence
  Synthetic
uguacaggugucuccugaacuucu

SEQ ID NO: 386618 - RNA, 18 nt, Artificial Sequence
  Synthetic
gagauuuaucacacuucu

SEQ ID NO: 386619 - RNA, 19 nt, Artificial Sequence
  Synthetic
ugagauuuaucacacuucu

SEQ ID NO: 386620 - RNA, 20 nt, Artificial Sequence
  Synthetic
cugagauuuaucacacuucu

SEQ ID NO: 386621 - RNA, 21 nt, Artificial Sequence
  Synthetic
gcugagauuuaucacacuucu

SEQ ID NO: 386622 - RNA, 22 nt, Artificial Sequence
  Synthetic
agcugagauuuaucacacuucu

SEQ ID NO: 386623 - RNA, 23 nt, Artificial Sequence
  Synthetic
aagcugagauuuaucacacuucu

SEQ ID NO: 386624 - RNA, 24 nt, Artificial Sequence
  Synthetic
uaagcugagauuuaucacacuucu

SEQ ID NO: 386625 - RNA, 18 nt, Artificial Sequence
  Synthetic
caucuucagaagacuucu

SEQ ID NO: 386626 - RNA, 19 nt, Artificial Sequence
  Synthetic
ucaucuucagaagacuucu

SEQ ID NO: 386627 - RNA, 20 nt, Artificial Sequence
  Synthetic
uucaucuucagaagacuucu

SEQ ID NO: 386628 - RNA, 21 nt, Artificial Sequence
  Synthetic
uuucaucuucagaagacuucu

SEQ ID NO: 386629 - RNA, 22 nt, Artificial Sequence
  Synthetic
uuuucaucuucagaagacuucu

SEQ ID NO: 386630 - RNA, 23 nt, Artificial Sequence
  Synthetic
auuuucaucuucagaagacuucu

SEQ ID NO: 386631 - RNA, 24 nt, Artificial Sequence
  Synthetic
gauuuucaucuucagaagacuucu

SEQ ID NO: 386632 - RNA, 18 nt, Artificial Sequence
  Synthetic
cccauguaugagacuucu

SEQ ID NO: 386633 - RNA, 19 nt, Artificial Sequence
  Synthetic
gcccauguaugagacuucu

SEQ ID NO: 386634 - RNA, 20 nt, Artificial Sequence
  Synthetic
agcccauguaugagacuucu

SEQ ID NO: 386635 - RNA, 21 nt, Artificial Sequence
  Synthetic
cagcccauguaugagacuucu

SEQ ID NO: 386636 - RNA, 22 nt, Artificial Sequence
  Synthetic
ucagcccauguaugagacuucu

SEQ ID NO: 386637 - RNA, 23 nt, Artificial Sequence
  Synthetic
uucagcccauguaugagacuucu

SEQ ID NO: 386638 - RNA, 24 nt, Artificial Sequence
  Synthetic
guucagcccauguaugagacuucu

SEQ ID NO: 386639 - RNA, 18 nt, Artificial Sequence
  Synthetic
cccuuauuccauacuucu

SEQ ID NO: 386640 - RNA, 19 nt, Artificial Sequence
  Synthetic
acccuuauuccauacuucu

SEQ ID NO: 386641 - RNA, 20 nt, Artificial Sequence
  Synthetic
uacccuuauuccauacuucu

SEQ ID NO: 386642 - RNA, 21 nt, Artificial Sequence
  Synthetic
auacccuuauuccauacuucu

SEQ ID NO: 386643 - RNA, 22 nt, Artificial Sequence
  Synthetic
aauacccuuauuccauacuucu

SEQ ID NO: 386644 - RNA, 23 nt, Artificial Sequence
  Synthetic
aaauacccuuauuccauacuucu

SEQ ID NO: 386645 - RNA, 24 nt, Artificial Sequence
  Synthetic
aaaauacccuuauuccauacuucu

SEQ ID NO: 386646 - RNA, 18 nt, Artificial Sequence
  Synthetic
cucuuaauuucuacuucu

SEQ ID NO: 386647 - RNA, 19 nt, Artificial Sequence
  Synthetic
ucucuuaauuucuacuucu

SEQ ID NO: 386648 - RNA, 20 nt, Artificial Sequence
  Synthetic
uucucuuaauuucuacuucu

SEQ ID NO: 386649 - RNA, 21 nt, Artificial Sequence
  Synthetic
uuucucuuaauuucuacuucu

SEQ ID NO: 386650 - RNA, 22 nt, Artificial Sequence
  Synthetic
auuucucuuaauuucuacuucu

SEQ ID NO: 386651 - RNA, 23 nt, Artificial Sequence
  Synthetic
aauuucucuuaauuucuacuucu

SEQ ID NO: 386652 - RNA, 24 nt, Artificial Sequence
  Synthetic
caauuucucuuaauuucuacuucu

SEQ ID NO: 386653 - RNA, 18 nt, Artificial Sequence
  Synthetic
auaugcggcguuacuucu

SEQ ID NO: 386654 - RNA, 19 nt, Artificial Sequence
  Synthetic
gauaugcggcguuacuucu

SEQ ID NO: 386655 - RNA, 20 nt, Artificial Sequence
  Synthetic
agauaugcggcguuacuucu

SEQ ID NO: 386656 - RNA, 23 nt, Artificial Sequence
  Synthetic
uguagauaugcggcguuacuucu

SEQ ID NO: 386657 - RNA, 24 nt, Artificial Sequence
  Synthetic
uuguagauaugcggcguuacuucu

SEQ ID NO: 386658 - RNA, 18 nt, Artificial Sequence
  Synthetic
cuauacucauuuacuucu

SEQ ID NO: 386659 - RNA, 19 nt, Artificial Sequence
  Synthetic
ucuauacucauuuacuucu

SEQ ID NO: 386660 - RNA, 20 nt, Artificial Sequence
  Synthetic
aucuauacucauuuacuucu

SEQ ID NO: 386661 - RNA, 21 nt, Artificial Sequence
  Synthetic
caucuauacucauuuacuucu

SEQ ID NO: 386662 - RNA, 22 nt, Artificial Sequence
  Synthetic
acaucuauacucauuuacuucu

SEQ ID NO: 386663 - RNA, 23 nt, Artificial Sequence
  Synthetic
cacaucuauacucauuuacuucu

SEQ ID NO: 386664 - RNA, 24 nt, Artificial Sequence
  Synthetic
gcacaucuauacucauuuacuucu

SEQ ID NO: 386665 - RNA, 18 nt, Artificial Sequence
  Synthetic
ucaauacacgcaccuucu

SEQ ID NO: 386666 - RNA, 19 nt, Artificial Sequence
  Synthetic
uucaauacacgcaccuucu

SEQ ID NO: 386667 - RNA, 20 nt, Artificial Sequence
  Synthetic
guucaauacacgcaccuucu

SEQ ID NO: 386668 - RNA, 21 nt, Artificial Sequence
  Synthetic
uguucaauacacgcaccuucu

SEQ ID NO: 386669 - RNA, 22 nt, Artificial Sequence
  Synthetic
auguucaauacacgcaccuucu

SEQ ID NO: 386670 - RNA, 23 nt, Artificial Sequence
  Synthetic
aauguucaauacacgcaccuucu

SEQ ID NO: 386671 - RNA, 24 nt, Artificial Sequence
  Synthetic
uaauguucaauacacgcaccuucu

SEQ ID NO: 386672 - RNA, 18 nt, Artificial Sequence
  Synthetic
caugaaucuucaccuucu

SEQ ID NO: 386673 - RNA, 19 nt, Artificial Sequence
  Synthetic
gcaugaaucuucaccuucu

SEQ ID NO: 386674 - RNA, 20 nt, Artificial Sequence
  Synthetic
ugcaugaaucuucaccuucu

SEQ ID NO: 386675 - RNA, 21 nt, Artificial Sequence
  Synthetic
augcaugaaucuucaccuucu

SEQ ID NO: 386676 - RNA, 22 nt, Artificial Sequence
  Synthetic
aaugcaugaaucuucaccuucu

SEQ ID NO: 386677 - RNA, 23 nt, Artificial Sequence
  Synthetic
aaaugcaugaaucuucaccuucu

SEQ ID NO: 386678 - RNA, 24 nt, Artificial Sequence
  Synthetic
aaaaugcaugaaucuucaccuucu

SEQ ID NO: 386679 - RNA, 18 nt, Artificial Sequence
  Synthetic
augaauguggccccuucu

SEQ ID NO: 386680 - RNA, 19 nt, Artificial Sequence
  Synthetic
caugaauguggccccuucu

SEQ ID NO: 386681 - RNA, 20 nt, Artificial Sequence
  Synthetic
ccaugaauguggccccuucu

SEQ ID NO: 386682 - RNA, 21 nt, Artificial Sequence
  Synthetic
accaugaauguggccccuucu

SEQ ID NO: 386683 - RNA, 22 nt, Artificial Sequence
  Synthetic
caccaugaauguggccccuucu

SEQ ID NO: 386684 - RNA, 23 nt, Artificial Sequence
  Synthetic
ucaccaugaauguggccccuucu

SEQ ID NO: 386685 - RNA, 24 nt, Artificial Sequence
  Synthetic
uucaccaugaauguggccccuucu

SEQ ID NO: 386686 - RNA, 18 nt, Artificial Sequence
  Synthetic
ugcaguuacugcccuucu

SEQ ID NO: 386687 - RNA, 19 nt, Artificial Sequence
  Synthetic
uugcaguuacugcccuucu

SEQ ID NO: 386688 - RNA, 20 nt, Artificial Sequence
  Synthetic
guugcaguuacugcccuucu

SEQ ID NO: 386689 - RNA, 21 nt, Artificial Sequence
  Synthetic
gguugcaguuacugcccuucu

SEQ ID NO: 386690 - RNA, 22 nt, Artificial Sequence
  Synthetic
ugguugcaguuacugcccuucu

SEQ ID NO: 386691 - RNA, 23 nt, Artificial Sequence
  Synthetic
uugguugcaguuacugcccuucu

SEQ ID NO: 386692 - RNA, 24 nt, Artificial Sequence
  Synthetic
cuugguugcaguuacugcccuucu

SEQ ID NO: 386693 - RNA, 18 nt, Artificial Sequence
  Synthetic
cucccaccucagccuucu

SEQ ID NO: 386694 - RNA, 19 nt, Artificial Sequence
  Synthetic
ccucccaccucagccuucu

SEQ ID NO: 386695 - RNA, 20 nt, Artificial Sequence
  Synthetic
uccucccaccucagccuucu

SEQ ID NO: 386696 - RNA, 21 nt, Artificial Sequence
  Synthetic
auccucccaccucagccuucu

SEQ ID NO: 386697 - RNA, 22 nt, Artificial Sequence
  Synthetic
aauccucccaccucagccuucu

SEQ ID NO: 386698 - RNA, 23 nt, Artificial Sequence
  Synthetic
uaauccucccaccucagccuucu

SEQ ID NO: 386699 - RNA, 24 nt, Artificial Sequence
  Synthetic
guaauccucccaccucagccuucu

SEQ ID NO: 386700 - RNA, 18 nt, Artificial Sequence
  Synthetic
auuggaugauagccuucu

SEQ ID NO: 386701 - RNA, 19 nt, Artificial Sequence
  Synthetic
cauuggaugauagccuucu

SEQ ID NO: 386702 - RNA, 20 nt, Artificial Sequence
  Synthetic
ucauuggaugauagccuucu

SEQ ID NO: 386703 - RNA, 21 nt, Artificial Sequence
  Synthetic
gucauuggaugauagccuucu

SEQ ID NO: 386704 - RNA, 22 nt, Artificial Sequence
  Synthetic
agucauuggaugauagccuucu

SEQ ID NO: 386705 - RNA, 23 nt, Artificial Sequence
  Synthetic
cagucauuggaugauagccuucu

SEQ ID NO: 386706 - RNA, 24 nt, Artificial Sequence
  Synthetic
ucagucauuggaugauagccuucu

SEQ ID NO: 386707 - RNA, 18 nt, Artificial Sequence
  Synthetic
aggcagagagcuccuucu

SEQ ID NO: 386708 - RNA, 19 nt, Artificial Sequence
  Synthetic
aaggcagagagcuccuucu

SEQ ID NO: 386709 - RNA, 20 nt, Artificial Sequence
  Synthetic
gaaggcagagagcuccuucu

SEQ ID NO: 386710 - RNA, 21 nt, Artificial Sequence
  Synthetic
ugaaggcagagagcuccuucu

SEQ ID NO: 386711 - RNA, 22 nt, Artificial Sequence
  Synthetic
gugaaggcagagagcuccuucu

SEQ ID NO: 386712 - RNA, 23 nt, Artificial Sequence
  Synthetic
ggugaaggcagagagcuccuucu

SEQ ID NO: 386713 - RNA, 24 nt, Artificial Sequence
  Synthetic
uggugaaggcagagagcuccuucu

SEQ ID NO: 386714 - RNA, 18 nt, Artificial Sequence
  Synthetic
auagcagcaucuccuucu

SEQ ID NO: 386715 - RNA, 19 nt, Artificial Sequence
  Synthetic
cauagcagcaucuccuucu

SEQ ID NO: 386716 - RNA, 20 nt, Artificial Sequence
  Synthetic
gcauagcagcaucuccuucu

SEQ ID NO: 386717 - RNA, 21 nt, Artificial Sequence
  Synthetic
agcauagcagcaucuccuucu

SEQ ID NO: 386718 - RNA, 22 nt, Artificial Sequence
  Synthetic
aagcauagcagcaucuccuucu

SEQ ID NO: 386719 - RNA, 23 nt, Artificial Sequence
  Synthetic
gaagcauagcagcaucuccuucu

SEQ ID NO: 386720 - RNA, 24 nt, Artificial Sequence
  Synthetic
ggaagcauagcagcaucuccuucu

SEQ ID NO: 386721 - RNA, 18 nt, Artificial Sequence
  Synthetic
agggaggcuuguccuucu

SEQ ID NO: 386722 - RNA, 19 nt, Artificial Sequence
  Synthetic
uagggaggcuuguccuucu

SEQ ID NO: 386723 - RNA, 20 nt, Artificial Sequence
  Synthetic
cuagggaggcuuguccuucu

SEQ ID NO: 386724 - RNA, 21 nt, Artificial Sequence
  Synthetic
acuagggaggcuuguccuucu

SEQ ID NO: 386725 - RNA, 22 nt, Artificial Sequence
  Synthetic
aacuagggaggcuuguccuucu

SEQ ID NO: 386726 - RNA, 23 nt, Artificial Sequence
  Synthetic
aaacuagggaggcuuguccuucu

SEQ ID NO: 386727 - RNA, 24 nt, Artificial Sequence
  Synthetic
aaaacuagggaggcuuguccuucu

SEQ ID NO: 386728 - RNA, 18 nt, Artificial Sequence
  Synthetic
ggaggguugguuccuucu

SEQ ID NO: 386729 - RNA, 19 nt, Artificial Sequence
  Synthetic
aggaggguugguuccuucu

SEQ ID NO: 386730 - RNA, 20 nt, Artificial Sequence
  Synthetic
caggaggguugguuccuucu

SEQ ID NO: 386731 - RNA, 21 nt, Artificial Sequence
  Synthetic
ucaggaggguugguuccuucu

SEQ ID NO: 386732 - RNA, 22 nt, Artificial Sequence
  Synthetic
gucaggaggguugguuccuucu

SEQ ID NO: 386733 - RNA, 23 nt, Artificial Sequence
  Synthetic
ugucaggaggguugguuccuucu

SEQ ID NO: 386734 - RNA, 24 nt, Artificial Sequence
  Synthetic
gugucaggaggguugguuccuucu

SEQ ID NO: 386735 - RNA, 18 nt, Artificial Sequence
  Synthetic
ucuuccucuuuuccuucu

SEQ ID NO: 386736 - RNA, 19 nt, Artificial Sequence
  Synthetic
gucuuccucuuuuccuucu

SEQ ID NO: 386737 - RNA, 20 nt, Artificial Sequence
  Synthetic
ugucuuccucuuuuccuucu

SEQ ID NO: 386738 - RNA, 21 nt, Artificial Sequence
  Synthetic
gugucuuccucuuuuccuucu

SEQ ID NO: 386739 - RNA, 22 nt, Artificial Sequence
  Synthetic
cgugucuuccucuuuuccuucu

SEQ ID NO: 386740 - RNA, 23 nt, Artificial Sequence
  Synthetic
ucgugucuuccucuuuuccuucu

SEQ ID NO: 386741 - RNA, 24 nt, Artificial Sequence
  Synthetic
gucgugucuuccucuuuuccuucu

SEQ ID NO: 386742 - RNA, 18 nt, Artificial Sequence
  Synthetic
gggucaccaaaagcuucu

SEQ ID NO: 386743 - RNA, 19 nt, Artificial Sequence
  Synthetic
ugggucaccaaaagcuucu

SEQ ID NO: 386744 - RNA, 20 nt, Artificial Sequence
  Synthetic
cugggucaccaaaagcuucu

SEQ ID NO: 386745 - RNA, 21 nt, Artificial Sequence
  Synthetic
ucugggucaccaaaagcuucu

SEQ ID NO: 386746 - RNA, 22 nt, Artificial Sequence
  Synthetic
aucugggucaccaaaagcuucu

SEQ ID NO: 386747 - RNA, 23 nt, Artificial Sequence
  Synthetic
uaucugggucaccaaaagcuucu

SEQ ID NO: 386748 - RNA, 24 nt, Artificial Sequence
  Synthetic
guaucugggucaccaaaagcuucu

SEQ ID NO: 386749 - RNA, 18 nt, Artificial Sequence
  Synthetic
cuuguaauccaagcuucu

SEQ ID NO: 386750 - RNA, 19 nt, Artificial Sequence
  Synthetic
gcuuguaauccaagcuucu

SEQ ID NO: 386751 - RNA, 20 nt, Artificial Sequence
  Synthetic
ugcuuguaauccaagcuucu

SEQ ID NO: 386752 - RNA, 21 nt, Artificial Sequence
  Synthetic
uugcuuguaauccaagcuucu

SEQ ID NO: 386753 - RNA, 22 nt, Artificial Sequence
  Synthetic
guugcuuguaauccaagcuucu

SEQ ID NO: 386754 - RNA, 23 nt, Artificial Sequence
  Synthetic
aguugcuuguaauccaagcuucu

SEQ ID NO: 386755 - RNA, 24 nt, Artificial Sequence
  Synthetic
caguugcuuguaauccaagcuucu

SEQ ID NO: 386756 - RNA, 18 nt, Artificial Sequence
  Synthetic
agcaucuacucagcuucu

SEQ ID NO: 386757 - RNA, 19 nt, Artificial Sequence
  Synthetic
cagcaucuacucagcuucu

SEQ ID NO: 386758 - RNA, 20 nt, Artificial Sequence
  Synthetic
ccagcaucuacucagcuucu

SEQ ID NO: 386759 - RNA, 21 nt, Artificial Sequence
  Synthetic
accagcaucuacucagcuucu

SEQ ID NO: 386760 - RNA, 22 nt, Artificial Sequence
  Synthetic
caccagcaucuacucagcuucu

SEQ ID NO: 386761 - RNA, 23 nt, Artificial Sequence
  Synthetic
acaccagcaucuacucagcuucu

SEQ ID NO: 386762 - RNA, 24 nt, Artificial Sequence
  Synthetic
gacaccagcaucuacucagcuucu

SEQ ID NO: 386763 - RNA, 18 nt, Artificial Sequence
  Synthetic
auaaggagcucagcuucu

SEQ ID NO: 386764 - RNA, 19 nt, Artificial Sequence
  Synthetic
cauaaggagcucagcuucu

SEQ ID NO: 386765 - RNA, 20 nt, Artificial Sequence
  Synthetic
acauaaggagcucagcuucu

SEQ ID NO: 386766 - RNA, 21 nt, Artificial Sequence
  Synthetic
gacauaaggagcucagcuucu

SEQ ID NO: 386767 - RNA, 22 nt, Artificial Sequence
  Synthetic
ggacauaaggagcucagcuucu

SEQ ID NO: 386768 - RNA, 23 nt, Artificial Sequence
  Synthetic
aggacauaaggagcucagcuucu

SEQ ID NO: 386769 - RNA, 24 nt, Artificial Sequence
  Synthetic
uaggacauaaggagcucagcuucu

SEQ ID NO: 386770 - RNA, 18 nt, Artificial Sequence
  Synthetic
gggcugaagcaggcuucu

SEQ ID NO: 386771 - RNA, 19 nt, Artificial Sequence
  Synthetic
agggcugaagcaggcuucu

SEQ ID NO: 386772 - RNA, 20 nt, Artificial Sequence
  Synthetic
aagggcugaagcaggcuucu

SEQ ID NO: 386773 - RNA, 21 nt, Artificial Sequence
  Synthetic
caagggcugaagcaggcuucu

SEQ ID NO: 386774 - RNA, 22 nt, Artificial Sequence
  Synthetic
acaagggcugaagcaggcuucu

SEQ ID NO: 386775 - RNA, 23 nt, Artificial Sequence
  Synthetic
aacaagggcugaagcaggcuucu

SEQ ID NO: 386776 - RNA, 24 nt, Artificial Sequence
  Synthetic
uaacaagggcugaagcaggcuucu

SEQ ID NO: 386777 - RNA, 18 nt, Artificial Sequence
  Synthetic
gaaugucacucggcuucu

SEQ ID NO: 386778 - RNA, 19 nt, Artificial Sequence
  Synthetic
agaaugucacucggcuucu

SEQ ID NO: 386779 - RNA, 20 nt, Artificial Sequence
  Synthetic
cagaaugucacucggcuucu

SEQ ID NO: 386780 - RNA, 21 nt, Artificial Sequence
  Synthetic
ccagaaugucacucggcuucu

SEQ ID NO: 386781 - RNA, 22 nt, Artificial Sequence
  Synthetic
cccagaaugucacucggcuucu

SEQ ID NO: 386782 - RNA, 23 nt, Artificial Sequence
  Synthetic
gcccagaaugucacucggcuucu

SEQ ID NO: 386783 - RNA, 24 nt, Artificial Sequence
  Synthetic
agcccagaaugucacucggcuucu

SEQ ID NO: 386784 - RNA, 18 nt, Artificial Sequence
  Synthetic
aaugauaacuaugcuucu

SEQ ID NO: 386785 - RNA, 19 nt, Artificial Sequence
  Synthetic
aaaugauaacuaugcuucu

SEQ ID NO: 386786 - RNA, 20 nt, Artificial Sequence
  Synthetic
aaaaugauaacuaugcuucu

SEQ ID NO: 386787 - RNA, 21 nt, Artificial Sequence
  Synthetic
aaaaaugauaacuaugcuucu

SEQ ID NO: 386788 - RNA, 22 nt, Artificial Sequence
  Synthetic
aaaaaaugauaacuaugcuucu

SEQ ID NO: 386789 - RNA, 23 nt, Artificial Sequence
  Synthetic
aaaaaaaugauaacuaugcuucu

SEQ ID NO: 386790 - RNA, 24 nt, Artificial Sequence
  Synthetic
aaaaaaaaugauaacuaugcuucu

SEQ ID NO: 386791 - RNA, 18 nt, Artificial Sequence
  Synthetic
uuaaaagagauugcuucu

SEQ ID NO: 386792 - RNA, 19 nt, Artificial Sequence
  Synthetic
guuaaaagagauugcuucu

SEQ ID NO: 386793 - RNA, 20 nt, Artificial Sequence
  Synthetic
gguuaaaagagauugcuucu

SEQ ID NO: 386794 - RNA, 21 nt, Artificial Sequence
  Synthetic
ggguuaaaagagauugcuucu

SEQ ID NO: 386795 - RNA, 22 nt, Artificial Sequence
  Synthetic
aggguuaaaagagauugcuucu

SEQ ID NO: 386796 - RNA, 23 nt, Artificial Sequence
  Synthetic
aaggguuaaaagagauugcuucu

SEQ ID NO: 386797 - RNA, 24 nt, Artificial Sequence
  Synthetic
gaaggguuaaaagagauugcuucu

SEQ ID NO: 386798 - RNA, 18 nt, Artificial Sequence
  Synthetic
uuccauuuuaaaucuucu

SEQ ID NO: 386799 - RNA, 19 nt, Artificial Sequence
  Synthetic
uuuccauuuuaaaucuucu

SEQ ID NO: 386800 - RNA, 20 nt, Artificial Sequence
  Synthetic
auuuccauuuuaaaucuucu

SEQ ID NO: 386801 - RNA, 21 nt, Artificial Sequence
  Synthetic
cauuuccauuuuaaaucuucu

SEQ ID NO: 386802 - RNA, 22 nt, Artificial Sequence
  Synthetic
acauuuccauuuuaaaucuucu

SEQ ID NO: 386803 - RNA, 23 nt, Artificial Sequence
  Synthetic
uacauuuccauuuuaaaucuucu

SEQ ID NO: 386804 - RNA, 24 nt, Artificial Sequence
  Synthetic
uuacauuuccauuuuaaaucuucu

SEQ ID NO: 386805 - RNA, 18 nt, Artificial Sequence
  Synthetic
gggauuaagcaaucuucu

SEQ ID NO: 386806 - RNA, 19 nt, Artificial Sequence
  Synthetic
agggauuaagcaaucuucu

SEQ ID NO: 386807 - RNA, 20 nt, Artificial Sequence
  Synthetic
gagggauuaagcaaucuucu

SEQ ID NO: 386808 - RNA, 21 nt, Artificial Sequence
  Synthetic
agagggauuaagcaaucuucu

SEQ ID NO: 386809 - RNA, 22 nt, Artificial Sequence
  Synthetic
cagagggauuaagcaaucuucu

SEQ ID NO: 386810 - RNA, 23 nt, Artificial Sequence
  Synthetic
ccagagggauuaagcaaucuucu

SEQ ID NO: 386811 - RNA, 24 nt, Artificial Sequence
  Synthetic
uccagagggauuaagcaaucuucu

SEQ ID NO: 386812 - RNA, 18 nt, Artificial Sequence
  Synthetic
ucugcacucucaucuucu

SEQ ID NO: 386813 - RNA, 19 nt, Artificial Sequence
  Synthetic
aucugcacucucaucuucu

SEQ ID NO: 386814 - RNA, 20 nt, Artificial Sequence
  Synthetic
uaucugcacucucaucuucu

SEQ ID NO: 386815 - RNA, 21 nt, Artificial Sequence
  Synthetic
auaucugcacucucaucuucu

SEQ ID NO: 386816 - RNA, 22 nt, Artificial Sequence
  Synthetic
gauaucugcacucucaucuucu

SEQ ID NO: 386817 - RNA, 23 nt, Artificial Sequence
  Synthetic
agauaucugcacucucaucuucu

SEQ ID NO: 386818 - RNA, 24 nt, Artificial Sequence
  Synthetic
aagauaucugcacucucaucuucu

SEQ ID NO: 386819 - RNA, 18 nt, Artificial Sequence
  Synthetic
uuacccucaagaucuucu

SEQ ID NO: 386820 - RNA, 19 nt, Artificial Sequence
  Synthetic
uuuacccucaagaucuucu

SEQ ID NO: 386821 - RNA, 20 nt, Artificial Sequence
  Synthetic
uuuuacccucaagaucuucu

SEQ ID NO: 386822 - RNA, 21 nt, Artificial Sequence
  Synthetic
uuuuuacccucaagaucuucu

SEQ ID NO: 386823 - RNA, 22 nt, Artificial Sequence
  Synthetic
guuuuuacccucaagaucuucu

SEQ ID NO: 386824 - RNA, 23 nt, Artificial Sequence
  Synthetic
gguuuuuacccucaagaucuucu

SEQ ID NO: 386825 - RNA, 24 nt, Artificial Sequence
  Synthetic
ugguuuuuacccucaagaucuucu

SEQ ID NO: 386826 - RNA, 18 nt, Artificial Sequence
  Synthetic
cucauuucuauaucuucu

SEQ ID NO: 386827 - RNA, 19 nt, Artificial Sequence
  Synthetic
acucauuucuauaucuucu

SEQ ID NO: 386828 - RNA, 20 nt, Artificial Sequence
  Synthetic
uacucauuucuauaucuucu

SEQ ID NO: 386829 - RNA, 21 nt, Artificial Sequence
  Synthetic
auacucauuucuauaucuucu

SEQ ID NO: 386830 - RNA, 22 nt, Artificial Sequence
  Synthetic
aauacucauuucuauaucuucu

SEQ ID NO: 386831 - RNA, 23 nt, Artificial Sequence
  Synthetic
gaauacucauuucuauaucuucu

SEQ ID NO: 386832 - RNA, 24 nt, Artificial Sequence
  Synthetic
ugaauacucauuucuauaucuucu

SEQ ID NO: 386833 - RNA, 18 nt, Artificial Sequence
  Synthetic
cucagaucauuaucuucu

SEQ ID NO: 386834 - RNA, 19 nt, Artificial Sequence
  Synthetic
acucagaucauuaucuucu

SEQ ID NO: 386835 - RNA, 20 nt, Artificial Sequence
  Synthetic
gacucagaucauuaucuucu

SEQ ID NO: 386836 - RNA, 21 nt, Artificial Sequence
  Synthetic
agacucagaucauuaucuucu

SEQ ID NO: 386837 - RNA, 22 nt, Artificial Sequence
  Synthetic
aagacucagaucauuaucuucu

SEQ ID NO: 386838 - RNA, 23 nt, Artificial Sequence
  Synthetic
caagacucagaucauuaucuucu

SEQ ID NO: 386839 - RNA, 24 nt, Artificial Sequence
  Synthetic
ucaagacucagaucauuaucuucu

SEQ ID NO: 386840 - RNA, 18 nt, Artificial Sequence
  Synthetic
aaacuuuaaaacucuucu

SEQ ID NO: 386841 - RNA, 19 nt, Artificial Sequence
  Synthetic
aaaacuuuaaaacucuucu

SEQ ID NO: 386842 - RNA, 20 nt, Artificial Sequence
  Synthetic
uaaaacuuuaaaacucuucu

SEQ ID NO: 386843 - RNA, 21 nt, Artificial Sequence
  Synthetic
cuaaaacuuuaaaacucuucu

SEQ ID NO: 386844 - RNA, 22 nt, Artificial Sequence
  Synthetic
acuaaaacuuuaaaacucuucu

SEQ ID NO: 386845 - RNA, 23 nt, Artificial Sequence
  Synthetic
aacuaaaacuuuaaaacucuucu

SEQ ID NO: 386846 - RNA, 24 nt, Artificial Sequence
  Synthetic
gaacuaaaacuuuaaaacucuucu

SEQ ID NO: 386847 - RNA, 18 nt, Artificial Sequence
  Synthetic
aagauccacugcucuucu

SEQ ID NO: 386848 - RNA, 19 nt, Artificial Sequence
  Synthetic
uaagauccacugcucuucu

SEQ ID NO: 386849 - RNA, 20 nt, Artificial Sequence
  Synthetic
guaagauccacugcucuucu

SEQ ID NO: 386850 - RNA, 21 nt, Artificial Sequence
  Synthetic
aguaagauccacugcucuucu

SEQ ID NO: 386851 - RNA, 22 nt, Artificial Sequence
  Synthetic
aaguaagauccacugcucuucu

SEQ ID NO: 386852 - RNA, 23 nt, Artificial Sequence
  Synthetic
uaaguaagauccacugcucuucu

SEQ ID NO: 386853 - RNA, 24 nt, Artificial Sequence
  Synthetic
cuaaguaagauccacugcucuucu

SEQ ID NO: 386854 - RNA, 18 nt, Artificial Sequence
  Synthetic
ugucuucucuucucuucu

SEQ ID NO: 386855 - RNA, 19 nt, Artificial Sequence
  Synthetic
gugucuucucuucucuucu

SEQ ID NO: 386856 - RNA, 20 nt, Artificial Sequence
  Synthetic
ggugucuucucuucucuucu

SEQ ID NO: 386857 - RNA, 21 nt, Artificial Sequence
  Synthetic
aggugucuucucuucucuucu

SEQ ID NO: 386858 - RNA, 22 nt, Artificial Sequence
  Synthetic
aaggugucuucucuucucuucu

SEQ ID NO: 386859 - RNA, 23 nt, Artificial Sequence
  Synthetic
aaaggugucuucucuucucuucu

SEQ ID NO: 386860 - RNA, 24 nt, Artificial Sequence
  Synthetic
caaaggugucuucucuucucuucu

SEQ ID NO: 386861 - RNA, 18 nt, Artificial Sequence
  Synthetic
gacuggaugaagucuucu

SEQ ID NO: 386862 - RNA, 19 nt, Artificial Sequence
  Synthetic
ggacuggaugaagucuucu

SEQ ID NO: 386863 - RNA, 20 nt, Artificial Sequence
  Synthetic
gggacuggaugaagucuucu

SEQ ID NO: 386864 - RNA, 21 nt, Artificial Sequence
  Synthetic
ugggacuggaugaagucuucu

SEQ ID NO: 386865 - RNA, 22 nt, Artificial Sequence
  Synthetic
augggacuggaugaagucuucu

SEQ ID NO: 386866 - RNA, 23 nt, Artificial Sequence
  Synthetic
caugggacuggaugaagucuucu

SEQ ID NO: 386867 - RNA, 24 nt, Artificial Sequence
  Synthetic
acaugggacuggaugaagucuucu

SEQ ID NO: 386868 - RNA, 18 nt, Artificial Sequence
  Synthetic
gucauuuuaaugucuucu

SEQ ID NO: 386869 - RNA, 19 nt, Artificial Sequence
  Synthetic
ggucauuuuaaugucuucu

SEQ ID NO: 386870 - RNA, 20 nt, Artificial Sequence
  Synthetic
uggucauuuuaaugucuucu

SEQ ID NO: 386871 - RNA, 21 nt, Artificial Sequence
  Synthetic
uuggucauuuuaaugucuucu

SEQ ID NO: 386872 - RNA, 22 nt, Artificial Sequence
  Synthetic
guuggucauuuuaaugucuucu

SEQ ID NO: 386873 - RNA, 23 nt, Artificial Sequence
  Synthetic
uguuggucauuuuaaugucuucu

SEQ ID NO: 386874 - RNA, 24 nt, Artificial Sequence
  Synthetic
cuguuggucauuuuaaugucuucu

SEQ ID NO: 386875 - RNA, 18 nt, Artificial Sequence
  Synthetic
aacaugauuaauucuucu

SEQ ID NO: 386876 - RNA, 19 nt, Artificial Sequence
  Synthetic
uaacaugauuaauucuucu

SEQ ID NO: 386877 - RNA, 20 nt, Artificial Sequence
  Synthetic
uuaacaugauuaauucuucu

SEQ ID NO: 386878 - RNA, 21 nt, Artificial Sequence
  Synthetic
auuaacaugauuaauucuucu

SEQ ID NO: 386879 - RNA, 22 nt, Artificial Sequence
  Synthetic
aauuaacaugauuaauucuucu

SEQ ID NO: 386880 - RNA, 23 nt, Artificial Sequence
  Synthetic
gaauuaacaugauuaauucuucu

SEQ ID NO: 386881 - RNA, 24 nt, Artificial Sequence
  Synthetic
ggaauuaacaugauuaauucuucu

SEQ ID NO: 386882 - RNA, 18 nt, Artificial Sequence
  Synthetic
aaauuuguuaauucuucu

SEQ ID NO: 386883 - RNA, 19 nt, Artificial Sequence
  Synthetic
caaauuuguuaauucuucu

SEQ ID NO: 386884 - RNA, 20 nt, Artificial Sequence
  Synthetic
ucaaauuuguuaauucuucu

SEQ ID NO: 386885 - RNA, 21 nt, Artificial Sequence
  Synthetic
uucaaauuuguuaauucuucu

SEQ ID NO: 386886 - RNA, 22 nt, Artificial Sequence
  Synthetic
uuucaaauuuguuaauucuucu

SEQ ID NO: 386887 - RNA, 23 nt, Artificial Sequence
  Synthetic
auuucaaauuuguuaauucuucu

SEQ ID NO: 386888 - RNA, 24 nt, Artificial Sequence
  Synthetic
aauuucaaauuuguuaauucuucu

SEQ ID NO: 386889 - RNA, 18 nt, Artificial Sequence
  Synthetic
ucaugcauugcuucuucu

SEQ ID NO: 386890 - RNA, 19 nt, Artificial Sequence
  Synthetic
cucaugcauugcuucuucu

SEQ ID NO: 386891 - RNA, 20 nt, Artificial Sequence
  Synthetic
ucucaugcauugcuucuucu

SEQ ID NO: 386892 - RNA, 21 nt, Artificial Sequence
  Synthetic
cucucaugcauugcuucuucu

SEQ ID NO: 386893 - RNA, 22 nt, Artificial Sequence
  Synthetic
ucucucaugcauugcuucuucu

SEQ ID NO: 386894 - RNA, 23 nt, Artificial Sequence
  Synthetic
cucucucaugcauugcuucuucu

SEQ ID NO: 386895 - RNA, 24 nt, Artificial Sequence
  Synthetic
ucucucucaugcauugcuucuucu

SEQ ID NO: 386896 - RNA, 18 nt, Artificial Sequence
  Synthetic
ccaauguauucuucuucu

SEQ ID NO: 386897 - RNA, 19 nt, Artificial Sequence
  Synthetic
uccaauguauucuucuucu

SEQ ID NO: 386898 - RNA, 20 nt, Artificial Sequence
  Synthetic
uuccaauguauucuucuucu

SEQ ID NO: 386899 - RNA, 21 nt, Artificial Sequence
  Synthetic
uuuccaauguauucuucuucu

SEQ ID NO: 386900 - RNA, 22 nt, Artificial Sequence
  Synthetic
uuuuccaauguauucuucuucu

SEQ ID NO: 386901 - RNA, 23 nt, Artificial Sequence
  Synthetic
auuuuccaauguauucuucuucu

SEQ ID NO: 386902 - RNA, 24 nt, Artificial Sequence
  Synthetic
cauuuuccaauguauucuucuucu

SEQ ID NO: 386903 - RNA, 18 nt, Artificial Sequence
  Synthetic
acauaccggauuucuucu

SEQ ID NO: 386904 - RNA, 19 nt, Artificial Sequence
  Synthetic
cacauaccggauuucuucu

SEQ ID NO: 386905 - RNA, 20 nt, Artificial Sequence
  Synthetic
ucacauaccggauuucuucu

SEQ ID NO: 386906 - RNA, 21 nt, Artificial Sequence
  Synthetic
uucacauaccggauuucuucu

SEQ ID NO: 386907 - RNA, 22 nt, Artificial Sequence
  Synthetic
cuucacauaccggauuucuucu

SEQ ID NO: 386908 - RNA, 23 nt, Artificial Sequence
  Synthetic
gcuucacauaccggauuucuucu

SEQ ID NO: 386909 - RNA, 24 nt, Artificial Sequence
  Synthetic
ggcuucacauaccggauuucuucu

SEQ ID NO: 386910 - RNA, 18 nt, Artificial Sequence
  Synthetic
aaugcacauuuuucuucu

SEQ ID NO: 386911 - RNA, 19 nt, Artificial Sequence
  Synthetic
uaaugcacauuuuucuucu

SEQ ID NO: 386912 - RNA, 20 nt, Artificial Sequence
  Synthetic
auaaugcacauuuuucuucu

SEQ ID NO: 386913 - RNA, 21 nt, Artificial Sequence
  Synthetic
aauaaugcacauuuuucuucu

SEQ ID NO: 386914 - RNA, 22 nt, Artificial Sequence
  Synthetic
uaauaaugcacauuuuucuucu

SEQ ID NO: 386915 - RNA, 23 nt, Artificial Sequence
  Synthetic
uuaauaaugcacauuuuucuucu

SEQ ID NO: 386916 - RNA, 24 nt, Artificial Sequence
  Synthetic
cuuaauaaugcacauuuuucuucu

SEQ ID NO: 386917 - RNA, 18 nt, Artificial Sequence
  Synthetic
gcaucucuaacaaguucu

SEQ ID NO: 386918 - RNA, 19 nt, Artificial Sequence
  Synthetic
ugcaucucuaacaaguucu

SEQ ID NO: 386919 - RNA, 20 nt, Artificial Sequence
  Synthetic
uugcaucucuaacaaguucu

SEQ ID NO: 386920 - RNA, 21 nt, Artificial Sequence
  Synthetic
uuugcaucucuaacaaguucu

SEQ ID NO: 386921 - RNA, 22 nt, Artificial Sequence
  Synthetic
auuugcaucucuaacaaguucu

SEQ ID NO: 386922 - RNA, 23 nt, Artificial Sequence
  Synthetic
aauuugcaucucuaacaaguucu

SEQ ID NO: 386923 - RNA, 24 nt, Artificial Sequence
  Synthetic
gaauuugcaucucuaacaaguucu

SEQ ID NO: 386924 - RNA, 18 nt, Artificial Sequence
  Synthetic
cccagucauauaaguucu

SEQ ID NO: 386925 - RNA, 19 nt, Artificial Sequence
  Synthetic
ucccagucauauaaguucu

SEQ ID NO: 386926 - RNA, 20 nt, Artificial Sequence
  Synthetic
uucccagucauauaaguucu

SEQ ID NO: 386927 - RNA, 21 nt, Artificial Sequence
  Synthetic
uuucccagucauauaaguucu

SEQ ID NO: 386928 - RNA, 22 nt, Artificial Sequence
  Synthetic
uuuucccagucauauaaguucu

SEQ ID NO: 386929 - RNA, 23 nt, Artificial Sequence
  Synthetic
uuuuucccagucauauaaguucu

SEQ ID NO: 386930 - RNA, 24 nt, Artificial Sequence
  Synthetic
cuuuuucccagucauauaaguucu

SEQ ID NO: 386931 - RNA, 18 nt, Artificial Sequence
  Synthetic
ccugaccuucuaaguucu

SEQ ID NO: 386932 - RNA, 19 nt, Artificial Sequence
  Synthetic
uccugaccuucuaaguucu

SEQ ID NO: 386933 - RNA, 20 nt, Artificial Sequence
  Synthetic
uuccugaccuucuaaguucu

SEQ ID NO: 386934 - RNA, 21 nt, Artificial Sequence
  Synthetic
guuccugaccuucuaaguucu

SEQ ID NO: 386935 - RNA, 22 nt, Artificial Sequence
  Synthetic
uguuccugaccuucuaaguucu

SEQ ID NO: 386936 - RNA, 23 nt, Artificial Sequence
  Synthetic
auguuccugaccuucuaaguucu

SEQ ID NO: 386937 - RNA, 24 nt, Artificial Sequence
  Synthetic
uauguuccugaccuucuaaguucu

SEQ ID NO: 386938 - RNA, 18 nt, Artificial Sequence
  Synthetic
auucauaaaguaaguucu

SEQ ID NO: 386939 - RNA, 19 nt, Artificial Sequence
  Synthetic
gauucauaaaguaaguucu

SEQ ID NO: 386940 - RNA, 20 nt, Artificial Sequence
  Synthetic
ggauucauaaaguaaguucu

SEQ ID NO: 386941 - RNA, 21 nt, Artificial Sequence
  Synthetic
cggauucauaaaguaaguucu

SEQ ID NO: 386942 - RNA, 22 nt, Artificial Sequence
  Synthetic
ccggauucauaaaguaaguucu

SEQ ID NO: 386943 - RNA, 23 nt, Artificial Sequence
  Synthetic
cccggauucauaaaguaaguucu

SEQ ID NO: 386944 - RNA, 24 nt, Artificial Sequence
  Synthetic
acccggauucauaaaguaaguucu

SEQ ID NO: 386945 - RNA, 18 nt, Artificial Sequence
  Synthetic
cguuaaagacccaguucu

SEQ ID NO: 386946 - RNA, 19 nt, Artificial Sequence
  Synthetic
ucguuaaagacccaguucu

SEQ ID NO: 386947 - RNA, 20 nt, Artificial Sequence
  Synthetic
uucguuaaagacccaguucu

SEQ ID NO: 386948 - RNA, 21 nt, Artificial Sequence
  Synthetic
cuucguuaaagacccaguucu

SEQ ID NO: 386949 - RNA, 22 nt, Artificial Sequence
  Synthetic
gcuucguuaaagacccaguucu

SEQ ID NO: 386950 - RNA, 23 nt, Artificial Sequence
  Synthetic
agcuucguuaaagacccaguucu

SEQ ID NO: 386951 - RNA, 24 nt, Artificial Sequence
  Synthetic
cagcuucguuaaagacccaguucu

SEQ ID NO: 386952 - RNA, 18 nt, Artificial Sequence
  Synthetic
auuucacgauucaguucu

SEQ ID NO: 386953 - RNA, 19 nt, Artificial Sequence
  Synthetic
uauuucacgauucaguucu

SEQ ID NO: 386954 - RNA, 20 nt, Artificial Sequence
  Synthetic
guauuucacgauucaguucu

SEQ ID NO: 386955 - RNA, 21 nt, Artificial Sequence
  Synthetic
gguauuucacgauucaguucu

SEQ ID NO: 386956 - RNA, 22 nt, Artificial Sequence
  Synthetic
ugguauuucacgauucaguucu

SEQ ID NO: 386957 - RNA, 23 nt, Artificial Sequence
  Synthetic
augguauuucacgauucaguucu

SEQ ID NO: 386958 - RNA, 24 nt, Artificial Sequence
  Synthetic
uaugguauuucacgauucaguucu

SEQ ID NO: 386959 - RNA, 18 nt, Artificial Sequence
  Synthetic
ugacauauucagaguucu

SEQ ID NO: 386960 - RNA, 19 nt, Artificial Sequence
  Synthetic
augacauauucagaguucu

SEQ ID NO: 386961 - RNA, 20 nt, Artificial Sequence
  Synthetic
aaugacauauucagaguucu

SEQ ID NO: 386962 - RNA, 21 nt, Artificial Sequence
  Synthetic
aaaugacauauucagaguucu

SEQ ID NO: 386963 - RNA, 22 nt, Artificial Sequence
  Synthetic
gaaaugacauauucagaguucu

SEQ ID NO: 386964 - RNA, 23 nt, Artificial Sequence
  Synthetic
ugaaaugacauauucagaguucu

SEQ ID NO: 386965 - RNA, 24 nt, Artificial Sequence
  Synthetic
uugaaaugacauauucagaguucu

SEQ ID NO: 386966 - RNA, 18 nt, Artificial Sequence
  Synthetic
uucauauuuuggaguucu

SEQ ID NO: 386967 - RNA, 19 nt, Artificial Sequence
  Synthetic
uuucauauuuuggaguucu

SEQ ID NO: 386968 - RNA, 20 nt, Artificial Sequence
  Synthetic
cuuucauauuuuggaguucu

SEQ ID NO: 386969 - RNA, 21 nt, Artificial Sequence
  Synthetic
acuuucauauuuuggaguucu

SEQ ID NO: 386970 - RNA, 22 nt, Artificial Sequence
  Synthetic
uacuuucauauuuuggaguucu

SEQ ID NO: 386971 - RNA, 23 nt, Artificial Sequence
  Synthetic
cuacuuucauauuuuggaguucu

SEQ ID NO: 386972 - RNA, 24 nt, Artificial Sequence
  Synthetic
ucuacuuucauauuuuggaguucu

SEQ ID NO: 386973 - RNA, 18 nt, Artificial Sequence
  Synthetic
aaaagcuugaugaguucu

SEQ ID NO: 386974 - RNA, 19 nt, Artificial Sequence
  Synthetic
aaaaagcuugaugaguucu

SEQ ID NO: 386975 - RNA, 20 nt, Artificial Sequence
  Synthetic
uaaaaagcuugaugaguucu

SEQ ID NO: 386976 - RNA, 21 nt, Artificial Sequence
  Synthetic
auaaaaagcuugaugaguucu

SEQ ID NO: 386977 - RNA, 22 nt, Artificial Sequence
  Synthetic
aauaaaaagcuugaugaguucu

SEQ ID NO: 386978 - RNA, 23 nt, Artificial Sequence
  Synthetic
aaauaaaaagcuugaugaguucu

SEQ ID NO: 386979 - RNA, 24 nt, Artificial Sequence
  Synthetic
gaaauaaaaagcuugaugaguucu

SEQ ID NO: 386980 - RNA, 18 nt, Artificial Sequence
  Synthetic
uuguugccucugaguucu

SEQ ID NO: 386981 - RNA, 19 nt, Artificial Sequence
  Synthetic
cuuguugccucugaguucu

SEQ ID NO: 386982 - RNA, 20 nt, Artificial Sequence
  Synthetic
ucuuguugccucugaguucu

SEQ ID NO: 386983 - RNA, 21 nt, Artificial Sequence
  Synthetic
uucuuguugccucugaguucu

SEQ ID NO: 386984 - RNA, 22 nt, Artificial Sequence
  Synthetic
uuucuuguugccucugaguucu

SEQ ID NO: 386985 - RNA, 23 nt, Artificial Sequence
  Synthetic
guuucuuguugccucugaguucu

SEQ ID NO: 386986 - RNA, 24 nt, Artificial Sequence
  Synthetic
aguuucuuguugccucugaguucu

SEQ ID NO: 386987 - RNA, 18 nt, Artificial Sequence
  Synthetic
gcuuggugguugaguucu

SEQ ID NO: 386988 - RNA, 19 nt, Artificial Sequence
  Synthetic
agcuuggugguugaguucu

SEQ ID NO: 386989 - RNA, 20 nt, Artificial Sequence
  Synthetic
cagcuuggugguugaguucu

SEQ ID NO: 386990 - RNA, 21 nt, Artificial Sequence
  Synthetic
acagcuuggugguugaguucu

SEQ ID NO: 386991 - RNA, 22 nt, Artificial Sequence
  Synthetic
cacagcuuggugguugaguucu

SEQ ID NO: 386992 - RNA, 23 nt, Artificial Sequence
  Synthetic
ccacagcuuggugguugaguucu

SEQ ID NO: 386993 - RNA, 24 nt, Artificial Sequence
  Synthetic
cccacagcuuggugguugaguucu

SEQ ID NO: 386994 - RNA, 18 nt, Artificial Sequence
  Synthetic
aguucaguuuugaguucu

SEQ ID NO: 386995 - RNA, 19 nt, Artificial Sequence
  Synthetic
uaguucaguuuugaguucu

SEQ ID NO: 386996 - RNA, 20 nt, Artificial Sequence
  Synthetic
guaguucaguuuugaguucu

SEQ ID NO: 386997 - RNA, 21 nt, Artificial Sequence
  Synthetic
gguaguucaguuuugaguucu

SEQ ID NO: 386998 - RNA, 22 nt, Artificial Sequence
  Synthetic
cgguaguucaguuuugaguucu

SEQ ID NO: 386999 - RNA, 23 nt, Artificial Sequence
  Synthetic
acgguaguucaguuuugaguucu

SEQ ID NO: 387000 - RNA, 24 nt, Artificial Sequence
  Synthetic
aacgguaguucaguuuugaguucu

SEQ ID NO: 387001 - RNA, 18 nt, Artificial Sequence
  Synthetic
gggauaauguauaguucu

SEQ ID NO: 387002 - RNA, 19 nt, Artificial Sequence
  Synthetic
agggauaauguauaguucu

SEQ ID NO: 387003 - RNA, 20 nt, Artificial Sequence
  Synthetic
gagggauaauguauaguucu

SEQ ID NO: 387004 - RNA, 21 nt, Artificial Sequence
  Synthetic
ggagggauaauguauaguucu

SEQ ID NO: 387005 - RNA, 22 nt, Artificial Sequence
  Synthetic
uggagggauaauguauaguucu

SEQ ID NO: 387006 - RNA, 23 nt, Artificial Sequence
  Synthetic
cuggagggauaauguauaguucu

SEQ ID NO: 387007 - RNA, 24 nt, Artificial Sequence
  Synthetic
acuggagggauaauguauaguucu

SEQ ID NO: 387008 - RNA, 18 nt, Artificial Sequence
  Synthetic
aaaaucccucuagguucu

SEQ ID NO: 387009 - RNA, 19 nt, Artificial Sequence
  Synthetic
aaaaaucccucuagguucu

SEQ ID NO: 387010 - RNA, 20 nt, Artificial Sequence
  Synthetic
aaaaaaucccucuagguucu

SEQ ID NO: 387011 - RNA, 21 nt, Artificial Sequence
  Synthetic
uaaaaaaucccucuagguucu

SEQ ID NO: 387012 - RNA, 22 nt, Artificial Sequence
  Synthetic
cuaaaaaaucccucuagguucu

SEQ ID NO: 387013 - RNA, 23 nt, Artificial Sequence
  Synthetic
acuaaaaaaucccucuagguucu

SEQ ID NO: 387014 - RNA, 24 nt, Artificial Sequence
  Synthetic
uacuaaaaaaucccucuagguucu

SEQ ID NO: 387015 - RNA, 18 nt, Artificial Sequence
  Synthetic
uaccagucgagggguucu

SEQ ID NO: 387016 - RNA, 19 nt, Artificial Sequence
  Synthetic
auaccagucgagggguucu

SEQ ID NO: 387017 - RNA, 20 nt, Artificial Sequence
  Synthetic
cauaccagucgagggguucu

SEQ ID NO: 387018 - RNA, 21 nt, Artificial Sequence
  Synthetic
acauaccagucgagggguucu

SEQ ID NO: 387019 - RNA, 22 nt, Artificial Sequence
  Synthetic
gacauaccagucgagggguucu

SEQ ID NO: 387020 - RNA, 23 nt, Artificial Sequence
  Synthetic
agacauaccagucgagggguucu

SEQ ID NO: 387021 - RNA, 24 nt, Artificial Sequence
  Synthetic
aagacauaccagucgagggguucu

SEQ ID NO: 387022 - RNA, 18 nt, Artificial Sequence
  Synthetic
uguuacagguuggguucu

SEQ ID NO: 387023 - RNA, 19 nt, Artificial Sequence
  Synthetic
guguuacagguuggguucu

SEQ ID NO: 387024 - RNA, 20 nt, Artificial Sequence
  Synthetic
gguguuacagguuggguucu

SEQ ID NO: 387025 - RNA, 21 nt, Artificial Sequence
  Synthetic
agguguuacagguuggguucu

SEQ ID NO: 387026 - RNA, 22 nt, Artificial Sequence
  Synthetic
uagguguuacagguuggguucu

SEQ ID NO: 387027 - RNA, 23 nt, Artificial Sequence
  Synthetic
guagguguuacagguuggguucu

SEQ ID NO: 387028 - RNA, 24 nt, Artificial Sequence
  Synthetic
aguagguguuacagguuggguucu

SEQ ID NO: 387029 - RNA, 18 nt, Artificial Sequence
  Synthetic
ugucauuacaaugguucu

SEQ ID NO: 387030 - RNA, 19 nt, Artificial Sequence
  Synthetic
uugucauuacaaugguucu

SEQ ID NO: 387031 - RNA, 20 nt, Artificial Sequence
  Synthetic
uuugucauuacaaugguucu

SEQ ID NO: 387032 - RNA, 21 nt, Artificial Sequence
  Synthetic
uuuugucauuacaaugguucu

SEQ ID NO: 387033 - RNA, 22 nt, Artificial Sequence
  Synthetic
uuuuugucauuacaaugguucu

SEQ ID NO: 387034 - RNA, 23 nt, Artificial Sequence
  Synthetic
auuuuugucauuacaaugguucu

SEQ ID NO: 387035 - RNA, 24 nt, Artificial Sequence
  Synthetic
gauuuuugucauuacaaugguucu

SEQ ID NO: 387036 - RNA, 18 nt, Artificial Sequence
  Synthetic
uugguaaguuuugguucu

SEQ ID NO: 387037 - RNA, 19 nt, Artificial Sequence
  Synthetic
uuugguaaguuuugguucu

SEQ ID NO: 387038 - RNA, 20 nt, Artificial Sequence
  Synthetic
uuuugguaaguuuugguucu

SEQ ID NO: 387039 - RNA, 21 nt, Artificial Sequence
  Synthetic
uuuuugguaaguuuugguucu

SEQ ID NO: 387040 - RNA, 22 nt, Artificial Sequence
  Synthetic
auuuuugguaaguuuugguucu

SEQ ID NO: 387041 - RNA, 23 nt, Artificial Sequence
  Synthetic
cauuuuugguaaguuuugguucu

SEQ ID NO: 387042 - RNA, 24 nt, Artificial Sequence
  Synthetic
acauuuuugguaaguuuugguucu

SEQ ID NO: 387043 - RNA, 18 nt, Artificial Sequence
  Synthetic
cuuuugaguaaauguucu

SEQ ID NO: 387044 - RNA, 19 nt, Artificial Sequence
  Synthetic
ccuuuugaguaaauguucu

SEQ ID NO: 387045 - RNA, 20 nt, Artificial Sequence
  Synthetic
cccuuuugaguaaauguucu

SEQ ID NO: 387046 - RNA, 21 nt, Artificial Sequence
  Synthetic
gcccuuuugaguaaauguucu

SEQ ID NO: 387047 - RNA, 22 nt, Artificial Sequence
  Synthetic
agcccuuuugaguaaauguucu

SEQ ID NO: 387048 - RNA, 23 nt, Artificial Sequence
  Synthetic
aagcccuuuugaguaaauguucu

SEQ ID NO: 387049 - RNA, 24 nt, Artificial Sequence
  Synthetic
uaagcccuuuugaguaaauguucu

SEQ ID NO: 387050 - RNA, 18 nt, Artificial Sequence
  Synthetic
uucuugucugaauguucu

SEQ ID NO: 387051 - RNA, 19 nt, Artificial Sequence
  Synthetic
uuucuugucugaauguucu

SEQ ID NO: 387052 - RNA, 20 nt, Artificial Sequence
  Synthetic
cuuucuugucugaauguucu

SEQ ID NO: 387053 - RNA, 21 nt, Artificial Sequence
  Synthetic
acuuucuugucugaauguucu

SEQ ID NO: 387054 - RNA, 22 nt, Artificial Sequence
  Synthetic
gacuuucuugucugaauguucu

SEQ ID NO: 387055 - RNA, 23 nt, Artificial Sequence
  Synthetic
cgacuuucuugucugaauguucu

SEQ ID NO: 387056 - RNA, 24 nt, Artificial Sequence
  Synthetic
acgacuuucuugucugaauguucu

SEQ ID NO: 387057 - RNA, 18 nt, Artificial Sequence
  Synthetic
uuaaagcuagcauguucu

SEQ ID NO: 387058 - RNA, 19 nt, Artificial Sequence
  Synthetic
uuuaaagcuagcauguucu

SEQ ID NO: 387059 - RNA, 20 nt, Artificial Sequence
  Synthetic
auuuaaagcuagcauguucu

SEQ ID NO: 387060 - RNA, 21 nt, Artificial Sequence
  Synthetic
cauuuaaagcuagcauguucu

SEQ ID NO: 387061 - RNA, 22 nt, Artificial Sequence
  Synthetic
acauuuaaagcuagcauguucu

SEQ ID NO: 387062 - RNA, 23 nt, Artificial Sequence
  Synthetic
aacauuuaaagcuagcauguucu

SEQ ID NO: 387063 - RNA, 24 nt, Artificial Sequence
  Synthetic
uaacauuuaaagcuagcauguucu

SEQ ID NO: 387064 - RNA, 18 nt, Artificial Sequence
  Synthetic
cuuccaugaauauguucu

SEQ ID NO: 387065 - RNA, 19 nt, Artificial Sequence
  Synthetic
acuuccaugaauauguucu

SEQ ID NO: 387066 - RNA, 20 nt, Artificial Sequence
  Synthetic
cacuuccaugaauauguucu

SEQ ID NO: 387067 - RNA, 21 nt, Artificial Sequence
  Synthetic
acacuuccaugaauauguucu

SEQ ID NO: 387068 - RNA, 22 nt, Artificial Sequence
  Synthetic
aacacuuccaugaauauguucu

SEQ ID NO: 387069 - RNA, 23 nt, Artificial Sequence
  Synthetic
uaacacuuccaugaauauguucu

SEQ ID NO: 387070 - RNA, 24 nt, Artificial Sequence
  Synthetic
uuaacacuuccaugaauauguucu

SEQ ID NO: 387071 - RNA, 18 nt, Artificial Sequence
  Synthetic
ggauauggggaguguucu

SEQ ID NO: 387072 - RNA, 19 nt, Artificial Sequence
  Synthetic
gggauauggggaguguucu

SEQ ID NO: 387073 - RNA, 20 nt, Artificial Sequence
  Synthetic
cgggauauggggaguguucu

SEQ ID NO: 387074 - RNA, 21 nt, Artificial Sequence
  Synthetic
acgggauauggggaguguucu

SEQ ID NO: 387075 - RNA, 22 nt, Artificial Sequence
  Synthetic
aacgggauauggggaguguucu

SEQ ID NO: 387076 - RNA, 23 nt, Artificial Sequence
  Synthetic
caacgggauauggggaguguucu

SEQ ID NO: 387077 - RNA, 24 nt, Artificial Sequence
  Synthetic
acaacgggauauggggaguguucu

SEQ ID NO: 387078 - RNA, 18 nt, Artificial Sequence
  Synthetic
uuauuuuauugguguucu

SEQ ID NO: 387079 - RNA, 19 nt, Artificial Sequence
  Synthetic
uuuauuuuauugguguucu

SEQ ID NO: 387080 - RNA, 20 nt, Artificial Sequence
  Synthetic
uuuuauuuuauugguguucu

SEQ ID NO: 387081 - RNA, 21 nt, Artificial Sequence
  Synthetic
guuuuauuuuauugguguucu

SEQ ID NO: 387082 - RNA, 22 nt, Artificial Sequence
  Synthetic
aguuuuauuuuauugguguucu

SEQ ID NO: 387083 - RNA, 23 nt, Artificial Sequence
  Synthetic
gaguuuuauuuuauugguguucu

SEQ ID NO: 387084 - RNA, 24 nt, Artificial Sequence
  Synthetic
agaguuuuauuuuauugguguucu

SEQ ID NO: 387085 - RNA, 18 nt, Artificial Sequence
  Synthetic
auugauuguacuuguucu

SEQ ID NO: 387086 - RNA, 19 nt, Artificial Sequence
  Synthetic
aauugauuguacuuguucu

SEQ ID NO: 387087 - RNA, 20 nt, Artificial Sequence
  Synthetic
gaauugauuguacuuguucu

SEQ ID NO: 387088 - RNA, 21 nt, Artificial Sequence
  Synthetic
agaauugauuguacuuguucu

SEQ ID NO: 387089 - RNA, 22 nt, Artificial Sequence
  Synthetic
aagaauugauuguacuuguucu

SEQ ID NO: 387090 - RNA, 23 nt, Artificial Sequence
  Synthetic
uaagaauugauuguacuuguucu

SEQ ID NO: 387091 - RNA, 24 nt, Artificial Sequence
  Synthetic
uuaagaauugauuguacuuguucu

SEQ ID NO: 387092 - RNA, 18 nt, Artificial Sequence
  Synthetic
guucaaccuauuuguucu

SEQ ID NO: 387093 - RNA, 19 nt, Artificial Sequence
  Synthetic
uguucaaccuauuuguucu

SEQ ID NO: 387094 - RNA, 20 nt, Artificial Sequence
  Synthetic
auguucaaccuauuuguucu

SEQ ID NO: 387095 - RNA, 21 nt, Artificial Sequence
  Synthetic
uauguucaaccuauuuguucu

SEQ ID NO: 387096 - RNA, 22 nt, Artificial Sequence
  Synthetic
uuauguucaaccuauuuguucu

SEQ ID NO: 387097 - RNA, 23 nt, Artificial Sequence
  Synthetic
uuuauguucaaccuauuuguucu

SEQ ID NO: 387098 - RNA, 24 nt, Artificial Sequence
  Synthetic
auuuauguucaaccuauuuguucu

SEQ ID NO: 387099 - RNA, 18 nt, Artificial Sequence
  Synthetic
uguaagugcuuuuguucu

SEQ ID NO: 387100 - RNA, 19 nt, Artificial Sequence
  Synthetic
cuguaagugcuuuuguucu

SEQ ID NO: 387101 - RNA, 20 nt, Artificial Sequence
  Synthetic
acuguaagugcuuuuguucu

SEQ ID NO: 387102 - RNA, 21 nt, Artificial Sequence
  Synthetic
gacuguaagugcuuuuguucu

SEQ ID NO: 387103 - RNA, 22 nt, Artificial Sequence
  Synthetic
ugacuguaagugcuuuuguucu

SEQ ID NO: 387104 - RNA, 23 nt, Artificial Sequence
  Synthetic
augacuguaagugcuuuuguucu

SEQ ID NO: 387105 - RNA, 24 nt, Artificial Sequence
  Synthetic
aaugacuguaagugcuuuuguucu

SEQ ID NO: 387106 - RNA, 18 nt, Artificial Sequence
  Synthetic
aacuauccaaaaauuucu

SEQ ID NO: 387107 - RNA, 19 nt, Artificial Sequence
  Synthetic
aaacuauccaaaaauuucu

SEQ ID NO: 387108 - RNA, 20 nt, Artificial Sequence
  Synthetic
aaaacuauccaaaaauuucu

SEQ ID NO: 387109 - RNA, 21 nt, Artificial Sequence
  Synthetic
uaaaacuauccaaaaauuucu

SEQ ID NO: 387110 - RNA, 22 nt, Artificial Sequence
  Synthetic
auaaaacuauccaaaaauuucu

SEQ ID NO: 387111 - RNA, 23 nt, Artificial Sequence
  Synthetic
aauaaaacuauccaaaaauuucu

SEQ ID NO: 387112 - RNA, 24 nt, Artificial Sequence
  Synthetic
aaauaaaacuauccaaaaauuucu

SEQ ID NO: 387113 - RNA, 18 nt, Artificial Sequence
  Synthetic
augggacuuaaaauuucu

SEQ ID NO: 387114 - RNA, 19 nt, Artificial Sequence
  Synthetic
caugggacuuaaaauuucu

SEQ ID NO: 387115 - RNA, 20 nt, Artificial Sequence
  Synthetic
ucaugggacuuaaaauuucu

SEQ ID NO: 387116 - RNA, 21 nt, Artificial Sequence
  Synthetic
cucaugggacuuaaaauuucu

SEQ ID NO: 387117 - RNA, 22 nt, Artificial Sequence
  Synthetic
acucaugggacuuaaaauuucu

SEQ ID NO: 387118 - RNA, 23 nt, Artificial Sequence
  Synthetic
gacucaugggacuuaaaauuucu

SEQ ID NO: 387119 - RNA, 24 nt, Artificial Sequence
  Synthetic
ugacucaugggacuuaaaauuucu

SEQ ID NO: 387120 - RNA, 18 nt, Artificial Sequence
  Synthetic
cugcugagagaaauuucu

SEQ ID NO: 387121 - RNA, 19 nt, Artificial Sequence
  Synthetic
ucugcugagagaaauuucu

SEQ ID NO: 387122 - RNA, 20 nt, Artificial Sequence
  Synthetic
gucugcugagagaaauuucu

SEQ ID NO: 387123 - RNA, 21 nt, Artificial Sequence
  Synthetic
ugucugcugagagaaauuucu

SEQ ID NO: 387124 - RNA, 22 nt, Artificial Sequence
  Synthetic
cugucugcugagagaaauuucu

SEQ ID NO: 387125 - RNA, 23 nt, Artificial Sequence
  Synthetic
ccugucugcugagagaaauuucu

SEQ ID NO: 387126 - RNA, 24 nt, Artificial Sequence
  Synthetic
gccugucugcugagagaaauuucu

SEQ ID NO: 387127 - RNA, 18 nt, Artificial Sequence
  Synthetic
ugccaauccagaauuucu

SEQ ID NO: 387128 - RNA, 19 nt, Artificial Sequence
  Synthetic
uugccaauccagaauuucu

SEQ ID NO: 387129 - RNA, 20 nt, Artificial Sequence
  Synthetic
uuugccaauccagaauuucu

SEQ ID NO: 387130 - RNA, 21 nt, Artificial Sequence
  Synthetic
cuuugccaauccagaauuucu

SEQ ID NO: 387131 - RNA, 22 nt, Artificial Sequence
  Synthetic
acuuugccaauccagaauuucu

SEQ ID NO: 387132 - RNA, 23 nt, Artificial Sequence
  Synthetic
uacuuugccaauccagaauuucu

SEQ ID NO: 387133 - RNA, 24 nt, Artificial Sequence
  Synthetic
uuacuuugccaauccagaauuucu

SEQ ID NO: 387134 - RNA, 18 nt, Artificial Sequence
  Synthetic
ucauaguggggaauuucu

SEQ ID NO: 387135 - RNA, 19 nt, Artificial Sequence
  Synthetic
aucauaguggggaauuucu

SEQ ID NO: 387136 - RNA, 20 nt, Artificial Sequence
  Synthetic
aaucauaguggggaauuucu

SEQ ID NO: 387137 - RNA, 21 nt, Artificial Sequence
  Synthetic
aaaucauaguggggaauuucu

SEQ ID NO: 387138 - RNA, 22 nt, Artificial Sequence
  Synthetic
caaaucauaguggggaauuucu

SEQ ID NO: 387139 - RNA, 23 nt, Artificial Sequence
  Synthetic
gcaaaucauaguggggaauuucu

SEQ ID NO: 387140 - RNA, 24 nt, Artificial Sequence
  Synthetic
agcaaaucauaguggggaauuucu

SEQ ID NO: 387141 - RNA, 18 nt, Artificial Sequence
  Synthetic
cacucuauuugaauuucu

SEQ ID NO: 387142 - RNA, 19 nt, Artificial Sequence
  Synthetic
ucacucuauuugaauuucu

SEQ ID NO: 387143 - RNA, 20 nt, Artificial Sequence
  Synthetic
uucacucuauuugaauuucu

SEQ ID NO: 387144 - RNA, 21 nt, Artificial Sequence
  Synthetic
guucacucuauuugaauuucu

SEQ ID NO: 387145 - RNA, 22 nt, Artificial Sequence
  Synthetic
gguucacucuauuugaauuucu

SEQ ID NO: 387146 - RNA, 23 nt, Artificial Sequence
  Synthetic
ugguucacucuauuugaauuucu

SEQ ID NO: 387147 - RNA, 24 nt, Artificial Sequence
  Synthetic
uugguucacucuauuugaauuucu

SEQ ID NO: 387148 - RNA, 18 nt, Artificial Sequence
  Synthetic
acugggagucccauuucu

SEQ ID NO: 387149 - RNA, 19 nt, Artificial Sequence
  Synthetic
cacugggagucccauuucu

SEQ ID NO: 387150 - RNA, 20 nt, Artificial Sequence
  Synthetic
ucacugggagucccauuucu

SEQ ID NO: 387151 - RNA, 21 nt, Artificial Sequence
  Synthetic
gucacugggagucccauuucu

SEQ ID NO: 387152 - RNA, 22 nt, Artificial Sequence
  Synthetic
ugucacugggagucccauuucu

SEQ ID NO: 387153 - RNA, 23 nt, Artificial Sequence
  Synthetic
gugucacugggagucccauuucu

SEQ ID NO: 387154 - RNA, 24 nt, Artificial Sequence
  Synthetic
ugugucacugggagucccauuucu

SEQ ID NO: 387155 - RNA, 18 nt, Artificial Sequence
  Synthetic
gugauagcauccauuucu

SEQ ID NO: 387156 - RNA, 19 nt, Artificial Sequence
  Synthetic
ggugauagcauccauuucu

SEQ ID NO: 387157 - RNA, 20 nt, Artificial Sequence
  Synthetic
aggugauagcauccauuucu

SEQ ID NO: 387158 - RNA, 21 nt, Artificial Sequence
  Synthetic
uaggugauagcauccauuucu

SEQ ID NO: 387159 - RNA, 22 nt, Artificial Sequence
  Synthetic
cuaggugauagcauccauuucu

SEQ ID NO: 387160 - RNA, 23 nt, Artificial Sequence
  Synthetic
ccuaggugauagcauccauuucu

SEQ ID NO: 387161 - RNA, 24 nt, Artificial Sequence
  Synthetic
uccuaggugauagcauccauuucu

SEQ ID NO: 387162 - RNA, 18 nt, Artificial Sequence
  Synthetic
uauuaccuguccauuucu

SEQ ID NO: 387163 - RNA, 19 nt, Artificial Sequence
  Synthetic
auauuaccuguccauuucu

SEQ ID NO: 387164 - RNA, 20 nt, Artificial Sequence
  Synthetic
gauauuaccuguccauuucu

SEQ ID NO: 387165 - RNA, 21 nt, Artificial Sequence
  Synthetic
agauauuaccuguccauuucu

SEQ ID NO: 387166 - RNA, 22 nt, Artificial Sequence
  Synthetic
aagauauuaccuguccauuucu

SEQ ID NO: 387167 - RNA, 23 nt, Artificial Sequence
  Synthetic
gaagauauuaccuguccauuucu

SEQ ID NO: 387168 - RNA, 24 nt, Artificial Sequence
  Synthetic
agaagauauuaccuguccauuucu

SEQ ID NO: 387169 - RNA, 18 nt, Artificial Sequence
  Synthetic
gcccagggcagcauuucu

SEQ ID NO: 387170 - RNA, 19 nt, Artificial Sequence
  Synthetic
ggcccagggcagcauuucu

SEQ ID NO: 387171 - RNA, 20 nt, Artificial Sequence
  Synthetic
uggcccagggcagcauuucu

SEQ ID NO: 387172 - RNA, 21 nt, Artificial Sequence
  Synthetic
uuggcccagggcagcauuucu

SEQ ID NO: 387173 - RNA, 22 nt, Artificial Sequence
  Synthetic
uuuggcccagggcagcauuucu

SEQ ID NO: 387174 - RNA, 23 nt, Artificial Sequence
  Synthetic
uuuuggcccagggcagcauuucu

SEQ ID NO: 387175 - RNA, 24 nt, Artificial Sequence
  Synthetic
uuuuuggcccagggcagcauuucu

SEQ ID NO: 387176 - RNA, 18 nt, Artificial Sequence
  Synthetic
uuuaucuuacgcauuucu

SEQ ID NO: 387177 - RNA, 19 nt, Artificial Sequence
  Synthetic
cuuuaucuuacgcauuucu

SEQ ID NO: 387178 - RNA, 20 nt, Artificial Sequence
  Synthetic
ccuuuaucuuacgcauuucu

SEQ ID NO: 387179 - RNA, 21 nt, Artificial Sequence
  Synthetic
accuuuaucuuacgcauuucu

SEQ ID NO: 387180 - RNA, 22 nt, Artificial Sequence
  Synthetic
uaccuuuaucuuacgcauuucu

SEQ ID NO: 387181 - RNA, 23 nt, Artificial Sequence
  Synthetic
cuaccuuuaucuuacgcauuucu

SEQ ID NO: 387182 - RNA, 24 nt, Artificial Sequence
  Synthetic
acuaccuuuaucuuacgcauuucu

SEQ ID NO: 387183 - RNA, 18 nt, Artificial Sequence
  Synthetic
gaaguagcaggcauuucu

SEQ ID NO: 387184 - RNA, 19 nt, Artificial Sequence
  Synthetic
agaaguagcaggcauuucu

SEQ ID NO: 387185 - RNA, 20 nt, Artificial Sequence
  Synthetic
uagaaguagcaggcauuucu

SEQ ID NO: 387186 - RNA, 21 nt, Artificial Sequence
  Synthetic
auagaaguagcaggcauuucu

SEQ ID NO: 387187 - RNA, 22 nt, Artificial Sequence
  Synthetic
aauagaaguagcaggcauuucu

SEQ ID NO: 387188 - RNA, 23 nt, Artificial Sequence
  Synthetic
caauagaaguagcaggcauuucu

SEQ ID NO: 387189 - RNA, 24 nt, Artificial Sequence
  Synthetic
ucaauagaaguagcaggcauuucu

SEQ ID NO: 387190 - RNA, 18 nt, Artificial Sequence
  Synthetic
ggaauuucaaucauuucu

SEQ ID NO: 387191 - RNA, 19 nt, Artificial Sequence
  Synthetic
aggaauuucaaucauuucu

SEQ ID NO: 387192 - RNA, 20 nt, Artificial Sequence
  Synthetic
aaggaauuucaaucauuucu

SEQ ID NO: 387193 - RNA, 21 nt, Artificial Sequence
  Synthetic
caaggaauuucaaucauuucu

SEQ ID NO: 387194 - RNA, 22 nt, Artificial Sequence
  Synthetic
ucaaggaauuucaaucauuucu

SEQ ID NO: 387195 - RNA, 23 nt, Artificial Sequence
  Synthetic
gucaaggaauuucaaucauuucu

SEQ ID NO: 387196 - RNA, 24 nt, Artificial Sequence
  Synthetic
agucaaggaauuucaaucauuucu

SEQ ID NO: 387197 - RNA, 18 nt, Artificial Sequence
  Synthetic
cucuaguucaucauuucu

SEQ ID NO: 387198 - RNA, 19 nt, Artificial Sequence
  Synthetic
acucuaguucaucauuucu

SEQ ID NO: 387199 - RNA, 20 nt, Artificial Sequence
  Synthetic
aacucuaguucaucauuucu

SEQ ID NO: 387200 - RNA, 21 nt, Artificial Sequence
  Synthetic
aaacucuaguucaucauuucu

SEQ ID NO: 387201 - RNA, 22 nt, Artificial Sequence
  Synthetic
gaaacucuaguucaucauuucu

SEQ ID NO: 387202 - RNA, 23 nt, Artificial Sequence
  Synthetic
agaaacucuaguucaucauuucu

SEQ ID NO: 387203 - RNA, 24 nt, Artificial Sequence
  Synthetic
gagaaacucuaguucaucauuucu

SEQ ID NO: 387204 - RNA, 18 nt, Artificial Sequence
  Synthetic
auagcaguuaucauuucu

SEQ ID NO: 387205 - RNA, 19 nt, Artificial Sequence
  Synthetic
uauagcaguuaucauuucu

SEQ ID NO: 387206 - RNA, 20 nt, Artificial Sequence
  Synthetic
uuauagcaguuaucauuucu

SEQ ID NO: 387207 - RNA, 21 nt, Artificial Sequence
  Synthetic
cuuauagcaguuaucauuucu

SEQ ID NO: 387208 - RNA, 22 nt, Artificial Sequence
  Synthetic
gcuuauagcaguuaucauuucu

SEQ ID NO: 387209 - RNA, 23 nt, Artificial Sequence
  Synthetic
ggcuuauagcaguuaucauuucu

SEQ ID NO: 387210 - RNA, 24 nt, Artificial Sequence
  Synthetic
gggcuuauagcaguuaucauuucu

SEQ ID NO: 387211 - RNA, 18 nt, Artificial Sequence
  Synthetic
cuuaaaauacagauuucu

SEQ ID NO: 387212 - RNA, 19 nt, Artificial Sequence
  Synthetic
ucuuaaaauacagauuucu

SEQ ID NO: 387213 - RNA, 20 nt, Artificial Sequence
  Synthetic
uucuuaaaauacagauuucu

SEQ ID NO: 387214 - RNA, 21 nt, Artificial Sequence
  Synthetic
cuucuuaaaauacagauuucu

SEQ ID NO: 387215 - RNA, 22 nt, Artificial Sequence
  Synthetic
ucuucuuaaaauacagauuucu

SEQ ID NO: 387216 - RNA, 23 nt, Artificial Sequence
  Synthetic
uucuucuuaaaauacagauuucu

SEQ ID NO: 387217 - RNA, 24 nt, Artificial Sequence
  Synthetic
uuucuucuuaaaauacagauuucu

SEQ ID NO: 387218 - RNA, 18 nt, Artificial Sequence
  Synthetic
cauccuuuguagauuucu

SEQ ID NO: 387219 - RNA, 19 nt, Artificial Sequence
  Synthetic
ucauccuuuguagauuucu

SEQ ID NO: 387220 - RNA, 20 nt, Artificial Sequence
  Synthetic
uucauccuuuguagauuucu

SEQ ID NO: 387221 - RNA, 21 nt, Artificial Sequence
  Synthetic
cuucauccuuuguagauuucu

SEQ ID NO: 387222 - RNA, 22 nt, Artificial Sequence
  Synthetic
ucuucauccuuuguagauuucu

SEQ ID NO: 387223 - RNA, 23 nt, Artificial Sequence
  Synthetic
cucuucauccuuuguagauuucu

SEQ ID NO: 387224 - RNA, 24 nt, Artificial Sequence
  Synthetic
ccucuucauccuuuguagauuucu

SEQ ID NO: 387225 - RNA, 18 nt, Artificial Sequence
  Synthetic
gcaauccgauggauuucu

SEQ ID NO: 387226 - RNA, 19 nt, Artificial Sequence
  Synthetic
agcaauccgauggauuucu

SEQ ID NO: 387227 - RNA, 20 nt, Artificial Sequence
  Synthetic
uagcaauccgauggauuucu

SEQ ID NO: 387228 - RNA, 21 nt, Artificial Sequence
  Synthetic
guagcaauccgauggauuucu

SEQ ID NO: 387229 - RNA, 22 nt, Artificial Sequence
  Synthetic
aguagcaauccgauggauuucu

SEQ ID NO: 387230 - RNA, 23 nt, Artificial Sequence
  Synthetic
caguagcaauccgauggauuucu

SEQ ID NO: 387231 - RNA, 24 nt, Artificial Sequence
  Synthetic
gcaguagcaauccgauggauuucu

SEQ ID NO: 387232 - RNA, 18 nt, Artificial Sequence
  Synthetic
uuguauuucaugauuucu

SEQ ID NO: 387233 - RNA, 19 nt, Artificial Sequence
  Synthetic
uuuguauuucaugauuucu

SEQ ID NO: 387234 - RNA, 20 nt, Artificial Sequence
  Synthetic
guuuguauuucaugauuucu

SEQ ID NO: 387235 - RNA, 21 nt, Artificial Sequence
  Synthetic
uguuuguauuucaugauuucu

SEQ ID NO: 387236 - RNA, 22 nt, Artificial Sequence
  Synthetic
auguuuguauuucaugauuucu

SEQ ID NO: 387237 - RNA, 23 nt, Artificial Sequence
  Synthetic
cauguuuguauuucaugauuucu

SEQ ID NO: 387238 - RNA, 24 nt, Artificial Sequence
  Synthetic
acauguuuguauuucaugauuucu

SEQ ID NO: 387239 - RNA, 18 nt, Artificial Sequence
  Synthetic
guuacauaaaauauuucu

SEQ ID NO: 387240 - RNA, 19 nt, Artificial Sequence
  Synthetic
uguuacauaaaauauuucu

SEQ ID NO: 387241 - RNA, 20 nt, Artificial Sequence
  Synthetic
uuguuacauaaaauauuucu

SEQ ID NO: 387242 - RNA, 21 nt, Artificial Sequence
  Synthetic
uuuguuacauaaaauauuucu

SEQ ID NO: 387243 - RNA, 22 nt, Artificial Sequence
  Synthetic
auuuguuacauaaaauauuucu

SEQ ID NO: 387244 - RNA, 23 nt, Artificial Sequence
  Synthetic
cauuuguuacauaaaauauuucu

SEQ ID NO: 387245 - RNA, 24 nt, Artificial Sequence
  Synthetic
gcauuuguuacauaaaauauuucu

SEQ ID NO: 387246 - RNA, 18 nt, Artificial Sequence
  Synthetic
acauagucccauauuucu

SEQ ID NO: 387247 - RNA, 19 nt, Artificial Sequence
  Synthetic
cacauagucccauauuucu

SEQ ID NO: 387248 - RNA, 20 nt, Artificial Sequence
  Synthetic
ucacauagucccauauuucu

SEQ ID NO: 387249 - RNA, 21 nt, Artificial Sequence
  Synthetic
uucacauagucccauauuucu

SEQ ID NO: 387250 - RNA, 22 nt, Artificial Sequence
  Synthetic
uuucacauagucccauauuucu

SEQ ID NO: 387251 - RNA, 23 nt, Artificial Sequence
  Synthetic
uuuucacauagucccauauuucu

SEQ ID NO: 387252 - RNA, 24 nt, Artificial Sequence
  Synthetic
cuuuucacauagucccauauuucu

SEQ ID NO: 387253 - RNA, 18 nt, Artificial Sequence
  Synthetic
ccuuuuuguacuauuucu

SEQ ID NO: 387254 - RNA, 19 nt, Artificial Sequence
  Synthetic
uccuuuuuguacuauuucu

SEQ ID NO: 387255 - RNA, 20 nt, Artificial Sequence
  Synthetic
uuccuuuuuguacuauuucu

SEQ ID NO: 387256 - RNA, 21 nt, Artificial Sequence
  Synthetic
uuuccuuuuuguacuauuucu

SEQ ID NO: 387257 - RNA, 22 nt, Artificial Sequence
  Synthetic
uuuuccuuuuuguacuauuucu

SEQ ID NO: 387258 - RNA, 23 nt, Artificial Sequence
  Synthetic
uuuuuccuuuuuguacuauuucu

SEQ ID NO: 387259 - RNA, 24 nt, Artificial Sequence
  Synthetic
uuuuuuccuuuuuguacuauuucu

SEQ ID NO: 387260 - RNA, 18 nt, Artificial Sequence
  Synthetic
gacaugauacguauuucu

SEQ ID NO: 387261 - RNA, 19 nt, Artificial Sequence
  Synthetic
agacaugauacguauuucu

SEQ ID NO: 387262 - RNA, 20 nt, Artificial Sequence
  Synthetic
aagacaugauacguauuucu

SEQ ID NO: 387263 - RNA, 21 nt, Artificial Sequence
  Synthetic
uaagacaugauacguauuucu

SEQ ID NO: 387264 - RNA, 22 nt, Artificial Sequence
  Synthetic
cuaagacaugauacguauuucu

SEQ ID NO: 387265 - RNA, 23 nt, Artificial Sequence
  Synthetic
gcuaagacaugauacguauuucu

SEQ ID NO: 387266 - RNA, 24 nt, Artificial Sequence
  Synthetic
agcuaagacaugauacguauuucu

SEQ ID NO: 387267 - RNA, 18 nt, Artificial Sequence
  Synthetic
ugagccugguguauuucu

SEQ ID NO: 387268 - RNA, 19 nt, Artificial Sequence
  Synthetic
gugagccugguguauuucu

SEQ ID NO: 387269 - RNA, 20 nt, Artificial Sequence
  Synthetic
agugagccugguguauuucu

SEQ ID NO: 387270 - RNA, 21 nt, Artificial Sequence
  Synthetic
aagugagccugguguauuucu

SEQ ID NO: 387271 - RNA, 22 nt, Artificial Sequence
  Synthetic
gaagugagccugguguauuucu

SEQ ID NO: 387272 - RNA, 23 nt, Artificial Sequence
  Synthetic
ggaagugagccugguguauuucu

SEQ ID NO: 387273 - RNA, 24 nt, Artificial Sequence
  Synthetic
aggaagugagccugguguauuucu

SEQ ID NO: 387274 - RNA, 18 nt, Artificial Sequence
  Synthetic
augguaguuuguauuucu

SEQ ID NO: 387275 - RNA, 19 nt, Artificial Sequence
  Synthetic
gaugguaguuuguauuucu

SEQ ID NO: 387276 - RNA, 20 nt, Artificial Sequence
  Synthetic
ugaugguaguuuguauuucu

SEQ ID NO: 387277 - RNA, 18 nt, Artificial Sequence
  Synthetic
auaugcggcauuauuucu

SEQ ID NO: 387278 - RNA, 19 nt, Artificial Sequence
  Synthetic
gauaugcggcauuauuucu

SEQ ID NO: 387279 - RNA, 20 nt, Artificial Sequence
  Synthetic
agauaugcggcauuauuucu

SEQ ID NO: 387280 - RNA, 18 nt, Artificial Sequence
  Synthetic
augugugguauuauuucu

SEQ ID NO: 387281 - RNA, 19 nt, Artificial Sequence
  Synthetic
gaugugugguauuauuucu

SEQ ID NO: 387282 - RNA, 20 nt, Artificial Sequence
  Synthetic
agaugugugguauuauuucu

SEQ ID NO: 387283 - RNA, 21 nt, Artificial Sequence
  Synthetic
uagaugugugguauuauuucu

SEQ ID NO: 387284 - RNA, 22 nt, Artificial Sequence
  Synthetic
guagaugugugguauuauuucu

SEQ ID NO: 387285 - RNA, 23 nt, Artificial Sequence
  Synthetic
uguagaugugugguauuauuucu

SEQ ID NO: 387286 - RNA, 24 nt, Artificial Sequence
  Synthetic
uuguagaugugugguauuauuucu

SEQ ID NO: 387287 - RNA, 18 nt, Artificial Sequence
  Synthetic
uuauauuuauuuauuucu

SEQ ID NO: 387288 - RNA, 19 nt, Artificial Sequence
  Synthetic
cuuauauuuauuuauuucu

SEQ ID NO: 387289 - RNA, 20 nt, Artificial Sequence
  Synthetic
ucuuauauuuauuuauuucu

SEQ ID NO: 387290 - RNA, 21 nt, Artificial Sequence
  Synthetic
gucuuauauuuauuuauuucu

SEQ ID NO: 387291 - RNA, 22 nt, Artificial Sequence
  Synthetic
agucuuauauuuauuuauuucu

SEQ ID NO: 387292 - RNA, 23 nt, Artificial Sequence
  Synthetic
gagucuuauauuuauuuauuucu

SEQ ID NO: 387293 - RNA, 24 nt, Artificial Sequence
  Synthetic
agagucuuauauuuauuuauuucu

SEQ ID NO: 387294 - RNA, 18 nt, Artificial Sequence
  Synthetic
guggucaacuuuauuucu

SEQ ID NO: 387295 - RNA, 19 nt, Artificial Sequence
  Synthetic
uguggucaacuuuauuucu

SEQ ID NO: 387296 - RNA, 20 nt, Artificial Sequence
  Synthetic
cuguggucaacuuuauuucu

SEQ ID NO: 387297 - RNA, 21 nt, Artificial Sequence
  Synthetic
gcuguggucaacuuuauuucu

SEQ ID NO: 387298 - RNA, 22 nt, Artificial Sequence
  Synthetic
ugcuguggucaacuuuauuucu

SEQ ID NO: 387299 - RNA, 23 nt, Artificial Sequence
  Synthetic
uugcuguggucaacuuuauuucu

SEQ ID NO: 387300 - RNA, 24 nt, Artificial Sequence
  Synthetic
uuugcuguggucaacuuuauuucu

SEQ ID NO: 387301 - RNA, 18 nt, Artificial Sequence
  Synthetic
ugucaaacguuuauuucu

SEQ ID NO: 387302 - RNA, 19 nt, Artificial Sequence
  Synthetic
augucaaacguuuauuucu

SEQ ID NO: 387303 - RNA, 20 nt, Artificial Sequence
  Synthetic
aaugucaaacguuuauuucu

SEQ ID NO: 387304 - RNA, 21 nt, Artificial Sequence
  Synthetic
caaugucaaacguuuauuucu

SEQ ID NO: 387305 - RNA, 22 nt, Artificial Sequence
  Synthetic
ccaaugucaaacguuuauuucu

SEQ ID NO: 387306 - RNA, 23 nt, Artificial Sequence
  Synthetic
uccaaugucaaacguuuauuucu

SEQ ID NO: 387307 - RNA, 24 nt, Artificial Sequence
  Synthetic
guccaaugucaaacguuuauuucu

SEQ ID NO: 387308 - RNA, 18 nt, Artificial Sequence
  Synthetic
cugugacuccaacuuucu

SEQ ID NO: 387309 - RNA, 19 nt, Artificial Sequence
  Synthetic
ccugugacuccaacuuucu

SEQ ID NO: 387310 - RNA, 20 nt, Artificial Sequence
  Synthetic
accugugacuccaacuuucu

SEQ ID NO: 387311 - RNA, 21 nt, Artificial Sequence
  Synthetic
caccugugacuccaacuuucu

SEQ ID NO: 387312 - RNA, 22 nt, Artificial Sequence
  Synthetic
ucaccugugacuccaacuuucu

SEQ ID NO: 387313 - RNA, 23 nt, Artificial Sequence
  Synthetic
gucaccugugacuccaacuuucu

SEQ ID NO: 387314 - RNA, 24 nt, Artificial Sequence
  Synthetic
ugucaccugugacuccaacuuucu

SEQ ID NO: 387315 - RNA, 18 nt, Artificial Sequence
  Synthetic
acuuagagauaacuuucu

SEQ ID NO: 387316 - RNA, 19 nt, Artificial Sequence
  Synthetic
gacuuagagauaacuuucu

SEQ ID NO: 387317 - RNA, 20 nt, Artificial Sequence
  Synthetic
cgacuuagagauaacuuucu

SEQ ID NO: 387318 - RNA, 21 nt, Artificial Sequence
  Synthetic
ccgacuuagagauaacuuucu

SEQ ID NO: 387319 - RNA, 22 nt, Artificial Sequence
  Synthetic
cccgacuuagagauaacuuucu

SEQ ID NO: 387320 - RNA, 23 nt, Artificial Sequence
  Synthetic
gcccgacuuagagauaacuuucu

SEQ ID NO: 387321 - RNA, 24 nt, Artificial Sequence
  Synthetic
ggcccgacuuagagauaacuuucu

SEQ ID NO: 387322 - RNA, 18 nt, Artificial Sequence
  Synthetic
auuuauaauucacuuucu

SEQ ID NO: 387323 - RNA, 19 nt, Artificial Sequence
  Synthetic
gauuuauaauucacuuucu

SEQ ID NO: 387324 - RNA, 20 nt, Artificial Sequence
  Synthetic
ggauuuauaauucacuuucu

SEQ ID NO: 387325 - RNA, 21 nt, Artificial Sequence
  Synthetic
uggauuuauaauucacuuucu

SEQ ID NO: 387326 - RNA, 22 nt, Artificial Sequence
  Synthetic
auggauuuauaauucacuuucu

SEQ ID NO: 387327 - RNA, 23 nt, Artificial Sequence
  Synthetic
gauggauuuauaauucacuuucu

SEQ ID NO: 387328 - RNA, 24 nt, Artificial Sequence
  Synthetic
ugauggauuuauaauucacuuucu

SEQ ID NO: 387329 - RNA, 18 nt, Artificial Sequence
  Synthetic
augggauuaugacuuucu

SEQ ID NO: 387330 - RNA, 19 nt, Artificial Sequence
  Synthetic
aaugggauuaugacuuucu

SEQ ID NO: 387331 - RNA, 20 nt, Artificial Sequence
  Synthetic
uaaugggauuaugacuuucu

SEQ ID NO: 387332 - RNA, 21 nt, Artificial Sequence
  Synthetic
cuaaugggauuaugacuuucu

SEQ ID NO: 387333 - RNA, 22 nt, Artificial Sequence
  Synthetic
gcuaaugggauuaugacuuucu

SEQ ID NO: 387334 - RNA, 23 nt, Artificial Sequence
  Synthetic
ugcuaaugggauuaugacuuucu

SEQ ID NO: 387335 - RNA, 24 nt, Artificial Sequence
  Synthetic
augcuaaugggauuaugacuuucu

SEQ ID NO: 387336 - RNA, 18 nt, Artificial Sequence
  Synthetic
aauaaacacauacuuucu

SEQ ID NO: 387337 - RNA, 19 nt, Artificial Sequence
  Synthetic
aaauaaacacauacuuucu

SEQ ID NO: 387338 - RNA, 20 nt, Artificial Sequence
  Synthetic
aaaauaaacacauacuuucu

SEQ ID NO: 387339 - RNA, 21 nt, Artificial Sequence
  Synthetic
gaaaauaaacacauacuuucu

SEQ ID NO: 387340 - RNA, 22 nt, Artificial Sequence
  Synthetic
agaaaauaaacacauacuuucu

SEQ ID NO: 387341 - RNA, 23 nt, Artificial Sequence
  Synthetic
cagaaaauaaacacauacuuucu

SEQ ID NO: 387342 - RNA, 24 nt, Artificial Sequence
  Synthetic
ucagaaaauaaacacauacuuucu

SEQ ID NO: 387343 - RNA, 18 nt, Artificial Sequence
  Synthetic
auuuacuaguuacuuucu

SEQ ID NO: 387344 - RNA, 19 nt, Artificial Sequence
  Synthetic
uauuuacuaguuacuuucu

SEQ ID NO: 387345 - RNA, 20 nt, Artificial Sequence
  Synthetic
uuauuuacuaguuacuuucu

SEQ ID NO: 387346 - RNA, 21 nt, Artificial Sequence
  Synthetic
guuauuuacuaguuacuuucu

SEQ ID NO: 387347 - RNA, 22 nt, Artificial Sequence
  Synthetic
aguuauuuacuaguuacuuucu

SEQ ID NO: 387348 - RNA, 23 nt, Artificial Sequence
  Synthetic
aaguuauuuacuaguuacuuucu

SEQ ID NO: 387349 - RNA, 24 nt, Artificial Sequence
  Synthetic
aaaguuauuuacuaguuacuuucu

SEQ ID NO: 387350 - RNA, 18 nt, Artificial Sequence
  Synthetic
cuugucauccuccuuucu

SEQ ID NO: 387351 - RNA, 19 nt, Artificial Sequence
  Synthetic
gcuugucauccuccuuucu

SEQ ID NO: 387352 - RNA, 20 nt, Artificial Sequence
  Synthetic
agcuugucauccuccuuucu

SEQ ID NO: 387353 - RNA, 21 nt, Artificial Sequence
  Synthetic
uagcuugucauccuccuuucu

SEQ ID NO: 387354 - RNA, 22 nt, Artificial Sequence
  Synthetic
guagcuugucauccuccuuucu

SEQ ID NO: 387355 - RNA, 23 nt, Artificial Sequence
  Synthetic
uguagcuugucauccuccuuucu

SEQ ID NO: 387356 - RNA, 24 nt, Artificial Sequence
  Synthetic
uuguagcuugucauccuccuuucu

SEQ ID NO: 387357 - RNA, 18 nt, Artificial Sequence
  Synthetic
ucuaugugccagcuuucu

SEQ ID NO: 387358 - RNA, 19 nt, Artificial Sequence
  Synthetic
uucuaugugccagcuuucu

SEQ ID NO: 387359 - RNA, 20 nt, Artificial Sequence
  Synthetic
cuucuaugugccagcuuucu

SEQ ID NO: 387360 - RNA, 21 nt, Artificial Sequence
  Synthetic
ccuucuaugugccagcuuucu

SEQ ID NO: 387361 - RNA, 22 nt, Artificial Sequence
  Synthetic
cccuucuaugugccagcuuucu

SEQ ID NO: 387362 - RNA, 23 nt, Artificial Sequence
  Synthetic
ccccuucuaugugccagcuuucu

SEQ ID NO: 387363 - RNA, 24 nt, Artificial Sequence
  Synthetic
cccccuucuaugugccagcuuucu

SEQ ID NO: 387364 - RNA, 18 nt, Artificial Sequence
  Synthetic
accacaucucagcuuucu

SEQ ID NO: 387365 - RNA, 19 nt, Artificial Sequence
  Synthetic
caccacaucucagcuuucu

SEQ ID NO: 387366 - RNA, 20 nt, Artificial Sequence
  Synthetic
acaccacaucucagcuuucu

SEQ ID NO: 387367 - RNA, 21 nt, Artificial Sequence
  Synthetic
uacaccacaucucagcuuucu

SEQ ID NO: 387368 - RNA, 22 nt, Artificial Sequence
  Synthetic
auacaccacaucucagcuuucu

SEQ ID NO: 387369 - RNA, 23 nt, Artificial Sequence
  Synthetic
uauacaccacaucucagcuuucu

SEQ ID NO: 387370 - RNA, 24 nt, Artificial Sequence
  Synthetic
uuauacaccacaucucagcuuucu

SEQ ID NO: 387371 - RNA, 18 nt, Artificial Sequence
  Synthetic
uguuagcauuugcuuucu

SEQ ID NO: 387372 - RNA, 19 nt, Artificial Sequence
  Synthetic
cuguuagcauuugcuuucu

SEQ ID NO: 387373 - RNA, 20 nt, Artificial Sequence
  Synthetic
acuguuagcauuugcuuucu

SEQ ID NO: 387374 - RNA, 21 nt, Artificial Sequence
  Synthetic
uacuguuagcauuugcuuucu

SEQ ID NO: 387375 - RNA, 22 nt, Artificial Sequence
  Synthetic
uuacuguuagcauuugcuuucu

SEQ ID NO: 387376 - RNA, 23 nt, Artificial Sequence
  Synthetic
auuacuguuagcauuugcuuucu

SEQ ID NO: 387377 - RNA, 24 nt, Artificial Sequence
  Synthetic
uauuacuguuagcauuugcuuucu

SEQ ID NO: 387378 - RNA, 18 nt, Artificial Sequence
  Synthetic
uauacugauuugcuuucu

SEQ ID NO: 387379 - RNA, 19 nt, Artificial Sequence
  Synthetic
auauacugauuugcuuucu

SEQ ID NO: 387380 - RNA, 20 nt, Artificial Sequence
  Synthetic
gauauacugauuugcuuucu

SEQ ID NO: 387381 - RNA, 21 nt, Artificial Sequence
  Synthetic
ugauauacugauuugcuuucu

SEQ ID NO: 387382 - RNA, 22 nt, Artificial Sequence
  Synthetic
uugauauacugauuugcuuucu

SEQ ID NO: 387383 - RNA, 23 nt, Artificial Sequence
  Synthetic
uuugauauacugauuugcuuucu

SEQ ID NO: 387384 - RNA, 24 nt, Artificial Sequence
  Synthetic
cuuugauauacugauuugcuuucu

SEQ ID NO: 387385 - RNA, 18 nt, Artificial Sequence
  Synthetic
ccauugucacaucuuucu

SEQ ID NO: 387386 - RNA, 19 nt, Artificial Sequence
  Synthetic
accauugucacaucuuucu

SEQ ID NO: 387387 - RNA, 20 nt, Artificial Sequence
  Synthetic
aaccauugucacaucuuucu

SEQ ID NO: 387388 - RNA, 21 nt, Artificial Sequence
  Synthetic
uaaccauugucacaucuuucu

SEQ ID NO: 387389 - RNA, 22 nt, Artificial Sequence
  Synthetic
uuaaccauugucacaucuuucu

SEQ ID NO: 387390 - RNA, 23 nt, Artificial Sequence
  Synthetic
guuaaccauugucacaucuuucu

SEQ ID NO: 387391 - RNA, 24 nt, Artificial Sequence
  Synthetic
gguuaaccauugucacaucuuucu

SEQ ID NO: 387392 - RNA, 18 nt, Artificial Sequence
  Synthetic
caaaauugaacucuuucu

SEQ ID NO: 387393 - RNA, 19 nt, Artificial Sequence
  Synthetic
acaaaauugaacucuuucu

SEQ ID NO: 387394 - RNA, 20 nt, Artificial Sequence
  Synthetic
cacaaaauugaacucuuucu

SEQ ID NO: 387395 - RNA, 21 nt, Artificial Sequence
  Synthetic
acacaaaauugaacucuuucu

SEQ ID NO: 387396 - RNA, 22 nt, Artificial Sequence
  Synthetic
cacacaaaauugaacucuuucu

SEQ ID NO: 387397 - RNA, 23 nt, Artificial Sequence
  Synthetic
acacacaaaauugaacucuuucu

SEQ ID NO: 387398 - RNA, 24 nt, Artificial Sequence
  Synthetic
cacacacaaaauugaacucuuucu

SEQ ID NO: 387399 - RNA, 18 nt, Artificial Sequence
  Synthetic
uagaacaagagucuuucu

SEQ ID NO: 387400 - RNA, 19 nt, Artificial Sequence
  Synthetic
cuagaacaagagucuuucu

SEQ ID NO: 387401 - RNA, 20 nt, Artificial Sequence
  Synthetic
ucuagaacaagagucuuucu

SEQ ID NO: 387402 - RNA, 21 nt, Artificial Sequence
  Synthetic
aucuagaacaagagucuuucu

SEQ ID NO: 387403 - RNA, 22 nt, Artificial Sequence
  Synthetic
caucuagaacaagagucuuucu

SEQ ID NO: 387404 - RNA, 23 nt, Artificial Sequence
  Synthetic
ucaucuagaacaagagucuuucu

SEQ ID NO: 387405 - RNA, 24 nt, Artificial Sequence
  Synthetic
aucaucuagaacaagagucuuucu

SEQ ID NO: 387406 - RNA, 18 nt, Artificial Sequence
  Synthetic
aaggaaacuugucuuucu

SEQ ID NO: 387407 - RNA, 19 nt, Artificial Sequence
  Synthetic
gaaggaaacuugucuuucu

SEQ ID NO: 387408 - RNA, 20 nt, Artificial Sequence
  Synthetic
agaaggaaacuugucuuucu

SEQ ID NO: 387409 - RNA, 21 nt, Artificial Sequence
  Synthetic
uagaaggaaacuugucuuucu

SEQ ID NO: 387410 - RNA, 22 nt, Artificial Sequence
  Synthetic
cuagaaggaaacuugucuuucu

SEQ ID NO: 387411 - RNA, 23 nt, Artificial Sequence
  Synthetic
ccuagaaggaaacuugucuuucu

SEQ ID NO: 387412 - RNA, 24 nt, Artificial Sequence
  Synthetic
uccuagaaggaaacuugucuuucu

SEQ ID NO: 387413 - RNA, 18 nt, Artificial Sequence
  Synthetic
auuaauugacuucuuucu

SEQ ID NO: 387414 - RNA, 19 nt, Artificial Sequence
  Synthetic
cauuaauugacuucuuucu

SEQ ID NO: 387415 - RNA, 20 nt, Artificial Sequence
  Synthetic
ccauuaauugacuucuuucu

SEQ ID NO: 387416 - RNA, 21 nt, Artificial Sequence
  Synthetic
accauuaauugacuucuuucu

SEQ ID NO: 387417 - RNA, 22 nt, Artificial Sequence
  Synthetic
uaccauuaauugacuucuuucu

SEQ ID NO: 387418 - RNA, 23 nt, Artificial Sequence
  Synthetic
cuaccauuaauugacuucuuucu

SEQ ID NO: 387419 - RNA, 24 nt, Artificial Sequence
  Synthetic
ccuaccauuaauugacuucuuucu

SEQ ID NO: 387420 - RNA, 18 nt, Artificial Sequence
  Synthetic
uaaaaacaccuucuuucu

SEQ ID NO: 387421 - RNA, 19 nt, Artificial Sequence
  Synthetic
uuaaaaacaccuucuuucu

SEQ ID NO: 387422 - RNA, 20 nt, Artificial Sequence
  Synthetic
uuuaaaaacaccuucuuucu

SEQ ID NO: 387423 - RNA, 21 nt, Artificial Sequence
  Synthetic
uuuuaaaaacaccuucuuucu

SEQ ID NO: 387424 - RNA, 22 nt, Artificial Sequence
  Synthetic
auuuuaaaaacaccuucuuucu

SEQ ID NO: 387425 - RNA, 23 nt, Artificial Sequence
  Synthetic
uauuuuaaaaacaccuucuuucu

SEQ ID NO: 387426 - RNA, 24 nt, Artificial Sequence
  Synthetic
uuauuuuaaaaacaccuucuuucu

SEQ ID NO: 387427 - RNA, 18 nt, Artificial Sequence
  Synthetic
aauuuuccauuucuuucu

SEQ ID NO: 387428 - RNA, 19 nt, Artificial Sequence
  Synthetic
uaauuuuccauuucuuucu

SEQ ID NO: 387429 - RNA, 20 nt, Artificial Sequence
  Synthetic
uuaauuuuccauuucuuucu

SEQ ID NO: 387430 - RNA, 21 nt, Artificial Sequence
  Synthetic
uuuaauuuuccauuucuuucu

SEQ ID NO: 387431 - RNA, 22 nt, Artificial Sequence
  Synthetic
auuuaauuuuccauuucuuucu

SEQ ID NO: 387432 - RNA, 23 nt, Artificial Sequence
  Synthetic
aauuuaauuuuccauuucuuucu

SEQ ID NO: 387433 - RNA, 24 nt, Artificial Sequence
  Synthetic
caauuuaauuuuccauuucuuucu

SEQ ID NO: 387434 - RNA, 18 nt, Artificial Sequence
  Synthetic
uggaauuuuuuucuuucu

SEQ ID NO: 387435 - RNA, 19 nt, Artificial Sequence
  Synthetic
uuggaauuuuuuucuuucu

SEQ ID NO: 387436 - RNA, 20 nt, Artificial Sequence
  Synthetic
auuggaauuuuuuucuuucu

SEQ ID NO: 387437 - RNA, 21 nt, Artificial Sequence
  Synthetic
aauuggaauuuuuuucuuucu

SEQ ID NO: 387438 - RNA, 22 nt, Artificial Sequence
  Synthetic
aaauuggaauuuuuuucuuucu

SEQ ID NO: 387439 - RNA, 23 nt, Artificial Sequence
  Synthetic
aaaauuggaauuuuuuucuuucu

SEQ ID NO: 387440 - RNA, 24 nt, Artificial Sequence
  Synthetic
uaaaauuggaauuuuuuucuuucu

SEQ ID NO: 387441 - RNA, 18 nt, Artificial Sequence
  Synthetic
uuaacccucaaaguuucu

SEQ ID NO: 387442 - RNA, 19 nt, Artificial Sequence
  Synthetic
guuaacccucaaaguuucu

SEQ ID NO: 387443 - RNA, 20 nt, Artificial Sequence
  Synthetic
aguuaacccucaaaguuucu

SEQ ID NO: 387444 - RNA, 21 nt, Artificial Sequence
  Synthetic
uaguuaacccucaaaguuucu

SEQ ID NO: 387445 - RNA, 22 nt, Artificial Sequence
  Synthetic
cuaguuaacccucaaaguuucu

SEQ ID NO: 387446 - RNA, 23 nt, Artificial Sequence
  Synthetic
ccuaguuaacccucaaaguuucu

SEQ ID NO: 387447 - RNA, 24 nt, Artificial Sequence
  Synthetic
uccuaguuaacccucaaaguuucu

SEQ ID NO: 387448 - RNA, 18 nt, Artificial Sequence
  Synthetic
auggugugggaaguuucu

SEQ ID NO: 387449 - RNA, 19 nt, Artificial Sequence
  Synthetic
cauggugugggaaguuucu

SEQ ID NO: 387450 - RNA, 20 nt, Artificial Sequence
  Synthetic
ccauggugugggaaguuucu

SEQ ID NO: 387451 - RNA, 21 nt, Artificial Sequence
  Synthetic
uccauggugugggaaguuucu

SEQ ID NO: 387452 - RNA, 22 nt, Artificial Sequence
  Synthetic
cuccauggugugggaaguuucu

SEQ ID NO: 387453 - RNA, 23 nt, Artificial Sequence
  Synthetic
ucuccauggugugggaaguuucu

SEQ ID NO: 387454 - RNA, 24 nt, Artificial Sequence
  Synthetic
aucuccauggugugggaaguuucu

SEQ ID NO: 387455 - RNA, 18 nt, Artificial Sequence
  Synthetic
ggugcuuagugaguuucu

SEQ ID NO: 387456 - RNA, 19 nt, Artificial Sequence
  Synthetic
uggugcuuagugaguuucu

SEQ ID NO: 387457 - RNA, 20 nt, Artificial Sequence
  Synthetic
guggugcuuagugaguuucu

SEQ ID NO: 387458 - RNA, 21 nt, Artificial Sequence
  Synthetic
aguggugcuuagugaguuucu

SEQ ID NO: 387459 - RNA, 22 nt, Artificial Sequence
  Synthetic
aaguggugcuuagugaguuucu

SEQ ID NO: 387460 - RNA, 23 nt, Artificial Sequence
  Synthetic
aaaguggugcuuagugaguuucu

SEQ ID NO: 387461 - RNA, 24 nt, Artificial Sequence
  Synthetic
aaaaguggugcuuagugaguuucu

SEQ ID NO: 387462 - RNA, 18 nt, Artificial Sequence
  Synthetic
ugaguucaaauaguuucu

SEQ ID NO: 387463 - RNA, 19 nt, Artificial Sequence
  Synthetic
gugaguucaaauaguuucu

SEQ ID NO: 387464 - RNA, 20 nt, Artificial Sequence
  Synthetic
ugugaguucaaauaguuucu

SEQ ID NO: 387465 - RNA, 21 nt, Artificial Sequence
  Synthetic
augugaguucaaauaguuucu

SEQ ID NO: 387466 - RNA, 22 nt, Artificial Sequence
  Synthetic
gaugugaguucaaauaguuucu

SEQ ID NO: 387467 - RNA, 23 nt, Artificial Sequence
  Synthetic
ggaugugaguucaaauaguuucu

SEQ ID NO: 387468 - RNA, 24 nt, Artificial Sequence
  Synthetic
aggaugugaguucaaauaguuucu

SEQ ID NO: 387469 - RNA, 18 nt, Artificial Sequence
  Synthetic
cacaaaaugauaguuucu

SEQ ID NO: 387470 - RNA, 19 nt, Artificial Sequence
  Synthetic
gcacaaaaugauaguuucu

SEQ ID NO: 387471 - RNA, 20 nt, Artificial Sequence
  Synthetic
ugcacaaaaugauaguuucu

SEQ ID NO: 387472 - RNA, 21 nt, Artificial Sequence
  Synthetic
uugcacaaaaugauaguuucu

SEQ ID NO: 387473 - RNA, 22 nt, Artificial Sequence
  Synthetic
uuugcacaaaaugauaguuucu

SEQ ID NO: 387474 - RNA, 23 nt, Artificial Sequence
  Synthetic
guuugcacaaaaugauaguuucu

SEQ ID NO: 387475 - RNA, 24 nt, Artificial Sequence
  Synthetic
aguuugcacaaaaugauaguuucu

SEQ ID NO: 387476 - RNA, 18 nt, Artificial Sequence
  Synthetic
ucuuucuuucuaguuucu

SEQ ID NO: 387477 - RNA, 19 nt, Artificial Sequence
  Synthetic
aucuuucuuucuaguuucu

SEQ ID NO: 387478 - RNA, 20 nt, Artificial Sequence
  Synthetic
aaucuuucuuucuaguuucu

SEQ ID NO: 387479 - RNA, 21 nt, Artificial Sequence
  Synthetic
aaaucuuucuuucuaguuucu

SEQ ID NO: 387480 - RNA, 22 nt, Artificial Sequence
  Synthetic
aaaaucuuucuuucuaguuucu

SEQ ID NO: 387481 - RNA, 23 nt, Artificial Sequence
  Synthetic
gaaaaucuuucuuucuaguuucu

SEQ ID NO: 387482 - RNA, 24 nt, Artificial Sequence
  Synthetic
agaaaaucuuucuuucuaguuucu

SEQ ID NO: 387483 - RNA, 18 nt, Artificial Sequence
  Synthetic
gcccuguuuuuaguuucu

SEQ ID NO: 387484 - RNA, 19 nt, Artificial Sequence
  Synthetic
agcccuguuuuuaguuucu

SEQ ID NO: 387485 - RNA, 20 nt, Artificial Sequence
  Synthetic
uagcccuguuuuuaguuucu

SEQ ID NO: 387486 - RNA, 21 nt, Artificial Sequence
  Synthetic
guagcccuguuuuuaguuucu

SEQ ID NO: 387487 - RNA, 22 nt, Artificial Sequence
  Synthetic
gguagcccuguuuuuaguuucu

SEQ ID NO: 387488 - RNA, 23 nt, Artificial Sequence
  Synthetic
ugguagcccuguuuuuaguuucu

SEQ ID NO: 387489 - RNA, 24 nt, Artificial Sequence
  Synthetic
augguagcccuguuuuuaguuucu

SEQ ID NO: 387490 - RNA, 18 nt, Artificial Sequence
  Synthetic
ccuacugcaaagguuucu

SEQ ID NO: 387491 - RNA, 19 nt, Artificial Sequence
  Synthetic
accuacugcaaagguuucu

SEQ ID NO: 387492 - RNA, 20 nt, Artificial Sequence
  Synthetic
gaccuacugcaaagguuucu

SEQ ID NO: 387493 - RNA, 21 nt, Artificial Sequence
  Synthetic
agaccuacugcaaagguuucu

SEQ ID NO: 387494 - RNA, 22 nt, Artificial Sequence
  Synthetic
gagaccuacugcaaagguuucu

SEQ ID NO: 387495 - RNA, 23 nt, Artificial Sequence
  Synthetic
ggagaccuacugcaaagguuucu

SEQ ID NO: 387496 - RNA, 24 nt, Artificial Sequence
  Synthetic
aggagaccuacugcaaagguuucu

SEQ ID NO: 387497 - RNA, 18 nt, Artificial Sequence
  Synthetic
acucuaugucagguuucu

SEQ ID NO: 387498 - RNA, 19 nt, Artificial Sequence
  Synthetic
aacucuaugucagguuucu

SEQ ID NO: 387499 - RNA, 20 nt, Artificial Sequence
  Synthetic
gaacucuaugucagguuucu

SEQ ID NO: 387500 - RNA, 21 nt, Artificial Sequence
  Synthetic
ggaacucuaugucagguuucu

SEQ ID NO: 387501 - RNA, 22 nt, Artificial Sequence
  Synthetic
aggaacucuaugucagguuucu

SEQ ID NO: 387502 - RNA, 23 nt, Artificial Sequence
  Synthetic
uaggaacucuaugucagguuucu

SEQ ID NO: 387503 - RNA, 24 nt, Artificial Sequence
  Synthetic
uuaggaacucuaugucagguuucu

SEQ ID NO: 387504 - RNA, 18 nt, Artificial Sequence
  Synthetic
uuggggagagagguuucu

SEQ ID NO: 387505 - RNA, 19 nt, Artificial Sequence
  Synthetic
guuggggagagagguuucu

SEQ ID NO: 387506 - RNA, 20 nt, Artificial Sequence
  Synthetic
uguuggggagagagguuucu

SEQ ID NO: 387507 - RNA, 21 nt, Artificial Sequence
  Synthetic
uuguuggggagagagguuucu

SEQ ID NO: 387508 - RNA, 22 nt, Artificial Sequence
  Synthetic
guuguuggggagagagguuucu

SEQ ID NO: 387509 - RNA, 23 nt, Artificial Sequence
  Synthetic
cguuguuggggagagagguuucu

SEQ ID NO: 387510 - RNA, 24 nt, Artificial Sequence
  Synthetic
ccguuguuggggagagagguuucu

SEQ ID NO: 387511 - RNA, 18 nt, Artificial Sequence
  Synthetic
agagaaucugggguuucu

SEQ ID NO: 387512 - RNA, 19 nt, Artificial Sequence
  Synthetic
gagagaaucugggguuucu

SEQ ID NO: 387513 - RNA, 20 nt, Artificial Sequence
  Synthetic
agagagaaucugggguuucu

SEQ ID NO: 387514 - RNA, 21 nt, Artificial Sequence
  Synthetic
gagagagaaucugggguuucu

SEQ ID NO: 387515 - RNA, 22 nt, Artificial Sequence
  Synthetic
agagagagaaucugggguuucu

SEQ ID NO: 387516 - RNA, 23 nt, Artificial Sequence
  Synthetic
gagagagagaaucugggguuucu

SEQ ID NO: 387517 - RNA, 24 nt, Artificial Sequence
  Synthetic
agagagagagaaucugggguuucu

SEQ ID NO: 387518 - RNA, 18 nt, Artificial Sequence
  Synthetic
auuucaggcuggguuucu

SEQ ID NO: 387519 - RNA, 19 nt, Artificial Sequence
  Synthetic
uauuucaggcuggguuucu

SEQ ID NO: 387520 - RNA, 20 nt, Artificial Sequence
  Synthetic
auauuucaggcuggguuucu

SEQ ID NO: 387521 - RNA, 21 nt, Artificial Sequence
  Synthetic
cauauuucaggcuggguuucu

SEQ ID NO: 387522 - RNA, 22 nt, Artificial Sequence
  Synthetic
acauauuucaggcuggguuucu

SEQ ID NO: 387523 - RNA, 23 nt, Artificial Sequence
  Synthetic
uacauauuucaggcuggguuucu

SEQ ID NO: 387524 - RNA, 24 nt, Artificial Sequence
  Synthetic
cuacauauuucaggcuggguuucu

SEQ ID NO: 387525 - RNA, 18 nt, Artificial Sequence
  Synthetic
uuuucauauaugguuucu

SEQ ID NO: 387526 - RNA, 19 nt, Artificial Sequence
  Synthetic
cuuuucauauaugguuucu

SEQ ID NO: 387527 - RNA, 20 nt, Artificial Sequence
  Synthetic
acuuuucauauaugguuucu

SEQ ID NO: 387528 - RNA, 21 nt, Artificial Sequence
  Synthetic
aacuuuucauauaugguuucu

SEQ ID NO: 387529 - RNA, 22 nt, Artificial Sequence
  Synthetic
aaacuuuucauauaugguuucu

SEQ ID NO: 387530 - RNA, 23 nt, Artificial Sequence
  Synthetic
uaaacuuuucauauaugguuucu

SEQ ID NO: 387531 - RNA, 24 nt, Artificial Sequence
  Synthetic
cuaaacuuuucauauaugguuucu

SEQ ID NO: 387532 - RNA, 18 nt, Artificial Sequence
  Synthetic
ccaucucaugugguuucu

SEQ ID NO: 387533 - RNA, 19 nt, Artificial Sequence
  Synthetic
uccaucucaugugguuucu

SEQ ID NO: 387534 - RNA, 20 nt, Artificial Sequence
  Synthetic
uuccaucucaugugguuucu

SEQ ID NO: 387535 - RNA, 21 nt, Artificial Sequence
  Synthetic
uuuccaucucaugugguuucu

SEQ ID NO: 387536 - RNA, 22 nt, Artificial Sequence
  Synthetic
cuuuccaucucaugugguuucu

SEQ ID NO: 387537 - RNA, 23 nt, Artificial Sequence
  Synthetic
ucuuuccaucucaugugguuucu

SEQ ID NO: 387538 - RNA, 24 nt, Artificial Sequence
  Synthetic
aucuuuccaucucaugugguuucu

SEQ ID NO: 387539 - RNA, 18 nt, Artificial Sequence
  Synthetic
auagcaacaucuguuucu

SEQ ID NO: 387540 - RNA, 19 nt, Artificial Sequence
  Synthetic
cauagcaacaucuguuucu

SEQ ID NO: 387541 - RNA, 20 nt, Artificial Sequence
  Synthetic
gcauagcaacaucuguuucu

SEQ ID NO: 387542 - RNA, 21 nt, Artificial Sequence
  Synthetic
agcauagcaacaucuguuucu

SEQ ID NO: 387543 - RNA, 22 nt, Artificial Sequence
  Synthetic
aagcauagcaacaucuguuucu

SEQ ID NO: 387544 - RNA, 23 nt, Artificial Sequence
  Synthetic
gaagcauagcaacaucuguuucu

SEQ ID NO: 387545 - RNA, 24 nt, Artificial Sequence
  Synthetic
ggaagcauagcaacaucuguuucu

SEQ ID NO: 387546 - RNA, 18 nt, Artificial Sequence
  Synthetic
auaguaaccucuguuucu

SEQ ID NO: 387547 - RNA, 19 nt, Artificial Sequence
  Synthetic
aauaguaaccucuguuucu

SEQ ID NO: 387548 - RNA, 20 nt, Artificial Sequence
  Synthetic
gaauaguaaccucuguuucu

SEQ ID NO: 387549 - RNA, 21 nt, Artificial Sequence
  Synthetic
agaauaguaaccucuguuucu

SEQ ID NO: 387550 - RNA, 22 nt, Artificial Sequence
  Synthetic
aagaauaguaaccucuguuucu

SEQ ID NO: 387551 - RNA, 23 nt, Artificial Sequence
  Synthetic
aaagaauaguaaccucuguuucu

SEQ ID NO: 387552 - RNA, 24 nt, Artificial Sequence
  Synthetic
uaaagaauaguaaccucuguuucu

SEQ ID NO: 387553 - RNA, 18 nt, Artificial Sequence
  Synthetic
gggagcaauucuguuucu

SEQ ID NO: 387554 - RNA, 19 nt, Artificial Sequence
  Synthetic
agggagcaauucuguuucu

SEQ ID NO: 387555 - RNA, 20 nt, Artificial Sequence
  Synthetic
cagggagcaauucuguuucu

SEQ ID NO: 387556 - RNA, 21 nt, Artificial Sequence
  Synthetic
ucagggagcaauucuguuucu

SEQ ID NO: 387557 - RNA, 22 nt, Artificial Sequence
  Synthetic
aucagggagcaauucuguuucu

SEQ ID NO: 387558 - RNA, 23 nt, Artificial Sequence
  Synthetic
caucagggagcaauucuguuucu

SEQ ID NO: 387559 - RNA, 24 nt, Artificial Sequence
  Synthetic
acaucagggagcaauucuguuucu

SEQ ID NO: 387560 - RNA, 18 nt, Artificial Sequence
  Synthetic
uaaguaauauguguuucu

SEQ ID NO: 387561 - RNA, 19 nt, Artificial Sequence
  Synthetic
cuaaguaauauguguuucu

SEQ ID NO: 387562 - RNA, 20 nt, Artificial Sequence
  Synthetic
acuaaguaauauguguuucu

SEQ ID NO: 387563 - RNA, 21 nt, Artificial Sequence
  Synthetic
aacuaaguaauauguguuucu

SEQ ID NO: 387564 - RNA, 22 nt, Artificial Sequence
  Synthetic
aaacuaaguaauauguguuucu

SEQ ID NO: 387565 - RNA, 23 nt, Artificial Sequence
  Synthetic
gaaacuaaguaauauguguuucu

SEQ ID NO: 387566 - RNA, 24 nt, Artificial Sequence
  Synthetic
agaaacuaaguaauauguguuucu

SEQ ID NO: 387567 - RNA, 18 nt, Artificial Sequence
  Synthetic
caaguuuucuuuguuucu

SEQ ID NO: 387568 - RNA, 19 nt, Artificial Sequence
  Synthetic
acaaguuuucuuuguuucu

SEQ ID NO: 387569 - RNA, 20 nt, Artificial Sequence
  Synthetic
aacaaguuuucuuuguuucu

SEQ ID NO: 387570 - RNA, 21 nt, Artificial Sequence
  Synthetic
aaacaaguuuucuuuguuucu

SEQ ID NO: 387571 - RNA, 22 nt, Artificial Sequence
  Synthetic
aaaacaaguuuucuuuguuucu

SEQ ID NO: 387572 - RNA, 23 nt, Artificial Sequence
  Synthetic
aaaaacaaguuuucuuuguuucu

SEQ ID NO: 387573 - RNA, 24 nt, Artificial Sequence
  Synthetic
aaaaaacaaguuuucuuuguuucu

SEQ ID NO: 387574 - RNA, 18 nt, Artificial Sequence
  Synthetic
gugcacaugaaauuuucu

SEQ ID NO: 387575 - RNA, 19 nt, Artificial Sequence
  Synthetic
agugcacaugaaauuuucu

SEQ ID NO: 387576 - RNA, 20 nt, Artificial Sequence
  Synthetic
aagugcacaugaaauuuucu

SEQ ID NO: 387577 - RNA, 21 nt, Artificial Sequence
  Synthetic
aaagugcacaugaaauuuucu

SEQ ID NO: 387578 - RNA, 22 nt, Artificial Sequence
  Synthetic
uaaagugcacaugaaauuuucu

SEQ ID NO: 387579 - RNA, 23 nt, Artificial Sequence
  Synthetic
uuaaagugcacaugaaauuuucu

SEQ ID NO: 387580 - RNA, 24 nt, Artificial Sequence
  Synthetic
uuuaaagugcacaugaaauuuucu

SEQ ID NO: 387581 - RNA, 18 nt, Artificial Sequence
  Synthetic
auaguguccacauuuucu

SEQ ID NO: 387582 - RNA, 19 nt, Artificial Sequence
  Synthetic
gauaguguccacauuuucu

SEQ ID NO: 387583 - RNA, 20 nt, Artificial Sequence
  Synthetic
agauaguguccacauuuucu

SEQ ID NO: 387584 - RNA, 21 nt, Artificial Sequence
  Synthetic
gagauaguguccacauuuucu

SEQ ID NO: 387585 - RNA, 22 nt, Artificial Sequence
  Synthetic
agagauaguguccacauuuucu

SEQ ID NO: 387586 - RNA, 23 nt, Artificial Sequence
  Synthetic
uagagauaguguccacauuuucu

SEQ ID NO: 387587 - RNA, 24 nt, Artificial Sequence
  Synthetic
cuagagauaguguccacauuuucu

SEQ ID NO: 387588 - RNA, 18 nt, Artificial Sequence
  Synthetic
aagaaaaacccauuuucu

SEQ ID NO: 387589 - RNA, 19 nt, Artificial Sequence
  Synthetic
aaagaaaaacccauuuucu

SEQ ID NO: 387590 - RNA, 20 nt, Artificial Sequence
  Synthetic
aaaagaaaaacccauuuucu

SEQ ID NO: 387591 - RNA, 21 nt, Artificial Sequence
  Synthetic
gaaaagaaaaacccauuuucu

SEQ ID NO: 387592 - RNA, 22 nt, Artificial Sequence
  Synthetic
agaaaagaaaaacccauuuucu

SEQ ID NO: 387593 - RNA, 23 nt, Artificial Sequence
  Synthetic
uagaaaagaaaaacccauuuucu

SEQ ID NO: 387594 - RNA, 24 nt, Artificial Sequence
  Synthetic
auagaaaagaaaaacccauuuucu

SEQ ID NO: 387595 - RNA, 18 nt, Artificial Sequence
  Synthetic
aagaagaauccauuuucu

SEQ ID NO: 387596 - RNA, 19 nt, Artificial Sequence
  Synthetic
aaagaagaauccauuuucu

SEQ ID NO: 387597 - RNA, 20 nt, Artificial Sequence
  Synthetic
aaaagaagaauccauuuucu

SEQ ID NO: 387598 - RNA, 21 nt, Artificial Sequence
  Synthetic
aaaaagaagaauccauuuucu

SEQ ID NO: 387599 - RNA, 22 nt, Artificial Sequence
  Synthetic
uaaaaagaagaauccauuuucu

SEQ ID NO: 387600 - RNA, 23 nt, Artificial Sequence
  Synthetic
uuaaaaagaagaauccauuuucu

SEQ ID NO: 387601 - RNA, 24 nt, Artificial Sequence
  Synthetic
uuuaaaaagaagaauccauuuucu

SEQ ID NO: 387602 - RNA, 18 nt, Artificial Sequence
  Synthetic
gaaaaaguagcauuuucu

SEQ ID NO: 387603 - RNA, 19 nt, Artificial Sequence
  Synthetic
ugaaaaaguagcauuuucu

SEQ ID NO: 387604 - RNA, 20 nt, Artificial Sequence
  Synthetic
augaaaaaguagcauuuucu

SEQ ID NO: 387605 - RNA, 21 nt, Artificial Sequence
  Synthetic
aaugaaaaaguagcauuuucu

SEQ ID NO: 387606 - RNA, 22 nt, Artificial Sequence
  Synthetic
uaaugaaaaaguagcauuuucu

SEQ ID NO: 387607 - RNA, 23 nt, Artificial Sequence
  Synthetic
auaaugaaaaaguagcauuuucu

SEQ ID NO: 387608 - RNA, 24 nt, Artificial Sequence
  Synthetic
gauaaugaaaaaguagcauuuucu

SEQ ID NO: 387609 - RNA, 18 nt, Artificial Sequence
  Synthetic
aggaauuuaagauuuucu

SEQ ID NO: 387610 - RNA, 19 nt, Artificial Sequence
  Synthetic
gaggaauuuaagauuuucu

SEQ ID NO: 387611 - RNA, 20 nt, Artificial Sequence
  Synthetic
cgaggaauuuaagauuuucu

SEQ ID NO: 387612 - RNA, 21 nt, Artificial Sequence
  Synthetic
ucgaggaauuuaagauuuucu

SEQ ID NO: 387613 - RNA, 22 nt, Artificial Sequence
  Synthetic
cucgaggaauuuaagauuuucu

SEQ ID NO: 387614 - RNA, 23 nt, Artificial Sequence
  Synthetic
ucucgaggaauuuaagauuuucu

SEQ ID NO: 387615 - RNA, 24 nt, Artificial Sequence
  Synthetic
gucucgaggaauuuaagauuuucu

SEQ ID NO: 387616 - RNA, 18 nt, Artificial Sequence
  Synthetic
uucuaaaagagauuuucu

SEQ ID NO: 387617 - RNA, 19 nt, Artificial Sequence
  Synthetic
cuucuaaaagagauuuucu

SEQ ID NO: 387618 - RNA, 20 nt, Artificial Sequence
  Synthetic
ucuucuaaaagagauuuucu

SEQ ID NO: 387619 - RNA, 21 nt, Artificial Sequence
  Synthetic
cucuucuaaaagagauuuucu

SEQ ID NO: 387620 - RNA, 22 nt, Artificial Sequence
  Synthetic
acucuucuaaaagagauuuucu

SEQ ID NO: 387621 - RNA, 23 nt, Artificial Sequence
  Synthetic
cacucuucuaaaagagauuuucu

SEQ ID NO: 387622 - RNA, 24 nt, Artificial Sequence
  Synthetic
acacucuucuaaaagagauuuucu

SEQ ID NO: 387623 - RNA, 18 nt, Artificial Sequence
  Synthetic
gcuguguauauauuuucu

SEQ ID NO: 387624 - RNA, 19 nt, Artificial Sequence
  Synthetic
ggcuguguauauauuuucu

SEQ ID NO: 387625 - RNA, 20 nt, Artificial Sequence
  Synthetic
uggcuguguauauauuuucu

SEQ ID NO: 387626 - RNA, 21 nt, Artificial Sequence
  Synthetic
uuggcuguguauauauuuucu

SEQ ID NO: 387627 - RNA, 22 nt, Artificial Sequence
  Synthetic
guuggcuguguauauauuuucu

SEQ ID NO: 387628 - RNA, 23 nt, Artificial Sequence
  Synthetic
uguuggcuguguauauauuuucu

SEQ ID NO: 387629 - RNA, 24 nt, Artificial Sequence
  Synthetic
uuguuggcuguguauauauuuucu

SEQ ID NO: 387630 - RNA, 18 nt, Artificial Sequence
  Synthetic
uuguuuaaacuauuuucu

SEQ ID NO: 387631 - RNA, 19 nt, Artificial Sequence
  Synthetic
auuguuuaaacuauuuucu

SEQ ID NO: 387632 - RNA, 20 nt, Artificial Sequence
  Synthetic
aauuguuuaaacuauuuucu

SEQ ID NO: 387633 - RNA, 21 nt, Artificial Sequence
  Synthetic
aaauuguuuaaacuauuuucu

SEQ ID NO: 387634 - RNA, 22 nt, Artificial Sequence
  Synthetic
caaauuguuuaaacuauuuucu

SEQ ID NO: 387635 - RNA, 23 nt, Artificial Sequence
  Synthetic
acaaauuguuuaaacuauuuucu

SEQ ID NO: 387636 - RNA, 24 nt, Artificial Sequence
  Synthetic
aacaaauuguuuaaacuauuuucu

SEQ ID NO: 387637 - RNA, 18 nt, Artificial Sequence
  Synthetic
uauuucuuuguauuuucu

SEQ ID NO: 387638 - RNA, 19 nt, Artificial Sequence
  Synthetic
auauuucuuuguauuuucu

SEQ ID NO: 387639 - RNA, 20 nt, Artificial Sequence
  Synthetic
cauauuucuuuguauuuucu

SEQ ID NO: 387640 - RNA, 21 nt, Artificial Sequence
  Synthetic
ucauauuucuuuguauuuucu

SEQ ID NO: 387641 - RNA, 22 nt, Artificial Sequence
  Synthetic
uucauauuucuuuguauuuucu

SEQ ID NO: 387642 - RNA, 23 nt, Artificial Sequence
  Synthetic
cuucauauuucuuuguauuuucu

SEQ ID NO: 387643 - RNA, 24 nt, Artificial Sequence
  Synthetic
ucuucauauuucuuuguauuuucu

SEQ ID NO: 387644 - RNA, 18 nt, Artificial Sequence
  Synthetic
aaaaauuuguuauuuucu

SEQ ID NO: 387645 - RNA, 19 nt, Artificial Sequence
  Synthetic
aaaaaauuuguuauuuucu

SEQ ID NO: 387646 - RNA, 20 nt, Artificial Sequence
  Synthetic
uaaaaaauuuguuauuuucu

SEQ ID NO: 387647 - RNA, 21 nt, Artificial Sequence
  Synthetic
auaaaaaauuuguuauuuucu

SEQ ID NO: 387648 - RNA, 22 nt, Artificial Sequence
  Synthetic
cauaaaaaauuuguuauuuucu

SEQ ID NO: 387649 - RNA, 23 nt, Artificial Sequence
  Synthetic
ucauaaaaaauuuguuauuuucu

SEQ ID NO: 387650 - RNA, 24 nt, Artificial Sequence
  Synthetic
gucauaaaaaauuuguuauuuucu

SEQ ID NO: 387651 - RNA, 18 nt, Artificial Sequence
  Synthetic
uuuguauauuuauuuucu

SEQ ID NO: 387652 - RNA, 19 nt, Artificial Sequence
  Synthetic
cuuuguauauuuauuuucu

SEQ ID NO: 387653 - RNA, 20 nt, Artificial Sequence
  Synthetic
acuuuguauauuuauuuucu

SEQ ID NO: 387654 - RNA, 21 nt, Artificial Sequence
  Synthetic
gacuuuguauauuuauuuucu

SEQ ID NO: 387655 - RNA, 22 nt, Artificial Sequence
  Synthetic
agacuuuguauauuuauuuucu

SEQ ID NO: 387656 - RNA, 23 nt, Artificial Sequence
  Synthetic
uagacuuuguauauuuauuuucu

SEQ ID NO: 387657 - RNA, 24 nt, Artificial Sequence
  Synthetic
guagacuuuguauauuuauuuucu

SEQ ID NO: 387658 - RNA, 18 nt, Artificial Sequence
  Synthetic
acaauuccuuuauuuucu

SEQ ID NO: 387659 - RNA, 19 nt, Artificial Sequence
  Synthetic
gacaauuccuuuauuuucu

SEQ ID NO: 387660 - RNA, 20 nt, Artificial Sequence
  Synthetic
agacaauuccuuuauuuucu

SEQ ID NO: 387661 - RNA, 21 nt, Artificial Sequence
  Synthetic
uagacaauuccuuuauuuucu

SEQ ID NO: 387662 - RNA, 22 nt, Artificial Sequence
  Synthetic
auagacaauuccuuuauuuucu

SEQ ID NO: 387663 - RNA, 23 nt, Artificial Sequence
  Synthetic
aauagacaauuccuuuauuuucu

SEQ ID NO: 387664 - RNA, 24 nt, Artificial Sequence
  Synthetic
uaauagacaauuccuuuauuuucu

SEQ ID NO: 387665 - RNA, 18 nt, Artificial Sequence
  Synthetic
ccaacuucuuuauuuucu

SEQ ID NO: 387666 - RNA, 19 nt, Artificial Sequence
  Synthetic
accaacuucuuuauuuucu

SEQ ID NO: 387667 - RNA, 20 nt, Artificial Sequence
  Synthetic
aaccaacuucuuuauuuucu

SEQ ID NO: 387668 - RNA, 21 nt, Artificial Sequence
  Synthetic
uaaccaacuucuuuauuuucu

SEQ ID NO: 387669 - RNA, 22 nt, Artificial Sequence
  Synthetic
cuaaccaacuucuuuauuuucu

SEQ ID NO: 387670 - RNA, 23 nt, Artificial Sequence
  Synthetic
acuaaccaacuucuuuauuuucu

SEQ ID NO: 387671 - RNA, 24 nt, Artificial Sequence
  Synthetic
gacuaaccaacuucuuuauuuucu

SEQ ID NO: 387672 - RNA, 18 nt, Artificial Sequence
  Synthetic
aaugcucucgacuuuucu

SEQ ID NO: 387673 - RNA, 19 nt, Artificial Sequence
  Synthetic
uaaugcucucgacuuuucu

SEQ ID NO: 387674 - RNA, 20 nt, Artificial Sequence
  Synthetic
uuaaugcucucgacuuuucu

SEQ ID NO: 387675 - RNA, 21 nt, Artificial Sequence
  Synthetic
cuuaaugcucucgacuuuucu

SEQ ID NO: 387676 - RNA, 22 nt, Artificial Sequence
  Synthetic
gcuuaaugcucucgacuuuucu

SEQ ID NO: 387677 - RNA, 23 nt, Artificial Sequence
  Synthetic
ugcuuaaugcucucgacuuuucu

SEQ ID NO: 387678 - RNA, 24 nt, Artificial Sequence
  Synthetic
uugcuuaaugcucucgacuuuucu

SEQ ID NO: 387679 - RNA, 18 nt, Artificial Sequence
  Synthetic
agaauuccuuccuuuucu

SEQ ID NO: 387680 - RNA, 19 nt, Artificial Sequence
  Synthetic
cagaauuccuuccuuuucu

SEQ ID NO: 387681 - RNA, 20 nt, Artificial Sequence
  Synthetic
gcagaauuccuuccuuuucu

SEQ ID NO: 387682 - RNA, 21 nt, Artificial Sequence
  Synthetic
agcagaauuccuuccuuuucu

SEQ ID NO: 387683 - RNA, 22 nt, Artificial Sequence
  Synthetic
uagcagaauuccuuccuuuucu

SEQ ID NO: 387684 - RNA, 23 nt, Artificial Sequence
  Synthetic
auagcagaauuccuuccuuuucu

SEQ ID NO: 387685 - RNA, 24 nt, Artificial Sequence
  Synthetic
gauagcagaauuccuuccuuuucu

SEQ ID NO: 387686 - RNA, 18 nt, Artificial Sequence
  Synthetic
augaacucagucuuuucu

SEQ ID NO: 387687 - RNA, 19 nt, Artificial Sequence
  Synthetic
aaugaacucagucuuuucu

SEQ ID NO: 387688 - RNA, 20 nt, Artificial Sequence
  Synthetic
caaugaacucagucuuuucu

SEQ ID NO: 387689 - RNA, 21 nt, Artificial Sequence
  Synthetic
acaaugaacucagucuuuucu

SEQ ID NO: 387690 - RNA, 22 nt, Artificial Sequence
  Synthetic
aacaaugaacucagucuuuucu

SEQ ID NO: 387691 - RNA, 23 nt, Artificial Sequence
  Synthetic
gaacaaugaacucagucuuuucu

SEQ ID NO: 387692 - RNA, 24 nt, Artificial Sequence
  Synthetic
agaacaaugaacucagucuuuucu

SEQ ID NO: 387693 - RNA, 18 nt, Artificial Sequence
  Synthetic
gagccaacuuucuuuucu

SEQ ID NO: 387694 - RNA, 19 nt, Artificial Sequence
  Synthetic
ugagccaacuuucuuuucu

SEQ ID NO: 387695 - RNA, 20 nt, Artificial Sequence
  Synthetic
augagccaacuuucuuuucu

SEQ ID NO: 387696 - RNA, 21 nt, Artificial Sequence
  Synthetic
uaugagccaacuuucuuuucu

SEQ ID NO: 387697 - RNA, 22 nt, Artificial Sequence
  Synthetic
auaugagccaacuuucuuuucu

SEQ ID NO: 387698 - RNA, 23 nt, Artificial Sequence
  Synthetic
aauaugagccaacuuucuuuucu

SEQ ID NO: 387699 - RNA, 24 nt, Artificial Sequence
  Synthetic
gaauaugagccaacuuucuuuucu

SEQ ID NO: 387700 - RNA, 18 nt, Artificial Sequence
  Synthetic
cuuuguauuuucuuuucu

SEQ ID NO: 387701 - RNA, 19 nt, Artificial Sequence
  Synthetic
ccuuuguauuuucuuuucu

SEQ ID NO: 387702 - RNA, 20 nt, Artificial Sequence
  Synthetic
uccuuuguauuuucuuuucu

SEQ ID NO: 387703 - RNA, 21 nt, Artificial Sequence
  Synthetic
auccuuuguauuuucuuuucu

SEQ ID NO: 387704 - RNA, 22 nt, Artificial Sequence
  Synthetic
aauccuuuguauuuucuuuucu

SEQ ID NO: 387705 - RNA, 23 nt, Artificial Sequence
  Synthetic
aaauccuuuguauuuucuuuucu

SEQ ID NO: 387706 - RNA, 24 nt, Artificial Sequence
  Synthetic
aaaauccuuuguauuuucuuuucu

SEQ ID NO: 387707 - RNA, 18 nt, Artificial Sequence
  Synthetic
ugacaacaucaguuuucu

SEQ ID NO: 387708 - RNA, 19 nt, Artificial Sequence
  Synthetic
gugacaacaucaguuuucu

SEQ ID NO: 387709 - RNA, 20 nt, Artificial Sequence
  Synthetic
agugacaacaucaguuuucu

SEQ ID NO: 387710 - RNA, 21 nt, Artificial Sequence
  Synthetic
aagugacaacaucaguuuucu

SEQ ID NO: 387711 - RNA, 22 nt, Artificial Sequence
  Synthetic
gaagugacaacaucaguuuucu

SEQ ID NO: 387712 - RNA, 23 nt, Artificial Sequence
  Synthetic
agaagugacaacaucaguuuucu

SEQ ID NO: 387713 - RNA, 24 nt, Artificial Sequence
  Synthetic
aagaagugacaacaucaguuuucu

SEQ ID NO: 387714 - RNA, 18 nt, Artificial Sequence
  Synthetic
caacuuuaucaguuuucu

SEQ ID NO: 387715 - RNA, 19 nt, Artificial Sequence
  Synthetic
ccaacuuuaucaguuuucu

SEQ ID NO: 387716 - RNA, 20 nt, Artificial Sequence
  Synthetic
uccaacuuuaucaguuuucu

SEQ ID NO: 387717 - RNA, 21 nt, Artificial Sequence
  Synthetic
uuccaacuuuaucaguuuucu

SEQ ID NO: 387718 - RNA, 22 nt, Artificial Sequence
  Synthetic
auuccaacuuuaucaguuuucu

SEQ ID NO: 387719 - RNA, 23 nt, Artificial Sequence
  Synthetic
cauuccaacuuuaucaguuuucu

SEQ ID NO: 387720 - RNA, 24 nt, Artificial Sequence
  Synthetic
acauuccaacuuuaucaguuuucu

SEQ ID NO: 387721 - RNA, 18 nt, Artificial Sequence
  Synthetic
gaugggaaugaguuuucu

SEQ ID NO: 387722 - RNA, 19 nt, Artificial Sequence
  Synthetic
agaugggaaugaguuuucu

SEQ ID NO: 387723 - RNA, 20 nt, Artificial Sequence
  Synthetic
aagaugggaaugaguuuucu

SEQ ID NO: 387724 - RNA, 21 nt, Artificial Sequence
  Synthetic
aaagaugggaaugaguuuucu

SEQ ID NO: 387725 - RNA, 22 nt, Artificial Sequence
  Synthetic
aaaagaugggaaugaguuuucu

SEQ ID NO: 387726 - RNA, 23 nt, Artificial Sequence
  Synthetic
caaaagaugggaaugaguuuucu

SEQ ID NO: 387727 - RNA, 24 nt, Artificial Sequence
  Synthetic
acaaaagaugggaaugaguuuucu

SEQ ID NO: 387728 - RNA, 18 nt, Artificial Sequence
  Synthetic
cuuugccaugaguuuucu

SEQ ID NO: 387729 - RNA, 19 nt, Artificial Sequence
  Synthetic
acuuugccaugaguuuucu

SEQ ID NO: 387730 - RNA, 20 nt, Artificial Sequence
  Synthetic
cacuuugccaugaguuuucu

SEQ ID NO: 387731 - RNA, 21 nt, Artificial Sequence
  Synthetic
gcacuuugccaugaguuuucu

SEQ ID NO: 387732 - RNA, 22 nt, Artificial Sequence
  Synthetic
ugcacuuugccaugaguuuucu

SEQ ID NO: 387733 - RNA, 23 nt, Artificial Sequence
  Synthetic
cugcacuuugccaugaguuuucu

SEQ ID NO: 387734 - RNA, 24 nt, Artificial Sequence
  Synthetic
acugcacuuugccaugaguuuucu

SEQ ID NO: 387735 - RNA, 18 nt, Artificial Sequence
  Synthetic
auuauucaugaguuuucu

SEQ ID NO: 387736 - RNA, 19 nt, Artificial Sequence
  Synthetic
gauuauucaugaguuuucu

SEQ ID NO: 387737 - RNA, 20 nt, Artificial Sequence
  Synthetic
ggauuauucaugaguuuucu

SEQ ID NO: 387738 - RNA, 21 nt, Artificial Sequence
  Synthetic
uggauuauucaugaguuuucu

SEQ ID NO: 387739 - RNA, 22 nt, Artificial Sequence
  Synthetic
guggauuauucaugaguuuucu

SEQ ID NO: 387740 - RNA, 23 nt, Artificial Sequence
  Synthetic
gguggauuauucaugaguuuucu

SEQ ID NO: 387741 - RNA, 24 nt, Artificial Sequence
  Synthetic
ggguggauuauucaugaguuuucu

SEQ ID NO: 387742 - RNA, 18 nt, Artificial Sequence
  Synthetic
auuaccaaaagguuuucu

SEQ ID NO: 387743 - RNA, 19 nt, Artificial Sequence
  Synthetic
aauuaccaaaagguuuucu

SEQ ID NO: 387744 - RNA, 20 nt, Artificial Sequence
  Synthetic
aaauuaccaaaagguuuucu

SEQ ID NO: 387745 - RNA, 21 nt, Artificial Sequence
  Synthetic
uaaauuaccaaaagguuuucu

SEQ ID NO: 387746 - RNA, 22 nt, Artificial Sequence
  Synthetic
uuaaauuaccaaaagguuuucu

SEQ ID NO: 387747 - RNA, 23 nt, Artificial Sequence
  Synthetic
uuuaaauuaccaaaagguuuucu

SEQ ID NO: 387748 - RNA, 24 nt, Artificial Sequence
  Synthetic
uuuuaaauuaccaaaagguuuucu

SEQ ID NO: 387749 - RNA, 18 nt, Artificial Sequence
  Synthetic
gucaacccccuguuuucu

SEQ ID NO: 387750 - RNA, 19 nt, Artificial Sequence
  Synthetic
ugucaacccccuguuuucu

SEQ ID NO: 387751 - RNA, 20 nt, Artificial Sequence
  Synthetic
uugucaacccccuguuuucu

SEQ ID NO: 387752 - RNA, 21 nt, Artificial Sequence
  Synthetic
cuugucaacccccuguuuucu

SEQ ID NO: 387753 - RNA, 22 nt, Artificial Sequence
  Synthetic
ucuugucaacccccuguuuucu

SEQ ID NO: 387754 - RNA, 23 nt, Artificial Sequence
  Synthetic
uucuugucaacccccuguuuucu

SEQ ID NO: 387755 - RNA, 24 nt, Artificial Sequence
  Synthetic
auucuugucaacccccuguuuucu

SEQ ID NO: 387756 - RNA, 18 nt, Artificial Sequence
  Synthetic
cauacuuuccuguuuucu

SEQ ID NO: 387757 - RNA, 19 nt, Artificial Sequence
  Synthetic
ccauacuuuccuguuuucu

SEQ ID NO: 387758 - RNA, 20 nt, Artificial Sequence
  Synthetic
cccauacuuuccuguuuucu

SEQ ID NO: 387759 - RNA, 21 nt, Artificial Sequence
  Synthetic
ucccauacuuuccuguuuucu

SEQ ID NO: 387760 - RNA, 22 nt, Artificial Sequence
  Synthetic
cucccauacuuuccuguuuucu

SEQ ID NO: 387761 - RNA, 23 nt, Artificial Sequence
  Synthetic
gcucccauacuuuccuguuuucu

SEQ ID NO: 387762 - RNA, 24 nt, Artificial Sequence
  Synthetic
ugcucccauacuuuccuguuuucu

SEQ ID NO: 387763 - RNA, 18 nt, Artificial Sequence
  Synthetic
gcucacaaaguguuuucu

SEQ ID NO: 387764 - RNA, 19 nt, Artificial Sequence
  Synthetic
ggcucacaaaguguuuucu

SEQ ID NO: 387765 - RNA, 20 nt, Artificial Sequence
  Synthetic
aggcucacaaaguguuuucu

SEQ ID NO: 387766 - RNA, 21 nt, Artificial Sequence
  Synthetic
caggcucacaaaguguuuucu

SEQ ID NO: 387767 - RNA, 22 nt, Artificial Sequence
  Synthetic
acaggcucacaaaguguuuucu

SEQ ID NO: 387768 - RNA, 23 nt, Artificial Sequence
  Synthetic
cacaggcucacaaaguguuuucu

SEQ ID NO: 387769 - RNA, 24 nt, Artificial Sequence
  Synthetic
acacaggcucacaaaguguuuucu

SEQ ID NO: 387770 - RNA, 18 nt, Artificial Sequence
  Synthetic
cacugcuuuguguuuucu

SEQ ID NO: 387771 - RNA, 19 nt, Artificial Sequence
  Synthetic
acacugcuuuguguuuucu

SEQ ID NO: 387772 - RNA, 20 nt, Artificial Sequence
  Synthetic
uacacugcuuuguguuuucu

SEQ ID NO: 387773 - RNA, 21 nt, Artificial Sequence
  Synthetic
auacacugcuuuguguuuucu

SEQ ID NO: 387774 - RNA, 22 nt, Artificial Sequence
  Synthetic
aauacacugcuuuguguuuucu

SEQ ID NO: 387775 - RNA, 23 nt, Artificial Sequence
  Synthetic
uaauacacugcuuuguguuuucu

SEQ ID NO: 387776 - RNA, 24 nt, Artificial Sequence
  Synthetic
auaauacacugcuuuguguuuucu

SEQ ID NO: 387777 - RNA, 18 nt, Artificial Sequence
  Synthetic
ucacuguaauuguuuucu

SEQ ID NO: 387778 - RNA, 19 nt, Artificial Sequence
  Synthetic
uucacuguaauuguuuucu

SEQ ID NO: 387779 - RNA, 20 nt, Artificial Sequence
  Synthetic
uuucacuguaauuguuuucu

SEQ ID NO: 387780 - RNA, 21 nt, Artificial Sequence
  Synthetic
guuucacuguaauuguuuucu

SEQ ID NO: 387781 - RNA, 22 nt, Artificial Sequence
  Synthetic
uguuucacuguaauuguuuucu

SEQ ID NO: 387782 - RNA, 23 nt, Artificial Sequence
  Synthetic
auguuucacuguaauuguuuucu

SEQ ID NO: 387783 - RNA, 24 nt, Artificial Sequence
  Synthetic
cauguuucacuguaauuguuuucu

SEQ ID NO: 387784 - RNA, 18 nt, Artificial Sequence
  Synthetic
uauauauaaaauuuuucu

SEQ ID NO: 387785 - RNA, 19 nt, Artificial Sequence
  Synthetic
auauauauaaaauuuuucu

SEQ ID NO: 387786 - RNA, 20 nt, Artificial Sequence
  Synthetic
uauauauauaaaauuuuucu

SEQ ID NO: 387787 - RNA, 21 nt, Artificial Sequence
  Synthetic
auauauauauaaaauuuuucu

SEQ ID NO: 387788 - RNA, 22 nt, Artificial Sequence
  Synthetic
uauauauauauaaaauuuuucu

SEQ ID NO: 387789 - RNA, 23 nt, Artificial Sequence
  Synthetic
auauauauauauaaaauuuuucu

SEQ ID NO: 387790 - RNA, 24 nt, Artificial Sequence
  Synthetic
uauauauauauauaaaauuuuucu

SEQ ID NO: 387791 - RNA, 18 nt, Artificial Sequence
  Synthetic
auuguguagaauuuuucu

SEQ ID NO: 387792 - RNA, 19 nt, Artificial Sequence
  Synthetic
aauuguguagaauuuuucu

SEQ ID NO: 387793 - RNA, 20 nt, Artificial Sequence
  Synthetic
gaauuguguagaauuuuucu

SEQ ID NO: 387794 - RNA, 21 nt, Artificial Sequence
  Synthetic
ggaauuguguagaauuuuucu

SEQ ID NO: 387795 - RNA, 22 nt, Artificial Sequence
  Synthetic
aggaauuguguagaauuuuucu

SEQ ID NO: 387796 - RNA, 23 nt, Artificial Sequence
  Synthetic
caggaauuguguagaauuuuucu

SEQ ID NO: 387797 - RNA, 24 nt, Artificial Sequence
  Synthetic
acaggaauuguguagaauuuuucu

SEQ ID NO: 387798 - RNA, 18 nt, Artificial Sequence
  Synthetic
agcccaaaucauuuuucu

SEQ ID NO: 387799 - RNA, 19 nt, Artificial Sequence
  Synthetic
cagcccaaaucauuuuucu

SEQ ID NO: 387800 - RNA, 20 nt, Artificial Sequence
  Synthetic
ccagcccaaaucauuuuucu

SEQ ID NO: 387801 - RNA, 21 nt, Artificial Sequence
  Synthetic
uccagcccaaaucauuuuucu

SEQ ID NO: 387802 - RNA, 22 nt, Artificial Sequence
  Synthetic
uuccagcccaaaucauuuuucu

SEQ ID NO: 387803 - RNA, 23 nt, Artificial Sequence
  Synthetic
auuccagcccaaaucauuuuucu

SEQ ID NO: 387804 - RNA, 24 nt, Artificial Sequence
  Synthetic
aauuccagcccaaaucauuuuucu

SEQ ID NO: 387805 - RNA, 18 nt, Artificial Sequence
  Synthetic
aauuugggucauuuuucu

SEQ ID NO: 387806 - RNA, 19 nt, Artificial Sequence
  Synthetic
aaauuugggucauuuuucu

SEQ ID NO: 387807 - RNA, 20 nt, Artificial Sequence
  Synthetic
uaaauuugggucauuuuucu

SEQ ID NO: 387808 - RNA, 21 nt, Artificial Sequence
  Synthetic
auaaauuugggucauuuuucu

SEQ ID NO: 387809 - RNA, 22 nt, Artificial Sequence
  Synthetic
aauaaauuugggucauuuuucu

SEQ ID NO: 387810 - RNA, 23 nt, Artificial Sequence
  Synthetic
aaauaaauuugggucauuuuucu

SEQ ID NO: 387811 - RNA, 24 nt, Artificial Sequence
  Synthetic
caaauaaauuugggucauuuuucu

SEQ ID NO: 387812 - RNA, 18 nt, Artificial Sequence
  Synthetic
acucuacccacuuuuucu

SEQ ID NO: 387813 - RNA, 19 nt, Artificial Sequence
  Synthetic
uacucuacccacuuuuucu

SEQ ID NO: 387814 - RNA, 20 nt, Artificial Sequence
  Synthetic
uuacucuacccacuuuuucu

SEQ ID NO: 387815 - RNA, 21 nt, Artificial Sequence
  Synthetic
guuacucuacccacuuuuucu

SEQ ID NO: 387816 - RNA, 22 nt, Artificial Sequence
  Synthetic
uguuacucuacccacuuuuucu

SEQ ID NO: 387817 - RNA, 23 nt, Artificial Sequence
  Synthetic
guguuacucuacccacuuuuucu

SEQ ID NO: 387818 - RNA, 24 nt, Artificial Sequence
  Synthetic
aguguuacucuacccacuuuuucu

SEQ ID NO: 387819 - RNA, 18 nt, Artificial Sequence
  Synthetic
caaaaccucucuuuuucu

SEQ ID NO: 387820 - RNA, 19 nt, Artificial Sequence
  Synthetic
ucaaaaccucucuuuuucu

SEQ ID NO: 387821 - RNA, 20 nt, Artificial Sequence
  Synthetic
gucaaaaccucucuuuuucu

SEQ ID NO: 387822 - RNA, 21 nt, Artificial Sequence
  Synthetic
ugucaaaaccucucuuuuucu

SEQ ID NO: 387823 - RNA, 22 nt, Artificial Sequence
  Synthetic
uugucaaaaccucucuuuuucu

SEQ ID NO: 387824 - RNA, 23 nt, Artificial Sequence
  Synthetic
uuugucaaaaccucucuuuuucu

SEQ ID NO: 387825 - RNA, 24 nt, Artificial Sequence
  Synthetic
cuuugucaaaaccucucuuuuucu

SEQ ID NO: 387826 - RNA, 18 nt, Artificial Sequence
  Synthetic
uguacuuuuucuuuuucu

SEQ ID NO: 387827 - RNA, 19 nt, Artificial Sequence
  Synthetic
uuguacuuuuucuuuuucu

SEQ ID NO: 387828 - RNA, 20 nt, Artificial Sequence
  Synthetic
uuuguacuuuuucuuuuucu

SEQ ID NO: 387829 - RNA, 21 nt, Artificial Sequence
  Synthetic
uuuuguacuuuuucuuuuucu

SEQ ID NO: 387830 - RNA, 22 nt, Artificial Sequence
  Synthetic
uuuuuguacuuuuucuuuuucu

SEQ ID NO: 387831 - RNA, 23 nt, Artificial Sequence
  Synthetic
guuuuuguacuuuuucuuuuucu

SEQ ID NO: 387832 - RNA, 24 nt, Artificial Sequence
  Synthetic
gguuuuuguacuuuuucuuuuucu

SEQ ID NO: 387833 - RNA, 18 nt, Artificial Sequence
  Synthetic
aaaguauaauguuuuucu

SEQ ID NO: 387834 - RNA, 19 nt, Artificial Sequence
  Synthetic
gaaaguauaauguuuuucu

SEQ ID NO: 387835 - RNA, 20 nt, Artificial Sequence
  Synthetic
ugaaaguauaauguuuuucu

SEQ ID NO: 387836 - RNA, 21 nt, Artificial Sequence
  Synthetic
augaaaguauaauguuuuucu

SEQ ID NO: 387837 - RNA, 22 nt, Artificial Sequence
  Synthetic
uaugaaaguauaauguuuuucu

SEQ ID NO: 387838 - RNA, 23 nt, Artificial Sequence
  Synthetic
cuaugaaaguauaauguuuuucu

SEQ ID NO: 387839 - RNA, 24 nt, Artificial Sequence
  Synthetic
ucuaugaaaguauaauguuuuucu

SEQ ID NO: 387840 - RNA, 18 nt, Artificial Sequence
  Synthetic
uuuccuguuuguuuuucu

SEQ ID NO: 387841 - RNA, 19 nt, Artificial Sequence
  Synthetic
uuuuccuguuuguuuuucu

SEQ ID NO: 387842 - RNA, 20 nt, Artificial Sequence
  Synthetic
cuuuuccuguuuguuuuucu

SEQ ID NO: 387843 - RNA, 21 nt, Artificial Sequence
  Synthetic
acuuuuccuguuuguuuuucu

SEQ ID NO: 387844 - RNA, 22 nt, Artificial Sequence
  Synthetic
cacuuuuccuguuuguuuuucu

SEQ ID NO: 387845 - RNA, 23 nt, Artificial Sequence
  Synthetic
ucacuuuuccuguuuguuuuucu

SEQ ID NO: 387846 - RNA, 24 nt, Artificial Sequence
  Synthetic
uucacuuuuccuguuuguuuuucu

SEQ ID NO: 387847 - RNA, 18 nt, Artificial Sequence
  Synthetic
caaguuuuacuuuuuucu

SEQ ID NO: 387848 - RNA, 19 nt, Artificial Sequence
  Synthetic
gcaaguuuuacuuuuuucu

SEQ ID NO: 387849 - RNA, 20 nt, Artificial Sequence
  Synthetic
agcaaguuuuacuuuuuucu

SEQ ID NO: 387850 - RNA, 21 nt, Artificial Sequence
  Synthetic
cagcaaguuuuacuuuuuucu

SEQ ID NO: 387851 - RNA, 22 nt, Artificial Sequence
  Synthetic
gcagcaaguuuuacuuuuuucu

SEQ ID NO: 387852 - RNA, 23 nt, Artificial Sequence
  Synthetic
agcagcaaguuuuacuuuuuucu

SEQ ID NO: 387853 - RNA, 24 nt, Artificial Sequence
  Synthetic
cagcagcaaguuuuacuuuuuucu

SEQ ID NO: 387854 - RNA, 18 nt, Artificial Sequence
  Synthetic
gucagaagccuuuuuucu

SEQ ID NO: 387855 - RNA, 19 nt, Artificial Sequence
  Synthetic
agucagaagccuuuuuucu

SEQ ID NO: 387856 - RNA, 20 nt, Artificial Sequence
  Synthetic
gagucagaagccuuuuuucu

SEQ ID NO: 387857 - RNA, 21 nt, Artificial Sequence
  Synthetic
ggagucagaagccuuuuuucu

SEQ ID NO: 387858 - RNA, 22 nt, Artificial Sequence
  Synthetic
aggagucagaagccuuuuuucu

SEQ ID NO: 387859 - RNA, 23 nt, Artificial Sequence
  Synthetic
caggagucagaagccuuuuuucu

SEQ ID NO: 387860 - RNA, 24 nt, Artificial Sequence
  Synthetic
gcaggagucagaagccuuuuuucu

SEQ ID NO: 387861 - RNA, 18 nt, Artificial Sequence
  Synthetic
uuucuaauccuuuuuucu

SEQ ID NO: 387862 - RNA, 19 nt, Artificial Sequence
  Synthetic
uuuucuaauccuuuuuucu

SEQ ID NO: 387863 - RNA, 20 nt, Artificial Sequence
  Synthetic
uuuuucuaauccuuuuuucu

SEQ ID NO: 387864 - RNA, 21 nt, Artificial Sequence
  Synthetic
guuuuucuaauccuuuuuucu

SEQ ID NO: 387865 - RNA, 22 nt, Artificial Sequence
  Synthetic
gguuuuucuaauccuuuuuucu

SEQ ID NO: 387866 - RNA, 23 nt, Artificial Sequence
  Synthetic
ggguuuuucuaauccuuuuuucu

SEQ ID NO: 387867 - RNA, 24 nt, Artificial Sequence
  Synthetic
uggguuuuucuaauccuuuuuucu

SEQ ID NO: 387868 - RNA, 18 nt, Artificial Sequence
  Synthetic
agcaaaaaaaaaaaaagu

SEQ ID NO: 387869 - RNA, 19 nt, Artificial Sequence
  Synthetic
uagcaaaaaaaaaaaaagu

SEQ ID NO: 387870 - RNA, 20 nt, Artificial Sequence
  Synthetic
uuagcaaaaaaaaaaaaagu

SEQ ID NO: 387871 - RNA, 21 nt, Artificial Sequence
  Synthetic
auuagcaaaaaaaaaaaaagu

SEQ ID NO: 387872 - RNA, 22 nt, Artificial Sequence
  Synthetic
cauuagcaaaaaaaaaaaaagu

SEQ ID NO: 387873 - RNA, 23 nt, Artificial Sequence
  Synthetic
ucauuagcaaaaaaaaaaaaagu

SEQ ID NO: 387874 - RNA, 24 nt, Artificial Sequence
  Synthetic
gucauuagcaaaaaaaaaaaaagu

SEQ ID NO: 387875 - RNA, 18 nt, Artificial Sequence
  Synthetic
auggguauaaaaaaaagu

SEQ ID NO: 387876 - RNA, 19 nt, Artificial Sequence
  Synthetic
gauggguauaaaaaaaagu

SEQ ID NO: 387877 - RNA, 20 nt, Artificial Sequence
  Synthetic
ggauggguauaaaaaaaagu

SEQ ID NO: 387878 - RNA, 21 nt, Artificial Sequence
  Synthetic
uggauggguauaaaaaaaagu

SEQ ID NO: 387879 - RNA, 22 nt, Artificial Sequence
  Synthetic
cuggauggguauaaaaaaaagu

SEQ ID NO: 387880 - RNA, 23 nt, Artificial Sequence
  Synthetic
acuggauggguauaaaaaaaagu

SEQ ID NO: 387881 - RNA, 24 nt, Artificial Sequence
  Synthetic
aacuggauggguauaaaaaaaagu

SEQ ID NO: 387882 - RNA, 18 nt, Artificial Sequence
  Synthetic
gaaaaagaagaaaaaagu

SEQ ID NO: 387883 - RNA, 19 nt, Artificial Sequence
  Synthetic
ugaaaaagaagaaaaaagu

SEQ ID NO: 387884 - RNA, 20 nt, Artificial Sequence
  Synthetic
gugaaaaagaagaaaaaagu

SEQ ID NO: 387885 - RNA, 21 nt, Artificial Sequence
  Synthetic
ugugaaaaagaagaaaaaagu

SEQ ID NO: 387886 - RNA, 22 nt, Artificial Sequence
  Synthetic
uugugaaaaagaagaaaaaagu

SEQ ID NO: 387887 - RNA, 23 nt, Artificial Sequence
  Synthetic
auugugaaaaagaagaaaaaagu

SEQ ID NO: 387888 - RNA, 24 nt, Artificial Sequence
  Synthetic
aauugugaaaaagaagaaaaaagu

SEQ ID NO: 387889 - RNA, 18 nt, Artificial Sequence
  Synthetic
uucuuuuaggaaaaaagu

SEQ ID NO: 387890 - RNA, 19 nt, Artificial Sequence
  Synthetic
uuucuuuuaggaaaaaagu

SEQ ID NO: 387891 - RNA, 20 nt, Artificial Sequence
  Synthetic
uuuucuuuuaggaaaaaagu

SEQ ID NO: 387892 - RNA, 21 nt, Artificial Sequence
  Synthetic
auuuucuuuuaggaaaaaagu

SEQ ID NO: 387893 - RNA, 22 nt, Artificial Sequence
  Synthetic
aauuuucuuuuaggaaaaaagu

SEQ ID NO: 387894 - RNA, 23 nt, Artificial Sequence
  Synthetic
aaauuuucuuuuaggaaaaaagu

SEQ ID NO: 387895 - RNA, 24 nt, Artificial Sequence
  Synthetic
aaaauuuucuuuuaggaaaaaagu

SEQ ID NO: 387896 - RNA, 18 nt, Artificial Sequence
  Synthetic
auguuaggggaaaaaagu

SEQ ID NO: 387897 - RNA, 19 nt, Artificial Sequence
  Synthetic
uauguuaggggaaaaaagu

SEQ ID NO: 387898 - RNA, 20 nt, Artificial Sequence
  Synthetic
cuauguuaggggaaaaaagu

SEQ ID NO: 387899 - RNA, 21 nt, Artificial Sequence
  Synthetic
acuauguuaggggaaaaaagu

SEQ ID NO: 387900 - RNA, 22 nt, Artificial Sequence
  Synthetic
aacuauguuaggggaaaaaagu

SEQ ID NO: 387901 - RNA, 23 nt, Artificial Sequence
  Synthetic
caacuauguuaggggaaaaaagu

SEQ ID NO: 387902 - RNA, 24 nt, Artificial Sequence
  Synthetic
ucaacuauguuaggggaaaaaagu

SEQ ID NO: 387903 - RNA, 18 nt, Artificial Sequence
  Synthetic
ggaugccuuccaaaaagu

SEQ ID NO: 387904 - RNA, 19 nt, Artificial Sequence
  Synthetic
aggaugccuuccaaaaagu

SEQ ID NO: 387905 - RNA, 20 nt, Artificial Sequence
  Synthetic
aaggaugccuuccaaaaagu

SEQ ID NO: 387906 - RNA, 21 nt, Artificial Sequence
  Synthetic
uaaggaugccuuccaaaaagu

SEQ ID NO: 387907 - RNA, 22 nt, Artificial Sequence
  Synthetic
auaaggaugccuuccaaaaagu

SEQ ID NO: 387908 - RNA, 23 nt, Artificial Sequence
  Synthetic
uauaaggaugccuuccaaaaagu

SEQ ID NO: 387909 - RNA, 24 nt, Artificial Sequence
  Synthetic
guauaaggaugccuuccaaaaagu

SEQ ID NO: 387910 - RNA, 18 nt, Artificial Sequence
  Synthetic
acaaccccaucaaaaagu

SEQ ID NO: 387911 - RNA, 19 nt, Artificial Sequence
  Synthetic
aacaaccccaucaaaaagu

SEQ ID NO: 387912 - RNA, 20 nt, Artificial Sequence
  Synthetic
aaacaaccccaucaaaaagu

SEQ ID NO: 387913 - RNA, 21 nt, Artificial Sequence
  Synthetic
caaacaaccccaucaaaaagu

SEQ ID NO: 387914 - RNA, 22 nt, Artificial Sequence
  Synthetic
acaaacaaccccaucaaaaagu

SEQ ID NO: 387915 - RNA, 23 nt, Artificial Sequence
  Synthetic
aacaaacaaccccaucaaaaagu

SEQ ID NO: 387916 - RNA, 24 nt, Artificial Sequence
  Synthetic
aaacaaacaaccccaucaaaaagu

SEQ ID NO: 387917 - RNA, 18 nt, Artificial Sequence
  Synthetic
uuuauaaaaugaaaaagu

SEQ ID NO: 387918 - RNA, 19 nt, Artificial Sequence
  Synthetic
auuuauaaaaugaaaaagu

SEQ ID NO: 387919 - RNA, 20 nt, Artificial Sequence
  Synthetic
uauuuauaaaaugaaaaagu

SEQ ID NO: 387920 - RNA, 21 nt, Artificial Sequence
  Synthetic
uuauuuauaaaaugaaaaagu

SEQ ID NO: 387921 - RNA, 22 nt, Artificial Sequence
  Synthetic
cuuauuuauaaaaugaaaaagu

SEQ ID NO: 387922 - RNA, 23 nt, Artificial Sequence
  Synthetic
ucuuauuuauaaaaugaaaaagu

SEQ ID NO: 387923 - RNA, 24 nt, Artificial Sequence
  Synthetic
uucuuauuuauaaaaugaaaaagu

SEQ ID NO: 387924 - RNA, 18 nt, Artificial Sequence
  Synthetic
auacaaaagguaaaaagu

SEQ ID NO: 387925 - RNA, 19 nt, Artificial Sequence
  Synthetic
uauacaaaagguaaaaagu

SEQ ID NO: 387926 - RNA, 20 nt, Artificial Sequence
  Synthetic
auauacaaaagguaaaaagu

SEQ ID NO: 387927 - RNA, 21 nt, Artificial Sequence
  Synthetic
gauauacaaaagguaaaaagu

SEQ ID NO: 387928 - RNA, 22 nt, Artificial Sequence
  Synthetic
agauauacaaaagguaaaaagu

SEQ ID NO: 387929 - RNA, 23 nt, Artificial Sequence
  Synthetic
uagauauacaaaagguaaaaagu

SEQ ID NO: 387930 - RNA, 24 nt, Artificial Sequence
  Synthetic
guagauauacaaaagguaaaaagu

SEQ ID NO: 387931 - RNA, 18 nt, Artificial Sequence
  Synthetic
uggcaaucauuaaaaagu

SEQ ID NO: 387932 - RNA, 19 nt, Artificial Sequence
  Synthetic
auggcaaucauuaaaaagu

SEQ ID NO: 387933 - RNA, 20 nt, Artificial Sequence
  Synthetic
aauggcaaucauuaaaaagu

SEQ ID NO: 387934 - RNA, 21 nt, Artificial Sequence
  Synthetic
gaauggcaaucauuaaaaagu

SEQ ID NO: 387935 - RNA, 22 nt, Artificial Sequence
  Synthetic
agaauggcaaucauuaaaaagu

SEQ ID NO: 387936 - RNA, 23 nt, Artificial Sequence
  Synthetic
uagaauggcaaucauuaaaaagu

SEQ ID NO: 387937 - RNA, 24 nt, Artificial Sequence
  Synthetic
uuagaauggcaaucauuaaaaagu

SEQ ID NO: 387938 - RNA, 18 nt, Artificial Sequence
  Synthetic
aggcgaucauuaaaaagu

SEQ ID NO: 387939 - RNA, 19 nt, Artificial Sequence
  Synthetic
aaggcgaucauuaaaaagu

SEQ ID NO: 387940 - RNA, 20 nt, Artificial Sequence
  Synthetic
aaaggcgaucauuaaaaagu

SEQ ID NO: 387941 - RNA, 21 nt, Artificial Sequence
  Synthetic
gaaaggcgaucauuaaaaagu

SEQ ID NO: 387942 - RNA, 22 nt, Artificial Sequence
  Synthetic
agaaaggcgaucauuaaaaagu

SEQ ID NO: 387943 - RNA, 23 nt, Artificial Sequence
  Synthetic
uagaaaggcgaucauuaaaaagu

SEQ ID NO: 387944 - RNA, 24 nt, Artificial Sequence
  Synthetic
uuagaaaggcgaucauuaaaaagu

SEQ ID NO: 387945 - RNA, 18 nt, Artificial Sequence
  Synthetic
uggcgaucauuaaaaagu

SEQ ID NO: 387946 - RNA, 19 nt, Artificial Sequence
  Synthetic
auggcgaucauuaaaaagu

SEQ ID NO: 387947 - RNA, 20 nt, Artificial Sequence
  Synthetic
aauggcgaucauuaaaaagu

SEQ ID NO: 387948 - RNA, 21 nt, Artificial Sequence
  Synthetic
caauggcgaucauuaaaaagu

SEQ ID NO: 387949 - RNA, 22 nt, Artificial Sequence
  Synthetic
acaauggcgaucauuaaaaagu

SEQ ID NO: 387950 - RNA, 23 nt, Artificial Sequence
  Synthetic
uacaauggcgaucauuaaaaagu

SEQ ID NO: 387951 - RNA, 24 nt, Artificial Sequence
  Synthetic
uuacaauggcgaucauuaaaaagu

SEQ ID NO: 387952 - RNA, 18 nt, Artificial Sequence
  Synthetic
uugaauuaguacaaaagu

SEQ ID NO: 387953 - RNA, 19 nt, Artificial Sequence
  Synthetic
uuugaauuaguacaaaagu

SEQ ID NO: 387954 - RNA, 20 nt, Artificial Sequence
  Synthetic
cuuugaauuaguacaaaagu

SEQ ID NO: 387955 - RNA, 21 nt, Artificial Sequence
  Synthetic
ccuuugaauuaguacaaaagu

SEQ ID NO: 387956 - RNA, 22 nt, Artificial Sequence
  Synthetic
gccuuugaauuaguacaaaagu

SEQ ID NO: 387957 - RNA, 23 nt, Artificial Sequence
  Synthetic
ugccuuugaauuaguacaaaagu

SEQ ID NO: 387958 - RNA, 24 nt, Artificial Sequence
  Synthetic
augccuuugaauuaguacaaaagu

SEQ ID NO: 387959 - RNA, 18 nt, Artificial Sequence
  Synthetic
cucuccuuaagcaaaagu

SEQ ID NO: 387960 - RNA, 19 nt, Artificial Sequence
  Synthetic
ccucuccuuaagcaaaagu

SEQ ID NO: 387961 - RNA, 20 nt, Artificial Sequence
  Synthetic
uccucuccuuaagcaaaagu

SEQ ID NO: 387962 - RNA, 21 nt, Artificial Sequence
  Synthetic
cuccucuccuuaagcaaaagu

SEQ ID NO: 387963 - RNA, 22 nt, Artificial Sequence
  Synthetic
ucuccucuccuuaagcaaaagu

SEQ ID NO: 387964 - RNA, 23 nt, Artificial Sequence
  Synthetic
cucuccucuccuuaagcaaaagu

SEQ ID NO: 387965 - RNA, 24 nt, Artificial Sequence
  Synthetic
acucuccucuccuuaagcaaaagu

SEQ ID NO: 387966 - RNA, 18 nt, Artificial Sequence
  Synthetic
aauauagucagcaaaagu

SEQ ID NO: 387967 - RNA, 19 nt, Artificial Sequence
  Synthetic
uaauauagucagcaaaagu

SEQ ID NO: 387968 - RNA, 20 nt, Artificial Sequence
  Synthetic
uuaauauagucagcaaaagu

SEQ ID NO: 387969 - RNA, 21 nt, Artificial Sequence
  Synthetic
uuuaauauagucagcaaaagu

SEQ ID NO: 387970 - RNA, 22 nt, Artificial Sequence
  Synthetic
uuuuaauauagucagcaaaagu

SEQ ID NO: 387971 - RNA, 23 nt, Artificial Sequence
  Synthetic
guuuuaauauagucagcaaaagu

SEQ ID NO: 387972 - RNA, 24 nt, Artificial Sequence
  Synthetic
uguuuuaauauagucagcaaaagu

SEQ ID NO: 387973 - RNA, 18 nt, Artificial Sequence
  Synthetic
gaaauggcuggcaaaagu

SEQ ID NO: 387974 - RNA, 19 nt, Artificial Sequence
  Synthetic
ugaaauggcuggcaaaagu

SEQ ID NO: 387975 - RNA, 20 nt, Artificial Sequence
  Synthetic
augaaauggcuggcaaaagu

SEQ ID NO: 387976 - RNA, 21 nt, Artificial Sequence
  Synthetic
gaugaaauggcuggcaaaagu

SEQ ID NO: 387977 - RNA, 22 nt, Artificial Sequence
  Synthetic
ugaugaaauggcuggcaaaagu

SEQ ID NO: 387978 - RNA, 23 nt, Artificial Sequence
  Synthetic
gugaugaaauggcuggcaaaagu

SEQ ID NO: 387979 - RNA, 24 nt, Artificial Sequence
  Synthetic
ugugaugaaauggcuggcaaaagu

SEQ ID NO: 387980 - RNA, 18 nt, Artificial Sequence
  Synthetic
ucacuuuaaaucaaaagu

SEQ ID NO: 387981 - RNA, 19 nt, Artificial Sequence
  Synthetic
gucacuuuaaaucaaaagu

SEQ ID NO: 387982 - RNA, 20 nt, Artificial Sequence
  Synthetic
ugucacuuuaaaucaaaagu

SEQ ID NO: 387983 - RNA, 21 nt, Artificial Sequence
  Synthetic
uugucacuuuaaaucaaaagu

SEQ ID NO: 387984 - RNA, 22 nt, Artificial Sequence
  Synthetic
uuugucacuuuaaaucaaaagu

SEQ ID NO: 387985 - RNA, 23 nt, Artificial Sequence
  Synthetic
guuugucacuuuaaaucaaaagu

SEQ ID NO: 387986 - RNA, 24 nt, Artificial Sequence
  Synthetic
uguuugucacuuuaaaucaaaagu

SEQ ID NO: 387987 - RNA, 18 nt, Artificial Sequence
  Synthetic
ugacuccugcucaaaagu

SEQ ID NO: 387988 - RNA, 19 nt, Artificial Sequence
  Synthetic
gugacuccugcucaaaagu

SEQ ID NO: 387989 - RNA, 20 nt, Artificial Sequence
  Synthetic
agugacuccugcucaaaagu

SEQ ID NO: 387990 - RNA, 21 nt, Artificial Sequence
  Synthetic
gagugacuccugcucaaaagu

SEQ ID NO: 387991 - RNA, 22 nt, Artificial Sequence
  Synthetic
ggagugacuccugcucaaaagu

SEQ ID NO: 387992 - RNA, 23 nt, Artificial Sequence
  Synthetic
uggagugacuccugcucaaaagu

SEQ ID NO: 387993 - RNA, 24 nt, Artificial Sequence
  Synthetic
uuggagugacuccugcucaaaagu

SEQ ID NO: 387994 - RNA, 18 nt, Artificial Sequence
  Synthetic
uggcaaucauucaaaagu

SEQ ID NO: 387995 - RNA, 19 nt, Artificial Sequence
  Synthetic
auggcaaucauucaaaagu

SEQ ID NO: 387996 - RNA, 20 nt, Artificial Sequence
  Synthetic
aauggcaaucauucaaaagu

SEQ ID NO: 387997 - RNA, 21 nt, Artificial Sequence
  Synthetic
gaauggcaaucauucaaaagu

SEQ ID NO: 387998 - RNA, 22 nt, Artificial Sequence
  Synthetic
agaauggcaaucauucaaaagu

SEQ ID NO: 387999 - RNA, 23 nt, Artificial Sequence
  Synthetic
uagaauggcaaucauucaaaagu

SEQ ID NO: 388000 - RNA, 24 nt, Artificial Sequence
  Synthetic
uuagaauggcaaucauucaaaagu

SEQ ID NO: 388001 - RNA, 18 nt, Artificial Sequence
  Synthetic
uaacuuguuuucaaaagu

SEQ ID NO: 388002 - RNA, 19 nt, Artificial Sequence
  Synthetic
auaacuuguuuucaaaagu

SEQ ID NO: 388003 - RNA, 20 nt, Artificial Sequence
  Synthetic
aauaacuuguuuucaaaagu

SEQ ID NO: 388004 - RNA, 21 nt, Artificial Sequence
  Synthetic
uaauaacuuguuuucaaaagu

SEQ ID NO: 388005 - RNA, 22 nt, Artificial Sequence
  Synthetic
uuaauaacuuguuuucaaaagu

SEQ ID NO: 388006 - RNA, 23 nt, Artificial Sequence
  Synthetic
uuuaauaacuuguuuucaaaagu

SEQ ID NO: 388007 - RNA, 24 nt, Artificial Sequence
  Synthetic
uuuuaauaacuuguuuucaaaagu

SEQ ID NO: 388008 - RNA, 18 nt, Artificial Sequence
  Synthetic
aagcugcagcagaaaagu

SEQ ID NO: 388009 - RNA, 19 nt, Artificial Sequence
  Synthetic
gaagcugcagcagaaaagu

SEQ ID NO: 388010 - RNA, 20 nt, Artificial Sequence
  Synthetic
ggaagcugcagcagaaaagu

SEQ ID NO: 388011 - RNA, 21 nt, Artificial Sequence
  Synthetic
aggaagcugcagcagaaaagu

SEQ ID NO: 388012 - RNA, 22 nt, Artificial Sequence
  Synthetic
gaggaagcugcagcagaaaagu

SEQ ID NO: 388013 - RNA, 23 nt, Artificial Sequence
  Synthetic
ugaggaagcugcagcagaaaagu

SEQ ID NO: 388014 - RNA, 24 nt, Artificial Sequence
  Synthetic
gugaggaagcugcagcagaaaagu

SEQ ID NO: 388015 - RNA, 18 nt, Artificial Sequence
  Synthetic
aaccagucagagaaaagu

SEQ ID NO: 388016 - RNA, 19 nt, Artificial Sequence
  Synthetic
aaaccagucagagaaaagu

SEQ ID NO: 388017 - RNA, 20 nt, Artificial Sequence
  Synthetic
uaaaccagucagagaaaagu

SEQ ID NO: 388018 - RNA, 21 nt, Artificial Sequence
  Synthetic
uuaaaccagucagagaaaagu

SEQ ID NO: 388019 - RNA, 22 nt, Artificial Sequence
  Synthetic
uuuaaaccagucagagaaaagu

SEQ ID NO: 388020 - RNA, 23 nt, Artificial Sequence
  Synthetic
uuuuaaaccagucagagaaaagu

SEQ ID NO: 388021 - RNA, 24 nt, Artificial Sequence
  Synthetic
auuuuaaaccagucagagaaaagu

SEQ ID NO: 388022 - RNA, 18 nt, Artificial Sequence
  Synthetic
agcucaguguagaaaagu

SEQ ID NO: 388023 - RNA, 19 nt, Artificial Sequence
  Synthetic
aagcucaguguagaaaagu

SEQ ID NO: 388024 - RNA, 20 nt, Artificial Sequence
  Synthetic
aaagcucaguguagaaaagu

SEQ ID NO: 388025 - RNA, 21 nt, Artificial Sequence
  Synthetic
uaaagcucaguguagaaaagu

SEQ ID NO: 388026 - RNA, 22 nt, Artificial Sequence
  Synthetic
uuaaagcucaguguagaaaagu

SEQ ID NO: 388027 - RNA, 23 nt, Artificial Sequence
  Synthetic
uuuaaagcucaguguagaaaagu

SEQ ID NO: 388028 - RNA, 24 nt, Artificial Sequence
  Synthetic
uuuuaaagcucaguguagaaaagu

SEQ ID NO: 388029 - RNA, 18 nt, Artificial Sequence
  Synthetic
cauucgaguaggaaaagu

SEQ ID NO: 388030 - RNA, 19 nt, Artificial Sequence
  Synthetic
ccauucgaguaggaaaagu

SEQ ID NO: 388031 - RNA, 20 nt, Artificial Sequence
  Synthetic
accauucgaguaggaaaagu

SEQ ID NO: 388032 - RNA, 21 nt, Artificial Sequence
  Synthetic
caccauucgaguaggaaaagu

SEQ ID NO: 388033 - RNA, 22 nt, Artificial Sequence
  Synthetic
acaccauucgaguaggaaaagu

SEQ ID NO: 388034 - RNA, 23 nt, Artificial Sequence
  Synthetic
aacaccauucgaguaggaaaagu

SEQ ID NO: 388035 - RNA, 24 nt, Artificial Sequence
  Synthetic
aaacaccauucgaguaggaaaagu

SEQ ID NO: 388036 - RNA, 18 nt, Artificial Sequence
  Synthetic
uuucuuacugugaaaagu

SEQ ID NO: 388037 - RNA, 19 nt, Artificial Sequence
  Synthetic
auuucuuacugugaaaagu

SEQ ID NO: 388038 - RNA, 20 nt, Artificial Sequence
  Synthetic
cauuucuuacugugaaaagu

SEQ ID NO: 388039 - RNA, 21 nt, Artificial Sequence
  Synthetic
gcauuucuuacugugaaaagu

SEQ ID NO: 388040 - RNA, 22 nt, Artificial Sequence
  Synthetic
ugcauuucuuacugugaaaagu

SEQ ID NO: 388041 - RNA, 23 nt, Artificial Sequence
  Synthetic
uugcauuucuuacugugaaaagu

SEQ ID NO: 388042 - RNA, 24 nt, Artificial Sequence
  Synthetic
cuugcauuucuuacugugaaaagu

SEQ ID NO: 388043 - RNA, 18 nt, Artificial Sequence
  Synthetic
uaaagaaaccauaaaagu

SEQ ID NO: 388044 - RNA, 19 nt, Artificial Sequence
  Synthetic
guaaagaaaccauaaaagu

SEQ ID NO: 388045 - RNA, 20 nt, Artificial Sequence
  Synthetic
uguaaagaaaccauaaaagu

SEQ ID NO: 388046 - RNA, 21 nt, Artificial Sequence
  Synthetic
guguaaagaaaccauaaaagu

SEQ ID NO: 388047 - RNA, 22 nt, Artificial Sequence
  Synthetic
uguguaaagaaaccauaaaagu

SEQ ID NO: 388048 - RNA, 23 nt, Artificial Sequence
  Synthetic
uuguguaaagaaaccauaaaagu

SEQ ID NO: 388049 - RNA, 24 nt, Artificial Sequence
  Synthetic
guuguguaaagaaaccauaaaagu

SEQ ID NO: 388050 - RNA, 18 nt, Artificial Sequence
  Synthetic
acccugguaauuaaaagu

SEQ ID NO: 388051 - RNA, 19 nt, Artificial Sequence
  Synthetic
cacccugguaauuaaaagu

SEQ ID NO: 388052 - RNA, 20 nt, Artificial Sequence
  Synthetic
ucacccugguaauuaaaagu

SEQ ID NO: 388053 - RNA, 21 nt, Artificial Sequence
  Synthetic
uucacccugguaauuaaaagu

SEQ ID NO: 388054 - RNA, 22 nt, Artificial Sequence
  Synthetic
uuucacccugguaauuaaaagu

SEQ ID NO: 388055 - RNA, 23 nt, Artificial Sequence
  Synthetic
uuuucacccugguaauuaaaagu

SEQ ID NO: 388056 - RNA, 24 nt, Artificial Sequence
  Synthetic
uuuuucacccugguaauuaaaagu

SEQ ID NO: 388057 - RNA, 18 nt, Artificial Sequence
  Synthetic
auguucucacuuaaaagu

SEQ ID NO: 388058 - RNA, 19 nt, Artificial Sequence
  Synthetic
cauguucucacuuaaaagu

SEQ ID NO: 388059 - RNA, 20 nt, Artificial Sequence
  Synthetic
acauguucucacuuaaaagu

SEQ ID NO: 388060 - RNA, 21 nt, Artificial Sequence
  Synthetic
cacauguucucacuuaaaagu

SEQ ID NO: 388061 - RNA, 22 nt, Artificial Sequence
  Synthetic
ucacauguucucacuuaaaagu

SEQ ID NO: 388062 - RNA, 23 nt, Artificial Sequence
  Synthetic
aucacauguucucacuuaaaagu

SEQ ID NO: 388063 - RNA, 24 nt, Artificial Sequence
  Synthetic
uaucacauguucucacuuaaaagu

SEQ ID NO: 388064 - RNA, 18 nt, Artificial Sequence
  Synthetic
aggucauaucuuaaaagu

SEQ ID NO: 388065 - RNA, 19 nt, Artificial Sequence
  Synthetic
aaggucauaucuuaaaagu

SEQ ID NO: 388066 - RNA, 20 nt, Artificial Sequence
  Synthetic
caaggucauaucuuaaaagu

SEQ ID NO: 388067 - RNA, 21 nt, Artificial Sequence
  Synthetic
ccaaggucauaucuuaaaagu

SEQ ID NO: 388068 - RNA, 22 nt, Artificial Sequence
  Synthetic
gccaaggucauaucuuaaaagu

SEQ ID NO: 388069 - RNA, 23 nt, Artificial Sequence
  Synthetic
ugccaaggucauaucuuaaaagu

SEQ ID NO: 388070 - RNA, 24 nt, Artificial Sequence
  Synthetic
augccaaggucauaucuuaaaagu

SEQ ID NO: 388071 - RNA, 18 nt, Artificial Sequence
  Synthetic
uggcaaucauuuaaaagu

SEQ ID NO: 388072 - RNA, 19 nt, Artificial Sequence
  Synthetic
auggcaaucauuuaaaagu

SEQ ID NO: 388073 - RNA, 20 nt, Artificial Sequence
  Synthetic
aauggcaaucauuuaaaagu

SEQ ID NO: 388074 - RNA, 21 nt, Artificial Sequence
  Synthetic
gaauggcaaucauuuaaaagu

SEQ ID NO: 388075 - RNA, 22 nt, Artificial Sequence
  Synthetic
agaauggcaaucauuuaaaagu

SEQ ID NO: 388076 - RNA, 23 nt, Artificial Sequence
  Synthetic
uagaauggcaaucauuuaaaagu

SEQ ID NO: 388077 - RNA, 24 nt, Artificial Sequence
  Synthetic
uuagaauggcaaucauuuaaaagu

SEQ ID NO: 388078 - RNA, 18 nt, Artificial Sequence
  Synthetic
caugcauuuuuuaaaagu

SEQ ID NO: 388079 - RNA, 19 nt, Artificial Sequence
  Synthetic
ccaugcauuuuuuaaaagu

SEQ ID NO: 388080 - RNA, 20 nt, Artificial Sequence
  Synthetic
cccaugcauuuuuuaaaagu

SEQ ID NO: 388081 - RNA, 21 nt, Artificial Sequence
  Synthetic
gcccaugcauuuuuuaaaagu

SEQ ID NO: 388082 - RNA, 22 nt, Artificial Sequence
  Synthetic
ugcccaugcauuuuuuaaaagu

SEQ ID NO: 388083 - RNA, 23 nt, Artificial Sequence
  Synthetic
gugcccaugcauuuuuuaaaagu

SEQ ID NO: 388084 - RNA, 24 nt, Artificial Sequence
  Synthetic
ugugcccaugcauuuuuuaaaagu

SEQ ID NO: 388085 - RNA, 18 nt, Artificial Sequence
  Synthetic
gauuugaaaaaacaaagu

SEQ ID NO: 388086 - RNA, 19 nt, Artificial Sequence
  Synthetic
agauuugaaaaaacaaagu

SEQ ID NO: 388087 - RNA, 20 nt, Artificial Sequence
  Synthetic
aagauuugaaaaaacaaagu

SEQ ID NO: 388088 - RNA, 21 nt, Artificial Sequence
  Synthetic
gaagauuugaaaaaacaaagu

SEQ ID NO: 388089 - RNA, 22 nt, Artificial Sequence
  Synthetic
cgaagauuugaaaaaacaaagu

SEQ ID NO: 388090 - RNA, 23 nt, Artificial Sequence
  Synthetic
acgaagauuugaaaaaacaaagu

SEQ ID NO: 388091 - RNA, 24 nt, Artificial Sequence
  Synthetic
aacgaagauuugaaaaaacaaagu

SEQ ID NO: 388092 - RNA, 18 nt, Artificial Sequence
  Synthetic
cagaagucaccacaaagu

SEQ ID NO: 388093 - RNA, 19 nt, Artificial Sequence
  Synthetic
ucagaagucaccacaaagu

SEQ ID NO: 388094 - RNA, 20 nt, Artificial Sequence
  Synthetic
uucagaagucaccacaaagu

SEQ ID NO: 388095 - RNA, 21 nt, Artificial Sequence
  Synthetic
cuucagaagucaccacaaagu

SEQ ID NO: 388096 - RNA, 22 nt, Artificial Sequence
  Synthetic
ucuucagaagucaccacaaagu

SEQ ID NO: 388097 - RNA, 23 nt, Artificial Sequence
  Synthetic
uucuucagaagucaccacaaagu

SEQ ID NO: 388098 - RNA, 24 nt, Artificial Sequence
  Synthetic
uuucuucagaagucaccacaaagu

SEQ ID NO: 388099 - RNA, 18 nt, Artificial Sequence
  Synthetic
gugggcggaucacaaagu

SEQ ID NO: 388100 - RNA, 19 nt, Artificial Sequence
  Synthetic
ggugggcggaucacaaagu

SEQ ID NO: 388101 - RNA, 20 nt, Artificial Sequence
  Synthetic
aggugggcggaucacaaagu

SEQ ID NO: 388102 - RNA, 21 nt, Artificial Sequence
  Synthetic
aaggugggcggaucacaaagu

SEQ ID NO: 388103 - RNA, 22 nt, Artificial Sequence
  Synthetic
caaggugggcggaucacaaagu

SEQ ID NO: 388104 - RNA, 23 nt, Artificial Sequence
  Synthetic
ccaaggugggcggaucacaaagu

SEQ ID NO: 388105 - RNA, 24 nt, Artificial Sequence
  Synthetic
gccaaggugggcggaucacaaagu

SEQ ID NO: 388106 - RNA, 18 nt, Artificial Sequence
  Synthetic
gcagcugcaugacaaagu

SEQ ID NO: 388107 - RNA, 19 nt, Artificial Sequence
  Synthetic
agcagcugcaugacaaagu

SEQ ID NO: 388108 - RNA, 20 nt, Artificial Sequence
  Synthetic
aagcagcugcaugacaaagu

SEQ ID NO: 388109 - RNA, 21 nt, Artificial Sequence
  Synthetic
caagcagcugcaugacaaagu

SEQ ID NO: 388110 - RNA, 22 nt, Artificial Sequence
  Synthetic
acaagcagcugcaugacaaagu

SEQ ID NO: 388111 - RNA, 23 nt, Artificial Sequence
  Synthetic
aacaagcagcugcaugacaaagu

SEQ ID NO: 388112 - RNA, 24 nt, Artificial Sequence
  Synthetic
aaacaagcagcugcaugacaaagu

SEQ ID NO: 388113 - RNA, 18 nt, Artificial Sequence
  Synthetic
uagcucaagauacaaagu

SEQ ID NO: 388114 - RNA, 19 nt, Artificial Sequence
  Synthetic
guagcucaagauacaaagu

SEQ ID NO: 388115 - RNA, 20 nt, Artificial Sequence
  Synthetic
aguagcucaagauacaaagu

SEQ ID NO: 388116 - RNA, 21 nt, Artificial Sequence
  Synthetic
gaguagcucaagauacaaagu

SEQ ID NO: 388117 - RNA, 22 nt, Artificial Sequence
  Synthetic
ggaguagcucaagauacaaagu

SEQ ID NO: 388118 - RNA, 23 nt, Artificial Sequence
  Synthetic
gggaguagcucaagauacaaagu

SEQ ID NO: 388119 - RNA, 24 nt, Artificial Sequence
  Synthetic
ggggaguagcucaagauacaaagu

SEQ ID NO: 388120 - RNA, 18 nt, Artificial Sequence
  Synthetic
gguuaauuauuacaaagu

SEQ ID NO: 388121 - RNA, 19 nt, Artificial Sequence
  Synthetic
ggguuaauuauuacaaagu

SEQ ID NO: 388122 - RNA, 20 nt, Artificial Sequence
  Synthetic
uggguuaauuauuacaaagu

SEQ ID NO: 388123 - RNA, 21 nt, Artificial Sequence
  Synthetic
cuggguuaauuauuacaaagu

SEQ ID NO: 388124 - RNA, 22 nt, Artificial Sequence
  Synthetic
acuggguuaauuauuacaaagu

SEQ ID NO: 388125 - RNA, 23 nt, Artificial Sequence
  Synthetic
uacuggguuaauuauuacaaagu

SEQ ID NO: 388126 - RNA, 24 nt, Artificial Sequence
  Synthetic
auacuggguuaauuauuacaaagu

SEQ ID NO: 388127 - RNA, 18 nt, Artificial Sequence
  Synthetic
uuguauagggaccaaagu

SEQ ID NO: 388128 - RNA, 19 nt, Artificial Sequence
  Synthetic
uuuguauagggaccaaagu

SEQ ID NO: 388129 - RNA, 20 nt, Artificial Sequence
  Synthetic
guuuguauagggaccaaagu

SEQ ID NO: 388130 - RNA, 21 nt, Artificial Sequence
  Synthetic
uguuuguauagggaccaaagu

SEQ ID NO: 388131 - RNA, 22 nt, Artificial Sequence
  Synthetic
auguuuguauagggaccaaagu

SEQ ID NO: 388132 - RNA, 23 nt, Artificial Sequence
  Synthetic
aauguuuguauagggaccaaagu

SEQ ID NO: 388133 - RNA, 24 nt, Artificial Sequence
  Synthetic
gaauguuuguauagggaccaaagu

SEQ ID NO: 388134 - RNA, 18 nt, Artificial Sequence
  Synthetic
accucagccucccaaagu

SEQ ID NO: 388135 - RNA, 19 nt, Artificial Sequence
  Synthetic
caccucagccucccaaagu

SEQ ID NO: 388136 - RNA, 20 nt, Artificial Sequence
  Synthetic
ccaccucagccucccaaagu

SEQ ID NO: 388137 - RNA, 21 nt, Artificial Sequence
  Synthetic
cccaccucagccucccaaagu

SEQ ID NO: 388138 - RNA, 22 nt, Artificial Sequence
  Synthetic
acccaccucagccucccaaagu

SEQ ID NO: 388139 - RNA, 23 nt, Artificial Sequence
  Synthetic
cacccaccucagccucccaaagu

SEQ ID NO: 388140 - RNA, 24 nt, Artificial Sequence
  Synthetic
ccacccaccucagccucccaaagu

SEQ ID NO: 388141 - RNA, 18 nt, Artificial Sequence
  Synthetic
gccuuggccucccaaagu

SEQ ID NO: 388142 - RNA, 19 nt, Artificial Sequence
  Synthetic
ugccuuggccucccaaagu

SEQ ID NO: 388143 - RNA, 20 nt, Artificial Sequence
  Synthetic
cugccuuggccucccaaagu

SEQ ID NO: 388144 - RNA, 21 nt, Artificial Sequence
  Synthetic
ccugccuuggccucccaaagu

SEQ ID NO: 388145 - RNA, 22 nt, Artificial Sequence
  Synthetic
accugccuuggccucccaaagu

SEQ ID NO: 388146 - RNA, 23 nt, Artificial Sequence
  Synthetic
caccugccuuggccucccaaagu

SEQ ID NO: 388147 - RNA, 24 nt, Artificial Sequence
  Synthetic
ccaccugccuuggccucccaaagu

SEQ ID NO: 388148 - RNA, 18 nt, Artificial Sequence
  Synthetic
caauaaaaauggcaaagu

SEQ ID NO: 388149 - RNA, 19 nt, Artificial Sequence
  Synthetic
ucaauaaaaauggcaaagu

SEQ ID NO: 388150 - RNA, 20 nt, Artificial Sequence
  Synthetic
cucaauaaaaauggcaaagu

SEQ ID NO: 388151 - RNA, 21 nt, Artificial Sequence
  Synthetic
ucucaauaaaaauggcaaagu

SEQ ID NO: 388152 - RNA, 22 nt, Artificial Sequence
  Synthetic
cucucaauaaaaauggcaaagu

SEQ ID NO: 388153 - RNA, 23 nt, Artificial Sequence
  Synthetic
acucucaauaaaaauggcaaagu

SEQ ID NO: 388154 - RNA, 24 nt, Artificial Sequence
  Synthetic
gacucucaauaaaaauggcaaagu

SEQ ID NO: 388155 - RNA, 18 nt, Artificial Sequence
  Synthetic
aucuuuauuaaucaaagu

SEQ ID NO: 388156 - RNA, 19 nt, Artificial Sequence
  Synthetic
caucuuuauuaaucaaagu

SEQ ID NO: 388157 - RNA, 20 nt, Artificial Sequence
  Synthetic
acaucuuuauuaaucaaagu

SEQ ID NO: 388158 - RNA, 21 nt, Artificial Sequence
  Synthetic
cacaucuuuauuaaucaaagu

SEQ ID NO: 388159 - RNA, 22 nt, Artificial Sequence
  Synthetic
gcacaucuuuauuaaucaaagu

SEQ ID NO: 388160 - RNA, 23 nt, Artificial Sequence
  Synthetic
agcacaucuuuauuaaucaaagu

SEQ ID NO: 388161 - RNA, 24 nt, Artificial Sequence
  Synthetic
aagcacaucuuuauuaaucaaagu

SEQ ID NO: 388162 - RNA, 18 nt, Artificial Sequence
  Synthetic
gaagcagagcaucaaagu

SEQ ID NO: 388163 - RNA, 19 nt, Artificial Sequence
  Synthetic
ggaagcagagcaucaaagu

SEQ ID NO: 388164 - RNA, 20 nt, Artificial Sequence
  Synthetic
gggaagcagagcaucaaagu

SEQ ID NO: 388165 - RNA, 21 nt, Artificial Sequence
  Synthetic
agggaagcagagcaucaaagu

SEQ ID NO: 388166 - RNA, 22 nt, Artificial Sequence
  Synthetic
aagggaagcagagcaucaaagu

SEQ ID NO: 388167 - RNA, 23 nt, Artificial Sequence
  Synthetic
aaagggaagcagagcaucaaagu

SEQ ID NO: 388168 - RNA, 24 nt, Artificial Sequence
  Synthetic
uaaagggaagcagagcaucaaagu

SEQ ID NO: 388169 - RNA, 18 nt, Artificial Sequence
  Synthetic
gaaaccgcagcucaaagu

SEQ ID NO: 388170 - RNA, 19 nt, Artificial Sequence
  Synthetic
ugaaaccgcagcucaaagu

SEQ ID NO: 388171 - RNA, 20 nt, Artificial Sequence
  Synthetic
cugaaaccgcagcucaaagu

SEQ ID NO: 388172 - RNA, 21 nt, Artificial Sequence
  Synthetic
ccugaaaccgcagcucaaagu

SEQ ID NO: 388173 - RNA, 22 nt, Artificial Sequence
  Synthetic
gccugaaaccgcagcucaaagu

SEQ ID NO: 388174 - RNA, 23 nt, Artificial Sequence
  Synthetic
agccugaaaccgcagcucaaagu

SEQ ID NO: 388175 - RNA, 24 nt, Artificial Sequence
  Synthetic
aagccugaaaccgcagcucaaagu

SEQ ID NO: 388176 - RNA, 18 nt, Artificial Sequence
  Synthetic
uaguuauuuuaagaaagu

SEQ ID NO: 388177 - RNA, 19 nt, Artificial Sequence
  Synthetic
auaguuauuuuaagaaagu

SEQ ID NO: 388178 - RNA, 20 nt, Artificial Sequence
  Synthetic
uauaguuauuuuaagaaagu

SEQ ID NO: 388179 - RNA, 21 nt, Artificial Sequence
  Synthetic
cuauaguuauuuuaagaaagu

SEQ ID NO: 388180 - RNA, 22 nt, Artificial Sequence
  Synthetic
ccuauaguuauuuuaagaaagu

SEQ ID NO: 388181 - RNA, 23 nt, Artificial Sequence
  Synthetic
accuauaguuauuuuaagaaagu

SEQ ID NO: 388182 - RNA, 24 nt, Artificial Sequence
  Synthetic
aaccuauaguuauuuuaagaaagu

SEQ ID NO: 388183 - RNA, 18 nt, Artificial Sequence
  Synthetic
augcgucaagcagaaagu

SEQ ID NO: 388184 - RNA, 19 nt, Artificial Sequence
  Synthetic
gaugcgucaagcagaaagu

SEQ ID NO: 388185 - RNA, 20 nt, Artificial Sequence
  Synthetic
ggaugcgucaagcagaaagu

SEQ ID NO: 388186 - RNA, 21 nt, Artificial Sequence
  Synthetic
aggaugcgucaagcagaaagu

SEQ ID NO: 388187 - RNA, 22 nt, Artificial Sequence
  Synthetic
gaggaugcgucaagcagaaagu

SEQ ID NO: 388188 - RNA, 23 nt, Artificial Sequence
  Synthetic
ggaggaugcgucaagcagaaagu

SEQ ID NO: 388189 - RNA, 24 nt, Artificial Sequence
  Synthetic
aggaggaugcgucaagcagaaagu

SEQ ID NO: 388190 - RNA, 18 nt, Artificial Sequence
  Synthetic
ggagucauggcagaaagu

SEQ ID NO: 388191 - RNA, 19 nt, Artificial Sequence
  Synthetic
uggagucauggcagaaagu

SEQ ID NO: 388192 - RNA, 20 nt, Artificial Sequence
  Synthetic
uuggagucauggcagaaagu

SEQ ID NO: 388193 - RNA, 21 nt, Artificial Sequence
  Synthetic
auuggagucauggcagaaagu

SEQ ID NO: 388194 - RNA, 22 nt, Artificial Sequence
  Synthetic
gauuggagucauggcagaaagu

SEQ ID NO: 388195 - RNA, 23 nt, Artificial Sequence
  Synthetic
ggauuggagucauggcagaaagu

SEQ ID NO: 388196 - RNA, 24 nt, Artificial Sequence
  Synthetic
aggauuggagucauggcagaaagu

SEQ ID NO: 388197 - RNA, 18 nt, Artificial Sequence
  Synthetic
aauuauccuucagaaagu

SEQ ID NO: 388198 - RNA, 19 nt, Artificial Sequence
  Synthetic
aaauuauccuucagaaagu

SEQ ID NO: 388199 - RNA, 20 nt, Artificial Sequence
  Synthetic
caaauuauccuucagaaagu

SEQ ID NO: 388200 - RNA, 21 nt, Artificial Sequence
  Synthetic
ucaaauuauccuucagaaagu

SEQ ID NO: 388201 - RNA, 22 nt, Artificial Sequence
  Synthetic
gucaaauuauccuucagaaagu

SEQ ID NO: 388202 - RNA, 23 nt, Artificial Sequence
  Synthetic
ugucaaauuauccuucagaaagu

SEQ ID NO: 388203 - RNA, 24 nt, Artificial Sequence
  Synthetic
uugucaaauuauccuucagaaagu

SEQ ID NO: 388204 - RNA, 18 nt, Artificial Sequence
  Synthetic
aucaggaggagagaaagu

SEQ ID NO: 388205 - RNA, 19 nt, Artificial Sequence
  Synthetic
uaucaggaggagagaaagu

SEQ ID NO: 388206 - RNA, 20 nt, Artificial Sequence
  Synthetic
guaucaggaggagagaaagu

SEQ ID NO: 388207 - RNA, 21 nt, Artificial Sequence
  Synthetic
uguaucaggaggagagaaagu

SEQ ID NO: 388208 - RNA, 22 nt, Artificial Sequence
  Synthetic
auguaucaggaggagagaaagu

SEQ ID NO: 388209 - RNA, 23 nt, Artificial Sequence
  Synthetic
gauguaucaggaggagagaaagu

SEQ ID NO: 388210 - RNA, 24 nt, Artificial Sequence
  Synthetic
ugauguaucaggaggagagaaagu

SEQ ID NO: 388211 - RNA, 18 nt, Artificial Sequence
  Synthetic
aaaucagugagagaaagu

SEQ ID NO: 388212 - RNA, 19 nt, Artificial Sequence
  Synthetic
aaaaucagugagagaaagu

SEQ ID NO: 388213 - RNA, 20 nt, Artificial Sequence
  Synthetic
caaaaucagugagagaaagu

SEQ ID NO: 388214 - RNA, 21 nt, Artificial Sequence
  Synthetic
ucaaaaucagugagagaaagu

SEQ ID NO: 388215 - RNA, 22 nt, Artificial Sequence
  Synthetic
aucaaaaucagugagagaaagu

SEQ ID NO: 388216 - RNA, 23 nt, Artificial Sequence
  Synthetic
caucaaaaucagugagagaaagu

SEQ ID NO: 388217 - RNA, 24 nt, Artificial Sequence
  Synthetic
ucaucaaaaucagugagagaaagu

SEQ ID NO: 388218 - RNA, 18 nt, Artificial Sequence
  Synthetic
uaauucccuggagaaagu

SEQ ID NO: 388219 - RNA, 19 nt, Artificial Sequence
  Synthetic
uuaauucccuggagaaagu

SEQ ID NO: 388220 - RNA, 20 nt, Artificial Sequence
  Synthetic
cuuaauucccuggagaaagu

SEQ ID NO: 388221 - RNA, 21 nt, Artificial Sequence
  Synthetic
gcuuaauucccuggagaaagu

SEQ ID NO: 388222 - RNA, 22 nt, Artificial Sequence
  Synthetic
ggcuuaauucccuggagaaagu

SEQ ID NO: 388223 - RNA, 23 nt, Artificial Sequence
  Synthetic
gggcuuaauucccuggagaaagu

SEQ ID NO: 388224 - RNA, 24 nt, Artificial Sequence
  Synthetic
agggcuuaauucccuggagaaagu

SEQ ID NO: 388225 - RNA, 18 nt, Artificial Sequence
  Synthetic
auugagaauugagaaagu

SEQ ID NO: 388226 - RNA, 19 nt, Artificial Sequence
  Synthetic
gauugagaauugagaaagu

SEQ ID NO: 388227 - RNA, 20 nt, Artificial Sequence
  Synthetic
ugauugagaauugagaaagu

SEQ ID NO: 388228 - RNA, 21 nt, Artificial Sequence
  Synthetic
augauugagaauugagaaagu

SEQ ID NO: 388229 - RNA, 22 nt, Artificial Sequence
  Synthetic
caugauugagaauugagaaagu

SEQ ID NO: 388230 - RNA, 23 nt, Artificial Sequence
  Synthetic
gcaugauugagaauugagaaagu

SEQ ID NO: 388231 - RNA, 24 nt, Artificial Sequence
  Synthetic
ggcaugauugagaauugagaaagu

SEQ ID NO: 388232 - RNA, 18 nt, Artificial Sequence
  Synthetic
gauagaauuauagaaagu

SEQ ID NO: 388233 - RNA, 19 nt, Artificial Sequence
  Synthetic
ugauagaauuauagaaagu

SEQ ID NO: 388234 - RNA, 20 nt, Artificial Sequence
  Synthetic
uugauagaauuauagaaagu

SEQ ID NO: 388235 - RNA, 21 nt, Artificial Sequence
  Synthetic
guugauagaauuauagaaagu

SEQ ID NO: 388236 - RNA, 22 nt, Artificial Sequence
  Synthetic
uguugauagaauuauagaaagu

SEQ ID NO: 388237 - RNA, 23 nt, Artificial Sequence
  Synthetic
uuguugauagaauuauagaaagu

SEQ ID NO: 388238 - RNA, 24 nt, Artificial Sequence
  Synthetic
auuguugauagaauuauagaaagu

SEQ ID NO: 388239 - RNA, 18 nt, Artificial Sequence
  Synthetic
ccuagacuccuagaaagu

SEQ ID NO: 388240 - RNA, 19 nt, Artificial Sequence
  Synthetic
uccuagacuccuagaaagu

SEQ ID NO: 388241 - RNA, 20 nt, Artificial Sequence
  Synthetic
uuccuagacuccuagaaagu

SEQ ID NO: 388242 - RNA, 21 nt, Artificial Sequence
  Synthetic
auuccuagacuccuagaaagu

SEQ ID NO: 388243 - RNA, 22 nt, Artificial Sequence
  Synthetic
gauuccuagacuccuagaaagu

SEQ ID NO: 388244 - RNA, 23 nt, Artificial Sequence
  Synthetic
ugauuccuagacuccuagaaagu

SEQ ID NO: 388245 - RNA, 24 nt, Artificial Sequence
  Synthetic
gugauuccuagacuccuagaaagu

SEQ ID NO: 388246 - RNA, 18 nt, Artificial Sequence
  Synthetic
gaaaacaauuuagaaagu

SEQ ID NO: 388247 - RNA, 19 nt, Artificial Sequence
  Synthetic
ggaaaacaauuuagaaagu

SEQ ID NO: 388248 - RNA, 20 nt, Artificial Sequence
  Synthetic
aggaaaacaauuuagaaagu

SEQ ID NO: 388249 - RNA, 21 nt, Artificial Sequence
  Synthetic
aaggaaaacaauuuagaaagu

SEQ ID NO: 388250 - RNA, 22 nt, Artificial Sequence
  Synthetic
aaaggaaaacaauuuagaaagu

SEQ ID NO: 388251 - RNA, 23 nt, Artificial Sequence
  Synthetic
gaaaggaaaacaauuuagaaagu

SEQ ID NO: 388252 - RNA, 24 nt, Artificial Sequence
  Synthetic
agaaaggaaaacaauuuagaaagu

SEQ ID NO: 388253 - RNA, 18 nt, Artificial Sequence
  Synthetic
accucagccuccgaaagu

SEQ ID NO: 388254 - RNA, 19 nt, Artificial Sequence
  Synthetic
caccucagccuccgaaagu

SEQ ID NO: 388255 - RNA, 20 nt, Artificial Sequence
  Synthetic
ucaccucagccuccgaaagu

SEQ ID NO: 388256 - RNA, 21 nt, Artificial Sequence
  Synthetic
cucaccucagccuccgaaagu

SEQ ID NO: 388257 - RNA, 22 nt, Artificial Sequence
  Synthetic
gcucaccucagccuccgaaagu

SEQ ID NO: 388258 - RNA, 23 nt, Artificial Sequence
  Synthetic
ugcucaccucagccuccgaaagu

SEQ ID NO: 388259 - RNA, 24 nt, Artificial Sequence
  Synthetic
cugcucaccucagccuccgaaagu

SEQ ID NO: 388260 - RNA, 18 nt, Artificial Sequence
  Synthetic
ucacagaggcaggaaagu

SEQ ID NO: 388261 - RNA, 19 nt, Artificial Sequence
  Synthetic
gucacagaggcaggaaagu

SEQ ID NO: 388262 - RNA, 20 nt, Artificial Sequence
  Synthetic
agucacagaggcaggaaagu

SEQ ID NO: 388263 - RNA, 21 nt, Artificial Sequence
  Synthetic
gagucacagaggcaggaaagu

SEQ ID NO: 388264 - RNA, 22 nt, Artificial Sequence
  Synthetic
agagucacagaggcaggaaagu

SEQ ID NO: 388265 - RNA, 23 nt, Artificial Sequence
  Synthetic
cagagucacagaggcaggaaagu

SEQ ID NO: 388266 - RNA, 24 nt, Artificial Sequence
  Synthetic
ccagagucacagaggcaggaaagu

SEQ ID NO: 388267 - RNA, 18 nt, Artificial Sequence
  Synthetic
ugauaugcccuggaaagu

SEQ ID NO: 388268 - RNA, 19 nt, Artificial Sequence
  Synthetic
augauaugcccuggaaagu

SEQ ID NO: 388269 - RNA, 20 nt, Artificial Sequence
  Synthetic
aaugauaugcccuggaaagu

SEQ ID NO: 388270 - RNA, 21 nt, Artificial Sequence
  Synthetic
caaugauaugcccuggaaagu

SEQ ID NO: 388271 - RNA, 22 nt, Artificial Sequence
  Synthetic
ucaaugauaugcccuggaaagu

SEQ ID NO: 388272 - RNA, 23 nt, Artificial Sequence
  Synthetic
cucaaugauaugcccuggaaagu

SEQ ID NO: 388273 - RNA, 24 nt, Artificial Sequence
  Synthetic
ucucaaugauaugcccuggaaagu

SEQ ID NO: 388274 - RNA, 18 nt, Artificial Sequence
  Synthetic
ggagauuuccaugaaagu

SEQ ID NO: 388275 - RNA, 19 nt, Artificial Sequence
  Synthetic
aggagauuuccaugaaagu

SEQ ID NO: 388276 - RNA, 20 nt, Artificial Sequence
  Synthetic
aaggagauuuccaugaaagu

SEQ ID NO: 388277 - RNA, 21 nt, Artificial Sequence
  Synthetic
gaaggagauuuccaugaaagu

SEQ ID NO: 388278 - RNA, 22 nt, Artificial Sequence
  Synthetic
ugaaggagauuuccaugaaagu

SEQ ID NO: 388279 - RNA, 23 nt, Artificial Sequence
  Synthetic
augaaggagauuuccaugaaagu

SEQ ID NO: 388280 - RNA, 24 nt, Artificial Sequence
  Synthetic
caugaaggagauuuccaugaaagu

SEQ ID NO: 388281 - RNA, 18 nt, Artificial Sequence
  Synthetic
gugcaguuggaugaaagu

SEQ ID NO: 388282 - RNA, 19 nt, Artificial Sequence
  Synthetic
agugcaguuggaugaaagu

SEQ ID NO: 388283 - RNA, 20 nt, Artificial Sequence
  Synthetic
gagugcaguuggaugaaagu

SEQ ID NO: 388284 - RNA, 21 nt, Artificial Sequence
  Synthetic
agagugcaguuggaugaaagu

SEQ ID NO: 388285 - RNA, 22 nt, Artificial Sequence
  Synthetic
aagagugcaguuggaugaaagu

SEQ ID NO: 388286 - RNA, 23 nt, Artificial Sequence
  Synthetic
aaagagugcaguuggaugaaagu

SEQ ID NO: 388287 - RNA, 24 nt, Artificial Sequence
  Synthetic
caaagagugcaguuggaugaaagu

SEQ ID NO: 388288 - RNA, 18 nt, Artificial Sequence
  Synthetic
auguguauuuaugaaagu

SEQ ID NO: 388289 - RNA, 19 nt, Artificial Sequence
  Synthetic
uauguguauuuaugaaagu

SEQ ID NO: 388290 - RNA, 20 nt, Artificial Sequence
  Synthetic
guauguguauuuaugaaagu

SEQ ID NO: 388291 - RNA, 21 nt, Artificial Sequence
  Synthetic
aguauguguauuuaugaaagu

SEQ ID NO: 388292 - RNA, 22 nt, Artificial Sequence
  Synthetic
aaguauguguauuuaugaaagu

SEQ ID NO: 388293 - RNA, 23 nt, Artificial Sequence
  Synthetic
aaaguauguguauuuaugaaagu

SEQ ID NO: 388294 - RNA, 24 nt, Artificial Sequence
  Synthetic
caaaguauguguauuuaugaaagu

SEQ ID NO: 388295 - RNA, 18 nt, Artificial Sequence
  Synthetic
gaucucagcugugaaagu

SEQ ID NO: 388296 - RNA, 19 nt, Artificial Sequence
  Synthetic
agaucucagcugugaaagu

SEQ ID NO: 388297 - RNA, 20 nt, Artificial Sequence
  Synthetic
uagaucucagcugugaaagu

SEQ ID NO: 388298 - RNA, 21 nt, Artificial Sequence
  Synthetic
cuagaucucagcugugaaagu

SEQ ID NO: 388299 - RNA, 22 nt, Artificial Sequence
  Synthetic
ucuagaucucagcugugaaagu

SEQ ID NO: 388300 - RNA, 23 nt, Artificial Sequence
  Synthetic
cucuagaucucagcugugaaagu

SEQ ID NO: 388301 - RNA, 24 nt, Artificial Sequence
  Synthetic
gcucuagaucucagcugugaaagu

SEQ ID NO: 388302 - RNA, 18 nt, Artificial Sequence
  Synthetic
ggagcuaagcuugaaagu

SEQ ID NO: 388303 - RNA, 19 nt, Artificial Sequence
  Synthetic
uggagcuaagcuugaaagu

SEQ ID NO: 388304 - RNA, 20 nt, Artificial Sequence
  Synthetic
uuggagcuaagcuugaaagu

SEQ ID NO: 388305 - RNA, 21 nt, Artificial Sequence
  Synthetic
auuggagcuaagcuugaaagu

SEQ ID NO: 388306 - RNA, 22 nt, Artificial Sequence
  Synthetic
cauuggagcuaagcuugaaagu

SEQ ID NO: 388307 - RNA, 23 nt, Artificial Sequence
  Synthetic
gcauuggagcuaagcuugaaagu

SEQ ID NO: 388308 - RNA, 24 nt, Artificial Sequence
  Synthetic
ggcauuggagcuaagcuugaaagu

SEQ ID NO: 388309 - RNA, 18 nt, Artificial Sequence
  Synthetic
uguagaauauuauaaagu

SEQ ID NO: 388310 - RNA, 19 nt, Artificial Sequence
  Synthetic
auguagaauauuauaaagu

SEQ ID NO: 388311 - RNA, 20 nt, Artificial Sequence
  Synthetic
gauguagaauauuauaaagu

SEQ ID NO: 388312 - RNA, 21 nt, Artificial Sequence
  Synthetic
agauguagaauauuauaaagu

SEQ ID NO: 388313 - RNA, 22 nt, Artificial Sequence
  Synthetic
gagauguagaauauuauaaagu

SEQ ID NO: 388314 - RNA, 23 nt, Artificial Sequence
  Synthetic
ugagauguagaauauuauaaagu

SEQ ID NO: 388315 - RNA, 24 nt, Artificial Sequence
  Synthetic
uugagauguagaauauuauaaagu

SEQ ID NO: 388316 - RNA, 18 nt, Artificial Sequence
  Synthetic
aguuagaauaacuaaagu

SEQ ID NO: 388317 - RNA, 19 nt, Artificial Sequence
  Synthetic
aaguuagaauaacuaaagu

SEQ ID NO: 388318 - RNA, 20 nt, Artificial Sequence
  Synthetic
uaaguuagaauaacuaaagu

SEQ ID NO: 388319 - RNA, 21 nt, Artificial Sequence
  Synthetic
auaaguuagaauaacuaaagu

SEQ ID NO: 388320 - RNA, 22 nt, Artificial Sequence
  Synthetic
cauaaguuagaauaacuaaagu

SEQ ID NO: 388321 - RNA, 23 nt, Artificial Sequence
  Synthetic
acauaaguuagaauaacuaaagu

SEQ ID NO: 388322 - RNA, 24 nt, Artificial Sequence
  Synthetic
uacauaaguuagaauaacuaaagu

SEQ ID NO: 388323 - RNA, 18 nt, Artificial Sequence
  Synthetic
uuugaugcacacuaaagu

SEQ ID NO: 388324 - RNA, 19 nt, Artificial Sequence
  Synthetic
auuugaugcacacuaaagu

SEQ ID NO: 388325 - RNA, 20 nt, Artificial Sequence
  Synthetic
aauuugaugcacacuaaagu

SEQ ID NO: 388326 - RNA, 21 nt, Artificial Sequence
  Synthetic
uaauuugaugcacacuaaagu

SEQ ID NO: 388327 - RNA, 22 nt, Artificial Sequence
  Synthetic
guaauuugaugcacacuaaagu

SEQ ID NO: 388328 - RNA, 23 nt, Artificial Sequence
  Synthetic
gguaauuugaugcacacuaaagu

SEQ ID NO: 388329 - RNA, 24 nt, Artificial Sequence
  Synthetic
agguaauuugaugcacacuaaagu

SEQ ID NO: 388330 - RNA, 18 nt, Artificial Sequence
  Synthetic
gaagauucaaccuaaagu

SEQ ID NO: 388331 - RNA, 19 nt, Artificial Sequence
  Synthetic
agaagauucaaccuaaagu

SEQ ID NO: 388332 - RNA, 20 nt, Artificial Sequence
  Synthetic
aagaagauucaaccuaaagu

SEQ ID NO: 388333 - RNA, 21 nt, Artificial Sequence
  Synthetic
aaagaagauucaaccuaaagu

SEQ ID NO: 388334 - RNA, 22 nt, Artificial Sequence
  Synthetic
aaaagaagauucaaccuaaagu

SEQ ID NO: 388335 - RNA, 23 nt, Artificial Sequence
  Synthetic
gaaaagaagauucaaccuaaagu

SEQ ID NO: 388336 - RNA, 24 nt, Artificial Sequence
  Synthetic
ggaaaagaagauucaaccuaaagu

SEQ ID NO: 388337 - RNA, 18 nt, Artificial Sequence
  Synthetic
uucuguugauccuaaagu

SEQ ID NO: 388338 - RNA, 19 nt, Artificial Sequence
  Synthetic
auucuguugauccuaaagu

SEQ ID NO: 388339 - RNA, 20 nt, Artificial Sequence
  Synthetic
gauucuguugauccuaaagu

SEQ ID NO: 388340 - RNA, 21 nt, Artificial Sequence
  Synthetic
ugauucuguugauccuaaagu

SEQ ID NO: 388341 - RNA, 22 nt, Artificial Sequence
  Synthetic
gugauucuguugauccuaaagu

SEQ ID NO: 388342 - RNA, 23 nt, Artificial Sequence
  Synthetic
ggugauucuguugauccuaaagu

SEQ ID NO: 388343 - RNA, 24 nt, Artificial Sequence
  Synthetic
aggugauucuguugauccuaaagu

SEQ ID NO: 388344 - RNA, 18 nt, Artificial Sequence
  Synthetic
cucgauagaagcuaaagu

SEQ ID NO: 388345 - RNA, 19 nt, Artificial Sequence
  Synthetic
ucucgauagaagcuaaagu

SEQ ID NO: 388346 - RNA, 20 nt, Artificial Sequence
  Synthetic
cucucgauagaagcuaaagu

SEQ ID NO: 388347 - RNA, 21 nt, Artificial Sequence
  Synthetic
ucucucgauagaagcuaaagu

SEQ ID NO: 388348 - RNA, 22 nt, Artificial Sequence
  Synthetic
gucucucgauagaagcuaaagu

SEQ ID NO: 388349 - RNA, 23 nt, Artificial Sequence
  Synthetic
agucucucgauagaagcuaaagu

SEQ ID NO: 388350 - RNA, 24 nt, Artificial Sequence
  Synthetic
cagucucucgauagaagcuaaagu

SEQ ID NO: 388351 - RNA, 18 nt, Artificial Sequence
  Synthetic
aacuuaugagucuaaagu

SEQ ID NO: 388352 - RNA, 19 nt, Artificial Sequence
  Synthetic
aaacuuaugagucuaaagu

SEQ ID NO: 388353 - RNA, 20 nt, Artificial Sequence
  Synthetic
aaaacuuaugagucuaaagu

SEQ ID NO: 388354 - RNA, 21 nt, Artificial Sequence
  Synthetic
gaaaacuuaugagucuaaagu

SEQ ID NO: 388355 - RNA, 22 nt, Artificial Sequence
  Synthetic
ugaaaacuuaugagucuaaagu

SEQ ID NO: 388356 - RNA, 23 nt, Artificial Sequence
  Synthetic
uugaaaacuuaugagucuaaagu

SEQ ID NO: 388357 - RNA, 24 nt, Artificial Sequence
  Synthetic
uuugaaaacuuaugagucuaaagu

SEQ ID NO: 388358 - RNA, 18 nt, Artificial Sequence
  Synthetic
gaaggucaggucuaaagu

SEQ ID NO: 388359 - RNA, 19 nt, Artificial Sequence
  Synthetic
ggaaggucaggucuaaagu

SEQ ID NO: 388360 - RNA, 20 nt, Artificial Sequence
  Synthetic
aggaaggucaggucuaaagu

SEQ ID NO: 388361 - RNA, 21 nt, Artificial Sequence
  Synthetic
aaggaaggucaggucuaaagu

SEQ ID NO: 388362 - RNA, 22 nt, Artificial Sequence
  Synthetic
aaaggaaggucaggucuaaagu

SEQ ID NO: 388363 - RNA, 23 nt, Artificial Sequence
  Synthetic
aaaaggaaggucaggucuaaagu

SEQ ID NO: 388364 - RNA, 24 nt, Artificial Sequence
  Synthetic
gaaaaggaaggucaggucuaaagu

SEQ ID NO: 388365 - RNA, 18 nt, Artificial Sequence
  Synthetic
guuuuuaggggguaaagu

SEQ ID NO: 388366 - RNA, 19 nt, Artificial Sequence
  Synthetic
gguuuuuaggggguaaagu

SEQ ID NO: 388367 - RNA, 20 nt, Artificial Sequence
  Synthetic
agguuuuuaggggguaaagu

SEQ ID NO: 388368 - RNA, 21 nt, Artificial Sequence
  Synthetic
gagguuuuuaggggguaaagu

SEQ ID NO: 388369 - RNA, 22 nt, Artificial Sequence
  Synthetic
ugagguuuuuaggggguaaagu

SEQ ID NO: 388370 - RNA, 23 nt, Artificial Sequence
  Synthetic
uugagguuuuuaggggguaaagu

SEQ ID NO: 388371 - RNA, 24 nt, Artificial Sequence
  Synthetic
uuugagguuuuuaggggguaaagu

SEQ ID NO: 388372 - RNA, 18 nt, Artificial Sequence
  Synthetic
augaauuagauguaaagu

SEQ ID NO: 388373 - RNA, 19 nt, Artificial Sequence
  Synthetic
gaugaauuagauguaaagu

SEQ ID NO: 388374 - RNA, 20 nt, Artificial Sequence
  Synthetic
ugaugaauuagauguaaagu

SEQ ID NO: 388375 - RNA, 21 nt, Artificial Sequence
  Synthetic
gugaugaauuagauguaaagu

SEQ ID NO: 388376 - RNA, 22 nt, Artificial Sequence
  Synthetic
ugugaugaauuagauguaaagu

SEQ ID NO: 388377 - RNA, 23 nt, Artificial Sequence
  Synthetic
cugugaugaauuagauguaaagu

SEQ ID NO: 388378 - RNA, 24 nt, Artificial Sequence
  Synthetic
gcugugaugaauuagauguaaagu

SEQ ID NO: 388379 - RNA, 18 nt, Artificial Sequence
  Synthetic
gggaaagcaaauuaaagu

SEQ ID NO: 388380 - RNA, 19 nt, Artificial Sequence
  Synthetic
ggggaaagcaaauuaaagu

SEQ ID NO: 388381 - RNA, 20 nt, Artificial Sequence
  Synthetic
uggggaaagcaaauuaaagu

SEQ ID NO: 388382 - RNA, 21 nt, Artificial Sequence
  Synthetic
uuggggaaagcaaauuaaagu

SEQ ID NO: 388383 - RNA, 22 nt, Artificial Sequence
  Synthetic
uuuggggaaagcaaauuaaagu

SEQ ID NO: 388384 - RNA, 23 nt, Artificial Sequence
  Synthetic
uuuuggggaaagcaaauuaaagu

SEQ ID NO: 388385 - RNA, 24 nt, Artificial Sequence
  Synthetic
cuuuuggggaaagcaaauuaaagu

SEQ ID NO: 388386 - RNA, 18 nt, Artificial Sequence
  Synthetic
ucaugggcacauuaaagu

SEQ ID NO: 388387 - RNA, 19 nt, Artificial Sequence
  Synthetic
uucaugggcacauuaaagu

SEQ ID NO: 388388 - RNA, 20 nt, Artificial Sequence
  Synthetic
auucaugggcacauuaaagu

SEQ ID NO: 388389 - RNA, 21 nt, Artificial Sequence
  Synthetic
gauucaugggcacauuaaagu

SEQ ID NO: 388390 - RNA, 22 nt, Artificial Sequence
  Synthetic
ugauucaugggcacauuaaagu

SEQ ID NO: 388391 - RNA, 23 nt, Artificial Sequence
  Synthetic
gugauucaugggcacauuaaagu

SEQ ID NO: 388392 - RNA, 24 nt, Artificial Sequence
  Synthetic
agugauucaugggcacauuaaagu

SEQ ID NO: 388393 - RNA, 18 nt, Artificial Sequence
  Synthetic
uaaagugacuauuaaagu

SEQ ID NO: 388394 - RNA, 19 nt, Artificial Sequence
  Synthetic
cuaaagugacuauuaaagu

SEQ ID NO: 388395 - RNA, 20 nt, Artificial Sequence
  Synthetic
acuaaagugacuauuaaagu

SEQ ID NO: 388396 - RNA, 21 nt, Artificial Sequence
  Synthetic
gacuaaagugacuauuaaagu

SEQ ID NO: 388397 - RNA, 22 nt, Artificial Sequence
  Synthetic
agacuaaagugacuauuaaagu

SEQ ID NO: 388398 - RNA, 23 nt, Artificial Sequence
  Synthetic
aagacuaaagugacuauuaaagu

SEQ ID NO: 388399 - RNA, 24 nt, Artificial Sequence
  Synthetic
gaagacuaaagugacuauuaaagu

SEQ ID NO: 388400 - RNA, 18 nt, Artificial Sequence
  Synthetic
uagcuuuugauuuaaagu

SEQ ID NO: 388401 - RNA, 19 nt, Artificial Sequence
  Synthetic
cuagcuuuugauuuaaagu

SEQ ID NO: 388402 - RNA, 20 nt, Artificial Sequence
  Synthetic
ucuagcuuuugauuuaaagu

SEQ ID NO: 388403 - RNA, 21 nt, Artificial Sequence
  Synthetic
uucuagcuuuugauuuaaagu

SEQ ID NO: 388404 - RNA, 22 nt, Artificial Sequence
  Synthetic
uuucuagcuuuugauuuaaagu

SEQ ID NO: 388405 - RNA, 23 nt, Artificial Sequence
  Synthetic
auuucuagcuuuugauuuaaagu

SEQ ID NO: 388406 - RNA, 24 nt, Artificial Sequence
  Synthetic
cauuucuagcuuuugauuuaaagu

SEQ ID NO: 388407 - RNA, 18 nt, Artificial Sequence
  Synthetic
cauucucacuuuuaaagu

SEQ ID NO: 388408 - RNA, 19 nt, Artificial Sequence
  Synthetic
gcauucucacuuuuaaagu

SEQ ID NO: 388409 - RNA, 20 nt, Artificial Sequence
  Synthetic
agcauucucacuuuuaaagu

SEQ ID NO: 388410 - RNA, 21 nt, Artificial Sequence
  Synthetic
cagcauucucacuuuuaaagu

SEQ ID NO: 388411 - RNA, 22 nt, Artificial Sequence
  Synthetic
ccagcauucucacuuuuaaagu

SEQ ID NO: 388412 - RNA, 23 nt, Artificial Sequence
  Synthetic
accagcauucucacuuuuaaagu

SEQ ID NO: 388413 - RNA, 24 nt, Artificial Sequence
  Synthetic
caccagcauucucacuuuuaaagu

SEQ ID NO: 388414 - RNA, 18 nt, Artificial Sequence
  Synthetic
caaaauguuuuuuaaagu

SEQ ID NO: 388415 - RNA, 19 nt, Artificial Sequence
  Synthetic
acaaaauguuuuuuaaagu

SEQ ID NO: 388416 - RNA, 20 nt, Artificial Sequence
  Synthetic
cacaaaauguuuuuuaaagu

SEQ ID NO: 388417 - RNA, 21 nt, Artificial Sequence
  Synthetic
acacaaaauguuuuuuaaagu

SEQ ID NO: 388418 - RNA, 22 nt, Artificial Sequence
  Synthetic
uacacaaaauguuuuuuaaagu

SEQ ID NO: 388419 - RNA, 23 nt, Artificial Sequence
  Synthetic
guacacaaaauguuuuuuaaagu

SEQ ID NO: 388420 - RNA, 24 nt, Artificial Sequence
  Synthetic
aguacacaaaauguuuuuuaaagu

SEQ ID NO: 388421 - RNA, 18 nt, Artificial Sequence
  Synthetic
auaguuauacaaacaagu

SEQ ID NO: 388422 - RNA, 19 nt, Artificial Sequence
  Synthetic
uauaguuauacaaacaagu

SEQ ID NO: 388423 - RNA, 20 nt, Artificial Sequence
  Synthetic
uuauaguuauacaaacaagu

SEQ ID NO: 388424 - RNA, 21 nt, Artificial Sequence
  Synthetic
auuauaguuauacaaacaagu

SEQ ID NO: 388425 - RNA, 22 nt, Artificial Sequence
  Synthetic
uauuauaguuauacaaacaagu

SEQ ID NO: 388426 - RNA, 23 nt, Artificial Sequence
  Synthetic
auauuauaguuauacaaacaagu

SEQ ID NO: 388427 - RNA, 24 nt, Artificial Sequence
  Synthetic
cauauuauaguuauacaaacaagu

SEQ ID NO: 388428 - RNA, 18 nt, Artificial Sequence
  Synthetic
guaccuaggcaaacaagu

SEQ ID NO: 388429 - RNA, 19 nt, Artificial Sequence
  Synthetic
uguaccuaggcaaacaagu

SEQ ID NO: 388430 - RNA, 20 nt, Artificial Sequence
  Synthetic
guguaccuaggcaaacaagu

SEQ ID NO: 388431 - RNA, 21 nt, Artificial Sequence
  Synthetic
gguguaccuaggcaaacaagu

SEQ ID NO: 388432 - RNA, 22 nt, Artificial Sequence
  Synthetic
agguguaccuaggcaaacaagu

SEQ ID NO: 388433 - RNA, 23 nt, Artificial Sequence
  Synthetic
uagguguaccuaggcaaacaagu

SEQ ID NO: 388434 - RNA, 24 nt, Artificial Sequence
  Synthetic
guagguguaccuaggcaaacaagu

SEQ ID NO: 388435 - RNA, 18 nt, Artificial Sequence
  Synthetic
gcuuucagaacaacaagu

SEQ ID NO: 388436 - RNA, 19 nt, Artificial Sequence
  Synthetic
ggcuuucagaacaacaagu

SEQ ID NO: 388437 - RNA, 20 nt, Artificial Sequence
  Synthetic
gggcuuucagaacaacaagu

SEQ ID NO: 388438 - RNA, 21 nt, Artificial Sequence
  Synthetic
ggggcuuucagaacaacaagu

SEQ ID NO: 388439 - RNA, 22 nt, Artificial Sequence
  Synthetic
aggggcuuucagaacaacaagu

SEQ ID NO: 388440 - RNA, 23 nt, Artificial Sequence
  Synthetic
gaggggcuuucagaacaacaagu

SEQ ID NO: 388441 - RNA, 24 nt, Artificial Sequence
  Synthetic
ggaggggcuuucagaacaacaagu

SEQ ID NO: 388442 - RNA, 18 nt, Artificial Sequence
  Synthetic
aacauacugugcacaagu

SEQ ID NO: 388443 - RNA, 19 nt, Artificial Sequence
  Synthetic
caacauacugugcacaagu

SEQ ID NO: 388444 - RNA, 20 nt, Artificial Sequence
  Synthetic
gcaacauacugugcacaagu

SEQ ID NO: 388445 - RNA, 21 nt, Artificial Sequence
  Synthetic
ggcaacauacugugcacaagu

SEQ ID NO: 388446 - RNA, 22 nt, Artificial Sequence
  Synthetic
aggcaacauacugugcacaagu

SEQ ID NO: 388447 - RNA, 23 nt, Artificial Sequence
  Synthetic
caggcaacauacugugcacaagu

SEQ ID NO: 388448 - RNA, 24 nt, Artificial Sequence
  Synthetic
ccaggcaacauacugugcacaagu

SEQ ID NO: 388449 - RNA, 18 nt, Artificial Sequence
  Synthetic
cuuaggaagaugacaagu

SEQ ID NO: 388450 - RNA, 19 nt, Artificial Sequence
  Synthetic
ucuuaggaagaugacaagu

SEQ ID NO: 388451 - RNA, 20 nt, Artificial Sequence
  Synthetic
gucuuaggaagaugacaagu

SEQ ID NO: 388452 - RNA, 21 nt, Artificial Sequence
  Synthetic
ggucuuaggaagaugacaagu

SEQ ID NO: 388453 - RNA, 22 nt, Artificial Sequence
  Synthetic
gggucuuaggaagaugacaagu

SEQ ID NO: 388454 - RNA, 23 nt, Artificial Sequence
  Synthetic
agggucuuaggaagaugacaagu

SEQ ID NO: 388455 - RNA, 24 nt, Artificial Sequence
  Synthetic
uagggucuuaggaagaugacaagu

SEQ ID NO: 388456 - RNA, 18 nt, Artificial Sequence
  Synthetic
gggagaauggaaccaagu

SEQ ID NO: 388457 - RNA, 19 nt, Artificial Sequence
  Synthetic
ggggagaauggaaccaagu

SEQ ID NO: 388458 - RNA, 20 nt, Artificial Sequence
  Synthetic
uggggagaauggaaccaagu

SEQ ID NO: 388459 - RNA, 21 nt, Artificial Sequence
  Synthetic
auggggagaauggaaccaagu

SEQ ID NO: 388460 - RNA, 22 nt, Artificial Sequence
  Synthetic
gauggggagaauggaaccaagu

SEQ ID NO: 388461 - RNA, 23 nt, Artificial Sequence
  Synthetic
ugauggggagaauggaaccaagu

SEQ ID NO: 388462 - RNA, 24 nt, Artificial Sequence
  Synthetic
gugauggggagaauggaaccaagu

SEQ ID NO: 388463 - RNA, 18 nt, Artificial Sequence
  Synthetic
agggaagguugaccaagu

SEQ ID NO: 388464 - RNA, 19 nt, Artificial Sequence
  Synthetic
uagggaagguugaccaagu

SEQ ID NO: 388465 - RNA, 20 nt, Artificial Sequence
  Synthetic
guagggaagguugaccaagu

SEQ ID NO: 388466 - RNA, 21 nt, Artificial Sequence
  Synthetic
aguagggaagguugaccaagu

SEQ ID NO: 388467 - RNA, 22 nt, Artificial Sequence
  Synthetic
aaguagggaagguugaccaagu

SEQ ID NO: 388468 - RNA, 23 nt, Artificial Sequence
  Synthetic
gaaguagggaagguugaccaagu

SEQ ID NO: 388469 - RNA, 24 nt, Artificial Sequence
  Synthetic
agaaguagggaagguugaccaagu

SEQ ID NO: 388470 - RNA, 18 nt, Artificial Sequence
  Synthetic
auggcguuagccccaagu

SEQ ID NO: 388471 - RNA, 19 nt, Artificial Sequence
  Synthetic
aauggcguuagccccaagu

SEQ ID NO: 388472 - RNA, 20 nt, Artificial Sequence
  Synthetic
aaauggcguuagccccaagu

SEQ ID NO: 388473 - RNA, 21 nt, Artificial Sequence
  Synthetic
aaaauggcguuagccccaagu

SEQ ID NO: 388474 - RNA, 22 nt, Artificial Sequence
  Synthetic
uaaaauggcguuagccccaagu

SEQ ID NO: 388475 - RNA, 23 nt, Artificial Sequence
  Synthetic
cuaaaauggcguuagccccaagu

SEQ ID NO: 388476 - RNA, 24 nt, Artificial Sequence
  Synthetic
ccuaaaauggcguuagccccaagu

SEQ ID NO: 388477 - RNA, 18 nt, Artificial Sequence
  Synthetic
gauacauguagcccaagu

SEQ ID NO: 388478 - RNA, 19 nt, Artificial Sequence
  Synthetic
ugauacauguagcccaagu

SEQ ID NO: 388479 - RNA, 20 nt, Artificial Sequence
  Synthetic
gugauacauguagcccaagu

SEQ ID NO: 388480 - RNA, 21 nt, Artificial Sequence
  Synthetic
ugugauacauguagcccaagu

SEQ ID NO: 388481 - RNA, 22 nt, Artificial Sequence
  Synthetic
cugugauacauguagcccaagu

SEQ ID NO: 388482 - RNA, 23 nt, Artificial Sequence
  Synthetic
gcugugauacauguagcccaagu

SEQ ID NO: 388483 - RNA, 24 nt, Artificial Sequence
  Synthetic
ugcugugauacauguagcccaagu

SEQ ID NO: 388484 - RNA, 18 nt, Artificial Sequence
  Synthetic
ccuuugaaaaauccaagu

SEQ ID NO: 388485 - RNA, 19 nt, Artificial Sequence
  Synthetic
accuuugaaaaauccaagu

SEQ ID NO: 388486 - RNA, 20 nt, Artificial Sequence
  Synthetic
uaccuuugaaaaauccaagu

SEQ ID NO: 388487 - RNA, 21 nt, Artificial Sequence
  Synthetic
auaccuuugaaaaauccaagu

SEQ ID NO: 388488 - RNA, 22 nt, Artificial Sequence
  Synthetic
gauaccuuugaaaaauccaagu

SEQ ID NO: 388489 - RNA, 23 nt, Artificial Sequence
  Synthetic
agauaccuuugaaaaauccaagu

SEQ ID NO: 388490 - RNA, 24 nt, Artificial Sequence
  Synthetic
gagauaccuuugaaaaauccaagu

SEQ ID NO: 388491 - RNA, 18 nt, Artificial Sequence
  Synthetic
uaaagaaaaacuccaagu

SEQ ID NO: 388492 - RNA, 19 nt, Artificial Sequence
  Synthetic
uuaaagaaaaacuccaagu

SEQ ID NO: 388493 - RNA, 20 nt, Artificial Sequence
  Synthetic
uuuaaagaaaaacuccaagu

SEQ ID NO: 388494 - RNA, 21 nt, Artificial Sequence
  Synthetic
auuuaaagaaaaacuccaagu

SEQ ID NO: 388495 - RNA, 22 nt, Artificial Sequence
  Synthetic
gauuuaaagaaaaacuccaagu

SEQ ID NO: 388496 - RNA, 23 nt, Artificial Sequence
  Synthetic
agauuuaaagaaaaacuccaagu

SEQ ID NO: 388497 - RNA, 24 nt, Artificial Sequence
  Synthetic
cagauuuaaagaaaaacuccaagu

SEQ ID NO: 388498 - RNA, 18 nt, Artificial Sequence
  Synthetic
uuggaguuuucagcaagu

SEQ ID NO: 388499 - RNA, 19 nt, Artificial Sequence
  Synthetic
cuuggaguuuucagcaagu

SEQ ID NO: 388500 - RNA, 20 nt, Artificial Sequence
  Synthetic
ucuuggaguuuucagcaagu

SEQ ID NO: 388501 - RNA, 21 nt, Artificial Sequence
  Synthetic
uucuuggaguuuucagcaagu

SEQ ID NO: 388502 - RNA, 22 nt, Artificial Sequence
  Synthetic
uuucuuggaguuuucagcaagu

SEQ ID NO: 388503 - RNA, 23 nt, Artificial Sequence
  Synthetic
auuucuuggaguuuucagcaagu

SEQ ID NO: 388504 - RNA, 24 nt, Artificial Sequence
  Synthetic
uauuucuuggaguuuucagcaagu

SEQ ID NO: 388505 - RNA, 18 nt, Artificial Sequence
  Synthetic
aguauuuucugagcaagu

SEQ ID NO: 388506 - RNA, 19 nt, Artificial Sequence
  Synthetic
caguauuuucugagcaagu

SEQ ID NO: 388507 - RNA, 20 nt, Artificial Sequence
  Synthetic
ucaguauuuucugagcaagu

SEQ ID NO: 388508 - RNA, 21 nt, Artificial Sequence
  Synthetic
aucaguauuuucugagcaagu

SEQ ID NO: 388509 - RNA, 22 nt, Artificial Sequence
  Synthetic
caucaguauuuucugagcaagu

SEQ ID NO: 388510 - RNA, 23 nt, Artificial Sequence
  Synthetic
acaucaguauuuucugagcaagu

SEQ ID NO: 388511 - RNA, 24 nt, Artificial Sequence
  Synthetic
aacaucaguauuuucugagcaagu

SEQ ID NO: 388512 - RNA, 18 nt, Artificial Sequence
  Synthetic
agugaugagauagcaagu

SEQ ID NO: 388513 - RNA, 19 nt, Artificial Sequence
  Synthetic
aagugaugagauagcaagu

SEQ ID NO: 388514 - RNA, 20 nt, Artificial Sequence
  Synthetic
caagugaugagauagcaagu

SEQ ID NO: 388515 - RNA, 21 nt, Artificial Sequence
  Synthetic
ucaagugaugagauagcaagu

SEQ ID NO: 388516 - RNA, 22 nt, Artificial Sequence
  Synthetic
uucaagugaugagauagcaagu

SEQ ID NO: 388517 - RNA, 23 nt, Artificial Sequence
  Synthetic
uuucaagugaugagauagcaagu

SEQ ID NO: 388518 - RNA, 24 nt, Artificial Sequence
  Synthetic
guuucaagugaugagauagcaagu

SEQ ID NO: 388519 - RNA, 18 nt, Artificial Sequence
  Synthetic
gagguagaauaggcaagu

SEQ ID NO: 388520 - RNA, 19 nt, Artificial Sequence
  Synthetic
ugagguagaauaggcaagu

SEQ ID NO: 388521 - RNA, 20 nt, Artificial Sequence
  Synthetic
gugagguagaauaggcaagu

SEQ ID NO: 388522 - RNA, 21 nt, Artificial Sequence
  Synthetic
agugagguagaauaggcaagu

SEQ ID NO: 388523 - RNA, 22 nt, Artificial Sequence
  Synthetic
gagugagguagaauaggcaagu

SEQ ID NO: 388524 - RNA, 23 nt, Artificial Sequence
  Synthetic
ugagugagguagaauaggcaagu

SEQ ID NO: 388525 - RNA, 24 nt, Artificial Sequence
  Synthetic
augagugagguagaauaggcaagu

SEQ ID NO: 388526 - RNA, 18 nt, Artificial Sequence
  Synthetic
uaaaugucugcaucaagu

SEQ ID NO: 388527 - RNA, 19 nt, Artificial Sequence
  Synthetic
guaaaugucugcaucaagu

SEQ ID NO: 388528 - RNA, 20 nt, Artificial Sequence
  Synthetic
uguaaaugucugcaucaagu

SEQ ID NO: 388529 - RNA, 21 nt, Artificial Sequence
  Synthetic
uuguaaaugucugcaucaagu

SEQ ID NO: 388530 - RNA, 22 nt, Artificial Sequence
  Synthetic
auuguaaaugucugcaucaagu

SEQ ID NO: 388531 - RNA, 23 nt, Artificial Sequence
  Synthetic
uauuguaaaugucugcaucaagu

SEQ ID NO: 388532 - RNA, 24 nt, Artificial Sequence
  Synthetic
cuauuguaaaugucugcaucaagu

SEQ ID NO: 388533 - RNA, 18 nt, Artificial Sequence
  Synthetic
ucucaagcccacucaagu

SEQ ID NO: 388534 - RNA, 19 nt, Artificial Sequence
  Synthetic
uucucaagcccacucaagu

SEQ ID NO: 388535 - RNA, 20 nt, Artificial Sequence
  Synthetic
auucucaagcccacucaagu

SEQ ID NO: 388536 - RNA, 21 nt, Artificial Sequence
  Synthetic
gauucucaagcccacucaagu

SEQ ID NO: 388537 - RNA, 22 nt, Artificial Sequence
  Synthetic
ugauucucaagcccacucaagu

SEQ ID NO: 388538 - RNA, 23 nt, Artificial Sequence
  Synthetic
gugauucucaagcccacucaagu

SEQ ID NO: 388539 - RNA, 24 nt, Artificial Sequence
  Synthetic
ggugauucucaagcccacucaagu

SEQ ID NO: 388540 - RNA, 18 nt, Artificial Sequence
  Synthetic
uggcagggugacucaagu

SEQ ID NO: 388541 - RNA, 19 nt, Artificial Sequence
  Synthetic
guggcagggugacucaagu

SEQ ID NO: 388542 - RNA, 20 nt, Artificial Sequence
  Synthetic
aguggcagggugacucaagu

SEQ ID NO: 388543 - RNA, 21 nt, Artificial Sequence
  Synthetic
uaguggcagggugacucaagu

SEQ ID NO: 388544 - RNA, 22 nt, Artificial Sequence
  Synthetic
cuaguggcagggugacucaagu

SEQ ID NO: 388545 - RNA, 23 nt, Artificial Sequence
  Synthetic
acuaguggcagggugacucaagu

SEQ ID NO: 388546 - RNA, 24 nt, Artificial Sequence
  Synthetic
aacuaguggcagggugacucaagu

SEQ ID NO: 388547 - RNA, 18 nt, Artificial Sequence
  Synthetic
ugagcccuaaccucaagu

SEQ ID NO: 388548 - RNA, 19 nt, Artificial Sequence
  Synthetic
cugagcccuaaccucaagu

SEQ ID NO: 388549 - RNA, 20 nt, Artificial Sequence
  Synthetic
gcugagcccuaaccucaagu

SEQ ID NO: 388550 - RNA, 21 nt, Artificial Sequence
  Synthetic
cgcugagcccuaaccucaagu

SEQ ID NO: 388551 - RNA, 22 nt, Artificial Sequence
  Synthetic
gcgcugagcccuaaccucaagu

SEQ ID NO: 388552 - RNA, 23 nt, Artificial Sequence
  Synthetic
ggcgcugagcccuaaccucaagu

SEQ ID NO: 388553 - RNA, 24 nt, Artificial Sequence
  Synthetic
gggcgcugagcccuaaccucaagu

SEQ ID NO: 388554 - RNA, 18 nt, Artificial Sequence
  Synthetic
uucacauugaagucaagu

SEQ ID NO: 388555 - RNA, 19 nt, Artificial Sequence
  Synthetic
guucacauugaagucaagu

SEQ ID NO: 388556 - RNA, 20 nt, Artificial Sequence
  Synthetic
aguucacauugaagucaagu

SEQ ID NO: 388557 - RNA, 21 nt, Artificial Sequence
  Synthetic
uaguucacauugaagucaagu

SEQ ID NO: 388558 - RNA, 22 nt, Artificial Sequence
  Synthetic
guaguucacauugaagucaagu

SEQ ID NO: 388559 - RNA, 23 nt, Artificial Sequence
  Synthetic
uguaguucacauugaagucaagu

SEQ ID NO: 388560 - RNA, 24 nt, Artificial Sequence
  Synthetic
auguaguucacauugaagucaagu

SEQ ID NO: 388561 - RNA, 18 nt, Artificial Sequence
  Synthetic
gaguuagacaggucaagu

SEQ ID NO: 388562 - RNA, 19 nt, Artificial Sequence
  Synthetic
ggaguuagacaggucaagu

SEQ ID NO: 388563 - RNA, 20 nt, Artificial Sequence
  Synthetic
aggaguuagacaggucaagu

SEQ ID NO: 388564 - RNA, 21 nt, Artificial Sequence
  Synthetic
caggaguuagacaggucaagu

SEQ ID NO: 388565 - RNA, 22 nt, Artificial Sequence
  Synthetic
gcaggaguuagacaggucaagu

SEQ ID NO: 388566 - RNA, 23 nt, Artificial Sequence
  Synthetic
agcaggaguuagacaggucaagu

SEQ ID NO: 388567 - RNA, 24 nt, Artificial Sequence
  Synthetic
aagcaggaguuagacaggucaagu

SEQ ID NO: 388568 - RNA, 18 nt, Artificial Sequence
  Synthetic
gacaacccuuguucaagu

SEQ ID NO: 388569 - RNA, 19 nt, Artificial Sequence
  Synthetic
agacaacccuuguucaagu

SEQ ID NO: 388570 - RNA, 20 nt, Artificial Sequence
  Synthetic
gagacaacccuuguucaagu

SEQ ID NO: 388571 - RNA, 21 nt, Artificial Sequence
  Synthetic
agagacaacccuuguucaagu

SEQ ID NO: 388572 - RNA, 22 nt, Artificial Sequence
  Synthetic
uagagacaacccuuguucaagu

SEQ ID NO: 388573 - RNA, 23 nt, Artificial Sequence
  Synthetic
auagagacaacccuuguucaagu

SEQ ID NO: 388574 - RNA, 24 nt, Artificial Sequence
  Synthetic
aauagagacaacccuuguucaagu

SEQ ID NO: 388575 - RNA, 18 nt, Artificial Sequence
  Synthetic
uuuugugucauuucaagu

SEQ ID NO: 388576 - RNA, 19 nt, Artificial Sequence
  Synthetic
uuuuugugucauuucaagu

SEQ ID NO: 388577 - RNA, 20 nt, Artificial Sequence
  Synthetic
auuuuugugucauuucaagu

SEQ ID NO: 388578 - RNA, 21 nt, Artificial Sequence
  Synthetic
gauuuuugugucauuucaagu

SEQ ID NO: 388579 - RNA, 22 nt, Artificial Sequence
  Synthetic
agauuuuugugucauuucaagu

SEQ ID NO: 388580 - RNA, 23 nt, Artificial Sequence
  Synthetic
gagauuuuugugucauuucaagu

SEQ ID NO: 388581 - RNA, 24 nt, Artificial Sequence
  Synthetic
ugagauuuuugugucauuucaagu

SEQ ID NO: 388582 - RNA, 18 nt, Artificial Sequence
  Synthetic
gugggauguauuucaagu

SEQ ID NO: 388583 - RNA, 19 nt, Artificial Sequence
  Synthetic
ggugggauguauuucaagu

SEQ ID NO: 388584 - RNA, 20 nt, Artificial Sequence
  Synthetic
aggugggauguauuucaagu

SEQ ID NO: 388585 - RNA, 21 nt, Artificial Sequence
  Synthetic
aaggugggauguauuucaagu

SEQ ID NO: 388586 - RNA, 22 nt, Artificial Sequence
  Synthetic
aaaggugggauguauuucaagu

SEQ ID NO: 388587 - RNA, 23 nt, Artificial Sequence
  Synthetic
gaaaggugggauguauuucaagu

SEQ ID NO: 388588 - RNA, 24 nt, Artificial Sequence
  Synthetic
ggaaaggugggauguauuucaagu

SEQ ID NO: 388589 - RNA, 18 nt, Artificial Sequence
  Synthetic
aacauucaaaaaagaagu

SEQ ID NO: 388590 - RNA, 19 nt, Artificial Sequence
  Synthetic
gaacauucaaaaaagaagu

SEQ ID NO: 388591 - RNA, 20 nt, Artificial Sequence
  Synthetic
agaacauucaaaaaagaagu

SEQ ID NO: 388592 - RNA, 21 nt, Artificial Sequence
  Synthetic
uagaacauucaaaaaagaagu

SEQ ID NO: 388593 - RNA, 22 nt, Artificial Sequence
  Synthetic
guagaacauucaaaaaagaagu

SEQ ID NO: 388594 - RNA, 23 nt, Artificial Sequence
  Synthetic
aguagaacauucaaaaaagaagu

SEQ ID NO: 388595 - RNA, 24 nt, Artificial Sequence
  Synthetic
uaguagaacauucaaaaaagaagu

SEQ ID NO: 388596 - RNA, 18 nt, Artificial Sequence
  Synthetic
uuaacgugagaaagaagu

SEQ ID NO: 388597 - RNA, 19 nt, Artificial Sequence
  Synthetic
uuuaacgugagaaagaagu

SEQ ID NO: 388598 - RNA, 20 nt, Artificial Sequence
  Synthetic
cuuuaacgugagaaagaagu

SEQ ID NO: 388599 - RNA, 21 nt, Artificial Sequence
  Synthetic
ccuuuaacgugagaaagaagu

SEQ ID NO: 388600 - RNA, 22 nt, Artificial Sequence
  Synthetic
cccuuuaacgugagaaagaagu

SEQ ID NO: 388601 - RNA, 23 nt, Artificial Sequence
  Synthetic
ccccuuuaacgugagaaagaagu

SEQ ID NO: 388602 - RNA, 24 nt, Artificial Sequence
  Synthetic
gccccuuuaacgugagaaagaagu

SEQ ID NO: 388603 - RNA, 18 nt, Artificial Sequence
  Synthetic
aaggcaggcuaaagaagu

SEQ ID NO: 388604 - RNA, 19 nt, Artificial Sequence
  Synthetic
aaaggcaggcuaaagaagu

SEQ ID NO: 388605 - RNA, 20 nt, Artificial Sequence
  Synthetic
uaaaggcaggcuaaagaagu

SEQ ID NO: 388606 - RNA, 21 nt, Artificial Sequence
  Synthetic
auaaaggcaggcuaaagaagu

SEQ ID NO: 388607 - RNA, 22 nt, Artificial Sequence
  Synthetic
gauaaaggcaggcuaaagaagu

SEQ ID NO: 388608 - RNA, 23 nt, Artificial Sequence
  Synthetic
agauaaaggcaggcuaaagaagu

SEQ ID NO: 388609 - RNA, 24 nt, Artificial Sequence
  Synthetic
uagauaaaggcaggcuaaagaagu

SEQ ID NO: 388610 - RNA, 18 nt, Artificial Sequence
  Synthetic
cgcagagaggcaagaagu

SEQ ID NO: 388611 - RNA, 19 nt, Artificial Sequence
  Synthetic
ccgcagagaggcaagaagu

SEQ ID NO: 388612 - RNA, 20 nt, Artificial Sequence
  Synthetic
cccgcagagaggcaagaagu

SEQ ID NO: 388613 - RNA, 21 nt, Artificial Sequence
  Synthetic
ccccgcagagaggcaagaagu

SEQ ID NO: 388614 - RNA, 22 nt, Artificial Sequence
  Synthetic
uccccgcagagaggcaagaagu

SEQ ID NO: 388615 - RNA, 23 nt, Artificial Sequence
  Synthetic
guccccgcagagaggcaagaagu

SEQ ID NO: 388616 - RNA, 24 nt, Artificial Sequence
  Synthetic
gguccccgcagagaggcaagaagu

SEQ ID NO: 388617 - RNA, 18 nt, Artificial Sequence
  Synthetic
uuucaacaaugaagaagu

SEQ ID NO: 388618 - RNA, 19 nt, Artificial Sequence
  Synthetic
auuucaacaaugaagaagu

SEQ ID NO: 388619 - RNA, 20 nt, Artificial Sequence
  Synthetic
aauuucaacaaugaagaagu

SEQ ID NO: 388620 - RNA, 21 nt, Artificial Sequence
  Synthetic
caauuucaacaaugaagaagu

SEQ ID NO: 388621 - RNA, 22 nt, Artificial Sequence
  Synthetic
gcaauuucaacaaugaagaagu

SEQ ID NO: 388622 - RNA, 23 nt, Artificial Sequence
  Synthetic
ggcaauuucaacaaugaagaagu

SEQ ID NO: 388623 - RNA, 24 nt, Artificial Sequence
  Synthetic
aggcaauuucaacaaugaagaagu

SEQ ID NO: 388624 - RNA, 18 nt, Artificial Sequence
  Synthetic
ucguguuagcccagaagu

SEQ ID NO: 388625 - RNA, 19 nt, Artificial Sequence
  Synthetic
aucguguuagcccagaagu

SEQ ID NO: 388626 - RNA, 20 nt, Artificial Sequence
  Synthetic
gaucguguuagcccagaagu

SEQ ID NO: 388627 - RNA, 21 nt, Artificial Sequence
  Synthetic
ggaucguguuagcccagaagu

SEQ ID NO: 388628 - RNA, 22 nt, Artificial Sequence
  Synthetic
aggaucguguuagcccagaagu

SEQ ID NO: 388629 - RNA, 23 nt, Artificial Sequence
  Synthetic
gaggaucguguuagcccagaagu

SEQ ID NO: 388630 - RNA, 24 nt, Artificial Sequence
  Synthetic
ggaggaucguguuagcccagaagu

SEQ ID NO: 388631 - RNA, 18 nt, Artificial Sequence
  Synthetic
gaucuagccuccagaagu

SEQ ID NO: 388632 - RNA, 19 nt, Artificial Sequence
  Synthetic
ggaucuagccuccagaagu

SEQ ID NO: 388633 - RNA, 20 nt, Artificial Sequence
  Synthetic
uggaucuagccuccagaagu

SEQ ID NO: 388634 - RNA, 21 nt, Artificial Sequence
  Synthetic
uuggaucuagccuccagaagu

SEQ ID NO: 388635 - RNA, 22 nt, Artificial Sequence
  Synthetic
uuuggaucuagccuccagaagu

SEQ ID NO: 388636 - RNA, 23 nt, Artificial Sequence
  Synthetic
uuuuggaucuagccuccagaagu

SEQ ID NO: 388637 - RNA, 24 nt, Artificial Sequence
  Synthetic
auuuuggaucuagccuccagaagu

SEQ ID NO: 388638 - RNA, 18 nt, Artificial Sequence
  Synthetic
auucuuggaagcagaagu

SEQ ID NO: 388639 - RNA, 19 nt, Artificial Sequence
  Synthetic
uauucuuggaagcagaagu

SEQ ID NO: 388640 - RNA, 20 nt, Artificial Sequence
  Synthetic
auauucuuggaagcagaagu

SEQ ID NO: 388641 - RNA, 21 nt, Artificial Sequence
  Synthetic
uauauucuuggaagcagaagu

SEQ ID NO: 388642 - RNA, 22 nt, Artificial Sequence
  Synthetic
uuauauucuuggaagcagaagu

SEQ ID NO: 388643 - RNA, 23 nt, Artificial Sequence
  Synthetic
cuuauauucuuggaagcagaagu

SEQ ID NO: 388644 - RNA, 24 nt, Artificial Sequence
  Synthetic
gcuuauauucuuggaagcagaagu

SEQ ID NO: 388645 - RNA, 18 nt, Artificial Sequence
  Synthetic
agggagaacaucagaagu

SEQ ID NO: 388646 - RNA, 19 nt, Artificial Sequence
  Synthetic
gagggagaacaucagaagu

SEQ ID NO: 388647 - RNA, 20 nt, Artificial Sequence
  Synthetic
agagggagaacaucagaagu

SEQ ID NO: 388648 - RNA, 21 nt, Artificial Sequence
  Synthetic
uagagggagaacaucagaagu

SEQ ID NO: 388649 - RNA, 22 nt, Artificial Sequence
  Synthetic
auagagggagaacaucagaagu

SEQ ID NO: 388650 - RNA, 23 nt, Artificial Sequence
  Synthetic
uauagagggagaacaucagaagu

SEQ ID NO: 388651 - RNA, 24 nt, Artificial Sequence
  Synthetic
uuauagagggagaacaucagaagu

SEQ ID NO: 388652 - RNA, 18 nt, Artificial Sequence
  Synthetic
agagaggagaagagaagu

SEQ ID NO: 388653 - RNA, 19 nt, Artificial Sequence
  Synthetic
gagagaggagaagagaagu

SEQ ID NO: 388654 - RNA, 20 nt, Artificial Sequence
  Synthetic
agagagaggagaagagaagu

SEQ ID NO: 388655 - RNA, 21 nt, Artificial Sequence
  Synthetic
cagagagaggagaagagaagu

SEQ ID NO: 388656 - RNA, 22 nt, Artificial Sequence
  Synthetic
acagagagaggagaagagaagu

SEQ ID NO: 388657 - RNA, 23 nt, Artificial Sequence
  Synthetic
gacagagagaggagaagagaagu

SEQ ID NO: 388658 - RNA, 24 nt, Artificial Sequence
  Synthetic
agacagagagaggagaagagaagu

SEQ ID NO: 388659 - RNA, 18 nt, Artificial Sequence
  Synthetic
uucuccuuaacgagaagu

SEQ ID NO: 388660 - RNA, 19 nt, Artificial Sequence
  Synthetic
cuucuccuuaacgagaagu

SEQ ID NO: 388661 - RNA, 20 nt, Artificial Sequence
  Synthetic
ucuucuccuuaacgagaagu

SEQ ID NO: 388662 - RNA, 21 nt, Artificial Sequence
  Synthetic
cucuucuccuuaacgagaagu

SEQ ID NO: 388663 - RNA, 22 nt, Artificial Sequence
  Synthetic
ucucuucuccuuaacgagaagu

SEQ ID NO: 388664 - RNA, 23 nt, Artificial Sequence
  Synthetic
cucucuucuccuuaacgagaagu

SEQ ID NO: 388665 - RNA, 24 nt, Artificial Sequence
  Synthetic
gcucucuucuccuuaacgagaagu

SEQ ID NO: 388666 - RNA, 18 nt, Artificial Sequence
  Synthetic
aaaauggaaaugagaagu

SEQ ID NO: 388667 - RNA, 19 nt, Artificial Sequence
  Synthetic
uaaaauggaaaugagaagu

SEQ ID NO: 388668 - RNA, 20 nt, Artificial Sequence
  Synthetic
auaaaauggaaaugagaagu

SEQ ID NO: 388669 - RNA, 21 nt, Artificial Sequence
  Synthetic
uauaaaauggaaaugagaagu

SEQ ID NO: 388670 - RNA, 22 nt, Artificial Sequence
  Synthetic
guauaaaauggaaaugagaagu

SEQ ID NO: 388671 - RNA, 23 nt, Artificial Sequence
  Synthetic
aguauaaaauggaaaugagaagu

SEQ ID NO: 388672 - RNA, 24 nt, Artificial Sequence
  Synthetic
caguauaaaauggaaaugagaagu

SEQ ID NO: 388673 - RNA, 18 nt, Artificial Sequence
  Synthetic
gguggugaguugagaagu

SEQ ID NO: 388674 - RNA, 19 nt, Artificial Sequence
  Synthetic
ugguggugaguugagaagu

SEQ ID NO: 388675 - RNA, 20 nt, Artificial Sequence
  Synthetic
augguggugaguugagaagu

SEQ ID NO: 388676 - RNA, 21 nt, Artificial Sequence
  Synthetic
uaugguggugaguugagaagu

SEQ ID NO: 388677 - RNA, 22 nt, Artificial Sequence
  Synthetic
uuaugguggugaguugagaagu

SEQ ID NO: 388678 - RNA, 23 nt, Artificial Sequence
  Synthetic
cuuaugguggugaguugagaagu

SEQ ID NO: 388679 - RNA, 24 nt, Artificial Sequence
  Synthetic
ucuuaugguggugaguugagaagu

SEQ ID NO: 388680 - RNA, 18 nt, Artificial Sequence
  Synthetic
aaucgcuaaaauagaagu

SEQ ID NO: 388681 - RNA, 19 nt, Artificial Sequence
  Synthetic
gaaucgcuaaaauagaagu

SEQ ID NO: 388682 - RNA, 20 nt, Artificial Sequence
  Synthetic
agaaucgcuaaaauagaagu

SEQ ID NO: 388683 - RNA, 21 nt, Artificial Sequence
  Synthetic
cagaaucgcuaaaauagaagu

SEQ ID NO: 388684 - RNA, 22 nt, Artificial Sequence
  Synthetic
ccagaaucgcuaaaauagaagu

SEQ ID NO: 388685 - RNA, 23 nt, Artificial Sequence
  Synthetic
cccagaaucgcuaaaauagaagu

SEQ ID NO: 388686 - RNA, 24 nt, Artificial Sequence
  Synthetic
acccagaaucgcuaaaauagaagu

SEQ ID NO: 388687 - RNA, 18 nt, Artificial Sequence
  Synthetic
guaauuacccauagaagu

SEQ ID NO: 388688 - RNA, 19 nt, Artificial Sequence
  Synthetic
aguaauuacccauagaagu

SEQ ID NO: 388689 - RNA, 20 nt, Artificial Sequence
  Synthetic
uaguaauuacccauagaagu

SEQ ID NO: 388690 - RNA, 21 nt, Artificial Sequence
  Synthetic
auaguaauuacccauagaagu

SEQ ID NO: 388691 - RNA, 22 nt, Artificial Sequence
  Synthetic
cauaguaauuacccauagaagu

SEQ ID NO: 388692 - RNA, 23 nt, Artificial Sequence
  Synthetic
gcauaguaauuacccauagaagu

SEQ ID NO: 388693 - RNA, 24 nt, Artificial Sequence
  Synthetic
agcauaguaauuacccauagaagu

SEQ ID NO: 388694 - RNA, 18 nt, Artificial Sequence
  Synthetic
guucuggaggauagaagu

SEQ ID NO: 388695 - RNA, 19 nt, Artificial Sequence
  Synthetic
aguucuggaggauagaagu

SEQ ID NO: 388696 - RNA, 20 nt, Artificial Sequence
  Synthetic
caguucuggaggauagaagu

SEQ ID NO: 388697 - RNA, 21 nt, Artificial Sequence
  Synthetic
acaguucuggaggauagaagu

SEQ ID NO: 388698 - RNA, 22 nt, Artificial Sequence
  Synthetic
uacaguucuggaggauagaagu

SEQ ID NO: 388699 - RNA, 23 nt, Artificial Sequence
  Synthetic
uuacaguucuggaggauagaagu

SEQ ID NO: 388700 - RNA, 24 nt, Artificial Sequence
  Synthetic
cuuacaguucuggaggauagaagu

SEQ ID NO: 388701 - RNA, 18 nt, Artificial Sequence
  Synthetic
ucauauaaaacuagaagu

SEQ ID NO: 388702 - RNA, 19 nt, Artificial Sequence
  Synthetic
cucauauaaaacuagaagu

SEQ ID NO: 388703 - RNA, 20 nt, Artificial Sequence
  Synthetic
ucucauauaaaacuagaagu

SEQ ID NO: 388704 - RNA, 21 nt, Artificial Sequence
  Synthetic
uucucauauaaaacuagaagu

SEQ ID NO: 388705 - RNA, 22 nt, Artificial Sequence
  Synthetic
uuucucauauaaaacuagaagu

SEQ ID NO: 388706 - RNA, 23 nt, Artificial Sequence
  Synthetic
uuuucucauauaaaacuagaagu

SEQ ID NO: 388707 - RNA, 24 nt, Artificial Sequence
  Synthetic
uuuuucucauauaaaacuagaagu

SEQ ID NO: 388708 - RNA, 18 nt, Artificial Sequence
  Synthetic
uguucaucagcuagaagu

SEQ ID NO: 388709 - RNA, 19 nt, Artificial Sequence
  Synthetic
cuguucaucagcuagaagu

SEQ ID NO: 388710 - RNA, 20 nt, Artificial Sequence
  Synthetic
acuguucaucagcuagaagu

SEQ ID NO: 388711 - RNA, 21 nt, Artificial Sequence
  Synthetic
uacuguucaucagcuagaagu

SEQ ID NO: 388712 - RNA, 22 nt, Artificial Sequence
  Synthetic
uuacuguucaucagcuagaagu

SEQ ID NO: 388713 - RNA, 23 nt, Artificial Sequence
  Synthetic
uuuacuguucaucagcuagaagu

SEQ ID NO: 388714 - RNA, 24 nt, Artificial Sequence
  Synthetic
uuuuacuguucaucagcuagaagu

SEQ ID NO: 388715 - RNA, 18 nt, Artificial Sequence
  Synthetic
aagcagaaaauacgaagu

SEQ ID NO: 388716 - RNA, 19 nt, Artificial Sequence
  Synthetic
uaagcagaaaauacgaagu

SEQ ID NO: 388717 - RNA, 20 nt, Artificial Sequence
  Synthetic
auaagcagaaaauacgaagu

SEQ ID NO: 388718 - RNA, 21 nt, Artificial Sequence
  Synthetic
uauaagcagaaaauacgaagu

SEQ ID NO: 388719 - RNA, 22 nt, Artificial Sequence
  Synthetic
guauaagcagaaaauacgaagu

SEQ ID NO: 388720 - RNA, 23 nt, Artificial Sequence
  Synthetic
gguauaagcagaaaauacgaagu

SEQ ID NO: 388721 - RNA, 24 nt, Artificial Sequence
  Synthetic
agguauaagcagaaaauacgaagu

SEQ ID NO: 388722 - RNA, 18 nt, Artificial Sequence
  Synthetic
agaaaccuucaccgaagu

SEQ ID NO: 388723 - RNA, 19 nt, Artificial Sequence
  Synthetic
uagaaaccuucaccgaagu

SEQ ID NO: 388724 - RNA, 20 nt, Artificial Sequence
  Synthetic
cuagaaaccuucaccgaagu

SEQ ID NO: 388725 - RNA, 21 nt, Artificial Sequence
  Synthetic
gcuagaaaccuucaccgaagu

SEQ ID NO: 388726 - RNA, 22 nt, Artificial Sequence
  Synthetic
agcuagaaaccuucaccgaagu

SEQ ID NO: 388727 - RNA, 23 nt, Artificial Sequence
  Synthetic
cagcuagaaaccuucaccgaagu

SEQ ID NO: 388728 - RNA, 24 nt, Artificial Sequence
  Synthetic
acagcuagaaaccuucaccgaagu

SEQ ID NO: 388729 - RNA, 18 nt, Artificial Sequence
  Synthetic
acuuugggaggccgaagu

SEQ ID NO: 388730 - RNA, 19 nt, Artificial Sequence
  Synthetic
cacuuugggaggccgaagu

SEQ ID NO: 388731 - RNA, 20 nt, Artificial Sequence
  Synthetic
acacuuugggaggccgaagu

SEQ ID NO: 388732 - RNA, 21 nt, Artificial Sequence
  Synthetic
aacacuuugggaggccgaagu

SEQ ID NO: 388733 - RNA, 22 nt, Artificial Sequence
  Synthetic
caacacuuugggaggccgaagu

SEQ ID NO: 388734 - RNA, 23 nt, Artificial Sequence
  Synthetic
ccaacacuuugggaggccgaagu

SEQ ID NO: 388735 - RNA, 24 nt, Artificial Sequence
  Synthetic
cccaacacuuugggaggccgaagu

SEQ ID NO: 388736 - RNA, 18 nt, Artificial Sequence
  Synthetic
agaagcgcccagcgaagu

SEQ ID NO: 388737 - RNA, 19 nt, Artificial Sequence
  Synthetic
gagaagcgcccagcgaagu

SEQ ID NO: 388738 - RNA, 20 nt, Artificial Sequence
  Synthetic
ggagaagcgcccagcgaagu

SEQ ID NO: 388739 - RNA, 21 nt, Artificial Sequence
  Synthetic
aggagaagcgcccagcgaagu

SEQ ID NO: 388740 - RNA, 22 nt, Artificial Sequence
  Synthetic
aaggagaagcgcccagcgaagu

SEQ ID NO: 388741 - RNA, 23 nt, Artificial Sequence
  Synthetic
gaaggagaagcgcccagcgaagu

SEQ ID NO: 388742 - RNA, 24 nt, Artificial Sequence
  Synthetic
ggaaggagaagcgcccagcgaagu

SEQ ID NO: 388743 - RNA, 18 nt, Artificial Sequence
  Synthetic
gcaaagggaaaaggaagu

SEQ ID NO: 388744 - RNA, 19 nt, Artificial Sequence
  Synthetic
agcaaagggaaaaggaagu

SEQ ID NO: 388745 - RNA, 20 nt, Artificial Sequence
  Synthetic
gagcaaagggaaaaggaagu

SEQ ID NO: 388746 - RNA, 21 nt, Artificial Sequence
  Synthetic
agagcaaagggaaaaggaagu

SEQ ID NO: 388747 - RNA, 22 nt, Artificial Sequence
  Synthetic
gagagcaaagggaaaaggaagu

SEQ ID NO: 388748 - RNA, 23 nt, Artificial Sequence
  Synthetic
ugagagcaaagggaaaaggaagu

SEQ ID NO: 388749 - RNA, 24 nt, Artificial Sequence
  Synthetic
cugagagcaaagggaaaaggaagu

SEQ ID NO: 388750 - RNA, 18 nt, Artificial Sequence
  Synthetic
cucagauaagaaggaagu

SEQ ID NO: 388751 - RNA, 19 nt, Artificial Sequence
  Synthetic
acucagauaagaaggaagu

SEQ ID NO: 388752 - RNA, 20 nt, Artificial Sequence
  Synthetic
gacucagauaagaaggaagu

SEQ ID NO: 388753 - RNA, 21 nt, Artificial Sequence
  Synthetic
agacucagauaagaaggaagu

SEQ ID NO: 388754 - RNA, 22 nt, Artificial Sequence
  Synthetic
gagacucagauaagaaggaagu

SEQ ID NO: 388755 - RNA, 23 nt, Artificial Sequence
  Synthetic
ugagacucagauaagaaggaagu

SEQ ID NO: 388756 - RNA, 24 nt, Artificial Sequence
  Synthetic
augagacucagauaagaaggaagu

SEQ ID NO: 388757 - RNA, 18 nt, Artificial Sequence
  Synthetic
auuaaaacauaaggaagu

SEQ ID NO: 388758 - RNA, 19 nt, Artificial Sequence
  Synthetic
gauuaaaacauaaggaagu

SEQ ID NO: 388759 - RNA, 20 nt, Artificial Sequence
  Synthetic
ggauuaaaacauaaggaagu

SEQ ID NO: 388760 - RNA, 21 nt, Artificial Sequence
  Synthetic
aggauuaaaacauaaggaagu

SEQ ID NO: 388761 - RNA, 22 nt, Artificial Sequence
  Synthetic
gaggauuaaaacauaaggaagu

SEQ ID NO: 388762 - RNA, 23 nt, Artificial Sequence
  Synthetic
ugaggauuaaaacauaaggaagu

SEQ ID NO: 388763 - RNA, 24 nt, Artificial Sequence
  Synthetic
augaggauuaaaacauaaggaagu

SEQ ID NO: 388764 - RNA, 18 nt, Artificial Sequence
  Synthetic
uucuguuaaagaggaagu

SEQ ID NO: 388765 - RNA, 19 nt, Artificial Sequence
  Synthetic
uuucuguuaaagaggaagu

SEQ ID NO: 388766 - RNA, 20 nt, Artificial Sequence
  Synthetic
uuuucuguuaaagaggaagu

SEQ ID NO: 388767 - RNA, 21 nt, Artificial Sequence
  Synthetic
cuuuucuguuaaagaggaagu

SEQ ID NO: 388768 - RNA, 22 nt, Artificial Sequence
  Synthetic
gcuuuucuguuaaagaggaagu

SEQ ID NO: 388769 - RNA, 23 nt, Artificial Sequence
  Synthetic
ugcuuuucuguuaaagaggaagu

SEQ ID NO: 388770 - RNA, 24 nt, Artificial Sequence
  Synthetic
augcuuuucuguuaaagaggaagu

SEQ ID NO: 388771 - RNA, 18 nt, Artificial Sequence
  Synthetic
ggaaggaagggaggaagu

SEQ ID NO: 388772 - RNA, 19 nt, Artificial Sequence
  Synthetic
aggaaggaagggaggaagu

SEQ ID NO: 388773 - RNA, 20 nt, Artificial Sequence
  Synthetic
gaggaaggaagggaggaagu

SEQ ID NO: 388774 - RNA, 21 nt, Artificial Sequence
  Synthetic
ggaggaaggaagggaggaagu

SEQ ID NO: 388775 - RNA, 22 nt, Artificial Sequence
  Synthetic
aggaggaaggaagggaggaagu

SEQ ID NO: 388776 - RNA, 23 nt, Artificial Sequence
  Synthetic
gaggaggaaggaagggaggaagu

SEQ ID NO: 388777 - RNA, 24 nt, Artificial Sequence
  Synthetic
ggaggaggaaggaagggaggaagu

SEQ ID NO: 388778 - RNA, 18 nt, Artificial Sequence
  Synthetic
uugguagaauuaggaagu

SEQ ID NO: 388779 - RNA, 19 nt, Artificial Sequence
  Synthetic
cuugguagaauuaggaagu

SEQ ID NO: 388780 - RNA, 20 nt, Artificial Sequence
  Synthetic
gcuugguagaauuaggaagu

SEQ ID NO: 388781 - RNA, 21 nt, Artificial Sequence
  Synthetic
agcuugguagaauuaggaagu

SEQ ID NO: 388782 - RNA, 22 nt, Artificial Sequence
  Synthetic
gagcuugguagaauuaggaagu

SEQ ID NO: 388783 - RNA, 23 nt, Artificial Sequence
  Synthetic
ugagcuugguagaauuaggaagu

SEQ ID NO: 388784 - RNA, 24 nt, Artificial Sequence
  Synthetic
cugagcuugguagaauuaggaagu

SEQ ID NO: 388785 - RNA, 18 nt, Artificial Sequence
  Synthetic
auccccugucucggaagu

SEQ ID NO: 388786 - RNA, 19 nt, Artificial Sequence
  Synthetic
uauccccugucucggaagu

SEQ ID NO: 388787 - RNA, 20 nt, Artificial Sequence
  Synthetic
auauccccugucucggaagu

SEQ ID NO: 388788 - RNA, 21 nt, Artificial Sequence
  Synthetic
uauauccccugucucggaagu

SEQ ID NO: 388789 - RNA, 22 nt, Artificial Sequence
  Synthetic
auauauccccugucucggaagu

SEQ ID NO: 388790 - RNA, 23 nt, Artificial Sequence
  Synthetic
uauauauccccugucucggaagu

SEQ ID NO: 388791 - RNA, 24 nt, Artificial Sequence
  Synthetic
auauauauccccugucucggaagu

SEQ ID NO: 388792 - RNA, 18 nt, Artificial Sequence
  Synthetic
ccaaagaaugggggaagu

SEQ ID NO: 388793 - RNA, 19 nt, Artificial Sequence
  Synthetic
accaaagaaugggggaagu

SEQ ID NO: 388794 - RNA, 20 nt, Artificial Sequence
  Synthetic
caccaaagaaugggggaagu

SEQ ID NO: 388795 - RNA, 21 nt, Artificial Sequence
  Synthetic
ucaccaaagaaugggggaagu

SEQ ID NO: 388796 - RNA, 22 nt, Artificial Sequence
  Synthetic
gucaccaaagaaugggggaagu

SEQ ID NO: 388797 - RNA, 23 nt, Artificial Sequence
  Synthetic
ggucaccaaagaaugggggaagu

SEQ ID NO: 388798 - RNA, 24 nt, Artificial Sequence
  Synthetic
uggucaccaaagaaugggggaagu

SEQ ID NO: 388799 - RNA, 18 nt, Artificial Sequence
  Synthetic
cauauaguaaugggaagu

SEQ ID NO: 388800 - RNA, 19 nt, Artificial Sequence
  Synthetic
ucauauaguaaugggaagu

SEQ ID NO: 388801 - RNA, 20 nt, Artificial Sequence
  Synthetic
cucauauaguaaugggaagu

SEQ ID NO: 388802 - RNA, 21 nt, Artificial Sequence
  Synthetic
gcucauauaguaaugggaagu

SEQ ID NO: 388803 - RNA, 22 nt, Artificial Sequence
  Synthetic
agcucauauaguaaugggaagu

SEQ ID NO: 388804 - RNA, 23 nt, Artificial Sequence
  Synthetic
gagcucauauaguaaugggaagu

SEQ ID NO: 388805 - RNA, 24 nt, Artificial Sequence
  Synthetic
ggagcucauauaguaaugggaagu

SEQ ID NO: 388806 - RNA, 18 nt, Artificial Sequence
  Synthetic
agagacaucacuggaagu

SEQ ID NO: 388807 - RNA, 19 nt, Artificial Sequence
  Synthetic
aagagacaucacuggaagu

SEQ ID NO: 388808 - RNA, 20 nt, Artificial Sequence
  Synthetic
aaagagacaucacuggaagu

SEQ ID NO: 388809 - RNA, 21 nt, Artificial Sequence
  Synthetic
uaaagagacaucacuggaagu

SEQ ID NO: 388810 - RNA, 22 nt, Artificial Sequence
  Synthetic
guaaagagacaucacuggaagu

SEQ ID NO: 388811 - RNA, 23 nt, Artificial Sequence
  Synthetic
aguaaagagacaucacuggaagu

SEQ ID NO: 388812 - RNA, 24 nt, Artificial Sequence
  Synthetic
gaguaaagagacaucacuggaagu

SEQ ID NO: 388813 - RNA, 18 nt, Artificial Sequence
  Synthetic
gcauaaaggccuggaagu

SEQ ID NO: 388814 - RNA, 19 nt, Artificial Sequence
  Synthetic
ugcauaaaggccuggaagu

SEQ ID NO: 388815 - RNA, 20 nt, Artificial Sequence
  Synthetic
augcauaaaggccuggaagu

SEQ ID NO: 388816 - RNA, 21 nt, Artificial Sequence
  Synthetic
uaugcauaaaggccuggaagu

SEQ ID NO: 388817 - RNA, 22 nt, Artificial Sequence
  Synthetic
cuaugcauaaaggccuggaagu

SEQ ID NO: 388818 - RNA, 23 nt, Artificial Sequence
  Synthetic
acuaugcauaaaggccuggaagu

SEQ ID NO: 388819 - RNA, 24 nt, Artificial Sequence
  Synthetic
uacuaugcauaaaggccuggaagu

SEQ ID NO: 388820 - RNA, 18 nt, Artificial Sequence
  Synthetic
agcuaucaagcuggaagu

SEQ ID NO: 388821 - RNA, 19 nt, Artificial Sequence
  Synthetic
cagcuaucaagcuggaagu

SEQ ID NO: 388822 - RNA, 20 nt, Artificial Sequence
  Synthetic
ccagcuaucaagcuggaagu

SEQ ID NO: 388823 - RNA, 21 nt, Artificial Sequence
  Synthetic
accagcuaucaagcuggaagu

SEQ ID NO: 388824 - RNA, 22 nt, Artificial Sequence
  Synthetic
uaccagcuaucaagcuggaagu

SEQ ID NO: 388825 - RNA, 23 nt, Artificial Sequence
  Synthetic
auaccagcuaucaagcuggaagu

SEQ ID NO: 388826 - RNA, 24 nt, Artificial Sequence
  Synthetic
cauaccagcuaucaagcuggaagu

SEQ ID NO: 388827 - RNA, 18 nt, Artificial Sequence
  Synthetic
gucuugauaaguggaagu

SEQ ID NO: 388828 - RNA, 19 nt, Artificial Sequence
  Synthetic
cgucuugauaaguggaagu

SEQ ID NO: 388829 - RNA, 20 nt, Artificial Sequence
  Synthetic
ucgucuugauaaguggaagu

SEQ ID NO: 388830 - RNA, 21 nt, Artificial Sequence
  Synthetic
uucgucuugauaaguggaagu

SEQ ID NO: 388831 - RNA, 22 nt, Artificial Sequence
  Synthetic
auucgucuugauaaguggaagu

SEQ ID NO: 388832 - RNA, 23 nt, Artificial Sequence
  Synthetic
aauucgucuugauaaguggaagu

SEQ ID NO: 388833 - RNA, 24 nt, Artificial Sequence
  Synthetic
gaauucgucuugauaaguggaagu

SEQ ID NO: 388834 - RNA, 18 nt, Artificial Sequence
  Synthetic
guuggaagcaaaugaagu

SEQ ID NO: 388835 - RNA, 19 nt, Artificial Sequence
  Synthetic
uguuggaagcaaaugaagu

SEQ ID NO: 388836 - RNA, 20 nt, Artificial Sequence
  Synthetic
auguuggaagcaaaugaagu

SEQ ID NO: 388837 - RNA, 21 nt, Artificial Sequence
  Synthetic
uauguuggaagcaaaugaagu

SEQ ID NO: 388838 - RNA, 22 nt, Artificial Sequence
  Synthetic
cuauguuggaagcaaaugaagu

SEQ ID NO: 388839 - RNA, 23 nt, Artificial Sequence
  Synthetic
ucuauguuggaagcaaaugaagu

SEQ ID NO: 388840 - RNA, 24 nt, Artificial Sequence
  Synthetic
gucuauguuggaagcaaaugaagu

SEQ ID NO: 388841 - RNA, 18 nt, Artificial Sequence
  Synthetic
uccagcuggaaaugaagu

SEQ ID NO: 388842 - RNA, 19 nt, Artificial Sequence
  Synthetic
guccagcuggaaaugaagu

SEQ ID NO: 388843 - RNA, 20 nt, Artificial Sequence
  Synthetic
uguccagcuggaaaugaagu

SEQ ID NO: 388844 - RNA, 21 nt, Artificial Sequence
  Synthetic
guguccagcuggaaaugaagu

SEQ ID NO: 388845 - RNA, 22 nt, Artificial Sequence
  Synthetic
aguguccagcuggaaaugaagu

SEQ ID NO: 388846 - RNA, 23 nt, Artificial Sequence
  Synthetic
aaguguccagcuggaaaugaagu

SEQ ID NO: 388847 - RNA, 24 nt, Artificial Sequence
  Synthetic
aaaguguccagcuggaaaugaagu

SEQ ID NO: 388848 - RNA, 18 nt, Artificial Sequence
  Synthetic
cuugauuauaaaugaagu

SEQ ID NO: 388849 - RNA, 19 nt, Artificial Sequence
  Synthetic
ccuugauuauaaaugaagu

SEQ ID NO: 388850 - RNA, 20 nt, Artificial Sequence
  Synthetic
gccuugauuauaaaugaagu

SEQ ID NO: 388851 - RNA, 21 nt, Artificial Sequence
  Synthetic
ggccuugauuauaaaugaagu

SEQ ID NO: 388852 - RNA, 22 nt, Artificial Sequence
  Synthetic
gggccuugauuauaaaugaagu

SEQ ID NO: 388853 - RNA, 23 nt, Artificial Sequence
  Synthetic
agggccuugauuauaaaugaagu

SEQ ID NO: 388854 - RNA, 24 nt, Artificial Sequence
  Synthetic
uagggccuugauuauaaaugaagu

SEQ ID NO: 388855 - RNA, 18 nt, Artificial Sequence
  Synthetic
aaaacaaaaacaugaagu

SEQ ID NO: 388856 - RNA, 19 nt, Artificial Sequence
  Synthetic
uaaaacaaaaacaugaagu

SEQ ID NO: 388857 - RNA, 20 nt, Artificial Sequence
  Synthetic
cuaaaacaaaaacaugaagu

SEQ ID NO: 388858 - RNA, 21 nt, Artificial Sequence
  Synthetic
ucuaaaacaaaaacaugaagu

SEQ ID NO: 388859 - RNA, 22 nt, Artificial Sequence
  Synthetic
uucuaaaacaaaaacaugaagu

SEQ ID NO: 388860 - RNA, 23 nt, Artificial Sequence
  Synthetic
uuucuaaaacaaaaacaugaagu

SEQ ID NO: 388861 - RNA, 24 nt, Artificial Sequence
  Synthetic
uuuucuaaaacaaaaacaugaagu

SEQ ID NO: 388862 - RNA, 18 nt, Artificial Sequence
  Synthetic
auguaggcuugaugaagu

SEQ ID NO: 388863 - RNA, 19 nt, Artificial Sequence
  Synthetic
aauguaggcuugaugaagu

SEQ ID NO: 388864 - RNA, 20 nt, Artificial Sequence
  Synthetic
gaauguaggcuugaugaagu

SEQ ID NO: 388865 - RNA, 21 nt, Artificial Sequence
  Synthetic
agaauguaggcuugaugaagu

SEQ ID NO: 388866 - RNA, 22 nt, Artificial Sequence
  Synthetic
uagaauguaggcuugaugaagu

SEQ ID NO: 388867 - RNA, 23 nt, Artificial Sequence
  Synthetic
uuagaauguaggcuugaugaagu

SEQ ID NO: 388868 - RNA, 24 nt, Artificial Sequence
  Synthetic
auuagaauguaggcuugaugaagu

SEQ ID NO: 388869 - RNA, 18 nt, Artificial Sequence
  Synthetic
auacaauuuuuaugaagu

SEQ ID NO: 388870 - RNA, 19 nt, Artificial Sequence
  Synthetic
aauacaauuuuuaugaagu

SEQ ID NO: 388871 - RNA, 20 nt, Artificial Sequence
  Synthetic
caauacaauuuuuaugaagu

SEQ ID NO: 388872 - RNA, 21 nt, Artificial Sequence
  Synthetic
ccaauacaauuuuuaugaagu

SEQ ID NO: 388873 - RNA, 22 nt, Artificial Sequence
  Synthetic
gccaauacaauuuuuaugaagu

SEQ ID NO: 388874 - RNA, 23 nt, Artificial Sequence
  Synthetic
ugccaauacaauuuuuaugaagu

SEQ ID NO: 388875 - RNA, 24 nt, Artificial Sequence
  Synthetic
gugccaauacaauuuuuaugaagu

SEQ ID NO: 388876 - RNA, 18 nt, Artificial Sequence
  Synthetic
agcauuggagacugaagu

SEQ ID NO: 388877 - RNA, 19 nt, Artificial Sequence
  Synthetic
aagcauuggagacugaagu

SEQ ID NO: 388878 - RNA, 20 nt, Artificial Sequence
  Synthetic
uaagcauuggagacugaagu

SEQ ID NO: 388879 - RNA, 21 nt, Artificial Sequence
  Synthetic
auaagcauuggagacugaagu

SEQ ID NO: 388880 - RNA, 22 nt, Artificial Sequence
  Synthetic
gauaagcauuggagacugaagu

SEQ ID NO: 388881 - RNA, 23 nt, Artificial Sequence
  Synthetic
ugauaagcauuggagacugaagu

SEQ ID NO: 388882 - RNA, 24 nt, Artificial Sequence
  Synthetic
gugauaagcauuggagacugaagu

SEQ ID NO: 388883 - RNA, 18 nt, Artificial Sequence
  Synthetic
uggaaaggggacugaagu

SEQ ID NO: 388884 - RNA, 19 nt, Artificial Sequence
  Synthetic
cuggaaaggggacugaagu

SEQ ID NO: 388885 - RNA, 20 nt, Artificial Sequence
  Synthetic
ccuggaaaggggacugaagu

SEQ ID NO: 388886 - RNA, 21 nt, Artificial Sequence
  Synthetic
cccuggaaaggggacugaagu

SEQ ID NO: 388887 - RNA, 22 nt, Artificial Sequence
  Synthetic
ccccuggaaaggggacugaagu

SEQ ID NO: 388888 - RNA, 23 nt, Artificial Sequence
  Synthetic
uccccuggaaaggggacugaagu

SEQ ID NO: 388889 - RNA, 24 nt, Artificial Sequence
  Synthetic
cuccccuggaaaggggacugaagu

SEQ ID NO: 388890 - RNA, 18 nt, Artificial Sequence
  Synthetic
gagcaacgauacugaagu

SEQ ID NO: 388891 - RNA, 19 nt, Artificial Sequence
  Synthetic
ugagcaacgauacugaagu

SEQ ID NO: 388892 - RNA, 20 nt, Artificial Sequence
  Synthetic
cugagcaacgauacugaagu

SEQ ID NO: 388893 - RNA, 21 nt, Artificial Sequence
  Synthetic
acugagcaacgauacugaagu

SEQ ID NO: 388894 - RNA, 22 nt, Artificial Sequence
  Synthetic
gacugagcaacgauacugaagu

SEQ ID NO: 388895 - RNA, 23 nt, Artificial Sequence
  Synthetic
agacugagcaacgauacugaagu

SEQ ID NO: 388896 - RNA, 24 nt, Artificial Sequence
  Synthetic
aagacugagcaacgauacugaagu

SEQ ID NO: 388897 - RNA, 18 nt, Artificial Sequence
  Synthetic
ggguggaucaccugaagu

SEQ ID NO: 388898 - RNA, 19 nt, Artificial Sequence
  Synthetic
uggguggaucaccugaagu

SEQ ID NO: 388899 - RNA, 20 nt, Artificial Sequence
  Synthetic
guggguggaucaccugaagu

SEQ ID NO: 388900 - RNA, 21 nt, Artificial Sequence
  Synthetic
gguggguggaucaccugaagu

SEQ ID NO: 388901 - RNA, 22 nt, Artificial Sequence
  Synthetic
agguggguggaucaccugaagu

SEQ ID NO: 388902 - RNA, 23 nt, Artificial Sequence
  Synthetic
gagguggguggaucaccugaagu

SEQ ID NO: 388903 - RNA, 24 nt, Artificial Sequence
  Synthetic
cgagguggguggaucaccugaagu

SEQ ID NO: 388904 - RNA, 18 nt, Artificial Sequence
  Synthetic
gacuucuuucgcugaagu

SEQ ID NO: 388905 - RNA, 19 nt, Artificial Sequence
  Synthetic
agacuucuuucgcugaagu

SEQ ID NO: 388906 - RNA, 20 nt, Artificial Sequence
  Synthetic
gagacuucuuucgcugaagu

SEQ ID NO: 388907 - RNA, 21 nt, Artificial Sequence
  Synthetic
agagacuucuuucgcugaagu

SEQ ID NO: 388908 - RNA, 22 nt, Artificial Sequence
  Synthetic
cagagacuucuuucgcugaagu

SEQ ID NO: 388909 - RNA, 23 nt, Artificial Sequence
  Synthetic
ucagagacuucuuucgcugaagu

SEQ ID NO: 388910 - RNA, 24 nt, Artificial Sequence
  Synthetic
uucagagacuucuuucgcugaagu

SEQ ID NO: 388911 - RNA, 18 nt, Artificial Sequence
  Synthetic
caggaggaucucugaagu

SEQ ID NO: 388912 - RNA, 19 nt, Artificial Sequence
  Synthetic
ccaggaggaucucugaagu

SEQ ID NO: 388913 - RNA, 20 nt, Artificial Sequence
  Synthetic
cccaggaggaucucugaagu

SEQ ID NO: 388914 - RNA, 21 nt, Artificial Sequence
  Synthetic
ccccaggaggaucucugaagu

SEQ ID NO: 388915 - RNA, 22 nt, Artificial Sequence
  Synthetic
uccccaggaggaucucugaagu

SEQ ID NO: 388916 - RNA, 23 nt, Artificial Sequence
  Synthetic
uuccccaggaggaucucugaagu

SEQ ID NO: 388917 - RNA, 24 nt, Artificial Sequence
  Synthetic
cuuccccaggaggaucucugaagu

SEQ ID NO: 388918 - RNA, 18 nt, Artificial Sequence
  Synthetic
uucuucaaauucugaagu

SEQ ID NO: 388919 - RNA, 19 nt, Artificial Sequence
  Synthetic
uuucuucaaauucugaagu

SEQ ID NO: 388920 - RNA, 20 nt, Artificial Sequence
  Synthetic
uuuucuucaaauucugaagu

SEQ ID NO: 388921 - RNA, 21 nt, Artificial Sequence
  Synthetic
uuuuucuucaaauucugaagu

SEQ ID NO: 388922 - RNA, 22 nt, Artificial Sequence
  Synthetic
cuuuuucuucaaauucugaagu

SEQ ID NO: 388923 - RNA, 23 nt, Artificial Sequence
  Synthetic
gcuuuuucuucaaauucugaagu

SEQ ID NO: 388924 - RNA, 24 nt, Artificial Sequence
  Synthetic
ugcuuuuucuucaaauucugaagu

SEQ ID NO: 388925 - RNA, 18 nt, Artificial Sequence
  Synthetic
auauguacugugugaagu

SEQ ID NO: 388926 - RNA, 19 nt, Artificial Sequence
  Synthetic
cauauguacugugugaagu

SEQ ID NO: 388927 - RNA, 20 nt, Artificial Sequence
  Synthetic
ccauauguacugugugaagu

SEQ ID NO: 388928 - RNA, 21 nt, Artificial Sequence
  Synthetic
uccauauguacugugugaagu

SEQ ID NO: 388929 - RNA, 22 nt, Artificial Sequence
  Synthetic
guccauauguacugugugaagu

SEQ ID NO: 388930 - RNA, 23 nt, Artificial Sequence
  Synthetic
gguccauauguacugugugaagu

SEQ ID NO: 388931 - RNA, 24 nt, Artificial Sequence
  Synthetic
ggguccauauguacugugugaagu

SEQ ID NO: 388932 - RNA, 18 nt, Artificial Sequence
  Synthetic
uguucaagcuugugaagu

SEQ ID NO: 388933 - RNA, 19 nt, Artificial Sequence
  Synthetic
cuguucaagcuugugaagu

SEQ ID NO: 388934 - RNA, 20 nt, Artificial Sequence
  Synthetic
gcuguucaagcuugugaagu

SEQ ID NO: 388935 - RNA, 21 nt, Artificial Sequence
  Synthetic
agcuguucaagcuugugaagu

SEQ ID NO: 388936 - RNA, 22 nt, Artificial Sequence
  Synthetic
cagcuguucaagcuugugaagu

SEQ ID NO: 388937 - RNA, 23 nt, Artificial Sequence
  Synthetic
acagcuguucaagcuugugaagu

SEQ ID NO: 388938 - RNA, 24 nt, Artificial Sequence
  Synthetic
uacagcuguucaagcuugugaagu

SEQ ID NO: 388939 - RNA, 18 nt, Artificial Sequence
  Synthetic
ucagucuugccuugaagu

SEQ ID NO: 388940 - RNA, 19 nt, Artificial Sequence
  Synthetic
uucagucuugccuugaagu

SEQ ID NO: 388941 - RNA, 20 nt, Artificial Sequence
  Synthetic
cuucagucuugccuugaagu

SEQ ID NO: 388942 - RNA, 21 nt, Artificial Sequence
  Synthetic
ucuucagucuugccuugaagu

SEQ ID NO: 388943 - RNA, 22 nt, Artificial Sequence
  Synthetic
uucuucagucuugccuugaagu

SEQ ID NO: 388944 - RNA, 23 nt, Artificial Sequence
  Synthetic
auucuucagucuugccuugaagu

SEQ ID NO: 388945 - RNA, 24 nt, Artificial Sequence
  Synthetic
gauucuucagucuugccuugaagu

SEQ ID NO: 388946 - RNA, 18 nt, Artificial Sequence
  Synthetic
agauauagucuuugaagu

SEQ ID NO: 388947 - RNA, 19 nt, Artificial Sequence
  Synthetic
aagauauagucuuugaagu

SEQ ID NO: 388948 - RNA, 20 nt, Artificial Sequence
  Synthetic
uaagauauagucuuugaagu

SEQ ID NO: 388949 - RNA, 21 nt, Artificial Sequence
  Synthetic
auaagauauagucuuugaagu

SEQ ID NO: 388950 - RNA, 22 nt, Artificial Sequence
  Synthetic
aauaagauauagucuuugaagu

SEQ ID NO: 388951 - RNA, 23 nt, Artificial Sequence
  Synthetic
aaauaagauauagucuuugaagu

SEQ ID NO: 388952 - RNA, 24 nt, Artificial Sequence
  Synthetic
gaaauaagauauagucuuugaagu

SEQ ID NO: 388953 - RNA, 18 nt, Artificial Sequence
  Synthetic
uaaaucccacaaauaagu

SEQ ID NO: 388954 - RNA, 19 nt, Artificial Sequence
  Synthetic
uuaaaucccacaaauaagu

SEQ ID NO: 388955 - RNA, 20 nt, Artificial Sequence
  Synthetic
uuuaaaucccacaaauaagu

SEQ ID NO: 388956 - RNA, 21 nt, Artificial Sequence
  Synthetic
uuuuaaaucccacaaauaagu

SEQ ID NO: 388957 - RNA, 22 nt, Artificial Sequence
  Synthetic
auuuuaaaucccacaaauaagu

SEQ ID NO: 388958 - RNA, 23 nt, Artificial Sequence
  Synthetic
aauuuuaaaucccacaaauaagu

SEQ ID NO: 388959 - RNA, 24 nt, Artificial Sequence
  Synthetic
gaauuuuaaaucccacaaauaagu

SEQ ID NO: 388960 - RNA, 18 nt, Artificial Sequence
  Synthetic
uagaucccacaaauaagu

SEQ ID NO: 388961 - RNA, 19 nt, Artificial Sequence
  Synthetic
uuagaucccacaaauaagu

SEQ ID NO: 388962 - RNA, 20 nt, Artificial Sequence
  Synthetic
uuuagaucccacaaauaagu

SEQ ID NO: 388963 - RNA, 21 nt, Artificial Sequence
  Synthetic
uuuuagaucccacaaauaagu

SEQ ID NO: 388964 - RNA, 22 nt, Artificial Sequence
  Synthetic
uuuuuagaucccacaaauaagu

SEQ ID NO: 388965 - RNA, 23 nt, Artificial Sequence
  Synthetic
auuuuuagaucccacaaauaagu

SEQ ID NO: 388966 - RNA, 24 nt, Artificial Sequence
  Synthetic
aauuuuuagaucccacaaauaagu

SEQ ID NO: 388967 - RNA, 18 nt, Artificial Sequence
  Synthetic
uagauucugcaaauaagu

SEQ ID NO: 388968 - RNA, 19 nt, Artificial Sequence
  Synthetic
uuagauucugcaaauaagu

SEQ ID NO: 388969 - RNA, 20 nt, Artificial Sequence
  Synthetic
uuuagauucugcaaauaagu

SEQ ID NO: 388970 - RNA, 21 nt, Artificial Sequence
  Synthetic
uuuuagauucugcaaauaagu

SEQ ID NO: 388971 - RNA, 22 nt, Artificial Sequence
  Synthetic
uuuuuagauucugcaaauaagu

SEQ ID NO: 388972 - RNA, 23 nt, Artificial Sequence
  Synthetic
auuuuuagauucugcaaauaagu

SEQ ID NO: 388973 - RNA, 24 nt, Artificial Sequence
  Synthetic
gauuuuuagauucugcaaauaagu

SEQ ID NO: 388974 - RNA, 18 nt, Artificial Sequence
  Synthetic
caaaaaugagaaauaagu

SEQ ID NO: 388975 - RNA, 19 nt, Artificial Sequence
  Synthetic
ccaaaaaugagaaauaagu

SEQ ID NO: 388976 - RNA, 20 nt, Artificial Sequence
  Synthetic
uccaaaaaugagaaauaagu

SEQ ID NO: 388977 - RNA, 21 nt, Artificial Sequence
  Synthetic
cuccaaaaaugagaaauaagu

SEQ ID NO: 388978 - RNA, 22 nt, Artificial Sequence
  Synthetic
ucuccaaaaaugagaaauaagu

SEQ ID NO: 388979 - RNA, 23 nt, Artificial Sequence
  Synthetic
uucuccaaaaaugagaaauaagu

SEQ ID NO: 388980 - RNA, 24 nt, Artificial Sequence
  Synthetic
cuucuccaaaaaugagaaauaagu

SEQ ID NO: 388981 - RNA, 18 nt, Artificial Sequence
  Synthetic
agagauaaaacaauaagu

SEQ ID NO: 388982 - RNA, 19 nt, Artificial Sequence
  Synthetic
aagagauaaaacaauaagu

SEQ ID NO: 388983 - RNA, 20 nt, Artificial Sequence
  Synthetic
aaagagauaaaacaauaagu

SEQ ID NO: 388984 - RNA, 21 nt, Artificial Sequence
  Synthetic
uaaagagauaaaacaauaagu

SEQ ID NO: 388985 - RNA, 22 nt, Artificial Sequence
  Synthetic
auaaagagauaaaacaauaagu

SEQ ID NO: 388986 - RNA, 23 nt, Artificial Sequence
  Synthetic
aauaaagagauaaaacaauaagu

SEQ ID NO: 388987 - RNA, 24 nt, Artificial Sequence
  Synthetic
aaauaaagagauaaaacaauaagu

SEQ ID NO: 388988 - RNA, 18 nt, Artificial Sequence
  Synthetic
auaggacccccaauaagu

SEQ ID NO: 388989 - RNA, 19 nt, Artificial Sequence
  Synthetic
aauaggacccccaauaagu

SEQ ID NO: 388990 - RNA, 20 nt, Artificial Sequence
  Synthetic
aaauaggacccccaauaagu

SEQ ID NO: 388991 - RNA, 21 nt, Artificial Sequence
  Synthetic
gaaauaggacccccaauaagu

SEQ ID NO: 388992 - RNA, 22 nt, Artificial Sequence
  Synthetic
agaaauaggacccccaauaagu

SEQ ID NO: 388993 - RNA, 23 nt, Artificial Sequence
  Synthetic
cagaaauaggacccccaauaagu

SEQ ID NO: 388994 - RNA, 24 nt, Artificial Sequence
  Synthetic
acagaaauaggacccccaauaagu

SEQ ID NO: 388995 - RNA, 18 nt, Artificial Sequence
  Synthetic
aauaacaccagaauaagu

SEQ ID NO: 388996 - RNA, 19 nt, Artificial Sequence
  Synthetic
caauaacaccagaauaagu

SEQ ID NO: 388997 - RNA, 20 nt, Artificial Sequence
  Synthetic
ccaauaacaccagaauaagu

SEQ ID NO: 388998 - RNA, 21 nt, Artificial Sequence
  Synthetic
gccaauaacaccagaauaagu

SEQ ID NO: 388999 - RNA, 22 nt, Artificial Sequence
  Synthetic
ugccaauaacaccagaauaagu

SEQ ID NO: 389000 - RNA, 23 nt, Artificial Sequence
  Synthetic
augccaauaacaccagaauaagu

SEQ ID NO: 389001 - RNA, 24 nt, Artificial Sequence
  Synthetic
caugccaauaacaccagaauaagu

SEQ ID NO: 389002 - RNA, 18 nt, Artificial Sequence
  Synthetic
agaacauguagaauaagu

SEQ ID NO: 389003 - RNA, 19 nt, Artificial Sequence
  Synthetic
aagaacauguagaauaagu

SEQ ID NO: 389004 - RNA, 20 nt, Artificial Sequence
  Synthetic
caagaacauguagaauaagu

SEQ ID NO: 389005 - RNA, 21 nt, Artificial Sequence
  Synthetic
ucaagaacauguagaauaagu

SEQ ID NO: 389006 - RNA, 22 nt, Artificial Sequence
  Synthetic
gucaagaacauguagaauaagu

SEQ ID NO: 389007 - RNA, 23 nt, Artificial Sequence
  Synthetic
agucaagaacauguagaauaagu

SEQ ID NO: 389008 - RNA, 24 nt, Artificial Sequence
  Synthetic
cagucaagaacauguagaauaagu

SEQ ID NO: 389009 - RNA, 18 nt, Artificial Sequence
  Synthetic
auacucuugugaauaagu

SEQ ID NO: 389010 - RNA, 19 nt, Artificial Sequence
  Synthetic
uauacucuugugaauaagu

SEQ ID NO: 389011 - RNA, 20 nt, Artificial Sequence
  Synthetic
uuauacucuugugaauaagu

SEQ ID NO: 389012 - RNA, 21 nt, Artificial Sequence
  Synthetic
guuauacucuugugaauaagu

SEQ ID NO: 389013 - RNA, 22 nt, Artificial Sequence
  Synthetic
cguuauacucuugugaauaagu

SEQ ID NO: 389014 - RNA, 23 nt, Artificial Sequence
  Synthetic
ucguuauacucuugugaauaagu

SEQ ID NO: 389015 - RNA, 24 nt, Artificial Sequence
  Synthetic
uucguuauacucuugugaauaagu

SEQ ID NO: 389016 - RNA, 18 nt, Artificial Sequence
  Synthetic
uagcucccacuaauaagu

SEQ ID NO: 389017 - RNA, 19 nt, Artificial Sequence
  Synthetic
uuagcucccacuaauaagu

SEQ ID NO: 389018 - RNA, 20 nt, Artificial Sequence
  Synthetic
uuuagcucccacuaauaagu

SEQ ID NO: 389019 - RNA, 21 nt, Artificial Sequence
  Synthetic
auuuagcucccacuaauaagu

SEQ ID NO: 389020 - RNA, 22 nt, Artificial Sequence
  Synthetic
cauuuagcucccacuaauaagu

SEQ ID NO: 389021 - RNA, 23 nt, Artificial Sequence
  Synthetic
ucauuuagcucccacuaauaagu

SEQ ID NO: 389022 - RNA, 24 nt, Artificial Sequence
  Synthetic
aucauuuagcucccacuaauaagu

SEQ ID NO: 389023 - RNA, 18 nt, Artificial Sequence
  Synthetic
ggguagaaagacauaagu

SEQ ID NO: 389024 - RNA, 19 nt, Artificial Sequence
  Synthetic
aggguagaaagacauaagu

SEQ ID NO: 389025 - RNA, 20 nt, Artificial Sequence
  Synthetic
uaggguagaaagacauaagu

SEQ ID NO: 389026 - RNA, 21 nt, Artificial Sequence
  Synthetic
cuaggguagaaagacauaagu

SEQ ID NO: 389027 - RNA, 22 nt, Artificial Sequence
  Synthetic
ucuaggguagaaagacauaagu

SEQ ID NO: 389028 - RNA, 23 nt, Artificial Sequence
  Synthetic
aucuaggguagaaagacauaagu

SEQ ID NO: 389029 - RNA, 24 nt, Artificial Sequence
  Synthetic
aaucuaggguagaaagacauaagu

SEQ ID NO: 389030 - RNA, 18 nt, Artificial Sequence
  Synthetic
aagaaagaagacauaagu

SEQ ID NO: 389031 - RNA, 19 nt, Artificial Sequence
  Synthetic
gaagaaagaagacauaagu

SEQ ID NO: 389032 - RNA, 20 nt, Artificial Sequence
  Synthetic
agaagaaagaagacauaagu

SEQ ID NO: 389033 - RNA, 21 nt, Artificial Sequence
  Synthetic
gagaagaaagaagacauaagu

SEQ ID NO: 389034 - RNA, 22 nt, Artificial Sequence
  Synthetic
agagaagaaagaagacauaagu

SEQ ID NO: 389035 - RNA, 23 nt, Artificial Sequence
  Synthetic
aagagaagaaagaagacauaagu

SEQ ID NO: 389036 - RNA, 24 nt, Artificial Sequence
  Synthetic
caagagaagaaagaagacauaagu

SEQ ID NO: 389037 - RNA, 18 nt, Artificial Sequence
  Synthetic
auccuauuuaccauaagu

SEQ ID NO: 389038 - RNA, 19 nt, Artificial Sequence
  Synthetic
uauccuauuuaccauaagu

SEQ ID NO: 389039 - RNA, 20 nt, Artificial Sequence
  Synthetic
cuauccuauuuaccauaagu

SEQ ID NO: 389040 - RNA, 21 nt, Artificial Sequence
  Synthetic
acuauccuauuuaccauaagu

SEQ ID NO: 389041 - RNA, 22 nt, Artificial Sequence
  Synthetic
gacuauccuauuuaccauaagu

SEQ ID NO: 389042 - RNA, 23 nt, Artificial Sequence
  Synthetic
agacuauccuauuuaccauaagu

SEQ ID NO: 389043 - RNA, 24 nt, Artificial Sequence
  Synthetic
uagacuauccuauuuaccauaagu

SEQ ID NO: 389044 - RNA, 18 nt, Artificial Sequence
  Synthetic
uuaaauuuuaccauaagu

SEQ ID NO: 389045 - RNA, 19 nt, Artificial Sequence
  Synthetic
auuaaauuuuaccauaagu

SEQ ID NO: 389046 - RNA, 20 nt, Artificial Sequence
  Synthetic
aauuaaauuuuaccauaagu

SEQ ID NO: 389047 - RNA, 21 nt, Artificial Sequence
  Synthetic
caauuaaauuuuaccauaagu

SEQ ID NO: 389048 - RNA, 22 nt, Artificial Sequence
  Synthetic
gcaauuaaauuuuaccauaagu

SEQ ID NO: 389049 - RNA, 23 nt, Artificial Sequence
  Synthetic
ggcaauuaaauuuuaccauaagu

SEQ ID NO: 389050 - RNA, 24 nt, Artificial Sequence
  Synthetic
uggcaauuaaauuuuaccauaagu

SEQ ID NO: 389051 - RNA, 18 nt, Artificial Sequence
  Synthetic
gcuggguacuccauaagu

SEQ ID NO: 389052 - RNA, 19 nt, Artificial Sequence
  Synthetic
ggcuggguacuccauaagu

SEQ ID NO: 389053 - RNA, 20 nt, Artificial Sequence
  Synthetic
uggcuggguacuccauaagu

SEQ ID NO: 389054 - RNA, 21 nt, Artificial Sequence
  Synthetic
guggcuggguacuccauaagu

SEQ ID NO: 389055 - RNA, 22 nt, Artificial Sequence
  Synthetic
aguggcuggguacuccauaagu

SEQ ID NO: 389056 - RNA, 23 nt, Artificial Sequence
  Synthetic
gaguggcuggguacuccauaagu

SEQ ID NO: 389057 - RNA, 24 nt, Artificial Sequence
  Synthetic
ugaguggcuggguacuccauaagu

SEQ ID NO: 389058 - RNA, 18 nt, Artificial Sequence
  Synthetic
agccuuggaggcauaagu

SEQ ID NO: 389059 - RNA, 19 nt, Artificial Sequence
  Synthetic
cagccuuggaggcauaagu

SEQ ID NO: 389060 - RNA, 20 nt, Artificial Sequence
  Synthetic
acagccuuggaggcauaagu

SEQ ID NO: 389061 - RNA, 21 nt, Artificial Sequence
  Synthetic
cacagccuuggaggcauaagu

SEQ ID NO: 389062 - RNA, 22 nt, Artificial Sequence
  Synthetic
acacagccuuggaggcauaagu

SEQ ID NO: 389063 - RNA, 23 nt, Artificial Sequence
  Synthetic
cacacagccuuggaggcauaagu

SEQ ID NO: 389064 - RNA, 24 nt, Artificial Sequence
  Synthetic
ucacacagccuuggaggcauaagu

SEQ ID NO: 389065 - RNA, 18 nt, Artificial Sequence
  Synthetic
ggugaauuucucauaagu

SEQ ID NO: 389066 - RNA, 19 nt, Artificial Sequence
  Synthetic
uggugaauuucucauaagu

SEQ ID NO: 389067 - RNA, 20 nt, Artificial Sequence
  Synthetic
uuggugaauuucucauaagu

SEQ ID NO: 389068 - RNA, 21 nt, Artificial Sequence
  Synthetic
guuggugaauuucucauaagu

SEQ ID NO: 389069 - RNA, 22 nt, Artificial Sequence
  Synthetic
gguuggugaauuucucauaagu

SEQ ID NO: 389070 - RNA, 23 nt, Artificial Sequence
  Synthetic
ggguuggugaauuucucauaagu

SEQ ID NO: 389071 - RNA, 24 nt, Artificial Sequence
  Synthetic
aggguuggugaauuucucauaagu

SEQ ID NO: 389072 - RNA, 18 nt, Artificial Sequence
  Synthetic
agugguauauucauaagu

SEQ ID NO: 389073 - RNA, 19 nt, Artificial Sequence
  Synthetic
aagugguauauucauaagu

SEQ ID NO: 389074 - RNA, 20 nt, Artificial Sequence
  Synthetic
uaagugguauauucauaagu

SEQ ID NO: 389075 - RNA, 21 nt, Artificial Sequence
  Synthetic
guaagugguauauucauaagu

SEQ ID NO: 389076 - RNA, 22 nt, Artificial Sequence
  Synthetic
aguaagugguauauucauaagu

SEQ ID NO: 389077 - RNA, 23 nt, Artificial Sequence
  Synthetic
uaguaagugguauauucauaagu

SEQ ID NO: 389078 - RNA, 24 nt, Artificial Sequence
  Synthetic
auaguaagugguauauucauaagu

SEQ ID NO: 389079 - RNA, 18 nt, Artificial Sequence
  Synthetic
aaacugauguucauaagu

SEQ ID NO: 389080 - RNA, 19 nt, Artificial Sequence
  Synthetic
aaaacugauguucauaagu

SEQ ID NO: 389081 - RNA, 20 nt, Artificial Sequence
  Synthetic
gaaaacugauguucauaagu

SEQ ID NO: 389082 - RNA, 21 nt, Artificial Sequence
  Synthetic
agaaaacugauguucauaagu

SEQ ID NO: 389083 - RNA, 22 nt, Artificial Sequence
  Synthetic
gagaaaacugauguucauaagu

SEQ ID NO: 389084 - RNA, 23 nt, Artificial Sequence
  Synthetic
ugagaaaacugauguucauaagu

SEQ ID NO: 389085 - RNA, 24 nt, Artificial Sequence
  Synthetic
uugagaaaacugauguucauaagu

SEQ ID NO: 389086 - RNA, 18 nt, Artificial Sequence
  Synthetic
acugcaugguauauaagu

SEQ ID NO: 389087 - RNA, 19 nt, Artificial Sequence
  Synthetic
gacugcaugguauauaagu

SEQ ID NO: 389088 - RNA, 20 nt, Artificial Sequence
  Synthetic
agacugcaugguauauaagu

SEQ ID NO: 389089 - RNA, 21 nt, Artificial Sequence
  Synthetic
aagacugcaugguauauaagu

SEQ ID NO: 389090 - RNA, 22 nt, Artificial Sequence
  Synthetic
caagacugcaugguauauaagu

SEQ ID NO: 389091 - RNA, 23 nt, Artificial Sequence
  Synthetic
ccaagacugcaugguauauaagu

SEQ ID NO: 389092 - RNA, 24 nt, Artificial Sequence
  Synthetic
cccaagacugcaugguauauaagu

SEQ ID NO: 389093 - RNA, 18 nt, Artificial Sequence
  Synthetic
uugucucucucuauaagu

SEQ ID NO: 389094 - RNA, 19 nt, Artificial Sequence
  Synthetic
uuugucucucucuauaagu

SEQ ID NO: 389095 - RNA, 20 nt, Artificial Sequence
  Synthetic
guuugucucucucuauaagu

SEQ ID NO: 389096 - RNA, 21 nt, Artificial Sequence
  Synthetic
aguuugucucucucuauaagu

SEQ ID NO: 389097 - RNA, 22 nt, Artificial Sequence
  Synthetic
gaguuugucucucucuauaagu

SEQ ID NO: 389098 - RNA, 23 nt, Artificial Sequence
  Synthetic
agaguuugucucucucuauaagu

SEQ ID NO: 389099 - RNA, 24 nt, Artificial Sequence
  Synthetic
aagaguuugucucucucuauaagu

SEQ ID NO: 389100 - RNA, 18 nt, Artificial Sequence
  Synthetic
uggaguauugguauaagu

SEQ ID NO: 389101 - RNA, 19 nt, Artificial Sequence
  Synthetic
cuggaguauugguauaagu

SEQ ID NO: 389102 - RNA, 20 nt, Artificial Sequence
  Synthetic
acuggaguauugguauaagu

SEQ ID NO: 389103 - RNA, 21 nt, Artificial Sequence
  Synthetic
aacuggaguauugguauaagu

SEQ ID NO: 389104 - RNA, 22 nt, Artificial Sequence
  Synthetic
aaacuggaguauugguauaagu

SEQ ID NO: 389105 - RNA, 23 nt, Artificial Sequence
  Synthetic
uaaacuggaguauugguauaagu

SEQ ID NO: 389106 - RNA, 24 nt, Artificial Sequence
  Synthetic
uuaaacuggaguauugguauaagu

SEQ ID NO: 389107 - RNA, 18 nt, Artificial Sequence
  Synthetic
aauaugcacauuauaagu

SEQ ID NO: 389108 - RNA, 19 nt, Artificial Sequence
  Synthetic
uaauaugcacauuauaagu

SEQ ID NO: 389109 - RNA, 20 nt, Artificial Sequence
  Synthetic
auaauaugcacauuauaagu

SEQ ID NO: 389110 - RNA, 21 nt, Artificial Sequence
  Synthetic
aauaauaugcacauuauaagu

SEQ ID NO: 389111 - RNA, 22 nt, Artificial Sequence
  Synthetic
aaauaauaugcacauuauaagu

SEQ ID NO: 389112 - RNA, 23 nt, Artificial Sequence
  Synthetic
aaaauaauaugcacauuauaagu

SEQ ID NO: 389113 - RNA, 24 nt, Artificial Sequence
  Synthetic
aaaaauaauaugcacauuauaagu

SEQ ID NO: 389114 - RNA, 19 nt, Artificial Sequence
  Synthetic
uuagcucccacuuauaagu

SEQ ID NO: 389115 - RNA, 20 nt, Artificial Sequence
  Synthetic
uuuagcucccacuuauaagu

SEQ ID NO: 389116 - RNA, 21 nt, Artificial Sequence
  Synthetic
guuuagcucccacuuauaagu

SEQ ID NO: 389117 - RNA, 22 nt, Artificial Sequence
  Synthetic
uguuuagcucccacuuauaagu

SEQ ID NO: 389118 - RNA, 23 nt, Artificial Sequence
  Synthetic
auguuuagcucccacuuauaagu

SEQ ID NO: 389119 - RNA, 24 nt, Artificial Sequence
  Synthetic
uauguuuagcucccacuuauaagu

SEQ ID NO: 389120 - RNA, 18 nt, Artificial Sequence
  Synthetic
auguucucacuuauaagu

SEQ ID NO: 389121 - RNA, 19 nt, Artificial Sequence
  Synthetic
uauguucucacuuauaagu

SEQ ID NO: 389122 - RNA, 20 nt, Artificial Sequence
  Synthetic
guauguucucacuuauaagu

SEQ ID NO: 389123 - RNA, 21 nt, Artificial Sequence
  Synthetic
uguauguucucacuuauaagu

SEQ ID NO: 389124 - RNA, 22 nt, Artificial Sequence
  Synthetic
cuguauguucucacuuauaagu

SEQ ID NO: 389125 - RNA, 23 nt, Artificial Sequence
  Synthetic
acuguauguucucacuuauaagu

SEQ ID NO: 389126 - RNA, 24 nt, Artificial Sequence
  Synthetic
uacuguauguucucacuuauaagu

SEQ ID NO: 389127 - RNA, 18 nt, Artificial Sequence
  Synthetic
aaauuacaaaaccuaagu

SEQ ID NO: 389128 - RNA, 19 nt, Artificial Sequence
  Synthetic
caaauuacaaaaccuaagu

SEQ ID NO: 389129 - RNA, 20 nt, Artificial Sequence
  Synthetic
ccaaauuacaaaaccuaagu

SEQ ID NO: 389130 - RNA, 21 nt, Artificial Sequence
  Synthetic
accaaauuacaaaaccuaagu

SEQ ID NO: 389131 - RNA, 22 nt, Artificial Sequence
  Synthetic
caccaaauuacaaaaccuaagu

SEQ ID NO: 389132 - RNA, 23 nt, Artificial Sequence
  Synthetic
ucaccaaauuacaaaaccuaagu

SEQ ID NO: 389133 - RNA, 24 nt, Artificial Sequence
  Synthetic
cucaccaaauuacaaaaccuaagu

SEQ ID NO: 389134 - RNA, 18 nt, Artificial Sequence
  Synthetic
auuauauguucccuaagu

SEQ ID NO: 389135 - RNA, 19 nt, Artificial Sequence
  Synthetic
aauuauauguucccuaagu

SEQ ID NO: 389136 - RNA, 20 nt, Artificial Sequence
  Synthetic
aaauuauauguucccuaagu

SEQ ID NO: 389137 - RNA, 21 nt, Artificial Sequence
  Synthetic
uaaauuauauguucccuaagu

SEQ ID NO: 389138 - RNA, 22 nt, Artificial Sequence
  Synthetic
cuaaauuauauguucccuaagu

SEQ ID NO: 389139 - RNA, 23 nt, Artificial Sequence
  Synthetic
ucuaaauuauauguucccuaagu

SEQ ID NO: 389140 - RNA, 24 nt, Artificial Sequence
  Synthetic
cucuaaauuauauguucccuaagu

SEQ ID NO: 389141 - RNA, 18 nt, Artificial Sequence
  Synthetic
caaacuguucuccuaagu

SEQ ID NO: 389142 - RNA, 19 nt, Artificial Sequence
  Synthetic
acaaacuguucuccuaagu

SEQ ID NO: 389143 - RNA, 20 nt, Artificial Sequence
  Synthetic
cacaaacuguucuccuaagu

SEQ ID NO: 389144 - RNA, 21 nt, Artificial Sequence
  Synthetic
acacaaacuguucuccuaagu

SEQ ID NO: 389145 - RNA, 22 nt, Artificial Sequence
  Synthetic
uacacaaacuguucuccuaagu

SEQ ID NO: 389146 - RNA, 23 nt, Artificial Sequence
  Synthetic
uuacacaaacuguucuccuaagu

SEQ ID NO: 389147 - RNA, 24 nt, Artificial Sequence
  Synthetic
auuacacaaacuguucuccuaagu

SEQ ID NO: 389148 - RNA, 18 nt, Artificial Sequence
  Synthetic
uugagaauggagcuaagu

SEQ ID NO: 389149 - RNA, 19 nt, Artificial Sequence
  Synthetic
auugagaauggagcuaagu

SEQ ID NO: 389150 - RNA, 20 nt, Artificial Sequence
  Synthetic
cauugagaauggagcuaagu

SEQ ID NO: 389151 - RNA, 21 nt, Artificial Sequence
  Synthetic
ccauugagaauggagcuaagu

SEQ ID NO: 389152 - RNA, 22 nt, Artificial Sequence
  Synthetic
accauugagaauggagcuaagu

SEQ ID NO: 389153 - RNA, 23 nt, Artificial Sequence
  Synthetic
gaccauugagaauggagcuaagu

SEQ ID NO: 389154 - RNA, 24 nt, Artificial Sequence
  Synthetic
ugaccauugagaauggagcuaagu

SEQ ID NO: 389155 - RNA, 18 nt, Artificial Sequence
  Synthetic
acuaggaauuagcuaagu

SEQ ID NO: 389156 - RNA, 19 nt, Artificial Sequence
  Synthetic
aacuaggaauuagcuaagu

SEQ ID NO: 389157 - RNA, 20 nt, Artificial Sequence
  Synthetic
aaacuaggaauuagcuaagu

SEQ ID NO: 389158 - RNA, 21 nt, Artificial Sequence
  Synthetic
aaaacuaggaauuagcuaagu

SEQ ID NO: 389159 - RNA, 22 nt, Artificial Sequence
  Synthetic
gaaaacuaggaauuagcuaagu

SEQ ID NO: 389160 - RNA, 23 nt, Artificial Sequence
  Synthetic
agaaaacuaggaauuagcuaagu

SEQ ID NO: 389161 - RNA, 24 nt, Artificial Sequence
  Synthetic
gagaaaacuaggaauuagcuaagu

SEQ ID NO: 389162 - RNA, 18 nt, Artificial Sequence
  Synthetic
uuccaaauuauucuaagu

SEQ ID NO: 389163 - RNA, 19 nt, Artificial Sequence
  Synthetic
cuuccaaauuauucuaagu

SEQ ID NO: 389164 - RNA, 20 nt, Artificial Sequence
  Synthetic
gcuuccaaauuauucuaagu

SEQ ID NO: 389165 - RNA, 21 nt, Artificial Sequence
  Synthetic
ggcuuccaaauuauucuaagu

SEQ ID NO: 389166 - RNA, 22 nt, Artificial Sequence
  Synthetic
uggcuuccaaauuauucuaagu

SEQ ID NO: 389167 - RNA, 23 nt, Artificial Sequence
  Synthetic
guggcuuccaaauuauucuaagu

SEQ ID NO: 389168 - RNA, 24 nt, Artificial Sequence
  Synthetic
uguggcuuccaaauuauucuaagu

SEQ ID NO: 389169 - RNA, 18 nt, Artificial Sequence
  Synthetic
guuuuucucuuucuaagu

SEQ ID NO: 389170 - RNA, 19 nt, Artificial Sequence
  Synthetic
cguuuuucucuuucuaagu

SEQ ID NO: 389171 - RNA, 20 nt, Artificial Sequence
  Synthetic
acguuuuucucuuucuaagu

SEQ ID NO: 389172 - RNA, 21 nt, Artificial Sequence
  Synthetic
gacguuuuucucuuucuaagu

SEQ ID NO: 389173 - RNA, 22 nt, Artificial Sequence
  Synthetic
ggacguuuuucucuuucuaagu

SEQ ID NO: 389174 - RNA, 23 nt, Artificial Sequence
  Synthetic
aggacguuuuucucuuucuaagu

SEQ ID NO: 389175 - RNA, 24 nt, Artificial Sequence
  Synthetic
aaggacguuuuucucuuucuaagu

SEQ ID NO: 389176 - RNA, 18 nt, Artificial Sequence
  Synthetic
ucuugcaauaaaguaagu

SEQ ID NO: 389177 - RNA, 19 nt, Artificial Sequence
  Synthetic
uucuugcaauaaaguaagu

SEQ ID NO: 389178 - RNA, 20 nt, Artificial Sequence
  Synthetic
auucuugcaauaaaguaagu

SEQ ID NO: 389179 - RNA, 21 nt, Artificial Sequence
  Synthetic
uauucuugcaauaaaguaagu

SEQ ID NO: 389180 - RNA, 22 nt, Artificial Sequence
  Synthetic
guauucuugcaauaaaguaagu

SEQ ID NO: 389181 - RNA, 23 nt, Artificial Sequence
  Synthetic
uguauucuugcaauaaaguaagu

SEQ ID NO: 389182 - RNA, 24 nt, Artificial Sequence
  Synthetic
cuguauucuugcaauaaaguaagu

SEQ ID NO: 389183 - RNA, 18 nt, Artificial Sequence
  Synthetic
guguuguauaaaguaagu

SEQ ID NO: 389184 - RNA, 19 nt, Artificial Sequence
  Synthetic
aguguuguauaaaguaagu

SEQ ID NO: 389185 - RNA, 20 nt, Artificial Sequence
  Synthetic
caguguuguauaaaguaagu

SEQ ID NO: 389186 - RNA, 21 nt, Artificial Sequence
  Synthetic
acaguguuguauaaaguaagu

SEQ ID NO: 389187 - RNA, 22 nt, Artificial Sequence
  Synthetic
cacaguguuguauaaaguaagu

SEQ ID NO: 389188 - RNA, 23 nt, Artificial Sequence
  Synthetic
acacaguguuguauaaaguaagu

SEQ ID NO: 389189 - RNA, 24 nt, Artificial Sequence
  Synthetic
aacacaguguuguauaaaguaagu

SEQ ID NO: 389190 - RNA, 18 nt, Artificial Sequence
  Synthetic
aacauuuauaaaguaagu

SEQ ID NO: 389191 - RNA, 19 nt, Artificial Sequence
  Synthetic
aaacauuuauaaaguaagu

SEQ ID NO: 389192 - RNA, 20 nt, Artificial Sequence
  Synthetic
aaaacauuuauaaaguaagu

SEQ ID NO: 389193 - RNA, 21 nt, Artificial Sequence
  Synthetic
uaaaacauuuauaaaguaagu

SEQ ID NO: 389194 - RNA, 22 nt, Artificial Sequence
  Synthetic
guaaaacauuuauaaaguaagu

SEQ ID NO: 389195 - RNA, 23 nt, Artificial Sequence
  Synthetic
aguaaaacauuuauaaaguaagu

SEQ ID NO: 389196 - RNA, 24 nt, Artificial Sequence
  Synthetic
aaguaaaacauuuauaaaguaagu

SEQ ID NO: 389197 - RNA, 18 nt, Artificial Sequence
  Synthetic
ucauggucagaaguaagu

SEQ ID NO: 389198 - RNA, 19 nt, Artificial Sequence
  Synthetic
uucauggucagaaguaagu

SEQ ID NO: 389199 - RNA, 20 nt, Artificial Sequence
  Synthetic
uuucauggucagaaguaagu

SEQ ID NO: 389200 - RNA, 21 nt, Artificial Sequence
  Synthetic
cuuucauggucagaaguaagu

SEQ ID NO: 389201 - RNA, 22 nt, Artificial Sequence
  Synthetic
ucuuucauggucagaaguaagu

SEQ ID NO: 389202 - RNA, 23 nt, Artificial Sequence
  Synthetic
uucuuucauggucagaaguaagu

SEQ ID NO: 389203 - RNA, 24 nt, Artificial Sequence
  Synthetic
cuucuuucauggucagaaguaagu

SEQ ID NO: 389204 - RNA, 18 nt, Artificial Sequence
  Synthetic
ggcuagagugaaguaagu

SEQ ID NO: 389205 - RNA, 19 nt, Artificial Sequence
  Synthetic
uggcuagagugaaguaagu

SEQ ID NO: 389206 - RNA, 20 nt, Artificial Sequence
  Synthetic
guggcuagagugaaguaagu

SEQ ID NO: 389207 - RNA, 21 nt, Artificial Sequence
  Synthetic
uguggcuagagugaaguaagu

SEQ ID NO: 389208 - RNA, 22 nt, Artificial Sequence
  Synthetic
guguggcuagagugaaguaagu

SEQ ID NO: 389209 - RNA, 23 nt, Artificial Sequence
  Synthetic
aguguggcuagagugaaguaagu

SEQ ID NO: 389210 - RNA, 24 nt, Artificial Sequence
  Synthetic
caguguggcuagagugaaguaagu

SEQ ID NO: 389211 - RNA, 18 nt, Artificial Sequence
  Synthetic
uaagaaggauaaguaagu

SEQ ID NO: 389212 - RNA, 19 nt, Artificial Sequence
  Synthetic
auaagaaggauaaguaagu

SEQ ID NO: 389213 - RNA, 20 nt, Artificial Sequence
  Synthetic
aauaagaaggauaaguaagu

SEQ ID NO: 389214 - RNA, 21 nt, Artificial Sequence
  Synthetic
aaauaagaaggauaaguaagu

SEQ ID NO: 389215 - RNA, 22 nt, Artificial Sequence
  Synthetic
gaaauaagaaggauaaguaagu

SEQ ID NO: 389216 - RNA, 23 nt, Artificial Sequence
  Synthetic
ggaaauaagaaggauaaguaagu

SEQ ID NO: 389217 - RNA, 24 nt, Artificial Sequence
  Synthetic
gggaaauaagaaggauaaguaagu

SEQ ID NO: 389218 - RNA, 18 nt, Artificial Sequence
  Synthetic
ucccacuuauaaguaagu

SEQ ID NO: 389219 - RNA, 19 nt, Artificial Sequence
  Synthetic
cucccacuuauaaguaagu

SEQ ID NO: 389220 - RNA, 20 nt, Artificial Sequence
  Synthetic
gcucccacuuauaaguaagu

SEQ ID NO: 389221 - RNA, 21 nt, Artificial Sequence
  Synthetic
agcucccacuuauaaguaagu

SEQ ID NO: 389222 - RNA, 22 nt, Artificial Sequence
  Synthetic
uagcucccacuuauaaguaagu

SEQ ID NO: 389223 - RNA, 23 nt, Artificial Sequence
  Synthetic
uuagcucccacuuauaaguaagu

SEQ ID NO: 389224 - RNA, 24 nt, Artificial Sequence
  Synthetic
cuuagcucccacuuauaaguaagu

SEQ ID NO: 389225 - RNA, 18 nt, Artificial Sequence
  Synthetic
aguuagaccuuaguaagu

SEQ ID NO: 389226 - RNA, 19 nt, Artificial Sequence
  Synthetic
aaguuagaccuuaguaagu

SEQ ID NO: 389227 - RNA, 20 nt, Artificial Sequence
  Synthetic
caaguuagaccuuaguaagu

SEQ ID NO: 389228 - RNA, 21 nt, Artificial Sequence
  Synthetic
acaaguuagaccuuaguaagu

SEQ ID NO: 389229 - RNA, 22 nt, Artificial Sequence
  Synthetic
uacaaguuagaccuuaguaagu

SEQ ID NO: 389230 - RNA, 23 nt, Artificial Sequence
  Synthetic
uuacaaguuagaccuuaguaagu

SEQ ID NO: 389231 - RNA, 24 nt, Artificial Sequence
  Synthetic
auuacaaguuagaccuuaguaagu

SEQ ID NO: 389232 - RNA, 18 nt, Artificial Sequence
  Synthetic
accucucuacccguaagu

SEQ ID NO: 389233 - RNA, 19 nt, Artificial Sequence
  Synthetic
uaccucucuacccguaagu

SEQ ID NO: 389234 - RNA, 20 nt, Artificial Sequence
  Synthetic
cuaccucucuacccguaagu

SEQ ID NO: 389235 - RNA, 21 nt, Artificial Sequence
  Synthetic
gcuaccucucuacccguaagu

SEQ ID NO: 389236 - RNA, 22 nt, Artificial Sequence
  Synthetic
ugcuaccucucuacccguaagu

SEQ ID NO: 389237 - RNA, 23 nt, Artificial Sequence
  Synthetic
cugcuaccucucuacccguaagu

SEQ ID NO: 389238 - RNA, 24 nt, Artificial Sequence
  Synthetic
ccugcuaccucucuacccguaagu

SEQ ID NO: 389239 - RNA, 18 nt, Artificial Sequence
  Synthetic
gaauggagagagguaagu

SEQ ID NO: 389240 - RNA, 19 nt, Artificial Sequence
  Synthetic
agaauggagagagguaagu

SEQ ID NO: 389241 - RNA, 20 nt, Artificial Sequence
  Synthetic
aagaauggagagagguaagu

SEQ ID NO: 389242 - RNA, 21 nt, Artificial Sequence
  Synthetic
aaagaauggagagagguaagu

SEQ ID NO: 389243 - RNA, 22 nt, Artificial Sequence
  Synthetic
gaaagaauggagagagguaagu

SEQ ID NO: 389244 - RNA, 23 nt, Artificial Sequence
  Synthetic
ggaaagaauggagagagguaagu

SEQ ID NO: 389245 - RNA, 24 nt, Artificial Sequence
  Synthetic
uggaaagaauggagagagguaagu

SEQ ID NO: 389246 - RNA, 18 nt, Artificial Sequence
  Synthetic
gcauuugaauagguaagu

SEQ ID NO: 389247 - RNA, 19 nt, Artificial Sequence
  Synthetic
cgcauuugaauagguaagu

SEQ ID NO: 389248 - RNA, 20 nt, Artificial Sequence
  Synthetic
acgcauuugaauagguaagu

SEQ ID NO: 389249 - RNA, 21 nt, Artificial Sequence
  Synthetic
cacgcauuugaauagguaagu

SEQ ID NO: 389250 - RNA, 22 nt, Artificial Sequence
  Synthetic
acacgcauuugaauagguaagu

SEQ ID NO: 389251 - RNA, 23 nt, Artificial Sequence
  Synthetic
aacacgcauuugaauagguaagu

SEQ ID NO: 389252 - RNA, 24 nt, Artificial Sequence
  Synthetic
aaacacgcauuugaauagguaagu

SEQ ID NO: 389253 - RNA, 18 nt, Artificial Sequence
  Synthetic
gacagauuuuugguaagu

SEQ ID NO: 389254 - RNA, 19 nt, Artificial Sequence
  Synthetic
agacagauuuuugguaagu

SEQ ID NO: 389255 - RNA, 20 nt, Artificial Sequence
  Synthetic
gagacagauuuuugguaagu

SEQ ID NO: 389256 - RNA, 21 nt, Artificial Sequence
  Synthetic
ggagacagauuuuugguaagu

SEQ ID NO: 389257 - RNA, 22 nt, Artificial Sequence
  Synthetic
gggagacagauuuuugguaagu

SEQ ID NO: 389258 - RNA, 23 nt, Artificial Sequence
  Synthetic
ugggagacagauuuuugguaagu

SEQ ID NO: 389259 - RNA, 24 nt, Artificial Sequence
  Synthetic
augggagacagauuuuugguaagu

SEQ ID NO: 389260 - RNA, 18 nt, Artificial Sequence
  Synthetic
cagaaaacugauguaagu

SEQ ID NO: 389261 - RNA, 19 nt, Artificial Sequence
  Synthetic
ucagaaaacugauguaagu

SEQ ID NO: 389262 - RNA, 20 nt, Artificial Sequence
  Synthetic
aucagaaaacugauguaagu

SEQ ID NO: 389263 - RNA, 21 nt, Artificial Sequence
  Synthetic
caucagaaaacugauguaagu

SEQ ID NO: 389264 - RNA, 22 nt, Artificial Sequence
  Synthetic
acaucagaaaacugauguaagu

SEQ ID NO: 389265 - RNA, 23 nt, Artificial Sequence
  Synthetic
aacaucagaaaacugauguaagu

SEQ ID NO: 389266 - RNA, 24 nt, Artificial Sequence
  Synthetic
gaacaucagaaaacugauguaagu

SEQ ID NO: 389267 - RNA, 18 nt, Artificial Sequence
  Synthetic
uuacagcaauguguaagu

SEQ ID NO: 389268 - RNA, 19 nt, Artificial Sequence
  Synthetic
guuacagcaauguguaagu

SEQ ID NO: 389269 - RNA, 20 nt, Artificial Sequence
  Synthetic
gguuacagcaauguguaagu

SEQ ID NO: 389270 - RNA, 21 nt, Artificial Sequence
  Synthetic
agguuacagcaauguguaagu

SEQ ID NO: 389271 - RNA, 22 nt, Artificial Sequence
  Synthetic
aagguuacagcaauguguaagu

SEQ ID NO: 389272 - RNA, 23 nt, Artificial Sequence
  Synthetic
uaagguuacagcaauguguaagu

SEQ ID NO: 389273 - RNA, 24 nt, Artificial Sequence
  Synthetic
uuaagguuacagcaauguguaagu

SEQ ID NO: 389274 - RNA, 18 nt, Artificial Sequence
  Synthetic
cuaagguauuguguaagu

SEQ ID NO: 389275 - RNA, 19 nt, Artificial Sequence
  Synthetic
gcuaagguauuguguaagu

SEQ ID NO: 389276 - RNA, 20 nt, Artificial Sequence
  Synthetic
ggcuaagguauuguguaagu

SEQ ID NO: 389277 - RNA, 21 nt, Artificial Sequence
  Synthetic
uggcuaagguauuguguaagu

SEQ ID NO: 389278 - RNA, 22 nt, Artificial Sequence
  Synthetic
auggcuaagguauuguguaagu

SEQ ID NO: 389279 - RNA, 23 nt, Artificial Sequence
  Synthetic
cauggcuaagguauuguguaagu

SEQ ID NO: 389280 - RNA, 24 nt, Artificial Sequence
  Synthetic
gcauggcuaagguauuguguaagu

SEQ ID NO: 389281 - RNA, 18 nt, Artificial Sequence
  Synthetic
uagcuuccacuuguaagu

SEQ ID NO: 389282 - RNA, 19 nt, Artificial Sequence
  Synthetic
uuagcuuccacuuguaagu

SEQ ID NO: 389283 - RNA, 20 nt, Artificial Sequence
  Synthetic
uuuagcuuccacuuguaagu

SEQ ID NO: 389284 - RNA, 21 nt, Artificial Sequence
  Synthetic
auuuagcuuccacuuguaagu

SEQ ID NO: 389285 - RNA, 22 nt, Artificial Sequence
  Synthetic
uauuuagcuuccacuuguaagu

SEQ ID NO: 389286 - RNA, 23 nt, Artificial Sequence
  Synthetic
uuauuuagcuuccacuuguaagu

SEQ ID NO: 389287 - RNA, 24 nt, Artificial Sequence
  Synthetic
auuauuuagcuuccacuuguaagu

SEQ ID NO: 389288 - RNA, 18 nt, Artificial Sequence
  Synthetic
gcaaacaggguuguaagu

SEQ ID NO: 389289 - RNA, 19 nt, Artificial Sequence
  Synthetic
agcaaacaggguuguaagu

SEQ ID NO: 389290 - RNA, 20 nt, Artificial Sequence
  Synthetic
cagcaaacaggguuguaagu

SEQ ID NO: 389291 - RNA, 21 nt, Artificial Sequence
  Synthetic
acagcaaacaggguuguaagu

SEQ ID NO: 389292 - RNA, 22 nt, Artificial Sequence
  Synthetic
uacagcaaacaggguuguaagu

SEQ ID NO: 389293 - RNA, 23 nt, Artificial Sequence
  Synthetic
auacagcaaacaggguuguaagu

SEQ ID NO: 389294 - RNA, 24 nt, Artificial Sequence
  Synthetic
cauacagcaaacaggguuguaagu

SEQ ID NO: 389295 - RNA, 18 nt, Artificial Sequence
  Synthetic
agagaacucuuuguaagu

SEQ ID NO: 389296 - RNA, 19 nt, Artificial Sequence
  Synthetic
uagagaacucuuuguaagu

SEQ ID NO: 389297 - RNA, 20 nt, Artificial Sequence
  Synthetic
uuagagaacucuuuguaagu

SEQ ID NO: 389298 - RNA, 21 nt, Artificial Sequence
  Synthetic
guuagagaacucuuuguaagu

SEQ ID NO: 389299 - RNA, 22 nt, Artificial Sequence
  Synthetic
gguuagagaacucuuuguaagu

SEQ ID NO: 389300 - RNA, 23 nt, Artificial Sequence
  Synthetic
ugguuagagaacucuuuguaagu

SEQ ID NO: 389301 - RNA, 24 nt, Artificial Sequence
  Synthetic
uugguuagagaacucuuuguaagu

SEQ ID NO: 389302 - RNA, 18 nt, Artificial Sequence
  Synthetic
cucuuccuguaauuaagu

SEQ ID NO: 389303 - RNA, 19 nt, Artificial Sequence
  Synthetic
ucucuuccuguaauuaagu

SEQ ID NO: 389304 - RNA, 20 nt, Artificial Sequence
  Synthetic
aucucuuccuguaauuaagu

SEQ ID NO: 389305 - RNA, 21 nt, Artificial Sequence
  Synthetic
caucucuuccuguaauuaagu

SEQ ID NO: 389306 - RNA, 22 nt, Artificial Sequence
  Synthetic
ucaucucuuccuguaauuaagu

SEQ ID NO: 389307 - RNA, 23 nt, Artificial Sequence
  Synthetic
aucaucucuuccuguaauuaagu

SEQ ID NO: 389308 - RNA, 24 nt, Artificial Sequence
  Synthetic
aaucaucucuuccuguaauuaagu

SEQ ID NO: 389309 - RNA, 18 nt, Artificial Sequence
  Synthetic
guuugcgucauauuaagu

SEQ ID NO: 389310 - RNA, 19 nt, Artificial Sequence
  Synthetic
uguuugcgucauauuaagu

SEQ ID NO: 389311 - RNA, 20 nt, Artificial Sequence
  Synthetic
uuguuugcgucauauuaagu

SEQ ID NO: 389312 - RNA, 21 nt, Artificial Sequence
  Synthetic
uuuguuugcgucauauuaagu

SEQ ID NO: 389313 - RNA, 22 nt, Artificial Sequence
  Synthetic
uuuuguuugcgucauauuaagu

SEQ ID NO: 389314 - RNA, 23 nt, Artificial Sequence
  Synthetic
auuuuguuugcgucauauuaagu

SEQ ID NO: 389315 - RNA, 24 nt, Artificial Sequence
  Synthetic
aauuuuguuugcgucauauuaagu

SEQ ID NO: 389316 - RNA, 18 nt, Artificial Sequence
  Synthetic
cagaaaagcuuauuaagu

SEQ ID NO: 389317 - RNA, 19 nt, Artificial Sequence
  Synthetic
ccagaaaagcuuauuaagu

SEQ ID NO: 389318 - RNA, 20 nt, Artificial Sequence
  Synthetic
accagaaaagcuuauuaagu

SEQ ID NO: 389319 - RNA, 21 nt, Artificial Sequence
  Synthetic
aaccagaaaagcuuauuaagu

SEQ ID NO: 389320 - RNA, 22 nt, Artificial Sequence
  Synthetic
aaaccagaaaagcuuauuaagu

SEQ ID NO: 389321 - RNA, 23 nt, Artificial Sequence
  Synthetic
aaaaccagaaaagcuuauuaagu

SEQ ID NO: 389322 - RNA, 24 nt, Artificial Sequence
  Synthetic
gaaaaccagaaaagcuuauuaagu

SEQ ID NO: 389323 - RNA, 18 nt, Artificial Sequence
  Synthetic
cucauuuuuaacuuaagu

SEQ ID NO: 389324 - RNA, 19 nt, Artificial Sequence
  Synthetic
acucauuuuuaacuuaagu

SEQ ID NO: 389325 - RNA, 20 nt, Artificial Sequence
  Synthetic
uacucauuuuuaacuuaagu

SEQ ID NO: 389326 - RNA, 21 nt, Artificial Sequence
  Synthetic
auacucauuuuuaacuuaagu

SEQ ID NO: 389327 - RNA, 22 nt, Artificial Sequence
  Synthetic
cauacucauuuuuaacuuaagu

SEQ ID NO: 389328 - RNA, 23 nt, Artificial Sequence
  Synthetic
ucauacucauuuuuaacuuaagu

SEQ ID NO: 389329 - RNA, 24 nt, Artificial Sequence
  Synthetic
uucauacucauuuuuaacuuaagu

SEQ ID NO: 389330 - RNA, 18 nt, Artificial Sequence
  Synthetic
acuauuauuuacuuaagu

SEQ ID NO: 389331 - RNA, 19 nt, Artificial Sequence
  Synthetic
cacuauuauuuacuuaagu

SEQ ID NO: 389332 - RNA, 20 nt, Artificial Sequence
  Synthetic
gcacuauuauuuacuuaagu

SEQ ID NO: 389333 - RNA, 21 nt, Artificial Sequence
  Synthetic
ugcacuauuauuuacuuaagu

SEQ ID NO: 389334 - RNA, 22 nt, Artificial Sequence
  Synthetic
uugcacuauuauuuacuuaagu

SEQ ID NO: 389335 - RNA, 23 nt, Artificial Sequence
  Synthetic
auugcacuauuauuuacuuaagu

SEQ ID NO: 389336 - RNA, 24 nt, Artificial Sequence
  Synthetic
aauugcacuauuauuuacuuaagu

SEQ ID NO: 389337 - RNA, 18 nt, Artificial Sequence
  Synthetic
aaggaugcuuccuuaagu

SEQ ID NO: 389338 - RNA, 19 nt, Artificial Sequence
  Synthetic
aaaggaugcuuccuuaagu

SEQ ID NO: 389339 - RNA, 20 nt, Artificial Sequence
  Synthetic
gaaaggaugcuuccuuaagu

SEQ ID NO: 389340 - RNA, 21 nt, Artificial Sequence
  Synthetic
ugaaaggaugcuuccuuaagu

SEQ ID NO: 389341 - RNA, 22 nt, Artificial Sequence
  Synthetic
augaaaggaugcuuccuuaagu

SEQ ID NO: 389342 - RNA, 23 nt, Artificial Sequence
  Synthetic
uaugaaaggaugcuuccuuaagu

SEQ ID NO: 389343 - RNA, 24 nt, Artificial Sequence
  Synthetic
uuaugaaaggaugcuuccuuaagu

SEQ ID NO: 389344 - RNA, 18 nt, Artificial Sequence
  Synthetic
uuuagguuuggcuuaagu

SEQ ID NO: 389345 - RNA, 19 nt, Artificial Sequence
  Synthetic
cuuuagguuuggcuuaagu

SEQ ID NO: 389346 - RNA, 20 nt, Artificial Sequence
  Synthetic
acuuuagguuuggcuuaagu

SEQ ID NO: 389347 - RNA, 21 nt, Artificial Sequence
  Synthetic
cacuuuagguuuggcuuaagu

SEQ ID NO: 389348 - RNA, 22 nt, Artificial Sequence
  Synthetic
ucacuuuagguuuggcuuaagu

SEQ ID NO: 389349 - RNA, 23 nt, Artificial Sequence
  Synthetic
aucacuuuagguuuggcuuaagu

SEQ ID NO: 389350 - RNA, 24 nt, Artificial Sequence
  Synthetic
uaucacuuuagguuuggcuuaagu

SEQ ID NO: 389351 - RNA, 18 nt, Artificial Sequence
  Synthetic
cuguugcagugcuuaagu

SEQ ID NO: 389352 - RNA, 19 nt, Artificial Sequence
  Synthetic
gcuguugcagugcuuaagu

SEQ ID NO: 389353 - RNA, 20 nt, Artificial Sequence
  Synthetic
ugcuguugcagugcuuaagu

SEQ ID NO: 389354 - RNA, 21 nt, Artificial Sequence
  Synthetic
cugcuguugcagugcuuaagu

SEQ ID NO: 389355 - RNA, 22 nt, Artificial Sequence
  Synthetic
ucugcuguugcagugcuuaagu

SEQ ID NO: 389356 - RNA, 23 nt, Artificial Sequence
  Synthetic
cucugcuguugcagugcuuaagu

SEQ ID NO: 389357 - RNA, 24 nt, Artificial Sequence
  Synthetic
ucucugcuguugcagugcuuaagu

SEQ ID NO: 389358 - RNA, 18 nt, Artificial Sequence
  Synthetic
gaucuuuucuaguuaagu

SEQ ID NO: 389359 - RNA, 19 nt, Artificial Sequence
  Synthetic
ugaucuuuucuaguuaagu

SEQ ID NO: 389360 - RNA, 20 nt, Artificial Sequence
  Synthetic
augaucuuuucuaguuaagu

SEQ ID NO: 389361 - RNA, 21 nt, Artificial Sequence
  Synthetic
aaugaucuuuucuaguuaagu

SEQ ID NO: 389362 - RNA, 22 nt, Artificial Sequence
  Synthetic
gaaugaucuuuucuaguuaagu

SEQ ID NO: 389363 - RNA, 23 nt, Artificial Sequence
  Synthetic
ugaaugaucuuuucuaguuaagu

SEQ ID NO: 389364 - RNA, 24 nt, Artificial Sequence
  Synthetic
uugaaugaucuuuucuaguuaagu

SEQ ID NO: 389365 - RNA, 18 nt, Artificial Sequence
  Synthetic
ugauaacuagauuuaagu

SEQ ID NO: 389366 - RNA, 19 nt, Artificial Sequence
  Synthetic
gugauaacuagauuuaagu

SEQ ID NO: 389367 - RNA, 20 nt, Artificial Sequence
  Synthetic
agugauaacuagauuuaagu

SEQ ID NO: 389368 - RNA, 21 nt, Artificial Sequence
  Synthetic
uagugauaacuagauuuaagu

SEQ ID NO: 389369 - RNA, 22 nt, Artificial Sequence
  Synthetic
cuagugauaacuagauuuaagu

SEQ ID NO: 389370 - RNA, 23 nt, Artificial Sequence
  Synthetic
ccuagugauaacuagauuuaagu

SEQ ID NO: 389371 - RNA, 24 nt, Artificial Sequence
  Synthetic
uccuagugauaacuagauuuaagu

SEQ ID NO: 389372 - RNA, 18 nt, Artificial Sequence
  Synthetic
ccucuauuggauuuaagu

SEQ ID NO: 389373 - RNA, 19 nt, Artificial Sequence
  Synthetic
accucuauuggauuuaagu

SEQ ID NO: 389374 - RNA, 20 nt, Artificial Sequence
  Synthetic
uaccucuauuggauuuaagu

SEQ ID NO: 389375 - RNA, 21 nt, Artificial Sequence
  Synthetic
cuaccucuauuggauuuaagu

SEQ ID NO: 389376 - RNA, 22 nt, Artificial Sequence
  Synthetic
acuaccucuauuggauuuaagu

SEQ ID NO: 389377 - RNA, 23 nt, Artificial Sequence
  Synthetic
aacuaccucuauuggauuuaagu

SEQ ID NO: 389378 - RNA, 24 nt, Artificial Sequence
  Synthetic
aaacuaccucuauuggauuuaagu

SEQ ID NO: 389379 - RNA, 18 nt, Artificial Sequence
  Synthetic
aaauuaugcacuuuaagu

SEQ ID NO: 389380 - RNA, 19 nt, Artificial Sequence
  Synthetic
aaaauuaugcacuuuaagu

SEQ ID NO: 389381 - RNA, 20 nt, Artificial Sequence
  Synthetic
gaaaauuaugcacuuuaagu

SEQ ID NO: 389382 - RNA, 21 nt, Artificial Sequence
  Synthetic
agaaaauuaugcacuuuaagu

SEQ ID NO: 389383 - RNA, 22 nt, Artificial Sequence
  Synthetic
cagaaaauuaugcacuuuaagu

SEQ ID NO: 389384 - RNA, 23 nt, Artificial Sequence
  Synthetic
ccagaaaauuaugcacuuuaagu

SEQ ID NO: 389385 - RNA, 24 nt, Artificial Sequence
  Synthetic
accagaaaauuaugcacuuuaagu

SEQ ID NO: 389386 - RNA, 18 nt, Artificial Sequence
  Synthetic
uuaugaucuccuuuaagu

SEQ ID NO: 389387 - RNA, 19 nt, Artificial Sequence
  Synthetic
guuaugaucuccuuuaagu

SEQ ID NO: 389388 - RNA, 20 nt, Artificial Sequence
  Synthetic
cguuaugaucuccuuuaagu

SEQ ID NO: 389389 - RNA, 21 nt, Artificial Sequence
  Synthetic
ucguuaugaucuccuuuaagu

SEQ ID NO: 389390 - RNA, 22 nt, Artificial Sequence
  Synthetic
aucguuaugaucuccuuuaagu

SEQ ID NO: 389391 - RNA, 23 nt, Artificial Sequence
  Synthetic
aaucguuaugaucuccuuuaagu

SEQ ID NO: 389392 - RNA, 24 nt, Artificial Sequence
  Synthetic
caaucguuaugaucuccuuuaagu

SEQ ID NO: 389393 - RNA, 18 nt, Artificial Sequence
  Synthetic
acauuaacugcuuuaagu

SEQ ID NO: 389394 - RNA, 19 nt, Artificial Sequence
  Synthetic
aacauuaacugcuuuaagu

SEQ ID NO: 389395 - RNA, 20 nt, Artificial Sequence
  Synthetic
aaacauuaacugcuuuaagu

SEQ ID NO: 389396 - RNA, 21 nt, Artificial Sequence
  Synthetic
aaaacauuaacugcuuuaagu

SEQ ID NO: 389397 - RNA, 22 nt, Artificial Sequence
  Synthetic
gaaaacauuaacugcuuuaagu

SEQ ID NO: 389398 - RNA, 23 nt, Artificial Sequence
  Synthetic
cgaaaacauuaacugcuuuaagu

SEQ ID NO: 389399 - RNA, 24 nt, Artificial Sequence
  Synthetic
acgaaaacauuaacugcuuuaagu

SEQ ID NO: 389400 - RNA, 18 nt, Artificial Sequence
  Synthetic
uuuucuaauguuuuaagu

SEQ ID NO: 389401 - RNA, 19 nt, Artificial Sequence
  Synthetic
uuuuucuaauguuuuaagu

SEQ ID NO: 389402 - RNA, 20 nt, Artificial Sequence
  Synthetic
auuuuucuaauguuuuaagu

SEQ ID NO: 389403 - RNA, 21 nt, Artificial Sequence
  Synthetic
uauuuuucuaauguuuuaagu

SEQ ID NO: 389404 - RNA, 22 nt, Artificial Sequence
  Synthetic
cuauuuuucuaauguuuuaagu

SEQ ID NO: 389405 - RNA, 23 nt, Artificial Sequence
  Synthetic
ccuauuuuucuaauguuuuaagu

SEQ ID NO: 389406 - RNA, 24 nt, Artificial Sequence
  Synthetic
accuauuuuucuaauguuuuaagu

SEQ ID NO: 389407 - RNA, 18 nt, Artificial Sequence
  Synthetic
augaaucuaaaaaacagu

SEQ ID NO: 389408 - RNA, 19 nt, Artificial Sequence
  Synthetic
uaugaaucuaaaaaacagu

SEQ ID NO: 389409 - RNA, 20 nt, Artificial Sequence
  Synthetic
auaugaaucuaaaaaacagu

SEQ ID NO: 389410 - RNA, 21 nt, Artificial Sequence
  Synthetic
cauaugaaucuaaaaaacagu

SEQ ID NO: 389411 - RNA, 22 nt, Artificial Sequence
  Synthetic
ucauaugaaucuaaaaaacagu

SEQ ID NO: 389412 - RNA, 23 nt, Artificial Sequence
  Synthetic
uucauaugaaucuaaaaaacagu

SEQ ID NO: 389413 - RNA, 24 nt, Artificial Sequence
  Synthetic
auucauaugaaucuaaaaaacagu

SEQ ID NO: 389414 - RNA, 18 nt, Artificial Sequence
  Synthetic
accuacauggaaaacagu

SEQ ID NO: 389415 - RNA, 19 nt, Artificial Sequence
  Synthetic
aaccuacauggaaaacagu

SEQ ID NO: 389416 - RNA, 20 nt, Artificial Sequence
  Synthetic
caaccuacauggaaaacagu

SEQ ID NO: 389417 - RNA, 21 nt, Artificial Sequence
  Synthetic
acaaccuacauggaaaacagu

SEQ ID NO: 389418 - RNA, 22 nt, Artificial Sequence
  Synthetic
uacaaccuacauggaaaacagu

SEQ ID NO: 389419 - RNA, 23 nt, Artificial Sequence
  Synthetic
guacaaccuacauggaaaacagu

SEQ ID NO: 389420 - RNA, 24 nt, Artificial Sequence
  Synthetic
aguacaaccuacauggaaaacagu

SEQ ID NO: 389421 - RNA, 18 nt, Artificial Sequence
  Synthetic
gagguaaaugaaaacagu

SEQ ID NO: 389422 - RNA, 19 nt, Artificial Sequence
  Synthetic
ggagguaaaugaaaacagu

SEQ ID NO: 389423 - RNA, 20 nt, Artificial Sequence
  Synthetic
aggagguaaaugaaaacagu

SEQ ID NO: 389424 - RNA, 21 nt, Artificial Sequence
  Synthetic
caggagguaaaugaaaacagu

SEQ ID NO: 389425 - RNA, 22 nt, Artificial Sequence
  Synthetic
ccaggagguaaaugaaaacagu

SEQ ID NO: 389426 - RNA, 23 nt, Artificial Sequence
  Synthetic
uccaggagguaaaugaaaacagu

SEQ ID NO: 389427 - RNA, 24 nt, Artificial Sequence
  Synthetic
uuccaggagguaaaugaaaacagu

SEQ ID NO: 389428 - RNA, 18 nt, Artificial Sequence
  Synthetic
aacaacuuugaaaacagu

SEQ ID NO: 389429 - RNA, 19 nt, Artificial Sequence
  Synthetic
aaacaacuuugaaaacagu

SEQ ID NO: 389430 - RNA, 20 nt, Artificial Sequence
  Synthetic
gaaacaacuuugaaaacagu

SEQ ID NO: 389431 - RNA, 21 nt, Artificial Sequence
  Synthetic
ugaaacaacuuugaaaacagu

SEQ ID NO: 389432 - RNA, 22 nt, Artificial Sequence
  Synthetic
gugaaacaacuuugaaaacagu

SEQ ID NO: 389433 - RNA, 23 nt, Artificial Sequence
  Synthetic
ggugaaacaacuuugaaaacagu

SEQ ID NO: 389434 - RNA, 24 nt, Artificial Sequence
  Synthetic
uggugaaacaacuuugaaaacagu

SEQ ID NO: 389435 - RNA, 18 nt, Artificial Sequence
  Synthetic
aguugacccucaaacagu

SEQ ID NO: 389436 - RNA, 19 nt, Artificial Sequence
  Synthetic
caguugacccucaaacagu

SEQ ID NO: 389437 - RNA, 20 nt, Artificial Sequence
  Synthetic
acaguugacccucaaacagu

SEQ ID NO: 389438 - RNA, 21 nt, Artificial Sequence
  Synthetic
uacaguugacccucaaacagu

SEQ ID NO: 389439 - RNA, 22 nt, Artificial Sequence
  Synthetic
auacaguugacccucaaacagu

SEQ ID NO: 389440 - RNA, 23 nt, Artificial Sequence
  Synthetic
uauacaguugacccucaaacagu

SEQ ID NO: 389441 - RNA, 24 nt, Artificial Sequence
  Synthetic
uuauacaguugacccucaaacagu

SEQ ID NO: 389442 - RNA, 18 nt, Artificial Sequence
  Synthetic
agucugagaugaaacagu

SEQ ID NO: 389443 - RNA, 19 nt, Artificial Sequence
  Synthetic
gagucugagaugaaacagu

SEQ ID NO: 389444 - RNA, 20 nt, Artificial Sequence
  Synthetic
agagucugagaugaaacagu

SEQ ID NO: 389445 - RNA, 21 nt, Artificial Sequence
  Synthetic
aagagucugagaugaaacagu

SEQ ID NO: 389446 - RNA, 22 nt, Artificial Sequence
  Synthetic
aaagagucugagaugaaacagu

SEQ ID NO: 389447 - RNA, 23 nt, Artificial Sequence
  Synthetic
gaaagagucugagaugaaacagu

SEQ ID NO: 389448 - RNA, 24 nt, Artificial Sequence
  Synthetic
ugaaagagucugagaugaaacagu

SEQ ID NO: 389449 - RNA, 18 nt, Artificial Sequence
  Synthetic
uuauaguugcuaaacagu

SEQ ID NO: 389450 - RNA, 19 nt, Artificial Sequence
  Synthetic
uuuauaguugcuaaacagu

SEQ ID NO: 389451 - RNA, 20 nt, Artificial Sequence
  Synthetic
auuuauaguugcuaaacagu

SEQ ID NO: 389452 - RNA, 21 nt, Artificial Sequence
  Synthetic
aauuuauaguugcuaaacagu

SEQ ID NO: 389453 - RNA, 22 nt, Artificial Sequence
  Synthetic
uaauuuauaguugcuaaacagu

SEQ ID NO: 389454 - RNA, 23 nt, Artificial Sequence
  Synthetic
cuaauuuauaguugcuaaacagu

SEQ ID NO: 389455 - RNA, 24 nt, Artificial Sequence
  Synthetic
ucuaauuuauaguugcuaaacagu

SEQ ID NO: 389456 - RNA, 18 nt, Artificial Sequence
  Synthetic
aauagaggaguaaacagu

SEQ ID NO: 389457 - RNA, 19 nt, Artificial Sequence
  Synthetic
uaauagaggaguaaacagu

SEQ ID NO: 389458 - RNA, 20 nt, Artificial Sequence
  Synthetic
auaauagaggaguaaacagu

SEQ ID NO: 389459 - RNA, 21 nt, Artificial Sequence
  Synthetic
uauaauagaggaguaaacagu

SEQ ID NO: 389460 - RNA, 22 nt, Artificial Sequence
  Synthetic
auauaauagaggaguaaacagu

SEQ ID NO: 389461 - RNA, 23 nt, Artificial Sequence
  Synthetic
cauauaauagaggaguaaacagu

SEQ ID NO: 389462 - RNA, 24 nt, Artificial Sequence
  Synthetic
ccauauaauagaggaguaaacagu

SEQ ID NO: 389463 - RNA, 18 nt, Artificial Sequence
  Synthetic
ccaugcagggacaacagu

SEQ ID NO: 389464 - RNA, 19 nt, Artificial Sequence
  Synthetic
cccaugcagggacaacagu

SEQ ID NO: 389465 - RNA, 20 nt, Artificial Sequence
  Synthetic
acccaugcagggacaacagu

SEQ ID NO: 389466 - RNA, 21 nt, Artificial Sequence
  Synthetic
gacccaugcagggacaacagu

SEQ ID NO: 389467 - RNA, 22 nt, Artificial Sequence
  Synthetic
agacccaugcagggacaacagu

SEQ ID NO: 389468 - RNA, 23 nt, Artificial Sequence
  Synthetic
gagacccaugcagggacaacagu

SEQ ID NO: 389469 - RNA, 24 nt, Artificial Sequence
  Synthetic
ugagacccaugcagggacaacagu

SEQ ID NO: 389470 - RNA, 18 nt, Artificial Sequence
  Synthetic
auuguugacuacaacagu

SEQ ID NO: 389471 - RNA, 19 nt, Artificial Sequence
  Synthetic
aauuguugacuacaacagu

SEQ ID NO: 389472 - RNA, 20 nt, Artificial Sequence
  Synthetic
gaauuguugacuacaacagu

SEQ ID NO: 389473 - RNA, 21 nt, Artificial Sequence
  Synthetic
agaauuguugacuacaacagu

SEQ ID NO: 389474 - RNA, 22 nt, Artificial Sequence
  Synthetic
aagaauuguugacuacaacagu

SEQ ID NO: 389475 - RNA, 23 nt, Artificial Sequence
  Synthetic
uaagaauuguugacuacaacagu

SEQ ID NO: 389476 - RNA, 24 nt, Artificial Sequence
  Synthetic
uuaagaauuguugacuacaacagu

SEQ ID NO: 389477 - RNA, 18 nt, Artificial Sequence
  Synthetic
acaaugugauagaacagu

SEQ ID NO: 389478 - RNA, 19 nt, Artificial Sequence
  Synthetic
cacaaugugauagaacagu

SEQ ID NO: 389479 - RNA, 20 nt, Artificial Sequence
  Synthetic
acacaaugugauagaacagu

SEQ ID NO: 389480 - RNA, 21 nt, Artificial Sequence
  Synthetic
cacacaaugugauagaacagu

SEQ ID NO: 389481 - RNA, 22 nt, Artificial Sequence
  Synthetic
acacacaaugugauagaacagu

SEQ ID NO: 389482 - RNA, 23 nt, Artificial Sequence
  Synthetic
aacacacaaugugauagaacagu

SEQ ID NO: 389483 - RNA, 24 nt, Artificial Sequence
  Synthetic
caacacacaaugugauagaacagu

SEQ ID NO: 389484 - RNA, 18 nt, Artificial Sequence
  Synthetic
aaaaggcuuuagaacagu

SEQ ID NO: 389485 - RNA, 19 nt, Artificial Sequence
  Synthetic
gaaaaggcuuuagaacagu

SEQ ID NO: 389486 - RNA, 20 nt, Artificial Sequence
  Synthetic
ggaaaaggcuuuagaacagu

SEQ ID NO: 389487 - RNA, 21 nt, Artificial Sequence
  Synthetic
aggaaaaggcuuuagaacagu

SEQ ID NO: 389488 - RNA, 22 nt, Artificial Sequence
  Synthetic
caggaaaaggcuuuagaacagu

SEQ ID NO: 389489 - RNA, 23 nt, Artificial Sequence
  Synthetic
acaggaaaaggcuuuagaacagu

SEQ ID NO: 389490 - RNA, 24 nt, Artificial Sequence
  Synthetic
gacaggaaaaggcuuuagaacagu

SEQ ID NO: 389491 - RNA, 18 nt, Artificial Sequence
  Synthetic
ggcacagguuggaacagu

SEQ ID NO: 389492 - RNA, 19 nt, Artificial Sequence
  Synthetic
aggcacagguuggaacagu

SEQ ID NO: 389493 - RNA, 20 nt, Artificial Sequence
  Synthetic
gaggcacagguuggaacagu

SEQ ID NO: 389494 - RNA, 21 nt, Artificial Sequence
  Synthetic
agaggcacagguuggaacagu

SEQ ID NO: 389495 - RNA, 22 nt, Artificial Sequence
  Synthetic
aagaggcacagguuggaacagu

SEQ ID NO: 389496 - RNA, 23 nt, Artificial Sequence
  Synthetic
uaagaggcacagguuggaacagu

SEQ ID NO: 389497 - RNA, 24 nt, Artificial Sequence
  Synthetic
guaagaggcacagguuggaacagu

SEQ ID NO: 389498 - RNA, 18 nt, Artificial Sequence
  Synthetic
uagaucaaggugaacagu

SEQ ID NO: 389499 - RNA, 19 nt, Artificial Sequence
  Synthetic
uuagaucaaggugaacagu

SEQ ID NO: 389500 - RNA, 20 nt, Artificial Sequence
  Synthetic
uuuagaucaaggugaacagu

SEQ ID NO: 389501 - RNA, 21 nt, Artificial Sequence
  Synthetic
guuuagaucaaggugaacagu

SEQ ID NO: 389502 - RNA, 22 nt, Artificial Sequence
  Synthetic
gguuuagaucaaggugaacagu

SEQ ID NO: 389503 - RNA, 23 nt, Artificial Sequence
  Synthetic
agguuuagaucaaggugaacagu

SEQ ID NO: 389504 - RNA, 24 nt, Artificial Sequence
  Synthetic
uagguuuagaucaaggugaacagu

SEQ ID NO: 389505 - RNA, 18 nt, Artificial Sequence
  Synthetic
uucauaacuuugaacagu

SEQ ID NO: 389506 - RNA, 19 nt, Artificial Sequence
  Synthetic
uuucauaacuuugaacagu

SEQ ID NO: 389507 - RNA, 20 nt, Artificial Sequence
  Synthetic
auuucauaacuuugaacagu

SEQ ID NO: 389508 - RNA, 21 nt, Artificial Sequence
  Synthetic
cauuucauaacuuugaacagu

SEQ ID NO: 389509 - RNA, 22 nt, Artificial Sequence
  Synthetic
ccauuucauaacuuugaacagu

SEQ ID NO: 389510 - RNA, 23 nt, Artificial Sequence
  Synthetic
cccauuucauaacuuugaacagu

SEQ ID NO: 389511 - RNA, 24 nt, Artificial Sequence
  Synthetic
ucccauuucauaacuuugaacagu

SEQ ID NO: 389512 - RNA, 18 nt, Artificial Sequence
  Synthetic
gauuaaugaucuaacagu

SEQ ID NO: 389513 - RNA, 19 nt, Artificial Sequence
  Synthetic
ggauuaaugaucuaacagu

SEQ ID NO: 389514 - RNA, 20 nt, Artificial Sequence
  Synthetic
aggauuaaugaucuaacagu

SEQ ID NO: 389515 - RNA, 21 nt, Artificial Sequence
  Synthetic
uaggauuaaugaucuaacagu

SEQ ID NO: 389516 - RNA, 22 nt, Artificial Sequence
  Synthetic
cuaggauuaaugaucuaacagu

SEQ ID NO: 389517 - RNA, 23 nt, Artificial Sequence
  Synthetic
gcuaggauuaaugaucuaacagu

SEQ ID NO: 389518 - RNA, 24 nt, Artificial Sequence
  Synthetic
ggcuaggauuaaugaucuaacagu

SEQ ID NO: 389519 - RNA, 18 nt, Artificial Sequence
  Synthetic
agagaaacaaguaacagu

SEQ ID NO: 389520 - RNA, 19 nt, Artificial Sequence
  Synthetic
aagagaaacaaguaacagu

SEQ ID NO: 389521 - RNA, 20 nt, Artificial Sequence
  Synthetic
caagagaaacaaguaacagu

SEQ ID NO: 389522 - RNA, 21 nt, Artificial Sequence
  Synthetic
gcaagagaaacaaguaacagu

SEQ ID NO: 389523 - RNA, 22 nt, Artificial Sequence
  Synthetic
ggcaagagaaacaaguaacagu

SEQ ID NO: 389524 - RNA, 23 nt, Artificial Sequence
  Synthetic
aggcaagagaaacaaguaacagu

SEQ ID NO: 389525 - RNA, 24 nt, Artificial Sequence
  Synthetic
caggcaagagaaacaaguaacagu

SEQ ID NO: 389526 - RNA, 18 nt, Artificial Sequence
  Synthetic
aaaauuuuuauuaacagu

SEQ ID NO: 389527 - RNA, 19 nt, Artificial Sequence
  Synthetic
uaaaauuuuuauuaacagu

SEQ ID NO: 389528 - RNA, 20 nt, Artificial Sequence
  Synthetic
auaaaauuuuuauuaacagu

SEQ ID NO: 389529 - RNA, 21 nt, Artificial Sequence
  Synthetic
uauaaaauuuuuauuaacagu

SEQ ID NO: 389530 - RNA, 22 nt, Artificial Sequence
  Synthetic
uuauaaaauuuuuauuaacagu

SEQ ID NO: 389531 - RNA, 23 nt, Artificial Sequence
  Synthetic
auuauaaaauuuuuauuaacagu

SEQ ID NO: 389532 - RNA, 24 nt, Artificial Sequence
  Synthetic
aauuauaaaauuuuuauuaacagu

SEQ ID NO: 389533 - RNA, 18 nt, Artificial Sequence
  Synthetic
uaugucuuuguuaacagu

SEQ ID NO: 389534 - RNA, 19 nt, Artificial Sequence
  Synthetic
auaugucuuuguuaacagu

SEQ ID NO: 389535 - RNA, 20 nt, Artificial Sequence
  Synthetic
gauaugucuuuguuaacagu

SEQ ID NO: 389536 - RNA, 21 nt, Artificial Sequence
  Synthetic
agauaugucuuuguuaacagu

SEQ ID NO: 389537 - RNA, 22 nt, Artificial Sequence
  Synthetic
cagauaugucuuuguuaacagu

SEQ ID NO: 389538 - RNA, 23 nt, Artificial Sequence
  Synthetic
ucagauaugucuuuguuaacagu

SEQ ID NO: 389539 - RNA, 24 nt, Artificial Sequence
  Synthetic
cucagauaugucuuuguuaacagu

SEQ ID NO: 389540 - RNA, 18 nt, Artificial Sequence
  Synthetic
gcuuugauuuuuaacagu

SEQ ID NO: 389541 - RNA, 19 nt, Artificial Sequence
  Synthetic
cgcuuugauuuuuaacagu

SEQ ID NO: 389542 - RNA, 20 nt, Artificial Sequence
  Synthetic
ucgcuuugauuuuuaacagu

SEQ ID NO: 389543 - RNA, 21 nt, Artificial Sequence
  Synthetic
aucgcuuugauuuuuaacagu

SEQ ID NO: 389544 - RNA, 22 nt, Artificial Sequence
  Synthetic
uaucgcuuugauuuuuaacagu

SEQ ID NO: 389545 - RNA, 23 nt, Artificial Sequence
  Synthetic
uuaucgcuuugauuuuuaacagu

SEQ ID NO: 389546 - RNA, 24 nt, Artificial Sequence
  Synthetic
guuaucgcuuugauuuuuaacagu

SEQ ID NO: 389547 - RNA, 18 nt, Artificial Sequence
  Synthetic
cagccugggcaacacagu

SEQ ID NO: 389548 - RNA, 19 nt, Artificial Sequence
  Synthetic
ccagccugggcaacacagu

SEQ ID NO: 389549 - RNA, 20 nt, Artificial Sequence
  Synthetic
accagccugggcaacacagu

SEQ ID NO: 389550 - RNA, 21 nt, Artificial Sequence
  Synthetic
aaccagccugggcaacacagu

SEQ ID NO: 389551 - RNA, 22 nt, Artificial Sequence
  Synthetic
aaaccagccugggcaacacagu

SEQ ID NO: 389552 - RNA, 23 nt, Artificial Sequence
  Synthetic
aaaaccagccugggcaacacagu

SEQ ID NO: 389553 - RNA, 24 nt, Artificial Sequence
  Synthetic
caaaaccagccugggcaacacagu

SEQ ID NO: 389554 - RNA, 18 nt, Artificial Sequence
  Synthetic
aggacugucuaacacagu

SEQ ID NO: 389555 - RNA, 19 nt, Artificial Sequence
  Synthetic
caggacugucuaacacagu

SEQ ID NO: 389556 - RNA, 20 nt, Artificial Sequence
  Synthetic
gcaggacugucuaacacagu

SEQ ID NO: 389557 - RNA, 21 nt, Artificial Sequence
  Synthetic
agcaggacugucuaacacagu

SEQ ID NO: 389558 - RNA, 22 nt, Artificial Sequence
  Synthetic
aagcaggacugucuaacacagu

SEQ ID NO: 389559 - RNA, 23 nt, Artificial Sequence
  Synthetic
aaagcaggacugucuaacacagu

SEQ ID NO: 389560 - RNA, 24 nt, Artificial Sequence
  Synthetic
caaagcaggacugucuaacacagu

SEQ ID NO: 389561 - RNA, 18 nt, Artificial Sequence
  Synthetic
gauggucauacacacagu

SEQ ID NO: 389562 - RNA, 19 nt, Artificial Sequence
  Synthetic
agauggucauacacacagu

SEQ ID NO: 389563 - RNA, 20 nt, Artificial Sequence
  Synthetic
cagauggucauacacacagu

SEQ ID NO: 389564 - RNA, 21 nt, Artificial Sequence
  Synthetic
ucagauggucauacacacagu

SEQ ID NO: 389565 - RNA, 22 nt, Artificial Sequence
  Synthetic
gucagauggucauacacacagu

SEQ ID NO: 389566 - RNA, 23 nt, Artificial Sequence
  Synthetic
ugucagauggucauacacacagu

SEQ ID NO: 389567 - RNA, 24 nt, Artificial Sequence
  Synthetic
gugucagauggucauacacacagu

SEQ ID NO: 389568 - RNA, 18 nt, Artificial Sequence
  Synthetic
ggucuguggaaccacagu

SEQ ID NO: 389569 - RNA, 19 nt, Artificial Sequence
  Synthetic
uggucuguggaaccacagu

SEQ ID NO: 389570 - RNA, 20 nt, Artificial Sequence
  Synthetic
cuggucuguggaaccacagu

SEQ ID NO: 389571 - RNA, 21 nt, Artificial Sequence
  Synthetic
ucuggucuguggaaccacagu

SEQ ID NO: 389572 - RNA, 22 nt, Artificial Sequence
  Synthetic
uucuggucuguggaaccacagu

SEQ ID NO: 389573 - RNA, 23 nt, Artificial Sequence
  Synthetic
uuucuggucuguggaaccacagu

SEQ ID NO: 389574 - RNA, 24 nt, Artificial Sequence
  Synthetic
auuucuggucuguggaaccacagu

SEQ ID NO: 389575 - RNA, 18 nt, Artificial Sequence
  Synthetic
acuuagcuuaggcacagu

SEQ ID NO: 389576 - RNA, 19 nt, Artificial Sequence
  Synthetic
cacuuagcuuaggcacagu

SEQ ID NO: 389577 - RNA, 20 nt, Artificial Sequence
  Synthetic
gcacuuagcuuaggcacagu

SEQ ID NO: 389578 - RNA, 21 nt, Artificial Sequence
  Synthetic
ggcacuuagcuuaggcacagu

SEQ ID NO: 389579 - RNA, 22 nt, Artificial Sequence
  Synthetic
aggcacuuagcuuaggcacagu

SEQ ID NO: 389580 - RNA, 23 nt, Artificial Sequence
  Synthetic
caggcacuuagcuuaggcacagu

SEQ ID NO: 389581 - RNA, 24 nt, Artificial Sequence
  Synthetic
ccaggcacuuagcuuaggcacagu

SEQ ID NO: 389582 - RNA, 18 nt, Artificial Sequence
  Synthetic
aauuccaggcugcacagu

SEQ ID NO: 389583 - RNA, 19 nt, Artificial Sequence
  Synthetic
gaauuccaggcugcacagu

SEQ ID NO: 389584 - RNA, 20 nt, Artificial Sequence
  Synthetic
ugaauuccaggcugcacagu

SEQ ID NO: 389585 - RNA, 21 nt, Artificial Sequence
  Synthetic
uugaauuccaggcugcacagu

SEQ ID NO: 389586 - RNA, 22 nt, Artificial Sequence
  Synthetic
auugaauuccaggcugcacagu

SEQ ID NO: 389587 - RNA, 23 nt, Artificial Sequence
  Synthetic
cauugaauuccaggcugcacagu

SEQ ID NO: 389588 - RNA, 24 nt, Artificial Sequence
  Synthetic
acauugaauuccaggcugcacagu

SEQ ID NO: 389589 - RNA, 18 nt, Artificial Sequence
  Synthetic
guuuauuaaaaucacagu

SEQ ID NO: 389590 - RNA, 19 nt, Artificial Sequence
  Synthetic
aguuuauuaaaaucacagu

SEQ ID NO: 389591 - RNA, 20 nt, Artificial Sequence
  Synthetic
gaguuuauuaaaaucacagu

SEQ ID NO: 389592 - RNA, 21 nt, Artificial Sequence
  Synthetic
agaguuuauuaaaaucacagu

SEQ ID NO: 389593 - RNA, 22 nt, Artificial Sequence
  Synthetic
cagaguuuauuaaaaucacagu

SEQ ID NO: 389594 - RNA, 23 nt, Artificial Sequence
  Synthetic
acagaguuuauuaaaaucacagu

SEQ ID NO: 389595 - RNA, 24 nt, Artificial Sequence
  Synthetic
cacagaguuuauuaaaaucacagu

SEQ ID NO: 389596 - RNA, 18 nt, Artificial Sequence
  Synthetic
agguagguaugucacagu

SEQ ID NO: 389597 - RNA, 19 nt, Artificial Sequence
  Synthetic
gagguagguaugucacagu

SEQ ID NO: 389598 - RNA, 20 nt, Artificial Sequence
  Synthetic
ggagguagguaugucacagu

SEQ ID NO: 389599 - RNA, 21 nt, Artificial Sequence
  Synthetic
cggagguagguaugucacagu

SEQ ID NO: 389600 - RNA, 22 nt, Artificial Sequence
  Synthetic
ucggagguagguaugucacagu

SEQ ID NO: 389601 - RNA, 23 nt, Artificial Sequence
  Synthetic
cucggagguagguaugucacagu

SEQ ID NO: 389602 - RNA, 24 nt, Artificial Sequence
  Synthetic
ccucggagguagguaugucacagu

SEQ ID NO: 389603 - RNA, 18 nt, Artificial Sequence
  Synthetic
ugagaaaggcuucacagu

SEQ ID NO: 389604 - RNA, 19 nt, Artificial Sequence
  Synthetic
uugagaaaggcuucacagu

SEQ ID NO: 389605 - RNA, 20 nt, Artificial Sequence
  Synthetic
cuugagaaaggcuucacagu

SEQ ID NO: 389606 - RNA, 21 nt, Artificial Sequence
  Synthetic
acuugagaaaggcuucacagu

SEQ ID NO: 389607 - RNA, 22 nt, Artificial Sequence
  Synthetic
gacuugagaaaggcuucacagu

SEQ ID NO: 389608 - RNA, 23 nt, Artificial Sequence
  Synthetic
ggacuugagaaaggcuucacagu

SEQ ID NO: 389609 - RNA, 24 nt, Artificial Sequence
  Synthetic
gggacuugagaaaggcuucacagu

SEQ ID NO: 389610 - RNA, 18 nt, Artificial Sequence
  Synthetic
uaauucaguuuucacagu

SEQ ID NO: 389611 - RNA, 19 nt, Artificial Sequence
  Synthetic
auaauucaguuuucacagu

SEQ ID NO: 389612 - RNA, 20 nt, Artificial Sequence
  Synthetic
cauaauucaguuuucacagu

SEQ ID NO: 389613 - RNA, 21 nt, Artificial Sequence
  Synthetic
ucauaauucaguuuucacagu

SEQ ID NO: 389614 - RNA, 22 nt, Artificial Sequence
  Synthetic
aucauaauucaguuuucacagu

SEQ ID NO: 389615 - RNA, 23 nt, Artificial Sequence
  Synthetic
aaucauaauucaguuuucacagu

SEQ ID NO: 389616 - RNA, 24 nt, Artificial Sequence
  Synthetic
gaaucauaauucaguuuucacagu

SEQ ID NO: 389617 - RNA, 18 nt, Artificial Sequence
  Synthetic
gauauuccagaagacagu

SEQ ID NO: 389618 - RNA, 19 nt, Artificial Sequence
  Synthetic
agauauuccagaagacagu

SEQ ID NO: 389619 - RNA, 20 nt, Artificial Sequence
  Synthetic
aagauauuccagaagacagu

SEQ ID NO: 389620 - RNA, 21 nt, Artificial Sequence
  Synthetic
uaagauauuccagaagacagu

SEQ ID NO: 389621 - RNA, 22 nt, Artificial Sequence
  Synthetic
cuaagauauuccagaagacagu

SEQ ID NO: 389622 - RNA, 23 nt, Artificial Sequence
  Synthetic
gcuaagauauuccagaagacagu

SEQ ID NO: 389623 - RNA, 24 nt, Artificial Sequence
  Synthetic
agcuaagauauuccagaagacagu

SEQ ID NO: 389624 - RNA, 18 nt, Artificial Sequence
  Synthetic
ucucuguauucagacagu

SEQ ID NO: 389625 - RNA, 19 nt, Artificial Sequence
  Synthetic
gucucuguauucagacagu

SEQ ID NO: 389626 - RNA, 20 nt, Artificial Sequence
  Synthetic
cgucucuguauucagacagu

SEQ ID NO: 389627 - RNA, 21 nt, Artificial Sequence
  Synthetic
ucgucucuguauucagacagu

SEQ ID NO: 389628 - RNA, 22 nt, Artificial Sequence
  Synthetic
aucgucucuguauucagacagu

SEQ ID NO: 389629 - RNA, 23 nt, Artificial Sequence
  Synthetic
aaucgucucuguauucagacagu

SEQ ID NO: 389630 - RNA, 24 nt, Artificial Sequence
  Synthetic
uaaucgucucuguauucagacagu

SEQ ID NO: 389631 - RNA, 18 nt, Artificial Sequence
  Synthetic
ugcugagggugggacagu

SEQ ID NO: 389632 - RNA, 19 nt, Artificial Sequence
  Synthetic
augcugagggugggacagu

SEQ ID NO: 389633 - RNA, 20 nt, Artificial Sequence
  Synthetic
gaugcugagggugggacagu

SEQ ID NO: 389634 - RNA, 21 nt, Artificial Sequence
  Synthetic
ggaugcugagggugggacagu

SEQ ID NO: 389635 - RNA, 22 nt, Artificial Sequence
  Synthetic
aggaugcugagggugggacagu

SEQ ID NO: 389636 - RNA, 23 nt, Artificial Sequence
  Synthetic
uaggaugcugagggugggacagu

SEQ ID NO: 389637 - RNA, 24 nt, Artificial Sequence
  Synthetic
uuaggaugcugagggugggacagu

SEQ ID NO: 389638 - RNA, 18 nt, Artificial Sequence
  Synthetic
ccagggauuuuugacagu

SEQ ID NO: 389639 - RNA, 19 nt, Artificial Sequence
  Synthetic
uccagggauuuuugacagu

SEQ ID NO: 389640 - RNA, 20 nt, Artificial Sequence
  Synthetic
auccagggauuuuugacagu

SEQ ID NO: 389641 - RNA, 21 nt, Artificial Sequence
  Synthetic
aauccagggauuuuugacagu

SEQ ID NO: 389642 - RNA, 22 nt, Artificial Sequence
  Synthetic
caauccagggauuuuugacagu

SEQ ID NO: 389643 - RNA, 23 nt, Artificial Sequence
  Synthetic
gcaauccagggauuuuugacagu

SEQ ID NO: 389644 - RNA, 24 nt, Artificial Sequence
  Synthetic
ugcaauccagggauuuuugacagu

SEQ ID NO: 389645 - RNA, 18 nt, Artificial Sequence
  Synthetic
uuuauucgcacauacagu

SEQ ID NO: 389646 - RNA, 19 nt, Artificial Sequence
  Synthetic
auuuauucgcacauacagu

SEQ ID NO: 389647 - RNA, 20 nt, Artificial Sequence
  Synthetic
uauuuauucgcacauacagu

SEQ ID NO: 389648 - RNA, 21 nt, Artificial Sequence
  Synthetic
uuauuuauucgcacauacagu

SEQ ID NO: 389649 - RNA, 22 nt, Artificial Sequence
  Synthetic
cuuauuuauucgcacauacagu

SEQ ID NO: 389650 - RNA, 23 nt, Artificial Sequence
  Synthetic
acuuauuuauucgcacauacagu

SEQ ID NO: 389651 - RNA, 24 nt, Artificial Sequence
  Synthetic
aacuuauuuauucgcacauacagu

SEQ ID NO: 389652 - RNA, 18 nt, Artificial Sequence
  Synthetic
cuaagacaaucauacagu

SEQ ID NO: 389653 - RNA, 19 nt, Artificial Sequence
  Synthetic
acuaagacaaucauacagu

SEQ ID NO: 389654 - RNA, 20 nt, Artificial Sequence
  Synthetic
gacuaagacaaucauacagu

SEQ ID NO: 389655 - RNA, 21 nt, Artificial Sequence
  Synthetic
agacuaagacaaucauacagu

SEQ ID NO: 389656 - RNA, 22 nt, Artificial Sequence
  Synthetic
cagacuaagacaaucauacagu

SEQ ID NO: 389657 - RNA, 23 nt, Artificial Sequence
  Synthetic
acagacuaagacaaucauacagu

SEQ ID NO: 389658 - RNA, 24 nt, Artificial Sequence
  Synthetic
aacagacuaagacaaucauacagu

SEQ ID NO: 389659 - RNA, 18 nt, Artificial Sequence
  Synthetic
guuuucucuagauacagu

SEQ ID NO: 389660 - RNA, 19 nt, Artificial Sequence
  Synthetic
uguuuucucuagauacagu

SEQ ID NO: 389661 - RNA, 20 nt, Artificial Sequence
  Synthetic
cuguuuucucuagauacagu

SEQ ID NO: 389662 - RNA, 21 nt, Artificial Sequence
  Synthetic
ccuguuuucucuagauacagu

SEQ ID NO: 389663 - RNA, 22 nt, Artificial Sequence
  Synthetic
cccuguuuucucuagauacagu

SEQ ID NO: 389664 - RNA, 23 nt, Artificial Sequence
  Synthetic
ucccuguuuucucuagauacagu

SEQ ID NO: 389665 - RNA, 24 nt, Artificial Sequence
  Synthetic
gucccuguuuucucuagauacagu

SEQ ID NO: 389666 - RNA, 18 nt, Artificial Sequence
  Synthetic
uuuuugaguguauacagu

SEQ ID NO: 389667 - RNA, 19 nt, Artificial Sequence
  Synthetic
uuuuuugaguguauacagu

SEQ ID NO: 389668 - RNA, 20 nt, Artificial Sequence
  Synthetic
uuuuuuugaguguauacagu

SEQ ID NO: 389669 - RNA, 21 nt, Artificial Sequence
  Synthetic
auuuuuuugaguguauacagu

SEQ ID NO: 389670 - RNA, 22 nt, Artificial Sequence
  Synthetic
aauuuuuuugaguguauacagu

SEQ ID NO: 389671 - RNA, 23 nt, Artificial Sequence
  Synthetic
aaauuuuuuugaguguauacagu

SEQ ID NO: 389672 - RNA, 24 nt, Artificial Sequence
  Synthetic
gaaauuuuuuugaguguauacagu

SEQ ID NO: 389673 - RNA, 18 nt, Artificial Sequence
  Synthetic
uuuuucacuaacuacagu

SEQ ID NO: 389674 - RNA, 19 nt, Artificial Sequence
  Synthetic
auuuuucacuaacuacagu

SEQ ID NO: 389675 - RNA, 20 nt, Artificial Sequence
  Synthetic
uauuuuucacuaacuacagu

SEQ ID NO: 389676 - RNA, 21 nt, Artificial Sequence
  Synthetic
uuauuuuucacuaacuacagu

SEQ ID NO: 389677 - RNA, 22 nt, Artificial Sequence
  Synthetic
cuuauuuuucacuaacuacagu

SEQ ID NO: 389678 - RNA, 23 nt, Artificial Sequence
  Synthetic
ucuuauuuuucacuaacuacagu

SEQ ID NO: 389679 - RNA, 24 nt, Artificial Sequence
  Synthetic
uucuuauuuuucacuaacuacagu

SEQ ID NO: 389680 - RNA, 18 nt, Artificial Sequence
  Synthetic
auuuaagcaaauuacagu

SEQ ID NO: 389681 - RNA, 19 nt, Artificial Sequence
  Synthetic
cauuuaagcaaauuacagu

SEQ ID NO: 389682 - RNA, 20 nt, Artificial Sequence
  Synthetic
ucauuuaagcaaauuacagu

SEQ ID NO: 389683 - RNA, 21 nt, Artificial Sequence
  Synthetic
cucauuuaagcaaauuacagu

SEQ ID NO: 389684 - RNA, 22 nt, Artificial Sequence
  Synthetic
ccucauuuaagcaaauuacagu

SEQ ID NO: 389685 - RNA, 23 nt, Artificial Sequence
  Synthetic
uccucauuuaagcaaauuacagu

SEQ ID NO: 389686 - RNA, 24 nt, Artificial Sequence
  Synthetic
uuccucauuuaagcaaauuacagu

SEQ ID NO: 389687 - RNA, 18 nt, Artificial Sequence
  Synthetic
caagaaaaauauuacagu

SEQ ID NO: 389688 - RNA, 19 nt, Artificial Sequence
  Synthetic
gcaagaaaaauauuacagu

SEQ ID NO: 389689 - RNA, 20 nt, Artificial Sequence
  Synthetic
ggcaagaaaaauauuacagu

SEQ ID NO: 389690 - RNA, 21 nt, Artificial Sequence
  Synthetic
uggcaagaaaaauauuacagu

SEQ ID NO: 389691 - RNA, 22 nt, Artificial Sequence
  Synthetic
auggcaagaaaaauauuacagu

SEQ ID NO: 389692 - RNA, 23 nt, Artificial Sequence
  Synthetic
cauggcaagaaaaauauuacagu

SEQ ID NO: 389693 - RNA, 24 nt, Artificial Sequence
  Synthetic
acauggcaagaaaaauauuacagu

SEQ ID NO: 389694 - RNA, 18 nt, Artificial Sequence
  Synthetic
acauaguguacuuacagu

SEQ ID NO: 389695 - RNA, 19 nt, Artificial Sequence
  Synthetic
cacauaguguacuuacagu

SEQ ID NO: 389696 - RNA, 20 nt, Artificial Sequence
  Synthetic
ccacauaguguacuuacagu

SEQ ID NO: 389697 - RNA, 21 nt, Artificial Sequence
  Synthetic
uccacauaguguacuuacagu

SEQ ID NO: 389698 - RNA, 22 nt, Artificial Sequence
  Synthetic
auccacauaguguacuuacagu

SEQ ID NO: 389699 - RNA, 23 nt, Artificial Sequence
  Synthetic
aauccacauaguguacuuacagu

SEQ ID NO: 389700 - RNA, 24 nt, Artificial Sequence
  Synthetic
aaauccacauaguguacuuacagu

SEQ ID NO: 389701 - RNA, 18 nt, Artificial Sequence
  Synthetic
accaugugauguuacagu

SEQ ID NO: 389702 - RNA, 19 nt, Artificial Sequence
  Synthetic
caccaugugauguuacagu

SEQ ID NO: 389703 - RNA, 20 nt, Artificial Sequence
  Synthetic
acaccaugugauguuacagu

SEQ ID NO: 389704 - RNA, 21 nt, Artificial Sequence
  Synthetic
aacaccaugugauguuacagu

SEQ ID NO: 389705 - RNA, 22 nt, Artificial Sequence
  Synthetic
aaacaccaugugauguuacagu

SEQ ID NO: 389706 - RNA, 23 nt, Artificial Sequence
  Synthetic
aaaacaccaugugauguuacagu

SEQ ID NO: 389707 - RNA, 24 nt, Artificial Sequence
  Synthetic
aaaaacaccaugugauguuacagu

SEQ ID NO: 389708 - RNA, 18 nt, Artificial Sequence
  Synthetic
auaauuucuuguuacagu

SEQ ID NO: 389709 - RNA, 19 nt, Artificial Sequence
  Synthetic
cauaauuucuuguuacagu

SEQ ID NO: 389710 - RNA, 20 nt, Artificial Sequence
  Synthetic
acauaauuucuuguuacagu

SEQ ID NO: 389711 - RNA, 21 nt, Artificial Sequence
  Synthetic
aacauaauuucuuguuacagu

SEQ ID NO: 389712 - RNA, 22 nt, Artificial Sequence
  Synthetic
uaacauaauuucuuguuacagu

SEQ ID NO: 389713 - RNA, 23 nt, Artificial Sequence
  Synthetic
guaacauaauuucuuguuacagu

SEQ ID NO: 389714 - RNA, 24 nt, Artificial Sequence
  Synthetic
gguaacauaauuucuuguuacagu

SEQ ID NO: 389715 - RNA, 18 nt, Artificial Sequence
  Synthetic
aagagauuuuaaaccagu

SEQ ID NO: 389716 - RNA, 19 nt, Artificial Sequence
  Synthetic
caagagauuuuaaaccagu

SEQ ID NO: 389717 - RNA, 20 nt, Artificial Sequence
  Synthetic
acaagagauuuuaaaccagu

SEQ ID NO: 389718 - RNA, 21 nt, Artificial Sequence
  Synthetic
uacaagagauuuuaaaccagu

SEQ ID NO: 389719 - RNA, 22 nt, Artificial Sequence
  Synthetic
uuacaagagauuuuaaaccagu

SEQ ID NO: 389720 - RNA, 23 nt, Artificial Sequence
  Synthetic
cuuacaagagauuuuaaaccagu

SEQ ID NO: 389721 - RNA, 24 nt, Artificial Sequence
  Synthetic
ucuuacaagagauuuuaaaccagu

SEQ ID NO: 389722 - RNA, 18 nt, Artificial Sequence
  Synthetic
uguauagauuuaaccagu

SEQ ID NO: 389723 - RNA, 19 nt, Artificial Sequence
  Synthetic
cuguauagauuuaaccagu

SEQ ID NO: 389724 - RNA, 20 nt, Artificial Sequence
  Synthetic
ucuguauagauuuaaccagu

SEQ ID NO: 389725 - RNA, 21 nt, Artificial Sequence
  Synthetic
uucuguauagauuuaaccagu

SEQ ID NO: 389726 - RNA, 22 nt, Artificial Sequence
  Synthetic
cuucuguauagauuuaaccagu

SEQ ID NO: 389727 - RNA, 23 nt, Artificial Sequence
  Synthetic
ucuucuguauagauuuaaccagu

SEQ ID NO: 389728 - RNA, 24 nt, Artificial Sequence
  Synthetic
aucuucuguauagauuuaaccagu

SEQ ID NO: 389729 - RNA, 18 nt, Artificial Sequence
  Synthetic
ggaacaucacacaccagu

SEQ ID NO: 389730 - RNA, 19 nt, Artificial Sequence
  Synthetic
gggaacaucacacaccagu

SEQ ID NO: 389731 - RNA, 20 nt, Artificial Sequence
  Synthetic
ggggaacaucacacaccagu

SEQ ID NO: 389732 - RNA, 21 nt, Artificial Sequence
  Synthetic
aggggaacaucacacaccagu

SEQ ID NO: 389733 - RNA, 22 nt, Artificial Sequence
  Synthetic
gaggggaacaucacacaccagu

SEQ ID NO: 389734 - RNA, 23 nt, Artificial Sequence
  Synthetic
ggaggggaacaucacacaccagu

SEQ ID NO: 389735 - RNA, 24 nt, Artificial Sequence
  Synthetic
gggaggggaacaucacacaccagu

SEQ ID NO: 389736 - RNA, 18 nt, Artificial Sequence
  Synthetic
ugcaccacuugcaccagu

SEQ ID NO: 389737 - RNA, 19 nt, Artificial Sequence
  Synthetic
cugcaccacuugcaccagu

SEQ ID NO: 389738 - RNA, 20 nt, Artificial Sequence
  Synthetic
ucugcaccacuugcaccagu

SEQ ID NO: 389739 - RNA, 21 nt, Artificial Sequence
  Synthetic
uucugcaccacuugcaccagu

SEQ ID NO: 389740 - RNA, 22 nt, Artificial Sequence
  Synthetic
uuucugcaccacuugcaccagu

SEQ ID NO: 389741 - RNA, 23 nt, Artificial Sequence
  Synthetic
auuucugcaccacuugcaccagu

SEQ ID NO: 389742 - RNA, 24 nt, Artificial Sequence
  Synthetic
uauuucugcaccacuugcaccagu

SEQ ID NO: 389743 - RNA, 18 nt, Artificial Sequence
  Synthetic
aaauauagucucaccagu

SEQ ID NO: 389744 - RNA, 19 nt, Artificial Sequence
  Synthetic
aaaauauagucucaccagu

SEQ ID NO: 389745 - RNA, 20 nt, Artificial Sequence
  Synthetic
gaaaauauagucucaccagu

SEQ ID NO: 389746 - RNA, 21 nt, Artificial Sequence
  Synthetic
agaaaauauagucucaccagu

SEQ ID NO: 389747 - RNA, 22 nt, Artificial Sequence
  Synthetic
aagaaaauauagucucaccagu

SEQ ID NO: 389748 - RNA, 23 nt, Artificial Sequence
  Synthetic
uaagaaaauauagucucaccagu

SEQ ID NO: 389749 - RNA, 24 nt, Artificial Sequence
  Synthetic
auaagaaaauauagucucaccagu

SEQ ID NO: 389750 - RNA, 18 nt, Artificial Sequence
  Synthetic
cccauacucuucaccagu

SEQ ID NO: 389751 - RNA, 19 nt, Artificial Sequence
  Synthetic
gcccauacucuucaccagu

SEQ ID NO: 389752 - RNA, 20 nt, Artificial Sequence
  Synthetic
agcccauacucuucaccagu

SEQ ID NO: 389753 - RNA, 21 nt, Artificial Sequence
  Synthetic
gagcccauacucuucaccagu

SEQ ID NO: 389754 - RNA, 22 nt, Artificial Sequence
  Synthetic
agagcccauacucuucaccagu

SEQ ID NO: 389755 - RNA, 23 nt, Artificial Sequence
  Synthetic
aagagcccauacucuucaccagu

SEQ ID NO: 389756 - RNA, 24 nt, Artificial Sequence
  Synthetic
caagagcccauacucuucaccagu

SEQ ID NO: 389757 - RNA, 18 nt, Artificial Sequence
  Synthetic
gaagucaguaagaccagu

SEQ ID NO: 389758 - RNA, 19 nt, Artificial Sequence
  Synthetic
ugaagucaguaagaccagu

SEQ ID NO: 389759 - RNA, 20 nt, Artificial Sequence
  Synthetic
augaagucaguaagaccagu

SEQ ID NO: 389760 - RNA, 21 nt, Artificial Sequence
  Synthetic
aaugaagucaguaagaccagu

SEQ ID NO: 389761 - RNA, 22 nt, Artificial Sequence
  Synthetic
aaaugaagucaguaagaccagu

SEQ ID NO: 389762 - RNA, 23 nt, Artificial Sequence
  Synthetic
uaaaugaagucaguaagaccagu

SEQ ID NO: 389763 - RNA, 24 nt, Artificial Sequence
  Synthetic
guaaaugaagucaguaagaccagu

SEQ ID NO: 389764 - RNA, 18 nt, Artificial Sequence
  Synthetic
caggaguucgagaccagu

SEQ ID NO: 389765 - RNA, 19 nt, Artificial Sequence
  Synthetic
ccaggaguucgagaccagu

SEQ ID NO: 389766 - RNA, 20 nt, Artificial Sequence
  Synthetic
cccaggaguucgagaccagu

SEQ ID NO: 389767 - RNA, 21 nt, Artificial Sequence
  Synthetic
gcccaggaguucgagaccagu

SEQ ID NO: 389768 - RNA, 22 nt, Artificial Sequence
  Synthetic
agcccaggaguucgagaccagu

SEQ ID NO: 389769 - RNA, 23 nt, Artificial Sequence
  Synthetic
gagcccaggaguucgagaccagu

SEQ ID NO: 389770 - RNA, 24 nt, Artificial Sequence
  Synthetic
ugagcccaggaguucgagaccagu

SEQ ID NO: 389771 - RNA, 18 nt, Artificial Sequence
  Synthetic
cagaaguuugagaccagu

SEQ ID NO: 389772 - RNA, 19 nt, Artificial Sequence
  Synthetic
ccagaaguuugagaccagu

SEQ ID NO: 389773 - RNA, 20 nt, Artificial Sequence
  Synthetic
cccagaaguuugagaccagu

SEQ ID NO: 389774 - RNA, 21 nt, Artificial Sequence
  Synthetic
gcccagaaguuugagaccagu

SEQ ID NO: 389775 - RNA, 22 nt, Artificial Sequence
  Synthetic
agcccagaaguuugagaccagu

SEQ ID NO: 389776 - RNA, 23 nt, Artificial Sequence
  Synthetic
uagcccagaaguuugagaccagu

SEQ ID NO: 389777 - RNA, 24 nt, Artificial Sequence
  Synthetic
uuagcccagaaguuugagaccagu

SEQ ID NO: 389778 - RNA, 18 nt, Artificial Sequence
  Synthetic
agaaauaaaaguaccagu

SEQ ID NO: 389779 - RNA, 19 nt, Artificial Sequence
  Synthetic
cagaaauaaaaguaccagu

SEQ ID NO: 389780 - RNA, 20 nt, Artificial Sequence
  Synthetic
acagaaauaaaaguaccagu

SEQ ID NO: 389781 - RNA, 21 nt, Artificial Sequence
  Synthetic
uacagaaauaaaaguaccagu

SEQ ID NO: 389782 - RNA, 22 nt, Artificial Sequence
  Synthetic
cuacagaaauaaaaguaccagu

SEQ ID NO: 389783 - RNA, 23 nt, Artificial Sequence
  Synthetic
acuacagaaauaaaaguaccagu

SEQ ID NO: 389784 - RNA, 24 nt, Artificial Sequence
  Synthetic
uacuacagaaauaaaaguaccagu

SEQ ID NO: 389785 - RNA, 18 nt, Artificial Sequence
  Synthetic
aucccaggaaguaccagu

SEQ ID NO: 389786 - RNA, 19 nt, Artificial Sequence
  Synthetic
gaucccaggaaguaccagu

SEQ ID NO: 389787 - RNA, 20 nt, Artificial Sequence
  Synthetic
ugaucccaggaaguaccagu

SEQ ID NO: 389788 - RNA, 21 nt, Artificial Sequence
  Synthetic
gugaucccaggaaguaccagu

SEQ ID NO: 389789 - RNA, 22 nt, Artificial Sequence
  Synthetic
ugugaucccaggaaguaccagu

SEQ ID NO: 389790 - RNA, 23 nt, Artificial Sequence
  Synthetic
augugaucccaggaaguaccagu

SEQ ID NO: 389791 - RNA, 24 nt, Artificial Sequence
  Synthetic
aaugugaucccaggaaguaccagu

SEQ ID NO: 389792 - RNA, 18 nt, Artificial Sequence
  Synthetic
auuauaguaaaacccagu

SEQ ID NO: 389793 - RNA, 19 nt, Artificial Sequence
  Synthetic
cauuauaguaaaacccagu

SEQ ID NO: 389794 - RNA, 20 nt, Artificial Sequence
  Synthetic
gcauuauaguaaaacccagu

SEQ ID NO: 389795 - RNA, 21 nt, Artificial Sequence
  Synthetic
agcauuauaguaaaacccagu

SEQ ID NO: 389796 - RNA, 22 nt, Artificial Sequence
  Synthetic
aagcauuauaguaaaacccagu

SEQ ID NO: 389797 - RNA, 23 nt, Artificial Sequence
  Synthetic
gaagcauuauaguaaaacccagu

SEQ ID NO: 389798 - RNA, 24 nt, Artificial Sequence
  Synthetic
ugaagcauuauaguaaaacccagu

SEQ ID NO: 389799 - RNA, 18 nt, Artificial Sequence
  Synthetic
agaaucaccucacccagu

SEQ ID NO: 389800 - RNA, 19 nt, Artificial Sequence
  Synthetic
aagaaucaccucacccagu

SEQ ID NO: 389801 - RNA, 20 nt, Artificial Sequence
  Synthetic
gaagaaucaccucacccagu

SEQ ID NO: 389802 - RNA, 21 nt, Artificial Sequence
  Synthetic
ggaagaaucaccucacccagu

SEQ ID NO: 389803 - RNA, 22 nt, Artificial Sequence
  Synthetic
aggaagaaucaccucacccagu

SEQ ID NO: 389804 - RNA, 23 nt, Artificial Sequence
  Synthetic
caggaagaaucaccucacccagu

SEQ ID NO: 389805 - RNA, 24 nt, Artificial Sequence
  Synthetic
ucaggaagaaucaccucacccagu

SEQ ID NO: 389806 - RNA, 18 nt, Artificial Sequence
  Synthetic
ucaugggagggacccagu

SEQ ID NO: 389807 - RNA, 19 nt, Artificial Sequence
  Synthetic
gucaugggagggacccagu

SEQ ID NO: 389808 - RNA, 20 nt, Artificial Sequence
  Synthetic
ugucaugggagggacccagu

SEQ ID NO: 389809 - RNA, 21 nt, Artificial Sequence
  Synthetic
gugucaugggagggacccagu

SEQ ID NO: 389810 - RNA, 22 nt, Artificial Sequence
  Synthetic
ggugucaugggagggacccagu

SEQ ID NO: 389811 - RNA, 23 nt, Artificial Sequence
  Synthetic
aggugucaugggagggacccagu

SEQ ID NO: 389812 - RNA, 24 nt, Artificial Sequence
  Synthetic
caggugucaugggagggacccagu

SEQ ID NO: 389813 - RNA, 18 nt, Artificial Sequence
  Synthetic
aaaggcagcagccccagu

SEQ ID NO: 389814 - RNA, 19 nt, Artificial Sequence
  Synthetic
gaaaggcagcagccccagu

SEQ ID NO: 389815 - RNA, 20 nt, Artificial Sequence
  Synthetic
agaaaggcagcagccccagu

SEQ ID NO: 389816 - RNA, 21 nt, Artificial Sequence
  Synthetic
aagaaaggcagcagccccagu

SEQ ID NO: 389817 - RNA, 22 nt, Artificial Sequence
  Synthetic
aaagaaaggcagcagccccagu

SEQ ID NO: 389818 - RNA, 23 nt, Artificial Sequence
  Synthetic
gaaagaaaggcagcagccccagu

SEQ ID NO: 389819 - RNA, 24 nt, Artificial Sequence
  Synthetic
ugaaagaaaggcagcagccccagu

SEQ ID NO: 389820 - RNA, 18 nt, Artificial Sequence
  Synthetic
acuaggcagugccccagu

SEQ ID NO: 389821 - RNA, 19 nt, Artificial Sequence
  Synthetic
uacuaggcagugccccagu

SEQ ID NO: 389822 - RNA, 20 nt, Artificial Sequence
  Synthetic
cuacuaggcagugccccagu

SEQ ID NO: 389823 - RNA, 21 nt, Artificial Sequence
  Synthetic
ucuacuaggcagugccccagu

SEQ ID NO: 389824 - RNA, 22 nt, Artificial Sequence
  Synthetic
cucuacuaggcagugccccagu

SEQ ID NO: 389825 - RNA, 23 nt, Artificial Sequence
  Synthetic
gcucuacuaggcagugccccagu

SEQ ID NO: 389826 - RNA, 24 nt, Artificial Sequence
  Synthetic
agcucuacuaggcagugccccagu

SEQ ID NO: 389827 - RNA, 18 nt, Artificial Sequence
  Synthetic
gcuaggcagugccccagu

SEQ ID NO: 389828 - RNA, 19 nt, Artificial Sequence
  Synthetic
cgcuaggcagugccccagu

SEQ ID NO: 389829 - RNA, 20 nt, Artificial Sequence
  Synthetic
ccgcuaggcagugccccagu

SEQ ID NO: 389830 - RNA, 21 nt, Artificial Sequence
  Synthetic
uccgcuaggcagugccccagu

SEQ ID NO: 389831 - RNA, 22 nt, Artificial Sequence
  Synthetic
cuccgcuaggcagugccccagu

SEQ ID NO: 389832 - RNA, 23 nt, Artificial Sequence
  Synthetic
gcuccgcuaggcagugccccagu

SEQ ID NO: 389833 - RNA, 24 nt, Artificial Sequence
  Synthetic
agcuccgcuaggcagugccccagu

SEQ ID NO: 389834 - RNA, 18 nt, Artificial Sequence
  Synthetic
cgggguguccuccccagu

SEQ ID NO: 389835 - RNA, 19 nt, Artificial Sequence
  Synthetic
ucgggguguccuccccagu

SEQ ID NO: 389836 - RNA, 20 nt, Artificial Sequence
  Synthetic
uucgggguguccuccccagu

SEQ ID NO: 389837 - RNA, 21 nt, Artificial Sequence
  Synthetic
guucgggguguccuccccagu

SEQ ID NO: 389838 - RNA, 22 nt, Artificial Sequence
  Synthetic
uguucgggguguccuccccagu

SEQ ID NO: 389839 - RNA, 23 nt, Artificial Sequence
  Synthetic
guguucgggguguccuccccagu

SEQ ID NO: 389840 - RNA, 24 nt, Artificial Sequence
  Synthetic
uguguucgggguguccuccccagu

SEQ ID NO: 389841 - RNA, 18 nt, Artificial Sequence
  Synthetic
aacagaggcguccccagu

SEQ ID NO: 389842 - RNA, 19 nt, Artificial Sequence
  Synthetic
gaacagaggcguccccagu

SEQ ID NO: 389843 - RNA, 20 nt, Artificial Sequence
  Synthetic
ggaacagaggcguccccagu

SEQ ID NO: 389844 - RNA, 21 nt, Artificial Sequence
  Synthetic
uggaacagaggcguccccagu

SEQ ID NO: 389845 - RNA, 22 nt, Artificial Sequence
  Synthetic
uuggaacagaggcguccccagu

SEQ ID NO: 389846 - RNA, 23 nt, Artificial Sequence
  Synthetic
uuuggaacagaggcguccccagu

SEQ ID NO: 389847 - RNA, 24 nt, Artificial Sequence
  Synthetic
auuuggaacagaggcguccccagu

SEQ ID NO: 389848 - RNA, 18 nt, Artificial Sequence
  Synthetic
uagcacuuggaucccagu

SEQ ID NO: 389849 - RNA, 19 nt, Artificial Sequence
  Synthetic
cuagcacuuggaucccagu

SEQ ID NO: 389850 - RNA, 20 nt, Artificial Sequence
  Synthetic
ucuagcacuuggaucccagu

SEQ ID NO: 389851 - RNA, 21 nt, Artificial Sequence
  Synthetic
gucuagcacuuggaucccagu

SEQ ID NO: 389852 - RNA, 22 nt, Artificial Sequence
  Synthetic
ugucuagcacuuggaucccagu

SEQ ID NO: 389853 - RNA, 23 nt, Artificial Sequence
  Synthetic
augucuagcacuuggaucccagu

SEQ ID NO: 389854 - RNA, 24 nt, Artificial Sequence
  Synthetic
caugucuagcacuuggaucccagu

SEQ ID NO: 389855 - RNA, 18 nt, Artificial Sequence
  Synthetic
aauuuuauuacucccagu

SEQ ID NO: 389856 - RNA, 19 nt, Artificial Sequence
  Synthetic
aaauuuuauuacucccagu

SEQ ID NO: 389857 - RNA, 20 nt, Artificial Sequence
  Synthetic
uaaauuuuauuacucccagu

SEQ ID NO: 389858 - RNA, 21 nt, Artificial Sequence
  Synthetic
cuaaauuuuauuacucccagu

SEQ ID NO: 389859 - RNA, 22 nt, Artificial Sequence
  Synthetic
acuaaauuuuauuacucccagu

SEQ ID NO: 389860 - RNA, 23 nt, Artificial Sequence
  Synthetic
uacuaaauuuuauuacucccagu

SEQ ID NO: 389861 - RNA, 24 nt, Artificial Sequence
  Synthetic
cuacuaaauuuuauuacucccagu

SEQ ID NO: 389862 - RNA, 18 nt, Artificial Sequence
  Synthetic
cuccacauugcugccagu

SEQ ID NO: 389863 - RNA, 19 nt, Artificial Sequence
  Synthetic
ccuccacauugcugccagu

SEQ ID NO: 389864 - RNA, 20 nt, Artificial Sequence
  Synthetic
uccuccacauugcugccagu

SEQ ID NO: 389865 - RNA, 21 nt, Artificial Sequence
  Synthetic
guccuccacauugcugccagu

SEQ ID NO: 389866 - RNA, 22 nt, Artificial Sequence
  Synthetic
uguccuccacauugcugccagu

SEQ ID NO: 389867 - RNA, 23 nt, Artificial Sequence
  Synthetic
auguccuccacauugcugccagu

SEQ ID NO: 389868 - RNA, 24 nt, Artificial Sequence
  Synthetic
uauguccuccacauugcugccagu

SEQ ID NO: 389869 - RNA, 18 nt, Artificial Sequence
  Synthetic
gaaaaucuaagugccagu

SEQ ID NO: 389870 - RNA, 19 nt, Artificial Sequence
  Synthetic
agaaaaucuaagugccagu

SEQ ID NO: 389871 - RNA, 20 nt, Artificial Sequence
  Synthetic
uagaaaaucuaagugccagu

SEQ ID NO: 389872 - RNA, 21 nt, Artificial Sequence
  Synthetic
cuagaaaaucuaagugccagu

SEQ ID NO: 389873 - RNA, 22 nt, Artificial Sequence
  Synthetic
acuagaaaaucuaagugccagu

SEQ ID NO: 389874 - RNA, 23 nt, Artificial Sequence
  Synthetic
uacuagaaaaucuaagugccagu

SEQ ID NO: 389875 - RNA, 24 nt, Artificial Sequence
  Synthetic
auacuagaaaaucuaagugccagu

SEQ ID NO: 389876 - RNA, 18 nt, Artificial Sequence
  Synthetic
gaagguaauggugccagu

SEQ ID NO: 389877 - RNA, 19 nt, Artificial Sequence
  Synthetic
ggaagguaauggugccagu

SEQ ID NO: 389878 - RNA, 20 nt, Artificial Sequence
  Synthetic
uggaagguaauggugccagu

SEQ ID NO: 389879 - RNA, 21 nt, Artificial Sequence
  Synthetic
guggaagguaauggugccagu

SEQ ID NO: 389880 - RNA, 22 nt, Artificial Sequence
  Synthetic
uguggaagguaauggugccagu

SEQ ID NO: 389881 - RNA, 23 nt, Artificial Sequence
  Synthetic
uuguggaagguaauggugccagu

SEQ ID NO: 389882 - RNA, 24 nt, Artificial Sequence
  Synthetic
cuuguggaagguaauggugccagu

SEQ ID NO: 389883 - RNA, 18 nt, Artificial Sequence
  Synthetic
uugugggagggauccagu

SEQ ID NO: 389884 - RNA, 19 nt, Artificial Sequence
  Synthetic
guugugggagggauccagu

SEQ ID NO: 389885 - RNA, 20 nt, Artificial Sequence
  Synthetic
uguugugggagggauccagu

SEQ ID NO: 389886 - RNA, 21 nt, Artificial Sequence
  Synthetic
uuguugugggagggauccagu

SEQ ID NO: 389887 - RNA, 22 nt, Artificial Sequence
  Synthetic
cuuguugugggagggauccagu

SEQ ID NO: 389888 - RNA, 23 nt, Artificial Sequence
  Synthetic
acuuguugugggagggauccagu

SEQ ID NO: 389889 - RNA, 24 nt, Artificial Sequence
  Synthetic
uacuuguugugggagggauccagu

SEQ ID NO: 389890 - RNA, 18 nt, Artificial Sequence
  Synthetic
uuuugucuaguauccagu

SEQ ID NO: 389891 - RNA, 19 nt, Artificial Sequence
  Synthetic
guuuugucuaguauccagu

SEQ ID NO: 389892 - RNA, 20 nt, Artificial Sequence
  Synthetic
uguuuugucuaguauccagu

SEQ ID NO: 389893 - RNA, 21 nt, Artificial Sequence
  Synthetic
uuguuuugucuaguauccagu

SEQ ID NO: 389894 - RNA, 22 nt, Artificial Sequence
  Synthetic
uuuguuuugucuaguauccagu

SEQ ID NO: 389895 - RNA, 23 nt, Artificial Sequence
  Synthetic
uuuuguuuugucuaguauccagu

SEQ ID NO: 389896 - RNA, 24 nt, Artificial Sequence
  Synthetic
cuuuuguuuugucuaguauccagu

SEQ ID NO: 389897 - RNA, 18 nt, Artificial Sequence
  Synthetic
uguggagaauuauccagu

SEQ ID NO: 389898 - RNA, 19 nt, Artificial Sequence
  Synthetic
guguggagaauuauccagu

SEQ ID NO: 389899 - RNA, 20 nt, Artificial Sequence
  Synthetic
uguguggagaauuauccagu

SEQ ID NO: 389900 - RNA, 21 nt, Artificial Sequence
  Synthetic
uuguguggagaauuauccagu

SEQ ID NO: 389901 - RNA, 22 nt, Artificial Sequence
  Synthetic
cuuguguggagaauuauccagu

SEQ ID NO: 389902 - RNA, 23 nt, Artificial Sequence
  Synthetic
ucuuguguggagaauuauccagu

SEQ ID NO: 389903 - RNA, 24 nt, Artificial Sequence
  Synthetic
cucuuguguggagaauuauccagu

SEQ ID NO: 389904 - RNA, 18 nt, Artificial Sequence
  Synthetic
agaagauuuuuauccagu

SEQ ID NO: 389905 - RNA, 19 nt, Artificial Sequence
  Synthetic
cagaagauuuuuauccagu

SEQ ID NO: 389906 - RNA, 20 nt, Artificial Sequence
  Synthetic
acagaagauuuuuauccagu

SEQ ID NO: 389907 - RNA, 21 nt, Artificial Sequence
  Synthetic
gacagaagauuuuuauccagu

SEQ ID NO: 389908 - RNA, 22 nt, Artificial Sequence
  Synthetic
agacagaagauuuuuauccagu

SEQ ID NO: 389909 - RNA, 23 nt, Artificial Sequence
  Synthetic
cagacagaagauuuuuauccagu

SEQ ID NO: 389910 - RNA, 24 nt, Artificial Sequence
  Synthetic
gcagacagaagauuuuuauccagu

SEQ ID NO: 389911 - RNA, 18 nt, Artificial Sequence
  Synthetic
uugcacacucccuccagu

SEQ ID NO: 389912 - RNA, 19 nt, Artificial Sequence
  Synthetic
cuugcacacucccuccagu

SEQ ID NO: 389913 - RNA, 20 nt, Artificial Sequence
  Synthetic
gcuugcacacucccuccagu

SEQ ID NO: 389914 - RNA, 21 nt, Artificial Sequence
  Synthetic
ugcuugcacacucccuccagu

SEQ ID NO: 389915 - RNA, 22 nt, Artificial Sequence
  Synthetic
uugcuugcacacucccuccagu

SEQ ID NO: 389916 - RNA, 23 nt, Artificial Sequence
  Synthetic
uuugcuugcacacucccuccagu

SEQ ID NO: 389917 - RNA, 24 nt, Artificial Sequence
  Synthetic
guuugcuugcacacucccuccagu

SEQ ID NO: 389918 - RNA, 18 nt, Artificial Sequence
  Synthetic
agggagcagccguccagu

SEQ ID NO: 389919 - RNA, 19 nt, Artificial Sequence
  Synthetic
gagggagcagccguccagu

SEQ ID NO: 389920 - RNA, 20 nt, Artificial Sequence
  Synthetic
agagggagcagccguccagu

SEQ ID NO: 389921 - RNA, 21 nt, Artificial Sequence
  Synthetic
cagagggagcagccguccagu

SEQ ID NO: 389922 - RNA, 22 nt, Artificial Sequence
  Synthetic
acagagggagcagccguccagu

SEQ ID NO: 389923 - RNA, 23 nt, Artificial Sequence
  Synthetic
uacagagggagcagccguccagu

SEQ ID NO: 389924 - RNA, 24 nt, Artificial Sequence
  Synthetic
uuacagagggagcagccguccagu

SEQ ID NO: 389925 - RNA, 18 nt, Artificial Sequence
  Synthetic
augaaucuauuguccagu

SEQ ID NO: 389926 - RNA, 19 nt, Artificial Sequence
  Synthetic
caugaaucuauuguccagu

SEQ ID NO: 389927 - RNA, 20 nt, Artificial Sequence
  Synthetic
ccaugaaucuauuguccagu

SEQ ID NO: 389928 - RNA, 21 nt, Artificial Sequence
  Synthetic
cccaugaaucuauuguccagu

SEQ ID NO: 389929 - RNA, 22 nt, Artificial Sequence
  Synthetic
acccaugaaucuauuguccagu

SEQ ID NO: 389930 - RNA, 23 nt, Artificial Sequence
  Synthetic
uacccaugaaucuauuguccagu

SEQ ID NO: 389931 - RNA, 24 nt, Artificial Sequence
  Synthetic
cuacccaugaaucuauuguccagu

SEQ ID NO: 389932 - RNA, 18 nt, Artificial Sequence
  Synthetic
cucucuuucaaaagcagu

SEQ ID NO: 389933 - RNA, 19 nt, Artificial Sequence
  Synthetic
ucucucuuucaaaagcagu

SEQ ID NO: 389934 - RNA, 20 nt, Artificial Sequence
  Synthetic
aucucucuuucaaaagcagu

SEQ ID NO: 389935 - RNA, 21 nt, Artificial Sequence
  Synthetic
gaucucucuuucaaaagcagu

SEQ ID NO: 389936 - RNA, 22 nt, Artificial Sequence
  Synthetic
ugaucucucuuucaaaagcagu

SEQ ID NO: 389937 - RNA, 23 nt, Artificial Sequence
  Synthetic
cugaucucucuuucaaaagcagu

SEQ ID NO: 389938 - RNA, 24 nt, Artificial Sequence
  Synthetic
ucugaucucucuuucaaaagcagu

SEQ ID NO: 389939 - RNA, 18 nt, Artificial Sequence
  Synthetic
gccacuguagaaagcagu

SEQ ID NO: 389940 - RNA, 19 nt, Artificial Sequence
  Synthetic
agccacuguagaaagcagu

SEQ ID NO: 389941 - RNA, 20 nt, Artificial Sequence
  Synthetic
cagccacuguagaaagcagu

SEQ ID NO: 389942 - RNA, 21 nt, Artificial Sequence
  Synthetic
ucagccacuguagaaagcagu

SEQ ID NO: 389943 - RNA, 22 nt, Artificial Sequence
  Synthetic
uucagccacuguagaaagcagu

SEQ ID NO: 389944 - RNA, 23 nt, Artificial Sequence
  Synthetic
guucagccacuguagaaagcagu

SEQ ID NO: 389945 - RNA, 24 nt, Artificial Sequence
  Synthetic
aguucagccacuguagaaagcagu

SEQ ID NO: 389946 - RNA, 18 nt, Artificial Sequence
  Synthetic
cccacuguggaaagcagu

SEQ ID NO: 389947 - RNA, 19 nt, Artificial Sequence
  Synthetic
acccacuguggaaagcagu

SEQ ID NO: 389948 - RNA, 20 nt, Artificial Sequence
  Synthetic
cacccacuguggaaagcagu

SEQ ID NO: 389949 - RNA, 21 nt, Artificial Sequence
  Synthetic
ucacccacuguggaaagcagu

SEQ ID NO: 389950 - RNA, 22 nt, Artificial Sequence
  Synthetic
uucacccacuguggaaagcagu

SEQ ID NO: 389951 - RNA, 23 nt, Artificial Sequence
  Synthetic
guucacccacuguggaaagcagu

SEQ ID NO: 389952 - RNA, 24 nt, Artificial Sequence
  Synthetic
aguucacccacuguggaaagcagu

SEQ ID NO: 389953 - RNA, 18 nt, Artificial Sequence
  Synthetic
uacuauccugaaagcagu

SEQ ID NO: 389954 - RNA, 19 nt, Artificial Sequence
  Synthetic
auacuauccugaaagcagu

SEQ ID NO: 389955 - RNA, 20 nt, Artificial Sequence
  Synthetic
aauacuauccugaaagcagu

SEQ ID NO: 389956 - RNA, 21 nt, Artificial Sequence
  Synthetic
uaauacuauccugaaagcagu

SEQ ID NO: 389957 - RNA, 22 nt, Artificial Sequence
  Synthetic
uuaauacuauccugaaagcagu

SEQ ID NO: 389958 - RNA, 23 nt, Artificial Sequence
  Synthetic
uuuaauacuauccugaaagcagu

SEQ ID NO: 389959 - RNA, 24 nt, Artificial Sequence
  Synthetic
uuuuaauacuauccugaaagcagu

SEQ ID NO: 389960 - RNA, 18 nt, Artificial Sequence
  Synthetic
acuuuugggguaagcagu

SEQ ID NO: 389961 - RNA, 19 nt, Artificial Sequence
  Synthetic
uacuuuugggguaagcagu

SEQ ID NO: 389962 - RNA, 20 nt, Artificial Sequence
  Synthetic
guacuuuugggguaagcagu

SEQ ID NO: 389963 - RNA, 21 nt, Artificial Sequence
  Synthetic
uguacuuuugggguaagcagu

SEQ ID NO: 389964 - RNA, 22 nt, Artificial Sequence
  Synthetic
guguacuuuugggguaagcagu

SEQ ID NO: 389965 - RNA, 23 nt, Artificial Sequence
  Synthetic
uguguacuuuugggguaagcagu

SEQ ID NO: 389966 - RNA, 24 nt, Artificial Sequence
  Synthetic
auguguacuuuugggguaagcagu

SEQ ID NO: 389967 - RNA, 18 nt, Artificial Sequence
  Synthetic
cgcugccagcacagcagu

SEQ ID NO: 389968 - RNA, 19 nt, Artificial Sequence
  Synthetic
ucgcugccagcacagcagu

SEQ ID NO: 389969 - RNA, 20 nt, Artificial Sequence
  Synthetic
cucgcugccagcacagcagu

SEQ ID NO: 389970 - RNA, 21 nt, Artificial Sequence
  Synthetic
ucucgcugccagcacagcagu

SEQ ID NO: 389971 - RNA, 22 nt, Artificial Sequence
  Synthetic
uucucgcugccagcacagcagu

SEQ ID NO: 389972 - RNA, 23 nt, Artificial Sequence
  Synthetic
auucucgcugccagcacagcagu

SEQ ID NO: 389973 - RNA, 24 nt, Artificial Sequence
  Synthetic
aauucucgcugccagcacagcagu

SEQ ID NO: 389974 - RNA, 18 nt, Artificial Sequence
  Synthetic
uuacuuuauugcagcagu

SEQ ID NO: 389975 - RNA, 19 nt, Artificial Sequence
  Synthetic
uuuacuuuauugcagcagu

SEQ ID NO: 389976 - RNA, 20 nt, Artificial Sequence
  Synthetic
auuuacuuuauugcagcagu

SEQ ID NO: 389977 - RNA, 21 nt, Artificial Sequence
  Synthetic
uauuuacuuuauugcagcagu

SEQ ID NO: 389978 - RNA, 22 nt, Artificial Sequence
  Synthetic
auauuuacuuuauugcagcagu

SEQ ID NO: 389979 - RNA, 23 nt, Artificial Sequence
  Synthetic
gauauuuacuuuauugcagcagu

SEQ ID NO: 389980 - RNA, 24 nt, Artificial Sequence
  Synthetic
ugauauuuacuuuauugcagcagu

SEQ ID NO: 389981 - RNA, 18 nt, Artificial Sequence
  Synthetic
uucaccuuccucagcagu

SEQ ID NO: 389982 - RNA, 19 nt, Artificial Sequence
  Synthetic
guucaccuuccucagcagu

SEQ ID NO: 389983 - RNA, 20 nt, Artificial Sequence
  Synthetic
gguucaccuuccucagcagu

SEQ ID NO: 389984 - RNA, 21 nt, Artificial Sequence
  Synthetic
ugguucaccuuccucagcagu

SEQ ID NO: 389985 - RNA, 22 nt, Artificial Sequence
  Synthetic
augguucaccuuccucagcagu

SEQ ID NO: 389986 - RNA, 23 nt, Artificial Sequence
  Synthetic
caugguucaccuuccucagcagu

SEQ ID NO: 389987 - RNA, 24 nt, Artificial Sequence
  Synthetic
gcaugguucaccuuccucagcagu

SEQ ID NO: 389988 - RNA, 18 nt, Artificial Sequence
  Synthetic
ucugggcaucagagcagu

SEQ ID NO: 389989 - RNA, 19 nt, Artificial Sequence
  Synthetic
uucugggcaucagagcagu

SEQ ID NO: 389990 - RNA, 20 nt, Artificial Sequence
  Synthetic
auucugggcaucagagcagu

SEQ ID NO: 389991 - RNA, 21 nt, Artificial Sequence
  Synthetic
cauucugggcaucagagcagu

SEQ ID NO: 389992 - RNA, 22 nt, Artificial Sequence
  Synthetic
acauucugggcaucagagcagu

SEQ ID NO: 389993 - RNA, 23 nt, Artificial Sequence
  Synthetic
uacauucugggcaucagagcagu

SEQ ID NO: 389994 - RNA, 24 nt, Artificial Sequence
  Synthetic
cuacauucugggcaucagagcagu

SEQ ID NO: 389995 - RNA, 18 nt, Artificial Sequence
  Synthetic
ggcacuguggagagcagu

SEQ ID NO: 389996 - RNA, 19 nt, Artificial Sequence
  Synthetic
aggcacuguggagagcagu

SEQ ID NO: 389997 - RNA, 20 nt, Artificial Sequence
  Synthetic
uaggcacuguggagagcagu

SEQ ID NO: 389998 - RNA, 21 nt, Artificial Sequence
  Synthetic
uuaggcacuguggagagcagu

SEQ ID NO: 389999 - RNA, 22 nt, Artificial Sequence
  Synthetic
uuuaggcacuguggagagcagu

SEQ ID NO: 390000 - RNA, 23 nt, Artificial Sequence
  Synthetic
guuuaggcacuguggagagcagu

SEQ ID NO: 390001 - RNA, 24 nt, Artificial Sequence
  Synthetic
aguuuaggcacuguggagagcagu

SEQ ID NO: 390002 - RNA, 18 nt, Artificial Sequence
  Synthetic
ugcaagagauagagcagu

SEQ ID NO: 390003 - RNA, 19 nt, Artificial Sequence
  Synthetic
augcaagagauagagcagu

SEQ ID NO: 390004 - RNA, 20 nt, Artificial Sequence
  Synthetic
gaugcaagagauagagcagu

SEQ ID NO: 390005 - RNA, 21 nt, Artificial Sequence
  Synthetic
agaugcaagagauagagcagu

SEQ ID NO: 390006 - RNA, 22 nt, Artificial Sequence
  Synthetic
aagaugcaagagauagagcagu

SEQ ID NO: 390007 - RNA, 23 nt, Artificial Sequence
  Synthetic
caagaugcaagagauagagcagu

SEQ ID NO: 390008 - RNA, 24 nt, Artificial Sequence
  Synthetic
gcaagaugcaagagauagagcagu

SEQ ID NO: 390009 - RNA, 18 nt, Artificial Sequence
  Synthetic
accucuccauggagcagu

SEQ ID NO: 390010 - RNA, 19 nt, Artificial Sequence
  Synthetic
gaccucuccauggagcagu

SEQ ID NO: 390011 - RNA, 20 nt, Artificial Sequence
  Synthetic
ggaccucuccauggagcagu

SEQ ID NO: 390012 - RNA, 21 nt, Artificial Sequence
  Synthetic
uggaccucuccauggagcagu

SEQ ID NO: 390013 - RNA, 22 nt, Artificial Sequence
  Synthetic
guggaccucuccauggagcagu

SEQ ID NO: 390014 - RNA, 23 nt, Artificial Sequence
  Synthetic
uguggaccucuccauggagcagu

SEQ ID NO: 390015 - RNA, 24 nt, Artificial Sequence
  Synthetic
auguggaccucuccauggagcagu

SEQ ID NO: 390016 - RNA, 18 nt, Artificial Sequence
  Synthetic
uaguguauaaugagcagu

SEQ ID NO: 390017 - RNA, 19 nt, Artificial Sequence
  Synthetic
uuaguguauaaugagcagu

SEQ ID NO: 390018 - RNA, 20 nt, Artificial Sequence
  Synthetic
auuaguguauaaugagcagu

SEQ ID NO: 390019 - RNA, 21 nt, Artificial Sequence
  Synthetic
aauuaguguauaaugagcagu

SEQ ID NO: 390020 - RNA, 22 nt, Artificial Sequence
  Synthetic
uaauuaguguauaaugagcagu

SEQ ID NO: 390021 - RNA, 23 nt, Artificial Sequence
  Synthetic
auaauuaguguauaaugagcagu

SEQ ID NO: 390022 - RNA, 24 nt, Artificial Sequence
  Synthetic
uauaauuaguguauaaugagcagu

SEQ ID NO: 390023 - RNA, 18 nt, Artificial Sequence
  Synthetic
uaggggagggauagcagu

SEQ ID NO: 390024 - RNA, 19 nt, Artificial Sequence
  Synthetic
uuaggggagggauagcagu

SEQ ID NO: 390025 - RNA, 20 nt, Artificial Sequence
  Synthetic
guuaggggagggauagcagu

SEQ ID NO: 390026 - RNA, 21 nt, Artificial Sequence
  Synthetic
gguuaggggagggauagcagu

SEQ ID NO: 390027 - RNA, 22 nt, Artificial Sequence
  Synthetic
agguuaggggagggauagcagu

SEQ ID NO: 390028 - RNA, 23 nt, Artificial Sequence
  Synthetic
gagguuaggggagggauagcagu

SEQ ID NO: 390029 - RNA, 24 nt, Artificial Sequence
  Synthetic
ggagguuaggggagggauagcagu

SEQ ID NO: 390030 - RNA, 20 nt, Artificial Sequence
  Synthetic
aggcaguucuuuauagcagu

SEQ ID NO: 390031 - RNA, 21 nt, Artificial Sequence
  Synthetic
caggcaguucuuuauagcagu

SEQ ID NO: 390032 - RNA, 22 nt, Artificial Sequence
  Synthetic
ucaggcaguucuuuauagcagu

SEQ ID NO: 390033 - RNA, 23 nt, Artificial Sequence
  Synthetic
cucaggcaguucuuuauagcagu

SEQ ID NO: 390034 - RNA, 24 nt, Artificial Sequence
  Synthetic
ucucaggcaguucuuuauagcagu

SEQ ID NO: 390035 - RNA, 18 nt, Artificial Sequence
  Synthetic
uuagguacacuuagcagu

SEQ ID NO: 390036 - RNA, 19 nt, Artificial Sequence
  Synthetic
uuuagguacacuuagcagu

SEQ ID NO: 390037 - RNA, 20 nt, Artificial Sequence
  Synthetic
cuuuagguacacuuagcagu

SEQ ID NO: 390038 - RNA, 21 nt, Artificial Sequence
  Synthetic
ccuuuagguacacuuagcagu

SEQ ID NO: 390039 - RNA, 22 nt, Artificial Sequence
  Synthetic
uccuuuagguacacuuagcagu

SEQ ID NO: 390040 - RNA, 23 nt, Artificial Sequence
  Synthetic
cuccuuuagguacacuuagcagu

SEQ ID NO: 390041 - RNA, 24 nt, Artificial Sequence
  Synthetic
acuccuuuagguacacuuagcagu

SEQ ID NO: 390042 - RNA, 18 nt, Artificial Sequence
  Synthetic
augacuuucuuuagcagu

SEQ ID NO: 390043 - RNA, 19 nt, Artificial Sequence
  Synthetic
caugacuuucuuuagcagu

SEQ ID NO: 390044 - RNA, 20 nt, Artificial Sequence
  Synthetic
acaugacuuucuuuagcagu

SEQ ID NO: 390045 - RNA, 21 nt, Artificial Sequence
  Synthetic
gacaugacuuucuuuagcagu

SEQ ID NO: 390046 - RNA, 22 nt, Artificial Sequence
  Synthetic
ggacaugacuuucuuuagcagu

SEQ ID NO: 390047 - RNA, 23 nt, Artificial Sequence
  Synthetic
aggacaugacuuucuuuagcagu

SEQ ID NO: 390048 - RNA, 24 nt, Artificial Sequence
  Synthetic
aaggacaugacuuucuuuagcagu

SEQ ID NO: 390049 - RNA, 18 nt, Artificial Sequence
  Synthetic
auuacugucccucgcagu

SEQ ID NO: 390050 - RNA, 19 nt, Artificial Sequence
  Synthetic
cauuacugucccucgcagu

SEQ ID NO: 390051 - RNA, 20 nt, Artificial Sequence
  Synthetic
ucauuacugucccucgcagu

SEQ ID NO: 390052 - RNA, 21 nt, Artificial Sequence
  Synthetic
uucauuacugucccucgcagu

SEQ ID NO: 390053 - RNA, 22 nt, Artificial Sequence
  Synthetic
auucauuacugucccucgcagu

SEQ ID NO: 390054 - RNA, 23 nt, Artificial Sequence
  Synthetic
gauucauuacugucccucgcagu

SEQ ID NO: 390055 - RNA, 24 nt, Artificial Sequence
  Synthetic
ggauucauuacugucccucgcagu

SEQ ID NO: 390056 - RNA, 18 nt, Artificial Sequence
  Synthetic
agacggaagcaaggcagu

SEQ ID NO: 390057 - RNA, 19 nt, Artificial Sequence
  Synthetic
gagacggaagcaaggcagu

SEQ ID NO: 390058 - RNA, 20 nt, Artificial Sequence
  Synthetic
ggagacggaagcaaggcagu

SEQ ID NO: 390059 - RNA, 21 nt, Artificial Sequence
  Synthetic
gggagacggaagcaaggcagu

SEQ ID NO: 390060 - RNA, 22 nt, Artificial Sequence
  Synthetic
ugggagacggaagcaaggcagu

SEQ ID NO: 390061 - RNA, 23 nt, Artificial Sequence
  Synthetic
augggagacggaagcaaggcagu

SEQ ID NO: 390062 - RNA, 24 nt, Artificial Sequence
  Synthetic
aaugggagacggaagcaaggcagu

SEQ ID NO: 390063 - RNA, 18 nt, Artificial Sequence
  Synthetic
cggagccgagaaggcagu

SEQ ID NO: 390064 - RNA, 19 nt, Artificial Sequence
  Synthetic
acggagccgagaaggcagu

SEQ ID NO: 390065 - RNA, 20 nt, Artificial Sequence
  Synthetic
gacggagccgagaaggcagu

SEQ ID NO: 390066 - RNA, 21 nt, Artificial Sequence
  Synthetic
agacggagccgagaaggcagu

SEQ ID NO: 390067 - RNA, 22 nt, Artificial Sequence
  Synthetic
gagacggagccgagaaggcagu

SEQ ID NO: 390068 - RNA, 23 nt, Artificial Sequence
  Synthetic
ggagacggagccgagaaggcagu

SEQ ID NO: 390069 - RNA, 24 nt, Artificial Sequence
  Synthetic
aggagacggagccgagaaggcagu

SEQ ID NO: 390070 - RNA, 18 nt, Artificial Sequence
  Synthetic
ucuuuccaugaaggcagu

SEQ ID NO: 390071 - RNA, 19 nt, Artificial Sequence
  Synthetic
gucuuuccaugaaggcagu

SEQ ID NO: 390072 - RNA, 20 nt, Artificial Sequence
  Synthetic
agucuuuccaugaaggcagu

SEQ ID NO: 390073 - RNA, 21 nt, Artificial Sequence
  Synthetic
aagucuuuccaugaaggcagu

SEQ ID NO: 390074 - RNA, 22 nt, Artificial Sequence
  Synthetic
gaagucuuuccaugaaggcagu

SEQ ID NO: 390075 - RNA, 23 nt, Artificial Sequence
  Synthetic
ggaagucuuuccaugaaggcagu

SEQ ID NO: 390076 - RNA, 24 nt, Artificial Sequence
  Synthetic
aggaagucuuuccaugaaggcagu

SEQ ID NO: 390077 - RNA, 18 nt, Artificial Sequence
  Synthetic
uuucccauacugggcagu

SEQ ID NO: 390078 - RNA, 19 nt, Artificial Sequence
  Synthetic
cuuucccauacugggcagu

SEQ ID NO: 390079 - RNA, 20 nt, Artificial Sequence
  Synthetic
ccuuucccauacugggcagu

SEQ ID NO: 390080 - RNA, 21 nt, Artificial Sequence
  Synthetic
cccuuucccauacugggcagu

SEQ ID NO: 390081 - RNA, 22 nt, Artificial Sequence
  Synthetic
acccuuucccauacugggcagu

SEQ ID NO: 390082 - RNA, 23 nt, Artificial Sequence
  Synthetic
aacccuuucccauacugggcagu

SEQ ID NO: 390083 - RNA, 24 nt, Artificial Sequence
  Synthetic
uaacccuuucccauacugggcagu

SEQ ID NO: 390084 - RNA, 18 nt, Artificial Sequence
  Synthetic
gagacuguacugggcagu

SEQ ID NO: 390085 - RNA, 19 nt, Artificial Sequence
  Synthetic
agagacuguacugggcagu

SEQ ID NO: 390086 - RNA, 20 nt, Artificial Sequence
  Synthetic
aagagacuguacugggcagu

SEQ ID NO: 390087 - RNA, 21 nt, Artificial Sequence
  Synthetic
caagagacuguacugggcagu

SEQ ID NO: 390088 - RNA, 22 nt, Artificial Sequence
  Synthetic
gcaagagacuguacugggcagu

SEQ ID NO: 390089 - RNA, 23 nt, Artificial Sequence
  Synthetic
ugcaagagacuguacugggcagu

SEQ ID NO: 390090 - RNA, 24 nt, Artificial Sequence
  Synthetic
uugcaagagacuguacugggcagu

SEQ ID NO: 390091 - RNA, 18 nt, Artificial Sequence
  Synthetic
aaacaugagcauggcagu

SEQ ID NO: 390092 - RNA, 19 nt, Artificial Sequence
  Synthetic
aaaacaugagcauggcagu

SEQ ID NO: 390093 - RNA, 20 nt, Artificial Sequence
  Synthetic
aaaaacaugagcauggcagu

SEQ ID NO: 390094 - RNA, 21 nt, Artificial Sequence
  Synthetic
uaaaaacaugagcauggcagu

SEQ ID NO: 390095 - RNA, 22 nt, Artificial Sequence
  Synthetic
uuaaaaacaugagcauggcagu

SEQ ID NO: 390096 - RNA, 23 nt, Artificial Sequence
  Synthetic
guuaaaaacaugagcauggcagu

SEQ ID NO: 390097 - RNA, 24 nt, Artificial Sequence
  Synthetic
gguuaaaaacaugagcauggcagu

SEQ ID NO: 390098 - RNA, 18 nt, Artificial Sequence
  Synthetic
uguuuuauauauggcagu

SEQ ID NO: 390099 - RNA, 19 nt, Artificial Sequence
  Synthetic
auguuuuauauauggcagu

SEQ ID NO: 390100 - RNA, 20 nt, Artificial Sequence
  Synthetic
gauguuuuauauauggcagu

SEQ ID NO: 390101 - RNA, 21 nt, Artificial Sequence
  Synthetic
ugauguuuuauauauggcagu

SEQ ID NO: 390102 - RNA, 22 nt, Artificial Sequence
  Synthetic
uugauguuuuauauauggcagu

SEQ ID NO: 390103 - RNA, 23 nt, Artificial Sequence
  Synthetic
auugauguuuuauauauggcagu

SEQ ID NO: 390104 - RNA, 24 nt, Artificial Sequence
  Synthetic
aauugauguuuuauauauggcagu

SEQ ID NO: 390105 - RNA, 18 nt, Artificial Sequence
  Synthetic
gcugugcucccuggcagu

SEQ ID NO: 390106 - RNA, 19 nt, Artificial Sequence
  Synthetic
ugcugugcucccuggcagu

SEQ ID NO: 390107 - RNA, 20 nt, Artificial Sequence
  Synthetic
augcugugcucccuggcagu

SEQ ID NO: 390108 - RNA, 21 nt, Artificial Sequence
  Synthetic
uaugcugugcucccuggcagu

SEQ ID NO: 390109 - RNA, 22 nt, Artificial Sequence
  Synthetic
auaugcugugcucccuggcagu

SEQ ID NO: 390110 - RNA, 23 nt, Artificial Sequence
  Synthetic
aauaugcugugcucccuggcagu

SEQ ID NO: 390111 - RNA, 24 nt, Artificial Sequence
  Synthetic
gaauaugcugugcucccuggcagu

SEQ ID NO: 390112 - RNA, 18 nt, Artificial Sequence
  Synthetic
agacuguagguuggcagu

SEQ ID NO: 390113 - RNA, 19 nt, Artificial Sequence
  Synthetic
aagacuguagguuggcagu

SEQ ID NO: 390114 - RNA, 20 nt, Artificial Sequence
  Synthetic
uaagacuguagguuggcagu

SEQ ID NO: 390115 - RNA, 21 nt, Artificial Sequence
  Synthetic
auaagacuguagguuggcagu

SEQ ID NO: 390116 - RNA, 22 nt, Artificial Sequence
  Synthetic
aauaagacuguagguuggcagu

SEQ ID NO: 390117 - RNA, 23 nt, Artificial Sequence
  Synthetic
aaauaagacuguagguuggcagu

SEQ ID NO: 390118 - RNA, 24 nt, Artificial Sequence
  Synthetic
uaaauaagacuguagguuggcagu

SEQ ID NO: 390119 - RNA, 18 nt, Artificial Sequence
  Synthetic
ccaaggaccaaaugcagu

SEQ ID NO: 390120 - RNA, 19 nt, Artificial Sequence
  Synthetic
cccaaggaccaaaugcagu

SEQ ID NO: 390121 - RNA, 20 nt, Artificial Sequence
  Synthetic
acccaaggaccaaaugcagu

SEQ ID NO: 390122 - RNA, 21 nt, Artificial Sequence
  Synthetic
gacccaaggaccaaaugcagu

SEQ ID NO: 390123 - RNA, 22 nt, Artificial Sequence
  Synthetic
agacccaaggaccaaaugcagu

SEQ ID NO: 390124 - RNA, 23 nt, Artificial Sequence
  Synthetic
aagacccaaggaccaaaugcagu

SEQ ID NO: 390125 - RNA, 24 nt, Artificial Sequence
  Synthetic
aaagacccaaggaccaaaugcagu

SEQ ID NO: 390126 - RNA, 18 nt, Artificial Sequence
  Synthetic
aucauuuuuacaugcagu

SEQ ID NO: 390127 - RNA, 19 nt, Artificial Sequence
  Synthetic
gaucauuuuuacaugcagu

SEQ ID NO: 390128 - RNA, 20 nt, Artificial Sequence
  Synthetic
ugaucauuuuuacaugcagu

SEQ ID NO: 390129 - RNA, 21 nt, Artificial Sequence
  Synthetic
augaucauuuuuacaugcagu

SEQ ID NO: 390130 - RNA, 22 nt, Artificial Sequence
  Synthetic
aaugaucauuuuuacaugcagu

SEQ ID NO: 390131 - RNA, 23 nt, Artificial Sequence
  Synthetic
aaaugaucauuuuuacaugcagu

SEQ ID NO: 390132 - RNA, 24 nt, Artificial Sequence
  Synthetic
aaaaugaucauuuuuacaugcagu

SEQ ID NO: 390133 - RNA, 18 nt, Artificial Sequence
  Synthetic
ugaacacagguaugcagu

SEQ ID NO: 390134 - RNA, 19 nt, Artificial Sequence
  Synthetic
gugaacacagguaugcagu

SEQ ID NO: 390135 - RNA, 20 nt, Artificial Sequence
  Synthetic
ugugaacacagguaugcagu

SEQ ID NO: 390136 - RNA, 21 nt, Artificial Sequence
  Synthetic
uugugaacacagguaugcagu

SEQ ID NO: 390137 - RNA, 22 nt, Artificial Sequence
  Synthetic
uuugugaacacagguaugcagu

SEQ ID NO: 390138 - RNA, 23 nt, Artificial Sequence
  Synthetic
uuuugugaacacagguaugcagu

SEQ ID NO: 390139 - RNA, 24 nt, Artificial Sequence
  Synthetic
guuuugugaacacagguaugcagu

SEQ ID NO: 390140 - RNA, 18 nt, Artificial Sequence
  Synthetic
gucaauuggguaugcagu

SEQ ID NO: 390141 - RNA, 19 nt, Artificial Sequence
  Synthetic
ugucaauuggguaugcagu

SEQ ID NO: 390142 - RNA, 20 nt, Artificial Sequence
  Synthetic
cugucaauuggguaugcagu

SEQ ID NO: 390143 - RNA, 21 nt, Artificial Sequence
  Synthetic
ucugucaauuggguaugcagu

SEQ ID NO: 390144 - RNA, 22 nt, Artificial Sequence
  Synthetic
uucugucaauuggguaugcagu

SEQ ID NO: 390145 - RNA, 23 nt, Artificial Sequence
  Synthetic
cuucugucaauuggguaugcagu

SEQ ID NO: 390146 - RNA, 24 nt, Artificial Sequence
  Synthetic
ucuucugucaauuggguaugcagu

SEQ ID NO: 390147 - RNA, 18 nt, Artificial Sequence
  Synthetic
aaaaaggcuaacugcagu

SEQ ID NO: 390148 - RNA, 19 nt, Artificial Sequence
  Synthetic
aaaaaaggcuaacugcagu

SEQ ID NO: 390149 - RNA, 20 nt, Artificial Sequence
  Synthetic
caaaaaaggcuaacugcagu

SEQ ID NO: 390150 - RNA, 21 nt, Artificial Sequence
  Synthetic
acaaaaaaggcuaacugcagu

SEQ ID NO: 390151 - RNA, 22 nt, Artificial Sequence
  Synthetic
aacaaaaaaggcuaacugcagu

SEQ ID NO: 390152 - RNA, 23 nt, Artificial Sequence
  Synthetic
gaacaaaaaaggcuaacugcagu

SEQ ID NO: 390153 - RNA, 24 nt, Artificial Sequence
  Synthetic
agaacaaaaaaggcuaacugcagu

SEQ ID NO: 390154 - RNA, 18 nt, Artificial Sequence
  Synthetic
caaaugggucccugcagu

SEQ ID NO: 390155 - RNA, 19 nt, Artificial Sequence
  Synthetic
ccaaaugggucccugcagu

SEQ ID NO: 390156 - RNA, 20 nt, Artificial Sequence
  Synthetic
gccaaaugggucccugcagu

SEQ ID NO: 390157 - RNA, 21 nt, Artificial Sequence
  Synthetic
ugccaaaugggucccugcagu

SEQ ID NO: 390158 - RNA, 22 nt, Artificial Sequence
  Synthetic
cugccaaaugggucccugcagu

SEQ ID NO: 390159 - RNA, 23 nt, Artificial Sequence
  Synthetic
ucugccaaaugggucccugcagu

SEQ ID NO: 390160 - RNA, 24 nt, Artificial Sequence
  Synthetic
cucugccaaaugggucccugcagu

SEQ ID NO: 390161 - RNA, 18 nt, Artificial Sequence
  Synthetic
aaugcgugcugcugcagu

SEQ ID NO: 390162 - RNA, 19 nt, Artificial Sequence
  Synthetic
aaaugcgugcugcugcagu

SEQ ID NO: 390163 - RNA, 20 nt, Artificial Sequence
  Synthetic
caaaugcgugcugcugcagu

SEQ ID NO: 390164 - RNA, 21 nt, Artificial Sequence
  Synthetic
ccaaaugcgugcugcugcagu

SEQ ID NO: 390165 - RNA, 22 nt, Artificial Sequence
  Synthetic
gccaaaugcgugcugcugcagu

SEQ ID NO: 390166 - RNA, 23 nt, Artificial Sequence
  Synthetic
agccaaaugcgugcugcugcagu

SEQ ID NO: 390167 - RNA, 24 nt, Artificial Sequence
  Synthetic
aagccaaaugcgugcugcugcagu

SEQ ID NO: 390168 - RNA, 18 nt, Artificial Sequence
  Synthetic
aguuguaaaaucugcagu

SEQ ID NO: 390169 - RNA, 19 nt, Artificial Sequence
  Synthetic
caguuguaaaaucugcagu

SEQ ID NO: 390170 - RNA, 20 nt, Artificial Sequence
  Synthetic
ucaguuguaaaaucugcagu

SEQ ID NO: 390171 - RNA, 21 nt, Artificial Sequence
  Synthetic
uucaguuguaaaaucugcagu

SEQ ID NO: 390172 - RNA, 22 nt, Artificial Sequence
  Synthetic
cuucaguuguaaaaucugcagu

SEQ ID NO: 390173 - RNA, 23 nt, Artificial Sequence
  Synthetic
ucuucaguuguaaaaucugcagu

SEQ ID NO: 390174 - RNA, 24 nt, Artificial Sequence
  Synthetic
uucuucaguuguaaaaucugcagu

SEQ ID NO: 390175 - RNA, 18 nt, Artificial Sequence
  Synthetic
uuucuucugaggugcagu

SEQ ID NO: 390176 - RNA, 19 nt, Artificial Sequence
  Synthetic
guuucuucugaggugcagu

SEQ ID NO: 390177 - RNA, 20 nt, Artificial Sequence
  Synthetic
uguuucuucugaggugcagu

SEQ ID NO: 390178 - RNA, 21 nt, Artificial Sequence
  Synthetic
uuguuucuucugaggugcagu

SEQ ID NO: 390179 - RNA, 22 nt, Artificial Sequence
  Synthetic
cuuguuucuucugaggugcagu

SEQ ID NO: 390180 - RNA, 23 nt, Artificial Sequence
  Synthetic
ucuuguuucuucugaggugcagu

SEQ ID NO: 390181 - RNA, 24 nt, Artificial Sequence
  Synthetic
uucuuguuucuucugaggugcagu

SEQ ID NO: 390182 - RNA, 18 nt, Artificial Sequence
  Synthetic
ugcaaaagaaauugcagu

SEQ ID NO: 390183 - RNA, 19 nt, Artificial Sequence
  Synthetic
gugcaaaagaaauugcagu

SEQ ID NO: 390184 - RNA, 20 nt, Artificial Sequence
  Synthetic
ggugcaaaagaaauugcagu

SEQ ID NO: 390185 - RNA, 21 nt, Artificial Sequence
  Synthetic
uggugcaaaagaaauugcagu

SEQ ID NO: 390186 - RNA, 22 nt, Artificial Sequence
  Synthetic
uuggugcaaaagaaauugcagu

SEQ ID NO: 390187 - RNA, 23 nt, Artificial Sequence
  Synthetic
guuggugcaaaagaaauugcagu

SEQ ID NO: 390188 - RNA, 24 nt, Artificial Sequence
  Synthetic
gguuggugcaaaagaaauugcagu

SEQ ID NO: 390189 - RNA, 18 nt, Artificial Sequence
  Synthetic
agauacugcaaaaucagu

SEQ ID NO: 390190 - RNA, 19 nt, Artificial Sequence
  Synthetic
aagauacugcaaaaucagu

SEQ ID NO: 390191 - RNA, 20 nt, Artificial Sequence
  Synthetic
aaagauacugcaaaaucagu

SEQ ID NO: 390192 - RNA, 21 nt, Artificial Sequence
  Synthetic
aaaagauacugcaaaaucagu

SEQ ID NO: 390193 - RNA, 22 nt, Artificial Sequence
  Synthetic
uaaaagauacugcaaaaucagu

SEQ ID NO: 390194 - RNA, 23 nt, Artificial Sequence
  Synthetic
auaaaagauacugcaaaaucagu

SEQ ID NO: 390195 - RNA, 24 nt, Artificial Sequence
  Synthetic
gauaaaagauacugcaaaaucagu

SEQ ID NO: 390196 - RNA, 18 nt, Artificial Sequence
  Synthetic
ugccucaucaaaaucagu

SEQ ID NO: 390197 - RNA, 19 nt, Artificial Sequence
  Synthetic
uugccucaucaaaaucagu

SEQ ID NO: 390198 - RNA, 20 nt, Artificial Sequence
  Synthetic
uuugccucaucaaaaucagu

SEQ ID NO: 390199 - RNA, 21 nt, Artificial Sequence
  Synthetic
auuugccucaucaaaaucagu

SEQ ID NO: 390200 - RNA, 22 nt, Artificial Sequence
  Synthetic
aauuugccucaucaaaaucagu

SEQ ID NO: 390201 - RNA, 23 nt, Artificial Sequence
  Synthetic
caauuugccucaucaaaaucagu

SEQ ID NO: 390202 - RNA, 24 nt, Artificial Sequence
  Synthetic
gcaauuugccucaucaaaaucagu

SEQ ID NO: 390203 - RNA, 18 nt, Artificial Sequence
  Synthetic
gauucccaauuaaucagu

SEQ ID NO: 390204 - RNA, 19 nt, Artificial Sequence
  Synthetic
ggauucccaauuaaucagu

SEQ ID NO: 390205 - RNA, 20 nt, Artificial Sequence
  Synthetic
uggauucccaauuaaucagu

SEQ ID NO: 390206 - RNA, 21 nt, Artificial Sequence
  Synthetic
auggauucccaauuaaucagu

SEQ ID NO: 390207 - RNA, 22 nt, Artificial Sequence
  Synthetic
aauggauucccaauuaaucagu

SEQ ID NO: 390208 - RNA, 23 nt, Artificial Sequence
  Synthetic
caauggauucccaauuaaucagu

SEQ ID NO: 390209 - RNA, 24 nt, Artificial Sequence
  Synthetic
ccaauggauucccaauuaaucagu

SEQ ID NO: 390210 - RNA, 18 nt, Artificial Sequence
  Synthetic
auaccaucucacaucagu

SEQ ID NO: 390211 - RNA, 19 nt, Artificial Sequence
  Synthetic
gauaccaucucacaucagu

SEQ ID NO: 390212 - RNA, 20 nt, Artificial Sequence
  Synthetic
agauaccaucucacaucagu

SEQ ID NO: 390213 - RNA, 21 nt, Artificial Sequence
  Synthetic
gagauaccaucucacaucagu

SEQ ID NO: 390214 - RNA, 22 nt, Artificial Sequence
  Synthetic
ugagauaccaucucacaucagu

SEQ ID NO: 390215 - RNA, 23 nt, Artificial Sequence
  Synthetic
augagauaccaucucacaucagu

SEQ ID NO: 390216 - RNA, 24 nt, Artificial Sequence
  Synthetic
aaugagauaccaucucacaucagu

SEQ ID NO: 390217 - RNA, 18 nt, Artificial Sequence
  Synthetic
aaaaacauagccaucagu

SEQ ID NO: 390218 - RNA, 19 nt, Artificial Sequence
  Synthetic
uaaaaacauagccaucagu

SEQ ID NO: 390219 - RNA, 20 nt, Artificial Sequence
  Synthetic
uuaaaaacauagccaucagu

SEQ ID NO: 390220 - RNA, 21 nt, Artificial Sequence
  Synthetic
auuaaaaacauagccaucagu

SEQ ID NO: 390221 - RNA, 22 nt, Artificial Sequence
  Synthetic
cauuaaaaacauagccaucagu

SEQ ID NO: 390222 - RNA, 23 nt, Artificial Sequence
  Synthetic
ccauuaaaaacauagccaucagu

SEQ ID NO: 390223 - RNA, 24 nt, Artificial Sequence
  Synthetic
uccauuaaaaacauagccaucagu

SEQ ID NO: 390224 - RNA, 18 nt, Artificial Sequence
  Synthetic
aaaguuggguagaucagu

SEQ ID NO: 390225 - RNA, 19 nt, Artificial Sequence
  Synthetic
gaaaguuggguagaucagu

SEQ ID NO: 390226 - RNA, 20 nt, Artificial Sequence
  Synthetic
agaaaguuggguagaucagu

SEQ ID NO: 390227 - RNA, 21 nt, Artificial Sequence
  Synthetic
aagaaaguuggguagaucagu

SEQ ID NO: 390228 - RNA, 22 nt, Artificial Sequence
  Synthetic
aaagaaaguuggguagaucagu

SEQ ID NO: 390229 - RNA, 23 nt, Artificial Sequence
  Synthetic
gaaagaaaguuggguagaucagu

SEQ ID NO: 390230 - RNA, 24 nt, Artificial Sequence
  Synthetic
ggaaagaaaguuggguagaucagu

SEQ ID NO: 390231 - RNA, 18 nt, Artificial Sequence
  Synthetic
ccaucuucauugaucagu

SEQ ID NO: 390232 - RNA, 19 nt, Artificial Sequence
  Synthetic
cccaucuucauugaucagu

SEQ ID NO: 390233 - RNA, 20 nt, Artificial Sequence
  Synthetic
acccaucuucauugaucagu

SEQ ID NO: 390234 - RNA, 21 nt, Artificial Sequence
  Synthetic
gacccaucuucauugaucagu

SEQ ID NO: 390235 - RNA, 22 nt, Artificial Sequence
  Synthetic
ugacccaucuucauugaucagu

SEQ ID NO: 390236 - RNA, 23 nt, Artificial Sequence
  Synthetic
gugacccaucuucauugaucagu

SEQ ID NO: 390237 - RNA, 24 nt, Artificial Sequence
  Synthetic
ggugacccaucuucauugaucagu

SEQ ID NO: 390238 - RNA, 18 nt, Artificial Sequence
  Synthetic
uagcucccacguaucagu

SEQ ID NO: 390239 - RNA, 19 nt, Artificial Sequence
  Synthetic
uuagcucccacguaucagu

SEQ ID NO: 390240 - RNA, 20 nt, Artificial Sequence
  Synthetic
cuuagcucccacguaucagu

SEQ ID NO: 390241 - RNA, 21 nt, Artificial Sequence
  Synthetic
gcuuagcucccacguaucagu

SEQ ID NO: 390242 - RNA, 22 nt, Artificial Sequence
  Synthetic
agcuuagcucccacguaucagu

SEQ ID NO: 390243 - RNA, 23 nt, Artificial Sequence
  Synthetic
uagcuuagcucccacguaucagu

SEQ ID NO: 390244 - RNA, 24 nt, Artificial Sequence
  Synthetic
auagcuuagcucccacguaucagu

SEQ ID NO: 390245 - RNA, 18 nt, Artificial Sequence
  Synthetic
acaacacgauguaucagu

SEQ ID NO: 390246 - RNA, 19 nt, Artificial Sequence
  Synthetic
cacaacacgauguaucagu

SEQ ID NO: 390247 - RNA, 20 nt, Artificial Sequence
  Synthetic
gcacaacacgauguaucagu

SEQ ID NO: 390248 - RNA, 21 nt, Artificial Sequence
  Synthetic
cgcacaacacgauguaucagu

SEQ ID NO: 390249 - RNA, 22 nt, Artificial Sequence
  Synthetic
acgcacaacacgauguaucagu

SEQ ID NO: 390250 - RNA, 23 nt, Artificial Sequence
  Synthetic
aacgcacaacacgauguaucagu

SEQ ID NO: 390251 - RNA, 24 nt, Artificial Sequence
  Synthetic
caacgcacaacacgauguaucagu

SEQ ID NO: 390252 - RNA, 18 nt, Artificial Sequence
  Synthetic
uagauaaaaauuaucagu

SEQ ID NO: 390253 - RNA, 19 nt, Artificial Sequence
  Synthetic
uuagauaaaaauuaucagu

SEQ ID NO: 390254 - RNA, 20 nt, Artificial Sequence
  Synthetic
auuagauaaaaauuaucagu

SEQ ID NO: 390255 - RNA, 21 nt, Artificial Sequence
  Synthetic
aauuagauaaaaauuaucagu

SEQ ID NO: 390256 - RNA, 22 nt, Artificial Sequence
  Synthetic
aaauuagauaaaaauuaucagu

SEQ ID NO: 390257 - RNA, 23 nt, Artificial Sequence
  Synthetic
uaaauuagauaaaaauuaucagu

SEQ ID NO: 390258 - RNA, 24 nt, Artificial Sequence
  Synthetic
uuaaauuagauaaaaauuaucagu

SEQ ID NO: 390259 - RNA, 18 nt, Artificial Sequence
  Synthetic
ucaacucccauuaucagu

SEQ ID NO: 390260 - RNA, 19 nt, Artificial Sequence
  Synthetic
uucaacucccauuaucagu

SEQ ID NO: 390261 - RNA, 20 nt, Artificial Sequence
  Synthetic
guucaacucccauuaucagu

SEQ ID NO: 390262 - RNA, 21 nt, Artificial Sequence
  Synthetic
uguucaacucccauuaucagu

SEQ ID NO: 390263 - RNA, 22 nt, Artificial Sequence
  Synthetic
uuguucaacucccauuaucagu

SEQ ID NO: 390264 - RNA, 23 nt, Artificial Sequence
  Synthetic
auuguucaacucccauuaucagu

SEQ ID NO: 390265 - RNA, 24 nt, Artificial Sequence
  Synthetic
cauuguucaacucccauuaucagu

SEQ ID NO: 390266 - RNA, 18 nt, Artificial Sequence
  Synthetic
aacuuagauguuaucagu

SEQ ID NO: 390267 - RNA, 19 nt, Artificial Sequence
  Synthetic
aaacuuagauguuaucagu

SEQ ID NO: 390268 - RNA, 20 nt, Artificial Sequence
  Synthetic
uaaacuuagauguuaucagu

SEQ ID NO: 390269 - RNA, 21 nt, Artificial Sequence
  Synthetic
auaaacuuagauguuaucagu

SEQ ID NO: 390270 - RNA, 22 nt, Artificial Sequence
  Synthetic
aauaaacuuagauguuaucagu

SEQ ID NO: 390271 - RNA, 23 nt, Artificial Sequence
  Synthetic
gaauaaacuuagauguuaucagu

SEQ ID NO: 390272 - RNA, 24 nt, Artificial Sequence
  Synthetic
agaauaaacuuagauguuaucagu

SEQ ID NO: 390273 - RNA, 18 nt, Artificial Sequence
  Synthetic
uuaaauaguguuaucagu

SEQ ID NO: 390274 - RNA, 19 nt, Artificial Sequence
  Synthetic
auuaaauaguguuaucagu

SEQ ID NO: 390275 - RNA, 20 nt, Artificial Sequence
  Synthetic
aauuaaauaguguuaucagu

SEQ ID NO: 390276 - RNA, 21 nt, Artificial Sequence
  Synthetic
aaauuaaauaguguuaucagu

SEQ ID NO: 390277 - RNA, 22 nt, Artificial Sequence
  Synthetic
aaaauuaaauaguguuaucagu

SEQ ID NO: 390278 - RNA, 23 nt, Artificial Sequence
  Synthetic
aaaaauuaaauaguguuaucagu

SEQ ID NO: 390279 - RNA, 24 nt, Artificial Sequence
  Synthetic
caaaaauuaaauaguguuaucagu

SEQ ID NO: 390280 - RNA, 18 nt, Artificial Sequence
  Synthetic
agaucuccugaacucagu

SEQ ID NO: 390281 - RNA, 19 nt, Artificial Sequence
  Synthetic
cagaucuccugaacucagu

SEQ ID NO: 390282 - RNA, 20 nt, Artificial Sequence
  Synthetic
ucagaucuccugaacucagu

SEQ ID NO: 390283 - RNA, 21 nt, Artificial Sequence
  Synthetic
aucagaucuccugaacucagu

SEQ ID NO: 390284 - RNA, 22 nt, Artificial Sequence
  Synthetic
uaucagaucuccugaacucagu

SEQ ID NO: 390285 - RNA, 23 nt, Artificial Sequence
  Synthetic
guaucagaucuccugaacucagu

SEQ ID NO: 390286 - RNA, 24 nt, Artificial Sequence
  Synthetic
cguaucagaucuccugaacucagu

SEQ ID NO: 390287 - RNA, 18 nt, Artificial Sequence
  Synthetic
cucugagaccaccucagu

SEQ ID NO: 390288 - RNA, 19 nt, Artificial Sequence
  Synthetic
ccucugagaccaccucagu

SEQ ID NO: 390289 - RNA, 20 nt, Artificial Sequence
  Synthetic
cccucugagaccaccucagu

SEQ ID NO: 390290 - RNA, 21 nt, Artificial Sequence
  Synthetic
ucccucugagaccaccucagu

SEQ ID NO: 390291 - RNA, 22 nt, Artificial Sequence
  Synthetic
cucccucugagaccaccucagu

SEQ ID NO: 390292 - RNA, 23 nt, Artificial Sequence
  Synthetic
ucucccucugagaccaccucagu

SEQ ID NO: 390293 - RNA, 24 nt, Artificial Sequence
  Synthetic
aucucccucugagaccaccucagu

SEQ ID NO: 390294 - RNA, 18 nt, Artificial Sequence
  Synthetic
agaagagaugaccucagu

SEQ ID NO: 390295 - RNA, 19 nt, Artificial Sequence
  Synthetic
cagaagagaugaccucagu

SEQ ID NO: 390296 - RNA, 20 nt, Artificial Sequence
  Synthetic
acagaagagaugaccucagu

SEQ ID NO: 390297 - RNA, 21 nt, Artificial Sequence
  Synthetic
aacagaagagaugaccucagu

SEQ ID NO: 390298 - RNA, 22 nt, Artificial Sequence
  Synthetic
aaacagaagagaugaccucagu

SEQ ID NO: 390299 - RNA, 23 nt, Artificial Sequence
  Synthetic
gaaacagaagagaugaccucagu

SEQ ID NO: 390300 - RNA, 24 nt, Artificial Sequence
  Synthetic
agaaacagaagagaugaccucagu

SEQ ID NO: 390301 - RNA, 18 nt, Artificial Sequence
  Synthetic
cagugacccuaccucagu

SEQ ID NO: 390302 - RNA, 19 nt, Artificial Sequence
  Synthetic
gcagugacccuaccucagu

SEQ ID NO: 390303 - RNA, 20 nt, Artificial Sequence
  Synthetic
ugcagugacccuaccucagu

SEQ ID NO: 390304 - RNA, 21 nt, Artificial Sequence
  Synthetic
gugcagugacccuaccucagu

SEQ ID NO: 390305 - RNA, 22 nt, Artificial Sequence
  Synthetic
ugugcagugacccuaccucagu

SEQ ID NO: 390306 - RNA, 23 nt, Artificial Sequence
  Synthetic
uugugcagugacccuaccucagu

SEQ ID NO: 390307 - RNA, 24 nt, Artificial Sequence
  Synthetic
cuugugcagugacccuaccucagu

SEQ ID NO: 390308 - RNA, 18 nt, Artificial Sequence
  Synthetic
gccguaauaggccucagu

SEQ ID NO: 390309 - RNA, 19 nt, Artificial Sequence
  Synthetic
agccguaauaggccucagu

SEQ ID NO: 390310 - RNA, 20 nt, Artificial Sequence
  Synthetic
cagccguaauaggccucagu

SEQ ID NO: 390311 - RNA, 21 nt, Artificial Sequence
  Synthetic
gcagccguaauaggccucagu

SEQ ID NO: 390312 - RNA, 22 nt, Artificial Sequence
  Synthetic
ggcagccguaauaggccucagu

SEQ ID NO: 390313 - RNA, 23 nt, Artificial Sequence
  Synthetic
aggcagccguaauaggccucagu

SEQ ID NO: 390314 - RNA, 24 nt, Artificial Sequence
  Synthetic
gaggcagccguaauaggccucagu

SEQ ID NO: 390315 - RNA, 18 nt, Artificial Sequence
  Synthetic
guggcuaauuagcucagu

SEQ ID NO: 390316 - RNA, 19 nt, Artificial Sequence
  Synthetic
aguggcuaauuagcucagu

SEQ ID NO: 390317 - RNA, 20 nt, Artificial Sequence
  Synthetic
uaguggcuaauuagcucagu

SEQ ID NO: 390318 - RNA, 21 nt, Artificial Sequence
  Synthetic
cuaguggcuaauuagcucagu

SEQ ID NO: 390319 - RNA, 22 nt, Artificial Sequence
  Synthetic
acuaguggcuaauuagcucagu

SEQ ID NO: 390320 - RNA, 23 nt, Artificial Sequence
  Synthetic
aacuaguggcuaauuagcucagu

SEQ ID NO: 390321 - RNA, 24 nt, Artificial Sequence
  Synthetic
uaacuaguggcuaauuagcucagu

SEQ ID NO: 390322 - RNA, 18 nt, Artificial Sequence
  Synthetic
gagugugggcaucucagu

SEQ ID NO: 390323 - RNA, 19 nt, Artificial Sequence
  Synthetic
agagugugggcaucucagu

SEQ ID NO: 390324 - RNA, 20 nt, Artificial Sequence
  Synthetic
cagagugugggcaucucagu

SEQ ID NO: 390325 - RNA, 21 nt, Artificial Sequence
  Synthetic
ucagagugugggcaucucagu

SEQ ID NO: 390326 - RNA, 22 nt, Artificial Sequence
  Synthetic
uucagagugugggcaucucagu

SEQ ID NO: 390327 - RNA, 23 nt, Artificial Sequence
  Synthetic
cuucagagugugggcaucucagu

SEQ ID NO: 390328 - RNA, 24 nt, Artificial Sequence
  Synthetic
acuucagagugugggcaucucagu

SEQ ID NO: 390329 - RNA, 18 nt, Artificial Sequence
  Synthetic
caguuugggggucucagu

SEQ ID NO: 390330 - RNA, 19 nt, Artificial Sequence
  Synthetic
acaguuugggggucucagu

SEQ ID NO: 390331 - RNA, 20 nt, Artificial Sequence
  Synthetic
cacaguuugggggucucagu

SEQ ID NO: 390332 - RNA, 21 nt, Artificial Sequence
  Synthetic
acacaguuugggggucucagu

SEQ ID NO: 390333 - RNA, 22 nt, Artificial Sequence
  Synthetic
aacacaguuugggggucucagu

SEQ ID NO: 390334 - RNA, 23 nt, Artificial Sequence
  Synthetic
uaacacaguuugggggucucagu

SEQ ID NO: 390335 - RNA, 24 nt, Artificial Sequence
  Synthetic
cuaacacaguuugggggucucagu

SEQ ID NO: 390336 - RNA, 18 nt, Artificial Sequence
  Synthetic
aaugagacaaaagucagu

SEQ ID NO: 390337 - RNA, 19 nt, Artificial Sequence
  Synthetic
aaaugagacaaaagucagu

SEQ ID NO: 390338 - RNA, 20 nt, Artificial Sequence
  Synthetic
aaaaugagacaaaagucagu

SEQ ID NO: 390339 - RNA, 21 nt, Artificial Sequence
  Synthetic
aaaaaugagacaaaagucagu

SEQ ID NO: 390340 - RNA, 22 nt, Artificial Sequence
  Synthetic
gaaaaaugagacaaaagucagu

SEQ ID NO: 390341 - RNA, 23 nt, Artificial Sequence
  Synthetic
ugaaaaaugagacaaaagucagu

SEQ ID NO: 390342 - RNA, 24 nt, Artificial Sequence
  Synthetic
augaaaaaugagacaaaagucagu

SEQ ID NO: 390343 - RNA, 18 nt, Artificial Sequence
  Synthetic
uaucacuuaggagucagu

SEQ ID NO: 390344 - RNA, 19 nt, Artificial Sequence
  Synthetic
auaucacuuaggagucagu

SEQ ID NO: 390345 - RNA, 20 nt, Artificial Sequence
  Synthetic
uauaucacuuaggagucagu

SEQ ID NO: 390346 - RNA, 21 nt, Artificial Sequence
  Synthetic
guauaucacuuaggagucagu

SEQ ID NO: 390347 - RNA, 22 nt, Artificial Sequence
  Synthetic
aguauaucacuuaggagucagu

SEQ ID NO: 390348 - RNA, 23 nt, Artificial Sequence
  Synthetic
gaguauaucacuuaggagucagu

SEQ ID NO: 390349 - RNA, 24 nt, Artificial Sequence
  Synthetic
ggaguauaucacuuaggagucagu

SEQ ID NO: 390350 - RNA, 18 nt, Artificial Sequence
  Synthetic
uaguauuuacuagucagu

SEQ ID NO: 390351 - RNA, 19 nt, Artificial Sequence
  Synthetic
uuaguauuuacuagucagu

SEQ ID NO: 390352 - RNA, 20 nt, Artificial Sequence
  Synthetic
cuuaguauuuacuagucagu

SEQ ID NO: 390353 - RNA, 21 nt, Artificial Sequence
  Synthetic
acuuaguauuuacuagucagu

SEQ ID NO: 390354 - RNA, 22 nt, Artificial Sequence
  Synthetic
aacuuaguauuuacuagucagu

SEQ ID NO: 390355 - RNA, 23 nt, Artificial Sequence
  Synthetic
aaacuuaguauuuacuagucagu

SEQ ID NO: 390356 - RNA, 24 nt, Artificial Sequence
  Synthetic
caaacuuaguauuuacuagucagu

SEQ ID NO: 390357 - RNA, 18 nt, Artificial Sequence
  Synthetic
caaaccaucguagucagu

SEQ ID NO: 390358 - RNA, 19 nt, Artificial Sequence
  Synthetic
ucaaaccaucguagucagu

SEQ ID NO: 390359 - RNA, 20 nt, Artificial Sequence
  Synthetic
gucaaaccaucguagucagu

SEQ ID NO: 390360 - RNA, 21 nt, Artificial Sequence
  Synthetic
agucaaaccaucguagucagu

SEQ ID NO: 390361 - RNA, 22 nt, Artificial Sequence
  Synthetic
aagucaaaccaucguagucagu

SEQ ID NO: 390362 - RNA, 23 nt, Artificial Sequence
  Synthetic
uaagucaaaccaucguagucagu

SEQ ID NO: 390363 - RNA, 24 nt, Artificial Sequence
  Synthetic
guaagucaaaccaucguagucagu

SEQ ID NO: 390364 - RNA, 18 nt, Artificial Sequence
  Synthetic
gcuaauagagacgucagu

SEQ ID NO: 390365 - RNA, 19 nt, Artificial Sequence
  Synthetic
agcuaauagagacgucagu

SEQ ID NO: 390366 - RNA, 20 nt, Artificial Sequence
  Synthetic
aagcuaauagagacgucagu

SEQ ID NO: 390367 - RNA, 21 nt, Artificial Sequence
  Synthetic
uaagcuaauagagacgucagu

SEQ ID NO: 390368 - RNA, 22 nt, Artificial Sequence
  Synthetic
cuaagcuaauagagacgucagu

SEQ ID NO: 390369 - RNA, 23 nt, Artificial Sequence
  Synthetic
acuaagcuaauagagacgucagu

SEQ ID NO: 390370 - RNA, 24 nt, Artificial Sequence
  Synthetic
aacuaagcuaauagagacgucagu

SEQ ID NO: 390371 - RNA, 18 nt, Artificial Sequence
  Synthetic
cagaaaucaaaggucagu

SEQ ID NO: 390372 - RNA, 19 nt, Artificial Sequence
  Synthetic
ccagaaaucaaaggucagu

SEQ ID NO: 390373 - RNA, 20 nt, Artificial Sequence
  Synthetic
cccagaaaucaaaggucagu

SEQ ID NO: 390374 - RNA, 21 nt, Artificial Sequence
  Synthetic
acccagaaaucaaaggucagu

SEQ ID NO: 390375 - RNA, 22 nt, Artificial Sequence
  Synthetic
gacccagaaaucaaaggucagu

SEQ ID NO: 390376 - RNA, 23 nt, Artificial Sequence
  Synthetic
ugacccagaaaucaaaggucagu

SEQ ID NO: 390377 - RNA, 24 nt, Artificial Sequence
  Synthetic
uugacccagaaaucaaaggucagu

SEQ ID NO: 390378 - RNA, 18 nt, Artificial Sequence
  Synthetic
uggagugguggggucagu

SEQ ID NO: 390379 - RNA, 19 nt, Artificial Sequence
  Synthetic
guggagugguggggucagu

SEQ ID NO: 390380 - RNA, 20 nt, Artificial Sequence
  Synthetic
gguggagugguggggucagu

SEQ ID NO: 390381 - RNA, 21 nt, Artificial Sequence
  Synthetic
ggguggagugguggggucagu

SEQ ID NO: 390382 - RNA, 22 nt, Artificial Sequence
  Synthetic
aggguggagugguggggucagu

SEQ ID NO: 390383 - RNA, 23 nt, Artificial Sequence
  Synthetic
uaggguggagugguggggucagu

SEQ ID NO: 390384 - RNA, 24 nt, Artificial Sequence
  Synthetic
cuaggguggagugguggggucagu

SEQ ID NO: 390385 - RNA, 18 nt, Artificial Sequence
  Synthetic
aacaguucgauggucagu

SEQ ID NO: 390386 - RNA, 19 nt, Artificial Sequence
  Synthetic
gaacaguucgauggucagu

SEQ ID NO: 390387 - RNA, 20 nt, Artificial Sequence
  Synthetic
agaacaguucgauggucagu

SEQ ID NO: 390388 - RNA, 21 nt, Artificial Sequence
  Synthetic
uagaacaguucgauggucagu

SEQ ID NO: 390389 - RNA, 22 nt, Artificial Sequence
  Synthetic
uuagaacaguucgauggucagu

SEQ ID NO: 390390 - RNA, 23 nt, Artificial Sequence
  Synthetic
auuagaacaguucgauggucagu

SEQ ID NO: 390391 - RNA, 24 nt, Artificial Sequence
  Synthetic
cauuagaacaguucgauggucagu

SEQ ID NO: 390392 - RNA, 18 nt, Artificial Sequence
  Synthetic
aacaacauuauugucagu

SEQ ID NO: 390393 - RNA, 19 nt, Artificial Sequence
  Synthetic
uaacaacauuauugucagu

SEQ ID NO: 390394 - RNA, 20 nt, Artificial Sequence
  Synthetic
uuaacaacauuauugucagu

SEQ ID NO: 390395 - RNA, 21 nt, Artificial Sequence
  Synthetic
cuuaacaacauuauugucagu

SEQ ID NO: 390396 - RNA, 22 nt, Artificial Sequence
  Synthetic
acuuaacaacauuauugucagu

SEQ ID NO: 390397 - RNA, 23 nt, Artificial Sequence
  Synthetic
aacuuaacaacauuauugucagu

SEQ ID NO: 390398 - RNA, 24 nt, Artificial Sequence
  Synthetic
gaacuuaacaacauuauugucagu

SEQ ID NO: 390399 - RNA, 18 nt, Artificial Sequence
  Synthetic
ucaagguaguuugucagu

SEQ ID NO: 390400 - RNA, 19 nt, Artificial Sequence
  Synthetic
gucaagguaguuugucagu

SEQ ID NO: 390401 - RNA, 20 nt, Artificial Sequence
  Synthetic
ugucaagguaguuugucagu

SEQ ID NO: 390402 - RNA, 21 nt, Artificial Sequence
  Synthetic
uugucaagguaguuugucagu

SEQ ID NO: 390403 - RNA, 22 nt, Artificial Sequence
  Synthetic
uuugucaagguaguuugucagu

SEQ ID NO: 390404 - RNA, 23 nt, Artificial Sequence
  Synthetic
auuugucaagguaguuugucagu

SEQ ID NO: 390405 - RNA, 24 nt, Artificial Sequence
  Synthetic
aauuugucaagguaguuugucagu

SEQ ID NO: 390406 - RNA, 18 nt, Artificial Sequence
  Synthetic
uguuuuuaaagauucagu

SEQ ID NO: 390407 - RNA, 19 nt, Artificial Sequence
  Synthetic
guguuuuuaaagauucagu

SEQ ID NO: 390408 - RNA, 20 nt, Artificial Sequence
  Synthetic
uguguuuuuaaagauucagu

SEQ ID NO: 390409 - RNA, 21 nt, Artificial Sequence
  Synthetic
cuguguuuuuaaagauucagu

SEQ ID NO: 390410 - RNA, 22 nt, Artificial Sequence
  Synthetic
ucuguguuuuuaaagauucagu

SEQ ID NO: 390411 - RNA, 23 nt, Artificial Sequence
  Synthetic
cucuguguuuuuaaagauucagu

SEQ ID NO: 390412 - RNA, 24 nt, Artificial Sequence
  Synthetic
acucuguguuuuuaaagauucagu

SEQ ID NO: 390413 - RNA, 18 nt, Artificial Sequence
  Synthetic
aaauaaaagguauucagu

SEQ ID NO: 390414 - RNA, 19 nt, Artificial Sequence
  Synthetic
gaaauaaaagguauucagu

SEQ ID NO: 390415 - RNA, 20 nt, Artificial Sequence
  Synthetic
ggaaauaaaagguauucagu

SEQ ID NO: 390416 - RNA, 21 nt, Artificial Sequence
  Synthetic
aggaaauaaaagguauucagu

SEQ ID NO: 390417 - RNA, 22 nt, Artificial Sequence
  Synthetic
aaggaaauaaaagguauucagu

SEQ ID NO: 390418 - RNA, 23 nt, Artificial Sequence
  Synthetic
gaaggaaauaaaagguauucagu

SEQ ID NO: 390419 - RNA, 24 nt, Artificial Sequence
  Synthetic
agaaggaaauaaaagguauucagu

SEQ ID NO: 390420 - RNA, 18 nt, Artificial Sequence
  Synthetic
aagcaaauacccuucagu

SEQ ID NO: 390421 - RNA, 19 nt, Artificial Sequence
  Synthetic
caagcaaauacccuucagu

SEQ ID NO: 390422 - RNA, 20 nt, Artificial Sequence
  Synthetic
ucaagcaaauacccuucagu

SEQ ID NO: 390423 - RNA, 21 nt, Artificial Sequence
  Synthetic
aucaagcaaauacccuucagu

SEQ ID NO: 390424 - RNA, 22 nt, Artificial Sequence
  Synthetic
aaucaagcaaauacccuucagu

SEQ ID NO: 390425 - RNA, 23 nt, Artificial Sequence
  Synthetic
aaaucaagcaaauacccuucagu

SEQ ID NO: 390426 - RNA, 24 nt, Artificial Sequence
  Synthetic
gaaaucaagcaaauacccuucagu

SEQ ID NO: 390427 - RNA, 18 nt, Artificial Sequence
  Synthetic
uggagaacacaguucagu

SEQ ID NO: 390428 - RNA, 19 nt, Artificial Sequence
  Synthetic
uuggagaacacaguucagu

SEQ ID NO: 390429 - RNA, 20 nt, Artificial Sequence
  Synthetic
auuggagaacacaguucagu

SEQ ID NO: 390430 - RNA, 21 nt, Artificial Sequence
  Synthetic
cauuggagaacacaguucagu

SEQ ID NO: 390431 - RNA, 22 nt, Artificial Sequence
  Synthetic
gcauuggagaacacaguucagu

SEQ ID NO: 390432 - RNA, 23 nt, Artificial Sequence
  Synthetic
agcauuggagaacacaguucagu

SEQ ID NO: 390433 - RNA, 24 nt, Artificial Sequence
  Synthetic
uagcauuggagaacacaguucagu

SEQ ID NO: 390434 - RNA, 18 nt, Artificial Sequence
  Synthetic
augaaucuauuguucagu

SEQ ID NO: 390435 - RNA, 19 nt, Artificial Sequence
  Synthetic
caugaaucuauuguucagu

SEQ ID NO: 390436 - RNA, 20 nt, Artificial Sequence
  Synthetic
ccaugaaucuauuguucagu

SEQ ID NO: 390437 - RNA, 21 nt, Artificial Sequence
  Synthetic
cccaugaaucuauuguucagu

SEQ ID NO: 390438 - RNA, 22 nt, Artificial Sequence
  Synthetic
acccaugaaucuauuguucagu

SEQ ID NO: 390439 - RNA, 23 nt, Artificial Sequence
  Synthetic
uacccaugaaucuauuguucagu

SEQ ID NO: 390440 - RNA, 24 nt, Artificial Sequence
  Synthetic
cuacccaugaaucuauuguucagu

SEQ ID NO: 390441 - RNA, 18 nt, Artificial Sequence
  Synthetic
aguugucauuauuucagu

SEQ ID NO: 390442 - RNA, 19 nt, Artificial Sequence
  Synthetic
caguugucauuauuucagu

SEQ ID NO: 390443 - RNA, 20 nt, Artificial Sequence
  Synthetic
gcaguugucauuauuucagu

SEQ ID NO: 390444 - RNA, 21 nt, Artificial Sequence
  Synthetic
ugcaguugucauuauuucagu

SEQ ID NO: 390445 - RNA, 22 nt, Artificial Sequence
  Synthetic
cugcaguugucauuauuucagu

SEQ ID NO: 390446 - RNA, 23 nt, Artificial Sequence
  Synthetic
ucugcaguugucauuauuucagu

SEQ ID NO: 390447 - RNA, 24 nt, Artificial Sequence
  Synthetic
uucugcaguugucauuauuucagu

SEQ ID NO: 390448 - RNA, 18 nt, Artificial Sequence
  Synthetic
gaguaccugaguuucagu

SEQ ID NO: 390449 - RNA, 19 nt, Artificial Sequence
  Synthetic
ugaguaccugaguuucagu

SEQ ID NO: 390450 - RNA, 20 nt, Artificial Sequence
  Synthetic
augaguaccugaguuucagu

SEQ ID NO: 390451 - RNA, 21 nt, Artificial Sequence
  Synthetic
aaugaguaccugaguuucagu

SEQ ID NO: 390452 - RNA, 22 nt, Artificial Sequence
  Synthetic
uaaugaguaccugaguuucagu

SEQ ID NO: 390453 - RNA, 23 nt, Artificial Sequence
  Synthetic
uuaaugaguaccugaguuucagu

SEQ ID NO: 390454 - RNA, 24 nt, Artificial Sequence
  Synthetic
uuuaaugaguaccugaguuucagu

SEQ ID NO: 390455 - RNA, 18 nt, Artificial Sequence
  Synthetic
acaauuugauguuucagu

SEQ ID NO: 390456 - RNA, 19 nt, Artificial Sequence
  Synthetic
uacaauuugauguuucagu

SEQ ID NO: 390457 - RNA, 20 nt, Artificial Sequence
  Synthetic
uuacaauuugauguuucagu

SEQ ID NO: 390458 - RNA, 21 nt, Artificial Sequence
  Synthetic
guuacaauuugauguuucagu

SEQ ID NO: 390459 - RNA, 22 nt, Artificial Sequence
  Synthetic
uguuacaauuugauguuucagu

SEQ ID NO: 390460 - RNA, 23 nt, Artificial Sequence
  Synthetic
uuguuacaauuugauguuucagu

SEQ ID NO: 390461 - RNA, 24 nt, Artificial Sequence
  Synthetic
guuguuacaauuugauguuucagu

SEQ ID NO: 390462 - RNA, 18 nt, Artificial Sequence
  Synthetic
agaaagacuauuuucagu

SEQ ID NO: 390463 - RNA, 19 nt, Artificial Sequence
  Synthetic
cagaaagacuauuuucagu

SEQ ID NO: 390464 - RNA, 20 nt, Artificial Sequence
  Synthetic
ucagaaagacuauuuucagu

SEQ ID NO: 390465 - RNA, 21 nt, Artificial Sequence
  Synthetic
aucagaaagacuauuuucagu

SEQ ID NO: 390466 - RNA, 22 nt, Artificial Sequence
  Synthetic
caucagaaagacuauuuucagu

SEQ ID NO: 390467 - RNA, 23 nt, Artificial Sequence
  Synthetic
acaucagaaagacuauuuucagu

SEQ ID NO: 390468 - RNA, 24 nt, Artificial Sequence
  Synthetic
aacaucagaaagacuauuuucagu

SEQ ID NO: 390469 - RNA, 18 nt, Artificial Sequence
  Synthetic
aaaggagaccuuuucagu

SEQ ID NO: 390470 - RNA, 19 nt, Artificial Sequence
  Synthetic
gaaaggagaccuuuucagu

SEQ ID NO: 390471 - RNA, 20 nt, Artificial Sequence
  Synthetic
agaaaggagaccuuuucagu

SEQ ID NO: 390472 - RNA, 21 nt, Artificial Sequence
  Synthetic
cagaaaggagaccuuuucagu

SEQ ID NO: 390473 - RNA, 22 nt, Artificial Sequence
  Synthetic
gcagaaaggagaccuuuucagu

SEQ ID NO: 390474 - RNA, 23 nt, Artificial Sequence
  Synthetic
ugcagaaaggagaccuuuucagu

SEQ ID NO: 390475 - RNA, 24 nt, Artificial Sequence
  Synthetic
uugcagaaaggagaccuuuucagu

SEQ ID NO: 390476 - RNA, 18 nt, Artificial Sequence
  Synthetic
cgguaccaucuuuucagu

SEQ ID NO: 390477 - RNA, 19 nt, Artificial Sequence
  Synthetic
ccgguaccaucuuuucagu

SEQ ID NO: 390478 - RNA, 20 nt, Artificial Sequence
  Synthetic
cccgguaccaucuuuucagu

SEQ ID NO: 390479 - RNA, 21 nt, Artificial Sequence
  Synthetic
ucccgguaccaucuuuucagu

SEQ ID NO: 390480 - RNA, 22 nt, Artificial Sequence
  Synthetic
aucccgguaccaucuuuucagu

SEQ ID NO: 390481 - RNA, 23 nt, Artificial Sequence
  Synthetic
caucccgguaccaucuuuucagu

SEQ ID NO: 390482 - RNA, 24 nt, Artificial Sequence
  Synthetic
ucaucccgguaccaucuuuucagu

SEQ ID NO: 390483 - RNA, 18 nt, Artificial Sequence
  Synthetic
uggccucauaaaaagagu

SEQ ID NO: 390484 - RNA, 19 nt, Artificial Sequence
  Synthetic
cuggccucauaaaaagagu

SEQ ID NO: 390485 - RNA, 20 nt, Artificial Sequence
  Synthetic
gcuggccucauaaaaagagu

SEQ ID NO: 390486 - RNA, 22 nt, Artificial Sequence
  Synthetic
cugcuggccucauaaaaagagu

SEQ ID NO: 390487 - RNA, 23 nt, Artificial Sequence
  Synthetic
gcugcuggccucauaaaaagagu

SEQ ID NO: 390488 - RNA, 24 nt, Artificial Sequence
  Synthetic
ugcugcuggccucauaaaaagagu

SEQ ID NO: 390489 - RNA, 18 nt, Artificial Sequence
  Synthetic
uuaguuuuccaaaagagu

SEQ ID NO: 390490 - RNA, 19 nt, Artificial Sequence
  Synthetic
uuuaguuuuccaaaagagu

SEQ ID NO: 390491 - RNA, 20 nt, Artificial Sequence
  Synthetic
cuuuaguuuuccaaaagagu

SEQ ID NO: 390492 - RNA, 21 nt, Artificial Sequence
  Synthetic
ucuuuaguuuuccaaaagagu

SEQ ID NO: 390493 - RNA, 22 nt, Artificial Sequence
  Synthetic
cucuuuaguuuuccaaaagagu

SEQ ID NO: 390494 - RNA, 23 nt, Artificial Sequence
  Synthetic
ccucuuuaguuuuccaaaagagu

SEQ ID NO: 390495 - RNA, 24 nt, Artificial Sequence
  Synthetic
uccucuuuaguuuuccaaaagagu

SEQ ID NO: 390496 - RNA, 18 nt, Artificial Sequence
  Synthetic
gugguuguuuaaaagagu

SEQ ID NO: 390497 - RNA, 19 nt, Artificial Sequence
  Synthetic
ugugguuguuuaaaagagu

SEQ ID NO: 390498 - RNA, 20 nt, Artificial Sequence
  Synthetic
augugguuguuuaaaagagu

SEQ ID NO: 390499 - RNA, 21 nt, Artificial Sequence
  Synthetic
uaugugguuguuuaaaagagu

SEQ ID NO: 390500 - RNA, 22 nt, Artificial Sequence
  Synthetic
auaugugguuguuuaaaagagu

SEQ ID NO: 390501 - RNA, 23 nt, Artificial Sequence
  Synthetic
uauaugugguuguuuaaaagagu

SEQ ID NO: 390502 - RNA, 24 nt, Artificial Sequence
  Synthetic
cuauaugugguuguuuaaaagagu

SEQ ID NO: 390503 - RNA, 18 nt, Artificial Sequence
  Synthetic
guuaugcagugaaagagu

SEQ ID NO: 390504 - RNA, 19 nt, Artificial Sequence
  Synthetic
uguuaugcagugaaagagu

SEQ ID NO: 390505 - RNA, 20 nt, Artificial Sequence
  Synthetic
auguuaugcagugaaagagu

SEQ ID NO: 390506 - RNA, 21 nt, Artificial Sequence
  Synthetic
aauguuaugcagugaaagagu

SEQ ID NO: 390507 - RNA, 22 nt, Artificial Sequence
  Synthetic
gaauguuaugcagugaaagagu

SEQ ID NO: 390508 - RNA, 23 nt, Artificial Sequence
  Synthetic
agaauguuaugcagugaaagagu

SEQ ID NO: 390509 - RNA, 24 nt, Artificial Sequence
  Synthetic
uagaauguuaugcagugaaagagu

SEQ ID NO: 390510 - RNA, 18 nt, Artificial Sequence
  Synthetic
gcaaauuggauaaagagu

SEQ ID NO: 390511 - RNA, 19 nt, Artificial Sequence
  Synthetic
ggcaaauuggauaaagagu

SEQ ID NO: 390512 - RNA, 20 nt, Artificial Sequence
  Synthetic
uggcaaauuggauaaagagu

SEQ ID NO: 390513 - RNA, 21 nt, Artificial Sequence
  Synthetic
cuggcaaauuggauaaagagu

SEQ ID NO: 390514 - RNA, 22 nt, Artificial Sequence
  Synthetic
acuggcaaauuggauaaagagu

SEQ ID NO: 390515 - RNA, 23 nt, Artificial Sequence
  Synthetic
gacuggcaaauuggauaaagagu

SEQ ID NO: 390516 - RNA, 24 nt, Artificial Sequence
  Synthetic
agacuggcaaauuggauaaagagu

SEQ ID NO: 390517 - RNA, 18 nt, Artificial Sequence
  Synthetic
gauuguugucuaaagagu

SEQ ID NO: 390518 - RNA, 19 nt, Artificial Sequence
  Synthetic
ugauuguugucuaaagagu

SEQ ID NO: 390519 - RNA, 20 nt, Artificial Sequence
  Synthetic
uugauuguugucuaaagagu

SEQ ID NO: 390520 - RNA, 21 nt, Artificial Sequence
  Synthetic
uuugauuguugucuaaagagu

SEQ ID NO: 390521 - RNA, 22 nt, Artificial Sequence
  Synthetic
uuuugauuguugucuaaagagu

SEQ ID NO: 390522 - RNA, 23 nt, Artificial Sequence
  Synthetic
auuuugauuguugucuaaagagu

SEQ ID NO: 390523 - RNA, 24 nt, Artificial Sequence
  Synthetic
uauuuugauuguugucuaaagagu

SEQ ID NO: 390524 - RNA, 18 nt, Artificial Sequence
  Synthetic
agaggaggaguaaagagu

SEQ ID NO: 390525 - RNA, 19 nt, Artificial Sequence
  Synthetic
uagaggaggaguaaagagu

SEQ ID NO: 390526 - RNA, 20 nt, Artificial Sequence
  Synthetic
auagaggaggaguaaagagu

SEQ ID NO: 390527 - RNA, 21 nt, Artificial Sequence
  Synthetic
uauagaggaggaguaaagagu

SEQ ID NO: 390528 - RNA, 22 nt, Artificial Sequence
  Synthetic
cuauagaggaggaguaaagagu

SEQ ID NO: 390529 - RNA, 23 nt, Artificial Sequence
  Synthetic
ccuauagaggaggaguaaagagu

SEQ ID NO: 390530 - RNA, 24 nt, Artificial Sequence
  Synthetic
uccuauagaggaggaguaaagagu

SEQ ID NO: 390531 - RNA, 18 nt, Artificial Sequence
  Synthetic
ugcaacacagccaagagu

SEQ ID NO: 390532 - RNA, 19 nt, Artificial Sequence
  Synthetic
cugcaacacagccaagagu

SEQ ID NO: 390533 - RNA, 20 nt, Artificial Sequence
  Synthetic
ccugcaacacagccaagagu

SEQ ID NO: 390534 - RNA, 21 nt, Artificial Sequence
  Synthetic
accugcaacacagccaagagu

SEQ ID NO: 390535 - RNA, 22 nt, Artificial Sequence
  Synthetic
uaccugcaacacagccaagagu

SEQ ID NO: 390536 - RNA, 23 nt, Artificial Sequence
  Synthetic
uuaccugcaacacagccaagagu

SEQ ID NO: 390537 - RNA, 24 nt, Artificial Sequence
  Synthetic
uuuaccugcaacacagccaagagu

SEQ ID NO: 390538 - RNA, 18 nt, Artificial Sequence
  Synthetic
ucacuagaggccaagagu

SEQ ID NO: 390539 - RNA, 19 nt, Artificial Sequence
  Synthetic
aucacuagaggccaagagu

SEQ ID NO: 390540 - RNA, 20 nt, Artificial Sequence
  Synthetic
gaucacuagaggccaagagu

SEQ ID NO: 390541 - RNA, 21 nt, Artificial Sequence
  Synthetic
ggaucacuagaggccaagagu

SEQ ID NO: 390542 - RNA, 22 nt, Artificial Sequence
  Synthetic
aggaucacuagaggccaagagu

SEQ ID NO: 390543 - RNA, 23 nt, Artificial Sequence
  Synthetic
gaggaucacuagaggccaagagu

SEQ ID NO: 390544 - RNA, 24 nt, Artificial Sequence
  Synthetic
ggaggaucacuagaggccaagagu

SEQ ID NO: 390545 - RNA, 18 nt, Artificial Sequence
  Synthetic
aaauuuucuuccaagagu

SEQ ID NO: 390546 - RNA, 19 nt, Artificial Sequence
  Synthetic
uaaauuuucuuccaagagu

SEQ ID NO: 390547 - RNA, 20 nt, Artificial Sequence
  Synthetic
cuaaauuuucuuccaagagu

SEQ ID NO: 390548 - RNA, 21 nt, Artificial Sequence
  Synthetic
ccuaaauuuucuuccaagagu

SEQ ID NO: 390549 - RNA, 22 nt, Artificial Sequence
  Synthetic
gccuaaauuuucuuccaagagu

SEQ ID NO: 390550 - RNA, 23 nt, Artificial Sequence
  Synthetic
ggccuaaauuuucuuccaagagu

SEQ ID NO: 390551 - RNA, 24 nt, Artificial Sequence
  Synthetic
aggccuaaauuuucuuccaagagu

SEQ ID NO: 390552 - RNA, 18 nt, Artificial Sequence
  Synthetic
guauguuugggcaagagu

SEQ ID NO: 390553 - RNA, 19 nt, Artificial Sequence
  Synthetic
gguauguuugggcaagagu

SEQ ID NO: 390554 - RNA, 20 nt, Artificial Sequence
  Synthetic
agguauguuugggcaagagu

SEQ ID NO: 390555 - RNA, 21 nt, Artificial Sequence
  Synthetic
aagguauguuugggcaagagu

SEQ ID NO: 390556 - RNA, 22 nt, Artificial Sequence
  Synthetic
aaagguauguuugggcaagagu

SEQ ID NO: 390557 - RNA, 23 nt, Artificial Sequence
  Synthetic
aaaagguauguuugggcaagagu

SEQ ID NO: 390558 - RNA, 24 nt, Artificial Sequence
  Synthetic
gaaaagguauguuugggcaagagu

SEQ ID NO: 390559 - RNA, 18 nt, Artificial Sequence
  Synthetic
uauggaaggugcaagagu

SEQ ID NO: 390560 - RNA, 19 nt, Artificial Sequence
  Synthetic
auauggaaggugcaagagu

SEQ ID NO: 390561 - RNA, 20 nt, Artificial Sequence
  Synthetic
gauauggaaggugcaagagu

SEQ ID NO: 390562 - RNA, 21 nt, Artificial Sequence
  Synthetic
ggauauggaaggugcaagagu

SEQ ID NO: 390563 - RNA, 22 nt, Artificial Sequence
  Synthetic
aggauauggaaggugcaagagu

SEQ ID NO: 390564 - RNA, 23 nt, Artificial Sequence
  Synthetic
uaggauauggaaggugcaagagu

SEQ ID NO: 390565 - RNA, 24 nt, Artificial Sequence
  Synthetic
auaggauauggaaggugcaagagu

SEQ ID NO: 390566 - RNA, 18 nt, Artificial Sequence
  Synthetic
ucccuggacgucaagagu

SEQ ID NO: 390567 - RNA, 19 nt, Artificial Sequence
  Synthetic
aucccuggacgucaagagu

SEQ ID NO: 390568 - RNA, 20 nt, Artificial Sequence
  Synthetic
gaucccuggacgucaagagu

SEQ ID NO: 390569 - RNA, 21 nt, Artificial Sequence
  Synthetic
agaucccuggacgucaagagu

SEQ ID NO: 390570 - RNA, 22 nt, Artificial Sequence
  Synthetic
cagaucccuggacgucaagagu

SEQ ID NO: 390571 - RNA, 23 nt, Artificial Sequence
  Synthetic
gcagaucccuggacgucaagagu

SEQ ID NO: 390572 - RNA, 24 nt, Artificial Sequence
  Synthetic
ggcagaucccuggacgucaagagu

SEQ ID NO: 390573 - RNA, 18 nt, Artificial Sequence
  Synthetic
aacuuuuaugagaagagu

SEQ ID NO: 390574 - RNA, 19 nt, Artificial Sequence
  Synthetic
aaacuuuuaugagaagagu

SEQ ID NO: 390575 - RNA, 20 nt, Artificial Sequence
  Synthetic
aaaacuuuuaugagaagagu

SEQ ID NO: 390576 - RNA, 21 nt, Artificial Sequence
  Synthetic
gaaaacuuuuaugagaagagu

SEQ ID NO: 390577 - RNA, 22 nt, Artificial Sequence
  Synthetic
cgaaaacuuuuaugagaagagu

SEQ ID NO: 390578 - RNA, 23 nt, Artificial Sequence
  Synthetic
acgaaaacuuuuaugagaagagu

SEQ ID NO: 390579 - RNA, 24 nt, Artificial Sequence
  Synthetic
aacgaaaacuuuuaugagaagagu

SEQ ID NO: 390580 - RNA, 18 nt, Artificial Sequence
  Synthetic
cuaucuggaaauaagagu

SEQ ID NO: 390581 - RNA, 19 nt, Artificial Sequence
  Synthetic
ccuaucuggaaauaagagu

SEQ ID NO: 390582 - RNA, 20 nt, Artificial Sequence
  Synthetic
accuaucuggaaauaagagu

SEQ ID NO: 390583 - RNA, 21 nt, Artificial Sequence
  Synthetic
uaccuaucuggaaauaagagu

SEQ ID NO: 390584 - RNA, 22 nt, Artificial Sequence
  Synthetic
uuaccuaucuggaaauaagagu

SEQ ID NO: 390585 - RNA, 23 nt, Artificial Sequence
  Synthetic
uuuaccuaucuggaaauaagagu

SEQ ID NO: 390586 - RNA, 24 nt, Artificial Sequence
  Synthetic
auuuaccuaucuggaaauaagagu

SEQ ID NO: 390587 - RNA, 18 nt, Artificial Sequence
  Synthetic
agauuuugaacuaagagu

SEQ ID NO: 390588 - RNA, 19 nt, Artificial Sequence
  Synthetic
cagauuuugaacuaagagu

SEQ ID NO: 390589 - RNA, 20 nt, Artificial Sequence
  Synthetic
acagauuuugaacuaagagu

SEQ ID NO: 390590 - RNA, 21 nt, Artificial Sequence
  Synthetic
aacagauuuugaacuaagagu

SEQ ID NO: 390591 - RNA, 22 nt, Artificial Sequence
  Synthetic
aaacagauuuugaacuaagagu

SEQ ID NO: 390592 - RNA, 23 nt, Artificial Sequence
  Synthetic
aaaacagauuuugaacuaagagu

SEQ ID NO: 390593 - RNA, 24 nt, Artificial Sequence
  Synthetic
caaaacagauuuugaacuaagagu

SEQ ID NO: 390594 - RNA, 18 nt, Artificial Sequence
  Synthetic
ccauucccaccuaagagu

SEQ ID NO: 390595 - RNA, 19 nt, Artificial Sequence
  Synthetic
uccauucccaccuaagagu

SEQ ID NO: 390596 - RNA, 20 nt, Artificial Sequence
  Synthetic
uuccauucccaccuaagagu

SEQ ID NO: 390597 - RNA, 21 nt, Artificial Sequence
  Synthetic
guuccauucccaccuaagagu

SEQ ID NO: 390598 - RNA, 22 nt, Artificial Sequence
  Synthetic
uguuccauucccaccuaagagu

SEQ ID NO: 390599 - RNA, 23 nt, Artificial Sequence
  Synthetic
uuguuccauucccaccuaagagu

SEQ ID NO: 390600 - RNA, 24 nt, Artificial Sequence
  Synthetic
auuguuccauucccaccuaagagu

SEQ ID NO: 390601 - RNA, 18 nt, Artificial Sequence
  Synthetic
aggccugccucuaagagu

SEQ ID NO: 390602 - RNA, 19 nt, Artificial Sequence
  Synthetic
aaggccugccucuaagagu

SEQ ID NO: 390603 - RNA, 20 nt, Artificial Sequence
  Synthetic
gaaggccugccucuaagagu

SEQ ID NO: 390604 - RNA, 21 nt, Artificial Sequence
  Synthetic
agaaggccugccucuaagagu

SEQ ID NO: 390605 - RNA, 22 nt, Artificial Sequence
  Synthetic
gagaaggccugccucuaagagu

SEQ ID NO: 390606 - RNA, 23 nt, Artificial Sequence
  Synthetic
agagaaggccugccucuaagagu

SEQ ID NO: 390607 - RNA, 24 nt, Artificial Sequence
  Synthetic
aagagaaggccugccucuaagagu

SEQ ID NO: 390608 - RNA, 18 nt, Artificial Sequence
  Synthetic
uagagauguuguaagagu

SEQ ID NO: 390609 - RNA, 19 nt, Artificial Sequence
  Synthetic
auagagauguuguaagagu

SEQ ID NO: 390610 - RNA, 20 nt, Artificial Sequence
  Synthetic
uauagagauguuguaagagu

SEQ ID NO: 390611 - RNA, 21 nt, Artificial Sequence
  Synthetic
uuauagagauguuguaagagu

SEQ ID NO: 390612 - RNA, 22 nt, Artificial Sequence
  Synthetic
uuuauagagauguuguaagagu

SEQ ID NO: 390613 - RNA, 23 nt, Artificial Sequence
  Synthetic
auuuauagagauguuguaagagu

SEQ ID NO: 390614 - RNA, 24 nt, Artificial Sequence
  Synthetic
uauuuauagagauguuguaagagu

SEQ ID NO: 390615 - RNA, 18 nt, Artificial Sequence
  Synthetic
uaaaaugggaaacagagu

SEQ ID NO: 390616 - RNA, 19 nt, Artificial Sequence
  Synthetic
cuaaaaugggaaacagagu

SEQ ID NO: 390617 - RNA, 20 nt, Artificial Sequence
  Synthetic
ccuaaaaugggaaacagagu

SEQ ID NO: 390618 - RNA, 21 nt, Artificial Sequence
  Synthetic
gccuaaaaugggaaacagagu

SEQ ID NO: 390619 - RNA, 22 nt, Artificial Sequence
  Synthetic
agccuaaaaugggaaacagagu

SEQ ID NO: 390620 - RNA, 23 nt, Artificial Sequence
  Synthetic
uagccuaaaaugggaaacagagu

SEQ ID NO: 390621 - RNA, 24 nt, Artificial Sequence
  Synthetic
auagccuaaaaugggaaacagagu

SEQ ID NO: 390622 - RNA, 18 nt, Artificial Sequence
  Synthetic
aagugaggcagacagagu

SEQ ID NO: 390623 - RNA, 19 nt, Artificial Sequence
  Synthetic
gaagugaggcagacagagu

SEQ ID NO: 390624 - RNA, 20 nt, Artificial Sequence
  Synthetic
agaagugaggcagacagagu

SEQ ID NO: 390625 - RNA, 21 nt, Artificial Sequence
  Synthetic
aagaagugaggcagacagagu

SEQ ID NO: 390626 - RNA, 22 nt, Artificial Sequence
  Synthetic
caagaagugaggcagacagagu

SEQ ID NO: 390627 - RNA, 23 nt, Artificial Sequence
  Synthetic
acaagaagugaggcagacagagu

SEQ ID NO: 390628 - RNA, 24 nt, Artificial Sequence
  Synthetic
aacaagaagugaggcagacagagu

SEQ ID NO: 390629 - RNA, 18 nt, Artificial Sequence
  Synthetic
cagccugggugacagagu

SEQ ID NO: 390630 - RNA, 19 nt, Artificial Sequence
  Synthetic
ccagccugggugacagagu

SEQ ID NO: 390631 - RNA, 20 nt, Artificial Sequence
  Synthetic
uccagccugggugacagagu

SEQ ID NO: 390632 - RNA, 21 nt, Artificial Sequence
  Synthetic
cuccagccugggugacagagu

SEQ ID NO: 390633 - RNA, 22 nt, Artificial Sequence
  Synthetic
acuccagccugggugacagagu

SEQ ID NO: 390634 - RNA, 23 nt, Artificial Sequence
  Synthetic
cacuccagccugggugacagagu

SEQ ID NO: 390635 - RNA, 24 nt, Artificial Sequence
  Synthetic
gcacuccagccugggugacagagu

SEQ ID NO: 390636 - RNA, 18 nt, Artificial Sequence
  Synthetic
aucacguauuaccagagu

SEQ ID NO: 390637 - RNA, 19 nt, Artificial Sequence
  Synthetic
caucacguauuaccagagu

SEQ ID NO: 390638 - RNA, 20 nt, Artificial Sequence
  Synthetic
gcaucacguauuaccagagu

SEQ ID NO: 390639 - RNA, 21 nt, Artificial Sequence
  Synthetic
agcaucacguauuaccagagu

SEQ ID NO: 390640 - RNA, 22 nt, Artificial Sequence
  Synthetic
aagcaucacguauuaccagagu

SEQ ID NO: 390641 - RNA, 23 nt, Artificial Sequence
  Synthetic
aaagcaucacguauuaccagagu

SEQ ID NO: 390642 - RNA, 24 nt, Artificial Sequence
  Synthetic
gaaagcaucacguauuaccagagu

SEQ ID NO: 390643 - RNA, 18 nt, Artificial Sequence
  Synthetic
cuccauccagcccagagu

SEQ ID NO: 390644 - RNA, 19 nt, Artificial Sequence
  Synthetic
ucuccauccagcccagagu

SEQ ID NO: 390645 - RNA, 20 nt, Artificial Sequence
  Synthetic
cucuccauccagcccagagu

SEQ ID NO: 390646 - RNA, 21 nt, Artificial Sequence
  Synthetic
acucuccauccagcccagagu

SEQ ID NO: 390647 - RNA, 22 nt, Artificial Sequence
  Synthetic
gacucuccauccagcccagagu

SEQ ID NO: 390648 - RNA, 23 nt, Artificial Sequence
  Synthetic
ugacucuccauccagcccagagu

SEQ ID NO: 390649 - RNA, 24 nt, Artificial Sequence
  Synthetic
uugacucuccauccagcccagagu

SEQ ID NO: 390650 - RNA, 18 nt, Artificial Sequence
  Synthetic
aacugaauuaggcagagu

SEQ ID NO: 390651 - RNA, 19 nt, Artificial Sequence
  Synthetic
uaacugaauuaggcagagu

SEQ ID NO: 390652 - RNA, 20 nt, Artificial Sequence
  Synthetic
uuaacugaauuaggcagagu

SEQ ID NO: 390653 - RNA, 21 nt, Artificial Sequence
  Synthetic
guuaacugaauuaggcagagu

SEQ ID NO: 390654 - RNA, 22 nt, Artificial Sequence
  Synthetic
aguuaacugaauuaggcagagu

SEQ ID NO: 390655 - RNA, 23 nt, Artificial Sequence
  Synthetic
gaguuaacugaauuaggcagagu

SEQ ID NO: 390656 - RNA, 24 nt, Artificial Sequence
  Synthetic
ugaguuaacugaauuaggcagagu

SEQ ID NO: 390657 - RNA, 18 nt, Artificial Sequence
  Synthetic
acucagaaggggcagagu

SEQ ID NO: 390658 - RNA, 19 nt, Artificial Sequence
  Synthetic
gacucagaaggggcagagu

SEQ ID NO: 390659 - RNA, 20 nt, Artificial Sequence
  Synthetic
agacucagaaggggcagagu

SEQ ID NO: 390660 - RNA, 21 nt, Artificial Sequence
  Synthetic
aagacucagaaggggcagagu

SEQ ID NO: 390661 - RNA, 22 nt, Artificial Sequence
  Synthetic
gaagacucagaaggggcagagu

SEQ ID NO: 390662 - RNA, 23 nt, Artificial Sequence
  Synthetic
ugaagacucagaaggggcagagu

SEQ ID NO: 390663 - RNA, 24 nt, Artificial Sequence
  Synthetic
uugaagacucagaaggggcagagu

SEQ ID NO: 390664 - RNA, 18 nt, Artificial Sequence
  Synthetic
caaucuaccuugcagagu

SEQ ID NO: 390665 - RNA, 19 nt, Artificial Sequence
  Synthetic
acaaucuaccuugcagagu

SEQ ID NO: 390666 - RNA, 20 nt, Artificial Sequence
  Synthetic
aacaaucuaccuugcagagu

SEQ ID NO: 390667 - RNA, 21 nt, Artificial Sequence
  Synthetic
aaacaaucuaccuugcagagu

SEQ ID NO: 390668 - RNA, 22 nt, Artificial Sequence
  Synthetic
gaaacaaucuaccuugcagagu

SEQ ID NO: 390669 - RNA, 23 nt, Artificial Sequence
  Synthetic
ggaaacaaucuaccuugcagagu

SEQ ID NO: 390670 - RNA, 24 nt, Artificial Sequence
  Synthetic
aggaaacaaucuaccuugcagagu

SEQ ID NO: 390671 - RNA, 18 nt, Artificial Sequence
  Synthetic
acaaauaugucucagagu

SEQ ID NO: 390672 - RNA, 19 nt, Artificial Sequence
  Synthetic
aacaaauaugucucagagu

SEQ ID NO: 390673 - RNA, 20 nt, Artificial Sequence
  Synthetic
aaacaaauaugucucagagu

SEQ ID NO: 390674 - RNA, 21 nt, Artificial Sequence
  Synthetic
aaaacaaauaugucucagagu

SEQ ID NO: 390675 - RNA, 22 nt, Artificial Sequence
  Synthetic
aaaaacaaauaugucucagagu

SEQ ID NO: 390676 - RNA, 23 nt, Artificial Sequence
  Synthetic
caaaaacaaauaugucucagagu

SEQ ID NO: 390677 - RNA, 24 nt, Artificial Sequence
  Synthetic
gcaaaaacaaauaugucucagagu

SEQ ID NO: 390678 - RNA, 18 nt, Artificial Sequence
  Synthetic
cguaaaacacuucagagu

SEQ ID NO: 390679 - RNA, 19 nt, Artificial Sequence
  Synthetic
gcguaaaacacuucagagu

SEQ ID NO: 390680 - RNA, 20 nt, Artificial Sequence
  Synthetic
agcguaaaacacuucagagu

SEQ ID NO: 390681 - RNA, 21 nt, Artificial Sequence
  Synthetic
gagcguaaaacacuucagagu

SEQ ID NO: 390682 - RNA, 22 nt, Artificial Sequence
  Synthetic
agagcguaaaacacuucagagu

SEQ ID NO: 390683 - RNA, 23 nt, Artificial Sequence
  Synthetic
aagagcguaaaacacuucagagu

SEQ ID NO: 390684 - RNA, 24 nt, Artificial Sequence
  Synthetic
caagagcguaaaacacuucagagu

SEQ ID NO: 390685 - RNA, 18 nt, Artificial Sequence
  Synthetic
ggagucugacuucagagu

SEQ ID NO: 390686 - RNA, 19 nt, Artificial Sequence
  Synthetic
gggagucugacuucagagu

SEQ ID NO: 390687 - RNA, 20 nt, Artificial Sequence
  Synthetic
agggagucugacuucagagu

SEQ ID NO: 390688 - RNA, 21 nt, Artificial Sequence
  Synthetic
cagggagucugacuucagagu

SEQ ID NO: 390689 - RNA, 22 nt, Artificial Sequence
  Synthetic
ucagggagucugacuucagagu

SEQ ID NO: 390690 - RNA, 23 nt, Artificial Sequence
  Synthetic
aucagggagucugacuucagagu

SEQ ID NO: 390691 - RNA, 24 nt, Artificial Sequence
  Synthetic
aaucagggagucugacuucagagu

SEQ ID NO: 390692 - RNA, 18 nt, Artificial Sequence
  Synthetic
auuagcuaaaaagagagu

SEQ ID NO: 390693 - RNA, 19 nt, Artificial Sequence
  Synthetic
uauuagcuaaaaagagagu

SEQ ID NO: 390694 - RNA, 20 nt, Artificial Sequence
  Synthetic
auauuagcuaaaaagagagu

SEQ ID NO: 390695 - RNA, 21 nt, Artificial Sequence
  Synthetic
aauauuagcuaaaaagagagu

SEQ ID NO: 390696 - RNA, 22 nt, Artificial Sequence
  Synthetic
caauauuagcuaaaaagagagu

SEQ ID NO: 390697 - RNA, 23 nt, Artificial Sequence
  Synthetic
acaauauuagcuaaaaagagagu

SEQ ID NO: 390698 - RNA, 24 nt, Artificial Sequence
  Synthetic
cacaauauuagcuaaaaagagagu

SEQ ID NO: 390699 - RNA, 18 nt, Artificial Sequence
  Synthetic
guaaggaagaaagagagu

SEQ ID NO: 390700 - RNA, 19 nt, Artificial Sequence
  Synthetic
aguaaggaagaaagagagu

SEQ ID NO: 390701 - RNA, 20 nt, Artificial Sequence
  Synthetic
aaguaaggaagaaagagagu

SEQ ID NO: 390702 - RNA, 21 nt, Artificial Sequence
  Synthetic
gaaguaaggaagaaagagagu

SEQ ID NO: 390703 - RNA, 22 nt, Artificial Sequence
  Synthetic
ggaaguaaggaagaaagagagu

SEQ ID NO: 390704 - RNA, 23 nt, Artificial Sequence
  Synthetic
aggaaguaaggaagaaagagagu

SEQ ID NO: 390705 - RNA, 24 nt, Artificial Sequence
  Synthetic
gaggaaguaaggaagaaagagagu

SEQ ID NO: 390706 - RNA, 18 nt, Artificial Sequence
  Synthetic
ugaaauuaucaagagagu

SEQ ID NO: 390707 - RNA, 19 nt, Artificial Sequence
  Synthetic
augaaauuaucaagagagu

SEQ ID NO: 390708 - RNA, 20 nt, Artificial Sequence
  Synthetic
caugaaauuaucaagagagu

SEQ ID NO: 390709 - RNA, 21 nt, Artificial Sequence
  Synthetic
gcaugaaauuaucaagagagu

SEQ ID NO: 390710 - RNA, 22 nt, Artificial Sequence
  Synthetic
agcaugaaauuaucaagagagu

SEQ ID NO: 390711 - RNA, 23 nt, Artificial Sequence
  Synthetic
gagcaugaaauuaucaagagagu

SEQ ID NO: 390712 - RNA, 24 nt, Artificial Sequence
  Synthetic
agagcaugaaauuaucaagagagu

SEQ ID NO: 390713 - RNA, 18 nt, Artificial Sequence
  Synthetic
uacaagccagaagagagu

SEQ ID NO: 390714 - RNA, 19 nt, Artificial Sequence
  Synthetic
cuacaagccagaagagagu

SEQ ID NO: 390715 - RNA, 20 nt, Artificial Sequence
  Synthetic
ccuacaagccagaagagagu

SEQ ID NO: 390716 - RNA, 21 nt, Artificial Sequence
  Synthetic
cccuacaagccagaagagagu

SEQ ID NO: 390717 - RNA, 22 nt, Artificial Sequence
  Synthetic
acccuacaagccagaagagagu

SEQ ID NO: 390718 - RNA, 23 nt, Artificial Sequence
  Synthetic
aacccuacaagccagaagagagu

SEQ ID NO: 390719 - RNA, 24 nt, Artificial Sequence
  Synthetic
aaacccuacaagccagaagagagu

SEQ ID NO: 390720 - RNA, 18 nt, Artificial Sequence
  Synthetic
gaaugggccuaagagagu

SEQ ID NO: 390721 - RNA, 19 nt, Artificial Sequence
  Synthetic
ggaaugggccuaagagagu

SEQ ID NO: 390722 - RNA, 20 nt, Artificial Sequence
  Synthetic
aggaaugggccuaagagagu

SEQ ID NO: 390723 - RNA, 21 nt, Artificial Sequence
  Synthetic
aaggaaugggccuaagagagu

SEQ ID NO: 390724 - RNA, 22 nt, Artificial Sequence
  Synthetic
uaaggaaugggccuaagagagu

SEQ ID NO: 390725 - RNA, 23 nt, Artificial Sequence
  Synthetic
uuaaggaaugggccuaagagagu

SEQ ID NO: 390726 - RNA, 24 nt, Artificial Sequence
  Synthetic
uuuaaggaaugggccuaagagagu

SEQ ID NO: 390727 - RNA, 18 nt, Artificial Sequence
  Synthetic
ucaccaugaagagagagu

SEQ ID NO: 390728 - RNA, 19 nt, Artificial Sequence
  Synthetic
cucaccaugaagagagagu

SEQ ID NO: 390729 - RNA, 20 nt, Artificial Sequence
  Synthetic
ccucaccaugaagagagagu

SEQ ID NO: 390730 - RNA, 21 nt, Artificial Sequence
  Synthetic
cccucaccaugaagagagagu

SEQ ID NO: 390731 - RNA, 22 nt, Artificial Sequence
  Synthetic
ucccucaccaugaagagagagu

SEQ ID NO: 390732 - RNA, 23 nt, Artificial Sequence
  Synthetic
aucccucaccaugaagagagagu

SEQ ID NO: 390733 - RNA, 24 nt, Artificial Sequence
  Synthetic
caucccucaccaugaagagagagu

SEQ ID NO: 390734 - RNA, 18 nt, Artificial Sequence
  Synthetic
gagagagagagagagagu

SEQ ID NO: 390735 - RNA, 19 nt, Artificial Sequence
  Synthetic
agagagagagagagagagu

SEQ ID NO: 390736 - RNA, 20 nt, Artificial Sequence
  Synthetic
gagagagagagagagagagu

SEQ ID NO: 390737 - RNA, 21 nt, Artificial Sequence
  Synthetic
agagagagagagagagagagu

SEQ ID NO: 390738 - RNA, 22 nt, Artificial Sequence
  Synthetic
gagagagagagagagagagagu

SEQ ID NO: 390739 - RNA, 23 nt, Artificial Sequence
  Synthetic
agagagagagagagagagagagu

SEQ ID NO: 390740 - RNA, 24 nt, Artificial Sequence
  Synthetic
gagagagagagagagagagagagu

SEQ ID NO: 390741 - RNA, 18 nt, Artificial Sequence
  Synthetic
aaucugcaguuagagagu

SEQ ID NO: 390742 - RNA, 19 nt, Artificial Sequence
  Synthetic
aaaucugcaguuagagagu

SEQ ID NO: 390743 - RNA, 20 nt, Artificial Sequence
  Synthetic
aaaaucugcaguuagagagu

SEQ ID NO: 390744 - RNA, 21 nt, Artificial Sequence
  Synthetic
uaaaaucugcaguuagagagu

SEQ ID NO: 390745 - RNA, 22 nt, Artificial Sequence
  Synthetic
guaaaaucugcaguuagagagu

SEQ ID NO: 390746 - RNA, 23 nt, Artificial Sequence
  Synthetic
uguaaaaucugcaguuagagagu

SEQ ID NO: 390747 - RNA, 24 nt, Artificial Sequence
  Synthetic
uuguaaaaucugcaguuagagagu

SEQ ID NO: 390748 - RNA, 18 nt, Artificial Sequence
  Synthetic
guugguucaaaggagagu

SEQ ID NO: 390749 - RNA, 19 nt, Artificial Sequence
  Synthetic
aguugguucaaaggagagu

SEQ ID NO: 390750 - RNA, 20 nt, Artificial Sequence
  Synthetic
caguugguucaaaggagagu

SEQ ID NO: 390751 - RNA, 21 nt, Artificial Sequence
  Synthetic
acaguugguucaaaggagagu

SEQ ID NO: 390752 - RNA, 22 nt, Artificial Sequence
  Synthetic
uacaguugguucaaaggagagu

SEQ ID NO: 390753 - RNA, 23 nt, Artificial Sequence
  Synthetic
uuacaguugguucaaaggagagu

SEQ ID NO: 390754 - RNA, 24 nt, Artificial Sequence
  Synthetic
guuacaguugguucaaaggagagu

SEQ ID NO: 390755 - RNA, 18 nt, Artificial Sequence
  Synthetic
ggugaaggagaggagagu

SEQ ID NO: 390756 - RNA, 19 nt, Artificial Sequence
  Synthetic
aggugaaggagaggagagu

SEQ ID NO: 390757 - RNA, 20 nt, Artificial Sequence
  Synthetic
caggugaaggagaggagagu

SEQ ID NO: 390758 - RNA, 21 nt, Artificial Sequence
  Synthetic
acaggugaaggagaggagagu

SEQ ID NO: 390759 - RNA, 22 nt, Artificial Sequence
  Synthetic
aacaggugaaggagaggagagu

SEQ ID NO: 390760 - RNA, 23 nt, Artificial Sequence
  Synthetic
caacaggugaaggagaggagagu

SEQ ID NO: 390761 - RNA, 24 nt, Artificial Sequence
  Synthetic
gcaacaggugaaggagaggagagu

SEQ ID NO: 390762 - RNA, 18 nt, Artificial Sequence
  Synthetic
gucuucuaggaggagagu

SEQ ID NO: 390763 - RNA, 19 nt, Artificial Sequence
  Synthetic
agucuucuaggaggagagu

SEQ ID NO: 390764 - RNA, 20 nt, Artificial Sequence
  Synthetic
aagucuucuaggaggagagu

SEQ ID NO: 390765 - RNA, 21 nt, Artificial Sequence
  Synthetic
gaagucuucuaggaggagagu

SEQ ID NO: 390766 - RNA, 22 nt, Artificial Sequence
  Synthetic
ugaagucuucuaggaggagagu

SEQ ID NO: 390767 - RNA, 23 nt, Artificial Sequence
  Synthetic
augaagucuucuaggaggagagu

SEQ ID NO: 390768 - RNA, 24 nt, Artificial Sequence
  Synthetic
gaugaagucuucuaggaggagagu

SEQ ID NO: 390769 - RNA, 18 nt, Artificial Sequence
  Synthetic
gggagauugugggagagu

SEQ ID NO: 390770 - RNA, 19 nt, Artificial Sequence
  Synthetic
agggagauugugggagagu

SEQ ID NO: 390771 - RNA, 20 nt, Artificial Sequence
  Synthetic
aagggagauugugggagagu

SEQ ID NO: 390772 - RNA, 21 nt, Artificial Sequence
  Synthetic
caagggagauugugggagagu

SEQ ID NO: 390773 - RNA, 22 nt, Artificial Sequence
  Synthetic
acaagggagauugugggagagu

SEQ ID NO: 390774 - RNA, 23 nt, Artificial Sequence
  Synthetic
cacaagggagauugugggagagu

SEQ ID NO: 390775 - RNA, 24 nt, Artificial Sequence
  Synthetic
gcacaagggagauugugggagagu

SEQ ID NO: 390776 - RNA, 18 nt, Artificial Sequence
  Synthetic
gcugccaguauggagagu

SEQ ID NO: 390777 - RNA, 19 nt, Artificial Sequence
  Synthetic
ugcugccaguauggagagu

SEQ ID NO: 390778 - RNA, 20 nt, Artificial Sequence
  Synthetic
uugcugccaguauggagagu

SEQ ID NO: 390779 - RNA, 21 nt, Artificial Sequence
  Synthetic
auugcugccaguauggagagu

SEQ ID NO: 390780 - RNA, 22 nt, Artificial Sequence
  Synthetic
cauugcugccaguauggagagu

SEQ ID NO: 390781 - RNA, 23 nt, Artificial Sequence
  Synthetic
acauugcugccaguauggagagu

SEQ ID NO: 390782 - RNA, 24 nt, Artificial Sequence
  Synthetic
cacauugcugccaguauggagagu

SEQ ID NO: 390783 - RNA, 18 nt, Artificial Sequence
  Synthetic
gauuucugauuggagagu

SEQ ID NO: 390784 - RNA, 19 nt, Artificial Sequence
  Synthetic
agauuucugauuggagagu

SEQ ID NO: 390785 - RNA, 20 nt, Artificial Sequence
  Synthetic
aagauuucugauuggagagu

SEQ ID NO: 390786 - RNA, 21 nt, Artificial Sequence
  Synthetic
aaagauuucugauuggagagu

SEQ ID NO: 390787 - RNA, 22 nt, Artificial Sequence
  Synthetic
caaagauuucugauuggagagu

SEQ ID NO: 390788 - RNA, 23 nt, Artificial Sequence
  Synthetic
ucaaagauuucugauuggagagu

SEQ ID NO: 390789 - RNA, 24 nt, Artificial Sequence
  Synthetic
aucaaagauuucugauuggagagu

SEQ ID NO: 390790 - RNA, 18 nt, Artificial Sequence
  Synthetic
gagggcagcacugagagu

SEQ ID NO: 390791 - RNA, 19 nt, Artificial Sequence
  Synthetic
ggagggcagcacugagagu

SEQ ID NO: 390792 - RNA, 20 nt, Artificial Sequence
  Synthetic
gggagggcagcacugagagu

SEQ ID NO: 390793 - RNA, 21 nt, Artificial Sequence
  Synthetic
agggagggcagcacugagagu

SEQ ID NO: 390794 - RNA, 22 nt, Artificial Sequence
  Synthetic
gagggagggcagcacugagagu

SEQ ID NO: 390795 - RNA, 23 nt, Artificial Sequence
  Synthetic
agagggagggcagcacugagagu

SEQ ID NO: 390796 - RNA, 24 nt, Artificial Sequence
  Synthetic
cagagggagggcagcacugagagu

SEQ ID NO: 390797 - RNA, 18 nt, Artificial Sequence
  Synthetic
aauugaaauacugagagu

SEQ ID NO: 390798 - RNA, 19 nt, Artificial Sequence
  Synthetic
uaauugaaauacugagagu

SEQ ID NO: 390799 - RNA, 20 nt, Artificial Sequence
  Synthetic
auaauugaaauacugagagu

SEQ ID NO: 390800 - RNA, 21 nt, Artificial Sequence
  Synthetic
gauaauugaaauacugagagu

SEQ ID NO: 390801 - RNA, 22 nt, Artificial Sequence
  Synthetic
ugauaauugaaauacugagagu

SEQ ID NO: 390802 - RNA, 23 nt, Artificial Sequence
  Synthetic
augauaauugaaauacugagagu

SEQ ID NO: 390803 - RNA, 24 nt, Artificial Sequence
  Synthetic
aaugauaauugaaauacugagagu

SEQ ID NO: 390804 - RNA, 18 nt, Artificial Sequence
  Synthetic
agaggaggcauugagagu

SEQ ID NO: 390805 - RNA, 19 nt, Artificial Sequence
  Synthetic
cagaggaggcauugagagu

SEQ ID NO: 390806 - RNA, 20 nt, Artificial Sequence
  Synthetic
acagaggaggcauugagagu

SEQ ID NO: 390807 - RNA, 21 nt, Artificial Sequence
  Synthetic
uacagaggaggcauugagagu

SEQ ID NO: 390808 - RNA, 22 nt, Artificial Sequence
  Synthetic
cuacagaggaggcauugagagu

SEQ ID NO: 390809 - RNA, 23 nt, Artificial Sequence
  Synthetic
ucuacagaggaggcauugagagu

SEQ ID NO: 390810 - RNA, 24 nt, Artificial Sequence
  Synthetic
aucuacagaggaggcauugagagu

SEQ ID NO: 390811 - RNA, 18 nt, Artificial Sequence
  Synthetic
ccauuuugauuugagagu

SEQ ID NO: 390812 - RNA, 19 nt, Artificial Sequence
  Synthetic
uccauuuugauuugagagu

SEQ ID NO: 390813 - RNA, 20 nt, Artificial Sequence
  Synthetic
uuccauuuugauuugagagu

SEQ ID NO: 390814 - RNA, 21 nt, Artificial Sequence
  Synthetic
auuccauuuugauuugagagu

SEQ ID NO: 390815 - RNA, 22 nt, Artificial Sequence
  Synthetic
aauuccauuuugauuugagagu

SEQ ID NO: 390816 - RNA, 23 nt, Artificial Sequence
  Synthetic
aaauuccauuuugauuugagagu

SEQ ID NO: 390817 - RNA, 24 nt, Artificial Sequence
  Synthetic
gaaauuccauuuugauuugagagu

SEQ ID NO: 390818 - RNA, 18 nt, Artificial Sequence
  Synthetic
cugaucucauuauagagu

SEQ ID NO: 390819 - RNA, 19 nt, Artificial Sequence
  Synthetic
ucugaucucauuauagagu

SEQ ID NO: 390820 - RNA, 20 nt, Artificial Sequence
  Synthetic
gucugaucucauuauagagu

SEQ ID NO: 390821 - RNA, 21 nt, Artificial Sequence
  Synthetic
agucugaucucauuauagagu

SEQ ID NO: 390822 - RNA, 22 nt, Artificial Sequence
  Synthetic
aagucugaucucauuauagagu

SEQ ID NO: 390823 - RNA, 23 nt, Artificial Sequence
  Synthetic
gaagucugaucucauuauagagu

SEQ ID NO: 390824 - RNA, 24 nt, Artificial Sequence
  Synthetic
agaagucugaucucauuauagagu

SEQ ID NO: 390825 - RNA, 18 nt, Artificial Sequence
  Synthetic
guuacuaggcacuagagu

SEQ ID NO: 390826 - RNA, 19 nt, Artificial Sequence
  Synthetic
cguuacuaggcacuagagu

SEQ ID NO: 390827 - RNA, 20 nt, Artificial Sequence
  Synthetic
acguuacuaggcacuagagu

SEQ ID NO: 390828 - RNA, 21 nt, Artificial Sequence
  Synthetic
cacguuacuaggcacuagagu

SEQ ID NO: 390829 - RNA, 22 nt, Artificial Sequence
  Synthetic
acacguuacuaggcacuagagu

SEQ ID NO: 390830 - RNA, 23 nt, Artificial Sequence
  Synthetic
aacacguuacuaggcacuagagu

SEQ ID NO: 390831 - RNA, 24 nt, Artificial Sequence
  Synthetic
caacacguuacuaggcacuagagu

SEQ ID NO: 390832 - RNA, 18 nt, Artificial Sequence
  Synthetic
auuggacaucccuagagu

SEQ ID NO: 390833 - RNA, 19 nt, Artificial Sequence
  Synthetic
aauuggacaucccuagagu

SEQ ID NO: 390834 - RNA, 20 nt, Artificial Sequence
  Synthetic
aaauuggacaucccuagagu

SEQ ID NO: 390835 - RNA, 21 nt, Artificial Sequence
  Synthetic
gaaauuggacaucccuagagu

SEQ ID NO: 390836 - RNA, 22 nt, Artificial Sequence
  Synthetic
agaaauuggacaucccuagagu

SEQ ID NO: 390837 - RNA, 23 nt, Artificial Sequence
  Synthetic
cagaaauuggacaucccuagagu

SEQ ID NO: 390838 - RNA, 24 nt, Artificial Sequence
  Synthetic
gcagaaauuggacaucccuagagu

SEQ ID NO: 390839 - RNA, 18 nt, Artificial Sequence
  Synthetic
ugauguagcagcuagagu

SEQ ID NO: 390840 - RNA, 19 nt, Artificial Sequence
  Synthetic
augauguagcagcuagagu

SEQ ID NO: 390841 - RNA, 20 nt, Artificial Sequence
  Synthetic
caugauguagcagcuagagu

SEQ ID NO: 390842 - RNA, 21 nt, Artificial Sequence
  Synthetic
gcaugauguagcagcuagagu

SEQ ID NO: 390843 - RNA, 22 nt, Artificial Sequence
  Synthetic
agcaugauguagcagcuagagu

SEQ ID NO: 390844 - RNA, 23 nt, Artificial Sequence
  Synthetic
cagcaugauguagcagcuagagu

SEQ ID NO: 390845 - RNA, 24 nt, Artificial Sequence
  Synthetic
acagcaugauguagcagcuagagu

SEQ ID NO: 390846 - RNA, 18 nt, Artificial Sequence
  Synthetic
aaggacacugucuagagu

SEQ ID NO: 390847 - RNA, 19 nt, Artificial Sequence
  Synthetic
caaggacacugucuagagu

SEQ ID NO: 390848 - RNA, 20 nt, Artificial Sequence
  Synthetic
gcaaggacacugucuagagu

SEQ ID NO: 390849 - RNA, 21 nt, Artificial Sequence
  Synthetic
ggcaaggacacugucuagagu

SEQ ID NO: 390850 - RNA, 22 nt, Artificial Sequence
  Synthetic
aggcaaggacacugucuagagu

SEQ ID NO: 390851 - RNA, 23 nt, Artificial Sequence
  Synthetic
gaggcaaggacacugucuagagu

SEQ ID NO: 390852 - RNA, 24 nt, Artificial Sequence
  Synthetic
ugaggcaaggacacugucuagagu

SEQ ID NO: 390853 - RNA, 18 nt, Artificial Sequence
  Synthetic
aaauaauacccuuagagu

SEQ ID NO: 390854 - RNA, 19 nt, Artificial Sequence
  Synthetic
gaaauaauacccuuagagu

SEQ ID NO: 390855 - RNA, 20 nt, Artificial Sequence
  Synthetic
ggaaauaauacccuuagagu

SEQ ID NO: 390856 - RNA, 21 nt, Artificial Sequence
  Synthetic
gggaaauaauacccuuagagu

SEQ ID NO: 390857 - RNA, 22 nt, Artificial Sequence
  Synthetic
ugggaaauaauacccuuagagu

SEQ ID NO: 390858 - RNA, 23 nt, Artificial Sequence
  Synthetic
uugggaaauaauacccuuagagu

SEQ ID NO: 390859 - RNA, 24 nt, Artificial Sequence
  Synthetic
cuugggaaauaauacccuuagagu

SEQ ID NO: 390860 - RNA, 18 nt, Artificial Sequence
  Synthetic
aauuguugagcuuagagu

SEQ ID NO: 390861 - RNA, 19 nt, Artificial Sequence
  Synthetic
uaauuguugagcuuagagu

SEQ ID NO: 390862 - RNA, 20 nt, Artificial Sequence
  Synthetic
uuaauuguugagcuuagagu

SEQ ID NO: 390863 - RNA, 21 nt, Artificial Sequence
  Synthetic
uuuaauuguugagcuuagagu

SEQ ID NO: 390864 - RNA, 22 nt, Artificial Sequence
  Synthetic
auuuaauuguugagcuuagagu

SEQ ID NO: 390865 - RNA, 23 nt, Artificial Sequence
  Synthetic
aauuuaauuguugagcuuagagu

SEQ ID NO: 390866 - RNA, 24 nt, Artificial Sequence
  Synthetic
caauuuaauuguugagcuuagagu

SEQ ID NO: 390867 - RNA, 18 nt, Artificial Sequence
  Synthetic
uagcucccacuuacgagu

SEQ ID NO: 390868 - RNA, 19 nt, Artificial Sequence
  Synthetic
uuagcucccacuuacgagu

SEQ ID NO: 390869 - RNA, 20 nt, Artificial Sequence
  Synthetic
cuuagcucccacuuacgagu

SEQ ID NO: 390870 - RNA, 21 nt, Artificial Sequence
  Synthetic
gcuuagcucccacuuacgagu

SEQ ID NO: 390871 - RNA, 22 nt, Artificial Sequence
  Synthetic
agcuuagcucccacuuacgagu

SEQ ID NO: 390872 - RNA, 23 nt, Artificial Sequence
  Synthetic
uagcuuagcucccacuuacgagu

SEQ ID NO: 390873 - RNA, 24 nt, Artificial Sequence
  Synthetic
auagcuuagcucccacuuacgagu

SEQ ID NO: 390874 - RNA, 18 nt, Artificial Sequence
  Synthetic
caauucccacuuacgagu

SEQ ID NO: 390875 - RNA, 19 nt, Artificial Sequence
  Synthetic
ucaauucccacuuacgagu

SEQ ID NO: 390876 - RNA, 20 nt, Artificial Sequence
  Synthetic
uucaauucccacuuacgagu

SEQ ID NO: 390877 - RNA, 21 nt, Artificial Sequence
  Synthetic
guucaauucccacuuacgagu

SEQ ID NO: 390878 - RNA, 22 nt, Artificial Sequence
  Synthetic
uguucaauucccacuuacgagu

SEQ ID NO: 390879 - RNA, 23 nt, Artificial Sequence
  Synthetic
uuguucaauucccacuuacgagu

SEQ ID NO: 390880 - RNA, 24 nt, Artificial Sequence
  Synthetic
auuguucaauucccacuuacgagu

SEQ ID NO: 390881 - RNA, 18 nt, Artificial Sequence
  Synthetic
auuuuuuuucuuacgagu

SEQ ID NO: 390882 - RNA, 19 nt, Artificial Sequence
  Synthetic
cauuuuuuuucuuacgagu

SEQ ID NO: 390883 - RNA, 20 nt, Artificial Sequence
  Synthetic
ucauuuuuuuucuuacgagu

SEQ ID NO: 390884 - RNA, 21 nt, Artificial Sequence
  Synthetic
cucauuuuuuuucuuacgagu

SEQ ID NO: 390885 - RNA, 22 nt, Artificial Sequence
  Synthetic
acucauuuuuuuucuuacgagu

SEQ ID NO: 390886 - RNA, 23 nt, Artificial Sequence
  Synthetic
cacucauuuuuuuucuuacgagu

SEQ ID NO: 390887 - RNA, 24 nt, Artificial Sequence
  Synthetic
acacucauuuuuuuucuuacgagu

SEQ ID NO: 390888 - RNA, 18 nt, Artificial Sequence
  Synthetic
aaccacugguguccgagu

SEQ ID NO: 390889 - RNA, 19 nt, Artificial Sequence
  Synthetic
gaaccacugguguccgagu

SEQ ID NO: 390890 - RNA, 20 nt, Artificial Sequence
  Synthetic
ggaaccacugguguccgagu

SEQ ID NO: 390891 - RNA, 21 nt, Artificial Sequence
  Synthetic
gggaaccacugguguccgagu

SEQ ID NO: 390892 - RNA, 22 nt, Artificial Sequence
  Synthetic
ggggaaccacugguguccgagu

SEQ ID NO: 390893 - RNA, 23 nt, Artificial Sequence
  Synthetic
aggggaaccacugguguccgagu

SEQ ID NO: 390894 - RNA, 24 nt, Artificial Sequence
  Synthetic
aaggggaaccacugguguccgagu

SEQ ID NO: 390895 - RNA, 18 nt, Artificial Sequence
  Synthetic
uugccuuucugcucgagu

SEQ ID NO: 390896 - RNA, 19 nt, Artificial Sequence
  Synthetic
uuugccuuucugcucgagu

SEQ ID NO: 390897 - RNA, 20 nt, Artificial Sequence
  Synthetic
cuuugccuuucugcucgagu

SEQ ID NO: 390898 - RNA, 21 nt, Artificial Sequence
  Synthetic
ccuuugccuuucugcucgagu

SEQ ID NO: 390899 - RNA, 22 nt, Artificial Sequence
  Synthetic
cccuuugccuuucugcucgagu

SEQ ID NO: 390900 - RNA, 23 nt, Artificial Sequence
  Synthetic
acccuuugccuuucugcucgagu

SEQ ID NO: 390901 - RNA, 24 nt, Artificial Sequence
  Synthetic
uacccuuugccuuucugcucgagu

SEQ ID NO: 390902 - RNA, 18 nt, Artificial Sequence
  Synthetic
aauaaacaccauucgagu

SEQ ID NO: 390903 - RNA, 19 nt, Artificial Sequence
  Synthetic
aaauaaacaccauucgagu

SEQ ID NO: 390904 - RNA, 20 nt, Artificial Sequence
  Synthetic
aaaauaaacaccauucgagu

SEQ ID NO: 390905 - RNA, 21 nt, Artificial Sequence
  Synthetic
aaaaauaaacaccauucgagu

SEQ ID NO: 390906 - RNA, 22 nt, Artificial Sequence
  Synthetic
aaaaaauaaacaccauucgagu

SEQ ID NO: 390907 - RNA, 23 nt, Artificial Sequence
  Synthetic
uaaaaaauaaacaccauucgagu

SEQ ID NO: 390908 - RNA, 24 nt, Artificial Sequence
  Synthetic
uuaaaaaauaaacaccauucgagu

SEQ ID NO: 390909 - RNA, 18 nt, Artificial Sequence
  Synthetic
guggggguucauucgagu

SEQ ID NO: 390910 - RNA, 19 nt, Artificial Sequence
  Synthetic
aguggggguucauucgagu

SEQ ID NO: 390911 - RNA, 20 nt, Artificial Sequence
  Synthetic
gaguggggguucauucgagu

SEQ ID NO: 390912 - RNA, 21 nt, Artificial Sequence
  Synthetic
ggaguggggguucauucgagu

SEQ ID NO: 390913 - RNA, 22 nt, Artificial Sequence
  Synthetic
aggaguggggguucauucgagu

SEQ ID NO: 390914 - RNA, 23 nt, Artificial Sequence
  Synthetic
aaggaguggggguucauucgagu

SEQ ID NO: 390915 - RNA, 24 nt, Artificial Sequence
  Synthetic
gaaggaguggggguucauucgagu

SEQ ID NO: 390916 - RNA, 18 nt, Artificial Sequence
  Synthetic
augcuugauaaaaggagu

SEQ ID NO: 390917 - RNA, 19 nt, Artificial Sequence
  Synthetic
aaugcuugauaaaaggagu

SEQ ID NO: 390918 - RNA, 20 nt, Artificial Sequence
  Synthetic
uaaugcuugauaaaaggagu

SEQ ID NO: 390919 - RNA, 21 nt, Artificial Sequence
  Synthetic
guaaugcuugauaaaaggagu

SEQ ID NO: 390920 - RNA, 22 nt, Artificial Sequence
  Synthetic
uguaaugcuugauaaaaggagu

SEQ ID NO: 390921 - RNA, 23 nt, Artificial Sequence
  Synthetic
cuguaaugcuugauaaaaggagu

SEQ ID NO: 390922 - RNA, 24 nt, Artificial Sequence
  Synthetic
acuguaaugcuugauaaaaggagu

SEQ ID NO: 390923 - RNA, 18 nt, Artificial Sequence
  Synthetic
aggaggaagcaaaggagu

SEQ ID NO: 390924 - RNA, 19 nt, Artificial Sequence
  Synthetic
aaggaggaagcaaaggagu

SEQ ID NO: 390925 - RNA, 20 nt, Artificial Sequence
  Synthetic
gaaggaggaagcaaaggagu

SEQ ID NO: 390926 - RNA, 21 nt, Artificial Sequence
  Synthetic
ugaaggaggaagcaaaggagu

SEQ ID NO: 390927 - RNA, 22 nt, Artificial Sequence
  Synthetic
uugaaggaggaagcaaaggagu

SEQ ID NO: 390928 - RNA, 23 nt, Artificial Sequence
  Synthetic
uuugaaggaggaagcaaaggagu

SEQ ID NO: 390929 - RNA, 24 nt, Artificial Sequence
  Synthetic
uuuugaaggaggaagcaaaggagu

SEQ ID NO: 390930 - RNA, 18 nt, Artificial Sequence
  Synthetic
uuggugauugcaaggagu

SEQ ID NO: 390931 - RNA, 19 nt, Artificial Sequence
  Synthetic
auuggugauugcaaggagu

SEQ ID NO: 390932 - RNA, 20 nt, Artificial Sequence
  Synthetic
gauuggugauugcaaggagu

SEQ ID NO: 390933 - RNA, 21 nt, Artificial Sequence
  Synthetic
agauuggugauugcaaggagu

SEQ ID NO: 390934 - RNA, 22 nt, Artificial Sequence
  Synthetic
cagauuggugauugcaaggagu

SEQ ID NO: 390935 - RNA, 23 nt, Artificial Sequence
  Synthetic
acagauuggugauugcaaggagu

SEQ ID NO: 390936 - RNA, 24 nt, Artificial Sequence
  Synthetic
aacagauuggugauugcaaggagu

SEQ ID NO: 390937 - RNA, 18 nt, Artificial Sequence
  Synthetic
gcuauugugucaaggagu

SEQ ID NO: 390938 - RNA, 19 nt, Artificial Sequence
  Synthetic
ugcuauugugucaaggagu

SEQ ID NO: 390939 - RNA, 20 nt, Artificial Sequence
  Synthetic
uugcuauugugucaaggagu

SEQ ID NO: 390940 - RNA, 21 nt, Artificial Sequence
  Synthetic
cuugcuauugugucaaggagu

SEQ ID NO: 390941 - RNA, 22 nt, Artificial Sequence
  Synthetic
gcuugcuauugugucaaggagu

SEQ ID NO: 390942 - RNA, 23 nt, Artificial Sequence
  Synthetic
agcuugcuauugugucaaggagu

SEQ ID NO: 390943 - RNA, 24 nt, Artificial Sequence
  Synthetic
cagcuugcuauugugucaaggagu

SEQ ID NO: 390944 - RNA, 18 nt, Artificial Sequence
  Synthetic
agugacagacgaaggagu

SEQ ID NO: 390945 - RNA, 19 nt, Artificial Sequence
  Synthetic
gagugacagacgaaggagu

SEQ ID NO: 390946 - RNA, 20 nt, Artificial Sequence
  Synthetic
agagugacagacgaaggagu

SEQ ID NO: 390947 - RNA, 21 nt, Artificial Sequence
  Synthetic
aagagugacagacgaaggagu

SEQ ID NO: 390948 - RNA, 22 nt, Artificial Sequence
  Synthetic
gaagagugacagacgaaggagu

SEQ ID NO: 390949 - RNA, 23 nt, Artificial Sequence
  Synthetic
ggaagagugacagacgaaggagu

SEQ ID NO: 390950 - RNA, 24 nt, Artificial Sequence
  Synthetic
aggaagagugacagacgaaggagu

SEQ ID NO: 390951 - RNA, 18 nt, Artificial Sequence
  Synthetic
ucacuugagcccaggagu

SEQ ID NO: 390952 - RNA, 19 nt, Artificial Sequence
  Synthetic
aucacuugagcccaggagu

SEQ ID NO: 390953 - RNA, 20 nt, Artificial Sequence
  Synthetic
gaucacuugagcccaggagu

SEQ ID NO: 390954 - RNA, 21 nt, Artificial Sequence
  Synthetic
ggaucacuugagcccaggagu

SEQ ID NO: 390955 - RNA, 22 nt, Artificial Sequence
  Synthetic
aggaucacuugagcccaggagu

SEQ ID NO: 390956 - RNA, 23 nt, Artificial Sequence
  Synthetic
gaggaucacuugagcccaggagu

SEQ ID NO: 390957 - RNA, 24 nt, Artificial Sequence
  Synthetic
ggaggaucacuugagcccaggagu

SEQ ID NO: 390958 - RNA, 18 nt, Artificial Sequence
  Synthetic
ucgcuugagcccaggagu

SEQ ID NO: 390959 - RNA, 19 nt, Artificial Sequence
  Synthetic
aucgcuugagcccaggagu

SEQ ID NO: 390960 - RNA, 20 nt, Artificial Sequence
  Synthetic
aaucgcuugagcccaggagu

SEQ ID NO: 390961 - RNA, 21 nt, Artificial Sequence
  Synthetic
gaaucgcuugagcccaggagu

SEQ ID NO: 390962 - RNA, 22 nt, Artificial Sequence
  Synthetic
agaaucgcuugagcccaggagu

SEQ ID NO: 390963 - RNA, 23 nt, Artificial Sequence
  Synthetic
gagaaucgcuugagcccaggagu

SEQ ID NO: 390964 - RNA, 24 nt, Artificial Sequence
  Synthetic
ggagaaucgcuugagcccaggagu

SEQ ID NO: 390965 - RNA, 20 nt, Artificial Sequence
  Synthetic
gaucgcuugagcccaggagu

SEQ ID NO: 390966 - RNA, 21 nt, Artificial Sequence
  Synthetic
ggaucgcuugagcccaggagu

SEQ ID NO: 390967 - RNA, 22 nt, Artificial Sequence
  Synthetic
aggaucgcuugagcccaggagu

SEQ ID NO: 390968 - RNA, 23 nt, Artificial Sequence
  Synthetic
gaggaucgcuugagcccaggagu

SEQ ID NO: 390969 - RNA, 24 nt, Artificial Sequence
  Synthetic
ggaggaucgcuugagcccaggagu

SEQ ID NO: 390970 - RNA, 18 nt, Artificial Sequence
  Synthetic
uuucuugagcccaggagu

SEQ ID NO: 390971 - RNA, 19 nt, Artificial Sequence
  Synthetic
auuucuugagcccaggagu

SEQ ID NO: 390972 - RNA, 20 nt, Artificial Sequence
  Synthetic
aauuucuugagcccaggagu

SEQ ID NO: 390973 - RNA, 21 nt, Artificial Sequence
  Synthetic
gaauuucuugagcccaggagu

SEQ ID NO: 390974 - RNA, 22 nt, Artificial Sequence
  Synthetic
agaauuucuugagcccaggagu

SEQ ID NO: 390975 - RNA, 23 nt, Artificial Sequence
  Synthetic
gagaauuucuugagcccaggagu

SEQ ID NO: 390976 - RNA, 24 nt, Artificial Sequence
  Synthetic
ggagaauuucuugagcccaggagu

SEQ ID NO: 390977 - RNA, 18 nt, Artificial Sequence
  Synthetic
ucucuugggcccaggagu

SEQ ID NO: 390978 - RNA, 19 nt, Artificial Sequence
  Synthetic
aucucuugggcccaggagu

SEQ ID NO: 390979 - RNA, 20 nt, Artificial Sequence
  Synthetic
gaucucuugggcccaggagu

SEQ ID NO: 390980 - RNA, 21 nt, Artificial Sequence
  Synthetic
ugaucucuugggcccaggagu

SEQ ID NO: 390981 - RNA, 22 nt, Artificial Sequence
  Synthetic
augaucucuugggcccaggagu

SEQ ID NO: 390982 - RNA, 23 nt, Artificial Sequence
  Synthetic
caugaucucuugggcccaggagu

SEQ ID NO: 390983 - RNA, 24 nt, Artificial Sequence
  Synthetic
acaugaucucuugggcccaggagu

SEQ ID NO: 390984 - RNA, 18 nt, Artificial Sequence
  Synthetic
ucaccugaggccaggagu

SEQ ID NO: 390985 - RNA, 19 nt, Artificial Sequence
  Synthetic
aucaccugaggccaggagu

SEQ ID NO: 390986 - RNA, 20 nt, Artificial Sequence
  Synthetic
gaucaccugaggccaggagu

SEQ ID NO: 390987 - RNA, 21 nt, Artificial Sequence
  Synthetic
ggaucaccugaggccaggagu

SEQ ID NO: 390988 - RNA, 22 nt, Artificial Sequence
  Synthetic
cggaucaccugaggccaggagu

SEQ ID NO: 390989 - RNA, 23 nt, Artificial Sequence
  Synthetic
gcggaucaccugaggccaggagu

SEQ ID NO: 390990 - RNA, 24 nt, Artificial Sequence
  Synthetic
ggcggaucaccugaggccaggagu

SEQ ID NO: 390991 - RNA, 21 nt, Artificial Sequence
  Synthetic
ggaucacuugaggccaggagu

SEQ ID NO: 390992 - RNA, 22 nt, Artificial Sequence
  Synthetic
uggaucacuugaggccaggagu

SEQ ID NO: 390993 - RNA, 23 nt, Artificial Sequence
  Synthetic
guggaucacuugaggccaggagu

SEQ ID NO: 390994 - RNA, 24 nt, Artificial Sequence
  Synthetic
gguggaucacuugaggccaggagu

SEQ ID NO: 390995 - RNA, 18 nt, Artificial Sequence
  Synthetic
ucacuggaguccaggagu

SEQ ID NO: 390996 - RNA, 19 nt, Artificial Sequence
  Synthetic
aucacuggaguccaggagu

SEQ ID NO: 390997 - RNA, 20 nt, Artificial Sequence
  Synthetic
gaucacuggaguccaggagu

SEQ ID NO: 390998 - RNA, 21 nt, Artificial Sequence
  Synthetic
agaucacuggaguccaggagu

SEQ ID NO: 390999 - RNA, 22 nt, Artificial Sequence
  Synthetic
cagaucacuggaguccaggagu

SEQ ID NO: 391000 - RNA, 23 nt, Artificial Sequence
  Synthetic
gcagaucacuggaguccaggagu

SEQ ID NO: 391001 - RNA, 24 nt, Artificial Sequence
  Synthetic
ggcagaucacuggaguccaggagu

SEQ ID NO: 391002 - RNA, 18 nt, Artificial Sequence
  Synthetic
ucacuugaguccaggagu

SEQ ID NO: 391003 - RNA, 19 nt, Artificial Sequence
  Synthetic
aucacuugaguccaggagu

SEQ ID NO: 391004 - RNA, 20 nt, Artificial Sequence
  Synthetic
gaucacuugaguccaggagu

SEQ ID NO: 391005 - RNA, 21 nt, Artificial Sequence
  Synthetic
agaucacuugaguccaggagu

SEQ ID NO: 391006 - RNA, 22 nt, Artificial Sequence
  Synthetic
cagaucacuugaguccaggagu

SEQ ID NO: 391007 - RNA, 23 nt, Artificial Sequence
  Synthetic
gcagaucacuugaguccaggagu

SEQ ID NO: 391008 - RNA, 24 nt, Artificial Sequence
  Synthetic
ggcagaucacuugaguccaggagu

SEQ ID NO: 391009 - RNA, 18 nt, Artificial Sequence
  Synthetic
uucuccuaaagcaggagu

SEQ ID NO: 391010 - RNA, 19 nt, Artificial Sequence
  Synthetic
uuucuccuaaagcaggagu

SEQ ID NO: 391011 - RNA, 20 nt, Artificial Sequence
  Synthetic
cuuucuccuaaagcaggagu

SEQ ID NO: 391012 - RNA, 21 nt, Artificial Sequence
  Synthetic
gcuuucuccuaaagcaggagu

SEQ ID NO: 391013 - RNA, 22 nt, Artificial Sequence
  Synthetic
ugcuuucuccuaaagcaggagu

SEQ ID NO: 391014 - RNA, 23 nt, Artificial Sequence
  Synthetic
gugcuuucuccuaaagcaggagu

SEQ ID NO: 391015 - RNA, 24 nt, Artificial Sequence
  Synthetic
cgugcuuucuccuaaagcaggagu

SEQ ID NO: 391016 - RNA, 18 nt, Artificial Sequence
  Synthetic
acagguuucagcaggagu

SEQ ID NO: 391017 - RNA, 19 nt, Artificial Sequence
  Synthetic
uacagguuucagcaggagu

SEQ ID NO: 391018 - RNA, 20 nt, Artificial Sequence
  Synthetic
cuacagguuucagcaggagu

SEQ ID NO: 391019 - RNA, 21 nt, Artificial Sequence
  Synthetic
ccuacagguuucagcaggagu

SEQ ID NO: 391020 - RNA, 22 nt, Artificial Sequence
  Synthetic
cccuacagguuucagcaggagu

SEQ ID NO: 391021 - RNA, 23 nt, Artificial Sequence
  Synthetic
ccccuacagguuucagcaggagu

SEQ ID NO: 391022 - RNA, 24 nt, Artificial Sequence
  Synthetic
uccccuacagguuucagcaggagu

SEQ ID NO: 391023 - RNA, 18 nt, Artificial Sequence
  Synthetic
ugguaaaugagcaggagu

SEQ ID NO: 391024 - RNA, 19 nt, Artificial Sequence
  Synthetic
augguaaaugagcaggagu

SEQ ID NO: 391025 - RNA, 20 nt, Artificial Sequence
  Synthetic
aaugguaaaugagcaggagu

SEQ ID NO: 391026 - RNA, 21 nt, Artificial Sequence
  Synthetic
aaaugguaaaugagcaggagu

SEQ ID NO: 391027 - RNA, 22 nt, Artificial Sequence
  Synthetic
caaaugguaaaugagcaggagu

SEQ ID NO: 391028 - RNA, 23 nt, Artificial Sequence
  Synthetic
gcaaaugguaaaugagcaggagu

SEQ ID NO: 391029 - RNA, 24 nt, Artificial Sequence
  Synthetic
agcaaaugguaaaugagcaggagu

SEQ ID NO: 391030 - RNA, 18 nt, Artificial Sequence
  Synthetic
gaucacgagaucaggagu

SEQ ID NO: 391031 - RNA, 19 nt, Artificial Sequence
  Synthetic
agaucacgagaucaggagu

SEQ ID NO: 391032 - RNA, 20 nt, Artificial Sequence
  Synthetic
cagaucacgagaucaggagu

SEQ ID NO: 391033 - RNA, 21 nt, Artificial Sequence
  Synthetic
gcagaucacgagaucaggagu

SEQ ID NO: 391034 - RNA, 22 nt, Artificial Sequence
  Synthetic
ggcagaucacgagaucaggagu

SEQ ID NO: 391035 - RNA, 23 nt, Artificial Sequence
  Synthetic
aggcagaucacgagaucaggagu

SEQ ID NO: 391036 - RNA, 24 nt, Artificial Sequence
  Synthetic
caggcagaucacgagaucaggagu

SEQ ID NO: 391037 - RNA, 18 nt, Artificial Sequence
  Synthetic
aucaacauuaucaggagu

SEQ ID NO: 391038 - RNA, 19 nt, Artificial Sequence
  Synthetic
uaucaacauuaucaggagu

SEQ ID NO: 391039 - RNA, 20 nt, Artificial Sequence
  Synthetic
auaucaacauuaucaggagu

SEQ ID NO: 391040 - RNA, 21 nt, Artificial Sequence
  Synthetic
aauaucaacauuaucaggagu

SEQ ID NO: 391041 - RNA, 22 nt, Artificial Sequence
  Synthetic
aaauaucaacauuaucaggagu

SEQ ID NO: 391042 - RNA, 23 nt, Artificial Sequence
  Synthetic
aaaauaucaacauuaucaggagu

SEQ ID NO: 391043 - RNA, 24 nt, Artificial Sequence
  Synthetic
caaaauaucaacauuaucaggagu

SEQ ID NO: 391044 - RNA, 18 nt, Artificial Sequence
  Synthetic
ucaccugaagucaggagu

SEQ ID NO: 391045 - RNA, 19 nt, Artificial Sequence
  Synthetic
aucaccugaagucaggagu

SEQ ID NO: 391046 - RNA, 20 nt, Artificial Sequence
  Synthetic
gaucaccugaagucaggagu

SEQ ID NO: 391047 - RNA, 21 nt, Artificial Sequence
  Synthetic
ggaucaccugaagucaggagu

SEQ ID NO: 391048 - RNA, 22 nt, Artificial Sequence
  Synthetic
uggaucaccugaagucaggagu

SEQ ID NO: 391049 - RNA, 23 nt, Artificial Sequence
  Synthetic
guggaucaccugaagucaggagu

SEQ ID NO: 391050 - RNA, 24 nt, Artificial Sequence
  Synthetic
gguggaucaccugaagucaggagu

SEQ ID NO: 391051 - RNA, 21 nt, Artificial Sequence
  Synthetic
gcagaucacgaggucaggagu

SEQ ID NO: 391052 - RNA, 22 nt, Artificial Sequence
  Synthetic
ggcagaucacgaggucaggagu

SEQ ID NO: 391053 - RNA, 23 nt, Artificial Sequence
  Synthetic
gggcagaucacgaggucaggagu

SEQ ID NO: 391054 - RNA, 24 nt, Artificial Sequence
  Synthetic
cgggcagaucacgaggucaggagu

SEQ ID NO: 391055 - RNA, 24 nt, Artificial Sequence
  Synthetic
ugggcagaucacgaggucaggagu

SEQ ID NO: 391056 - RNA, 18 nt, Artificial Sequence
  Synthetic
gauuaugaggucaggagu

SEQ ID NO: 391057 - RNA, 19 nt, Artificial Sequence
  Synthetic
agauuaugaggucaggagu

SEQ ID NO: 391058 - RNA, 20 nt, Artificial Sequence
  Synthetic
cagauuaugaggucaggagu

SEQ ID NO: 391059 - RNA, 21 nt, Artificial Sequence
  Synthetic
gcagauuaugaggucaggagu

SEQ ID NO: 391060 - RNA, 22 nt, Artificial Sequence
  Synthetic
ggcagauuaugaggucaggagu

SEQ ID NO: 391061 - RNA, 23 nt, Artificial Sequence
  Synthetic
gggcagauuaugaggucaggagu

SEQ ID NO: 391062 - RNA, 24 nt, Artificial Sequence
  Synthetic
cgggcagauuaugaggucaggagu

SEQ ID NO: 391063 - RNA, 18 nt, Artificial Sequence
  Synthetic
ucaccugaggucaggagu

SEQ ID NO: 391064 - RNA, 19 nt, Artificial Sequence
  Synthetic
aucaccugaggucaggagu

SEQ ID NO: 391065 - RNA, 21 nt, Artificial Sequence
  Synthetic
ggaucaccugaggucaggagu

SEQ ID NO: 391066 - RNA, 23 nt, Artificial Sequence
  Synthetic
acggaucaccugaggucaggagu

SEQ ID NO: 391067 - RNA, 24 nt, Artificial Sequence
  Synthetic
aacggaucaccugaggucaggagu

SEQ ID NO: 391068 - RNA, 24 nt, Artificial Sequence
  Synthetic
ggcggaucaccugaggucaggagu

SEQ ID NO: 391069 - RNA, 22 nt, Artificial Sequence
  Synthetic
uggaucaccugaggucaggagu

SEQ ID NO: 391070 - RNA, 23 nt, Artificial Sequence
  Synthetic
auggaucaccugaggucaggagu

SEQ ID NO: 391071 - RNA, 24 nt, Artificial Sequence
  Synthetic
gauggaucaccugaggucaggagu

SEQ ID NO: 391072 - RNA, 23 nt, Artificial Sequence
  Synthetic
guggaucaccugaggucaggagu

SEQ ID NO: 391073 - RNA, 24 nt, Artificial Sequence
  Synthetic
gguggaucaccugaggucaggagu

SEQ ID NO: 391074 - RNA, 20 nt, Artificial Sequence
  Synthetic
uaucaccugaggucaggagu

SEQ ID NO: 391075 - RNA, 21 nt, Artificial Sequence
  Synthetic
guaucaccugaggucaggagu

SEQ ID NO: 391076 - RNA, 22 nt, Artificial Sequence
  Synthetic
uguaucaccugaggucaggagu

SEQ ID NO: 391077 - RNA, 23 nt, Artificial Sequence
  Synthetic
guguaucaccugaggucaggagu

SEQ ID NO: 391078 - RNA, 24 nt, Artificial Sequence
  Synthetic
gguguaucaccugaggucaggagu

SEQ ID NO: 391079 - RNA, 18 nt, Artificial Sequence
  Synthetic
acacuugaggucaggagu

SEQ ID NO: 391080 - RNA, 19 nt, Artificial Sequence
  Synthetic
aacacuugaggucaggagu

SEQ ID NO: 391081 - RNA, 20 nt, Artificial Sequence
  Synthetic
gaacacuugaggucaggagu

SEQ ID NO: 391082 - RNA, 21 nt, Artificial Sequence
  Synthetic
ggaacacuugaggucaggagu

SEQ ID NO: 391083 - RNA, 22 nt, Artificial Sequence
  Synthetic
uggaacacuugaggucaggagu

SEQ ID NO: 391084 - RNA, 23 nt, Artificial Sequence
  Synthetic
guggaacacuugaggucaggagu

SEQ ID NO: 391085 - RNA, 24 nt, Artificial Sequence
  Synthetic
gguggaacacuugaggucaggagu

SEQ ID NO: 391086 - RNA, 21 nt, Artificial Sequence
  Synthetic
agaucacuugaggucaggagu

SEQ ID NO: 391087 - RNA, 22 nt, Artificial Sequence
  Synthetic
cagaucacuugaggucaggagu

SEQ ID NO: 391088 - RNA, 23 nt, Artificial Sequence
  Synthetic
gcagaucacuugaggucaggagu

SEQ ID NO: 391089 - RNA, 24 nt, Artificial Sequence
  Synthetic
ggcagaucacuugaggucaggagu

SEQ ID NO: 391090 - RNA, 24 nt, Artificial Sequence
  Synthetic
gguggaucacuugaggucaggagu

SEQ ID NO: 391091 - RNA, 18 nt, Artificial Sequence
  Synthetic
ucauuugaggucaggagu

SEQ ID NO: 391092 - RNA, 19 nt, Artificial Sequence
  Synthetic
aucauuugaggucaggagu

SEQ ID NO: 391093 - RNA, 20 nt, Artificial Sequence
  Synthetic
caucauuugaggucaggagu

SEQ ID NO: 391094 - RNA, 21 nt, Artificial Sequence
  Synthetic
acaucauuugaggucaggagu

SEQ ID NO: 391095 - RNA, 22 nt, Artificial Sequence
  Synthetic
cacaucauuugaggucaggagu

SEQ ID NO: 391096 - RNA, 23 nt, Artificial Sequence
  Synthetic
gcacaucauuugaggucaggagu

SEQ ID NO: 391097 - RNA, 24 nt, Artificial Sequence
  Synthetic
ggcacaucauuugaggucaggagu

SEQ ID NO: 391098 - RNA, 18 nt, Artificial Sequence
  Synthetic
agaggacaaaagaggagu

SEQ ID NO: 391099 - RNA, 19 nt, Artificial Sequence
  Synthetic
aagaggacaaaagaggagu

SEQ ID NO: 391100 - RNA, 20 nt, Artificial Sequence
  Synthetic
aaagaggacaaaagaggagu

SEQ ID NO: 391101 - RNA, 21 nt, Artificial Sequence
  Synthetic
uaaagaggacaaaagaggagu

SEQ ID NO: 391102 - RNA, 22 nt, Artificial Sequence
  Synthetic
uuaaagaggacaaaagaggagu

SEQ ID NO: 391103 - RNA, 23 nt, Artificial Sequence
  Synthetic
auuaaagaggacaaaagaggagu

SEQ ID NO: 391104 - RNA, 24 nt, Artificial Sequence
  Synthetic
uauuaaagaggacaaaagaggagu

SEQ ID NO: 391105 - RNA, 18 nt, Artificial Sequence
  Synthetic
ugaaaucaacauaggagu

SEQ ID NO: 391106 - RNA, 19 nt, Artificial Sequence
  Synthetic
cugaaaucaacauaggagu

SEQ ID NO: 391107 - RNA, 20 nt, Artificial Sequence
  Synthetic
acugaaaucaacauaggagu

SEQ ID NO: 391108 - RNA, 21 nt, Artificial Sequence
  Synthetic
gacugaaaucaacauaggagu

SEQ ID NO: 391109 - RNA, 22 nt, Artificial Sequence
  Synthetic
agacugaaaucaacauaggagu

SEQ ID NO: 391110 - RNA, 23 nt, Artificial Sequence
  Synthetic
aagacugaaaucaacauaggagu

SEQ ID NO: 391111 - RNA, 24 nt, Artificial Sequence
  Synthetic
uaagacugaaaucaacauaggagu

SEQ ID NO: 391112 - RNA, 18 nt, Artificial Sequence
  Synthetic
gacaugugcacuaggagu

SEQ ID NO: 391113 - RNA, 19 nt, Artificial Sequence
  Synthetic
ggacaugugcacuaggagu

SEQ ID NO: 391114 - RNA, 20 nt, Artificial Sequence
  Synthetic
uggacaugugcacuaggagu

SEQ ID NO: 391115 - RNA, 21 nt, Artificial Sequence
  Synthetic
cuggacaugugcacuaggagu

SEQ ID NO: 391116 - RNA, 22 nt, Artificial Sequence
  Synthetic
acuggacaugugcacuaggagu

SEQ ID NO: 391117 - RNA, 23 nt, Artificial Sequence
  Synthetic
cacuggacaugugcacuaggagu

SEQ ID NO: 391118 - RNA, 24 nt, Artificial Sequence
  Synthetic
ucacuggacaugugcacuaggagu

SEQ ID NO: 391119 - RNA, 18 nt, Artificial Sequence
  Synthetic
gccugggaaaguaggagu

SEQ ID NO: 391120 - RNA, 19 nt, Artificial Sequence
  Synthetic
ugccugggaaaguaggagu

SEQ ID NO: 391121 - RNA, 20 nt, Artificial Sequence
  Synthetic
gugccugggaaaguaggagu

SEQ ID NO: 391122 - RNA, 21 nt, Artificial Sequence
  Synthetic
ugugccugggaaaguaggagu

SEQ ID NO: 391123 - RNA, 22 nt, Artificial Sequence
  Synthetic
augugccugggaaaguaggagu

SEQ ID NO: 391124 - RNA, 23 nt, Artificial Sequence
  Synthetic
uaugugccugggaaaguaggagu

SEQ ID NO: 391125 - RNA, 24 nt, Artificial Sequence
  Synthetic
uuaugugccugggaaaguaggagu

SEQ ID NO: 391126 - RNA, 18 nt, Artificial Sequence
  Synthetic
agggcuagacuuaggagu

SEQ ID NO: 391127 - RNA, 19 nt, Artificial Sequence
  Synthetic
cagggcuagacuuaggagu

SEQ ID NO: 391128 - RNA, 20 nt, Artificial Sequence
  Synthetic
acagggcuagacuuaggagu

SEQ ID NO: 391129 - RNA, 21 nt, Artificial Sequence
  Synthetic
gacagggcuagacuuaggagu

SEQ ID NO: 391130 - RNA, 22 nt, Artificial Sequence
  Synthetic
ggacagggcuagacuuaggagu

SEQ ID NO: 391131 - RNA, 23 nt, Artificial Sequence
  Synthetic
uggacagggcuagacuuaggagu

SEQ ID NO: 391132 - RNA, 24 nt, Artificial Sequence
  Synthetic
guggacagggcuagacuuaggagu

SEQ ID NO: 391133 - RNA, 18 nt, Artificial Sequence
  Synthetic
aguaacccagaagggagu

SEQ ID NO: 391134 - RNA, 19 nt, Artificial Sequence
  Synthetic
uaguaacccagaagggagu

SEQ ID NO: 391135 - RNA, 20 nt, Artificial Sequence
  Synthetic
uuaguaacccagaagggagu

SEQ ID NO: 391136 - RNA, 21 nt, Artificial Sequence
  Synthetic
cuuaguaacccagaagggagu

SEQ ID NO: 391137 - RNA, 22 nt, Artificial Sequence
  Synthetic
ucuuaguaacccagaagggagu

SEQ ID NO: 391138 - RNA, 23 nt, Artificial Sequence
  Synthetic
gucuuaguaacccagaagggagu

SEQ ID NO: 391139 - RNA, 24 nt, Artificial Sequence
  Synthetic
ggucuuaguaacccagaagggagu

SEQ ID NO: 391140 - RNA, 18 nt, Artificial Sequence
  Synthetic
ucacuugaaccagggagu

SEQ ID NO: 391141 - RNA, 19 nt, Artificial Sequence
  Synthetic
aucacuugaaccagggagu

SEQ ID NO: 391142 - RNA, 20 nt, Artificial Sequence
  Synthetic
aaucacuugaaccagggagu

SEQ ID NO: 391143 - RNA, 21 nt, Artificial Sequence
  Synthetic
gaaucacuugaaccagggagu

SEQ ID NO: 391144 - RNA, 22 nt, Artificial Sequence
  Synthetic
agaaucacuugaaccagggagu

SEQ ID NO: 391145 - RNA, 23 nt, Artificial Sequence
  Synthetic
gagaaucacuugaaccagggagu

SEQ ID NO: 391146 - RNA, 24 nt, Artificial Sequence
  Synthetic
ggagaaucacuugaaccagggagu

SEQ ID NO: 391147 - RNA, 18 nt, Artificial Sequence
  Synthetic
ccgcuugagccagggagu

SEQ ID NO: 391148 - RNA, 19 nt, Artificial Sequence
  Synthetic
accgcuugagccagggagu

SEQ ID NO: 391149 - RNA, 20 nt, Artificial Sequence
  Synthetic
aaccgcuugagccagggagu

SEQ ID NO: 391150 - RNA, 21 nt, Artificial Sequence
  Synthetic
gaaccgcuugagccagggagu

SEQ ID NO: 391151 - RNA, 22 nt, Artificial Sequence
  Synthetic
agaaccgcuugagccagggagu

SEQ ID NO: 391152 - RNA, 23 nt, Artificial Sequence
  Synthetic
gagaaccgcuugagccagggagu

SEQ ID NO: 391153 - RNA, 24 nt, Artificial Sequence
  Synthetic
ggagaaccgcuugagccagggagu

SEQ ID NO: 391154 - RNA, 21 nt, Artificial Sequence
  Synthetic
agaucaccugaggucgggagu

SEQ ID NO: 391155 - RNA, 22 nt, Artificial Sequence
  Synthetic
cagaucaccugaggucgggagu

SEQ ID NO: 391156 - RNA, 23 nt, Artificial Sequence
  Synthetic
gcagaucaccugaggucgggagu

SEQ ID NO: 391157 - RNA, 24 nt, Artificial Sequence
  Synthetic
ggcagaucaccugaggucgggagu

SEQ ID NO: 391158 - RNA, 21 nt, Artificial Sequence
  Synthetic
ggaucaccugaggucgggagu

SEQ ID NO: 391159 - RNA, 22 nt, Artificial Sequence
  Synthetic
cggaucaccugaggucgggagu

SEQ ID NO: 391160 - RNA, 23 nt, Artificial Sequence
  Synthetic
gcggaucaccugaggucgggagu

SEQ ID NO: 391161 - RNA, 24 nt, Artificial Sequence
  Synthetic
ggcggaucaccugaggucgggagu

SEQ ID NO: 391162 - RNA, 22 nt, Artificial Sequence
  Synthetic
uggaucaccugaggucgggagu

SEQ ID NO: 391163 - RNA, 23 nt, Artificial Sequence
  Synthetic
guggaucaccugaggucgggagu

SEQ ID NO: 391164 - RNA, 24 nt, Artificial Sequence
  Synthetic
gguggaucaccugaggucgggagu

SEQ ID NO: 391165 - RNA, 18 nt, Artificial Sequence
  Synthetic
ucccagcuacaugggagu

SEQ ID NO: 391166 - RNA, 19 nt, Artificial Sequence
  Synthetic
gucccagcuacaugggagu

SEQ ID NO: 391167 - RNA, 20 nt, Artificial Sequence
  Synthetic
agucccagcuacaugggagu

SEQ ID NO: 391168 - RNA, 21 nt, Artificial Sequence
  Synthetic
uagucccagcuacaugggagu

SEQ ID NO: 391169 - RNA, 22 nt, Artificial Sequence
  Synthetic
guagucccagcuacaugggagu

SEQ ID NO: 391170 - RNA, 23 nt, Artificial Sequence
  Synthetic
uguagucccagcuacaugggagu

SEQ ID NO: 391171 - RNA, 24 nt, Artificial Sequence
  Synthetic
cuguagucccagcuacaugggagu

SEQ ID NO: 391172 - RNA, 18 nt, Artificial Sequence
  Synthetic
ugaagaguugaugggagu

SEQ ID NO: 391173 - RNA, 19 nt, Artificial Sequence
  Synthetic
uugaagaguugaugggagu

SEQ ID NO: 391174 - RNA, 20 nt, Artificial Sequence
  Synthetic
guugaagaguugaugggagu

SEQ ID NO: 391175 - RNA, 21 nt, Artificial Sequence
  Synthetic
uguugaagaguugaugggagu

SEQ ID NO: 391176 - RNA, 22 nt, Artificial Sequence
  Synthetic
uuguugaagaguugaugggagu

SEQ ID NO: 391177 - RNA, 23 nt, Artificial Sequence
  Synthetic
uuuguugaagaguugaugggagu

SEQ ID NO: 391178 - RNA, 24 nt, Artificial Sequence
  Synthetic
uuuuguugaagaguugaugggagu

SEQ ID NO: 391179 - RNA, 18 nt, Artificial Sequence
  Synthetic
agcuucacugcugggagu

SEQ ID NO: 391180 - RNA, 19 nt, Artificial Sequence
  Synthetic
aagcuucacugcugggagu

SEQ ID NO: 391181 - RNA, 20 nt, Artificial Sequence
  Synthetic
caagcuucacugcugggagu

SEQ ID NO: 391182 - RNA, 21 nt, Artificial Sequence
  Synthetic
gcaagcuucacugcugggagu

SEQ ID NO: 391183 - RNA, 22 nt, Artificial Sequence
  Synthetic
ugcaagcuucacugcugggagu

SEQ ID NO: 391184 - RNA, 23 nt, Artificial Sequence
  Synthetic
cugcaagcuucacugcugggagu

SEQ ID NO: 391185 - RNA, 24 nt, Artificial Sequence
  Synthetic
gcugcaagcuucacugcugggagu

SEQ ID NO: 391186 - RNA, 18 nt, Artificial Sequence
  Synthetic
uugauacgcucugggagu

SEQ ID NO: 391187 - RNA, 19 nt, Artificial Sequence
  Synthetic
auugauacgcucugggagu

SEQ ID NO: 391188 - RNA, 20 nt, Artificial Sequence
  Synthetic
uauugauacgcucugggagu

SEQ ID NO: 391189 - RNA, 21 nt, Artificial Sequence
  Synthetic
uuauugauacgcucugggagu

SEQ ID NO: 391190 - RNA, 22 nt, Artificial Sequence
  Synthetic
cuuauugauacgcucugggagu

SEQ ID NO: 391191 - RNA, 23 nt, Artificial Sequence
  Synthetic
gcuuauugauacgcucugggagu

SEQ ID NO: 391192 - RNA, 24 nt, Artificial Sequence
  Synthetic
ugcuuauugauacgcucugggagu

SEQ ID NO: 391193 - RNA, 18 nt, Artificial Sequence
  Synthetic
aagcaggagagugggagu

SEQ ID NO: 391194 - RNA, 19 nt, Artificial Sequence
  Synthetic
gaagcaggagagugggagu

SEQ ID NO: 391195 - RNA, 20 nt, Artificial Sequence
  Synthetic
ggaagcaggagagugggagu

SEQ ID NO: 391196 - RNA, 21 nt, Artificial Sequence
  Synthetic
uggaagcaggagagugggagu

SEQ ID NO: 391197 - RNA, 22 nt, Artificial Sequence
  Synthetic
auggaagcaggagagugggagu

SEQ ID NO: 391198 - RNA, 23 nt, Artificial Sequence
  Synthetic
aauggaagcaggagagugggagu

SEQ ID NO: 391199 - RNA, 24 nt, Artificial Sequence
  Synthetic
aaauggaagcaggagagugggagu

SEQ ID NO: 391200 - RNA, 18 nt, Artificial Sequence
  Synthetic
uuggauuucauugggagu

SEQ ID NO: 391201 - RNA, 19 nt, Artificial Sequence
  Synthetic
guuggauuucauugggagu

SEQ ID NO: 391202 - RNA, 20 nt, Artificial Sequence
  Synthetic
gguuggauuucauugggagu

SEQ ID NO: 391203 - RNA, 21 nt, Artificial Sequence
  Synthetic
agguuggauuucauugggagu

SEQ ID NO: 391204 - RNA, 22 nt, Artificial Sequence
  Synthetic
gagguuggauuucauugggagu

SEQ ID NO: 391205 - RNA, 23 nt, Artificial Sequence
  Synthetic
ugagguuggauuucauugggagu

SEQ ID NO: 391206 - RNA, 24 nt, Artificial Sequence
  Synthetic
gugagguuggauuucauugggagu

SEQ ID NO: 391207 - RNA, 18 nt, Artificial Sequence
  Synthetic
uugccugagcuugggagu

SEQ ID NO: 391208 - RNA, 19 nt, Artificial Sequence
  Synthetic
auugccugagcuugggagu

SEQ ID NO: 391209 - RNA, 20 nt, Artificial Sequence
  Synthetic
gauugccugagcuugggagu

SEQ ID NO: 391210 - RNA, 21 nt, Artificial Sequence
  Synthetic
ggauugccugagcuugggagu

SEQ ID NO: 391211 - RNA, 22 nt, Artificial Sequence
  Synthetic
uggauugccugagcuugggagu

SEQ ID NO: 391212 - RNA, 23 nt, Artificial Sequence
  Synthetic
guggauugccugagcuugggagu

SEQ ID NO: 391213 - RNA, 24 nt, Artificial Sequence
  Synthetic
gguggauugccugagcuugggagu

SEQ ID NO: 391214 - RNA, 18 nt, Artificial Sequence
  Synthetic
ucccagcacuuugggagu

SEQ ID NO: 391215 - RNA, 19 nt, Artificial Sequence
  Synthetic
aucccagcacuuugggagu

SEQ ID NO: 391216 - RNA, 20 nt, Artificial Sequence
  Synthetic
aaucccagcacuuugggagu

SEQ ID NO: 391217 - RNA, 21 nt, Artificial Sequence
  Synthetic
uaaucccagcacuuugggagu

SEQ ID NO: 391218 - RNA, 22 nt, Artificial Sequence
  Synthetic
guaaucccagcacuuugggagu

SEQ ID NO: 391219 - RNA, 23 nt, Artificial Sequence
  Synthetic
uguaaucccagcacuuugggagu

SEQ ID NO: 391220 - RNA, 24 nt, Artificial Sequence
  Synthetic
cuguaaucccagcacuuugggagu

SEQ ID NO: 391221 - RNA, 18 nt, Artificial Sequence
  Synthetic
uaaucuuaagaauggagu

SEQ ID NO: 391222 - RNA, 19 nt, Artificial Sequence
  Synthetic
guaaucuuaagaauggagu

SEQ ID NO: 391223 - RNA, 20 nt, Artificial Sequence
  Synthetic
gguaaucuuaagaauggagu

SEQ ID NO: 391224 - RNA, 21 nt, Artificial Sequence
  Synthetic
agguaaucuuaagaauggagu

SEQ ID NO: 391225 - RNA, 22 nt, Artificial Sequence
  Synthetic
aagguaaucuuaagaauggagu

SEQ ID NO: 391226 - RNA, 23 nt, Artificial Sequence
  Synthetic
aaagguaaucuuaagaauggagu

SEQ ID NO: 391227 - RNA, 24 nt, Artificial Sequence
  Synthetic
aaaagguaaucuuaagaauggagu

SEQ ID NO: 391228 - RNA, 18 nt, Artificial Sequence
  Synthetic
uaaaauaacaacuggagu

SEQ ID NO: 391229 - RNA, 19 nt, Artificial Sequence
  Synthetic
uuaaaauaacaacuggagu

SEQ ID NO: 391230 - RNA, 20 nt, Artificial Sequence
  Synthetic
uuuaaaauaacaacuggagu

SEQ ID NO: 391231 - RNA, 21 nt, Artificial Sequence
  Synthetic
uuuuaaaauaacaacuggagu

SEQ ID NO: 391232 - RNA, 22 nt, Artificial Sequence
  Synthetic
auuuuaaaauaacaacuggagu

SEQ ID NO: 391233 - RNA, 23 nt, Artificial Sequence
  Synthetic
cauuuuaaaauaacaacuggagu

SEQ ID NO: 391234 - RNA, 24 nt, Artificial Sequence
  Synthetic
acauuuuaaaauaacaacuggagu

SEQ ID NO: 391235 - RNA, 18 nt, Artificial Sequence
  Synthetic
gaguugagagacuggagu

SEQ ID NO: 391236 - RNA, 19 nt, Artificial Sequence
  Synthetic
agaguugagagacuggagu

SEQ ID NO: 391237 - RNA, 20 nt, Artificial Sequence
  Synthetic
gagaguugagagacuggagu

SEQ ID NO: 391238 - RNA, 21 nt, Artificial Sequence
  Synthetic
agagaguugagagacuggagu

SEQ ID NO: 391239 - RNA, 22 nt, Artificial Sequence
  Synthetic
uagagaguugagagacuggagu

SEQ ID NO: 391240 - RNA, 23 nt, Artificial Sequence
  Synthetic
auagagaguugagagacuggagu

SEQ ID NO: 391241 - RNA, 24 nt, Artificial Sequence
  Synthetic
cauagagaguugagagacuggagu

SEQ ID NO: 391242 - RNA, 18 nt, Artificial Sequence
  Synthetic
cauuuguuagacuggagu

SEQ ID NO: 391243 - RNA, 19 nt, Artificial Sequence
  Synthetic
gcauuuguuagacuggagu

SEQ ID NO: 391244 - RNA, 20 nt, Artificial Sequence
  Synthetic
agcauuuguuagacuggagu

SEQ ID NO: 391245 - RNA, 21 nt, Artificial Sequence
  Synthetic
uagcauuuguuagacuggagu

SEQ ID NO: 391246 - RNA, 22 nt, Artificial Sequence
  Synthetic
uuagcauuuguuagacuggagu

SEQ ID NO: 391247 - RNA, 23 nt, Artificial Sequence
  Synthetic
auuagcauuuguuagacuggagu

SEQ ID NO: 391248 - RNA, 24 nt, Artificial Sequence
  Synthetic
aauuagcauuuguuagacuggagu

SEQ ID NO: 391249 - RNA, 18 nt, Artificial Sequence
  Synthetic
caguggaauaucuggagu

SEQ ID NO: 391250 - RNA, 19 nt, Artificial Sequence
  Synthetic
ucaguggaauaucuggagu

SEQ ID NO: 391251 - RNA, 20 nt, Artificial Sequence
  Synthetic
cucaguggaauaucuggagu

SEQ ID NO: 391252 - RNA, 21 nt, Artificial Sequence
  Synthetic
acucaguggaauaucuggagu

SEQ ID NO: 391253 - RNA, 22 nt, Artificial Sequence
  Synthetic
aacucaguggaauaucuggagu

SEQ ID NO: 391254 - RNA, 23 nt, Artificial Sequence
  Synthetic
gaacucaguggaauaucuggagu

SEQ ID NO: 391255 - RNA, 24 nt, Artificial Sequence
  Synthetic
agaacucaguggaauaucuggagu

SEQ ID NO: 391256 - RNA, 18 nt, Artificial Sequence
  Synthetic
cagaaugagaaguggagu

SEQ ID NO: 391257 - RNA, 19 nt, Artificial Sequence
  Synthetic
ccagaaugagaaguggagu

SEQ ID NO: 391258 - RNA, 20 nt, Artificial Sequence
  Synthetic
accagaaugagaaguggagu

SEQ ID NO: 391259 - RNA, 21 nt, Artificial Sequence
  Synthetic
aaccagaaugagaaguggagu

SEQ ID NO: 391260 - RNA, 22 nt, Artificial Sequence
  Synthetic
gaaccagaaugagaaguggagu

SEQ ID NO: 391261 - RNA, 23 nt, Artificial Sequence
  Synthetic
agaaccagaaugagaaguggagu

SEQ ID NO: 391262 - RNA, 24 nt, Artificial Sequence
  Synthetic
gagaaccagaaugagaaguggagu

SEQ ID NO: 391263 - RNA, 18 nt, Artificial Sequence
  Synthetic
cucaauacugaguggagu

SEQ ID NO: 391264 - RNA, 19 nt, Artificial Sequence
  Synthetic
ucucaauacugaguggagu

SEQ ID NO: 391265 - RNA, 20 nt, Artificial Sequence
  Synthetic
aucucaauacugaguggagu

SEQ ID NO: 391266 - RNA, 21 nt, Artificial Sequence
  Synthetic
caucucaauacugaguggagu

SEQ ID NO: 391267 - RNA, 22 nt, Artificial Sequence
  Synthetic
acaucucaauacugaguggagu

SEQ ID NO: 391268 - RNA, 23 nt, Artificial Sequence
  Synthetic
uacaucucaauacugaguggagu

SEQ ID NO: 391269 - RNA, 24 nt, Artificial Sequence
  Synthetic
guacaucucaauacugaguggagu

SEQ ID NO: 391270 - RNA, 18 nt, Artificial Sequence
  Synthetic
aggcuugggagguggagu

SEQ ID NO: 391271 - RNA, 19 nt, Artificial Sequence
  Synthetic
gaggcuugggagguggagu

SEQ ID NO: 391272 - RNA, 20 nt, Artificial Sequence
  Synthetic
agaggcuugggagguggagu

SEQ ID NO: 391273 - RNA, 21 nt, Artificial Sequence
  Synthetic
cagaggcuugggagguggagu

SEQ ID NO: 391274 - RNA, 22 nt, Artificial Sequence
  Synthetic
acagaggcuugggagguggagu

SEQ ID NO: 391275 - RNA, 23 nt, Artificial Sequence
  Synthetic
aacagaggcuugggagguggagu

SEQ ID NO: 391276 - RNA, 24 nt, Artificial Sequence
  Synthetic
uaacagaggcuugggagguggagu

SEQ ID NO: 391277 - RNA, 18 nt, Artificial Sequence
  Synthetic
auagauagaauguggagu

SEQ ID NO: 391278 - RNA, 19 nt, Artificial Sequence
  Synthetic
gauagauagaauguggagu

SEQ ID NO: 391279 - RNA, 20 nt, Artificial Sequence
  Synthetic
agauagauagaauguggagu

SEQ ID NO: 391280 - RNA, 21 nt, Artificial Sequence
  Synthetic
aagauagauagaauguggagu

SEQ ID NO: 391281 - RNA, 22 nt, Artificial Sequence
  Synthetic
uaagauagauagaauguggagu

SEQ ID NO: 391282 - RNA, 23 nt, Artificial Sequence
  Synthetic
uuaagauagauagaauguggagu

SEQ ID NO: 391283 - RNA, 24 nt, Artificial Sequence
  Synthetic
cuuaagauagauagaauguggagu

SEQ ID NO: 391284 - RNA, 18 nt, Artificial Sequence
  Synthetic
cuaaauuuaaauuggagu

SEQ ID NO: 391285 - RNA, 19 nt, Artificial Sequence
  Synthetic
ccuaaauuuaaauuggagu

SEQ ID NO: 391286 - RNA, 20 nt, Artificial Sequence
  Synthetic
uccuaaauuuaaauuggagu

SEQ ID NO: 391287 - RNA, 21 nt, Artificial Sequence
  Synthetic
guccuaaauuuaaauuggagu

SEQ ID NO: 391288 - RNA, 22 nt, Artificial Sequence
  Synthetic
gguccuaaauuuaaauuggagu

SEQ ID NO: 391289 - RNA, 23 nt, Artificial Sequence
  Synthetic
agguccuaaauuuaaauuggagu

SEQ ID NO: 391290 - RNA, 24 nt, Artificial Sequence
  Synthetic
gagguccuaaauuuaaauuggagu

SEQ ID NO: 391291 - RNA, 18 nt, Artificial Sequence
  Synthetic
agaagccuguauuggagu

SEQ ID NO: 391292 - RNA, 19 nt, Artificial Sequence
  Synthetic
gagaagccuguauuggagu

SEQ ID NO: 391293 - RNA, 20 nt, Artificial Sequence
  Synthetic
ggagaagccuguauuggagu

SEQ ID NO: 391294 - RNA, 21 nt, Artificial Sequence
  Synthetic
aggagaagccuguauuggagu

SEQ ID NO: 391295 - RNA, 22 nt, Artificial Sequence
  Synthetic
caggagaagccuguauuggagu

SEQ ID NO: 391296 - RNA, 23 nt, Artificial Sequence
  Synthetic
ucaggagaagccuguauuggagu

SEQ ID NO: 391297 - RNA, 24 nt, Artificial Sequence
  Synthetic
cucaggagaagccuguauuggagu

SEQ ID NO: 391298 - RNA, 18 nt, Artificial Sequence
  Synthetic
gcagaagcacguuggagu

SEQ ID NO: 391299 - RNA, 19 nt, Artificial Sequence
  Synthetic
cgcagaagcacguuggagu

SEQ ID NO: 391300 - RNA, 20 nt, Artificial Sequence
  Synthetic
acgcagaagcacguuggagu

SEQ ID NO: 391301 - RNA, 21 nt, Artificial Sequence
  Synthetic
cacgcagaagcacguuggagu

SEQ ID NO: 391302 - RNA, 22 nt, Artificial Sequence
  Synthetic
acacgcagaagcacguuggagu

SEQ ID NO: 391303 - RNA, 23 nt, Artificial Sequence
  Synthetic
cacacgcagaagcacguuggagu

SEQ ID NO: 391304 - RNA, 24 nt, Artificial Sequence
  Synthetic
acacacgcagaagcacguuggagu

SEQ ID NO: 391305 - RNA, 18 nt, Artificial Sequence
  Synthetic
ugaggaagguguuggagu

SEQ ID NO: 391306 - RNA, 19 nt, Artificial Sequence
  Synthetic
augaggaagguguuggagu

SEQ ID NO: 391307 - RNA, 20 nt, Artificial Sequence
  Synthetic
gaugaggaagguguuggagu

SEQ ID NO: 391308 - RNA, 21 nt, Artificial Sequence
  Synthetic
ugaugaggaagguguuggagu

SEQ ID NO: 391309 - RNA, 22 nt, Artificial Sequence
  Synthetic
gugaugaggaagguguuggagu

SEQ ID NO: 391310 - RNA, 23 nt, Artificial Sequence
  Synthetic
agugaugaggaagguguuggagu

SEQ ID NO: 391311 - RNA, 24 nt, Artificial Sequence
  Synthetic
cagugaugaggaagguguuggagu

SEQ ID NO: 391312 - RNA, 18 nt, Artificial Sequence
  Synthetic
gcuccuuuuauuuggagu

SEQ ID NO: 391313 - RNA, 19 nt, Artificial Sequence
  Synthetic
ggcuccuuuuauuuggagu

SEQ ID NO: 391314 - RNA, 20 nt, Artificial Sequence
  Synthetic
uggcuccuuuuauuuggagu

SEQ ID NO: 391315 - RNA, 21 nt, Artificial Sequence
  Synthetic
cuggcuccuuuuauuuggagu

SEQ ID NO: 391316 - RNA, 22 nt, Artificial Sequence
  Synthetic
acuggcuccuuuuauuuggagu

SEQ ID NO: 391317 - RNA, 23 nt, Artificial Sequence
  Synthetic
uacuggcuccuuuuauuuggagu

SEQ ID NO: 391318 - RNA, 24 nt, Artificial Sequence
  Synthetic
auacuggcuccuuuuauuuggagu

SEQ ID NO: 391319 - RNA, 18 nt, Artificial Sequence
  Synthetic
aucuagacuuuuuggagu

SEQ ID NO: 391320 - RNA, 19 nt, Artificial Sequence
  Synthetic
gaucuagacuuuuuggagu

SEQ ID NO: 391321 - RNA, 20 nt, Artificial Sequence
  Synthetic
ggaucuagacuuuuuggagu

SEQ ID NO: 391322 - RNA, 21 nt, Artificial Sequence
  Synthetic
uggaucuagacuuuuuggagu

SEQ ID NO: 391323 - RNA, 22 nt, Artificial Sequence
  Synthetic
guggaucuagacuuuuuggagu

SEQ ID NO: 391324 - RNA, 23 nt, Artificial Sequence
  Synthetic
uguggaucuagacuuuuuggagu

SEQ ID NO: 391325 - RNA, 24 nt, Artificial Sequence
  Synthetic
uuguggaucuagacuuuuuggagu

SEQ ID NO: 391326 - RNA, 18 nt, Artificial Sequence
  Synthetic
uggccucauaaaaugagu

SEQ ID NO: 391327 - RNA, 19 nt, Artificial Sequence
  Synthetic
cuggccucauaaaaugagu

SEQ ID NO: 391328 - RNA, 20 nt, Artificial Sequence
  Synthetic
gcuggccucauaaaaugagu

SEQ ID NO: 391329 - RNA, 21 nt, Artificial Sequence
  Synthetic
ugcuggccucauaaaaugagu

SEQ ID NO: 391330 - RNA, 22 nt, Artificial Sequence
  Synthetic
augcuggccucauaaaaugagu

SEQ ID NO: 391331 - RNA, 23 nt, Artificial Sequence
  Synthetic
gaugcuggccucauaaaaugagu

SEQ ID NO: 391332 - RNA, 24 nt, Artificial Sequence
  Synthetic
ugaugcuggccucauaaaaugagu

SEQ ID NO: 391333 - RNA, 18 nt, Artificial Sequence
  Synthetic
gaaauaucuagaaugagu

SEQ ID NO: 391334 - RNA, 19 nt, Artificial Sequence
  Synthetic
ugaaauaucuagaaugagu

SEQ ID NO: 391335 - RNA, 20 nt, Artificial Sequence
  Synthetic
augaaauaucuagaaugagu

SEQ ID NO: 391336 - RNA, 21 nt, Artificial Sequence
  Synthetic
aaugaaauaucuagaaugagu

SEQ ID NO: 391337 - RNA, 22 nt, Artificial Sequence
  Synthetic
gaaugaaauaucuagaaugagu

SEQ ID NO: 391338 - RNA, 23 nt, Artificial Sequence
  Synthetic
agaaugaaauaucuagaaugagu

SEQ ID NO: 391339 - RNA, 24 nt, Artificial Sequence
  Synthetic
gagaaugaaauaucuagaaugagu

SEQ ID NO: 391340 - RNA, 18 nt, Artificial Sequence
  Synthetic
uugggagugggaaugagu

SEQ ID NO: 391341 - RNA, 19 nt, Artificial Sequence
  Synthetic
uuugggagugggaaugagu

SEQ ID NO: 391342 - RNA, 20 nt, Artificial Sequence
  Synthetic
guuugggagugggaaugagu

SEQ ID NO: 391343 - RNA, 21 nt, Artificial Sequence
  Synthetic
gguuugggagugggaaugagu

SEQ ID NO: 391344 - RNA, 22 nt, Artificial Sequence
  Synthetic
ugguuugggagugggaaugagu

SEQ ID NO: 391345 - RNA, 23 nt, Artificial Sequence
  Synthetic
uugguuugggagugggaaugagu

SEQ ID NO: 391346 - RNA, 24 nt, Artificial Sequence
  Synthetic
guugguuugggagugggaaugagu

SEQ ID NO: 391347 - RNA, 18 nt, Artificial Sequence
  Synthetic
aaguucucaugaaugagu

SEQ ID NO: 391348 - RNA, 19 nt, Artificial Sequence
  Synthetic
gaaguucucaugaaugagu

SEQ ID NO: 391349 - RNA, 20 nt, Artificial Sequence
  Synthetic
ugaaguucucaugaaugagu

SEQ ID NO: 391350 - RNA, 21 nt, Artificial Sequence
  Synthetic
cugaaguucucaugaaugagu

SEQ ID NO: 391351 - RNA, 22 nt, Artificial Sequence
  Synthetic
ccugaaguucucaugaaugagu

SEQ ID NO: 391352 - RNA, 23 nt, Artificial Sequence
  Synthetic
uccugaaguucucaugaaugagu

SEQ ID NO: 391353 - RNA, 24 nt, Artificial Sequence
  Synthetic
guccugaaguucucaugaaugagu

SEQ ID NO: 391354 - RNA, 18 nt, Artificial Sequence
  Synthetic
augugguggugaaugagu

SEQ ID NO: 391355 - RNA, 19 nt, Artificial Sequence
  Synthetic
uaugugguggugaaugagu

SEQ ID NO: 391356 - RNA, 20 nt, Artificial Sequence
  Synthetic
cuaugugguggugaaugagu

SEQ ID NO: 391357 - RNA, 21 nt, Artificial Sequence
  Synthetic
acuaugugguggugaaugagu

SEQ ID NO: 391358 - RNA, 22 nt, Artificial Sequence
  Synthetic
cacuaugugguggugaaugagu

SEQ ID NO: 391359 - RNA, 23 nt, Artificial Sequence
  Synthetic
acacuaugugguggugaaugagu

SEQ ID NO: 391360 - RNA, 24 nt, Artificial Sequence
  Synthetic
uacacuaugugguggugaaugagu

SEQ ID NO: 391361 - RNA, 18 nt, Artificial Sequence
  Synthetic
ccugaucuuugaaugagu

SEQ ID NO: 391362 - RNA, 19 nt, Artificial Sequence
  Synthetic
accugaucuuugaaugagu

SEQ ID NO: 391363 - RNA, 20 nt, Artificial Sequence
  Synthetic
caccugaucuuugaaugagu

SEQ ID NO: 391364 - RNA, 21 nt, Artificial Sequence
  Synthetic
ccaccugaucuuugaaugagu

SEQ ID NO: 391365 - RNA, 22 nt, Artificial Sequence
  Synthetic
uccaccugaucuuugaaugagu

SEQ ID NO: 391366 - RNA, 23 nt, Artificial Sequence
  Synthetic
auccaccugaucuuugaaugagu

SEQ ID NO: 391367 - RNA, 24 nt, Artificial Sequence
  Synthetic
cauccaccugaucuuugaaugagu

SEQ ID NO: 391368 - RNA, 18 nt, Artificial Sequence
  Synthetic
auacaacagauaaugagu

SEQ ID NO: 391369 - RNA, 19 nt, Artificial Sequence
  Synthetic
cauacaacagauaaugagu

SEQ ID NO: 391370 - RNA, 20 nt, Artificial Sequence
  Synthetic
ccauacaacagauaaugagu

SEQ ID NO: 391371 - RNA, 21 nt, Artificial Sequence
  Synthetic
accauacaacagauaaugagu

SEQ ID NO: 391372 - RNA, 22 nt, Artificial Sequence
  Synthetic
uaccauacaacagauaaugagu

SEQ ID NO: 391373 - RNA, 23 nt, Artificial Sequence
  Synthetic
uuaccauacaacagauaaugagu

SEQ ID NO: 391374 - RNA, 24 nt, Artificial Sequence
  Synthetic
auuaccauacaacagauaaugagu

SEQ ID NO: 391375 - RNA, 18 nt, Artificial Sequence
  Synthetic
gguacaccauugaugagu

SEQ ID NO: 391376 - RNA, 19 nt, Artificial Sequence
  Synthetic
cgguacaccauugaugagu

SEQ ID NO: 391377 - RNA, 20 nt, Artificial Sequence
  Synthetic
ucgguacaccauugaugagu

SEQ ID NO: 391378 - RNA, 21 nt, Artificial Sequence
  Synthetic
gucgguacaccauugaugagu

SEQ ID NO: 391379 - RNA, 22 nt, Artificial Sequence
  Synthetic
ggucgguacaccauugaugagu

SEQ ID NO: 391380 - RNA, 23 nt, Artificial Sequence
  Synthetic
aggucgguacaccauugaugagu

SEQ ID NO: 391381 - RNA, 24 nt, Artificial Sequence
  Synthetic
gaggucgguacaccauugaugagu

SEQ ID NO: 391382 - RNA, 18 nt, Artificial Sequence
  Synthetic
guaacugagcauaugagu

SEQ ID NO: 391383 - RNA, 19 nt, Artificial Sequence
  Synthetic
gguaacugagcauaugagu

SEQ ID NO: 391384 - RNA, 20 nt, Artificial Sequence
  Synthetic
agguaacugagcauaugagu

SEQ ID NO: 391385 - RNA, 21 nt, Artificial Sequence
  Synthetic
gagguaacugagcauaugagu

SEQ ID NO: 391386 - RNA, 22 nt, Artificial Sequence
  Synthetic
ugagguaacugagcauaugagu

SEQ ID NO: 391387 - RNA, 23 nt, Artificial Sequence
  Synthetic
cugagguaacugagcauaugagu

SEQ ID NO: 391388 - RNA, 24 nt, Artificial Sequence
  Synthetic
acugagguaacugagcauaugagu

SEQ ID NO: 391389 - RNA, 18 nt, Artificial Sequence
  Synthetic
guccauuggcauaugagu

SEQ ID NO: 391390 - RNA, 19 nt, Artificial Sequence
  Synthetic
aguccauuggcauaugagu

SEQ ID NO: 391391 - RNA, 20 nt, Artificial Sequence
  Synthetic
aaguccauuggcauaugagu

SEQ ID NO: 391392 - RNA, 21 nt, Artificial Sequence
  Synthetic
gaaguccauuggcauaugagu

SEQ ID NO: 391393 - RNA, 22 nt, Artificial Sequence
  Synthetic
agaaguccauuggcauaugagu

SEQ ID NO: 391394 - RNA, 23 nt, Artificial Sequence
  Synthetic
gagaaguccauuggcauaugagu

SEQ ID NO: 391395 - RNA, 24 nt, Artificial Sequence
  Synthetic
agagaaguccauuggcauaugagu

SEQ ID NO: 391396 - RNA, 18 nt, Artificial Sequence
  Synthetic
aguaaguaaguuaugagu

SEQ ID NO: 391397 - RNA, 19 nt, Artificial Sequence
  Synthetic
aaguaaguaaguuaugagu

SEQ ID NO: 391398 - RNA, 20 nt, Artificial Sequence
  Synthetic
uaaguaaguaaguuaugagu

SEQ ID NO: 391399 - RNA, 21 nt, Artificial Sequence
  Synthetic
auaaguaaguaaguuaugagu

SEQ ID NO: 391400 - RNA, 22 nt, Artificial Sequence
  Synthetic
uauaaguaaguaaguuaugagu

SEQ ID NO: 391401 - RNA, 23 nt, Artificial Sequence
  Synthetic
uuauaaguaaguaaguuaugagu

SEQ ID NO: 391402 - RNA, 24 nt, Artificial Sequence
  Synthetic
cuuauaaguaaguaaguuaugagu

SEQ ID NO: 391403 - RNA, 18 nt, Artificial Sequence
  Synthetic
auguacucaguuaugagu

SEQ ID NO: 391404 - RNA, 19 nt, Artificial Sequence
  Synthetic
uauguacucaguuaugagu

SEQ ID NO: 391405 - RNA, 20 nt, Artificial Sequence
  Synthetic
auauguacucaguuaugagu

SEQ ID NO: 391406 - RNA, 21 nt, Artificial Sequence
  Synthetic
uauauguacucaguuaugagu

SEQ ID NO: 391407 - RNA, 22 nt, Artificial Sequence
  Synthetic
cuauauguacucaguuaugagu

SEQ ID NO: 391408 - RNA, 23 nt, Artificial Sequence
  Synthetic
acuauauguacucaguuaugagu

SEQ ID NO: 391409 - RNA, 24 nt, Artificial Sequence
  Synthetic
uacuauauguacucaguuaugagu

SEQ ID NO: 391410 - RNA, 18 nt, Artificial Sequence
  Synthetic
cagggauggaaacugagu

SEQ ID NO: 391411 - RNA, 19 nt, Artificial Sequence
  Synthetic
acagggauggaaacugagu

SEQ ID NO: 391412 - RNA, 20 nt, Artificial Sequence
  Synthetic
aacagggauggaaacugagu

SEQ ID NO: 391413 - RNA, 21 nt, Artificial Sequence
  Synthetic
gaacagggauggaaacugagu

SEQ ID NO: 391414 - RNA, 22 nt, Artificial Sequence
  Synthetic
ugaacagggauggaaacugagu

SEQ ID NO: 391415 - RNA, 23 nt, Artificial Sequence
  Synthetic
uugaacagggauggaaacugagu

SEQ ID NO: 391416 - RNA, 24 nt, Artificial Sequence
  Synthetic
uuugaacagggauggaaacugagu

SEQ ID NO: 391417 - RNA, 18 nt, Artificial Sequence
  Synthetic
gacauaaugccacugagu

SEQ ID NO: 391418 - RNA, 19 nt, Artificial Sequence
  Synthetic
cgacauaaugccacugagu

SEQ ID NO: 391419 - RNA, 20 nt, Artificial Sequence
  Synthetic
ccgacauaaugccacugagu

SEQ ID NO: 391420 - RNA, 21 nt, Artificial Sequence
  Synthetic
accgacauaaugccacugagu

SEQ ID NO: 391421 - RNA, 22 nt, Artificial Sequence
  Synthetic
uaccgacauaaugccacugagu

SEQ ID NO: 391422 - RNA, 23 nt, Artificial Sequence
  Synthetic
cuaccgacauaaugccacugagu

SEQ ID NO: 391423 - RNA, 24 nt, Artificial Sequence
  Synthetic
gcuaccgacauaaugccacugagu

SEQ ID NO: 391424 - RNA, 18 nt, Artificial Sequence
  Synthetic
gaagugcaaauacugagu

SEQ ID NO: 391425 - RNA, 19 nt, Artificial Sequence
  Synthetic
agaagugcaaauacugagu

SEQ ID NO: 391426 - RNA, 20 nt, Artificial Sequence
  Synthetic
aagaagugcaaauacugagu

SEQ ID NO: 391427 - RNA, 21 nt, Artificial Sequence
  Synthetic
aaagaagugcaaauacugagu

SEQ ID NO: 391428 - RNA, 22 nt, Artificial Sequence
  Synthetic
aaaagaagugcaaauacugagu

SEQ ID NO: 391429 - RNA, 23 nt, Artificial Sequence
  Synthetic
gaaaagaagugcaaauacugagu

SEQ ID NO: 391430 - RNA, 24 nt, Artificial Sequence
  Synthetic
agaaaagaagugcaaauacugagu

SEQ ID NO: 391431 - RNA, 18 nt, Artificial Sequence
  Synthetic
cacaagagaguacugagu

SEQ ID NO: 391432 - RNA, 19 nt, Artificial Sequence
  Synthetic
ccacaagagaguacugagu

SEQ ID NO: 391433 - RNA, 20 nt, Artificial Sequence
  Synthetic
accacaagagaguacugagu

SEQ ID NO: 391434 - RNA, 21 nt, Artificial Sequence
  Synthetic
aaccacaagagaguacugagu

SEQ ID NO: 391435 - RNA, 22 nt, Artificial Sequence
  Synthetic
uaaccacaagagaguacugagu

SEQ ID NO: 391436 - RNA, 23 nt, Artificial Sequence
  Synthetic
uuaaccacaagagaguacugagu

SEQ ID NO: 391437 - RNA, 24 nt, Artificial Sequence
  Synthetic
auuaaccacaagagaguacugagu

SEQ ID NO: 391438 - RNA, 18 nt, Artificial Sequence
  Synthetic
cuuuugugcuaccugagu

SEQ ID NO: 391439 - RNA, 19 nt, Artificial Sequence
  Synthetic
ucuuuugugcuaccugagu

SEQ ID NO: 391440 - RNA, 20 nt, Artificial Sequence
  Synthetic
cucuuuugugcuaccugagu

SEQ ID NO: 391441 - RNA, 21 nt, Artificial Sequence
  Synthetic
gcucuuuugugcuaccugagu

SEQ ID NO: 391442 - RNA, 22 nt, Artificial Sequence
  Synthetic
ugcucuuuugugcuaccugagu

SEQ ID NO: 391443 - RNA, 23 nt, Artificial Sequence
  Synthetic
uugcucuuuugugcuaccugagu

SEQ ID NO: 391444 - RNA, 24 nt, Artificial Sequence
  Synthetic
uuugcucuuuugugcuaccugagu

SEQ ID NO: 391445 - RNA, 18 nt, Artificial Sequence
  Synthetic
auaaugugcuagcugagu

SEQ ID NO: 391446 - RNA, 19 nt, Artificial Sequence
  Synthetic
gauaaugugcuagcugagu

SEQ ID NO: 391447 - RNA, 20 nt, Artificial Sequence
  Synthetic
agauaaugugcuagcugagu

SEQ ID NO: 391448 - RNA, 21 nt, Artificial Sequence
  Synthetic
cagauaaugugcuagcugagu

SEQ ID NO: 391449 - RNA, 22 nt, Artificial Sequence
  Synthetic
ucagauaaugugcuagcugagu

SEQ ID NO: 391450 - RNA, 23 nt, Artificial Sequence
  Synthetic
aucagauaaugugcuagcugagu

SEQ ID NO: 391451 - RNA, 24 nt, Artificial Sequence
  Synthetic
uaucagauaaugugcuagcugagu

SEQ ID NO: 391452 - RNA, 18 nt, Artificial Sequence
  Synthetic
augcucgggaggcugagu

SEQ ID NO: 391453 - RNA, 19 nt, Artificial Sequence
  Synthetic
gaugcucgggaggcugagu

SEQ ID NO: 391454 - RNA, 20 nt, Artificial Sequence
  Synthetic
agaugcucgggaggcugagu

SEQ ID NO: 391455 - RNA, 21 nt, Artificial Sequence
  Synthetic
uagaugcucgggaggcugagu

SEQ ID NO: 391456 - RNA, 22 nt, Artificial Sequence
  Synthetic
cuagaugcucgggaggcugagu

SEQ ID NO: 391457 - RNA, 23 nt, Artificial Sequence
  Synthetic
ccuagaugcucgggaggcugagu

SEQ ID NO: 391458 - RNA, 24 nt, Artificial Sequence
  Synthetic
uccuagaugcucgggaggcugagu

SEQ ID NO: 391459 - RNA, 18 nt, Artificial Sequence
  Synthetic
gccgacuuggggcugagu

SEQ ID NO: 391460 - RNA, 19 nt, Artificial Sequence
  Synthetic
ggccgacuuggggcugagu

SEQ ID NO: 391461 - RNA, 20 nt, Artificial Sequence
  Synthetic
cggccgacuuggggcugagu

SEQ ID NO: 391462 - RNA, 21 nt, Artificial Sequence
  Synthetic
ucggccgacuuggggcugagu

SEQ ID NO: 391463 - RNA, 22 nt, Artificial Sequence
  Synthetic
cucggccgacuuggggcugagu

SEQ ID NO: 391464 - RNA, 23 nt, Artificial Sequence
  Synthetic
ucucggccgacuuggggcugagu

SEQ ID NO: 391465 - RNA, 24 nt, Artificial Sequence
  Synthetic
uucucggccgacuuggggcugagu

SEQ ID NO: 391466 - RNA, 18 nt, Artificial Sequence
  Synthetic
uccauaggcuggcugagu

SEQ ID NO: 391467 - RNA, 19 nt, Artificial Sequence
  Synthetic
uuccauaggcuggcugagu

SEQ ID NO: 391468 - RNA, 20 nt, Artificial Sequence
  Synthetic
auuccauaggcuggcugagu

SEQ ID NO: 391469 - RNA, 21 nt, Artificial Sequence
  Synthetic
cauuccauaggcuggcugagu

SEQ ID NO: 391470 - RNA, 22 nt, Artificial Sequence
  Synthetic
ucauuccauaggcuggcugagu

SEQ ID NO: 391471 - RNA, 23 nt, Artificial Sequence
  Synthetic
gucauuccauaggcuggcugagu

SEQ ID NO: 391472 - RNA, 24 nt, Artificial Sequence
  Synthetic
ggucauuccauaggcuggcugagu

SEQ ID NO: 391473 - RNA, 18 nt, Artificial Sequence
  Synthetic
ucuguugaaaugcugagu

SEQ ID NO: 391474 - RNA, 19 nt, Artificial Sequence
  Synthetic
uucuguugaaaugcugagu

SEQ ID NO: 391475 - RNA, 20 nt, Artificial Sequence
  Synthetic
guucuguugaaaugcugagu

SEQ ID NO: 391476 - RNA, 21 nt, Artificial Sequence
  Synthetic
aguucuguugaaaugcugagu

SEQ ID NO: 391477 - RNA, 22 nt, Artificial Sequence
  Synthetic
aaguucuguugaaaugcugagu

SEQ ID NO: 391478 - RNA, 23 nt, Artificial Sequence
  Synthetic
uaaguucuguugaaaugcugagu

SEQ ID NO: 391479 - RNA, 24 nt, Artificial Sequence
  Synthetic
uuaaguucuguugaaaugcugagu

SEQ ID NO: 391480 - RNA, 18 nt, Artificial Sequence
  Synthetic
ucugaagccaaucugagu

SEQ ID NO: 391481 - RNA, 19 nt, Artificial Sequence
  Synthetic
aucugaagccaaucugagu

SEQ ID NO: 391482 - RNA, 20 nt, Artificial Sequence
  Synthetic
caucugaagccaaucugagu

SEQ ID NO: 391483 - RNA, 21 nt, Artificial Sequence
  Synthetic
acaucugaagccaaucugagu

SEQ ID NO: 391484 - RNA, 22 nt, Artificial Sequence
  Synthetic
uacaucugaagccaaucugagu

SEQ ID NO: 391485 - RNA, 23 nt, Artificial Sequence
  Synthetic
auacaucugaagccaaucugagu

SEQ ID NO: 391486 - RNA, 24 nt, Artificial Sequence
  Synthetic
cauacaucugaagccaaucugagu

SEQ ID NO: 391487 - RNA, 18 nt, Artificial Sequence
  Synthetic
aaaucuuuaucucugagu

SEQ ID NO: 391488 - RNA, 19 nt, Artificial Sequence
  Synthetic
uaaaucuuuaucucugagu

SEQ ID NO: 391489 - RNA, 20 nt, Artificial Sequence
  Synthetic
uuaaaucuuuaucucugagu

SEQ ID NO: 391490 - RNA, 21 nt, Artificial Sequence
  Synthetic
cuuaaaucuuuaucucugagu

SEQ ID NO: 391491 - RNA, 22 nt, Artificial Sequence
  Synthetic
ucuuaaaucuuuaucucugagu

SEQ ID NO: 391492 - RNA, 23 nt, Artificial Sequence
  Synthetic
aucuuaaaucuuuaucucugagu

SEQ ID NO: 391493 - RNA, 24 nt, Artificial Sequence
  Synthetic
gaucuuaaaucuuuaucucugagu

SEQ ID NO: 391494 - RNA, 18 nt, Artificial Sequence
  Synthetic
ucuuucaucucucugagu

SEQ ID NO: 391495 - RNA, 19 nt, Artificial Sequence
  Synthetic
cucuuucaucucucugagu

SEQ ID NO: 391496 - RNA, 20 nt, Artificial Sequence
  Synthetic
ucucuuucaucucucugagu

SEQ ID NO: 391497 - RNA, 21 nt, Artificial Sequence
  Synthetic
uucucuuucaucucucugagu

SEQ ID NO: 391498 - RNA, 22 nt, Artificial Sequence
  Synthetic
cuucucuuucaucucucugagu

SEQ ID NO: 391499 - RNA, 23 nt, Artificial Sequence
  Synthetic
ccuucucuuucaucucucugagu

SEQ ID NO: 391500 - RNA, 24 nt, Artificial Sequence
  Synthetic
uccuucucuuucaucucucugagu

SEQ ID NO: 391501 - RNA, 18 nt, Artificial Sequence
  Synthetic
aggaugaaaauucugagu

SEQ ID NO: 391502 - RNA, 19 nt, Artificial Sequence
  Synthetic
caggaugaaaauucugagu

SEQ ID NO: 391503 - RNA, 20 nt, Artificial Sequence
  Synthetic
gcaggaugaaaauucugagu

SEQ ID NO: 391504 - RNA, 21 nt, Artificial Sequence
  Synthetic
agcaggaugaaaauucugagu

SEQ ID NO: 391505 - RNA, 22 nt, Artificial Sequence
  Synthetic
gagcaggaugaaaauucugagu

SEQ ID NO: 391506 - RNA, 23 nt, Artificial Sequence
  Synthetic
agagcaggaugaaaauucugagu

SEQ ID NO: 391507 - RNA, 24 nt, Artificial Sequence
  Synthetic
cagagcaggaugaaaauucugagu

SEQ ID NO: 391508 - RNA, 18 nt, Artificial Sequence
  Synthetic
cacagacauacagugagu

SEQ ID NO: 391509 - RNA, 19 nt, Artificial Sequence
  Synthetic
ccacagacauacagugagu

SEQ ID NO: 391510 - RNA, 20 nt, Artificial Sequence
  Synthetic
accacagacauacagugagu

SEQ ID NO: 391511 - RNA, 21 nt, Artificial Sequence
  Synthetic
uaccacagacauacagugagu

SEQ ID NO: 391512 - RNA, 22 nt, Artificial Sequence
  Synthetic
cuaccacagacauacagugagu

SEQ ID NO: 391513 - RNA, 23 nt, Artificial Sequence
  Synthetic
acuaccacagacauacagugagu

SEQ ID NO: 391514 - RNA, 24 nt, Artificial Sequence
  Synthetic
uacuaccacagacauacagugagu

SEQ ID NO: 391515 - RNA, 18 nt, Artificial Sequence
  Synthetic
cauugaggaugagugagu

SEQ ID NO: 391516 - RNA, 19 nt, Artificial Sequence
  Synthetic
acauugaggaugagugagu

SEQ ID NO: 391517 - RNA, 20 nt, Artificial Sequence
  Synthetic
gacauugaggaugagugagu

SEQ ID NO: 391518 - RNA, 21 nt, Artificial Sequence
  Synthetic
agacauugaggaugagugagu

SEQ ID NO: 391519 - RNA, 22 nt, Artificial Sequence
  Synthetic
aagacauugaggaugagugagu

SEQ ID NO: 391520 - RNA, 23 nt, Artificial Sequence
  Synthetic
uaagacauugaggaugagugagu

SEQ ID NO: 391521 - RNA, 24 nt, Artificial Sequence
  Synthetic
cuaagacauugaggaugagugagu

SEQ ID NO: 391522 - RNA, 18 nt, Artificial Sequence
  Synthetic
gagcacaagaacgugagu

SEQ ID NO: 391523 - RNA, 19 nt, Artificial Sequence
  Synthetic
agagcacaagaacgugagu

SEQ ID NO: 391524 - RNA, 20 nt, Artificial Sequence
  Synthetic
gagagcacaagaacgugagu

SEQ ID NO: 391525 - RNA, 21 nt, Artificial Sequence
  Synthetic
ugagagcacaagaacgugagu

SEQ ID NO: 391526 - RNA, 22 nt, Artificial Sequence
  Synthetic
augagagcacaagaacgugagu

SEQ ID NO: 391527 - RNA, 23 nt, Artificial Sequence
  Synthetic
aaugagagcacaagaacgugagu

SEQ ID NO: 391528 - RNA, 24 nt, Artificial Sequence
  Synthetic
aaaugagagcacaagaacgugagu

SEQ ID NO: 391529 - RNA, 18 nt, Artificial Sequence
  Synthetic
uaaaagcaaugcgugagu

SEQ ID NO: 391530 - RNA, 19 nt, Artificial Sequence
  Synthetic
cuaaaagcaaugcgugagu

SEQ ID NO: 391531 - RNA, 20 nt, Artificial Sequence
  Synthetic
acuaaaagcaaugcgugagu

SEQ ID NO: 391532 - RNA, 21 nt, Artificial Sequence
  Synthetic
aacuaaaagcaaugcgugagu

SEQ ID NO: 391533 - RNA, 22 nt, Artificial Sequence
  Synthetic
caacuaaaagcaaugcgugagu

SEQ ID NO: 391534 - RNA, 23 nt, Artificial Sequence
  Synthetic
acaacuaaaagcaaugcgugagu

SEQ ID NO: 391535 - RNA, 24 nt, Artificial Sequence
  Synthetic
gacaacuaaaagcaaugcgugagu

SEQ ID NO: 391536 - RNA, 18 nt, Artificial Sequence
  Synthetic
agucuuauuguggugagu

SEQ ID NO: 391537 - RNA, 19 nt, Artificial Sequence
  Synthetic
aagucuuauuguggugagu

SEQ ID NO: 391538 - RNA, 20 nt, Artificial Sequence
  Synthetic
gaagucuuauuguggugagu

SEQ ID NO: 391539 - RNA, 21 nt, Artificial Sequence
  Synthetic
agaagucuuauuguggugagu

SEQ ID NO: 391540 - RNA, 22 nt, Artificial Sequence
  Synthetic
aagaagucuuauuguggugagu

SEQ ID NO: 391541 - RNA, 23 nt, Artificial Sequence
  Synthetic
caagaagucuuauuguggugagu

SEQ ID NO: 391542 - RNA, 24 nt, Artificial Sequence
  Synthetic
ccaagaagucuuauuguggugagu

SEQ ID NO: 391543 - RNA, 18 nt, Artificial Sequence
  Synthetic
gcaguuggcugugugagu

SEQ ID NO: 391544 - RNA, 19 nt, Artificial Sequence
  Synthetic
ggcaguuggcugugugagu

SEQ ID NO: 391545 - RNA, 20 nt, Artificial Sequence
  Synthetic
gggcaguuggcugugugagu

SEQ ID NO: 391546 - RNA, 21 nt, Artificial Sequence
  Synthetic
ugggcaguuggcugugugagu

SEQ ID NO: 391547 - RNA, 22 nt, Artificial Sequence
  Synthetic
uugggcaguuggcugugugagu

SEQ ID NO: 391548 - RNA, 23 nt, Artificial Sequence
  Synthetic
cuugggcaguuggcugugugagu

SEQ ID NO: 391549 - RNA, 24 nt, Artificial Sequence
  Synthetic
ucuugggcaguuggcugugugagu

SEQ ID NO: 391550 - RNA, 18 nt, Artificial Sequence
  Synthetic
aucauguaagaauugagu

SEQ ID NO: 391551 - RNA, 19 nt, Artificial Sequence
  Synthetic
uaucauguaagaauugagu

SEQ ID NO: 391552 - RNA, 20 nt, Artificial Sequence
  Synthetic
auaucauguaagaauugagu

SEQ ID NO: 391553 - RNA, 21 nt, Artificial Sequence
  Synthetic
uauaucauguaagaauugagu

SEQ ID NO: 391554 - RNA, 22 nt, Artificial Sequence
  Synthetic
uuauaucauguaagaauugagu

SEQ ID NO: 391555 - RNA, 23 nt, Artificial Sequence
  Synthetic
uuuauaucauguaagaauugagu

SEQ ID NO: 391556 - RNA, 24 nt, Artificial Sequence
  Synthetic
uuuuauaucauguaagaauugagu

SEQ ID NO: 391557 - RNA, 18 nt, Artificial Sequence
  Synthetic
gcuacaaaggaauugagu

SEQ ID NO: 391558 - RNA, 19 nt, Artificial Sequence
  Synthetic
agcuacaaaggaauugagu

SEQ ID NO: 391559 - RNA, 20 nt, Artificial Sequence
  Synthetic
cagcuacaaaggaauugagu

SEQ ID NO: 391560 - RNA, 21 nt, Artificial Sequence
  Synthetic
gcagcuacaaaggaauugagu

SEQ ID NO: 391561 - RNA, 22 nt, Artificial Sequence
  Synthetic
ugcagcuacaaaggaauugagu

SEQ ID NO: 391562 - RNA, 23 nt, Artificial Sequence
  Synthetic
cugcagcuacaaaggaauugagu

SEQ ID NO: 391563 - RNA, 24 nt, Artificial Sequence
  Synthetic
ccugcagcuacaaaggaauugagu

SEQ ID NO: 391564 - RNA, 18 nt, Artificial Sequence
  Synthetic
augaagucugaauugagu

SEQ ID NO: 391565 - RNA, 19 nt, Artificial Sequence
  Synthetic
aaugaagucugaauugagu

SEQ ID NO: 391566 - RNA, 20 nt, Artificial Sequence
  Synthetic
aaaugaagucugaauugagu

SEQ ID NO: 391567 - RNA, 21 nt, Artificial Sequence
  Synthetic
gaaaugaagucugaauugagu

SEQ ID NO: 391568 - RNA, 22 nt, Artificial Sequence
  Synthetic
agaaaugaagucugaauugagu

SEQ ID NO: 391569 - RNA, 23 nt, Artificial Sequence
  Synthetic
uagaaaugaagucugaauugagu

SEQ ID NO: 391570 - RNA, 24 nt, Artificial Sequence
  Synthetic
guagaaaugaagucugaauugagu

SEQ ID NO: 391571 - RNA, 18 nt, Artificial Sequence
  Synthetic
augucccugucauugagu

SEQ ID NO: 391572 - RNA, 19 nt, Artificial Sequence
  Synthetic
aaugucccugucauugagu

SEQ ID NO: 391573 - RNA, 20 nt, Artificial Sequence
  Synthetic
aaaugucccugucauugagu

SEQ ID NO: 391574 - RNA, 21 nt, Artificial Sequence
  Synthetic
uaaaugucccugucauugagu

SEQ ID NO: 391575 - RNA, 22 nt, Artificial Sequence
  Synthetic
cuaaaugucccugucauugagu

SEQ ID NO: 391576 - RNA, 23 nt, Artificial Sequence
  Synthetic
gcuaaaugucccugucauugagu

SEQ ID NO: 391577 - RNA, 24 nt, Artificial Sequence
  Synthetic
agcuaaaugucccugucauugagu

SEQ ID NO: 391578 - RNA, 18 nt, Artificial Sequence
  Synthetic
gcuuucagguccuugagu

SEQ ID NO: 391579 - RNA, 19 nt, Artificial Sequence
  Synthetic
ggcuuucagguccuugagu

SEQ ID NO: 391580 - RNA, 20 nt, Artificial Sequence
  Synthetic
uggcuuucagguccuugagu

SEQ ID NO: 391581 - RNA, 21 nt, Artificial Sequence
  Synthetic
auggcuuucagguccuugagu

SEQ ID NO: 391582 - RNA, 22 nt, Artificial Sequence
  Synthetic
aauggcuuucagguccuugagu

SEQ ID NO: 391583 - RNA, 23 nt, Artificial Sequence
  Synthetic
gaauggcuuucagguccuugagu

SEQ ID NO: 391584 - RNA, 24 nt, Artificial Sequence
  Synthetic
agaauggcuuucagguccuugagu

SEQ ID NO: 391585 - RNA, 18 nt, Artificial Sequence
  Synthetic
gaauucacucuguugagu

SEQ ID NO: 391586 - RNA, 19 nt, Artificial Sequence
  Synthetic
cgaauucacucuguugagu

SEQ ID NO: 391587 - RNA, 20 nt, Artificial Sequence
  Synthetic
acgaauucacucuguugagu

SEQ ID NO: 391588 - RNA, 21 nt, Artificial Sequence
  Synthetic
cacgaauucacucuguugagu

SEQ ID NO: 391589 - RNA, 22 nt, Artificial Sequence
  Synthetic
acacgaauucacucuguugagu

SEQ ID NO: 391590 - RNA, 23 nt, Artificial Sequence
  Synthetic
aacacgaauucacucuguugagu

SEQ ID NO: 391591 - RNA, 24 nt, Artificial Sequence
  Synthetic
gaacacgaauucacucuguugagu

SEQ ID NO: 391592 - RNA, 18 nt, Artificial Sequence
  Synthetic
cuacagcuucuguugagu

SEQ ID NO: 391593 - RNA, 19 nt, Artificial Sequence
  Synthetic
ucuacagcuucuguugagu

SEQ ID NO: 391594 - RNA, 20 nt, Artificial Sequence
  Synthetic
gucuacagcuucuguugagu

SEQ ID NO: 391595 - RNA, 21 nt, Artificial Sequence
  Synthetic
ggucuacagcuucuguugagu

SEQ ID NO: 391596 - RNA, 22 nt, Artificial Sequence
  Synthetic
uggucuacagcuucuguugagu

SEQ ID NO: 391597 - RNA, 23 nt, Artificial Sequence
  Synthetic
guggucuacagcuucuguugagu

SEQ ID NO: 391598 - RNA, 24 nt, Artificial Sequence
  Synthetic
uguggucuacagcuucuguugagu

SEQ ID NO: 391599 - RNA, 18 nt, Artificial Sequence
  Synthetic
uuuggaagcguguugagu

SEQ ID NO: 391600 - RNA, 19 nt, Artificial Sequence
  Synthetic
auuuggaagcguguugagu

SEQ ID NO: 391601 - RNA, 20 nt, Artificial Sequence
  Synthetic
aauuuggaagcguguugagu

SEQ ID NO: 391602 - RNA, 21 nt, Artificial Sequence
  Synthetic
aaauuuggaagcguguugagu

SEQ ID NO: 391603 - RNA, 22 nt, Artificial Sequence
  Synthetic
caaauuuggaagcguguugagu

SEQ ID NO: 391604 - RNA, 23 nt, Artificial Sequence
  Synthetic
acaaauuuggaagcguguugagu

SEQ ID NO: 391605 - RNA, 24 nt, Artificial Sequence
  Synthetic
cacaaauuuggaagcguguugagu

SEQ ID NO: 391606 - RNA, 18 nt, Artificial Sequence
  Synthetic
guccauggaaauuugagu

SEQ ID NO: 391607 - RNA, 19 nt, Artificial Sequence
  Synthetic
uguccauggaaauuugagu

SEQ ID NO: 391608 - RNA, 20 nt, Artificial Sequence
  Synthetic
guguccauggaaauuugagu

SEQ ID NO: 391609 - RNA, 21 nt, Artificial Sequence
  Synthetic
uguguccauggaaauuugagu

SEQ ID NO: 391610 - RNA, 22 nt, Artificial Sequence
  Synthetic
uuguguccauggaaauuugagu

SEQ ID NO: 391611 - RNA, 23 nt, Artificial Sequence
  Synthetic
auuguguccauggaaauuugagu

SEQ ID NO: 391612 - RNA, 24 nt, Artificial Sequence
  Synthetic
uauuguguccauggaaauuugagu

SEQ ID NO: 391613 - RNA, 18 nt, Artificial Sequence
  Synthetic
auaucuaaguauuugagu

SEQ ID NO: 391614 - RNA, 19 nt, Artificial Sequence
  Synthetic
aauaucuaaguauuugagu

SEQ ID NO: 391615 - RNA, 20 nt, Artificial Sequence
  Synthetic
uaauaucuaaguauuugagu

SEQ ID NO: 391616 - RNA, 21 nt, Artificial Sequence
  Synthetic
uuaauaucuaaguauuugagu

SEQ ID NO: 391617 - RNA, 22 nt, Artificial Sequence
  Synthetic
uuuaauaucuaaguauuugagu

SEQ ID NO: 391618 - RNA, 23 nt, Artificial Sequence
  Synthetic
cuuuaauaucuaaguauuugagu

SEQ ID NO: 391619 - RNA, 24 nt, Artificial Sequence
  Synthetic
ucuuuaauaucuaaguauuugagu

SEQ ID NO: 391620 - RNA, 18 nt, Artificial Sequence
  Synthetic
uaauucaacaaaaauagu

SEQ ID NO: 391621 - RNA, 19 nt, Artificial Sequence
  Synthetic
guaauucaacaaaaauagu

SEQ ID NO: 391622 - RNA, 20 nt, Artificial Sequence
  Synthetic
gguaauucaacaaaaauagu

SEQ ID NO: 391623 - RNA, 21 nt, Artificial Sequence
  Synthetic
agguaauucaacaaaaauagu

SEQ ID NO: 391624 - RNA, 22 nt, Artificial Sequence
  Synthetic
uagguaauucaacaaaaauagu

SEQ ID NO: 391625 - RNA, 23 nt, Artificial Sequence
  Synthetic
uuagguaauucaacaaaaauagu

SEQ ID NO: 391626 - RNA, 24 nt, Artificial Sequence
  Synthetic
auuagguaauucaacaaaaauagu

SEQ ID NO: 391627 - RNA, 18 nt, Artificial Sequence
  Synthetic
uuugcauuaacaaauagu

SEQ ID NO: 391628 - RNA, 19 nt, Artificial Sequence
  Synthetic
guuugcauuaacaaauagu

SEQ ID NO: 391629 - RNA, 20 nt, Artificial Sequence
  Synthetic
aguuugcauuaacaaauagu

SEQ ID NO: 391630 - RNA, 21 nt, Artificial Sequence
  Synthetic
caguuugcauuaacaaauagu

SEQ ID NO: 391631 - RNA, 22 nt, Artificial Sequence
  Synthetic
ccaguuugcauuaacaaauagu

SEQ ID NO: 391632 - RNA, 23 nt, Artificial Sequence
  Synthetic
cccaguuugcauuaacaaauagu

SEQ ID NO: 391633 - RNA, 24 nt, Artificial Sequence
  Synthetic
ucccaguuugcauuaacaaauagu

SEQ ID NO: 391634 - RNA, 18 nt, Artificial Sequence
  Synthetic
acugccagcccaaauagu

SEQ ID NO: 391635 - RNA, 19 nt, Artificial Sequence
  Synthetic
uacugccagcccaaauagu

SEQ ID NO: 391636 - RNA, 20 nt, Artificial Sequence
  Synthetic
guacugccagcccaaauagu

SEQ ID NO: 391637 - RNA, 21 nt, Artificial Sequence
  Synthetic
gguacugccagcccaaauagu

SEQ ID NO: 391638 - RNA, 22 nt, Artificial Sequence
  Synthetic
agguacugccagcccaaauagu

SEQ ID NO: 391639 - RNA, 23 nt, Artificial Sequence
  Synthetic
aagguacugccagcccaaauagu

SEQ ID NO: 391640 - RNA, 24 nt, Artificial Sequence
  Synthetic
uaagguacugccagcccaaauagu

SEQ ID NO: 391641 - RNA, 18 nt, Artificial Sequence
  Synthetic
gaagggcuuucaaauagu

SEQ ID NO: 391642 - RNA, 19 nt, Artificial Sequence
  Synthetic
agaagggcuuucaaauagu

SEQ ID NO: 391643 - RNA, 20 nt, Artificial Sequence
  Synthetic
cagaagggcuuucaaauagu

SEQ ID NO: 391644 - RNA, 21 nt, Artificial Sequence
  Synthetic
ucagaagggcuuucaaauagu

SEQ ID NO: 391645 - RNA, 22 nt, Artificial Sequence
  Synthetic
cucagaagggcuuucaaauagu

SEQ ID NO: 391646 - RNA, 23 nt, Artificial Sequence
  Synthetic
ccucagaagggcuuucaaauagu

SEQ ID NO: 391647 - RNA, 24 nt, Artificial Sequence
  Synthetic
cccucagaagggcuuucaaauagu

SEQ ID NO: 391648 - RNA, 18 nt, Artificial Sequence
  Synthetic
uccaaaccccagaauagu

SEQ ID NO: 391649 - RNA, 19 nt, Artificial Sequence
  Synthetic
auccaaaccccagaauagu

SEQ ID NO: 391650 - RNA, 20 nt, Artificial Sequence
  Synthetic
cauccaaaccccagaauagu

SEQ ID NO: 391651 - RNA, 21 nt, Artificial Sequence
  Synthetic
ucauccaaaccccagaauagu

SEQ ID NO: 391652 - RNA, 22 nt, Artificial Sequence
  Synthetic
aucauccaaaccccagaauagu

SEQ ID NO: 391653 - RNA, 23 nt, Artificial Sequence
  Synthetic
caucauccaaaccccagaauagu

SEQ ID NO: 391654 - RNA, 24 nt, Artificial Sequence
  Synthetic
ccaucauccaaaccccagaauagu

SEQ ID NO: 391655 - RNA, 18 nt, Artificial Sequence
  Synthetic
gaacauguugagaauagu

SEQ ID NO: 391656 - RNA, 19 nt, Artificial Sequence
  Synthetic
ugaacauguugagaauagu

SEQ ID NO: 391657 - RNA, 20 nt, Artificial Sequence
  Synthetic
gugaacauguugagaauagu

SEQ ID NO: 391658 - RNA, 21 nt, Artificial Sequence
  Synthetic
ugugaacauguugagaauagu

SEQ ID NO: 391659 - RNA, 22 nt, Artificial Sequence
  Synthetic
augugaacauguugagaauagu

SEQ ID NO: 391660 - RNA, 23 nt, Artificial Sequence
  Synthetic
gaugugaacauguugagaauagu

SEQ ID NO: 391661 - RNA, 24 nt, Artificial Sequence
  Synthetic
ugaugugaacauguugagaauagu

SEQ ID NO: 391662 - RNA, 18 nt, Artificial Sequence
  Synthetic
ugcccauacaauaauagu

SEQ ID NO: 391663 - RNA, 19 nt, Artificial Sequence
  Synthetic
augcccauacaauaauagu

SEQ ID NO: 391664 - RNA, 20 nt, Artificial Sequence
  Synthetic
gaugcccauacaauaauagu

SEQ ID NO: 391665 - RNA, 21 nt, Artificial Sequence
  Synthetic
agaugcccauacaauaauagu

SEQ ID NO: 391666 - RNA, 22 nt, Artificial Sequence
  Synthetic
uagaugcccauacaauaauagu

SEQ ID NO: 391667 - RNA, 23 nt, Artificial Sequence
  Synthetic
auagaugcccauacaauaauagu

SEQ ID NO: 391668 - RNA, 24 nt, Artificial Sequence
  Synthetic
cauagaugcccauacaauaauagu

SEQ ID NO: 391669 - RNA, 18 nt, Artificial Sequence
  Synthetic
cuacaguacaauaauagu

SEQ ID NO: 391670 - RNA, 19 nt, Artificial Sequence
  Synthetic
acuacaguacaauaauagu

SEQ ID NO: 391671 - RNA, 20 nt, Artificial Sequence
  Synthetic
aacuacaguacaauaauagu

SEQ ID NO: 391672 - RNA, 21 nt, Artificial Sequence
  Synthetic
aaacuacaguacaauaauagu

SEQ ID NO: 391673 - RNA, 22 nt, Artificial Sequence
  Synthetic
caaacuacaguacaauaauagu

SEQ ID NO: 391674 - RNA, 23 nt, Artificial Sequence
  Synthetic
acaaacuacaguacaauaauagu

SEQ ID NO: 391675 - RNA, 24 nt, Artificial Sequence
  Synthetic
gacaaacuacaguacaauaauagu

SEQ ID NO: 391676 - RNA, 18 nt, Artificial Sequence
  Synthetic
agaaucaaauauaauagu

SEQ ID NO: 391677 - RNA, 19 nt, Artificial Sequence
  Synthetic
cagaaucaaauauaauagu

SEQ ID NO: 391678 - RNA, 20 nt, Artificial Sequence
  Synthetic
gcagaaucaaauauaauagu

SEQ ID NO: 391679 - RNA, 21 nt, Artificial Sequence
  Synthetic
ugcagaaucaaauauaauagu

SEQ ID NO: 391680 - RNA, 22 nt, Artificial Sequence
  Synthetic
uugcagaaucaaauauaauagu

SEQ ID NO: 391681 - RNA, 23 nt, Artificial Sequence
  Synthetic
auugcagaaucaaauauaauagu

SEQ ID NO: 391682 - RNA, 24 nt, Artificial Sequence
  Synthetic
uauugcagaaucaaauauaauagu

SEQ ID NO: 391683 - RNA, 18 nt, Artificial Sequence
  Synthetic
cuccuacacaguaauagu

SEQ ID NO: 391684 - RNA, 19 nt, Artificial Sequence
  Synthetic
acuccuacacaguaauagu

SEQ ID NO: 391685 - RNA, 20 nt, Artificial Sequence
  Synthetic
cacuccuacacaguaauagu

SEQ ID NO: 391686 - RNA, 21 nt, Artificial Sequence
  Synthetic
acacuccuacacaguaauagu

SEQ ID NO: 391687 - RNA, 22 nt, Artificial Sequence
  Synthetic
uacacuccuacacaguaauagu

SEQ ID NO: 391688 - RNA, 23 nt, Artificial Sequence
  Synthetic
uuacacuccuacacaguaauagu

SEQ ID NO: 391689 - RNA, 24 nt, Artificial Sequence
  Synthetic
cuuacacuccuacacaguaauagu

SEQ ID NO: 391690 - RNA, 18 nt, Artificial Sequence
  Synthetic
ccuguguauggacauagu

SEQ ID NO: 391691 - RNA, 19 nt, Artificial Sequence
  Synthetic
accuguguauggacauagu

SEQ ID NO: 391692 - RNA, 20 nt, Artificial Sequence
  Synthetic
caccuguguauggacauagu

SEQ ID NO: 391693 - RNA, 21 nt, Artificial Sequence
  Synthetic
acaccuguguauggacauagu

SEQ ID NO: 391694 - RNA, 22 nt, Artificial Sequence
  Synthetic
gacaccuguguauggacauagu

SEQ ID NO: 391695 - RNA, 23 nt, Artificial Sequence
  Synthetic
agacaccuguguauggacauagu

SEQ ID NO: 391696 - RNA, 24 nt, Artificial Sequence
  Synthetic
gagacaccuguguauggacauagu

SEQ ID NO: 391697 - RNA, 18 nt, Artificial Sequence
  Synthetic
acuggaaacauacauagu

SEQ ID NO: 391698 - RNA, 19 nt, Artificial Sequence
  Synthetic
cacuggaaacauacauagu

SEQ ID NO: 391699 - RNA, 20 nt, Artificial Sequence
  Synthetic
ccacuggaaacauacauagu

SEQ ID NO: 391700 - RNA, 21 nt, Artificial Sequence
  Synthetic
uccacuggaaacauacauagu

SEQ ID NO: 391701 - RNA, 22 nt, Artificial Sequence
  Synthetic
uuccacuggaaacauacauagu

SEQ ID NO: 391702 - RNA, 23 nt, Artificial Sequence
  Synthetic
auuccacuggaaacauacauagu

SEQ ID NO: 391703 - RNA, 24 nt, Artificial Sequence
  Synthetic
uauuccacuggaaacauacauagu

SEQ ID NO: 391704 - RNA, 18 nt, Artificial Sequence
  Synthetic
ggucuugcaggccauagu

SEQ ID NO: 391705 - RNA, 19 nt, Artificial Sequence
  Synthetic
uggucuugcaggccauagu

SEQ ID NO: 391706 - RNA, 20 nt, Artificial Sequence
  Synthetic
auggucuugcaggccauagu

SEQ ID NO: 391707 - RNA, 21 nt, Artificial Sequence
  Synthetic
aauggucuugcaggccauagu

SEQ ID NO: 391708 - RNA, 22 nt, Artificial Sequence
  Synthetic
gaauggucuugcaggccauagu

SEQ ID NO: 391709 - RNA, 23 nt, Artificial Sequence
  Synthetic
ugaauggucuugcaggccauagu

SEQ ID NO: 391710 - RNA, 24 nt, Artificial Sequence
  Synthetic
augaauggucuugcaggccauagu

SEQ ID NO: 391711 - RNA, 18 nt, Artificial Sequence
  Synthetic
gguguccuguugcauagu

SEQ ID NO: 391712 - RNA, 19 nt, Artificial Sequence
  Synthetic
ugguguccuguugcauagu

SEQ ID NO: 391713 - RNA, 20 nt, Artificial Sequence
  Synthetic
cugguguccuguugcauagu

SEQ ID NO: 391714 - RNA, 21 nt, Artificial Sequence
  Synthetic
ucugguguccuguugcauagu

SEQ ID NO: 391715 - RNA, 22 nt, Artificial Sequence
  Synthetic
uucugguguccuguugcauagu

SEQ ID NO: 391716 - RNA, 23 nt, Artificial Sequence
  Synthetic
guucugguguccuguugcauagu

SEQ ID NO: 391717 - RNA, 24 nt, Artificial Sequence
  Synthetic
aguucugguguccuguugcauagu

SEQ ID NO: 391718 - RNA, 18 nt, Artificial Sequence
  Synthetic
aaaggagcaaaucauagu

SEQ ID NO: 391719 - RNA, 19 nt, Artificial Sequence
  Synthetic
uaaaggagcaaaucauagu

SEQ ID NO: 391720 - RNA, 20 nt, Artificial Sequence
  Synthetic
uuaaaggagcaaaucauagu

SEQ ID NO: 391721 - RNA, 21 nt, Artificial Sequence
  Synthetic
uuuaaaggagcaaaucauagu

SEQ ID NO: 391722 - RNA, 22 nt, Artificial Sequence
  Synthetic
uuuuaaaggagcaaaucauagu

SEQ ID NO: 391723 - RNA, 23 nt, Artificial Sequence
  Synthetic
guuuuaaaggagcaaaucauagu

SEQ ID NO: 391724 - RNA, 24 nt, Artificial Sequence
  Synthetic
aguuuuaaaggagcaaaucauagu

SEQ ID NO: 391725 - RNA, 18 nt, Artificial Sequence
  Synthetic
uauauauggacucauagu

SEQ ID NO: 391726 - RNA, 19 nt, Artificial Sequence
  Synthetic
auauauauggacucauagu

SEQ ID NO: 391727 - RNA, 20 nt, Artificial Sequence
  Synthetic
uauauauauggacucauagu

SEQ ID NO: 391728 - RNA, 21 nt, Artificial Sequence
  Synthetic
cuauauauauggacucauagu

SEQ ID NO: 391729 - RNA, 22 nt, Artificial Sequence
  Synthetic
ccuauauauauggacucauagu

SEQ ID NO: 391730 - RNA, 23 nt, Artificial Sequence
  Synthetic
accuauauauauggacucauagu

SEQ ID NO: 391731 - RNA, 24 nt, Artificial Sequence
  Synthetic
aaccuauauauauggacucauagu

SEQ ID NO: 391732 - RNA, 18 nt, Artificial Sequence
  Synthetic
gauauaguuucucauagu

SEQ ID NO: 391733 - RNA, 19 nt, Artificial Sequence
  Synthetic
agauauaguuucucauagu

SEQ ID NO: 391734 - RNA, 20 nt, Artificial Sequence
  Synthetic
uagauauaguuucucauagu

SEQ ID NO: 391735 - RNA, 21 nt, Artificial Sequence
  Synthetic
guagauauaguuucucauagu

SEQ ID NO: 391736 - RNA, 22 nt, Artificial Sequence
  Synthetic
aguagauauaguuucucauagu

SEQ ID NO: 391737 - RNA, 23 nt, Artificial Sequence
  Synthetic
aaguagauauaguuucucauagu

SEQ ID NO: 391738 - RNA, 24 nt, Artificial Sequence
  Synthetic
uaaguagauauaguuucucauagu

SEQ ID NO: 391739 - RNA, 18 nt, Artificial Sequence
  Synthetic
uggauaguguuucauagu

SEQ ID NO: 391740 - RNA, 19 nt, Artificial Sequence
  Synthetic
guggauaguguuucauagu

SEQ ID NO: 391741 - RNA, 20 nt, Artificial Sequence
  Synthetic
gguggauaguguuucauagu

SEQ ID NO: 391742 - RNA, 21 nt, Artificial Sequence
  Synthetic
ggguggauaguguuucauagu

SEQ ID NO: 391743 - RNA, 22 nt, Artificial Sequence
  Synthetic
gggguggauaguguuucauagu

SEQ ID NO: 391744 - RNA, 23 nt, Artificial Sequence
  Synthetic
ugggguggauaguguuucauagu

SEQ ID NO: 391745 - RNA, 24 nt, Artificial Sequence
  Synthetic
cugggguggauaguguuucauagu

SEQ ID NO: 391746 - RNA, 18 nt, Artificial Sequence
  Synthetic
uuauaagccaaagauagu

SEQ ID NO: 391747 - RNA, 19 nt, Artificial Sequence
  Synthetic
cuuauaagccaaagauagu

SEQ ID NO: 391748 - RNA, 20 nt, Artificial Sequence
  Synthetic
gcuuauaagccaaagauagu

SEQ ID NO: 391749 - RNA, 21 nt, Artificial Sequence
  Synthetic
agcuuauaagccaaagauagu

SEQ ID NO: 391750 - RNA, 22 nt, Artificial Sequence
  Synthetic
gagcuuauaagccaaagauagu

SEQ ID NO: 391751 - RNA, 23 nt, Artificial Sequence
  Synthetic
ugagcuuauaagccaaagauagu

SEQ ID NO: 391752 - RNA, 24 nt, Artificial Sequence
  Synthetic
gugagcuuauaagccaaagauagu

SEQ ID NO: 391753 - RNA, 18 nt, Artificial Sequence
  Synthetic
cagaaaaccgaagauagu

SEQ ID NO: 391754 - RNA, 19 nt, Artificial Sequence
  Synthetic
acagaaaaccgaagauagu

SEQ ID NO: 391755 - RNA, 20 nt, Artificial Sequence
  Synthetic
aacagaaaaccgaagauagu

SEQ ID NO: 391756 - RNA, 21 nt, Artificial Sequence
  Synthetic
gaacagaaaaccgaagauagu

SEQ ID NO: 391757 - RNA, 22 nt, Artificial Sequence
  Synthetic
ggaacagaaaaccgaagauagu

SEQ ID NO: 391758 - RNA, 23 nt, Artificial Sequence
  Synthetic
aggaacagaaaaccgaagauagu

SEQ ID NO: 391759 - RNA, 24 nt, Artificial Sequence
  Synthetic
caggaacagaaaaccgaagauagu

SEQ ID NO: 391760 - RNA, 18 nt, Artificial Sequence
  Synthetic
ucagcagcuugagauagu

SEQ ID NO: 391761 - RNA, 19 nt, Artificial Sequence
  Synthetic
uucagcagcuugagauagu

SEQ ID NO: 391762 - RNA, 20 nt, Artificial Sequence
  Synthetic
uuucagcagcuugagauagu

SEQ ID NO: 391763 - RNA, 21 nt, Artificial Sequence
  Synthetic
guuucagcagcuugagauagu

SEQ ID NO: 391764 - RNA, 22 nt, Artificial Sequence
  Synthetic
uguuucagcagcuugagauagu

SEQ ID NO: 391765 - RNA, 23 nt, Artificial Sequence
  Synthetic
uuguuucagcagcuugagauagu

SEQ ID NO: 391766 - RNA, 24 nt, Artificial Sequence
  Synthetic
uuuguuucagcagcuugagauagu

SEQ ID NO: 391767 - RNA, 18 nt, Artificial Sequence
  Synthetic
uuacaaggaagggauagu

SEQ ID NO: 391768 - RNA, 19 nt, Artificial Sequence
  Synthetic
auuacaaggaagggauagu

SEQ ID NO: 391769 - RNA, 20 nt, Artificial Sequence
  Synthetic
uauuacaaggaagggauagu

SEQ ID NO: 391770 - RNA, 21 nt, Artificial Sequence
  Synthetic
cuauuacaaggaagggauagu

SEQ ID NO: 391771 - RNA, 22 nt, Artificial Sequence
  Synthetic
ucuauuacaaggaagggauagu

SEQ ID NO: 391772 - RNA, 23 nt, Artificial Sequence
  Synthetic
cucuauuacaaggaagggauagu

SEQ ID NO: 391773 - RNA, 24 nt, Artificial Sequence
  Synthetic
ccucuauuacaaggaagggauagu

SEQ ID NO: 391774 - RNA, 18 nt, Artificial Sequence
  Synthetic
gucagaaaugcugauagu

SEQ ID NO: 391775 - RNA, 19 nt, Artificial Sequence
  Synthetic
agucagaaaugcugauagu

SEQ ID NO: 391776 - RNA, 20 nt, Artificial Sequence
  Synthetic
uagucagaaaugcugauagu

SEQ ID NO: 391777 - RNA, 21 nt, Artificial Sequence
  Synthetic
auagucagaaaugcugauagu

SEQ ID NO: 391778 - RNA, 22 nt, Artificial Sequence
  Synthetic
aauagucagaaaugcugauagu

SEQ ID NO: 391779 - RNA, 23 nt, Artificial Sequence
  Synthetic
gaauagucagaaaugcugauagu

SEQ ID NO: 391780 - RNA, 24 nt, Artificial Sequence
  Synthetic
agaauagucagaaaugcugauagu

SEQ ID NO: 391781 - RNA, 18 nt, Artificial Sequence
  Synthetic
gcagaagcaucugauagu

SEQ ID NO: 391782 - RNA, 19 nt, Artificial Sequence
  Synthetic
ggcagaagcaucugauagu

SEQ ID NO: 391783 - RNA, 20 nt, Artificial Sequence
  Synthetic
uggcagaagcaucugauagu

SEQ ID NO: 391784 - RNA, 21 nt, Artificial Sequence
  Synthetic
cuggcagaagcaucugauagu

SEQ ID NO: 391785 - RNA, 22 nt, Artificial Sequence
  Synthetic
ucuggcagaagcaucugauagu

SEQ ID NO: 391786 - RNA, 23 nt, Artificial Sequence
  Synthetic
cucuggcagaagcaucugauagu

SEQ ID NO: 391787 - RNA, 24 nt, Artificial Sequence
  Synthetic
ucucuggcagaagcaucugauagu

SEQ ID NO: 391788 - RNA, 18 nt, Artificial Sequence
  Synthetic
aucugugauggugauagu

SEQ ID NO: 391789 - RNA, 19 nt, Artificial Sequence
  Synthetic
uaucugugauggugauagu

SEQ ID NO: 391790 - RNA, 20 nt, Artificial Sequence
  Synthetic
uuaucugugauggugauagu

SEQ ID NO: 391791 - RNA, 21 nt, Artificial Sequence
  Synthetic
uuuaucugugauggugauagu

SEQ ID NO: 391792 - RNA, 22 nt, Artificial Sequence
  Synthetic
guuuaucugugauggugauagu

SEQ ID NO: 391793 - RNA, 23 nt, Artificial Sequence
  Synthetic
cguuuaucugugauggugauagu

SEQ ID NO: 391794 - RNA, 24 nt, Artificial Sequence
  Synthetic
ccguuuaucugugauggugauagu

SEQ ID NO: 391795 - RNA, 18 nt, Artificial Sequence
  Synthetic
auauacauaugugauagu

SEQ ID NO: 391796 - RNA, 19 nt, Artificial Sequence
  Synthetic
aauauacauaugugauagu

SEQ ID NO: 391797 - RNA, 20 nt, Artificial Sequence
  Synthetic
uaauauacauaugugauagu

SEQ ID NO: 391798 - RNA, 21 nt, Artificial Sequence
  Synthetic
guaauauacauaugugauagu

SEQ ID NO: 391799 - RNA, 22 nt, Artificial Sequence
  Synthetic
aguaauauacauaugugauagu

SEQ ID NO: 391800 - RNA, 23 nt, Artificial Sequence
  Synthetic
aaguaauauacauaugugauagu

SEQ ID NO: 391801 - RNA, 24 nt, Artificial Sequence
  Synthetic
uaaguaauauacauaugugauagu

SEQ ID NO: 391802 - RNA, 18 nt, Artificial Sequence
  Synthetic
ugucuguuucuugauagu

SEQ ID NO: 391803 - RNA, 19 nt, Artificial Sequence
  Synthetic
augucuguuucuugauagu

SEQ ID NO: 391804 - RNA, 20 nt, Artificial Sequence
  Synthetic
aaugucuguuucuugauagu

SEQ ID NO: 391805 - RNA, 21 nt, Artificial Sequence
  Synthetic
gaaugucuguuucuugauagu

SEQ ID NO: 391806 - RNA, 22 nt, Artificial Sequence
  Synthetic
agaaugucuguuucuugauagu

SEQ ID NO: 391807 - RNA, 23 nt, Artificial Sequence
  Synthetic
aagaaugucuguuucuugauagu

SEQ ID NO: 391808 - RNA, 24 nt, Artificial Sequence
  Synthetic
gaagaaugucuguuucuugauagu

SEQ ID NO: 391809 - RNA, 18 nt, Artificial Sequence
  Synthetic
aauccagauaaauauagu

SEQ ID NO: 391810 - RNA, 19 nt, Artificial Sequence
  Synthetic
gaauccagauaaauauagu

SEQ ID NO: 391811 - RNA, 20 nt, Artificial Sequence
  Synthetic
agaauccagauaaauauagu

SEQ ID NO: 391812 - RNA, 21 nt, Artificial Sequence
  Synthetic
aagaauccagauaaauauagu

SEQ ID NO: 391813 - RNA, 22 nt, Artificial Sequence
  Synthetic
uaagaauccagauaaauauagu

SEQ ID NO: 391814 - RNA, 23 nt, Artificial Sequence
  Synthetic
auaagaauccagauaaauauagu

SEQ ID NO: 391815 - RNA, 24 nt, Artificial Sequence
  Synthetic
uauaagaauccagauaaauauagu

SEQ ID NO: 391816 - RNA, 18 nt, Artificial Sequence
  Synthetic
caacagaaacaauauagu

SEQ ID NO: 391817 - RNA, 19 nt, Artificial Sequence
  Synthetic
acaacagaaacaauauagu

SEQ ID NO: 391818 - RNA, 20 nt, Artificial Sequence
  Synthetic
uacaacagaaacaauauagu

SEQ ID NO: 391819 - RNA, 21 nt, Artificial Sequence
  Synthetic
cuacaacagaaacaauauagu

SEQ ID NO: 391820 - RNA, 22 nt, Artificial Sequence
  Synthetic
ucuacaacagaaacaauauagu

SEQ ID NO: 391821 - RNA, 23 nt, Artificial Sequence
  Synthetic
uucuacaacagaaacaauauagu

SEQ ID NO: 391822 - RNA, 24 nt, Artificial Sequence
  Synthetic
cuucuacaacagaaacaauauagu

SEQ ID NO: 391823 - RNA, 18 nt, Artificial Sequence
  Synthetic
gguaagauuucauauagu

SEQ ID NO: 391824 - RNA, 19 nt, Artificial Sequence
  Synthetic
ggguaagauuucauauagu

SEQ ID NO: 391825 - RNA, 20 nt, Artificial Sequence
  Synthetic
uggguaagauuucauauagu

SEQ ID NO: 391826 - RNA, 21 nt, Artificial Sequence
  Synthetic
auggguaagauuucauauagu

SEQ ID NO: 391827 - RNA, 22 nt, Artificial Sequence
  Synthetic
uauggguaagauuucauauagu

SEQ ID NO: 391828 - RNA, 23 nt, Artificial Sequence
  Synthetic
cuauggguaagauuucauauagu

SEQ ID NO: 391829 - RNA, 24 nt, Artificial Sequence
  Synthetic
ucuauggguaagauuucauauagu

SEQ ID NO: 391830 - RNA, 18 nt, Artificial Sequence
  Synthetic
ccuucucauggauauagu

SEQ ID NO: 391831 - RNA, 19 nt, Artificial Sequence
  Synthetic
gccuucucauggauauagu

SEQ ID NO: 391832 - RNA, 20 nt, Artificial Sequence
  Synthetic
ugccuucucauggauauagu

SEQ ID NO: 391833 - RNA, 21 nt, Artificial Sequence
  Synthetic
cugccuucucauggauauagu

SEQ ID NO: 391834 - RNA, 22 nt, Artificial Sequence
  Synthetic
acugccuucucauggauauagu

SEQ ID NO: 391835 - RNA, 23 nt, Artificial Sequence
  Synthetic
cacugccuucucauggauauagu

SEQ ID NO: 391836 - RNA, 24 nt, Artificial Sequence
  Synthetic
ccacugccuucucauggauauagu

SEQ ID NO: 391837 - RNA, 18 nt, Artificial Sequence
  Synthetic
ugcuguaaaauauauagu

SEQ ID NO: 391838 - RNA, 19 nt, Artificial Sequence
  Synthetic
augcuguaaaauauauagu

SEQ ID NO: 391839 - RNA, 20 nt, Artificial Sequence
  Synthetic
aaugcuguaaaauauauagu

SEQ ID NO: 391840 - RNA, 21 nt, Artificial Sequence
  Synthetic
aaaugcuguaaaauauauagu

SEQ ID NO: 391841 - RNA, 22 nt, Artificial Sequence
  Synthetic
aaaaugcuguaaaauauauagu

SEQ ID NO: 391842 - RNA, 23 nt, Artificial Sequence
  Synthetic
aaaaaugcuguaaaauauauagu

SEQ ID NO: 391843 - RNA, 24 nt, Artificial Sequence
  Synthetic
aaaaaaugcuguaaaauauauagu

SEQ ID NO: 391844 - RNA, 18 nt, Artificial Sequence
  Synthetic
ucuuauacacacuauagu

SEQ ID NO: 391845 - RNA, 19 nt, Artificial Sequence
  Synthetic
uucuuauacacacuauagu

SEQ ID NO: 391846 - RNA, 20 nt, Artificial Sequence
  Synthetic
uuucuuauacacacuauagu

SEQ ID NO: 391847 - RNA, 21 nt, Artificial Sequence
  Synthetic
guuucuuauacacacuauagu

SEQ ID NO: 391848 - RNA, 22 nt, Artificial Sequence
  Synthetic
uguuucuuauacacacuauagu

SEQ ID NO: 391849 - RNA, 23 nt, Artificial Sequence
  Synthetic
auguuucuuauacacacuauagu

SEQ ID NO: 391850 - RNA, 24 nt, Artificial Sequence
  Synthetic
aauguuucuuauacacacuauagu

SEQ ID NO: 391851 - RNA, 18 nt, Artificial Sequence
  Synthetic
agguauacugccuauagu

SEQ ID NO: 391852 - RNA, 19 nt, Artificial Sequence
  Synthetic
aagguauacugccuauagu

SEQ ID NO: 391853 - RNA, 20 nt, Artificial Sequence
  Synthetic
uaagguauacugccuauagu

SEQ ID NO: 391854 - RNA, 21 nt, Artificial Sequence
  Synthetic
auaagguauacugccuauagu

SEQ ID NO: 391855 - RNA, 22 nt, Artificial Sequence
  Synthetic
aauaagguauacugccuauagu

SEQ ID NO: 391856 - RNA, 23 nt, Artificial Sequence
  Synthetic
gaauaagguauacugccuauagu

SEQ ID NO: 391857 - RNA, 24 nt, Artificial Sequence
  Synthetic
ugaauaagguauacugccuauagu

SEQ ID NO: 391858 - RNA, 18 nt, Artificial Sequence
  Synthetic
gcuaugcuaagcuauagu

SEQ ID NO: 391859 - RNA, 19 nt, Artificial Sequence
  Synthetic
ggcuaugcuaagcuauagu

SEQ ID NO: 391860 - RNA, 20 nt, Artificial Sequence
  Synthetic
aggcuaugcuaagcuauagu

SEQ ID NO: 391861 - RNA, 21 nt, Artificial Sequence
  Synthetic
uaggcuaugcuaagcuauagu

SEQ ID NO: 391862 - RNA, 22 nt, Artificial Sequence
  Synthetic
uuaggcuaugcuaagcuauagu

SEQ ID NO: 391863 - RNA, 23 nt, Artificial Sequence
  Synthetic
guuaggcuaugcuaagcuauagu

SEQ ID NO: 391864 - RNA, 24 nt, Artificial Sequence
  Synthetic
gguuaggcuaugcuaagcuauagu

SEQ ID NO: 391865 - RNA, 18 nt, Artificial Sequence
  Synthetic
aauauuuggaaguauagu

SEQ ID NO: 391866 - RNA, 19 nt, Artificial Sequence
  Synthetic
aaauauuuggaaguauagu

SEQ ID NO: 391867 - RNA, 20 nt, Artificial Sequence
  Synthetic
uaaauauuuggaaguauagu

SEQ ID NO: 391868 - RNA, 21 nt, Artificial Sequence
  Synthetic
auaaauauuuggaaguauagu

SEQ ID NO: 391869 - RNA, 22 nt, Artificial Sequence
  Synthetic
uauaaauauuuggaaguauagu

SEQ ID NO: 391870 - RNA, 23 nt, Artificial Sequence
  Synthetic
auauaaauauuuggaaguauagu

SEQ ID NO: 391871 - RNA, 24 nt, Artificial Sequence
  Synthetic
cauauaaauauuuggaaguauagu

SEQ ID NO: 391872 - RNA, 18 nt, Artificial Sequence
  Synthetic
cuuuccuuccaguauagu

SEQ ID NO: 391873 - RNA, 19 nt, Artificial Sequence
  Synthetic
ccuuuccuuccaguauagu

SEQ ID NO: 391874 - RNA, 20 nt, Artificial Sequence
  Synthetic
uccuuuccuuccaguauagu

SEQ ID NO: 391875 - RNA, 21 nt, Artificial Sequence
  Synthetic
uuccuuuccuuccaguauagu

SEQ ID NO: 391876 - RNA, 22 nt, Artificial Sequence
  Synthetic
uuuccuuuccuuccaguauagu

SEQ ID NO: 391877 - RNA, 23 nt, Artificial Sequence
  Synthetic
uuuuccuuuccuuccaguauagu

SEQ ID NO: 391878 - RNA, 24 nt, Artificial Sequence
  Synthetic
auuuuccuuuccuuccaguauagu

SEQ ID NO: 391879 - RNA, 18 nt, Artificial Sequence
  Synthetic
uguaaauuggaguauagu

SEQ ID NO: 391880 - RNA, 19 nt, Artificial Sequence
  Synthetic
guguaaauuggaguauagu

SEQ ID NO: 391881 - RNA, 20 nt, Artificial Sequence
  Synthetic
uguguaaauuggaguauagu

SEQ ID NO: 391882 - RNA, 21 nt, Artificial Sequence
  Synthetic
guguguaaauuggaguauagu

SEQ ID NO: 391883 - RNA, 22 nt, Artificial Sequence
  Synthetic
gguguguaaauuggaguauagu

SEQ ID NO: 391884 - RNA, 23 nt, Artificial Sequence
  Synthetic
ugguguguaaauuggaguauagu

SEQ ID NO: 391885 - RNA, 24 nt, Artificial Sequence
  Synthetic
gugguguguaaauuggaguauagu

SEQ ID NO: 391886 - RNA, 18 nt, Artificial Sequence
  Synthetic
guagcauuauaguauagu

SEQ ID NO: 391887 - RNA, 19 nt, Artificial Sequence
  Synthetic
uguagcauuauaguauagu

SEQ ID NO: 391888 - RNA, 20 nt, Artificial Sequence
  Synthetic
cuguagcauuauaguauagu

SEQ ID NO: 391889 - RNA, 21 nt, Artificial Sequence
  Synthetic
acuguagcauuauaguauagu

SEQ ID NO: 391890 - RNA, 22 nt, Artificial Sequence
  Synthetic
uacuguagcauuauaguauagu

SEQ ID NO: 391891 - RNA, 23 nt, Artificial Sequence
  Synthetic
uuacuguagcauuauaguauagu

SEQ ID NO: 391892 - RNA, 24 nt, Artificial Sequence
  Synthetic
guuacuguagcauuauaguauagu

SEQ ID NO: 391893 - RNA, 18 nt, Artificial Sequence
  Synthetic
guagccuuguaguauagu

SEQ ID NO: 391894 - RNA, 19 nt, Artificial Sequence
  Synthetic
cguagccuuguaguauagu

SEQ ID NO: 391895 - RNA, 20 nt, Artificial Sequence
  Synthetic
ccguagccuuguaguauagu

SEQ ID NO: 391896 - RNA, 21 nt, Artificial Sequence
  Synthetic
accguagccuuguaguauagu

SEQ ID NO: 391897 - RNA, 22 nt, Artificial Sequence
  Synthetic
uaccguagccuuguaguauagu

SEQ ID NO: 391898 - RNA, 23 nt, Artificial Sequence
  Synthetic
uuaccguagccuuguaguauagu

SEQ ID NO: 391899 - RNA, 24 nt, Artificial Sequence
  Synthetic
guuaccguagccuuguaguauagu

SEQ ID NO: 391900 - RNA, 19 nt, Artificial Sequence
  Synthetic
uguagccuuguaguauagu

SEQ ID NO: 391901 - RNA, 20 nt, Artificial Sequence
  Synthetic
cuguagccuuguaguauagu

SEQ ID NO: 391902 - RNA, 24 nt, Artificial Sequence
  Synthetic
cuuacuguagccuuguaguauagu

SEQ ID NO: 391903 - RNA, 18 nt, Artificial Sequence
  Synthetic
gcuauccuuuaguauagu

SEQ ID NO: 391904 - RNA, 19 nt, Artificial Sequence
  Synthetic
ugcuauccuuuaguauagu

SEQ ID NO: 391905 - RNA, 20 nt, Artificial Sequence
  Synthetic
augcuauccuuuaguauagu

SEQ ID NO: 391906 - RNA, 21 nt, Artificial Sequence
  Synthetic
aaugcuauccuuuaguauagu

SEQ ID NO: 391907 - RNA, 22 nt, Artificial Sequence
  Synthetic
aaaugcuauccuuuaguauagu

SEQ ID NO: 391908 - RNA, 23 nt, Artificial Sequence
  Synthetic
caaaugcuauccuuuaguauagu

SEQ ID NO: 391909 - RNA, 24 nt, Artificial Sequence
  Synthetic
ucaaaugcuauccuuuaguauagu

SEQ ID NO: 391910 - RNA, 18 nt, Artificial Sequence
  Synthetic
uacucuuucauuuauagu

SEQ ID NO: 391911 - RNA, 19 nt, Artificial Sequence
  Synthetic
cuacucuuucauuuauagu

SEQ ID NO: 391912 - RNA, 20 nt, Artificial Sequence
  Synthetic
gcuacucuuucauuuauagu

SEQ ID NO: 391913 - RNA, 21 nt, Artificial Sequence
  Synthetic
ugcuacucuuucauuuauagu

SEQ ID NO: 391914 - RNA, 22 nt, Artificial Sequence
  Synthetic
uugcuacucuuucauuuauagu

SEQ ID NO: 391915 - RNA, 23 nt, Artificial Sequence
  Synthetic
cuugcuacucuuucauuuauagu

SEQ ID NO: 391916 - RNA, 24 nt, Artificial Sequence
  Synthetic
acuugcuacucuuucauuuauagu

SEQ ID NO: 391917 - RNA, 18 nt, Artificial Sequence
  Synthetic
auuuacuagcaaacuagu

SEQ ID NO: 391918 - RNA, 19 nt, Artificial Sequence
  Synthetic
aauuuacuagcaaacuagu

SEQ ID NO: 391919 - RNA, 20 nt, Artificial Sequence
  Synthetic
caauuuacuagcaaacuagu

SEQ ID NO: 391920 - RNA, 21 nt, Artificial Sequence
  Synthetic
gcaauuuacuagcaaacuagu

SEQ ID NO: 391921 - RNA, 22 nt, Artificial Sequence
  Synthetic
ugcaauuuacuagcaaacuagu

SEQ ID NO: 391922 - RNA, 23 nt, Artificial Sequence
  Synthetic
augcaauuuacuagcaaacuagu

SEQ ID NO: 391923 - RNA, 24 nt, Artificial Sequence
  Synthetic
aaugcaauuuacuagcaaacuagu

SEQ ID NO: 391924 - RNA, 18 nt, Artificial Sequence
  Synthetic
uacauacuggaaacuagu

SEQ ID NO: 391925 - RNA, 19 nt, Artificial Sequence
  Synthetic
guacauacuggaaacuagu

SEQ ID NO: 391926 - RNA, 20 nt, Artificial Sequence
  Synthetic
aguacauacuggaaacuagu

SEQ ID NO: 391927 - RNA, 21 nt, Artificial Sequence
  Synthetic
caguacauacuggaaacuagu

SEQ ID NO: 391928 - RNA, 22 nt, Artificial Sequence
  Synthetic
acaguacauacuggaaacuagu

SEQ ID NO: 391929 - RNA, 23 nt, Artificial Sequence
  Synthetic
aacaguacauacuggaaacuagu

SEQ ID NO: 391930 - RNA, 24 nt, Artificial Sequence
  Synthetic
caacaguacauacuggaaacuagu

SEQ ID NO: 391931 - RNA, 18 nt, Artificial Sequence
  Synthetic
ucaggauaaggaacuagu

SEQ ID NO: 391932 - RNA, 19 nt, Artificial Sequence
  Synthetic
gucaggauaaggaacuagu

SEQ ID NO: 391933 - RNA, 20 nt, Artificial Sequence
  Synthetic
agucaggauaaggaacuagu

SEQ ID NO: 391934 - RNA, 21 nt, Artificial Sequence
  Synthetic
gagucaggauaaggaacuagu

SEQ ID NO: 391935 - RNA, 22 nt, Artificial Sequence
  Synthetic
ugagucaggauaaggaacuagu

SEQ ID NO: 391936 - RNA, 23 nt, Artificial Sequence
  Synthetic
augagucaggauaaggaacuagu

SEQ ID NO: 391937 - RNA, 24 nt, Artificial Sequence
  Synthetic
aaugagucaggauaaggaacuagu

SEQ ID NO: 391938 - RNA, 18 nt, Artificial Sequence
  Synthetic
gucuaggaaaacacuagu

SEQ ID NO: 391939 - RNA, 19 nt, Artificial Sequence
  Synthetic
agucuaggaaaacacuagu

SEQ ID NO: 391940 - RNA, 20 nt, Artificial Sequence
  Synthetic
uagucuaggaaaacacuagu

SEQ ID NO: 391941 - RNA, 21 nt, Artificial Sequence
  Synthetic
cuagucuaggaaaacacuagu

SEQ ID NO: 391942 - RNA, 22 nt, Artificial Sequence
  Synthetic
acuagucuaggaaaacacuagu

SEQ ID NO: 391943 - RNA, 23 nt, Artificial Sequence
  Synthetic
cacuagucuaggaaaacacuagu

SEQ ID NO: 391944 - RNA, 24 nt, Artificial Sequence
  Synthetic
acacuagucuaggaaaacacuagu

SEQ ID NO: 391945 - RNA, 18 nt, Artificial Sequence
  Synthetic
uccuccaagguuacuagu

SEQ ID NO: 391946 - RNA, 19 nt, Artificial Sequence
  Synthetic
uuccuccaagguuacuagu

SEQ ID NO: 391947 - RNA, 20 nt, Artificial Sequence
  Synthetic
auuccuccaagguuacuagu

SEQ ID NO: 391948 - RNA, 21 nt, Artificial Sequence
  Synthetic
uauuccuccaagguuacuagu

SEQ ID NO: 391949 - RNA, 22 nt, Artificial Sequence
  Synthetic
auauuccuccaagguuacuagu

SEQ ID NO: 391950 - RNA, 23 nt, Artificial Sequence
  Synthetic
uauauuccuccaagguuacuagu

SEQ ID NO: 391951 - RNA, 24 nt, Artificial Sequence
  Synthetic
cuauauuccuccaagguuacuagu

SEQ ID NO: 391952 - RNA, 18 nt, Artificial Sequence
  Synthetic
cucaugacuuaaccuagu

SEQ ID NO: 391953 - RNA, 19 nt, Artificial Sequence
  Synthetic
ucucaugacuuaaccuagu

SEQ ID NO: 391954 - RNA, 20 nt, Artificial Sequence
  Synthetic
gucucaugacuuaaccuagu

SEQ ID NO: 391955 - RNA, 21 nt, Artificial Sequence
  Synthetic
ugucucaugacuuaaccuagu

SEQ ID NO: 391956 - RNA, 22 nt, Artificial Sequence
  Synthetic
gugucucaugacuuaaccuagu

SEQ ID NO: 391957 - RNA, 23 nt, Artificial Sequence
  Synthetic
ugugucucaugacuuaaccuagu

SEQ ID NO: 391958 - RNA, 24 nt, Artificial Sequence
  Synthetic
gugugucucaugacuuaaccuagu

SEQ ID NO: 391959 - RNA, 18 nt, Artificial Sequence
  Synthetic
guggcuagaggcccuagu

SEQ ID NO: 391960 - RNA, 19 nt, Artificial Sequence
  Synthetic
gguggcuagaggcccuagu

SEQ ID NO: 391961 - RNA, 20 nt, Artificial Sequence
  Synthetic
cgguggcuagaggcccuagu

SEQ ID NO: 391962 - RNA, 21 nt, Artificial Sequence
  Synthetic
acgguggcuagaggcccuagu

SEQ ID NO: 391963 - RNA, 22 nt, Artificial Sequence
  Synthetic
gacgguggcuagaggcccuagu

SEQ ID NO: 391964 - RNA, 23 nt, Artificial Sequence
  Synthetic
ggacgguggcuagaggcccuagu

SEQ ID NO: 391965 - RNA, 24 nt, Artificial Sequence
  Synthetic
aggacgguggcuagaggcccuagu

SEQ ID NO: 391966 - RNA, 18 nt, Artificial Sequence
  Synthetic
cacuaggaggucccuagu

SEQ ID NO: 391967 - RNA, 19 nt, Artificial Sequence
  Synthetic
gcacuaggaggucccuagu

SEQ ID NO: 391968 - RNA, 20 nt, Artificial Sequence
  Synthetic
ugcacuaggaggucccuagu

SEQ ID NO: 391969 - RNA, 21 nt, Artificial Sequence
  Synthetic
augcacuaggaggucccuagu

SEQ ID NO: 391970 - RNA, 22 nt, Artificial Sequence
  Synthetic
caugcacuaggaggucccuagu

SEQ ID NO: 391971 - RNA, 23 nt, Artificial Sequence
  Synthetic
ccaugcacuaggaggucccuagu

SEQ ID NO: 391972 - RNA, 24 nt, Artificial Sequence
  Synthetic
cccaugcacuaggaggucccuagu

SEQ ID NO: 391973 - RNA, 18 nt, Artificial Sequence
  Synthetic
aauaaaugaccuccuagu

SEQ ID NO: 391974 - RNA, 19 nt, Artificial Sequence
  Synthetic
aaauaaaugaccuccuagu

SEQ ID NO: 391975 - RNA, 20 nt, Artificial Sequence
  Synthetic
aaaauaaaugaccuccuagu

SEQ ID NO: 391976 - RNA, 21 nt, Artificial Sequence
  Synthetic
gaaaauaaaugaccuccuagu

SEQ ID NO: 391977 - RNA, 22 nt, Artificial Sequence
  Synthetic
agaaaauaaaugaccuccuagu

SEQ ID NO: 391978 - RNA, 23 nt, Artificial Sequence
  Synthetic
aagaaaauaaaugaccuccuagu

SEQ ID NO: 391979 - RNA, 24 nt, Artificial Sequence
  Synthetic
aaagaaaauaaaugaccuccuagu

SEQ ID NO: 391980 - RNA, 18 nt, Artificial Sequence
  Synthetic
cagcagauuuuuccuagu

SEQ ID NO: 391981 - RNA, 19 nt, Artificial Sequence
  Synthetic
ucagcagauuuuuccuagu

SEQ ID NO: 391982 - RNA, 20 nt, Artificial Sequence
  Synthetic
aucagcagauuuuuccuagu

SEQ ID NO: 391983 - RNA, 21 nt, Artificial Sequence
  Synthetic
aaucagcagauuuuuccuagu

SEQ ID NO: 391984 - RNA, 22 nt, Artificial Sequence
  Synthetic
gaaucagcagauuuuuccuagu

SEQ ID NO: 391985 - RNA, 23 nt, Artificial Sequence
  Synthetic
ugaaucagcagauuuuuccuagu

SEQ ID NO: 391986 - RNA, 24 nt, Artificial Sequence
  Synthetic
gugaaucagcagauuuuuccuagu

SEQ ID NO: 391987 - RNA, 18 nt, Artificial Sequence
  Synthetic
uaacacaagaaagcuagu

SEQ ID NO: 391988 - RNA, 19 nt, Artificial Sequence
  Synthetic
cuaacacaagaaagcuagu

SEQ ID NO: 391989 - RNA, 20 nt, Artificial Sequence
  Synthetic
acuaacacaagaaagcuagu

SEQ ID NO: 391990 - RNA, 21 nt, Artificial Sequence
  Synthetic
aacuaacacaagaaagcuagu

SEQ ID NO: 391991 - RNA, 22 nt, Artificial Sequence
  Synthetic
gaacuaacacaagaaagcuagu

SEQ ID NO: 391992 - RNA, 23 nt, Artificial Sequence
  Synthetic
agaacuaacacaagaaagcuagu

SEQ ID NO: 391993 - RNA, 24 nt, Artificial Sequence
  Synthetic
cagaacuaacacaagaaagcuagu

SEQ ID NO: 391994 - RNA, 18 nt, Artificial Sequence
  Synthetic
aaauaaauuugagcuagu

SEQ ID NO: 391995 - RNA, 19 nt, Artificial Sequence
  Synthetic
aaaauaaauuugagcuagu

SEQ ID NO: 391996 - RNA, 20 nt, Artificial Sequence
  Synthetic
caaaauaaauuugagcuagu

SEQ ID NO: 391997 - RNA, 21 nt, Artificial Sequence
  Synthetic
ucaaaauaaauuugagcuagu

SEQ ID NO: 391998 - RNA, 22 nt, Artificial Sequence
  Synthetic
aucaaaauaaauuugagcuagu

SEQ ID NO: 391999 - RNA, 23 nt, Artificial Sequence
  Synthetic
aaucaaaauaaauuugagcuagu

SEQ ID NO: 392000 - RNA, 24 nt, Artificial Sequence
  Synthetic
aaaucaaaauaaauuugagcuagu

SEQ ID NO: 392001 - RNA, 18 nt, Artificial Sequence
  Synthetic
gguauuguaauagcuagu

SEQ ID NO: 392002 - RNA, 19 nt, Artificial Sequence
  Synthetic
ugguauuguaauagcuagu

SEQ ID NO: 392003 - RNA, 20 nt, Artificial Sequence
  Synthetic
gugguauuguaauagcuagu

SEQ ID NO: 392004 - RNA, 21 nt, Artificial Sequence
  Synthetic
agugguauuguaauagcuagu

SEQ ID NO: 392005 - RNA, 22 nt, Artificial Sequence
  Synthetic
aagugguauuguaauagcuagu

SEQ ID NO: 392006 - RNA, 23 nt, Artificial Sequence
  Synthetic
uaagugguauuguaauagcuagu

SEQ ID NO: 392007 - RNA, 24 nt, Artificial Sequence
  Synthetic
uuaagugguauuguaauagcuagu

SEQ ID NO: 392008 - RNA, 18 nt, Artificial Sequence
  Synthetic
guuaagaaaaaugcuagu

SEQ ID NO: 392009 - RNA, 19 nt, Artificial Sequence
  Synthetic
uguuaagaaaaaugcuagu

SEQ ID NO: 392010 - RNA, 20 nt, Artificial Sequence
  Synthetic
auguuaagaaaaaugcuagu

SEQ ID NO: 392011 - RNA, 21 nt, Artificial Sequence
  Synthetic
gauguuaagaaaaaugcuagu

SEQ ID NO: 392012 - RNA, 22 nt, Artificial Sequence
  Synthetic
agauguuaagaaaaaugcuagu

SEQ ID NO: 392013 - RNA, 23 nt, Artificial Sequence
  Synthetic
cagauguuaagaaaaaugcuagu

SEQ ID NO: 392014 - RNA, 24 nt, Artificial Sequence
  Synthetic
ccagauguuaagaaaaaugcuagu

SEQ ID NO: 392015 - RNA, 18 nt, Artificial Sequence
  Synthetic
uuauuuggacaugcuagu

SEQ ID NO: 392016 - RNA, 19 nt, Artificial Sequence
  Synthetic
uuuauuuggacaugcuagu

SEQ ID NO: 392017 - RNA, 20 nt, Artificial Sequence
  Synthetic
cuuuauuuggacaugcuagu

SEQ ID NO: 392018 - RNA, 21 nt, Artificial Sequence
  Synthetic
ucuuuauuuggacaugcuagu

SEQ ID NO: 392019 - RNA, 22 nt, Artificial Sequence
  Synthetic
aucuuuauuuggacaugcuagu

SEQ ID NO: 392020 - RNA, 23 nt, Artificial Sequence
  Synthetic
aaucuuuauuuggacaugcuagu

SEQ ID NO: 392021 - RNA, 24 nt, Artificial Sequence
  Synthetic
gaaucuuuauuuggacaugcuagu

SEQ ID NO: 392022 - RNA, 18 nt, Artificial Sequence
  Synthetic
uuauaaaaccuugcuagu

SEQ ID NO: 392023 - RNA, 19 nt, Artificial Sequence
  Synthetic
guuauaaaaccuugcuagu

SEQ ID NO: 392024 - RNA, 20 nt, Artificial Sequence
  Synthetic
aguuauaaaaccuugcuagu

SEQ ID NO: 392025 - RNA, 21 nt, Artificial Sequence
  Synthetic
uaguuauaaaaccuugcuagu

SEQ ID NO: 392026 - RNA, 22 nt, Artificial Sequence
  Synthetic
uuaguuauaaaaccuugcuagu

SEQ ID NO: 392027 - RNA, 23 nt, Artificial Sequence
  Synthetic
cuuaguuauaaaaccuugcuagu

SEQ ID NO: 392028 - RNA, 24 nt, Artificial Sequence
  Synthetic
acuuaguuauaaaaccuugcuagu

SEQ ID NO: 392029 - RNA, 18 nt, Artificial Sequence
  Synthetic
aguucacggguugcuagu

SEQ ID NO: 392030 - RNA, 19 nt, Artificial Sequence
  Synthetic
aaguucacggguugcuagu

SEQ ID NO: 392031 - RNA, 20 nt, Artificial Sequence
  Synthetic
uaaguucacggguugcuagu

SEQ ID NO: 392032 - RNA, 21 nt, Artificial Sequence
  Synthetic
uuaaguucacggguugcuagu

SEQ ID NO: 392033 - RNA, 22 nt, Artificial Sequence
  Synthetic
guuaaguucacggguugcuagu

SEQ ID NO: 392034 - RNA, 23 nt, Artificial Sequence
  Synthetic
gguuaaguucacggguugcuagu

SEQ ID NO: 392035 - RNA, 24 nt, Artificial Sequence
  Synthetic
agguuaaguucacggguugcuagu

SEQ ID NO: 392036 - RNA, 18 nt, Artificial Sequence
  Synthetic
gccccacuggcaucuagu

SEQ ID NO: 392037 - RNA, 19 nt, Artificial Sequence
  Synthetic
agccccacuggcaucuagu

SEQ ID NO: 392038 - RNA, 20 nt, Artificial Sequence
  Synthetic
cagccccacuggcaucuagu

SEQ ID NO: 392039 - RNA, 21 nt, Artificial Sequence
  Synthetic
ccagccccacuggcaucuagu

SEQ ID NO: 392040 - RNA, 22 nt, Artificial Sequence
  Synthetic
cccagccccacuggcaucuagu

SEQ ID NO: 392041 - RNA, 23 nt, Artificial Sequence
  Synthetic
ucccagccccacuggcaucuagu

SEQ ID NO: 392042 - RNA, 24 nt, Artificial Sequence
  Synthetic
uucccagccccacuggcaucuagu

SEQ ID NO: 392043 - RNA, 18 nt, Artificial Sequence
  Synthetic
uccuuucuuggaucuagu

SEQ ID NO: 392044 - RNA, 19 nt, Artificial Sequence
  Synthetic
uuccuuucuuggaucuagu

SEQ ID NO: 392045 - RNA, 20 nt, Artificial Sequence
  Synthetic
uuuccuuucuuggaucuagu

SEQ ID NO: 392046 - RNA, 21 nt, Artificial Sequence
  Synthetic
auuuccuuucuuggaucuagu

SEQ ID NO: 392047 - RNA, 22 nt, Artificial Sequence
  Synthetic
aauuuccuuucuuggaucuagu

SEQ ID NO: 392048 - RNA, 23 nt, Artificial Sequence
  Synthetic
aaauuuccuuucuuggaucuagu

SEQ ID NO: 392049 - RNA, 24 nt, Artificial Sequence
  Synthetic
caaauuuccuuucuuggaucuagu

SEQ ID NO: 392050 - RNA, 18 nt, Artificial Sequence
  Synthetic
aauuuauauuuaucuagu

SEQ ID NO: 392051 - RNA, 19 nt, Artificial Sequence
  Synthetic
aaauuuauauuuaucuagu

SEQ ID NO: 392052 - RNA, 20 nt, Artificial Sequence
  Synthetic
aaaauuuauauuuaucuagu

SEQ ID NO: 392053 - RNA, 21 nt, Artificial Sequence
  Synthetic
uaaaauuuauauuuaucuagu

SEQ ID NO: 392054 - RNA, 22 nt, Artificial Sequence
  Synthetic
uuaaaauuuauauuuaucuagu

SEQ ID NO: 392055 - RNA, 23 nt, Artificial Sequence
  Synthetic
guuaaaauuuauauuuaucuagu

SEQ ID NO: 392056 - RNA, 24 nt, Artificial Sequence
  Synthetic
uguuaaaauuuauauuuaucuagu

SEQ ID NO: 392057 - RNA, 18 nt, Artificial Sequence
  Synthetic
ggaagcacacacucuagu

SEQ ID NO: 392058 - RNA, 19 nt, Artificial Sequence
  Synthetic
aggaagcacacacucuagu

SEQ ID NO: 392059 - RNA, 20 nt, Artificial Sequence
  Synthetic
caggaagcacacacucuagu

SEQ ID NO: 392060 - RNA, 21 nt, Artificial Sequence
  Synthetic
ucaggaagcacacacucuagu

SEQ ID NO: 392061 - RNA, 22 nt, Artificial Sequence
  Synthetic
gucaggaagcacacacucuagu

SEQ ID NO: 392062 - RNA, 23 nt, Artificial Sequence
  Synthetic
ugucaggaagcacacacucuagu

SEQ ID NO: 392063 - RNA, 24 nt, Artificial Sequence
  Synthetic
uugucaggaagcacacacucuagu

SEQ ID NO: 392064 - RNA, 18 nt, Artificial Sequence
  Synthetic
auuauuauuuagucuagu

SEQ ID NO: 392065 - RNA, 19 nt, Artificial Sequence
  Synthetic
aauuauuauuuagucuagu

SEQ ID NO: 392066 - RNA, 20 nt, Artificial Sequence
  Synthetic
gaauuauuauuuagucuagu

SEQ ID NO: 392067 - RNA, 21 nt, Artificial Sequence
  Synthetic
ugaauuauuauuuagucuagu

SEQ ID NO: 392068 - RNA, 22 nt, Artificial Sequence
  Synthetic
augaauuauuauuuagucuagu

SEQ ID NO: 392069 - RNA, 23 nt, Artificial Sequence
  Synthetic
aaugaauuauuauuuagucuagu

SEQ ID NO: 392070 - RNA, 24 nt, Artificial Sequence
  Synthetic
gaaugaauuauuauuuagucuagu

SEQ ID NO: 392071 - RNA, 18 nt, Artificial Sequence
  Synthetic
caucucccagcgucuagu

SEQ ID NO: 392072 - RNA, 19 nt, Artificial Sequence
  Synthetic
ccaucucccagcgucuagu

SEQ ID NO: 392073 - RNA, 20 nt, Artificial Sequence
  Synthetic
cccaucucccagcgucuagu

SEQ ID NO: 392074 - RNA, 21 nt, Artificial Sequence
  Synthetic
gcccaucucccagcgucuagu

SEQ ID NO: 392075 - RNA, 22 nt, Artificial Sequence
  Synthetic
ugcccaucucccagcgucuagu

SEQ ID NO: 392076 - RNA, 23 nt, Artificial Sequence
  Synthetic
uugcccaucucccagcgucuagu

SEQ ID NO: 392077 - RNA, 24 nt, Artificial Sequence
  Synthetic
uuugcccaucucccagcgucuagu

SEQ ID NO: 392078 - RNA, 18 nt, Artificial Sequence
  Synthetic
uacuuuccaaugucuagu

SEQ ID NO: 392079 - RNA, 19 nt, Artificial Sequence
  Synthetic
cuacuuuccaaugucuagu

SEQ ID NO: 392080 - RNA, 20 nt, Artificial Sequence
  Synthetic
ccuacuuuccaaugucuagu

SEQ ID NO: 392081 - RNA, 21 nt, Artificial Sequence
  Synthetic
accuacuuuccaaugucuagu

SEQ ID NO: 392082 - RNA, 22 nt, Artificial Sequence
  Synthetic
uaccuacuuuccaaugucuagu

SEQ ID NO: 392083 - RNA, 23 nt, Artificial Sequence
  Synthetic
guaccuacuuuccaaugucuagu

SEQ ID NO: 392084 - RNA, 24 nt, Artificial Sequence
  Synthetic
uguaccuacuuuccaaugucuagu

SEQ ID NO: 392085 - RNA, 18 nt, Artificial Sequence
  Synthetic
uggaguuugcauucuagu

SEQ ID NO: 392086 - RNA, 19 nt, Artificial Sequence
  Synthetic
uuggaguuugcauucuagu

SEQ ID NO: 392087 - RNA, 20 nt, Artificial Sequence
  Synthetic
auuggaguuugcauucuagu

SEQ ID NO: 392088 - RNA, 21 nt, Artificial Sequence
  Synthetic
cauuggaguuugcauucuagu

SEQ ID NO: 392089 - RNA, 22 nt, Artificial Sequence
  Synthetic
ucauuggaguuugcauucuagu

SEQ ID NO: 392090 - RNA, 23 nt, Artificial Sequence
  Synthetic
cucauuggaguuugcauucuagu

SEQ ID NO: 392091 - RNA, 24 nt, Artificial Sequence
  Synthetic
ccucauuggaguuugcauucuagu

SEQ ID NO: 392092 - RNA, 18 nt, Artificial Sequence
  Synthetic
agauggaguuguucuagu

SEQ ID NO: 392093 - RNA, 19 nt, Artificial Sequence
  Synthetic
aagauggaguuguucuagu

SEQ ID NO: 392094 - RNA, 20 nt, Artificial Sequence
  Synthetic
caagauggaguuguucuagu

SEQ ID NO: 392095 - RNA, 21 nt, Artificial Sequence
  Synthetic
ucaagauggaguuguucuagu

SEQ ID NO: 392096 - RNA, 22 nt, Artificial Sequence
  Synthetic
uucaagauggaguuguucuagu

SEQ ID NO: 392097 - RNA, 23 nt, Artificial Sequence
  Synthetic
auucaagauggaguuguucuagu

SEQ ID NO: 392098 - RNA, 24 nt, Artificial Sequence
  Synthetic
uauucaagauggaguuguucuagu

SEQ ID NO: 392099 - RNA, 18 nt, Artificial Sequence
  Synthetic
caaauccauauuucuagu

SEQ ID NO: 392100 - RNA, 19 nt, Artificial Sequence
  Synthetic
acaaauccauauuucuagu

SEQ ID NO: 392101 - RNA, 20 nt, Artificial Sequence
  Synthetic
gacaaauccauauuucuagu

SEQ ID NO: 392102 - RNA, 21 nt, Artificial Sequence
  Synthetic
agacaaauccauauuucuagu

SEQ ID NO: 392103 - RNA, 22 nt, Artificial Sequence
  Synthetic
cagacaaauccauauuucuagu

SEQ ID NO: 392104 - RNA, 23 nt, Artificial Sequence
  Synthetic
acagacaaauccauauuucuagu

SEQ ID NO: 392105 - RNA, 24 nt, Artificial Sequence
  Synthetic
aacagacaaauccauauuucuagu

SEQ ID NO: 392106 - RNA, 18 nt, Artificial Sequence
  Synthetic
uugcaguaaaaaaguagu

SEQ ID NO: 392107 - RNA, 19 nt, Artificial Sequence
  Synthetic
uuugcaguaaaaaaguagu

SEQ ID NO: 392108 - RNA, 20 nt, Artificial Sequence
  Synthetic
uuuugcaguaaaaaaguagu

SEQ ID NO: 392109 - RNA, 21 nt, Artificial Sequence
  Synthetic
auuuugcaguaaaaaaguagu

SEQ ID NO: 392110 - RNA, 22 nt, Artificial Sequence
  Synthetic
uauuuugcaguaaaaaaguagu

SEQ ID NO: 392111 - RNA, 23 nt, Artificial Sequence
  Synthetic
auauuuugcaguaaaaaaguagu

SEQ ID NO: 392112 - RNA, 24 nt, Artificial Sequence
  Synthetic
aauauuuugcaguaaaaaaguagu

SEQ ID NO: 392113 - RNA, 18 nt, Artificial Sequence
  Synthetic
accauauuagaaaguagu

SEQ ID NO: 392114 - RNA, 19 nt, Artificial Sequence
  Synthetic
uaccauauuagaaaguagu

SEQ ID NO: 392115 - RNA, 20 nt, Artificial Sequence
  Synthetic
uuaccauauuagaaaguagu

SEQ ID NO: 392116 - RNA, 21 nt, Artificial Sequence
  Synthetic
guuaccauauuagaaaguagu

SEQ ID NO: 392117 - RNA, 22 nt, Artificial Sequence
  Synthetic
gguuaccauauuagaaaguagu

SEQ ID NO: 392118 - RNA, 23 nt, Artificial Sequence
  Synthetic
ugguuaccauauuagaaaguagu

SEQ ID NO: 392119 - RNA, 24 nt, Artificial Sequence
  Synthetic
gugguuaccauauuagaaaguagu

SEQ ID NO: 392120 - RNA, 18 nt, Artificial Sequence
  Synthetic
agaaaagcaugaaguagu

SEQ ID NO: 392121 - RNA, 19 nt, Artificial Sequence
  Synthetic
cagaaaagcaugaaguagu

SEQ ID NO: 392122 - RNA, 20 nt, Artificial Sequence
  Synthetic
acagaaaagcaugaaguagu

SEQ ID NO: 392123 - RNA, 21 nt, Artificial Sequence
  Synthetic
aacagaaaagcaugaaguagu

SEQ ID NO: 392124 - RNA, 22 nt, Artificial Sequence
  Synthetic
uaacagaaaagcaugaaguagu

SEQ ID NO: 392125 - RNA, 23 nt, Artificial Sequence
  Synthetic
guaacagaaaagcaugaaguagu

SEQ ID NO: 392126 - RNA, 24 nt, Artificial Sequence
  Synthetic
gguaacagaaaagcaugaaguagu

SEQ ID NO: 392127 - RNA, 18 nt, Artificial Sequence
  Synthetic
ucuucuaacuacaguagu

SEQ ID NO: 392128 - RNA, 19 nt, Artificial Sequence
  Synthetic
uucuucuaacuacaguagu

SEQ ID NO: 392129 - RNA, 20 nt, Artificial Sequence
  Synthetic
uuucuucuaacuacaguagu

SEQ ID NO: 392130 - RNA, 21 nt, Artificial Sequence
  Synthetic
uuuucuucuaacuacaguagu

SEQ ID NO: 392131 - RNA, 22 nt, Artificial Sequence
  Synthetic
uuuuucuucuaacuacaguagu

SEQ ID NO: 392132 - RNA, 23 nt, Artificial Sequence
  Synthetic
auuuuucuucuaacuacaguagu

SEQ ID NO: 392133 - RNA, 24 nt, Artificial Sequence
  Synthetic
cauuuuucuucuaacuacaguagu

SEQ ID NO: 392134 - RNA, 18 nt, Artificial Sequence
  Synthetic
ggggcaaagaucaguagu

SEQ ID NO: 392135 - RNA, 19 nt, Artificial Sequence
  Synthetic
gggggcaaagaucaguagu

SEQ ID NO: 392136 - RNA, 20 nt, Artificial Sequence
  Synthetic
ugggggcaaagaucaguagu

SEQ ID NO: 392137 - RNA, 21 nt, Artificial Sequence
  Synthetic
cugggggcaaagaucaguagu

SEQ ID NO: 392138 - RNA, 22 nt, Artificial Sequence
  Synthetic
acugggggcaaagaucaguagu

SEQ ID NO: 392139 - RNA, 23 nt, Artificial Sequence
  Synthetic
uacugggggcaaagaucaguagu

SEQ ID NO: 392140 - RNA, 24 nt, Artificial Sequence
  Synthetic
uuacugggggcaaagaucaguagu

SEQ ID NO: 392141 - RNA, 18 nt, Artificial Sequence
  Synthetic
aaaguacagaagaguagu

SEQ ID NO: 392142 - RNA, 19 nt, Artificial Sequence
  Synthetic
aaaaguacagaagaguagu

SEQ ID NO: 392143 - RNA, 20 nt, Artificial Sequence
  Synthetic
aaaaaguacagaagaguagu

SEQ ID NO: 392144 - RNA, 21 nt, Artificial Sequence
  Synthetic
uaaaaaguacagaagaguagu

SEQ ID NO: 392145 - RNA, 22 nt, Artificial Sequence
  Synthetic
auaaaaaguacagaagaguagu

SEQ ID NO: 392146 - RNA, 23 nt, Artificial Sequence
  Synthetic
gauaaaaaguacagaagaguagu

SEQ ID NO: 392147 - RNA, 24 nt, Artificial Sequence
  Synthetic
agauaaaaaguacagaagaguagu

SEQ ID NO: 392148 - RNA, 18 nt, Artificial Sequence
  Synthetic
gaugcaaguaggaguagu

SEQ ID NO: 392149 - RNA, 19 nt, Artificial Sequence
  Synthetic
ggaugcaaguaggaguagu

SEQ ID NO: 392150 - RNA, 20 nt, Artificial Sequence
  Synthetic
aggaugcaaguaggaguagu

SEQ ID NO: 392151 - RNA, 21 nt, Artificial Sequence
  Synthetic
gaggaugcaaguaggaguagu

SEQ ID NO: 392152 - RNA, 22 nt, Artificial Sequence
  Synthetic
ugaggaugcaaguaggaguagu

SEQ ID NO: 392153 - RNA, 23 nt, Artificial Sequence
  Synthetic
augaggaugcaaguaggaguagu

SEQ ID NO: 392154 - RNA, 24 nt, Artificial Sequence
  Synthetic
aaugaggaugcaaguaggaguagu

SEQ ID NO: 392155 - RNA, 18 nt, Artificial Sequence
  Synthetic
agaaaguagaauaguagu

SEQ ID NO: 392156 - RNA, 19 nt, Artificial Sequence
  Synthetic
gagaaaguagaauaguagu

SEQ ID NO: 392157 - RNA, 20 nt, Artificial Sequence
  Synthetic
agagaaaguagaauaguagu

SEQ ID NO: 392158 - RNA, 21 nt, Artificial Sequence
  Synthetic
uagagaaaguagaauaguagu

SEQ ID NO: 392159 - RNA, 22 nt, Artificial Sequence
  Synthetic
auagagaaaguagaauaguagu

SEQ ID NO: 392160 - RNA, 23 nt, Artificial Sequence
  Synthetic
aauagagaaaguagaauaguagu

SEQ ID NO: 392161 - RNA, 24 nt, Artificial Sequence
  Synthetic
aaauagagaaaguagaauaguagu

SEQ ID NO: 392162 - RNA, 18 nt, Artificial Sequence
  Synthetic
augcuuccucauaguagu

SEQ ID NO: 392163 - RNA, 19 nt, Artificial Sequence
  Synthetic
uaugcuuccucauaguagu

SEQ ID NO: 392164 - RNA, 20 nt, Artificial Sequence
  Synthetic
auaugcuuccucauaguagu

SEQ ID NO: 392165 - RNA, 21 nt, Artificial Sequence
  Synthetic
aauaugcuuccucauaguagu

SEQ ID NO: 392166 - RNA, 22 nt, Artificial Sequence
  Synthetic
uaauaugcuuccucauaguagu

SEQ ID NO: 392167 - RNA, 23 nt, Artificial Sequence
  Synthetic
auaauaugcuuccucauaguagu

SEQ ID NO: 392168 - RNA, 24 nt, Artificial Sequence
  Synthetic
gauaauaugcuuccucauaguagu

SEQ ID NO: 392169 - RNA, 18 nt, Artificial Sequence
  Synthetic
uugacccacacuaguagu

SEQ ID NO: 392170 - RNA, 19 nt, Artificial Sequence
  Synthetic
auugacccacacuaguagu

SEQ ID NO: 392171 - RNA, 20 nt, Artificial Sequence
  Synthetic
aauugacccacacuaguagu

SEQ ID NO: 392172 - RNA, 21 nt, Artificial Sequence
  Synthetic
aaauugacccacacuaguagu

SEQ ID NO: 392173 - RNA, 22 nt, Artificial Sequence
  Synthetic
caaauugacccacacuaguagu

SEQ ID NO: 392174 - RNA, 23 nt, Artificial Sequence
  Synthetic
gcaaauugacccacacuaguagu

SEQ ID NO: 392175 - RNA, 24 nt, Artificial Sequence
  Synthetic
agcaaauugacccacacuaguagu

SEQ ID NO: 392176 - RNA, 18 nt, Artificial Sequence
  Synthetic
guuauuucauuuaguagu

SEQ ID NO: 392177 - RNA, 19 nt, Artificial Sequence
  Synthetic
cguuauuucauuuaguagu

SEQ ID NO: 392178 - RNA, 20 nt, Artificial Sequence
  Synthetic
ucguuauuucauuuaguagu

SEQ ID NO: 392179 - RNA, 21 nt, Artificial Sequence
  Synthetic
uucguuauuucauuuaguagu

SEQ ID NO: 392180 - RNA, 22 nt, Artificial Sequence
  Synthetic
uuucguuauuucauuuaguagu

SEQ ID NO: 392181 - RNA, 23 nt, Artificial Sequence
  Synthetic
cuuucguuauuucauuuaguagu

SEQ ID NO: 392182 - RNA, 24 nt, Artificial Sequence
  Synthetic
acuuucguuauuucauuuaguagu

SEQ ID NO: 392183 - RNA, 18 nt, Artificial Sequence
  Synthetic
caaugccuagugcguagu

SEQ ID NO: 392184 - RNA, 19 nt, Artificial Sequence
  Synthetic
acaaugccuagugcguagu

SEQ ID NO: 392185 - RNA, 20 nt, Artificial Sequence
  Synthetic
cacaaugccuagugcguagu

SEQ ID NO: 392186 - RNA, 21 nt, Artificial Sequence
  Synthetic
gcacaaugccuagugcguagu

SEQ ID NO: 392187 - RNA, 22 nt, Artificial Sequence
  Synthetic
ggcacaaugccuagugcguagu

SEQ ID NO: 392188 - RNA, 23 nt, Artificial Sequence
  Synthetic
uggcacaaugccuagugcguagu

SEQ ID NO: 392189 - RNA, 24 nt, Artificial Sequence
  Synthetic
uuggcacaaugccuagugcguagu

SEQ ID NO: 392190 - RNA, 18 nt, Artificial Sequence
  Synthetic
uguagcaagaaagguagu

SEQ ID NO: 392191 - RNA, 19 nt, Artificial Sequence
  Synthetic
cuguagcaagaaagguagu

SEQ ID NO: 392192 - RNA, 20 nt, Artificial Sequence
  Synthetic
ucuguagcaagaaagguagu

SEQ ID NO: 392193 - RNA, 21 nt, Artificial Sequence
  Synthetic
aucuguagcaagaaagguagu

SEQ ID NO: 392194 - RNA, 22 nt, Artificial Sequence
  Synthetic
gaucuguagcaagaaagguagu

SEQ ID NO: 392195 - RNA, 23 nt, Artificial Sequence
  Synthetic
agaucuguagcaagaaagguagu

SEQ ID NO: 392196 - RNA, 24 nt, Artificial Sequence
  Synthetic
cagaucuguagcaagaaagguagu

SEQ ID NO: 392197 - RNA, 18 nt, Artificial Sequence
  Synthetic
uuagaugaagaagguagu

SEQ ID NO: 392198 - RNA, 19 nt, Artificial Sequence
  Synthetic
guuagaugaagaagguagu

SEQ ID NO: 392199 - RNA, 20 nt, Artificial Sequence
  Synthetic
aguuagaugaagaagguagu

SEQ ID NO: 392200 - RNA, 21 nt, Artificial Sequence
  Synthetic
caguuagaugaagaagguagu

SEQ ID NO: 392201 - RNA, 22 nt, Artificial Sequence
  Synthetic
acaguuagaugaagaagguagu

SEQ ID NO: 392202 - RNA, 23 nt, Artificial Sequence
  Synthetic
aacaguuagaugaagaagguagu

SEQ ID NO: 392203 - RNA, 24 nt, Artificial Sequence
  Synthetic
caacaguuagaugaagaagguagu

SEQ ID NO: 392204 - RNA, 18 nt, Artificial Sequence
  Synthetic
gcagagugggaagguagu

SEQ ID NO: 392205 - RNA, 19 nt, Artificial Sequence
  Synthetic
ggcagagugggaagguagu

SEQ ID NO: 392206 - RNA, 20 nt, Artificial Sequence
  Synthetic
gggcagagugggaagguagu

SEQ ID NO: 392207 - RNA, 21 nt, Artificial Sequence
  Synthetic
ggggcagagugggaagguagu

SEQ ID NO: 392208 - RNA, 22 nt, Artificial Sequence
  Synthetic
aggggcagagugggaagguagu

SEQ ID NO: 392209 - RNA, 23 nt, Artificial Sequence
  Synthetic
aaggggcagagugggaagguagu

SEQ ID NO: 392210 - RNA, 24 nt, Artificial Sequence
  Synthetic
gaaggggcagagugggaagguagu

SEQ ID NO: 392211 - RNA, 18 nt, Artificial Sequence
  Synthetic
aaucugccaguagguagu

SEQ ID NO: 392212 - RNA, 19 nt, Artificial Sequence
  Synthetic
gaaucugccaguagguagu

SEQ ID NO: 392213 - RNA, 20 nt, Artificial Sequence
  Synthetic
ggaaucugccaguagguagu

SEQ ID NO: 392214 - RNA, 21 nt, Artificial Sequence
  Synthetic
aggaaucugccaguagguagu

SEQ ID NO: 392215 - RNA, 22 nt, Artificial Sequence
  Synthetic
aaggaaucugccaguagguagu

SEQ ID NO: 392216 - RNA, 23 nt, Artificial Sequence
  Synthetic
gaaggaaucugccaguagguagu

SEQ ID NO: 392217 - RNA, 24 nt, Artificial Sequence
  Synthetic
agaaggaaucugccaguagguagu

SEQ ID NO: 392218 - RNA, 18 nt, Artificial Sequence
  Synthetic
gaguagcagcacgguagu

SEQ ID NO: 392219 - RNA, 19 nt, Artificial Sequence
  Synthetic
ggaguagcagcacgguagu

SEQ ID NO: 392220 - RNA, 20 nt, Artificial Sequence
  Synthetic
aggaguagcagcacgguagu

SEQ ID NO: 392221 - RNA, 21 nt, Artificial Sequence
  Synthetic
gaggaguagcagcacgguagu

SEQ ID NO: 392222 - RNA, 22 nt, Artificial Sequence
  Synthetic
ugaggaguagcagcacgguagu

SEQ ID NO: 392223 - RNA, 23 nt, Artificial Sequence
  Synthetic
gugaggaguagcagcacgguagu

SEQ ID NO: 392224 - RNA, 24 nt, Artificial Sequence
  Synthetic
agugaggaguagcagcacgguagu

SEQ ID NO: 392225 - RNA, 18 nt, Artificial Sequence
  Synthetic
uuggacuuggucgguagu

SEQ ID NO: 392226 - RNA, 19 nt, Artificial Sequence
  Synthetic
cuuggacuuggucgguagu

SEQ ID NO: 392227 - RNA, 20 nt, Artificial Sequence
  Synthetic
gcuuggacuuggucgguagu

SEQ ID NO: 392228 - RNA, 21 nt, Artificial Sequence
  Synthetic
ggcuuggacuuggucgguagu

SEQ ID NO: 392229 - RNA, 22 nt, Artificial Sequence
  Synthetic
uggcuuggacuuggucgguagu

SEQ ID NO: 392230 - RNA, 23 nt, Artificial Sequence
  Synthetic
guggcuuggacuuggucgguagu

SEQ ID NO: 392231 - RNA, 24 nt, Artificial Sequence
  Synthetic
gguggcuuggacuuggucgguagu

SEQ ID NO: 392232 - RNA, 18 nt, Artificial Sequence
  Synthetic
gaauucaucaaggguagu

SEQ ID NO: 392233 - RNA, 19 nt, Artificial Sequence
  Synthetic
ugaauucaucaaggguagu

SEQ ID NO: 392234 - RNA, 20 nt, Artificial Sequence
  Synthetic
uugaauucaucaaggguagu

SEQ ID NO: 392235 - RNA, 21 nt, Artificial Sequence
  Synthetic
auugaauucaucaaggguagu

SEQ ID NO: 392236 - RNA, 22 nt, Artificial Sequence
  Synthetic
aauugaauucaucaaggguagu

SEQ ID NO: 392237 - RNA, 23 nt, Artificial Sequence
  Synthetic
uaauugaauucaucaaggguagu

SEQ ID NO: 392238 - RNA, 24 nt, Artificial Sequence
  Synthetic
uuaauugaauucaucaaggguagu

SEQ ID NO: 392239 - RNA, 18 nt, Artificial Sequence
  Synthetic
agucuaacuugggguagu

SEQ ID NO: 392240 - RNA, 19 nt, Artificial Sequence
  Synthetic
aagucuaacuugggguagu

SEQ ID NO: 392241 - RNA, 20 nt, Artificial Sequence
  Synthetic
caagucuaacuugggguagu

SEQ ID NO: 392242 - RNA, 21 nt, Artificial Sequence
  Synthetic
ccaagucuaacuugggguagu

SEQ ID NO: 392243 - RNA, 22 nt, Artificial Sequence
  Synthetic
cccaagucuaacuugggguagu

SEQ ID NO: 392244 - RNA, 23 nt, Artificial Sequence
  Synthetic
acccaagucuaacuugggguagu

SEQ ID NO: 392245 - RNA, 24 nt, Artificial Sequence
  Synthetic
uacccaagucuaacuugggguagu

SEQ ID NO: 392246 - RNA, 18 nt, Artificial Sequence
  Synthetic
cuaaacaguugggguagu

SEQ ID NO: 392247 - RNA, 19 nt, Artificial Sequence
  Synthetic
gcuaaacaguugggguagu

SEQ ID NO: 392248 - RNA, 20 nt, Artificial Sequence
  Synthetic
ugcuaaacaguugggguagu

SEQ ID NO: 392249 - RNA, 21 nt, Artificial Sequence
  Synthetic
gugcuaaacaguugggguagu

SEQ ID NO: 392250 - RNA, 22 nt, Artificial Sequence
  Synthetic
cgugcuaaacaguugggguagu

SEQ ID NO: 392251 - RNA, 23 nt, Artificial Sequence
  Synthetic
gcgugcuaaacaguugggguagu

SEQ ID NO: 392252 - RNA, 24 nt, Artificial Sequence
  Synthetic
ugcgugcuaaacaguugggguagu

SEQ ID NO: 392253 - RNA, 18 nt, Artificial Sequence
  Synthetic
agugagggguuggguagu

SEQ ID NO: 392254 - RNA, 19 nt, Artificial Sequence
  Synthetic
aagugagggguuggguagu

SEQ ID NO: 392255 - RNA, 20 nt, Artificial Sequence
  Synthetic
caagugagggguuggguagu

SEQ ID NO: 392256 - RNA, 21 nt, Artificial Sequence
  Synthetic
ccaagugagggguuggguagu

SEQ ID NO: 392257 - RNA, 22 nt, Artificial Sequence
  Synthetic
uccaagugagggguuggguagu

SEQ ID NO: 392258 - RNA, 23 nt, Artificial Sequence
  Synthetic
auccaagugagggguuggguagu

SEQ ID NO: 392259 - RNA, 24 nt, Artificial Sequence
  Synthetic
aauccaagugagggguuggguagu

SEQ ID NO: 392260 - RNA, 18 nt, Artificial Sequence
  Synthetic
cuuagucagugugguagu

SEQ ID NO: 392261 - RNA, 19 nt, Artificial Sequence
  Synthetic
gcuuagucagugugguagu

SEQ ID NO: 392262 - RNA, 20 nt, Artificial Sequence
  Synthetic
ggcuuagucagugugguagu

SEQ ID NO: 392263 - RNA, 21 nt, Artificial Sequence
  Synthetic
aggcuuagucagugugguagu

SEQ ID NO: 392264 - RNA, 22 nt, Artificial Sequence
  Synthetic
aaggcuuagucagugugguagu

SEQ ID NO: 392265 - RNA, 23 nt, Artificial Sequence
  Synthetic
aaaggcuuagucagugugguagu

SEQ ID NO: 392266 - RNA, 24 nt, Artificial Sequence
  Synthetic
caaaggcuuagucagugugguagu

SEQ ID NO: 392267 - RNA, 18 nt, Artificial Sequence
  Synthetic
caucacacuuuugguagu

SEQ ID NO: 392268 - RNA, 19 nt, Artificial Sequence
  Synthetic
ccaucacacuuuugguagu

SEQ ID NO: 392269 - RNA, 20 nt, Artificial Sequence
  Synthetic
accaucacacuuuugguagu

SEQ ID NO: 392270 - RNA, 21 nt, Artificial Sequence
  Synthetic
uaccaucacacuuuugguagu

SEQ ID NO: 392271 - RNA, 22 nt, Artificial Sequence
  Synthetic
cuaccaucacacuuuugguagu

SEQ ID NO: 392272 - RNA, 23 nt, Artificial Sequence
  Synthetic
ccuaccaucacacuuuugguagu

SEQ ID NO: 392273 - RNA, 24 nt, Artificial Sequence
  Synthetic
uccuaccaucacacuuuugguagu

SEQ ID NO: 392274 - RNA, 18 nt, Artificial Sequence
  Synthetic
gguagguuaaaauguagu

SEQ ID NO: 392275 - RNA, 19 nt, Artificial Sequence
  Synthetic
ugguagguuaaaauguagu

SEQ ID NO: 392276 - RNA, 20 nt, Artificial Sequence
  Synthetic
gugguagguuaaaauguagu

SEQ ID NO: 392277 - RNA, 21 nt, Artificial Sequence
  Synthetic
ugugguagguuaaaauguagu

SEQ ID NO: 392278 - RNA, 22 nt, Artificial Sequence
  Synthetic
uugugguagguuaaaauguagu

SEQ ID NO: 392279 - RNA, 23 nt, Artificial Sequence
  Synthetic
uuugugguagguuaaaauguagu

SEQ ID NO: 392280 - RNA, 24 nt, Artificial Sequence
  Synthetic
auuugugguagguuaaaauguagu

SEQ ID NO: 392281 - RNA, 18 nt, Artificial Sequence
  Synthetic
acagggaauccauguagu

SEQ ID NO: 392282 - RNA, 19 nt, Artificial Sequence
  Synthetic
gacagggaauccauguagu

SEQ ID NO: 392283 - RNA, 20 nt, Artificial Sequence
  Synthetic
ggacagggaauccauguagu

SEQ ID NO: 392284 - RNA, 21 nt, Artificial Sequence
  Synthetic
aggacagggaauccauguagu

SEQ ID NO: 392285 - RNA, 22 nt, Artificial Sequence
  Synthetic
uaggacagggaauccauguagu

SEQ ID NO: 392286 - RNA, 23 nt, Artificial Sequence
  Synthetic
uuaggacagggaauccauguagu

SEQ ID NO: 392287 - RNA, 24 nt, Artificial Sequence
  Synthetic
uuuaggacagggaauccauguagu

SEQ ID NO: 392288 - RNA, 18 nt, Artificial Sequence
  Synthetic
cacaaugccauauguagu

SEQ ID NO: 392289 - RNA, 19 nt, Artificial Sequence
  Synthetic
ucacaaugccauauguagu

SEQ ID NO: 392290 - RNA, 20 nt, Artificial Sequence
  Synthetic
gucacaaugccauauguagu

SEQ ID NO: 392291 - RNA, 21 nt, Artificial Sequence
  Synthetic
ugucacaaugccauauguagu

SEQ ID NO: 392292 - RNA, 22 nt, Artificial Sequence
  Synthetic
uugucacaaugccauauguagu

SEQ ID NO: 392293 - RNA, 23 nt, Artificial Sequence
  Synthetic
uuugucacaaugccauauguagu

SEQ ID NO: 392294 - RNA, 24 nt, Artificial Sequence
  Synthetic
auuugucacaaugccauauguagu

SEQ ID NO: 392295 - RNA, 18 nt, Artificial Sequence
  Synthetic
uagagccuagaguguagu

SEQ ID NO: 392296 - RNA, 19 nt, Artificial Sequence
  Synthetic
cuagagccuagaguguagu

SEQ ID NO: 392297 - RNA, 20 nt, Artificial Sequence
  Synthetic
ucuagagccuagaguguagu

SEQ ID NO: 392298 - RNA, 21 nt, Artificial Sequence
  Synthetic
cucuagagccuagaguguagu

SEQ ID NO: 392299 - RNA, 22 nt, Artificial Sequence
  Synthetic
ccucuagagccuagaguguagu

SEQ ID NO: 392300 - RNA, 23 nt, Artificial Sequence
  Synthetic
gccucuagagccuagaguguagu

SEQ ID NO: 392301 - RNA, 24 nt, Artificial Sequence
  Synthetic
ggccucuagagccuagaguguagu

SEQ ID NO: 392302 - RNA, 18 nt, Artificial Sequence
  Synthetic
gaagucuuggaguguagu

SEQ ID NO: 392303 - RNA, 19 nt, Artificial Sequence
  Synthetic
ggaagucuuggaguguagu

SEQ ID NO: 392304 - RNA, 20 nt, Artificial Sequence
  Synthetic
gggaagucuuggaguguagu

SEQ ID NO: 392305 - RNA, 21 nt, Artificial Sequence
  Synthetic
agggaagucuuggaguguagu

SEQ ID NO: 392306 - RNA, 22 nt, Artificial Sequence
  Synthetic
aagggaagucuuggaguguagu

SEQ ID NO: 392307 - RNA, 23 nt, Artificial Sequence
  Synthetic
aaagggaagucuuggaguguagu

SEQ ID NO: 392308 - RNA, 24 nt, Artificial Sequence
  Synthetic
gaaagggaagucuuggaguguagu

SEQ ID NO: 392309 - RNA, 18 nt, Artificial Sequence
  Synthetic
aaagaaguagauuguagu

SEQ ID NO: 392310 - RNA, 19 nt, Artificial Sequence
  Synthetic
gaaagaaguagauuguagu

SEQ ID NO: 392311 - RNA, 20 nt, Artificial Sequence
  Synthetic
ugaaagaaguagauuguagu

SEQ ID NO: 392312 - RNA, 21 nt, Artificial Sequence
  Synthetic
gugaaagaaguagauuguagu

SEQ ID NO: 392313 - RNA, 22 nt, Artificial Sequence
  Synthetic
ugugaaagaaguagauuguagu

SEQ ID NO: 392314 - RNA, 23 nt, Artificial Sequence
  Synthetic
augugaaagaaguagauuguagu

SEQ ID NO: 392315 - RNA, 24 nt, Artificial Sequence
  Synthetic
aaugugaaagaaguagauuguagu

SEQ ID NO: 392316 - RNA, 18 nt, Artificial Sequence
  Synthetic
ggccgauaugcuuguagu

SEQ ID NO: 392317 - RNA, 19 nt, Artificial Sequence
  Synthetic
uggccgauaugcuuguagu

SEQ ID NO: 392318 - RNA, 20 nt, Artificial Sequence
  Synthetic
auggccgauaugcuuguagu

SEQ ID NO: 392319 - RNA, 21 nt, Artificial Sequence
  Synthetic
aauggccgauaugcuuguagu

SEQ ID NO: 392320 - RNA, 22 nt, Artificial Sequence
  Synthetic
gaauggccgauaugcuuguagu

SEQ ID NO: 392321 - RNA, 23 nt, Artificial Sequence
  Synthetic
ggaauggccgauaugcuuguagu

SEQ ID NO: 392322 - RNA, 24 nt, Artificial Sequence
  Synthetic
aggaauggccgauaugcuuguagu

SEQ ID NO: 392323 - RNA, 18 nt, Artificial Sequence
  Synthetic
aacauuuguaguuguagu

SEQ ID NO: 392324 - RNA, 19 nt, Artificial Sequence
  Synthetic
aaacauuuguaguuguagu

SEQ ID NO: 392325 - RNA, 20 nt, Artificial Sequence
  Synthetic
uaaacauuuguaguuguagu

SEQ ID NO: 392326 - RNA, 21 nt, Artificial Sequence
  Synthetic
uuaaacauuuguaguuguagu

SEQ ID NO: 392327 - RNA, 22 nt, Artificial Sequence
  Synthetic
uuuaaacauuuguaguuguagu

SEQ ID NO: 392328 - RNA, 23 nt, Artificial Sequence
  Synthetic
auuuaaacauuuguaguuguagu

SEQ ID NO: 392329 - RNA, 24 nt, Artificial Sequence
  Synthetic
uauuuaaacauuuguaguuguagu

SEQ ID NO: 392330 - RNA, 18 nt, Artificial Sequence
  Synthetic
caacuacgcuguuguagu

SEQ ID NO: 392331 - RNA, 19 nt, Artificial Sequence
  Synthetic
ucaacuacgcuguuguagu

SEQ ID NO: 392332 - RNA, 20 nt, Artificial Sequence
  Synthetic
cucaacuacgcuguuguagu

SEQ ID NO: 392333 - RNA, 21 nt, Artificial Sequence
  Synthetic
acucaacuacgcuguuguagu

SEQ ID NO: 392334 - RNA, 22 nt, Artificial Sequence
  Synthetic
uacucaacuacgcuguuguagu

SEQ ID NO: 392335 - RNA, 23 nt, Artificial Sequence
  Synthetic
uuacucaacuacgcuguuguagu

SEQ ID NO: 392336 - RNA, 24 nt, Artificial Sequence
  Synthetic
auuacucaacuacgcuguuguagu

SEQ ID NO: 392337 - RNA, 18 nt, Artificial Sequence
  Synthetic
uagagcuacaaaauuagu

SEQ ID NO: 392338 - RNA, 19 nt, Artificial Sequence
  Synthetic
auagagcuacaaaauuagu

SEQ ID NO: 392339 - RNA, 20 nt, Artificial Sequence
  Synthetic
uauagagcuacaaaauuagu

SEQ ID NO: 392340 - RNA, 21 nt, Artificial Sequence
  Synthetic
uuauagagcuacaaaauuagu

SEQ ID NO: 392341 - RNA, 22 nt, Artificial Sequence
  Synthetic
guuauagagcuacaaaauuagu

SEQ ID NO: 392342 - RNA, 23 nt, Artificial Sequence
  Synthetic
uguuauagagcuacaaaauuagu

SEQ ID NO: 392343 - RNA, 24 nt, Artificial Sequence
  Synthetic
guguuauagagcuacaaaauuagu

SEQ ID NO: 392344 - RNA, 18 nt, Artificial Sequence
  Synthetic
ggcuucugauaaauuagu

SEQ ID NO: 392345 - RNA, 19 nt, Artificial Sequence
  Synthetic
aggcuucugauaaauuagu

SEQ ID NO: 392346 - RNA, 20 nt, Artificial Sequence
  Synthetic
aaggcuucugauaaauuagu

SEQ ID NO: 392347 - RNA, 21 nt, Artificial Sequence
  Synthetic
aaaggcuucugauaaauuagu

SEQ ID NO: 392348 - RNA, 22 nt, Artificial Sequence
  Synthetic
uaaaggcuucugauaaauuagu

SEQ ID NO: 392349 - RNA, 23 nt, Artificial Sequence
  Synthetic
auaaaggcuucugauaaauuagu

SEQ ID NO: 392350 - RNA, 24 nt, Artificial Sequence
  Synthetic
aauaaaggcuucugauaaauuagu

SEQ ID NO: 392351 - RNA, 18 nt, Artificial Sequence
  Synthetic
uuacuguguuaaauuagu

SEQ ID NO: 392352 - RNA, 19 nt, Artificial Sequence
  Synthetic
uuuacuguguuaaauuagu

SEQ ID NO: 392353 - RNA, 20 nt, Artificial Sequence
  Synthetic
uuuuacuguguuaaauuagu

SEQ ID NO: 392354 - RNA, 21 nt, Artificial Sequence
  Synthetic
auuuuacuguguuaaauuagu

SEQ ID NO: 392355 - RNA, 22 nt, Artificial Sequence
  Synthetic
aauuuuacuguguuaaauuagu

SEQ ID NO: 392356 - RNA, 23 nt, Artificial Sequence
  Synthetic
aaauuuuacuguguuaaauuagu

SEQ ID NO: 392357 - RNA, 24 nt, Artificial Sequence
  Synthetic
uaaauuuuacuguguuaaauuagu

SEQ ID NO: 392358 - RNA, 18 nt, Artificial Sequence
  Synthetic
gaaguaauaacaauuagu

SEQ ID NO: 392359 - RNA, 19 nt, Artificial Sequence
  Synthetic
ggaaguaauaacaauuagu

SEQ ID NO: 392360 - RNA, 20 nt, Artificial Sequence
  Synthetic
aggaaguaauaacaauuagu

SEQ ID NO: 392361 - RNA, 21 nt, Artificial Sequence
  Synthetic
caggaaguaauaacaauuagu

SEQ ID NO: 392362 - RNA, 22 nt, Artificial Sequence
  Synthetic
gcaggaaguaauaacaauuagu

SEQ ID NO: 392363 - RNA, 23 nt, Artificial Sequence
  Synthetic
agcaggaaguaauaacaauuagu

SEQ ID NO: 392364 - RNA, 24 nt, Artificial Sequence
  Synthetic
cagcaggaaguaauaacaauuagu

SEQ ID NO: 392365 - RNA, 18 nt, Artificial Sequence
  Synthetic
uaucguaaaugaauuagu

SEQ ID NO: 392366 - RNA, 19 nt, Artificial Sequence
  Synthetic
uuaucguaaaugaauuagu

SEQ ID NO: 392367 - RNA, 20 nt, Artificial Sequence
  Synthetic
auuaucguaaaugaauuagu

SEQ ID NO: 392368 - RNA, 21 nt, Artificial Sequence
  Synthetic
cauuaucguaaaugaauuagu

SEQ ID NO: 392369 - RNA, 22 nt, Artificial Sequence
  Synthetic
ccauuaucguaaaugaauuagu

SEQ ID NO: 392370 - RNA, 23 nt, Artificial Sequence
  Synthetic
gccauuaucguaaaugaauuagu

SEQ ID NO: 392371 - RNA, 24 nt, Artificial Sequence
  Synthetic
ggccauuaucguaaaugaauuagu

SEQ ID NO: 392372 - RNA, 18 nt, Artificial Sequence
  Synthetic
uuuaaauaaugaauuagu

SEQ ID NO: 392373 - RNA, 19 nt, Artificial Sequence
  Synthetic
auuuaaauaaugaauuagu

SEQ ID NO: 392374 - RNA, 20 nt, Artificial Sequence
  Synthetic
cauuuaaauaaugaauuagu

SEQ ID NO: 392375 - RNA, 21 nt, Artificial Sequence
  Synthetic
ucauuuaaauaaugaauuagu

SEQ ID NO: 392376 - RNA, 22 nt, Artificial Sequence
  Synthetic
aucauuuaaauaaugaauuagu

SEQ ID NO: 392377 - RNA, 23 nt, Artificial Sequence
  Synthetic
uaucauuuaaauaaugaauuagu

SEQ ID NO: 392378 - RNA, 24 nt, Artificial Sequence
  Synthetic
cuaucauuuaaauaaugaauuagu

SEQ ID NO: 392379 - RNA, 18 nt, Artificial Sequence
  Synthetic
gugaucguagacauuagu

SEQ ID NO: 392380 - RNA, 19 nt, Artificial Sequence
  Synthetic
ugugaucguagacauuagu

SEQ ID NO: 392381 - RNA, 20 nt, Artificial Sequence
  Synthetic
uugugaucguagacauuagu

SEQ ID NO: 392382 - RNA, 21 nt, Artificial Sequence
  Synthetic
auugugaucguagacauuagu

SEQ ID NO: 392383 - RNA, 22 nt, Artificial Sequence
  Synthetic
gauugugaucguagacauuagu

SEQ ID NO: 392384 - RNA, 23 nt, Artificial Sequence
  Synthetic
agauugugaucguagacauuagu

SEQ ID NO: 392385 - RNA, 24 nt, Artificial Sequence
  Synthetic
aagauugugaucguagacauuagu

SEQ ID NO: 392386 - RNA, 18 nt, Artificial Sequence
  Synthetic
aaagugaucacuauuagu

SEQ ID NO: 392387 - RNA, 19 nt, Artificial Sequence
  Synthetic
gaaagugaucacuauuagu

SEQ ID NO: 392388 - RNA, 20 nt, Artificial Sequence
  Synthetic
agaaagugaucacuauuagu

SEQ ID NO: 392389 - RNA, 21 nt, Artificial Sequence
  Synthetic
aagaaagugaucacuauuagu

SEQ ID NO: 392390 - RNA, 22 nt, Artificial Sequence
  Synthetic
uaagaaagugaucacuauuagu

SEQ ID NO: 392391 - RNA, 23 nt, Artificial Sequence
  Synthetic
cuaagaaagugaucacuauuagu

SEQ ID NO: 392392 - RNA, 24 nt, Artificial Sequence
  Synthetic
ucuaagaaagugaucacuauuagu

SEQ ID NO: 392393 - RNA, 18 nt, Artificial Sequence
  Synthetic
auauguuaaaguauuagu

SEQ ID NO: 392394 - RNA, 19 nt, Artificial Sequence
  Synthetic
aauauguuaaaguauuagu

SEQ ID NO: 392395 - RNA, 20 nt, Artificial Sequence
  Synthetic
caauauguuaaaguauuagu

SEQ ID NO: 392396 - RNA, 21 nt, Artificial Sequence
  Synthetic
acaauauguuaaaguauuagu

SEQ ID NO: 392397 - RNA, 22 nt, Artificial Sequence
  Synthetic
aacaauauguuaaaguauuagu

SEQ ID NO: 392398 - RNA, 23 nt, Artificial Sequence
  Synthetic
aaacaauauguuaaaguauuagu

SEQ ID NO: 392399 - RNA, 24 nt, Artificial Sequence
  Synthetic
uaaacaauauguuaaaguauuagu

SEQ ID NO: 392400 - RNA, 18 nt, Artificial Sequence
  Synthetic
aaaagugaguguauuagu

SEQ ID NO: 392401 - RNA, 19 nt, Artificial Sequence
  Synthetic
caaaagugaguguauuagu

SEQ ID NO: 392402 - RNA, 20 nt, Artificial Sequence
  Synthetic
acaaaagugaguguauuagu

SEQ ID NO: 392403 - RNA, 21 nt, Artificial Sequence
  Synthetic
gacaaaagugaguguauuagu

SEQ ID NO: 392404 - RNA, 22 nt, Artificial Sequence
  Synthetic
ggacaaaagugaguguauuagu

SEQ ID NO: 392405 - RNA, 23 nt, Artificial Sequence
  Synthetic
aggacaaaagugaguguauuagu

SEQ ID NO: 392406 - RNA, 24 nt, Artificial Sequence
  Synthetic
gaggacaaaagugaguguauuagu

SEQ ID NO: 392407 - RNA, 18 nt, Artificial Sequence
  Synthetic
auacguaggguuauuagu

SEQ ID NO: 392408 - RNA, 19 nt, Artificial Sequence
  Synthetic
gauacguaggguuauuagu

SEQ ID NO: 392409 - RNA, 20 nt, Artificial Sequence
  Synthetic
ugauacguaggguuauuagu

SEQ ID NO: 392410 - RNA, 21 nt, Artificial Sequence
  Synthetic
augauacguaggguuauuagu

SEQ ID NO: 392411 - RNA, 22 nt, Artificial Sequence
  Synthetic
gaugauacguaggguuauuagu

SEQ ID NO: 392412 - RNA, 23 nt, Artificial Sequence
  Synthetic
agaugauacguaggguuauuagu

SEQ ID NO: 392413 - RNA, 24 nt, Artificial Sequence
  Synthetic
cagaugauacguaggguuauuagu

SEQ ID NO: 392414 - RNA, 18 nt, Artificial Sequence
  Synthetic
aucggucagcaccuuagu

SEQ ID NO: 392415 - RNA, 19 nt, Artificial Sequence
  Synthetic
caucggucagcaccuuagu

SEQ ID NO: 392416 - RNA, 20 nt, Artificial Sequence
  Synthetic
gcaucggucagcaccuuagu

SEQ ID NO: 392417 - RNA, 21 nt, Artificial Sequence
  Synthetic
agcaucggucagcaccuuagu

SEQ ID NO: 392418 - RNA, 22 nt, Artificial Sequence
  Synthetic
gagcaucggucagcaccuuagu

SEQ ID NO: 392419 - RNA, 23 nt, Artificial Sequence
  Synthetic
agagcaucggucagcaccuuagu

SEQ ID NO: 392420 - RNA, 24 nt, Artificial Sequence
  Synthetic
gagagcaucggucagcaccuuagu

SEQ ID NO: 392421 - RNA, 18 nt, Artificial Sequence
  Synthetic
gggauacucaagcuuagu

SEQ ID NO: 392422 - RNA, 19 nt, Artificial Sequence
  Synthetic
ugggauacucaagcuuagu

SEQ ID NO: 392423 - RNA, 20 nt, Artificial Sequence
  Synthetic
cugggauacucaagcuuagu

SEQ ID NO: 392424 - RNA, 21 nt, Artificial Sequence
  Synthetic
ccugggauacucaagcuuagu

SEQ ID NO: 392425 - RNA, 22 nt, Artificial Sequence
  Synthetic
accugggauacucaagcuuagu

SEQ ID NO: 392426 - RNA, 23 nt, Artificial Sequence
  Synthetic
gaccugggauacucaagcuuagu

SEQ ID NO: 392427 - RNA, 24 nt, Artificial Sequence
  Synthetic
ggaccugggauacucaagcuuagu

SEQ ID NO: 392428 - RNA, 18 nt, Artificial Sequence
  Synthetic
aauaacauguugcuuagu

SEQ ID NO: 392429 - RNA, 19 nt, Artificial Sequence
  Synthetic
aaauaacauguugcuuagu

SEQ ID NO: 392430 - RNA, 20 nt, Artificial Sequence
  Synthetic
uaaauaacauguugcuuagu

SEQ ID NO: 392431 - RNA, 21 nt, Artificial Sequence
  Synthetic
uuaaauaacauguugcuuagu

SEQ ID NO: 392432 - RNA, 22 nt, Artificial Sequence
  Synthetic
guuaaauaacauguugcuuagu

SEQ ID NO: 392433 - RNA, 23 nt, Artificial Sequence
  Synthetic
aguuaaauaacauguugcuuagu

SEQ ID NO: 392434 - RNA, 24 nt, Artificial Sequence
  Synthetic
aaguuaaauaacauguugcuuagu

SEQ ID NO: 392435 - RNA, 18 nt, Artificial Sequence
  Synthetic
caaccauuagaucuuagu

SEQ ID NO: 392436 - RNA, 19 nt, Artificial Sequence
  Synthetic
ucaaccauuagaucuuagu

SEQ ID NO: 392437 - RNA, 20 nt, Artificial Sequence
  Synthetic
gucaaccauuagaucuuagu

SEQ ID NO: 392438 - RNA, 21 nt, Artificial Sequence
  Synthetic
agucaaccauuagaucuuagu

SEQ ID NO: 392439 - RNA, 22 nt, Artificial Sequence
  Synthetic
gagucaaccauuagaucuuagu

SEQ ID NO: 392440 - RNA, 23 nt, Artificial Sequence
  Synthetic
agagucaaccauuagaucuuagu

SEQ ID NO: 392441 - RNA, 24 nt, Artificial Sequence
  Synthetic
gagagucaaccauuagaucuuagu

SEQ ID NO: 392442 - RNA, 18 nt, Artificial Sequence
  Synthetic
uuuauguauacucuuagu

SEQ ID NO: 392443 - RNA, 19 nt, Artificial Sequence
  Synthetic
auuuauguauacucuuagu

SEQ ID NO: 392444 - RNA, 20 nt, Artificial Sequence
  Synthetic
aauuuauguauacucuuagu

SEQ ID NO: 392445 - RNA, 21 nt, Artificial Sequence
  Synthetic
caauuuauguauacucuuagu

SEQ ID NO: 392446 - RNA, 22 nt, Artificial Sequence
  Synthetic
ccaauuuauguauacucuuagu

SEQ ID NO: 392447 - RNA, 23 nt, Artificial Sequence
  Synthetic
gccaauuuauguauacucuuagu

SEQ ID NO: 392448 - RNA, 24 nt, Artificial Sequence
  Synthetic
agccaauuuauguauacucuuagu

SEQ ID NO: 392449 - RNA, 18 nt, Artificial Sequence
  Synthetic
cucugacgcagucuuagu

SEQ ID NO: 392450 - RNA, 19 nt, Artificial Sequence
  Synthetic
gcucugacgcagucuuagu

SEQ ID NO: 392451 - RNA, 20 nt, Artificial Sequence
  Synthetic
agcucugacgcagucuuagu

SEQ ID NO: 392452 - RNA, 21 nt, Artificial Sequence
  Synthetic
gagcucugacgcagucuuagu

SEQ ID NO: 392453 - RNA, 22 nt, Artificial Sequence
  Synthetic
ugagcucugacgcagucuuagu

SEQ ID NO: 392454 - RNA, 23 nt, Artificial Sequence
  Synthetic
uugagcucugacgcagucuuagu

SEQ ID NO: 392455 - RNA, 24 nt, Artificial Sequence
  Synthetic
guugagcucugacgcagucuuagu

SEQ ID NO: 392456 - RNA, 18 nt, Artificial Sequence
  Synthetic
ccgaaggcaauucuuagu

SEQ ID NO: 392457 - RNA, 19 nt, Artificial Sequence
  Synthetic
gccgaaggcaauucuuagu

SEQ ID NO: 392458 - RNA, 20 nt, Artificial Sequence
  Synthetic
ggccgaaggcaauucuuagu

SEQ ID NO: 392459 - RNA, 21 nt, Artificial Sequence
  Synthetic
aggccgaaggcaauucuuagu

SEQ ID NO: 392460 - RNA, 22 nt, Artificial Sequence
  Synthetic
gaggccgaaggcaauucuuagu

SEQ ID NO: 392461 - RNA, 23 nt, Artificial Sequence
  Synthetic
ugaggccgaaggcaauucuuagu

SEQ ID NO: 392462 - RNA, 24 nt, Artificial Sequence
  Synthetic
cugaggccgaaggcaauucuuagu

SEQ ID NO: 392463 - RNA, 18 nt, Artificial Sequence
  Synthetic
uuguaguaguuucuuagu

SEQ ID NO: 392464 - RNA, 19 nt, Artificial Sequence
  Synthetic
cuuguaguaguuucuuagu

SEQ ID NO: 392465 - RNA, 20 nt, Artificial Sequence
  Synthetic
ccuuguaguaguuucuuagu

SEQ ID NO: 392466 - RNA, 21 nt, Artificial Sequence
  Synthetic
uccuuguaguaguuucuuagu

SEQ ID NO: 392467 - RNA, 22 nt, Artificial Sequence
  Synthetic
uuccuuguaguaguuucuuagu

SEQ ID NO: 392468 - RNA, 23 nt, Artificial Sequence
  Synthetic
uuuccuuguaguaguuucuuagu

SEQ ID NO: 392469 - RNA, 24 nt, Artificial Sequence
  Synthetic
guuuccuuguaguaguuucuuagu

SEQ ID NO: 392470 - RNA, 18 nt, Artificial Sequence
  Synthetic
gugcugagaugaguuagu

SEQ ID NO: 392471 - RNA, 19 nt, Artificial Sequence
  Synthetic
agugcugagaugaguuagu

SEQ ID NO: 392472 - RNA, 20 nt, Artificial Sequence
  Synthetic
aagugcugagaugaguuagu

SEQ ID NO: 392473 - RNA, 21 nt, Artificial Sequence
  Synthetic
uaagugcugagaugaguuagu

SEQ ID NO: 392474 - RNA, 22 nt, Artificial Sequence
  Synthetic
cuaagugcugagaugaguuagu

SEQ ID NO: 392475 - RNA, 23 nt, Artificial Sequence
  Synthetic
ucuaagugcugagaugaguuagu

SEQ ID NO: 392476 - RNA, 24 nt, Artificial Sequence
  Synthetic
cucuaagugcugagaugaguuagu

SEQ ID NO: 392477 - RNA, 18 nt, Artificial Sequence
  Synthetic
uggaaaaggcugguuagu

SEQ ID NO: 392478 - RNA, 19 nt, Artificial Sequence
  Synthetic
auggaaaaggcugguuagu

SEQ ID NO: 392479 - RNA, 20 nt, Artificial Sequence
  Synthetic
aauggaaaaggcugguuagu

SEQ ID NO: 392480 - RNA, 21 nt, Artificial Sequence
  Synthetic
aaauggaaaaggcugguuagu

SEQ ID NO: 392481 - RNA, 22 nt, Artificial Sequence
  Synthetic
caaauggaaaaggcugguuagu

SEQ ID NO: 392482 - RNA, 23 nt, Artificial Sequence
  Synthetic
ucaaauggaaaaggcugguuagu

SEQ ID NO: 392483 - RNA, 24 nt, Artificial Sequence
  Synthetic
aucaaauggaaaaggcugguuagu

SEQ ID NO: 392484 - RNA, 18 nt, Artificial Sequence
  Synthetic
aagaaauuuuugguuagu

SEQ ID NO: 392485 - RNA, 19 nt, Artificial Sequence
  Synthetic
gaagaaauuuuugguuagu

SEQ ID NO: 392486 - RNA, 20 nt, Artificial Sequence
  Synthetic
ggaagaaauuuuugguuagu

SEQ ID NO: 392487 - RNA, 21 nt, Artificial Sequence
  Synthetic
aggaagaaauuuuugguuagu

SEQ ID NO: 392488 - RNA, 22 nt, Artificial Sequence
  Synthetic
uaggaagaaauuuuugguuagu

SEQ ID NO: 392489 - RNA, 23 nt, Artificial Sequence
  Synthetic
cuaggaagaaauuuuugguuagu

SEQ ID NO: 392490 - RNA, 24 nt, Artificial Sequence
  Synthetic
ucuaggaagaaauuuuugguuagu

SEQ ID NO: 392491 - RNA, 18 nt, Artificial Sequence
  Synthetic
uuuccaaagaauguuagu

SEQ ID NO: 392492 - RNA, 19 nt, Artificial Sequence
  Synthetic
guuuccaaagaauguuagu

SEQ ID NO: 392493 - RNA, 20 nt, Artificial Sequence
  Synthetic
uguuuccaaagaauguuagu

SEQ ID NO: 392494 - RNA, 21 nt, Artificial Sequence
  Synthetic
cuguuuccaaagaauguuagu

SEQ ID NO: 392495 - RNA, 22 nt, Artificial Sequence
  Synthetic
acuguuuccaaagaauguuagu

SEQ ID NO: 392496 - RNA, 23 nt, Artificial Sequence
  Synthetic
aacuguuuccaaagaauguuagu

SEQ ID NO: 392497 - RNA, 24 nt, Artificial Sequence
  Synthetic
uaacuguuuccaaagaauguuagu

SEQ ID NO: 392498 - RNA, 18 nt, Artificial Sequence
  Synthetic
aacaugaagacauuuagu

SEQ ID NO: 392499 - RNA, 19 nt, Artificial Sequence
  Synthetic
aaacaugaagacauuuagu

SEQ ID NO: 392500 - RNA, 20 nt, Artificial Sequence
  Synthetic
uaaacaugaagacauuuagu

SEQ ID NO: 392501 - RNA, 21 nt, Artificial Sequence
  Synthetic
auaaacaugaagacauuuagu

SEQ ID NO: 392502 - RNA, 22 nt, Artificial Sequence
  Synthetic
gauaaacaugaagacauuuagu

SEQ ID NO: 392503 - RNA, 23 nt, Artificial Sequence
  Synthetic
ugauaaacaugaagacauuuagu

SEQ ID NO: 392504 - RNA, 24 nt, Artificial Sequence
  Synthetic
augauaaacaugaagacauuuagu

SEQ ID NO: 392505 - RNA, 18 nt, Artificial Sequence
  Synthetic
cgaugcuguggauuuagu

SEQ ID NO: 392506 - RNA, 19 nt, Artificial Sequence
  Synthetic
gcgaugcuguggauuuagu

SEQ ID NO: 392507 - RNA, 20 nt, Artificial Sequence
  Synthetic
ggcgaugcuguggauuuagu

SEQ ID NO: 392508 - RNA, 21 nt, Artificial Sequence
  Synthetic
gggcgaugcuguggauuuagu

SEQ ID NO: 392509 - RNA, 22 nt, Artificial Sequence
  Synthetic
ugggcgaugcuguggauuuagu

SEQ ID NO: 392510 - RNA, 23 nt, Artificial Sequence
  Synthetic
gugggcgaugcuguggauuuagu

SEQ ID NO: 392511 - RNA, 24 nt, Artificial Sequence
  Synthetic
ugugggcgaugcuguggauuuagu

SEQ ID NO: 392512 - RNA, 18 nt, Artificial Sequence
  Synthetic
guuaauucacuauuuagu

SEQ ID NO: 392513 - RNA, 19 nt, Artificial Sequence
  Synthetic
uguuaauucacuauuuagu

SEQ ID NO: 392514 - RNA, 20 nt, Artificial Sequence
  Synthetic
guguuaauucacuauuuagu

SEQ ID NO: 392515 - RNA, 21 nt, Artificial Sequence
  Synthetic
uguguuaauucacuauuuagu

SEQ ID NO: 392516 - RNA, 22 nt, Artificial Sequence
  Synthetic
cuguguuaauucacuauuuagu

SEQ ID NO: 392517 - RNA, 23 nt, Artificial Sequence
  Synthetic
acuguguuaauucacuauuuagu

SEQ ID NO: 392518 - RNA, 24 nt, Artificial Sequence
  Synthetic
cacuguguuaauucacuauuuagu

SEQ ID NO: 392519 - RNA, 18 nt, Artificial Sequence
  Synthetic
augugcucaguauuuagu

SEQ ID NO: 392520 - RNA, 19 nt, Artificial Sequence
  Synthetic
aaugugcucaguauuuagu

SEQ ID NO: 392521 - RNA, 20 nt, Artificial Sequence
  Synthetic
caaugugcucaguauuuagu

SEQ ID NO: 392522 - RNA, 21 nt, Artificial Sequence
  Synthetic
acaaugugcucaguauuuagu

SEQ ID NO: 392523 - RNA, 22 nt, Artificial Sequence
  Synthetic
aacaaugugcucaguauuuagu

SEQ ID NO: 392524 - RNA, 23 nt, Artificial Sequence
  Synthetic
uaacaaugugcucaguauuuagu

SEQ ID NO: 392525 - RNA, 24 nt, Artificial Sequence
  Synthetic
cuaacaaugugcucaguauuuagu

SEQ ID NO: 392526 - RNA, 18 nt, Artificial Sequence
  Synthetic
auucaucugguauuuagu

SEQ ID NO: 392527 - RNA, 19 nt, Artificial Sequence
  Synthetic
cauucaucugguauuuagu

SEQ ID NO: 392528 - RNA, 20 nt, Artificial Sequence
  Synthetic
ucauucaucugguauuuagu

SEQ ID NO: 392529 - RNA, 21 nt, Artificial Sequence
  Synthetic
uucauucaucugguauuuagu

SEQ ID NO: 392530 - RNA, 22 nt, Artificial Sequence
  Synthetic
uuucauucaucugguauuuagu

SEQ ID NO: 392531 - RNA, 23 nt, Artificial Sequence
  Synthetic
auuucauucaucugguauuuagu

SEQ ID NO: 392532 - RNA, 24 nt, Artificial Sequence
  Synthetic
cauuucauucaucugguauuuagu

SEQ ID NO: 392533 - RNA, 18 nt, Artificial Sequence
  Synthetic
agcauuagauuauuuagu

SEQ ID NO: 392534 - RNA, 19 nt, Artificial Sequence
  Synthetic
uagcauuagauuauuuagu

SEQ ID NO: 392535 - RNA, 20 nt, Artificial Sequence
  Synthetic
auagcauuagauuauuuagu

SEQ ID NO: 392536 - RNA, 21 nt, Artificial Sequence
  Synthetic
uauagcauuagauuauuuagu

SEQ ID NO: 392537 - RNA, 22 nt, Artificial Sequence
  Synthetic
guauagcauuagauuauuuagu

SEQ ID NO: 392538 - RNA, 23 nt, Artificial Sequence
  Synthetic
uguauagcauuagauuauuuagu

SEQ ID NO: 392539 - RNA, 24 nt, Artificial Sequence
  Synthetic
auguauagcauuagauuauuuagu

SEQ ID NO: 392540 - RNA, 18 nt, Artificial Sequence
  Synthetic
guucagcauuuauuuagu

SEQ ID NO: 392541 - RNA, 19 nt, Artificial Sequence
  Synthetic
uguucagcauuuauuuagu

SEQ ID NO: 392542 - RNA, 20 nt, Artificial Sequence
  Synthetic
uuguucagcauuuauuuagu

SEQ ID NO: 392543 - RNA, 21 nt, Artificial Sequence
  Synthetic
uuuguucagcauuuauuuagu

SEQ ID NO: 392544 - RNA, 22 nt, Artificial Sequence
  Synthetic
auuuguucagcauuuauuuagu

SEQ ID NO: 392545 - RNA, 23 nt, Artificial Sequence
  Synthetic
uauuuguucagcauuuauuuagu

SEQ ID NO: 392546 - RNA, 24 nt, Artificial Sequence
  Synthetic
auauuuguucagcauuuauuuagu

SEQ ID NO: 392547 - RNA, 18 nt, Artificial Sequence
  Synthetic
gggguuaaaaacuuuagu

SEQ ID NO: 392548 - RNA, 19 nt, Artificial Sequence
  Synthetic
agggguuaaaaacuuuagu

SEQ ID NO: 392549 - RNA, 20 nt, Artificial Sequence
  Synthetic
aagggguuaaaaacuuuagu

SEQ ID NO: 392550 - RNA, 21 nt, Artificial Sequence
  Synthetic
aaagggguuaaaaacuuuagu

SEQ ID NO: 392551 - RNA, 22 nt, Artificial Sequence
  Synthetic
aaaagggguuaaaaacuuuagu

SEQ ID NO: 392552 - RNA, 23 nt, Artificial Sequence
  Synthetic
caaaagggguuaaaaacuuuagu

SEQ ID NO: 392553 - RNA, 24 nt, Artificial Sequence
  Synthetic
ucaaaagggguuaaaaacuuuagu

SEQ ID NO: 392554 - RNA, 18 nt, Artificial Sequence
  Synthetic
gaugcaagaaacuuuagu

SEQ ID NO: 392555 - RNA, 19 nt, Artificial Sequence
  Synthetic
ggaugcaagaaacuuuagu

SEQ ID NO: 392556 - RNA, 20 nt, Artificial Sequence
  Synthetic
gggaugcaagaaacuuuagu

SEQ ID NO: 392557 - RNA, 21 nt, Artificial Sequence
  Synthetic
cgggaugcaagaaacuuuagu

SEQ ID NO: 392558 - RNA, 22 nt, Artificial Sequence
  Synthetic
acgggaugcaagaaacuuuagu

SEQ ID NO: 392559 - RNA, 23 nt, Artificial Sequence
  Synthetic
cacgggaugcaagaaacuuuagu

SEQ ID NO: 392560 - RNA, 24 nt, Artificial Sequence
  Synthetic
gcacgggaugcaagaaacuuuagu

SEQ ID NO: 392561 - RNA, 18 nt, Artificial Sequence
  Synthetic
uuugaucuguaguuuagu

SEQ ID NO: 392562 - RNA, 19 nt, Artificial Sequence
  Synthetic
cuuugaucuguaguuuagu

SEQ ID NO: 392563 - RNA, 20 nt, Artificial Sequence
  Synthetic
ucuuugaucuguaguuuagu

SEQ ID NO: 392564 - RNA, 21 nt, Artificial Sequence
  Synthetic
uucuuugaucuguaguuuagu

SEQ ID NO: 392565 - RNA, 22 nt, Artificial Sequence
  Synthetic
cuucuuugaucuguaguuuagu

SEQ ID NO: 392566 - RNA, 23 nt, Artificial Sequence
  Synthetic
ucuucuuugaucuguaguuuagu

SEQ ID NO: 392567 - RNA, 24 nt, Artificial Sequence
  Synthetic
aucuucuuugaucuguaguuuagu

SEQ ID NO: 392568 - RNA, 18 nt, Artificial Sequence
  Synthetic
uggagcugaauguuuagu

SEQ ID NO: 392569 - RNA, 19 nt, Artificial Sequence
  Synthetic
uuggagcugaauguuuagu

SEQ ID NO: 392570 - RNA, 20 nt, Artificial Sequence
  Synthetic
uuuggagcugaauguuuagu

SEQ ID NO: 392571 - RNA, 21 nt, Artificial Sequence
  Synthetic
uuuuggagcugaauguuuagu

SEQ ID NO: 392572 - RNA, 22 nt, Artificial Sequence
  Synthetic
uuuuuggagcugaauguuuagu

SEQ ID NO: 392573 - RNA, 23 nt, Artificial Sequence
  Synthetic
cuuuuuggagcugaauguuuagu

SEQ ID NO: 392574 - RNA, 24 nt, Artificial Sequence
  Synthetic
ccuuuuuggagcugaauguuuagu

SEQ ID NO: 392575 - RNA, 18 nt, Artificial Sequence
  Synthetic
gccuggcuacuguuuagu

SEQ ID NO: 392576 - RNA, 19 nt, Artificial Sequence
  Synthetic
cgccuggcuacuguuuagu

SEQ ID NO: 392577 - RNA, 20 nt, Artificial Sequence
  Synthetic
acgccuggcuacuguuuagu

SEQ ID NO: 392578 - RNA, 21 nt, Artificial Sequence
  Synthetic
cacgccuggcuacuguuuagu

SEQ ID NO: 392579 - RNA, 22 nt, Artificial Sequence
  Synthetic
acacgccuggcuacuguuuagu

SEQ ID NO: 392580 - RNA, 23 nt, Artificial Sequence
  Synthetic
cacacgccuggcuacuguuuagu

SEQ ID NO: 392581 - RNA, 24 nt, Artificial Sequence
  Synthetic
ccacacgccuggcuacuguuuagu

SEQ ID NO: 392582 - RNA, 18 nt, Artificial Sequence
  Synthetic
uuuacuaccuuguuuagu

SEQ ID NO: 392583 - RNA, 19 nt, Artificial Sequence
  Synthetic
cuuuacuaccuuguuuagu

SEQ ID NO: 392584 - RNA, 20 nt, Artificial Sequence
  Synthetic
ucuuuacuaccuuguuuagu

SEQ ID NO: 392585 - RNA, 21 nt, Artificial Sequence
  Synthetic
cucuuuacuaccuuguuuagu

SEQ ID NO: 392586 - RNA, 22 nt, Artificial Sequence
  Synthetic
acucuuuacuaccuuguuuagu

SEQ ID NO: 392587 - RNA, 23 nt, Artificial Sequence
  Synthetic
cacucuuuacuaccuuguuuagu

SEQ ID NO: 392588 - RNA, 24 nt, Artificial Sequence
  Synthetic
ucacucuuuacuaccuuguuuagu

SEQ ID NO: 392589 - RNA, 18 nt, Artificial Sequence
  Synthetic
ucuaggauaccuuuuagu

SEQ ID NO: 392590 - RNA, 19 nt, Artificial Sequence
  Synthetic
aucuaggauaccuuuuagu

SEQ ID NO: 392591 - RNA, 20 nt, Artificial Sequence
  Synthetic
aaucuaggauaccuuuuagu

SEQ ID NO: 392592 - RNA, 21 nt, Artificial Sequence
  Synthetic
uaaucuaggauaccuuuuagu

SEQ ID NO: 392593 - RNA, 22 nt, Artificial Sequence
  Synthetic
auaaucuaggauaccuuuuagu

SEQ ID NO: 392594 - RNA, 23 nt, Artificial Sequence
  Synthetic
aauaaucuaggauaccuuuuagu

SEQ ID NO: 392595 - RNA, 24 nt, Artificial Sequence
  Synthetic
aaauaaucuaggauaccuuuuagu

SEQ ID NO: 392596 - RNA, 18 nt, Artificial Sequence
  Synthetic
acaguauacauuuuuagu

SEQ ID NO: 392597 - RNA, 19 nt, Artificial Sequence
  Synthetic
uacaguauacauuuuuagu

SEQ ID NO: 392598 - RNA, 20 nt, Artificial Sequence
  Synthetic
auacaguauacauuuuuagu

SEQ ID NO: 392599 - RNA, 21 nt, Artificial Sequence
  Synthetic
gauacaguauacauuuuuagu

SEQ ID NO: 392600 - RNA, 22 nt, Artificial Sequence
  Synthetic
agauacaguauacauuuuuagu

SEQ ID NO: 392601 - RNA, 23 nt, Artificial Sequence
  Synthetic
aagauacaguauacauuuuuagu

SEQ ID NO: 392602 - RNA, 24 nt, Artificial Sequence
  Synthetic
aaagauacaguauacauuuuuagu

SEQ ID NO: 392603 - RNA, 18 nt, Artificial Sequence
  Synthetic
uuuuuuuguauuuuuagu

SEQ ID NO: 392604 - RNA, 19 nt, Artificial Sequence
  Synthetic
auuuuuuuguauuuuuagu

SEQ ID NO: 392605 - RNA, 20 nt, Artificial Sequence
  Synthetic
aauuuuuuuguauuuuuagu

SEQ ID NO: 392606 - RNA, 21 nt, Artificial Sequence
  Synthetic
uaauuuuuuuguauuuuuagu

SEQ ID NO: 392607 - RNA, 22 nt, Artificial Sequence
  Synthetic
cuaauuuuuuuguauuuuuagu

SEQ ID NO: 392608 - RNA, 23 nt, Artificial Sequence
  Synthetic
gcuaauuuuuuuguauuuuuagu

SEQ ID NO: 392609 - RNA, 24 nt, Artificial Sequence
  Synthetic
agcuaauuuuuuuguauuuuuagu

SEQ ID NO: 392610 - RNA, 18 nt, Artificial Sequence
  Synthetic
aaacagagaacccaacgu

SEQ ID NO: 392611 - RNA, 19 nt, Artificial Sequence
  Synthetic
aaaacagagaacccaacgu

SEQ ID NO: 392612 - RNA, 20 nt, Artificial Sequence
  Synthetic
gaaaacagagaacccaacgu

SEQ ID NO: 392613 - RNA, 21 nt, Artificial Sequence
  Synthetic
ggaaaacagagaacccaacgu

SEQ ID NO: 392614 - RNA, 22 nt, Artificial Sequence
  Synthetic
cggaaaacagagaacccaacgu

SEQ ID NO: 392615 - RNA, 23 nt, Artificial Sequence
  Synthetic
ccggaaaacagagaacccaacgu

SEQ ID NO: 392616 - RNA, 24 nt, Artificial Sequence
  Synthetic
uccggaaaacagagaacccaacgu

SEQ ID NO: 392617 - RNA, 18 nt, Artificial Sequence
  Synthetic
gaaguuaugagagaacgu

SEQ ID NO: 392618 - RNA, 19 nt, Artificial Sequence
  Synthetic
ggaaguuaugagagaacgu

SEQ ID NO: 392619 - RNA, 20 nt, Artificial Sequence
  Synthetic
aggaaguuaugagagaacgu

SEQ ID NO: 392620 - RNA, 21 nt, Artificial Sequence
  Synthetic
aaggaaguuaugagagaacgu

SEQ ID NO: 392621 - RNA, 22 nt, Artificial Sequence
  Synthetic
gaaggaaguuaugagagaacgu

SEQ ID NO: 392622 - RNA, 23 nt, Artificial Sequence
  Synthetic
ugaaggaaguuaugagagaacgu

SEQ ID NO: 392623 - RNA, 24 nt, Artificial Sequence
  Synthetic
uugaaggaaguuaugagagaacgu

SEQ ID NO: 392624 - RNA, 18 nt, Artificial Sequence
  Synthetic
uauuuuuggaacgaacgu

SEQ ID NO: 392625 - RNA, 19 nt, Artificial Sequence
  Synthetic
auauuuuuggaacgaacgu

SEQ ID NO: 392626 - RNA, 20 nt, Artificial Sequence
  Synthetic
aauauuuuuggaacgaacgu

SEQ ID NO: 392627 - RNA, 21 nt, Artificial Sequence
  Synthetic
uaauauuuuuggaacgaacgu

SEQ ID NO: 392628 - RNA, 22 nt, Artificial Sequence
  Synthetic
uuaauauuuuuggaacgaacgu

SEQ ID NO: 392629 - RNA, 23 nt, Artificial Sequence
  Synthetic
uuuaauauuuuuggaacgaacgu

SEQ ID NO: 392630 - RNA, 24 nt, Artificial Sequence
  Synthetic
uuuuaauauuuuuggaacgaacgu

SEQ ID NO: 392631 - RNA, 18 nt, Artificial Sequence
  Synthetic
ggagaaucgcuugaacgu

SEQ ID NO: 392632 - RNA, 19 nt, Artificial Sequence
  Synthetic
aggagaaucgcuugaacgu

SEQ ID NO: 392633 - RNA, 20 nt, Artificial Sequence
  Synthetic
caggagaaucgcuugaacgu

SEQ ID NO: 392634 - RNA, 21 nt, Artificial Sequence
  Synthetic
gcaggagaaucgcuugaacgu

SEQ ID NO: 392635 - RNA, 22 nt, Artificial Sequence
  Synthetic
ggcaggagaaucgcuugaacgu

SEQ ID NO: 392636 - RNA, 23 nt, Artificial Sequence
  Synthetic
aggcaggagaaucgcuugaacgu

SEQ ID NO: 392637 - RNA, 24 nt, Artificial Sequence
  Synthetic
gaggcaggagaaucgcuugaacgu

SEQ ID NO: 392638 - RNA, 18 nt, Artificial Sequence
  Synthetic
auaaaugugagauaacgu

SEQ ID NO: 392639 - RNA, 19 nt, Artificial Sequence
  Synthetic
cauaaaugugagauaacgu

SEQ ID NO: 392640 - RNA, 20 nt, Artificial Sequence
  Synthetic
acauaaaugugagauaacgu

SEQ ID NO: 392641 - RNA, 21 nt, Artificial Sequence
  Synthetic
aacauaaaugugagauaacgu

SEQ ID NO: 392642 - RNA, 22 nt, Artificial Sequence
  Synthetic
caacauaaaugugagauaacgu

SEQ ID NO: 392643 - RNA, 23 nt, Artificial Sequence
  Synthetic
gcaacauaaaugugagauaacgu

SEQ ID NO: 392644 - RNA, 24 nt, Artificial Sequence
  Synthetic
agcaacauaaaugugagauaacgu

SEQ ID NO: 392645 - RNA, 18 nt, Artificial Sequence
  Synthetic
cagagggagggauaacgu

SEQ ID NO: 392646 - RNA, 19 nt, Artificial Sequence
  Synthetic
gcagagggagggauaacgu

SEQ ID NO: 392647 - RNA, 20 nt, Artificial Sequence
  Synthetic
ggcagagggagggauaacgu

SEQ ID NO: 392648 - RNA, 21 nt, Artificial Sequence
  Synthetic
gggcagagggagggauaacgu

SEQ ID NO: 392649 - RNA, 22 nt, Artificial Sequence
  Synthetic
ggggcagagggagggauaacgu

SEQ ID NO: 392650 - RNA, 23 nt, Artificial Sequence
  Synthetic
gggggcagagggagggauaacgu

SEQ ID NO: 392651 - RNA, 24 nt, Artificial Sequence
  Synthetic
ggggggcagagggagggauaacgu

SEQ ID NO: 392652 - RNA, 18 nt, Artificial Sequence
  Synthetic
agaaggccccuuuaacgu

SEQ ID NO: 392653 - RNA, 19 nt, Artificial Sequence
  Synthetic
gagaaggccccuuuaacgu

SEQ ID NO: 392654 - RNA, 20 nt, Artificial Sequence
  Synthetic
agagaaggccccuuuaacgu

SEQ ID NO: 392655 - RNA, 21 nt, Artificial Sequence
  Synthetic
uagagaaggccccuuuaacgu

SEQ ID NO: 392656 - RNA, 22 nt, Artificial Sequence
  Synthetic
guagagaaggccccuuuaacgu

SEQ ID NO: 392657 - RNA, 23 nt, Artificial Sequence
  Synthetic
aguagagaaggccccuuuaacgu

SEQ ID NO: 392658 - RNA, 24 nt, Artificial Sequence
  Synthetic
uaguagagaaggccccuuuaacgu

SEQ ID NO: 392659 - RNA, 18 nt, Artificial Sequence
  Synthetic
ugguauuacuagccacgu

SEQ ID NO: 392660 - RNA, 19 nt, Artificial Sequence
  Synthetic
gugguauuacuagccacgu

SEQ ID NO: 392661 - RNA, 20 nt, Artificial Sequence
  Synthetic
ggugguauuacuagccacgu

SEQ ID NO: 392662 - RNA, 21 nt, Artificial Sequence
  Synthetic
aggugguauuacuagccacgu

SEQ ID NO: 392663 - RNA, 22 nt, Artificial Sequence
  Synthetic
caggugguauuacuagccacgu

SEQ ID NO: 392664 - RNA, 23 nt, Artificial Sequence
  Synthetic
acaggugguauuacuagccacgu

SEQ ID NO: 392665 - RNA, 24 nt, Artificial Sequence
  Synthetic
aacaggugguauuacuagccacgu

SEQ ID NO: 392666 - RNA, 18 nt, Artificial Sequence
  Synthetic
cucccggugcugccacgu

SEQ ID NO: 392667 - RNA, 19 nt, Artificial Sequence
  Synthetic
ucucccggugcugccacgu

SEQ ID NO: 392668 - RNA, 20 nt, Artificial Sequence
  Synthetic
aucucccggugcugccacgu

SEQ ID NO: 392669 - RNA, 21 nt, Artificial Sequence
  Synthetic
aaucucccggugcugccacgu

SEQ ID NO: 392670 - RNA, 22 nt, Artificial Sequence
  Synthetic
caaucucccggugcugccacgu

SEQ ID NO: 392671 - RNA, 23 nt, Artificial Sequence
  Synthetic
acaaucucccggugcugccacgu

SEQ ID NO: 392672 - RNA, 24 nt, Artificial Sequence
  Synthetic
cacaaucucccggugcugccacgu

SEQ ID NO: 392673 - RNA, 18 nt, Artificial Sequence
  Synthetic
augaaagaacauccacgu

SEQ ID NO: 392674 - RNA, 19 nt, Artificial Sequence
  Synthetic
aaugaaagaacauccacgu

SEQ ID NO: 392675 - RNA, 20 nt, Artificial Sequence
  Synthetic
caaugaaagaacauccacgu

SEQ ID NO: 392676 - RNA, 21 nt, Artificial Sequence
  Synthetic
acaaugaaagaacauccacgu

SEQ ID NO: 392677 - RNA, 22 nt, Artificial Sequence
  Synthetic
aacaaugaaagaacauccacgu

SEQ ID NO: 392678 - RNA, 23 nt, Artificial Sequence
  Synthetic
aaacaaugaaagaacauccacgu

SEQ ID NO: 392679 - RNA, 24 nt, Artificial Sequence
  Synthetic
aaaacaaugaaagaacauccacgu

SEQ ID NO: 392680 - RNA, 18 nt, Artificial Sequence
  Synthetic
gugaguugauaagcacgu

SEQ ID NO: 392681 - RNA, 19 nt, Artificial Sequence
  Synthetic
agugaguugauaagcacgu

SEQ ID NO: 392682 - RNA, 20 nt, Artificial Sequence
  Synthetic
aagugaguugauaagcacgu

SEQ ID NO: 392683 - RNA, 21 nt, Artificial Sequence
  Synthetic
caagugaguugauaagcacgu

SEQ ID NO: 392684 - RNA, 22 nt, Artificial Sequence
  Synthetic
gcaagugaguugauaagcacgu

SEQ ID NO: 392685 - RNA, 23 nt, Artificial Sequence
  Synthetic
cgcaagugaguugauaagcacgu

SEQ ID NO: 392686 - RNA, 24 nt, Artificial Sequence
  Synthetic
ccgcaagugaguugauaagcacgu

SEQ ID NO: 392687 - RNA, 18 nt, Artificial Sequence
  Synthetic
gucccaaacugugcacgu

SEQ ID NO: 392688 - RNA, 19 nt, Artificial Sequence
  Synthetic
ugucccaaacugugcacgu

SEQ ID NO: 392689 - RNA, 20 nt, Artificial Sequence
  Synthetic
augucccaaacugugcacgu

SEQ ID NO: 392690 - RNA, 21 nt, Artificial Sequence
  Synthetic
caugucccaaacugugcacgu

SEQ ID NO: 392691 - RNA, 22 nt, Artificial Sequence
  Synthetic
acaugucccaaacugugcacgu

SEQ ID NO: 392692 - RNA, 23 nt, Artificial Sequence
  Synthetic
cacaugucccaaacugugcacgu

SEQ ID NO: 392693 - RNA, 24 nt, Artificial Sequence
  Synthetic
ucacaugucccaaacugugcacgu

SEQ ID NO: 392694 - RNA, 18 nt, Artificial Sequence
  Synthetic
ugaucccucccaggacgu

SEQ ID NO: 392695 - RNA, 19 nt, Artificial Sequence
  Synthetic
cugaucccucccaggacgu

SEQ ID NO: 392696 - RNA, 20 nt, Artificial Sequence
  Synthetic
ccugaucccucccaggacgu

SEQ ID NO: 392697 - RNA, 21 nt, Artificial Sequence
  Synthetic
accugaucccucccaggacgu

SEQ ID NO: 392698 - RNA, 22 nt, Artificial Sequence
  Synthetic
caccugaucccucccaggacgu

SEQ ID NO: 392699 - RNA, 23 nt, Artificial Sequence
  Synthetic
ccaccugaucccucccaggacgu

SEQ ID NO: 392700 - RNA, 24 nt, Artificial Sequence
  Synthetic
uccaccugaucccucccaggacgu

SEQ ID NO: 392701 - RNA, 18 nt, Artificial Sequence
  Synthetic
ccucaaagucuaauacgu

SEQ ID NO: 392702 - RNA, 19 nt, Artificial Sequence
  Synthetic
uccucaaagucuaauacgu

SEQ ID NO: 392703 - RNA, 20 nt, Artificial Sequence
  Synthetic
uuccucaaagucuaauacgu

SEQ ID NO: 392704 - RNA, 21 nt, Artificial Sequence
  Synthetic
cuuccucaaagucuaauacgu

SEQ ID NO: 392705 - RNA, 22 nt, Artificial Sequence
  Synthetic
acuuccucaaagucuaauacgu

SEQ ID NO: 392706 - RNA, 23 nt, Artificial Sequence
  Synthetic
aacuuccucaaagucuaauacgu

SEQ ID NO: 392707 - RNA, 24 nt, Artificial Sequence
  Synthetic
aaacuuccucaaagucuaauacgu

SEQ ID NO: 392708 - RNA, 18 nt, Artificial Sequence
  Synthetic
acaaaguacagcauacgu

SEQ ID NO: 392709 - RNA, 19 nt, Artificial Sequence
  Synthetic
gacaaaguacagcauacgu

SEQ ID NO: 392710 - RNA, 20 nt, Artificial Sequence
  Synthetic
ggacaaaguacagcauacgu

SEQ ID NO: 392711 - RNA, 21 nt, Artificial Sequence
  Synthetic
gggacaaaguacagcauacgu

SEQ ID NO: 392712 - RNA, 22 nt, Artificial Sequence
  Synthetic
ugggacaaaguacagcauacgu

SEQ ID NO: 392713 - RNA, 23 nt, Artificial Sequence
  Synthetic
augggacaaaguacagcauacgu

SEQ ID NO: 392714 - RNA, 24 nt, Artificial Sequence
  Synthetic
gaugggacaaaguacagcauacgu

SEQ ID NO: 392715 - RNA, 18 nt, Artificial Sequence
  Synthetic
ugaguauuuucuuuacgu

SEQ ID NO: 392716 - RNA, 19 nt, Artificial Sequence
  Synthetic
augaguauuuucuuuacgu

SEQ ID NO: 392717 - RNA, 20 nt, Artificial Sequence
  Synthetic
aaugaguauuuucuuuacgu

SEQ ID NO: 392718 - RNA, 21 nt, Artificial Sequence
  Synthetic
caaugaguauuuucuuuacgu

SEQ ID NO: 392719 - RNA, 22 nt, Artificial Sequence
  Synthetic
acaaugaguauuuucuuuacgu

SEQ ID NO: 392720 - RNA, 23 nt, Artificial Sequence
  Synthetic
uacaaugaguauuuucuuuacgu

SEQ ID NO: 392721 - RNA, 24 nt, Artificial Sequence
  Synthetic
uuacaaugaguauuuucuuuacgu

SEQ ID NO: 392722 - RNA, 18 nt, Artificial Sequence
  Synthetic
aggaugguauuaaaccgu

SEQ ID NO: 392723 - RNA, 19 nt, Artificial Sequence
  Synthetic
gaggaugguauuaaaccgu

SEQ ID NO: 392724 - RNA, 20 nt, Artificial Sequence
  Synthetic
agaggaugguauuaaaccgu

SEQ ID NO: 392725 - RNA, 21 nt, Artificial Sequence
  Synthetic
aagaggaugguauuaaaccgu

SEQ ID NO: 392726 - RNA, 22 nt, Artificial Sequence
  Synthetic
caagaggaugguauuaaaccgu

SEQ ID NO: 392727 - RNA, 23 nt, Artificial Sequence
  Synthetic
ccaagaggaugguauuaaaccgu

SEQ ID NO: 392728 - RNA, 24 nt, Artificial Sequence
  Synthetic
accaagaggaugguauuaaaccgu

SEQ ID NO: 392729 - RNA, 18 nt, Artificial Sequence
  Synthetic
agaaauacaaacuaccgu

SEQ ID NO: 392730 - RNA, 19 nt, Artificial Sequence
  Synthetic
cagaaauacaaacuaccgu

SEQ ID NO: 392731 - RNA, 20 nt, Artificial Sequence
  Synthetic
acagaaauacaaacuaccgu

SEQ ID NO: 392732 - RNA, 21 nt, Artificial Sequence
  Synthetic
cacagaaauacaaacuaccgu

SEQ ID NO: 392733 - RNA, 22 nt, Artificial Sequence
  Synthetic
ccacagaaauacaaacuaccgu

SEQ ID NO: 392734 - RNA, 23 nt, Artificial Sequence
  Synthetic
cccacagaaauacaaacuaccgu

SEQ ID NO: 392735 - RNA, 24 nt, Artificial Sequence
  Synthetic
ucccacagaaauacaaacuaccgu

SEQ ID NO: 392736 - RNA, 18 nt, Artificial Sequence
  Synthetic
cgggcagaauauuaccgu

SEQ ID NO: 392737 - RNA, 19 nt, Artificial Sequence
  Synthetic
gcgggcagaauauuaccgu

SEQ ID NO: 392738 - RNA, 20 nt, Artificial Sequence
  Synthetic
ggcgggcagaauauuaccgu

SEQ ID NO: 392739 - RNA, 21 nt, Artificial Sequence
  Synthetic
gggcgggcagaauauuaccgu

SEQ ID NO: 392740 - RNA, 22 nt, Artificial Sequence
  Synthetic
ugggcgggcagaauauuaccgu

SEQ ID NO: 392741 - RNA, 23 nt, Artificial Sequence
  Synthetic
gugggcgggcagaauauuaccgu

SEQ ID NO: 392742 - RNA, 24 nt, Artificial Sequence
  Synthetic
ggugggcgggcagaauauuaccgu

SEQ ID NO: 392743 - RNA, 18 nt, Artificial Sequence
  Synthetic
cauuuagaguauuaccgu

SEQ ID NO: 392744 - RNA, 19 nt, Artificial Sequence
  Synthetic
ccauuuagaguauuaccgu

SEQ ID NO: 392745 - RNA, 20 nt, Artificial Sequence
  Synthetic
accauuuagaguauuaccgu

SEQ ID NO: 392746 - RNA, 21 nt, Artificial Sequence
  Synthetic
gaccauuuagaguauuaccgu

SEQ ID NO: 392747 - RNA, 22 nt, Artificial Sequence
  Synthetic
ugaccauuuagaguauuaccgu

SEQ ID NO: 392748 - RNA, 23 nt, Artificial Sequence
  Synthetic
augaccauuuagaguauuaccgu

SEQ ID NO: 392749 - RNA, 24 nt, Artificial Sequence
  Synthetic
gaugaccauuuagaguauuaccgu

SEQ ID NO: 392750 - RNA, 18 nt, Artificial Sequence
  Synthetic
uuuaacaaugauacccgu

SEQ ID NO: 392751 - RNA, 19 nt, Artificial Sequence
  Synthetic
cuuuaacaaugauacccgu

SEQ ID NO: 392752 - RNA, 20 nt, Artificial Sequence
  Synthetic
ccuuuaacaaugauacccgu

SEQ ID NO: 392753 - RNA, 21 nt, Artificial Sequence
  Synthetic
gccuuuaacaaugauacccgu

SEQ ID NO: 392754 - RNA, 22 nt, Artificial Sequence
  Synthetic
agccuuuaacaaugauacccgu

SEQ ID NO: 392755 - RNA, 23 nt, Artificial Sequence
  Synthetic
cagccuuuaacaaugauacccgu

SEQ ID NO: 392756 - RNA, 24 nt, Artificial Sequence
  Synthetic
acagccuuuaacaaugauacccgu

SEQ ID NO: 392757 - RNA, 18 nt, Artificial Sequence
  Synthetic
agcucccuuucaccccgu

SEQ ID NO: 392758 - RNA, 19 nt, Artificial Sequence
  Synthetic
cagcucccuuucaccccgu

SEQ ID NO: 392759 - RNA, 20 nt, Artificial Sequence
  Synthetic
gcagcucccuuucaccccgu

SEQ ID NO: 392760 - RNA, 21 nt, Artificial Sequence
  Synthetic
ugcagcucccuuucaccccgu

SEQ ID NO: 392761 - RNA, 22 nt, Artificial Sequence
  Synthetic
uugcagcucccuuucaccccgu

SEQ ID NO: 392762 - RNA, 23 nt, Artificial Sequence
  Synthetic
uuugcagcucccuuucaccccgu

SEQ ID NO: 392763 - RNA, 24 nt, Artificial Sequence
  Synthetic
uuuugcagcucccuuucaccccgu

SEQ ID NO: 392764 - RNA, 18 nt, Artificial Sequence
  Synthetic
cuagccaacagaagccgu

SEQ ID NO: 392765 - RNA, 19 nt, Artificial Sequence
  Synthetic
ccuagccaacagaagccgu

SEQ ID NO: 392766 - RNA, 20 nt, Artificial Sequence
  Synthetic
cccuagccaacagaagccgu

SEQ ID NO: 392767 - RNA, 21 nt, Artificial Sequence
  Synthetic
ccccuagccaacagaagccgu

SEQ ID NO: 392768 - RNA, 22 nt, Artificial Sequence
  Synthetic
uccccuagccaacagaagccgu

SEQ ID NO: 392769 - RNA, 23 nt, Artificial Sequence
  Synthetic
cuccccuagccaacagaagccgu

SEQ ID NO: 392770 - RNA, 24 nt, Artificial Sequence
  Synthetic
ccuccccuagccaacagaagccgu

SEQ ID NO: 392771 - RNA, 18 nt, Artificial Sequence
  Synthetic
cuucaucugucaggccgu

SEQ ID NO: 392772 - RNA, 19 nt, Artificial Sequence
  Synthetic
acuucaucugucaggccgu

SEQ ID NO: 392773 - RNA, 20 nt, Artificial Sequence
  Synthetic
aacuucaucugucaggccgu

SEQ ID NO: 392774 - RNA, 21 nt, Artificial Sequence
  Synthetic
uaacuucaucugucaggccgu

SEQ ID NO: 392775 - RNA, 22 nt, Artificial Sequence
  Synthetic
uuaacuucaucugucaggccgu

SEQ ID NO: 392776 - RNA, 23 nt, Artificial Sequence
  Synthetic
auuaacuucaucugucaggccgu

SEQ ID NO: 392777 - RNA, 24 nt, Artificial Sequence
  Synthetic
aauuaacuucaucugucaggccgu

SEQ ID NO: 392778 - RNA, 18 nt, Artificial Sequence
  Synthetic
uuuauugauggcugccgu

SEQ ID NO: 392779 - RNA, 19 nt, Artificial Sequence
  Synthetic
guuuauugauggcugccgu

SEQ ID NO: 392780 - RNA, 20 nt, Artificial Sequence
  Synthetic
aguuuauugauggcugccgu

SEQ ID NO: 392781 - RNA, 21 nt, Artificial Sequence
  Synthetic
caguuuauugauggcugccgu

SEQ ID NO: 392782 - RNA, 22 nt, Artificial Sequence
  Synthetic
ucaguuuauugauggcugccgu

SEQ ID NO: 392783 - RNA, 23 nt, Artificial Sequence
  Synthetic
cucaguuuauugauggcugccgu

SEQ ID NO: 392784 - RNA, 24 nt, Artificial Sequence
  Synthetic
ccucaguuuauugauggcugccgu

SEQ ID NO: 392785 - RNA, 18 nt, Artificial Sequence
  Synthetic
cuacaaaugaauugccgu

SEQ ID NO: 392786 - RNA, 19 nt, Artificial Sequence
  Synthetic
acuacaaaugaauugccgu

SEQ ID NO: 392787 - RNA, 20 nt, Artificial Sequence
  Synthetic
aacuacaaaugaauugccgu

SEQ ID NO: 392788 - RNA, 21 nt, Artificial Sequence
  Synthetic
gaacuacaaaugaauugccgu

SEQ ID NO: 392789 - RNA, 22 nt, Artificial Sequence
  Synthetic
agaacuacaaaugaauugccgu

SEQ ID NO: 392790 - RNA, 23 nt, Artificial Sequence
  Synthetic
aagaacuacaaaugaauugccgu

SEQ ID NO: 392791 - RNA, 24 nt, Artificial Sequence
  Synthetic
aaagaacuacaaaugaauugccgu

SEQ ID NO: 392792 - RNA, 18 nt, Artificial Sequence
  Synthetic
ugaacuaaaagcauccgu

SEQ ID NO: 392793 - RNA, 19 nt, Artificial Sequence
  Synthetic
cugaacuaaaagcauccgu

SEQ ID NO: 392794 - RNA, 20 nt, Artificial Sequence
  Synthetic
ucugaacuaaaagcauccgu

SEQ ID NO: 392795 - RNA, 21 nt, Artificial Sequence
  Synthetic
cucugaacuaaaagcauccgu

SEQ ID NO: 392796 - RNA, 22 nt, Artificial Sequence
  Synthetic
gcucugaacuaaaagcauccgu

SEQ ID NO: 392797 - RNA, 23 nt, Artificial Sequence
  Synthetic
ugcucugaacuaaaagcauccgu

SEQ ID NO: 392798 - RNA, 24 nt, Artificial Sequence
  Synthetic
cugcucugaacuaaaagcauccgu

SEQ ID NO: 392799 - RNA, 18 nt, Artificial Sequence
  Synthetic
acuaaauuuagcauccgu

SEQ ID NO: 392800 - RNA, 19 nt, Artificial Sequence
  Synthetic
cacuaaauuuagcauccgu

SEQ ID NO: 392801 - RNA, 20 nt, Artificial Sequence
  Synthetic
gcacuaaauuuagcauccgu

SEQ ID NO: 392802 - RNA, 21 nt, Artificial Sequence
  Synthetic
ugcacuaaauuuagcauccgu

SEQ ID NO: 392803 - RNA, 22 nt, Artificial Sequence
  Synthetic
augcacuaaauuuagcauccgu

SEQ ID NO: 392804 - RNA, 23 nt, Artificial Sequence
  Synthetic
aaugcacuaaauuuagcauccgu

SEQ ID NO: 392805 - RNA, 24 nt, Artificial Sequence
  Synthetic
aaaugcacuaaauuuagcauccgu

SEQ ID NO: 392806 - RNA, 18 nt, Artificial Sequence
  Synthetic
uguacccaguauauccgu

SEQ ID NO: 392807 - RNA, 19 nt, Artificial Sequence
  Synthetic
auguacccaguauauccgu

SEQ ID NO: 392808 - RNA, 20 nt, Artificial Sequence
  Synthetic
aauguacccaguauauccgu

SEQ ID NO: 392809 - RNA, 21 nt, Artificial Sequence
  Synthetic
aaauguacccaguauauccgu

SEQ ID NO: 392810 - RNA, 22 nt, Artificial Sequence
  Synthetic
uaaauguacccaguauauccgu

SEQ ID NO: 392811 - RNA, 23 nt, Artificial Sequence
  Synthetic
uuaaauguacccaguauauccgu

SEQ ID NO: 392812 - RNA, 24 nt, Artificial Sequence
  Synthetic
guuaaauguacccaguauauccgu

SEQ ID NO: 392813 - RNA, 18 nt, Artificial Sequence
  Synthetic
auuaauugaguaguccgu

SEQ ID NO: 392814 - RNA, 19 nt, Artificial Sequence
  Synthetic
cauuaauugaguaguccgu

SEQ ID NO: 392815 - RNA, 20 nt, Artificial Sequence
  Synthetic
ucauuaauugaguaguccgu

SEQ ID NO: 392816 - RNA, 21 nt, Artificial Sequence
  Synthetic
gucauuaauugaguaguccgu

SEQ ID NO: 392817 - RNA, 22 nt, Artificial Sequence
  Synthetic
agucauuaauugaguaguccgu

SEQ ID NO: 392818 - RNA, 23 nt, Artificial Sequence
  Synthetic
cagucauuaauugaguaguccgu

SEQ ID NO: 392819 - RNA, 24 nt, Artificial Sequence
  Synthetic
ccagucauuaauugaguaguccgu

SEQ ID NO: 392820 - RNA, 18 nt, Artificial Sequence
  Synthetic
cccagcucaucuuuccgu

SEQ ID NO: 392821 - RNA, 19 nt, Artificial Sequence
  Synthetic
acccagcucaucuuuccgu

SEQ ID NO: 392822 - RNA, 20 nt, Artificial Sequence
  Synthetic
cacccagcucaucuuuccgu

SEQ ID NO: 392823 - RNA, 21 nt, Artificial Sequence
  Synthetic
ucacccagcucaucuuuccgu

SEQ ID NO: 392824 - RNA, 22 nt, Artificial Sequence
  Synthetic
cucacccagcucaucuuuccgu

SEQ ID NO: 392825 - RNA, 23 nt, Artificial Sequence
  Synthetic
ucucacccagcucaucuuuccgu

SEQ ID NO: 392826 - RNA, 24 nt, Artificial Sequence
  Synthetic
cucucacccagcucaucuuuccgu

SEQ ID NO: 392827 - RNA, 18 nt, Artificial Sequence
  Synthetic
aagaaguauagaaagcgu

SEQ ID NO: 392828 - RNA, 19 nt, Artificial Sequence
  Synthetic
caagaaguauagaaagcgu

SEQ ID NO: 392829 - RNA, 20 nt, Artificial Sequence
  Synthetic
ucaagaaguauagaaagcgu

SEQ ID NO: 392830 - RNA, 21 nt, Artificial Sequence
  Synthetic
uucaagaaguauagaaagcgu

SEQ ID NO: 392831 - RNA, 22 nt, Artificial Sequence
  Synthetic
uuucaagaaguauagaaagcgu

SEQ ID NO: 392832 - RNA, 23 nt, Artificial Sequence
  Synthetic
uuuucaagaaguauagaaagcgu

SEQ ID NO: 392833 - RNA, 24 nt, Artificial Sequence
  Synthetic
guuuucaagaaguauagaaagcgu

SEQ ID NO: 392834 - RNA, 18 nt, Artificial Sequence
  Synthetic
agagcaaagcuaaagcgu

SEQ ID NO: 392835 - RNA, 19 nt, Artificial Sequence
  Synthetic
aagagcaaagcuaaagcgu

SEQ ID NO: 392836 - RNA, 20 nt, Artificial Sequence
  Synthetic
aaagagcaaagcuaaagcgu

SEQ ID NO: 392837 - RNA, 21 nt, Artificial Sequence
  Synthetic
aaaagagcaaagcuaaagcgu

SEQ ID NO: 392838 - RNA, 22 nt, Artificial Sequence
  Synthetic
gaaaagagcaaagcuaaagcgu

SEQ ID NO: 392839 - RNA, 23 nt, Artificial Sequence
  Synthetic
agaaaagagcaaagcuaaagcgu

SEQ ID NO: 392840 - RNA, 24 nt, Artificial Sequence
  Synthetic
aagaaaagagcaaagcuaaagcgu

SEQ ID NO: 392841 - RNA, 18 nt, Artificial Sequence
  Synthetic
aaaguagaaugacagcgu

SEQ ID NO: 392842 - RNA, 19 nt, Artificial Sequence
  Synthetic
aaaaguagaaugacagcgu

SEQ ID NO: 392843 - RNA, 20 nt, Artificial Sequence
  Synthetic
aaaaaguagaaugacagcgu

SEQ ID NO: 392844 - RNA, 21 nt, Artificial Sequence
  Synthetic
caaaaaguagaaugacagcgu

SEQ ID NO: 392845 - RNA, 22 nt, Artificial Sequence
  Synthetic
ucaaaaaguagaaugacagcgu

SEQ ID NO: 392846 - RNA, 23 nt, Artificial Sequence
  Synthetic
uucaaaaaguagaaugacagcgu

SEQ ID NO: 392847 - RNA, 24 nt, Artificial Sequence
  Synthetic
uuucaaaaaguagaaugacagcgu

SEQ ID NO: 392848 - RNA, 18 nt, Artificial Sequence
  Synthetic
cugccauggaggcagcgu

SEQ ID NO: 392849 - RNA, 19 nt, Artificial Sequence
  Synthetic
ucugccauggaggcagcgu

SEQ ID NO: 392850 - RNA, 20 nt, Artificial Sequence
  Synthetic
uucugccauggaggcagcgu

SEQ ID NO: 392851 - RNA, 21 nt, Artificial Sequence
  Synthetic
uuucugccauggaggcagcgu

SEQ ID NO: 392852 - RNA, 22 nt, Artificial Sequence
  Synthetic
guuucugccauggaggcagcgu

SEQ ID NO: 392853 - RNA, 23 nt, Artificial Sequence
  Synthetic
aguuucugccauggaggcagcgu

SEQ ID NO: 392854 - RNA, 24 nt, Artificial Sequence
  Synthetic
uaguuucugccauggaggcagcgu

SEQ ID NO: 392855 - RNA, 18 nt, Artificial Sequence
  Synthetic
auucugaugcaggagcgu

SEQ ID NO: 392856 - RNA, 19 nt, Artificial Sequence
  Synthetic
uauucugaugcaggagcgu

SEQ ID NO: 392857 - RNA, 20 nt, Artificial Sequence
  Synthetic
cuauucugaugcaggagcgu

SEQ ID NO: 392858 - RNA, 21 nt, Artificial Sequence
  Synthetic
ucuauucugaugcaggagcgu

SEQ ID NO: 392859 - RNA, 22 nt, Artificial Sequence
  Synthetic
uucuauucugaugcaggagcgu

SEQ ID NO: 392860 - RNA, 23 nt, Artificial Sequence
  Synthetic
cuucuauucugaugcaggagcgu

SEQ ID NO: 392861 - RNA, 24 nt, Artificial Sequence
  Synthetic
ucuucuauucugaugcaggagcgu

SEQ ID NO: 392862 - RNA, 18 nt, Artificial Sequence
  Synthetic
aggggggagggauagcgu

SEQ ID NO: 392863 - RNA, 19 nt, Artificial Sequence
  Synthetic
gaggggggagggauagcgu

SEQ ID NO: 392864 - RNA, 20 nt, Artificial Sequence
  Synthetic
ggaggggggagggauagcgu

SEQ ID NO: 392865 - RNA, 21 nt, Artificial Sequence
  Synthetic
gggaggggggagggauagcgu

SEQ ID NO: 392866 - RNA, 22 nt, Artificial Sequence
  Synthetic
ggggaggggggagggauagcgu

SEQ ID NO: 392867 - RNA, 23 nt, Artificial Sequence
  Synthetic
gggggaggggggagggauagcgu

SEQ ID NO: 392868 - RNA, 24 nt, Artificial Sequence
  Synthetic
ggggggaggggggagggauagcgu

SEQ ID NO: 392869 - RNA, 18 nt, Artificial Sequence
  Synthetic
auucaagugcuaacgcgu

SEQ ID NO: 392870 - RNA, 19 nt, Artificial Sequence
  Synthetic
uauucaagugcuaacgcgu

SEQ ID NO: 392871 - RNA, 20 nt, Artificial Sequence
  Synthetic
uuauucaagugcuaacgcgu

SEQ ID NO: 392872 - RNA, 21 nt, Artificial Sequence
  Synthetic
uuuauucaagugcuaacgcgu

SEQ ID NO: 392873 - RNA, 22 nt, Artificial Sequence
  Synthetic
auuuauucaagugcuaacgcgu

SEQ ID NO: 392874 - RNA, 23 nt, Artificial Sequence
  Synthetic
cauuuauucaagugcuaacgcgu

SEQ ID NO: 392875 - RNA, 24 nt, Artificial Sequence
  Synthetic
acauuuauucaagugcuaacgcgu

SEQ ID NO: 392876 - RNA, 18 nt, Artificial Sequence
  Synthetic
gugucuuuuuagccgcgu

SEQ ID NO: 392877 - RNA, 19 nt, Artificial Sequence
  Synthetic
ggugucuuuuuagccgcgu

SEQ ID NO: 392878 - RNA, 20 nt, Artificial Sequence
  Synthetic
aggugucuuuuuagccgcgu

SEQ ID NO: 392879 - RNA, 21 nt, Artificial Sequence
  Synthetic
aaggugucuuuuuagccgcgu

SEQ ID NO: 392880 - RNA, 22 nt, Artificial Sequence
  Synthetic
uaaggugucuuuuuagccgcgu

SEQ ID NO: 392881 - RNA, 23 nt, Artificial Sequence
  Synthetic
cuaaggugucuuuuuagccgcgu

SEQ ID NO: 392882 - RNA, 24 nt, Artificial Sequence
  Synthetic
ucuaaggugucuuuuuagccgcgu

SEQ ID NO: 392883 - RNA, 18 nt, Artificial Sequence
  Synthetic
acaacugcccuagggcgu

SEQ ID NO: 392884 - RNA, 19 nt, Artificial Sequence
  Synthetic
aacaacugcccuagggcgu

SEQ ID NO: 392885 - RNA, 20 nt, Artificial Sequence
  Synthetic
gaacaacugcccuagggcgu

SEQ ID NO: 392886 - RNA, 21 nt, Artificial Sequence
  Synthetic
agaacaacugcccuagggcgu

SEQ ID NO: 392887 - RNA, 22 nt, Artificial Sequence
  Synthetic
gagaacaacugcccuagggcgu

SEQ ID NO: 392888 - RNA, 23 nt, Artificial Sequence
  Synthetic
ugagaacaacugcccuagggcgu

SEQ ID NO: 392889 - RNA, 24 nt, Artificial Sequence
  Synthetic
augagaacaacugcccuagggcgu

SEQ ID NO: 392890 - RNA, 18 nt, Artificial Sequence
  Synthetic
uauauauuuuacaugcgu

SEQ ID NO: 392891 - RNA, 19 nt, Artificial Sequence
  Synthetic
guauauauuuuacaugcgu

SEQ ID NO: 392892 - RNA, 20 nt, Artificial Sequence
  Synthetic
uguauauauuuuacaugcgu

SEQ ID NO: 392893 - RNA, 21 nt, Artificial Sequence
  Synthetic
auguauauauuuuacaugcgu

SEQ ID NO: 392894 - RNA, 22 nt, Artificial Sequence
  Synthetic
aauguauauauuuuacaugcgu

SEQ ID NO: 392895 - RNA, 23 nt, Artificial Sequence
  Synthetic
caauguauauauuuuacaugcgu

SEQ ID NO: 392896 - RNA, 24 nt, Artificial Sequence
  Synthetic
acaauguauauauuuuacaugcgu

SEQ ID NO: 392897 - RNA, 18 nt, Artificial Sequence
  Synthetic
ucaaaaauuaccaugcgu

SEQ ID NO: 392898 - RNA, 19 nt, Artificial Sequence
  Synthetic
cucaaaaauuaccaugcgu

SEQ ID NO: 392899 - RNA, 20 nt, Artificial Sequence
  Synthetic
ucucaaaaauuaccaugcgu

SEQ ID NO: 392900 - RNA, 21 nt, Artificial Sequence
  Synthetic
uucucaaaaauuaccaugcgu

SEQ ID NO: 392901 - RNA, 22 nt, Artificial Sequence
  Synthetic
auucucaaaaauuaccaugcgu

SEQ ID NO: 392902 - RNA, 23 nt, Artificial Sequence
  Synthetic
aauucucaaaaauuaccaugcgu

SEQ ID NO: 392903 - RNA, 24 nt, Artificial Sequence
  Synthetic
uaauucucaaaaauuaccaugcgu

SEQ ID NO: 392904 - RNA, 18 nt, Artificial Sequence
  Synthetic
uauguuuaguaccugcgu

SEQ ID NO: 392905 - RNA, 19 nt, Artificial Sequence
  Synthetic
cuauguuuaguaccugcgu

SEQ ID NO: 392906 - RNA, 20 nt, Artificial Sequence
  Synthetic
acuauguuuaguaccugcgu

SEQ ID NO: 392907 - RNA, 21 nt, Artificial Sequence
  Synthetic
uacuauguuuaguaccugcgu

SEQ ID NO: 392908 - RNA, 22 nt, Artificial Sequence
  Synthetic
guacuauguuuaguaccugcgu

SEQ ID NO: 392909 - RNA, 23 nt, Artificial Sequence
  Synthetic
gguacuauguuuaguaccugcgu

SEQ ID NO: 392910 - RNA, 24 nt, Artificial Sequence
  Synthetic
ggguacuauguuuaguaccugcgu

SEQ ID NO: 392911 - RNA, 18 nt, Artificial Sequence
  Synthetic
gcuggguaaaaggugcgu

SEQ ID NO: 392912 - RNA, 19 nt, Artificial Sequence
  Synthetic
agcuggguaaaaggugcgu

SEQ ID NO: 392913 - RNA, 20 nt, Artificial Sequence
  Synthetic
aagcuggguaaaaggugcgu

SEQ ID NO: 392914 - RNA, 21 nt, Artificial Sequence
  Synthetic
gaagcuggguaaaaggugcgu

SEQ ID NO: 392915 - RNA, 22 nt, Artificial Sequence
  Synthetic
agaagcuggguaaaaggugcgu

SEQ ID NO: 392916 - RNA, 23 nt, Artificial Sequence
  Synthetic
gagaagcuggguaaaaggugcgu

SEQ ID NO: 392917 - RNA, 24 nt, Artificial Sequence
  Synthetic
ggagaagcuggguaaaaggugcgu

SEQ ID NO: 392918 - RNA, 18 nt, Artificial Sequence
  Synthetic
cugaggcaggagaaucgu

SEQ ID NO: 392919 - RNA, 19 nt, Artificial Sequence
  Synthetic
gcugaggcaggagaaucgu

SEQ ID NO: 392920 - RNA, 20 nt, Artificial Sequence
  Synthetic
ggcugaggcaggagaaucgu

SEQ ID NO: 392921 - RNA, 21 nt, Artificial Sequence
  Synthetic
aggcugaggcaggagaaucgu

SEQ ID NO: 392922 - RNA, 22 nt, Artificial Sequence
  Synthetic
gaggcugaggcaggagaaucgu

SEQ ID NO: 392923 - RNA, 23 nt, Artificial Sequence
  Synthetic
ggaggcugaggcaggagaaucgu

SEQ ID NO: 392924 - RNA, 24 nt, Artificial Sequence
  Synthetic
cggaggcugaggcaggagaaucgu

SEQ ID NO: 392925 - RNA, 18 nt, Artificial Sequence
  Synthetic
cugagaugggagaaucgu

SEQ ID NO: 392926 - RNA, 19 nt, Artificial Sequence
  Synthetic
gcugagaugggagaaucgu

SEQ ID NO: 392927 - RNA, 20 nt, Artificial Sequence
  Synthetic
ggcugagaugggagaaucgu

SEQ ID NO: 392928 - RNA, 21 nt, Artificial Sequence
  Synthetic
aggcugagaugggagaaucgu

SEQ ID NO: 392929 - RNA, 22 nt, Artificial Sequence
  Synthetic
gaggcugagaugggagaaucgu

SEQ ID NO: 392930 - RNA, 23 nt, Artificial Sequence
  Synthetic
ggaggcugagaugggagaaucgu

SEQ ID NO: 392931 - RNA, 24 nt, Artificial Sequence
  Synthetic
aggaggcugagaugggagaaucgu

SEQ ID NO: 392932 - RNA, 18 nt, Artificial Sequence
  Synthetic
auaaauuccuagaaucgu

SEQ ID NO: 392933 - RNA, 19 nt, Artificial Sequence
  Synthetic
aauaaauuccuagaaucgu

SEQ ID NO: 392934 - RNA, 20 nt, Artificial Sequence
  Synthetic
caauaaauuccuagaaucgu

SEQ ID NO: 392935 - RNA, 21 nt, Artificial Sequence
  Synthetic
acaauaaauuccuagaaucgu

SEQ ID NO: 392936 - RNA, 22 nt, Artificial Sequence
  Synthetic
gacaauaaauuccuagaaucgu

SEQ ID NO: 392937 - RNA, 23 nt, Artificial Sequence
  Synthetic
ggacaauaaauuccuagaaucgu

SEQ ID NO: 392938 - RNA, 24 nt, Artificial Sequence
  Synthetic
uggacaauaaauuccuagaaucgu

SEQ ID NO: 392939 - RNA, 18 nt, Artificial Sequence
  Synthetic
aacauagugaaaccucgu

SEQ ID NO: 392940 - RNA, 19 nt, Artificial Sequence
  Synthetic
caacauagugaaaccucgu

SEQ ID NO: 392941 - RNA, 20 nt, Artificial Sequence
  Synthetic
acaacauagugaaaccucgu

SEQ ID NO: 392942 - RNA, 21 nt, Artificial Sequence
  Synthetic
gacaacauagugaaaccucgu

SEQ ID NO: 392943 - RNA, 22 nt, Artificial Sequence
  Synthetic
ggacaacauagugaaaccucgu

SEQ ID NO: 392944 - RNA, 23 nt, Artificial Sequence
  Synthetic
uggacaacauagugaaaccucgu

SEQ ID NO: 392945 - RNA, 24 nt, Artificial Sequence
  Synthetic
cuggacaacauagugaaaccucgu

SEQ ID NO: 392946 - RNA, 18 nt, Artificial Sequence
  Synthetic
aaaaccaucagaccucgu

SEQ ID NO: 392947 - RNA, 19 nt, Artificial Sequence
  Synthetic
uaaaaccaucagaccucgu

SEQ ID NO: 392948 - RNA, 20 nt, Artificial Sequence
  Synthetic
auaaaaccaucagaccucgu

SEQ ID NO: 392949 - RNA, 21 nt, Artificial Sequence
  Synthetic
uauaaaaccaucagaccucgu

SEQ ID NO: 392950 - RNA, 22 nt, Artificial Sequence
  Synthetic
uuauaaaaccaucagaccucgu

SEQ ID NO: 392951 - RNA, 23 nt, Artificial Sequence
  Synthetic
cuuauaaaaccaucagaccucgu

SEQ ID NO: 392952 - RNA, 24 nt, Artificial Sequence
  Synthetic
ccuuauaaaaccaucagaccucgu

SEQ ID NO: 392953 - RNA, 18 nt, Artificial Sequence
  Synthetic
uuuuucacuggggcucgu

SEQ ID NO: 392954 - RNA, 19 nt, Artificial Sequence
  Synthetic
auuuuucacuggggcucgu

SEQ ID NO: 392955 - RNA, 20 nt, Artificial Sequence
  Synthetic
aauuuuucacuggggcucgu

SEQ ID NO: 392956 - RNA, 21 nt, Artificial Sequence
  Synthetic
aaauuuuucacuggggcucgu

SEQ ID NO: 392957 - RNA, 22 nt, Artificial Sequence
  Synthetic
aaaauuuuucacuggggcucgu

SEQ ID NO: 392958 - RNA, 23 nt, Artificial Sequence
  Synthetic
uaaaauuuuucacuggggcucgu

SEQ ID NO: 392959 - RNA, 24 nt, Artificial Sequence
  Synthetic
auaaaauuuuucacuggggcucgu

SEQ ID NO: 392960 - RNA, 18 nt, Artificial Sequence
  Synthetic
uucagaauuugaagucgu

SEQ ID NO: 392961 - RNA, 19 nt, Artificial Sequence
  Synthetic
uuucagaauuugaagucgu

SEQ ID NO: 392962 - RNA, 20 nt, Artificial Sequence
  Synthetic
auuucagaauuugaagucgu

SEQ ID NO: 392963 - RNA, 21 nt, Artificial Sequence
  Synthetic
gauuucagaauuugaagucgu

SEQ ID NO: 392964 - RNA, 22 nt, Artificial Sequence
  Synthetic
agauuucagaauuugaagucgu

SEQ ID NO: 392965 - RNA, 23 nt, Artificial Sequence
  Synthetic
gagauuucagaauuugaagucgu

SEQ ID NO: 392966 - RNA, 24 nt, Artificial Sequence
  Synthetic
ugagauuucagaauuugaagucgu

SEQ ID NO: 392967 - RNA, 18 nt, Artificial Sequence
  Synthetic
cauugcuguuuuugucgu

SEQ ID NO: 392968 - RNA, 19 nt, Artificial Sequence
  Synthetic
ccauugcuguuuuugucgu

SEQ ID NO: 392969 - RNA, 20 nt, Artificial Sequence
  Synthetic
gccauugcuguuuuugucgu

SEQ ID NO: 392970 - RNA, 21 nt, Artificial Sequence
  Synthetic
ugccauugcuguuuuugucgu

SEQ ID NO: 392971 - RNA, 22 nt, Artificial Sequence
  Synthetic
cugccauugcuguuuuugucgu

SEQ ID NO: 392972 - RNA, 23 nt, Artificial Sequence
  Synthetic
gcugccauugcuguuuuugucgu

SEQ ID NO: 392973 - RNA, 24 nt, Artificial Sequence
  Synthetic
ugcugccauugcuguuuuugucgu

SEQ ID NO: 392974 - RNA, 18 nt, Artificial Sequence
  Synthetic
uccaaaaccaaaauucgu

SEQ ID NO: 392975 - RNA, 19 nt, Artificial Sequence
  Synthetic
uuccaaaaccaaaauucgu

SEQ ID NO: 392976 - RNA, 20 nt, Artificial Sequence
  Synthetic
uuuccaaaaccaaaauucgu

SEQ ID NO: 392977 - RNA, 21 nt, Artificial Sequence
  Synthetic
cuuuccaaaaccaaaauucgu

SEQ ID NO: 392978 - RNA, 22 nt, Artificial Sequence
  Synthetic
ccuuuccaaaaccaaaauucgu

SEQ ID NO: 392979 - RNA, 23 nt, Artificial Sequence
  Synthetic
gccuuuccaaaaccaaaauucgu

SEQ ID NO: 392980 - RNA, 24 nt, Artificial Sequence
  Synthetic
ggccuuuccaaaaccaaaauucgu

SEQ ID NO: 392981 - RNA, 18 nt, Artificial Sequence
  Synthetic
gggcaugcugucuuucgu

SEQ ID NO: 392982 - RNA, 19 nt, Artificial Sequence
  Synthetic
agggcaugcugucuuucgu

SEQ ID NO: 392983 - RNA, 20 nt, Artificial Sequence
  Synthetic
aagggcaugcugucuuucgu

SEQ ID NO: 392984 - RNA, 21 nt, Artificial Sequence
  Synthetic
caagggcaugcugucuuucgu

SEQ ID NO: 392985 - RNA, 22 nt, Artificial Sequence
  Synthetic
ucaagggcaugcugucuuucgu

SEQ ID NO: 392986 - RNA, 23 nt, Artificial Sequence
  Synthetic
gucaagggcaugcugucuuucgu

SEQ ID NO: 392987 - RNA, 24 nt, Artificial Sequence
  Synthetic
ugucaagggcaugcugucuuucgu

SEQ ID NO: 392988 - RNA, 18 nt, Artificial Sequence
  Synthetic
cuuuuagggaaguuucgu

SEQ ID NO: 392989 - RNA, 19 nt, Artificial Sequence
  Synthetic
ucuuuuagggaaguuucgu

SEQ ID NO: 392990 - RNA, 20 nt, Artificial Sequence
  Synthetic
gucuuuuagggaaguuucgu

SEQ ID NO: 392991 - RNA, 21 nt, Artificial Sequence
  Synthetic
ugucuuuuagggaaguuucgu

SEQ ID NO: 392992 - RNA, 22 nt, Artificial Sequence
  Synthetic
uugucuuuuagggaaguuucgu

SEQ ID NO: 392993 - RNA, 23 nt, Artificial Sequence
  Synthetic
auugucuuuuagggaaguuucgu

SEQ ID NO: 392994 - RNA, 24 nt, Artificial Sequence
  Synthetic
aauugucuuuuagggaaguuucgu

SEQ ID NO: 392995 - RNA, 18 nt, Artificial Sequence
  Synthetic
cccuguuguuuuuuucgu

SEQ ID NO: 392996 - RNA, 19 nt, Artificial Sequence
  Synthetic
ucccuguuguuuuuuucgu

SEQ ID NO: 392997 - RNA, 20 nt, Artificial Sequence
  Synthetic
uucccuguuguuuuuuucgu

SEQ ID NO: 392998 - RNA, 21 nt, Artificial Sequence
  Synthetic
guucccuguuguuuuuuucgu

SEQ ID NO: 392999 - RNA, 22 nt, Artificial Sequence
  Synthetic
cguucccuguuguuuuuuucgu

SEQ ID NO: 393000 - RNA, 23 nt, Artificial Sequence
  Synthetic
acguucccuguuguuuuuuucgu

SEQ ID NO: 393001 - RNA, 24 nt, Artificial Sequence
  Synthetic
aacguucccuguuguuuuuuucgu

SEQ ID NO: 393002 - RNA, 18 nt, Artificial Sequence
  Synthetic
gaaccuuaaaaaaaaggu

SEQ ID NO: 393003 - RNA, 19 nt, Artificial Sequence
  Synthetic
agaaccuuaaaaaaaaggu

SEQ ID NO: 393004 - RNA, 20 nt, Artificial Sequence
  Synthetic
aagaaccuuaaaaaaaaggu

SEQ ID NO: 393005 - RNA, 21 nt, Artificial Sequence
  Synthetic
uaagaaccuuaaaaaaaaggu

SEQ ID NO: 393006 - RNA, 22 nt, Artificial Sequence
  Synthetic
cuaagaaccuuaaaaaaaaggu

SEQ ID NO: 393007 - RNA, 23 nt, Artificial Sequence
  Synthetic
gcuaagaaccuuaaaaaaaaggu

SEQ ID NO: 393008 - RNA, 24 nt, Artificial Sequence
  Synthetic
agcuaagaaccuuaaaaaaaaggu

SEQ ID NO: 393009 - RNA, 18 nt, Artificial Sequence
  Synthetic
aauguaacagaaaaaggu

SEQ ID NO: 393010 - RNA, 19 nt, Artificial Sequence
  Synthetic
caauguaacagaaaaaggu

SEQ ID NO: 393011 - RNA, 20 nt, Artificial Sequence
  Synthetic
ucaauguaacagaaaaaggu

SEQ ID NO: 393012 - RNA, 21 nt, Artificial Sequence
  Synthetic
uucaauguaacagaaaaaggu

SEQ ID NO: 393013 - RNA, 22 nt, Artificial Sequence
  Synthetic
uuucaauguaacagaaaaaggu

SEQ ID NO: 393014 - RNA, 23 nt, Artificial Sequence
  Synthetic
uuuucaauguaacagaaaaaggu

SEQ ID NO: 393015 - RNA, 24 nt, Artificial Sequence
  Synthetic
uuuuucaauguaacagaaaaaggu

SEQ ID NO: 393016 - RNA, 18 nt, Artificial Sequence
  Synthetic
agcaaacccacaaaaggu

SEQ ID NO: 393017 - RNA, 19 nt, Artificial Sequence
  Synthetic
aagcaaacccacaaaaggu

SEQ ID NO: 393018 - RNA, 20 nt, Artificial Sequence
  Synthetic
caagcaaacccacaaaaggu

SEQ ID NO: 393019 - RNA, 21 nt, Artificial Sequence
  Synthetic
acaagcaaacccacaaaaggu

SEQ ID NO: 393020 - RNA, 22 nt, Artificial Sequence
  Synthetic
uacaagcaaacccacaaaaggu

SEQ ID NO: 393021 - RNA, 23 nt, Artificial Sequence
  Synthetic
auacaagcaaacccacaaaaggu

SEQ ID NO: 393022 - RNA, 24 nt, Artificial Sequence
  Synthetic
cauacaagcaaacccacaaaaggu

SEQ ID NO: 393023 - RNA, 18 nt, Artificial Sequence
  Synthetic
guuucauguacaaaaggu

SEQ ID NO: 393024 - RNA, 19 nt, Artificial Sequence
  Synthetic
aguuucauguacaaaaggu

SEQ ID NO: 393025 - RNA, 20 nt, Artificial Sequence
  Synthetic
gaguuucauguacaaaaggu

SEQ ID NO: 393026 - RNA, 21 nt, Artificial Sequence
  Synthetic
ugaguuucauguacaaaaggu

SEQ ID NO: 393027 - RNA, 22 nt, Artificial Sequence
  Synthetic
uugaguuucauguacaaaaggu

SEQ ID NO: 393028 - RNA, 23 nt, Artificial Sequence
  Synthetic
guugaguuucauguacaaaaggu

SEQ ID NO: 393029 - RNA, 24 nt, Artificial Sequence
  Synthetic
aguugaguuucauguacaaaaggu

SEQ ID NO: 393030 - RNA, 18 nt, Artificial Sequence
  Synthetic
cucuggugccgaaaaggu

SEQ ID NO: 393031 - RNA, 19 nt, Artificial Sequence
  Synthetic
ucucuggugccgaaaaggu

SEQ ID NO: 393032 - RNA, 20 nt, Artificial Sequence
  Synthetic
gucucuggugccgaaaaggu

SEQ ID NO: 393033 - RNA, 21 nt, Artificial Sequence
  Synthetic
agucucuggugccgaaaaggu

SEQ ID NO: 393034 - RNA, 22 nt, Artificial Sequence
  Synthetic
cagucucuggugccgaaaaggu

SEQ ID NO: 393035 - RNA, 23 nt, Artificial Sequence
  Synthetic
ccagucucuggugccgaaaaggu

SEQ ID NO: 393036 - RNA, 24 nt, Artificial Sequence
  Synthetic
accagucucuggugccgaaaaggu

SEQ ID NO: 393037 - RNA, 18 nt, Artificial Sequence
  Synthetic
aacaagaauugaaaaggu

SEQ ID NO: 393038 - RNA, 19 nt, Artificial Sequence
  Synthetic
aaacaagaauugaaaaggu

SEQ ID NO: 393039 - RNA, 20 nt, Artificial Sequence
  Synthetic
caaacaagaauugaaaaggu

SEQ ID NO: 393040 - RNA, 21 nt, Artificial Sequence
  Synthetic
ccaaacaagaauugaaaaggu

SEQ ID NO: 393041 - RNA, 22 nt, Artificial Sequence
  Synthetic
uccaaacaagaauugaaaaggu

SEQ ID NO: 393042 - RNA, 23 nt, Artificial Sequence
  Synthetic
cuccaaacaagaauugaaaaggu

SEQ ID NO: 393043 - RNA, 24 nt, Artificial Sequence
  Synthetic
ucuccaaacaagaauugaaaaggu

SEQ ID NO: 393044 - RNA, 18 nt, Artificial Sequence
  Synthetic
uuaauucuucuaaaaggu

SEQ ID NO: 393045 - RNA, 19 nt, Artificial Sequence
  Synthetic
uuuaauucuucuaaaaggu

SEQ ID NO: 393046 - RNA, 20 nt, Artificial Sequence
  Synthetic
guuuaauucuucuaaaaggu

SEQ ID NO: 393047 - RNA, 21 nt, Artificial Sequence
  Synthetic
uguuuaauucuucuaaaaggu

SEQ ID NO: 393048 - RNA, 22 nt, Artificial Sequence
  Synthetic
auguuuaauucuucuaaaaggu

SEQ ID NO: 393049 - RNA, 23 nt, Artificial Sequence
  Synthetic
aauguuuaauucuucuaaaaggu

SEQ ID NO: 393050 - RNA, 24 nt, Artificial Sequence
  Synthetic
caauguuuaauucuucuaaaaggu

SEQ ID NO: 393051 - RNA, 18 nt, Artificial Sequence
  Synthetic
uggagaauagucaaaggu

SEQ ID NO: 393052 - RNA, 19 nt, Artificial Sequence
  Synthetic
auggagaauagucaaaggu

SEQ ID NO: 393053 - RNA, 20 nt, Artificial Sequence
  Synthetic
gauggagaauagucaaaggu

SEQ ID NO: 393054 - RNA, 21 nt, Artificial Sequence
  Synthetic
ggauggagaauagucaaaggu

SEQ ID NO: 393055 - RNA, 22 nt, Artificial Sequence
  Synthetic
aggauggagaauagucaaaggu

SEQ ID NO: 393056 - RNA, 23 nt, Artificial Sequence
  Synthetic
gaggauggagaauagucaaaggu

SEQ ID NO: 393057 - RNA, 24 nt, Artificial Sequence
  Synthetic
ggaggauggagaauagucaaaggu

SEQ ID NO: 393058 - RNA, 18 nt, Artificial Sequence
  Synthetic
aaaggugaaaagaaaggu

SEQ ID NO: 393059 - RNA, 19 nt, Artificial Sequence
  Synthetic
gaaaggugaaaagaaaggu

SEQ ID NO: 393060 - RNA, 20 nt, Artificial Sequence
  Synthetic
ggaaaggugaaaagaaaggu

SEQ ID NO: 393061 - RNA, 21 nt, Artificial Sequence
  Synthetic
uggaaaggugaaaagaaaggu

SEQ ID NO: 393062 - RNA, 22 nt, Artificial Sequence
  Synthetic
uuggaaaggugaaaagaaaggu

SEQ ID NO: 393063 - RNA, 23 nt, Artificial Sequence
  Synthetic
cuuggaaaggugaaaagaaaggu

SEQ ID NO: 393064 - RNA, 24 nt, Artificial Sequence
  Synthetic
ucuuggaaaggugaaaagaaaggu

SEQ ID NO: 393065 - RNA, 18 nt, Artificial Sequence
  Synthetic
gagaacaggaugaaaggu

SEQ ID NO: 393066 - RNA, 19 nt, Artificial Sequence
  Synthetic
agagaacaggaugaaaggu

SEQ ID NO: 393067 - RNA, 20 nt, Artificial Sequence
  Synthetic
uagagaacaggaugaaaggu

SEQ ID NO: 393068 - RNA, 21 nt, Artificial Sequence
  Synthetic
cuagagaacaggaugaaaggu

SEQ ID NO: 393069 - RNA, 22 nt, Artificial Sequence
  Synthetic
gcuagagaacaggaugaaaggu

SEQ ID NO: 393070 - RNA, 23 nt, Artificial Sequence
  Synthetic
ugcuagagaacaggaugaaaggu

SEQ ID NO: 393071 - RNA, 24 nt, Artificial Sequence
  Synthetic
augcuagagaacaggaugaaaggu

SEQ ID NO: 393072 - RNA, 18 nt, Artificial Sequence
  Synthetic
ccaggaaauccuaaaggu

SEQ ID NO: 393073 - RNA, 19 nt, Artificial Sequence
  Synthetic
accaggaaauccuaaaggu

SEQ ID NO: 393074 - RNA, 20 nt, Artificial Sequence
  Synthetic
uaccaggaaauccuaaaggu

SEQ ID NO: 393075 - RNA, 21 nt, Artificial Sequence
  Synthetic
auaccaggaaauccuaaaggu

SEQ ID NO: 393076 - RNA, 22 nt, Artificial Sequence
  Synthetic
gauaccaggaaauccuaaaggu

SEQ ID NO: 393077 - RNA, 23 nt, Artificial Sequence
  Synthetic
agauaccaggaaauccuaaaggu

SEQ ID NO: 393078 - RNA, 24 nt, Artificial Sequence
  Synthetic
aagauaccaggaaauccuaaaggu

SEQ ID NO: 393079 - RNA, 18 nt, Artificial Sequence
  Synthetic
aaauuuauuuuuaaaggu

SEQ ID NO: 393080 - RNA, 19 nt, Artificial Sequence
  Synthetic
aaaauuuauuuuuaaaggu

SEQ ID NO: 393081 - RNA, 20 nt, Artificial Sequence
  Synthetic
aaaaauuuauuuuuaaaggu

SEQ ID NO: 393082 - RNA, 21 nt, Artificial Sequence
  Synthetic
caaaaauuuauuuuuaaaggu

SEQ ID NO: 393083 - RNA, 22 nt, Artificial Sequence
  Synthetic
ucaaaaauuuauuuuuaaaggu

SEQ ID NO: 393084 - RNA, 23 nt, Artificial Sequence
  Synthetic
aucaaaaauuuauuuuuaaaggu

SEQ ID NO: 393085 - RNA, 24 nt, Artificial Sequence
  Synthetic
gaucaaaaauuuauuuuuaaaggu

SEQ ID NO: 393086 - RNA, 18 nt, Artificial Sequence
  Synthetic
cgccaccucccacaaggu

SEQ ID NO: 393087 - RNA, 19 nt, Artificial Sequence
  Synthetic
ucgccaccucccacaaggu

SEQ ID NO: 393088 - RNA, 20 nt, Artificial Sequence
  Synthetic
aucgccaccucccacaaggu

SEQ ID NO: 393089 - RNA, 21 nt, Artificial Sequence
  Synthetic
uaucgccaccucccacaaggu

SEQ ID NO: 393090 - RNA, 22 nt, Artificial Sequence
  Synthetic
cuaucgccaccucccacaaggu

SEQ ID NO: 393091 - RNA, 23 nt, Artificial Sequence
  Synthetic
ucuaucgccaccucccacaaggu

SEQ ID NO: 393092 - RNA, 24 nt, Artificial Sequence
  Synthetic
uucuaucgccaccucccacaaggu

SEQ ID NO: 393093 - RNA, 18 nt, Artificial Sequence
  Synthetic
gcgggcagaucacaaggu

SEQ ID NO: 393094 - RNA, 19 nt, Artificial Sequence
  Synthetic
ggcgggcagaucacaaggu

SEQ ID NO: 393095 - RNA, 20 nt, Artificial Sequence
  Synthetic
aggcgggcagaucacaaggu

SEQ ID NO: 393096 - RNA, 21 nt, Artificial Sequence
  Synthetic
caggcgggcagaucacaaggu

SEQ ID NO: 393097 - RNA, 22 nt, Artificial Sequence
  Synthetic
ccaggcgggcagaucacaaggu

SEQ ID NO: 393098 - RNA, 23 nt, Artificial Sequence
  Synthetic
cccaggcgggcagaucacaaggu

SEQ ID NO: 393099 - RNA, 24 nt, Artificial Sequence
  Synthetic
gcccaggcgggcagaucacaaggu

SEQ ID NO: 393100 - RNA, 18 nt, Artificial Sequence
  Synthetic
auaagaaggagacaaggu

SEQ ID NO: 393101 - RNA, 19 nt, Artificial Sequence
  Synthetic
gauaagaaggagacaaggu

SEQ ID NO: 393102 - RNA, 20 nt, Artificial Sequence
  Synthetic
ggauaagaaggagacaaggu

SEQ ID NO: 393103 - RNA, 21 nt, Artificial Sequence
  Synthetic
uggauaagaaggagacaaggu

SEQ ID NO: 393104 - RNA, 22 nt, Artificial Sequence
  Synthetic
guggauaagaaggagacaaggu

SEQ ID NO: 393105 - RNA, 23 nt, Artificial Sequence
  Synthetic
aguggauaagaaggagacaaggu

SEQ ID NO: 393106 - RNA, 24 nt, Artificial Sequence
  Synthetic
gaguggauaagaaggagacaaggu

SEQ ID NO: 393107 - RNA, 18 nt, Artificial Sequence
  Synthetic
uggaaaugucuccaaggu

SEQ ID NO: 393108 - RNA, 19 nt, Artificial Sequence
  Synthetic
cuggaaaugucuccaaggu

SEQ ID NO: 393109 - RNA, 20 nt, Artificial Sequence
  Synthetic
ucuggaaaugucuccaaggu

SEQ ID NO: 393110 - RNA, 21 nt, Artificial Sequence
  Synthetic
aucuggaaaugucuccaaggu

SEQ ID NO: 393111 - RNA, 22 nt, Artificial Sequence
  Synthetic
aaucuggaaaugucuccaaggu

SEQ ID NO: 393112 - RNA, 23 nt, Artificial Sequence
  Synthetic
caaucuggaaaugucuccaaggu

SEQ ID NO: 393113 - RNA, 24 nt, Artificial Sequence
  Synthetic
acaaucuggaaaugucuccaaggu

SEQ ID NO: 393114 - RNA, 18 nt, Artificial Sequence
  Synthetic
aauugcuucaagcaaggu

SEQ ID NO: 393115 - RNA, 19 nt, Artificial Sequence
  Synthetic
aaauugcuucaagcaaggu

SEQ ID NO: 393116 - RNA, 20 nt, Artificial Sequence
  Synthetic
aaaauugcuucaagcaaggu

SEQ ID NO: 393117 - RNA, 21 nt, Artificial Sequence
  Synthetic
uaaaauugcuucaagcaaggu

SEQ ID NO: 393118 - RNA, 22 nt, Artificial Sequence
  Synthetic
uuaaaauugcuucaagcaaggu

SEQ ID NO: 393119 - RNA, 23 nt, Artificial Sequence
  Synthetic
auuaaaauugcuucaagcaaggu

SEQ ID NO: 393120 - RNA, 24 nt, Artificial Sequence
  Synthetic
gauuaaaauugcuucaagcaaggu

SEQ ID NO: 393121 - RNA, 18 nt, Artificial Sequence
  Synthetic
gguugaagugagcaaggu

SEQ ID NO: 393122 - RNA, 19 nt, Artificial Sequence
  Synthetic
ugguugaagugagcaaggu

SEQ ID NO: 393123 - RNA, 20 nt, Artificial Sequence
  Synthetic
uugguugaagugagcaaggu

SEQ ID NO: 393124 - RNA, 21 nt, Artificial Sequence
  Synthetic
auugguugaagugagcaaggu

SEQ ID NO: 393125 - RNA, 22 nt, Artificial Sequence
  Synthetic
aauugguugaagugagcaaggu

SEQ ID NO: 393126 - RNA, 23 nt, Artificial Sequence
  Synthetic
uaauugguugaagugagcaaggu

SEQ ID NO: 393127 - RNA, 24 nt, Artificial Sequence
  Synthetic
uuaauugguugaagugagcaaggu

SEQ ID NO: 393128 - RNA, 18 nt, Artificial Sequence
  Synthetic
uuauuucccuggcaaggu

SEQ ID NO: 393129 - RNA, 19 nt, Artificial Sequence
  Synthetic
uuuauuucccuggcaaggu

SEQ ID NO: 393130 - RNA, 20 nt, Artificial Sequence
  Synthetic
auuuauuucccuggcaaggu

SEQ ID NO: 393131 - RNA, 21 nt, Artificial Sequence
  Synthetic
aauuuauuucccuggcaaggu

SEQ ID NO: 393132 - RNA, 22 nt, Artificial Sequence
  Synthetic
aaauuuauuucccuggcaaggu

SEQ ID NO: 393133 - RNA, 23 nt, Artificial Sequence
  Synthetic
aaaauuuauuucccuggcaaggu

SEQ ID NO: 393134 - RNA, 24 nt, Artificial Sequence
  Synthetic
uaaaauuuauuucccuggcaaggu

SEQ ID NO: 393135 - RNA, 18 nt, Artificial Sequence
  Synthetic
uuucuuucaugucaaggu

SEQ ID NO: 393136 - RNA, 19 nt, Artificial Sequence
  Synthetic
uuuucuuucaugucaaggu

SEQ ID NO: 393137 - RNA, 20 nt, Artificial Sequence
  Synthetic
auuuucuuucaugucaaggu

SEQ ID NO: 393138 - RNA, 21 nt, Artificial Sequence
  Synthetic
aauuuucuuucaugucaaggu

SEQ ID NO: 393139 - RNA, 22 nt, Artificial Sequence
  Synthetic
uaauuuucuuucaugucaaggu

SEQ ID NO: 393140 - RNA, 23 nt, Artificial Sequence
  Synthetic
auaauuuucuuucaugucaaggu

SEQ ID NO: 393141 - RNA, 24 nt, Artificial Sequence
  Synthetic
aauaauuuucuuucaugucaaggu

SEQ ID NO: 393142 - RNA, 18 nt, Artificial Sequence
  Synthetic
ugaaaaacucuucaaggu

SEQ ID NO: 393143 - RNA, 19 nt, Artificial Sequence
  Synthetic
cugaaaaacucuucaaggu

SEQ ID NO: 393144 - RNA, 20 nt, Artificial Sequence
  Synthetic
ucugaaaaacucuucaaggu

SEQ ID NO: 393145 - RNA, 21 nt, Artificial Sequence
  Synthetic
uucugaaaaacucuucaaggu

SEQ ID NO: 393146 - RNA, 22 nt, Artificial Sequence
  Synthetic
uuucugaaaaacucuucaaggu

SEQ ID NO: 393147 - RNA, 23 nt, Artificial Sequence
  Synthetic
guuucugaaaaacucuucaaggu

SEQ ID NO: 393148 - RNA, 24 nt, Artificial Sequence
  Synthetic
aguuucugaaaaacucuucaaggu

SEQ ID NO: 393149 - RNA, 18 nt, Artificial Sequence
  Synthetic
uguggcuguguucaaggu

SEQ ID NO: 393150 - RNA, 19 nt, Artificial Sequence
  Synthetic
uuguggcuguguucaaggu

SEQ ID NO: 393151 - RNA, 20 nt, Artificial Sequence
  Synthetic
cuuguggcuguguucaaggu

SEQ ID NO: 393152 - RNA, 21 nt, Artificial Sequence
  Synthetic
gcuuguggcuguguucaaggu

SEQ ID NO: 393153 - RNA, 22 nt, Artificial Sequence
  Synthetic
ugcuuguggcuguguucaaggu

SEQ ID NO: 393154 - RNA, 23 nt, Artificial Sequence
  Synthetic
cugcuuguggcuguguucaaggu

SEQ ID NO: 393155 - RNA, 24 nt, Artificial Sequence
  Synthetic
ucugcuuguggcuguguucaaggu

SEQ ID NO: 393156 - RNA, 18 nt, Artificial Sequence
  Synthetic
gagcuuuuuuuucaaggu

SEQ ID NO: 393157 - RNA, 19 nt, Artificial Sequence
  Synthetic
ugagcuuuuuuuucaaggu

SEQ ID NO: 393158 - RNA, 20 nt, Artificial Sequence
  Synthetic
uugagcuuuuuuuucaaggu

SEQ ID NO: 393159 - RNA, 21 nt, Artificial Sequence
  Synthetic
uuugagcuuuuuuuucaaggu

SEQ ID NO: 393160 - RNA, 22 nt, Artificial Sequence
  Synthetic
auuugagcuuuuuuuucaaggu

SEQ ID NO: 393161 - RNA, 23 nt, Artificial Sequence
  Synthetic
gauuugagcuuuuuuuucaaggu

SEQ ID NO: 393162 - RNA, 24 nt, Artificial Sequence
  Synthetic
cgauuugagcuuuuuuuucaaggu

SEQ ID NO: 393163 - RNA, 18 nt, Artificial Sequence
  Synthetic
aauaacccacaagaaggu

SEQ ID NO: 393164 - RNA, 19 nt, Artificial Sequence
  Synthetic
aaauaacccacaagaaggu

SEQ ID NO: 393165 - RNA, 20 nt, Artificial Sequence
  Synthetic
caaauaacccacaagaaggu

SEQ ID NO: 393166 - RNA, 21 nt, Artificial Sequence
  Synthetic
ucaaauaacccacaagaaggu

SEQ ID NO: 393167 - RNA, 22 nt, Artificial Sequence
  Synthetic
uucaaauaacccacaagaaggu

SEQ ID NO: 393168 - RNA, 23 nt, Artificial Sequence
  Synthetic
guucaaauaacccacaagaaggu

SEQ ID NO: 393169 - RNA, 24 nt, Artificial Sequence
  Synthetic
uguucaaauaacccacaagaaggu

SEQ ID NO: 393170 - RNA, 18 nt, Artificial Sequence
  Synthetic
caaagauuggaagaaggu

SEQ ID NO: 393171 - RNA, 19 nt, Artificial Sequence
  Synthetic
gcaaagauuggaagaaggu

SEQ ID NO: 393172 - RNA, 20 nt, Artificial Sequence
  Synthetic
agcaaagauuggaagaaggu

SEQ ID NO: 393173 - RNA, 21 nt, Artificial Sequence
  Synthetic
gagcaaagauuggaagaaggu

SEQ ID NO: 393174 - RNA, 22 nt, Artificial Sequence
  Synthetic
ugagcaaagauuggaagaaggu

SEQ ID NO: 393175 - RNA, 23 nt, Artificial Sequence
  Synthetic
uugagcaaagauuggaagaaggu

SEQ ID NO: 393176 - RNA, 24 nt, Artificial Sequence
  Synthetic
uuugagcaaagauuggaagaaggu

SEQ ID NO: 393177 - RNA, 18 nt, Artificial Sequence
  Synthetic
gaucaucaagcagaaggu

SEQ ID NO: 393178 - RNA, 19 nt, Artificial Sequence
  Synthetic
ugaucaucaagcagaaggu

SEQ ID NO: 393179 - RNA, 20 nt, Artificial Sequence
  Synthetic
augaucaucaagcagaaggu

SEQ ID NO: 393180 - RNA, 21 nt, Artificial Sequence
  Synthetic
gaugaucaucaagcagaaggu

SEQ ID NO: 393181 - RNA, 22 nt, Artificial Sequence
  Synthetic
agaugaucaucaagcagaaggu

SEQ ID NO: 393182 - RNA, 23 nt, Artificial Sequence
  Synthetic
gagaugaucaucaagcagaaggu

SEQ ID NO: 393183 - RNA, 24 nt, Artificial Sequence
  Synthetic
cgagaugaucaucaagcagaaggu

SEQ ID NO: 393184 - RNA, 18 nt, Artificial Sequence
  Synthetic
uccaguguaagagaaggu

SEQ ID NO: 393185 - RNA, 19 nt, Artificial Sequence
  Synthetic
uuccaguguaagagaaggu

SEQ ID NO: 393186 - RNA, 20 nt, Artificial Sequence
  Synthetic
auuccaguguaagagaaggu

SEQ ID NO: 393187 - RNA, 21 nt, Artificial Sequence
  Synthetic
gauuccaguguaagagaaggu

SEQ ID NO: 393188 - RNA, 22 nt, Artificial Sequence
  Synthetic
ggauuccaguguaagagaaggu

SEQ ID NO: 393189 - RNA, 23 nt, Artificial Sequence
  Synthetic
aggauuccaguguaagagaaggu

SEQ ID NO: 393190 - RNA, 24 nt, Artificial Sequence
  Synthetic
aaggauuccaguguaagagaaggu

SEQ ID NO: 393191 - RNA, 18 nt, Artificial Sequence
  Synthetic
aggagagcaggagaaggu

SEQ ID NO: 393192 - RNA, 19 nt, Artificial Sequence
  Synthetic
aaggagagcaggagaaggu

SEQ ID NO: 393193 - RNA, 20 nt, Artificial Sequence
  Synthetic
aaaggagagcaggagaaggu

SEQ ID NO: 393194 - RNA, 21 nt, Artificial Sequence
  Synthetic
gaaaggagagcaggagaaggu

SEQ ID NO: 393195 - RNA, 22 nt, Artificial Sequence
  Synthetic
ugaaaggagagcaggagaaggu

SEQ ID NO: 393196 - RNA, 23 nt, Artificial Sequence
  Synthetic
gugaaaggagagcaggagaaggu

SEQ ID NO: 393197 - RNA, 24 nt, Artificial Sequence
  Synthetic
agugaaaggagagcaggagaaggu

SEQ ID NO: 393198 - RNA, 18 nt, Artificial Sequence
  Synthetic
auaguaaauaaggaaggu

SEQ ID NO: 393199 - RNA, 19 nt, Artificial Sequence
  Synthetic
aauaguaaauaaggaaggu

SEQ ID NO: 393200 - RNA, 20 nt, Artificial Sequence
  Synthetic
uaauaguaaauaaggaaggu

SEQ ID NO: 393201 - RNA, 21 nt, Artificial Sequence
  Synthetic
auaauaguaaauaaggaaggu

SEQ ID NO: 393202 - RNA, 22 nt, Artificial Sequence
  Synthetic
aauaauaguaaauaaggaaggu

SEQ ID NO: 393203 - RNA, 23 nt, Artificial Sequence
  Synthetic
aaauaauaguaaauaaggaaggu

SEQ ID NO: 393204 - RNA, 24 nt, Artificial Sequence
  Synthetic
aaaauaauaguaaauaaggaaggu

SEQ ID NO: 393205 - RNA, 18 nt, Artificial Sequence
  Synthetic
gcugcugguugggaaggu

SEQ ID NO: 393206 - RNA, 19 nt, Artificial Sequence
  Synthetic
agcugcugguugggaaggu

SEQ ID NO: 393207 - RNA, 20 nt, Artificial Sequence
  Synthetic
cagcugcugguugggaaggu

SEQ ID NO: 393208 - RNA, 21 nt, Artificial Sequence
  Synthetic
acagcugcugguugggaaggu

SEQ ID NO: 393209 - RNA, 22 nt, Artificial Sequence
  Synthetic
uacagcugcugguugggaaggu

SEQ ID NO: 393210 - RNA, 23 nt, Artificial Sequence
  Synthetic
guacagcugcugguugggaaggu

SEQ ID NO: 393211 - RNA, 24 nt, Artificial Sequence
  Synthetic
uguacagcugcugguugggaaggu

SEQ ID NO: 393212 - RNA, 18 nt, Artificial Sequence
  Synthetic
ugcucuucucuugaaggu

SEQ ID NO: 393213 - RNA, 19 nt, Artificial Sequence
  Synthetic
gugcucuucucuugaaggu

SEQ ID NO: 393214 - RNA, 20 nt, Artificial Sequence
  Synthetic
ugugcucuucucuugaaggu

SEQ ID NO: 393215 - RNA, 21 nt, Artificial Sequence
  Synthetic
augugcucuucucuugaaggu

SEQ ID NO: 393216 - RNA, 22 nt, Artificial Sequence
  Synthetic
gaugugcucuucucuugaaggu

SEQ ID NO: 393217 - RNA, 23 nt, Artificial Sequence
  Synthetic
agaugugcucuucucuugaaggu

SEQ ID NO: 393218 - RNA, 24 nt, Artificial Sequence
  Synthetic
uagaugugcucuucucuugaaggu

SEQ ID NO: 393219 - RNA, 18 nt, Artificial Sequence
  Synthetic
aggugggucacauaaggu

SEQ ID NO: 393220 - RNA, 19 nt, Artificial Sequence
  Synthetic
caggugggucacauaaggu

SEQ ID NO: 393221 - RNA, 20 nt, Artificial Sequence
  Synthetic
gcaggugggucacauaaggu

SEQ ID NO: 393222 - RNA, 21 nt, Artificial Sequence
  Synthetic
ggcaggugggucacauaaggu

SEQ ID NO: 393223 - RNA, 22 nt, Artificial Sequence
  Synthetic
aggcaggugggucacauaaggu

SEQ ID NO: 393224 - RNA, 23 nt, Artificial Sequence
  Synthetic
gaggcaggugggucacauaaggu

SEQ ID NO: 393225 - RNA, 24 nt, Artificial Sequence
  Synthetic
ugaggcaggugggucacauaaggu

SEQ ID NO: 393226 - RNA, 18 nt, Artificial Sequence
  Synthetic
agcagugguacauaaggu

SEQ ID NO: 393227 - RNA, 19 nt, Artificial Sequence
  Synthetic
gagcagugguacauaaggu

SEQ ID NO: 393228 - RNA, 20 nt, Artificial Sequence
  Synthetic
ggagcagugguacauaaggu

SEQ ID NO: 393229 - RNA, 21 nt, Artificial Sequence
  Synthetic
aggagcagugguacauaaggu

SEQ ID NO: 393230 - RNA, 22 nt, Artificial Sequence
  Synthetic
uaggagcagugguacauaaggu

SEQ ID NO: 393231 - RNA, 23 nt, Artificial Sequence
  Synthetic
uuaggagcagugguacauaaggu

SEQ ID NO: 393232 - RNA, 24 nt, Artificial Sequence
  Synthetic
uuuaggagcagugguacauaaggu

SEQ ID NO: 393233 - RNA, 18 nt, Artificial Sequence
  Synthetic
gaguaaauaauauaaggu

SEQ ID NO: 393234 - RNA, 19 nt, Artificial Sequence
  Synthetic
ugaguaaauaauauaaggu

SEQ ID NO: 393235 - RNA, 20 nt, Artificial Sequence
  Synthetic
cugaguaaauaauauaaggu

SEQ ID NO: 393236 - RNA, 21 nt, Artificial Sequence
  Synthetic
gcugaguaaauaauauaaggu

SEQ ID NO: 393237 - RNA, 22 nt, Artificial Sequence
  Synthetic
ggcugaguaaauaauauaaggu

SEQ ID NO: 393238 - RNA, 23 nt, Artificial Sequence
  Synthetic
aggcugaguaaauaauauaaggu

SEQ ID NO: 393239 - RNA, 24 nt, Artificial Sequence
  Synthetic
uaggcugaguaaauaauauaaggu

SEQ ID NO: 393240 - RNA, 18 nt, Artificial Sequence
  Synthetic
caaugaaaugccuaaggu

SEQ ID NO: 393241 - RNA, 19 nt, Artificial Sequence
  Synthetic
gcaaugaaaugccuaaggu

SEQ ID NO: 393242 - RNA, 20 nt, Artificial Sequence
  Synthetic
ugcaaugaaaugccuaaggu

SEQ ID NO: 393243 - RNA, 21 nt, Artificial Sequence
  Synthetic
cugcaaugaaaugccuaaggu

SEQ ID NO: 393244 - RNA, 22 nt, Artificial Sequence
  Synthetic
ccugcaaugaaaugccuaaggu

SEQ ID NO: 393245 - RNA, 23 nt, Artificial Sequence
  Synthetic
accugcaaugaaaugccuaaggu

SEQ ID NO: 393246 - RNA, 24 nt, Artificial Sequence
  Synthetic
uaccugcaaugaaaugccuaaggu

SEQ ID NO: 393247 - RNA, 18 nt, Artificial Sequence
  Synthetic
acuuuggaaggcuaaggu

SEQ ID NO: 393248 - RNA, 19 nt, Artificial Sequence
  Synthetic
cacuuuggaaggcuaaggu

SEQ ID NO: 393249 - RNA, 20 nt, Artificial Sequence
  Synthetic
gcacuuuggaaggcuaaggu

SEQ ID NO: 393250 - RNA, 21 nt, Artificial Sequence
  Synthetic
agcacuuuggaaggcuaaggu

SEQ ID NO: 393251 - RNA, 22 nt, Artificial Sequence
  Synthetic
uagcacuuuggaaggcuaaggu

SEQ ID NO: 393252 - RNA, 23 nt, Artificial Sequence
  Synthetic
cuagcacuuuggaaggcuaaggu

SEQ ID NO: 393253 - RNA, 24 nt, Artificial Sequence
  Synthetic
ccuagcacuuuggaaggcuaaggu

SEQ ID NO: 393254 - RNA, 18 nt, Artificial Sequence
  Synthetic
ugaauguaaaucuaaggu

SEQ ID NO: 393255 - RNA, 19 nt, Artificial Sequence
  Synthetic
gugaauguaaaucuaaggu

SEQ ID NO: 393256 - RNA, 20 nt, Artificial Sequence
  Synthetic
ugugaauguaaaucuaaggu

SEQ ID NO: 393257 - RNA, 21 nt, Artificial Sequence
  Synthetic
uugugaauguaaaucuaaggu

SEQ ID NO: 393258 - RNA, 22 nt, Artificial Sequence
  Synthetic
guugugaauguaaaucuaaggu

SEQ ID NO: 393259 - RNA, 23 nt, Artificial Sequence
  Synthetic
aguugugaauguaaaucuaaggu

SEQ ID NO: 393260 - RNA, 24 nt, Artificial Sequence
  Synthetic
caguugugaauguaaaucuaaggu

SEQ ID NO: 393261 - RNA, 18 nt, Artificial Sequence
  Synthetic
cucuaguagcuguaaggu

SEQ ID NO: 393262 - RNA, 19 nt, Artificial Sequence
  Synthetic
acucuaguagcuguaaggu

SEQ ID NO: 393263 - RNA, 20 nt, Artificial Sequence
  Synthetic
cacucuaguagcuguaaggu

SEQ ID NO: 393264 - RNA, 21 nt, Artificial Sequence
  Synthetic
ccacucuaguagcuguaaggu

SEQ ID NO: 393265 - RNA, 22 nt, Artificial Sequence
  Synthetic
accacucuaguagcuguaaggu

SEQ ID NO: 393266 - RNA, 23 nt, Artificial Sequence
  Synthetic
gaccacucuaguagcuguaaggu

SEQ ID NO: 393267 - RNA, 24 nt, Artificial Sequence
  Synthetic
ugaccacucuaguagcuguaaggu

SEQ ID NO: 393268 - RNA, 18 nt, Artificial Sequence
  Synthetic
cucagagacuauuaaggu

SEQ ID NO: 393269 - RNA, 19 nt, Artificial Sequence
  Synthetic
gcucagagacuauuaaggu

SEQ ID NO: 393270 - RNA, 20 nt, Artificial Sequence
  Synthetic
ggcucagagacuauuaaggu

SEQ ID NO: 393271 - RNA, 21 nt, Artificial Sequence
  Synthetic
aggcucagagacuauuaaggu

SEQ ID NO: 393272 - RNA, 22 nt, Artificial Sequence
  Synthetic
gaggcucagagacuauuaaggu

SEQ ID NO: 393273 - RNA, 23 nt, Artificial Sequence
  Synthetic
agaggcucagagacuauuaaggu

SEQ ID NO: 393274 - RNA, 24 nt, Artificial Sequence
  Synthetic
aagaggcucagagacuauuaaggu

SEQ ID NO: 393275 - RNA, 18 nt, Artificial Sequence
  Synthetic
accauuugacguuaaggu

SEQ ID NO: 393276 - RNA, 19 nt, Artificial Sequence
  Synthetic
gaccauuugacguuaaggu

SEQ ID NO: 393277 - RNA, 20 nt, Artificial Sequence
  Synthetic
ggaccauuugacguuaaggu

SEQ ID NO: 393278 - RNA, 21 nt, Artificial Sequence
  Synthetic
aggaccauuugacguuaaggu

SEQ ID NO: 393279 - RNA, 22 nt, Artificial Sequence
  Synthetic
aaggaccauuugacguuaaggu

SEQ ID NO: 393280 - RNA, 23 nt, Artificial Sequence
  Synthetic
gaaggaccauuugacguuaaggu

SEQ ID NO: 393281 - RNA, 24 nt, Artificial Sequence
  Synthetic
agaaggaccauuugacguuaaggu

SEQ ID NO: 393282 - RNA, 18 nt, Artificial Sequence
  Synthetic
caagucugugcaacaggu

SEQ ID NO: 393283 - RNA, 19 nt, Artificial Sequence
  Synthetic
acaagucugugcaacaggu

SEQ ID NO: 393284 - RNA, 20 nt, Artificial Sequence
  Synthetic
aacaagucugugcaacaggu

SEQ ID NO: 393285 - RNA, 21 nt, Artificial Sequence
  Synthetic
aaacaagucugugcaacaggu

SEQ ID NO: 393286 - RNA, 22 nt, Artificial Sequence
  Synthetic
gaaacaagucugugcaacaggu

SEQ ID NO: 393287 - RNA, 23 nt, Artificial Sequence
  Synthetic
agaaacaagucugugcaacaggu

SEQ ID NO: 393288 - RNA, 24 nt, Artificial Sequence
  Synthetic
gagaaacaagucugugcaacaggu

SEQ ID NO: 393289 - RNA, 18 nt, Artificial Sequence
  Synthetic
uuagggcauugaacaggu

SEQ ID NO: 393290 - RNA, 19 nt, Artificial Sequence
  Synthetic
uuuagggcauugaacaggu

SEQ ID NO: 393291 - RNA, 20 nt, Artificial Sequence
  Synthetic
uuuuagggcauugaacaggu

SEQ ID NO: 393292 - RNA, 21 nt, Artificial Sequence
  Synthetic
uuuuuagggcauugaacaggu

SEQ ID NO: 393293 - RNA, 22 nt, Artificial Sequence
  Synthetic
uuuuuuagggcauugaacaggu

SEQ ID NO: 393294 - RNA, 23 nt, Artificial Sequence
  Synthetic
uuuuuuuagggcauugaacaggu

SEQ ID NO: 393295 - RNA, 24 nt, Artificial Sequence
  Synthetic
auuuuuuuagggcauugaacaggu

SEQ ID NO: 393296 - RNA, 18 nt, Artificial Sequence
  Synthetic
guaugaaaggacacaggu

SEQ ID NO: 393297 - RNA, 19 nt, Artificial Sequence
  Synthetic
cguaugaaaggacacaggu

SEQ ID NO: 393298 - RNA, 20 nt, Artificial Sequence
  Synthetic
gcguaugaaaggacacaggu

SEQ ID NO: 393299 - RNA, 21 nt, Artificial Sequence
  Synthetic
agcguaugaaaggacacaggu

SEQ ID NO: 393300 - RNA, 22 nt, Artificial Sequence
  Synthetic
aagcguaugaaaggacacaggu

SEQ ID NO: 393301 - RNA, 23 nt, Artificial Sequence
  Synthetic
aaagcguaugaaaggacacaggu

SEQ ID NO: 393302 - RNA, 24 nt, Artificial Sequence
  Synthetic
gaaagcguaugaaaggacacaggu

SEQ ID NO: 393303 - RNA, 18 nt, Artificial Sequence
  Synthetic
caugugccaagcacaggu

SEQ ID NO: 393304 - RNA, 19 nt, Artificial Sequence
  Synthetic
ucaugugccaagcacaggu

SEQ ID NO: 393305 - RNA, 20 nt, Artificial Sequence
  Synthetic
aucaugugccaagcacaggu

SEQ ID NO: 393306 - RNA, 21 nt, Artificial Sequence
  Synthetic
uaucaugugccaagcacaggu

SEQ ID NO: 393307 - RNA, 22 nt, Artificial Sequence
  Synthetic
cuaucaugugccaagcacaggu

SEQ ID NO: 393308 - RNA, 23 nt, Artificial Sequence
  Synthetic
ucuaucaugugccaagcacaggu

SEQ ID NO: 393309 - RNA, 24 nt, Artificial Sequence
  Synthetic
aucuaucaugugccaagcacaggu

SEQ ID NO: 393310 - RNA, 18 nt, Artificial Sequence
  Synthetic
uggguaagaggcacaggu

SEQ ID NO: 393311 - RNA, 19 nt, Artificial Sequence
  Synthetic
cuggguaagaggcacaggu

SEQ ID NO: 393312 - RNA, 20 nt, Artificial Sequence
  Synthetic
acuggguaagaggcacaggu

SEQ ID NO: 393313 - RNA, 21 nt, Artificial Sequence
  Synthetic
aacuggguaagaggcacaggu

SEQ ID NO: 393314 - RNA, 22 nt, Artificial Sequence
  Synthetic
gaacuggguaagaggcacaggu

SEQ ID NO: 393315 - RNA, 23 nt, Artificial Sequence
  Synthetic
ggaacuggguaagaggcacaggu

SEQ ID NO: 393316 - RNA, 24 nt, Artificial Sequence
  Synthetic
uggaacuggguaagaggcacaggu

SEQ ID NO: 393317 - RNA, 18 nt, Artificial Sequence
  Synthetic
gcauauauacucacaggu

SEQ ID NO: 393318 - RNA, 19 nt, Artificial Sequence
  Synthetic
ggcauauauacucacaggu

SEQ ID NO: 393319 - RNA, 20 nt, Artificial Sequence
  Synthetic
gggcauauauacucacaggu

SEQ ID NO: 393320 - RNA, 21 nt, Artificial Sequence
  Synthetic
agggcauauauacucacaggu

SEQ ID NO: 393321 - RNA, 22 nt, Artificial Sequence
  Synthetic
aagggcauauauacucacaggu

SEQ ID NO: 393322 - RNA, 23 nt, Artificial Sequence
  Synthetic
caagggcauauauacucacaggu

SEQ ID NO: 393323 - RNA, 24 nt, Artificial Sequence
  Synthetic
acaagggcauauauacucacaggu

SEQ ID NO: 393324 - RNA, 18 nt, Artificial Sequence
  Synthetic
aggguucuaaugacaggu

SEQ ID NO: 393325 - RNA, 19 nt, Artificial Sequence
  Synthetic
uaggguucuaaugacaggu

SEQ ID NO: 393326 - RNA, 20 nt, Artificial Sequence
  Synthetic
guaggguucuaaugacaggu

SEQ ID NO: 393327 - RNA, 21 nt, Artificial Sequence
  Synthetic
aguaggguucuaaugacaggu

SEQ ID NO: 393328 - RNA, 22 nt, Artificial Sequence
  Synthetic
gaguaggguucuaaugacaggu

SEQ ID NO: 393329 - RNA, 23 nt, Artificial Sequence
  Synthetic
ggaguaggguucuaaugacaggu

SEQ ID NO: 393330 - RNA, 24 nt, Artificial Sequence
  Synthetic
gggaguaggguucuaaugacaggu

SEQ ID NO: 393331 - RNA, 18 nt, Artificial Sequence
  Synthetic
ccuuuucauuugacaggu

SEQ ID NO: 393332 - RNA, 19 nt, Artificial Sequence
  Synthetic
accuuuucauuugacaggu

SEQ ID NO: 393333 - RNA, 20 nt, Artificial Sequence
  Synthetic
caccuuuucauuugacaggu

SEQ ID NO: 393334 - RNA, 21 nt, Artificial Sequence
  Synthetic
ucaccuuuucauuugacaggu

SEQ ID NO: 393335 - RNA, 22 nt, Artificial Sequence
  Synthetic
uucaccuuuucauuugacaggu

SEQ ID NO: 393336 - RNA, 23 nt, Artificial Sequence
  Synthetic
cuucaccuuuucauuugacaggu

SEQ ID NO: 393337 - RNA, 24 nt, Artificial Sequence
  Synthetic
acuucaccuuuucauuugacaggu

SEQ ID NO: 393338 - RNA, 18 nt, Artificial Sequence
  Synthetic
uguacguuggguacaggu

SEQ ID NO: 393339 - RNA, 19 nt, Artificial Sequence
  Synthetic
cuguacguuggguacaggu

SEQ ID NO: 393340 - RNA, 20 nt, Artificial Sequence
  Synthetic
acuguacguuggguacaggu

SEQ ID NO: 393341 - RNA, 21 nt, Artificial Sequence
  Synthetic
aacuguacguuggguacaggu

SEQ ID NO: 393342 - RNA, 22 nt, Artificial Sequence
  Synthetic
caacuguacguuggguacaggu

SEQ ID NO: 393343 - RNA, 23 nt, Artificial Sequence
  Synthetic
ucaacuguacguuggguacaggu

SEQ ID NO: 393344 - RNA, 24 nt, Artificial Sequence
  Synthetic
uucaacuguacguuggguacaggu

SEQ ID NO: 393345 - RNA, 18 nt, Artificial Sequence
  Synthetic
aacgcugagauuacaggu

SEQ ID NO: 393346 - RNA, 19 nt, Artificial Sequence
  Synthetic
aaacgcugagauuacaggu

SEQ ID NO: 393347 - RNA, 20 nt, Artificial Sequence
  Synthetic
aaaacgcugagauuacaggu

SEQ ID NO: 393348 - RNA, 21 nt, Artificial Sequence
  Synthetic
caaaacgcugagauuacaggu

SEQ ID NO: 393349 - RNA, 22 nt, Artificial Sequence
  Synthetic
ccaaaacgcugagauuacaggu

SEQ ID NO: 393350 - RNA, 23 nt, Artificial Sequence
  Synthetic
cccaaaacgcugagauuacaggu

SEQ ID NO: 393351 - RNA, 24 nt, Artificial Sequence
  Synthetic
ucccaaaacgcugagauuacaggu

SEQ ID NO: 393352 - RNA, 18 nt, Artificial Sequence
  Synthetic
agugcggggauuacaggu

SEQ ID NO: 393353 - RNA, 19 nt, Artificial Sequence
  Synthetic
aagugcggggauuacaggu

SEQ ID NO: 393354 - RNA, 20 nt, Artificial Sequence
  Synthetic
aaagugcggggauuacaggu

SEQ ID NO: 393355 - RNA, 21 nt, Artificial Sequence
  Synthetic
gaaagugcggggauuacaggu

SEQ ID NO: 393356 - RNA, 22 nt, Artificial Sequence
  Synthetic
cgaaagugcggggauuacaggu

SEQ ID NO: 393357 - RNA, 23 nt, Artificial Sequence
  Synthetic
ccgaaagugcggggauuacaggu

SEQ ID NO: 393358 - RNA, 24 nt, Artificial Sequence
  Synthetic
uccgaaagugcggggauuacaggu

SEQ ID NO: 393359 - RNA, 18 nt, Artificial Sequence
  Synthetic
agagcugggauuacaggu

SEQ ID NO: 393360 - RNA, 19 nt, Artificial Sequence
  Synthetic
aagagcugggauuacaggu

SEQ ID NO: 393361 - RNA, 20 nt, Artificial Sequence
  Synthetic
aaagagcugggauuacaggu

SEQ ID NO: 393362 - RNA, 21 nt, Artificial Sequence
  Synthetic
caaagagcugggauuacaggu

SEQ ID NO: 393363 - RNA, 22 nt, Artificial Sequence
  Synthetic
ccaaagagcugggauuacaggu

SEQ ID NO: 393364 - RNA, 23 nt, Artificial Sequence
  Synthetic
cccaaagagcugggauuacaggu

SEQ ID NO: 393365 - RNA, 24 nt, Artificial Sequence
  Synthetic
ccccaaagagcugggauuacaggu

SEQ ID NO: 393366 - RNA, 18 nt, Artificial Sequence
  Synthetic
agugcugggauuacaggu

SEQ ID NO: 393367 - RNA, 19 nt, Artificial Sequence
  Synthetic
aagugcugggauuacaggu

SEQ ID NO: 393368 - RNA, 20 nt, Artificial Sequence
  Synthetic
aaagugcugggauuacaggu

SEQ ID NO: 393369 - RNA, 22 nt, Artificial Sequence
  Synthetic
ccaaagugcugggauuacaggu

SEQ ID NO: 393370 - RNA, 23 nt, Artificial Sequence
  Synthetic
cccaaagugcugggauuacaggu

SEQ ID NO: 393371 - RNA, 24 nt, Artificial Sequence
  Synthetic
ucccaaagugcugggauuacaggu

SEQ ID NO: 393372 - RNA, 18 nt, Artificial Sequence
  Synthetic
ggaaucuugaaaccaggu

SEQ ID NO: 393373 - RNA, 19 nt, Artificial Sequence
  Synthetic
aggaaucuugaaaccaggu

SEQ ID NO: 393374 - RNA, 20 nt, Artificial Sequence
  Synthetic
aaggaaucuugaaaccaggu

SEQ ID NO: 393375 - RNA, 21 nt, Artificial Sequence
  Synthetic
uaaggaaucuugaaaccaggu

SEQ ID NO: 393376 - RNA, 22 nt, Artificial Sequence
  Synthetic
uuaaggaaucuugaaaccaggu

SEQ ID NO: 393377 - RNA, 23 nt, Artificial Sequence
  Synthetic
uuuaaggaaucuugaaaccaggu

SEQ ID NO: 393378 - RNA, 24 nt, Artificial Sequence
  Synthetic
cuuuaaggaaucuugaaaccaggu

SEQ ID NO: 393379 - RNA, 18 nt, Artificial Sequence
  Synthetic
aagaaaaucugaccaggu

SEQ ID NO: 393380 - RNA, 19 nt, Artificial Sequence
  Synthetic
gaagaaaaucugaccaggu

SEQ ID NO: 393381 - RNA, 20 nt, Artificial Sequence
  Synthetic
ugaagaaaaucugaccaggu

SEQ ID NO: 393382 - RNA, 21 nt, Artificial Sequence
  Synthetic
cugaagaaaaucugaccaggu

SEQ ID NO: 393383 - RNA, 22 nt, Artificial Sequence
  Synthetic
ucugaagaaaaucugaccaggu

SEQ ID NO: 393384 - RNA, 23 nt, Artificial Sequence
  Synthetic
uucugaagaaaaucugaccaggu

SEQ ID NO: 393385 - RNA, 24 nt, Artificial Sequence
  Synthetic
auucugaagaaaaucugaccaggu

SEQ ID NO: 393386 - RNA, 18 nt, Artificial Sequence
  Synthetic
cacacgugcaagccaggu

SEQ ID NO: 393387 - RNA, 19 nt, Artificial Sequence
  Synthetic
ucacacgugcaagccaggu

SEQ ID NO: 393388 - RNA, 20 nt, Artificial Sequence
  Synthetic
cucacacgugcaagccaggu

SEQ ID NO: 393389 - RNA, 21 nt, Artificial Sequence
  Synthetic
ccucacacgugcaagccaggu

SEQ ID NO: 393390 - RNA, 22 nt, Artificial Sequence
  Synthetic
accucacacgugcaagccaggu

SEQ ID NO: 393391 - RNA, 23 nt, Artificial Sequence
  Synthetic
caccucacacgugcaagccaggu

SEQ ID NO: 393392 - RNA, 24 nt, Artificial Sequence
  Synthetic
ucaccucacacgugcaagccaggu

SEQ ID NO: 393393 - RNA, 18 nt, Artificial Sequence
  Synthetic
uguuaaaauuggccaggu

SEQ ID NO: 393394 - RNA, 19 nt, Artificial Sequence
  Synthetic
uuguuaaaauuggccaggu

SEQ ID NO: 393395 - RNA, 20 nt, Artificial Sequence
  Synthetic
guuguuaaaauuggccaggu

SEQ ID NO: 393396 - RNA, 21 nt, Artificial Sequence
  Synthetic
gguuguuaaaauuggccaggu

SEQ ID NO: 393397 - RNA, 22 nt, Artificial Sequence
  Synthetic
agguuguuaaaauuggccaggu

SEQ ID NO: 393398 - RNA, 23 nt, Artificial Sequence
  Synthetic
gagguuguuaaaauuggccaggu

SEQ ID NO: 393399 - RNA, 24 nt, Artificial Sequence
  Synthetic
ggagguuguuaaaauuggccaggu

SEQ ID NO: 393400 - RNA, 18 nt, Artificial Sequence
  Synthetic
uuaucuccuucuccaggu

SEQ ID NO: 393401 - RNA, 19 nt, Artificial Sequence
  Synthetic
uuuaucuccuucuccaggu

SEQ ID NO: 393402 - RNA, 20 nt, Artificial Sequence
  Synthetic
guuuaucuccuucuccaggu

SEQ ID NO: 393403 - RNA, 21 nt, Artificial Sequence
  Synthetic
gguuuaucuccuucuccaggu

SEQ ID NO: 393404 - RNA, 22 nt, Artificial Sequence
  Synthetic
agguuuaucuccuucuccaggu

SEQ ID NO: 393405 - RNA, 23 nt, Artificial Sequence
  Synthetic
uagguuuaucuccuucuccaggu

SEQ ID NO: 393406 - RNA, 24 nt, Artificial Sequence
  Synthetic
auagguuuaucuccuucuccaggu

SEQ ID NO: 393407 - RNA, 18 nt, Artificial Sequence
  Synthetic
aaaauaugaacagcaggu

SEQ ID NO: 393408 - RNA, 19 nt, Artificial Sequence
  Synthetic
aaaaauaugaacagcaggu

SEQ ID NO: 393409 - RNA, 20 nt, Artificial Sequence
  Synthetic
uaaaaauaugaacagcaggu

SEQ ID NO: 393410 - RNA, 21 nt, Artificial Sequence
  Synthetic
auaaaaauaugaacagcaggu

SEQ ID NO: 393411 - RNA, 22 nt, Artificial Sequence
  Synthetic
cauaaaaauaugaacagcaggu

SEQ ID NO: 393412 - RNA, 23 nt, Artificial Sequence
  Synthetic
gcauaaaaauaugaacagcaggu

SEQ ID NO: 393413 - RNA, 24 nt, Artificial Sequence
  Synthetic
ugcauaaaaauaugaacagcaggu

SEQ ID NO: 393414 - RNA, 18 nt, Artificial Sequence
  Synthetic
caugaaggacuggcaggu

SEQ ID NO: 393415 - RNA, 19 nt, Artificial Sequence
  Synthetic
ccaugaaggacuggcaggu

SEQ ID NO: 393416 - RNA, 20 nt, Artificial Sequence
  Synthetic
accaugaaggacuggcaggu

SEQ ID NO: 393417 - RNA, 21 nt, Artificial Sequence
  Synthetic
aaccaugaaggacuggcaggu

SEQ ID NO: 393418 - RNA, 22 nt, Artificial Sequence
  Synthetic
aaaccaugaaggacuggcaggu

SEQ ID NO: 393419 - RNA, 23 nt, Artificial Sequence
  Synthetic
gaaaccaugaaggacuggcaggu

SEQ ID NO: 393420 - RNA, 24 nt, Artificial Sequence
  Synthetic
ugaaaccaugaaggacuggcaggu

SEQ ID NO: 393421 - RNA, 18 nt, Artificial Sequence
  Synthetic
agaauaaaaauugcaggu

SEQ ID NO: 393422 - RNA, 19 nt, Artificial Sequence
  Synthetic
gagaauaaaaauugcaggu

SEQ ID NO: 393423 - RNA, 20 nt, Artificial Sequence
  Synthetic
ggagaauaaaaauugcaggu

SEQ ID NO: 393424 - RNA, 21 nt, Artificial Sequence
  Synthetic
aggagaauaaaaauugcaggu

SEQ ID NO: 393425 - RNA, 22 nt, Artificial Sequence
  Synthetic
aaggagaauaaaaauugcaggu

SEQ ID NO: 393426 - RNA, 23 nt, Artificial Sequence
  Synthetic
aaaggagaauaaaaauugcaggu

SEQ ID NO: 393427 - RNA, 24 nt, Artificial Sequence
  Synthetic
caaaggagaauaaaaauugcaggu

SEQ ID NO: 393428 - RNA, 18 nt, Artificial Sequence
  Synthetic
gaaaaaagaaaaucaggu

SEQ ID NO: 393429 - RNA, 19 nt, Artificial Sequence
  Synthetic
ggaaaaaagaaaaucaggu

SEQ ID NO: 393430 - RNA, 20 nt, Artificial Sequence
  Synthetic
uggaaaaaagaaaaucaggu

SEQ ID NO: 393431 - RNA, 21 nt, Artificial Sequence
  Synthetic
uuggaaaaaagaaaaucaggu

SEQ ID NO: 393432 - RNA, 22 nt, Artificial Sequence
  Synthetic
uuuggaaaaaagaaaaucaggu

SEQ ID NO: 393433 - RNA, 23 nt, Artificial Sequence
  Synthetic
auuuggaaaaaagaaaaucaggu

SEQ ID NO: 393434 - RNA, 24 nt, Artificial Sequence
  Synthetic
gauuuggaaaaaagaaaaucaggu

SEQ ID NO: 393435 - RNA, 18 nt, Artificial Sequence
  Synthetic
ggcauacacaaaucaggu

SEQ ID NO: 393436 - RNA, 19 nt, Artificial Sequence
  Synthetic
uggcauacacaaaucaggu

SEQ ID NO: 393437 - RNA, 20 nt, Artificial Sequence
  Synthetic
auggcauacacaaaucaggu

SEQ ID NO: 393438 - RNA, 21 nt, Artificial Sequence
  Synthetic
gauggcauacacaaaucaggu

SEQ ID NO: 393439 - RNA, 22 nt, Artificial Sequence
  Synthetic
cgauggcauacacaaaucaggu

SEQ ID NO: 393440 - RNA, 23 nt, Artificial Sequence
  Synthetic
gcgauggcauacacaaaucaggu

SEQ ID NO: 393441 - RNA, 24 nt, Artificial Sequence
  Synthetic
ggcgauggcauacacaaaucaggu

SEQ ID NO: 393442 - RNA, 18 nt, Artificial Sequence
  Synthetic
cuguauuacauaucaggu

SEQ ID NO: 393443 - RNA, 19 nt, Artificial Sequence
  Synthetic
ucuguauuacauaucaggu

SEQ ID NO: 393444 - RNA, 20 nt, Artificial Sequence
  Synthetic
aucuguauuacauaucaggu

SEQ ID NO: 393445 - RNA, 21 nt, Artificial Sequence
  Synthetic
aaucuguauuacauaucaggu

SEQ ID NO: 393446 - RNA, 22 nt, Artificial Sequence
  Synthetic
aaaucuguauuacauaucaggu

SEQ ID NO: 393447 - RNA, 23 nt, Artificial Sequence
  Synthetic
aaaaucuguauuacauaucaggu

SEQ ID NO: 393448 - RNA, 24 nt, Artificial Sequence
  Synthetic
uaaaaucuguauuacauaucaggu

SEQ ID NO: 393449 - RNA, 18 nt, Artificial Sequence
  Synthetic
ccuccuugcuuaucaggu

SEQ ID NO: 393450 - RNA, 19 nt, Artificial Sequence
  Synthetic
uccuccuugcuuaucaggu

SEQ ID NO: 393451 - RNA, 20 nt, Artificial Sequence
  Synthetic
auccuccuugcuuaucaggu

SEQ ID NO: 393452 - RNA, 21 nt, Artificial Sequence
  Synthetic
gauccuccuugcuuaucaggu

SEQ ID NO: 393453 - RNA, 22 nt, Artificial Sequence
  Synthetic
ggauccuccuugcuuaucaggu

SEQ ID NO: 393454 - RNA, 23 nt, Artificial Sequence
  Synthetic
gggauccuccuugcuuaucaggu

SEQ ID NO: 393455 - RNA, 24 nt, Artificial Sequence
  Synthetic
agggauccuccuugcuuaucaggu

SEQ ID NO: 393456 - RNA, 18 nt, Artificial Sequence
  Synthetic
gauuaaaaagacucaggu

SEQ ID NO: 393457 - RNA, 19 nt, Artificial Sequence
  Synthetic
agauuaaaaagacucaggu

SEQ ID NO: 393458 - RNA, 20 nt, Artificial Sequence
  Synthetic
aagauuaaaaagacucaggu

SEQ ID NO: 393459 - RNA, 21 nt, Artificial Sequence
  Synthetic
caagauuaaaaagacucaggu

SEQ ID NO: 393460 - RNA, 22 nt, Artificial Sequence
  Synthetic
gcaagauuaaaaagacucaggu

SEQ ID NO: 393461 - RNA, 23 nt, Artificial Sequence
  Synthetic
ggcaagauuaaaaagacucaggu

SEQ ID NO: 393462 - RNA, 24 nt, Artificial Sequence
  Synthetic
aggcaagauuaaaaagacucaggu

SEQ ID NO: 393463 - RNA, 18 nt, Artificial Sequence
  Synthetic
auauguuuaaagucaggu

SEQ ID NO: 393464 - RNA, 19 nt, Artificial Sequence
  Synthetic
gauauguuuaaagucaggu

SEQ ID NO: 393465 - RNA, 20 nt, Artificial Sequence
  Synthetic
ggauauguuuaaagucaggu

SEQ ID NO: 393466 - RNA, 21 nt, Artificial Sequence
  Synthetic
aggauauguuuaaagucaggu

SEQ ID NO: 393467 - RNA, 22 nt, Artificial Sequence
  Synthetic
aaggauauguuuaaagucaggu

SEQ ID NO: 393468 - RNA, 23 nt, Artificial Sequence
  Synthetic
gaaggauauguuuaaagucaggu

SEQ ID NO: 393469 - RNA, 24 nt, Artificial Sequence
  Synthetic
ggaaggauauguuuaaagucaggu

SEQ ID NO: 393470 - RNA, 18 nt, Artificial Sequence
  Synthetic
gagauggguuggucaggu

SEQ ID NO: 393471 - RNA, 19 nt, Artificial Sequence
  Synthetic
agagauggguuggucaggu

SEQ ID NO: 393472 - RNA, 20 nt, Artificial Sequence
  Synthetic
aagagauggguuggucaggu

SEQ ID NO: 393473 - RNA, 21 nt, Artificial Sequence
  Synthetic
uaagagauggguuggucaggu

SEQ ID NO: 393474 - RNA, 22 nt, Artificial Sequence
  Synthetic
cuaagagauggguuggucaggu

SEQ ID NO: 393475 - RNA, 23 nt, Artificial Sequence
  Synthetic
ccuaagagauggguuggucaggu

SEQ ID NO: 393476 - RNA, 24 nt, Artificial Sequence
  Synthetic
accuaagagauggguuggucaggu

SEQ ID NO: 393477 - RNA, 18 nt, Artificial Sequence
  Synthetic
ccccaugcuuugucaggu

SEQ ID NO: 393478 - RNA, 19 nt, Artificial Sequence
  Synthetic
gccccaugcuuugucaggu

SEQ ID NO: 393479 - RNA, 20 nt, Artificial Sequence
  Synthetic
agccccaugcuuugucaggu

SEQ ID NO: 393480 - RNA, 21 nt, Artificial Sequence
  Synthetic
cagccccaugcuuugucaggu

SEQ ID NO: 393481 - RNA, 22 nt, Artificial Sequence
  Synthetic
gcagccccaugcuuugucaggu

SEQ ID NO: 393482 - RNA, 23 nt, Artificial Sequence
  Synthetic
agcagccccaugcuuugucaggu

SEQ ID NO: 393483 - RNA, 24 nt, Artificial Sequence
  Synthetic
gagcagccccaugcuuugucaggu

SEQ ID NO: 393484 - RNA, 18 nt, Artificial Sequence
  Synthetic
ugucucuaacauucaggu

SEQ ID NO: 393485 - RNA, 19 nt, Artificial Sequence
  Synthetic
uugucucuaacauucaggu

SEQ ID NO: 393486 - RNA, 20 nt, Artificial Sequence
  Synthetic
cuugucucuaacauucaggu

SEQ ID NO: 393487 - RNA, 21 nt, Artificial Sequence
  Synthetic
ucuugucucuaacauucaggu

SEQ ID NO: 393488 - RNA, 22 nt, Artificial Sequence
  Synthetic
gucuugucucuaacauucaggu

SEQ ID NO: 393489 - RNA, 23 nt, Artificial Sequence
  Synthetic
agucuugucucuaacauucaggu

SEQ ID NO: 393490 - RNA, 24 nt, Artificial Sequence
  Synthetic
gagucuugucucuaacauucaggu

SEQ ID NO: 393491 - RNA, 18 nt, Artificial Sequence
  Synthetic
ucucaaaaguguucaggu

SEQ ID NO: 393492 - RNA, 19 nt, Artificial Sequence
  Synthetic
cucucaaaaguguucaggu

SEQ ID NO: 393493 - RNA, 20 nt, Artificial Sequence
  Synthetic
acucucaaaaguguucaggu

SEQ ID NO: 393494 - RNA, 21 nt, Artificial Sequence
  Synthetic
cacucucaaaaguguucaggu

SEQ ID NO: 393495 - RNA, 22 nt, Artificial Sequence
  Synthetic
acacucucaaaaguguucaggu

SEQ ID NO: 393496 - RNA, 23 nt, Artificial Sequence
  Synthetic
gacacucucaaaaguguucaggu

SEQ ID NO: 393497 - RNA, 24 nt, Artificial Sequence
  Synthetic
ggacacucucaaaaguguucaggu

SEQ ID NO: 393498 - RNA, 18 nt, Artificial Sequence
  Synthetic
guuuggaagaaaagaggu

SEQ ID NO: 393499 - RNA, 19 nt, Artificial Sequence
  Synthetic
gguuuggaagaaaagaggu

SEQ ID NO: 393500 - RNA, 20 nt, Artificial Sequence
  Synthetic
ggguuuggaagaaaagaggu

SEQ ID NO: 393501 - RNA, 21 nt, Artificial Sequence
  Synthetic
uggguuuggaagaaaagaggu

SEQ ID NO: 393502 - RNA, 22 nt, Artificial Sequence
  Synthetic
uuggguuuggaagaaaagaggu

SEQ ID NO: 393503 - RNA, 23 nt, Artificial Sequence
  Synthetic
guuggguuuggaagaaaagaggu

SEQ ID NO: 393504 - RNA, 24 nt, Artificial Sequence
  Synthetic
gguuggguuuggaagaaaagaggu

SEQ ID NO: 393505 - RNA, 18 nt, Artificial Sequence
  Synthetic
augucagcucgaagaggu

SEQ ID NO: 393506 - RNA, 19 nt, Artificial Sequence
  Synthetic
aaugucagcucgaagaggu

SEQ ID NO: 393507 - RNA, 20 nt, Artificial Sequence
  Synthetic
uaaugucagcucgaagaggu

SEQ ID NO: 393508 - RNA, 21 nt, Artificial Sequence
  Synthetic
uuaaugucagcucgaagaggu

SEQ ID NO: 393509 - RNA, 22 nt, Artificial Sequence
  Synthetic
cuuaaugucagcucgaagaggu

SEQ ID NO: 393510 - RNA, 23 nt, Artificial Sequence
  Synthetic
acuuaaugucagcucgaagaggu

SEQ ID NO: 393511 - RNA, 24 nt, Artificial Sequence
  Synthetic
uacuuaaugucagcucgaagaggu

SEQ ID NO: 393512 - RNA, 18 nt, Artificial Sequence
  Synthetic
aggcuggauguaagaggu

SEQ ID NO: 393513 - RNA, 19 nt, Artificial Sequence
  Synthetic
caggcuggauguaagaggu

SEQ ID NO: 393514 - RNA, 20 nt, Artificial Sequence
  Synthetic
ccaggcuggauguaagaggu

SEQ ID NO: 393515 - RNA, 21 nt, Artificial Sequence
  Synthetic
gccaggcuggauguaagaggu

SEQ ID NO: 393516 - RNA, 22 nt, Artificial Sequence
  Synthetic
ggccaggcuggauguaagaggu

SEQ ID NO: 393517 - RNA, 23 nt, Artificial Sequence
  Synthetic
aggccaggcuggauguaagaggu

SEQ ID NO: 393518 - RNA, 24 nt, Artificial Sequence
  Synthetic
aaggccaggcuggauguaagaggu

SEQ ID NO: 393519 - RNA, 18 nt, Artificial Sequence
  Synthetic
acugaaagauuaagaggu

SEQ ID NO: 393520 - RNA, 19 nt, Artificial Sequence
  Synthetic
aacugaaagauuaagaggu

SEQ ID NO: 393521 - RNA, 20 nt, Artificial Sequence
  Synthetic
aaacugaaagauuaagaggu

SEQ ID NO: 393522 - RNA, 21 nt, Artificial Sequence
  Synthetic
aaaacugaaagauuaagaggu

SEQ ID NO: 393523 - RNA, 22 nt, Artificial Sequence
  Synthetic
uaaaacugaaagauuaagaggu

SEQ ID NO: 393524 - RNA, 23 nt, Artificial Sequence
  Synthetic
auaaaacugaaagauuaagaggu

SEQ ID NO: 393525 - RNA, 24 nt, Artificial Sequence
  Synthetic
cauaaaacugaaagauuaagaggu

SEQ ID NO: 393526 - RNA, 18 nt, Artificial Sequence
  Synthetic
ugcuuuuauuucagaggu

SEQ ID NO: 393527 - RNA, 19 nt, Artificial Sequence
  Synthetic
uugcuuuuauuucagaggu

SEQ ID NO: 393528 - RNA, 20 nt, Artificial Sequence
  Synthetic
auugcuuuuauuucagaggu

SEQ ID NO: 393529 - RNA, 21 nt, Artificial Sequence
  Synthetic
aauugcuuuuauuucagaggu

SEQ ID NO: 393530 - RNA, 22 nt, Artificial Sequence
  Synthetic
aaauugcuuuuauuucagaggu

SEQ ID NO: 393531 - RNA, 23 nt, Artificial Sequence
  Synthetic
uaaauugcuuuuauuucagaggu

SEQ ID NO: 393532 - RNA, 24 nt, Artificial Sequence
  Synthetic
cuaaauugcuuuuauuucagaggu

SEQ ID NO: 393533 - RNA, 18 nt, Artificial Sequence
  Synthetic
aaggagaggaagagaggu

SEQ ID NO: 393534 - RNA, 19 nt, Artificial Sequence
  Synthetic
caaggagaggaagagaggu

SEQ ID NO: 393535 - RNA, 20 nt, Artificial Sequence
  Synthetic
ccaaggagaggaagagaggu

SEQ ID NO: 393536 - RNA, 21 nt, Artificial Sequence
  Synthetic
cccaaggagaggaagagaggu

SEQ ID NO: 393537 - RNA, 22 nt, Artificial Sequence
  Synthetic
gcccaaggagaggaagagaggu

SEQ ID NO: 393538 - RNA, 23 nt, Artificial Sequence
  Synthetic
ggcccaaggagaggaagagaggu

SEQ ID NO: 393539 - RNA, 24 nt, Artificial Sequence
  Synthetic
aggcccaaggagaggaagagaggu

SEQ ID NO: 393540 - RNA, 18 nt, Artificial Sequence
  Synthetic
auggucucuaagagaggu

SEQ ID NO: 393541 - RNA, 19 nt, Artificial Sequence
  Synthetic
aauggucucuaagagaggu

SEQ ID NO: 393542 - RNA, 20 nt, Artificial Sequence
  Synthetic
caauggucucuaagagaggu

SEQ ID NO: 393543 - RNA, 21 nt, Artificial Sequence
  Synthetic
acaauggucucuaagagaggu

SEQ ID NO: 393544 - RNA, 22 nt, Artificial Sequence
  Synthetic
aacaauggucucuaagagaggu

SEQ ID NO: 393545 - RNA, 23 nt, Artificial Sequence
  Synthetic
gaacaauggucucuaagagaggu

SEQ ID NO: 393546 - RNA, 24 nt, Artificial Sequence
  Synthetic
ugaacaauggucucuaagagaggu

SEQ ID NO: 393547 - RNA, 18 nt, Artificial Sequence
  Synthetic
aauauuuuuaagagaggu

SEQ ID NO: 393548 - RNA, 19 nt, Artificial Sequence
  Synthetic
uaauauuuuuaagagaggu

SEQ ID NO: 393549 - RNA, 20 nt, Artificial Sequence
  Synthetic
cuaauauuuuuaagagaggu

SEQ ID NO: 393550 - RNA, 21 nt, Artificial Sequence
  Synthetic
acuaauauuuuuaagagaggu

SEQ ID NO: 393551 - RNA, 22 nt, Artificial Sequence
  Synthetic
cacuaauauuuuuaagagaggu

SEQ ID NO: 393552 - RNA, 23 nt, Artificial Sequence
  Synthetic
ucacuaauauuuuuaagagaggu

SEQ ID NO: 393553 - RNA, 24 nt, Artificial Sequence
  Synthetic
aucacuaauauuuuuaagagaggu

SEQ ID NO: 393554 - RNA, 18 nt, Artificial Sequence
  Synthetic
uaauccaaagagagaggu

SEQ ID NO: 393555 - RNA, 19 nt, Artificial Sequence
  Synthetic
guaauccaaagagagaggu

SEQ ID NO: 393556 - RNA, 20 nt, Artificial Sequence
  Synthetic
uguaauccaaagagagaggu

SEQ ID NO: 393557 - RNA, 21 nt, Artificial Sequence
  Synthetic
uuguaauccaaagagagaggu

SEQ ID NO: 393558 - RNA, 22 nt, Artificial Sequence
  Synthetic
cuuguaauccaaagagagaggu

SEQ ID NO: 393559 - RNA, 23 nt, Artificial Sequence
  Synthetic
ccuuguaauccaaagagagaggu

SEQ ID NO: 393560 - RNA, 24 nt, Artificial Sequence
  Synthetic
gccuuguaauccaaagagagaggu

SEQ ID NO: 393561 - RNA, 18 nt, Artificial Sequence
  Synthetic
gugaaugccgagagaggu

SEQ ID NO: 393562 - RNA, 19 nt, Artificial Sequence
  Synthetic
ugugaaugccgagagaggu

SEQ ID NO: 393563 - RNA, 20 nt, Artificial Sequence
  Synthetic
cugugaaugccgagagaggu

SEQ ID NO: 393564 - RNA, 21 nt, Artificial Sequence
  Synthetic
ucugugaaugccgagagaggu

SEQ ID NO: 393565 - RNA, 22 nt, Artificial Sequence
  Synthetic
uucugugaaugccgagagaggu

SEQ ID NO: 393566 - RNA, 23 nt, Artificial Sequence
  Synthetic
auucugugaaugccgagagaggu

SEQ ID NO: 393567 - RNA, 24 nt, Artificial Sequence
  Synthetic
aauucugugaaugccgagagaggu

SEQ ID NO: 393568 - RNA, 18 nt, Artificial Sequence
  Synthetic
gcaggcagaucacgaggu

SEQ ID NO: 393569 - RNA, 19 nt, Artificial Sequence
  Synthetic
ggcaggcagaucacgaggu

SEQ ID NO: 393570 - RNA, 20 nt, Artificial Sequence
  Synthetic
aggcaggcagaucacgaggu

SEQ ID NO: 393571 - RNA, 21 nt, Artificial Sequence
  Synthetic
gaggcaggcagaucacgaggu

SEQ ID NO: 393572 - RNA, 22 nt, Artificial Sequence
  Synthetic
cgaggcaggcagaucacgaggu

SEQ ID NO: 393573 - RNA, 23 nt, Artificial Sequence
  Synthetic
ccgaggcaggcagaucacgaggu

SEQ ID NO: 393574 - RNA, 24 nt, Artificial Sequence
  Synthetic
gccgaggcaggcagaucacgaggu

SEQ ID NO: 393575 - RNA, 21 nt, Artificial Sequence
  Synthetic
aaggcgggcagaucacgaggu

SEQ ID NO: 393576 - RNA, 22 nt, Artificial Sequence
  Synthetic
caaggcgggcagaucacgaggu

SEQ ID NO: 393577 - RNA, 23 nt, Artificial Sequence
  Synthetic
ccaaggcgggcagaucacgaggu

SEQ ID NO: 393578 - RNA, 24 nt, Artificial Sequence
  Synthetic
gccaaggcgggcagaucacgaggu

SEQ ID NO: 393579 - RNA, 21 nt, Artificial Sequence
  Synthetic
gaggcgggcagaucacgaggu

SEQ ID NO: 393580 - RNA, 22 nt, Artificial Sequence
  Synthetic
cgaggcgggcagaucacgaggu

SEQ ID NO: 393581 - RNA, 23 nt, Artificial Sequence
  Synthetic
ccgaggcgggcagaucacgaggu

SEQ ID NO: 393582 - RNA, 24 nt, Artificial Sequence
  Synthetic
gccgaggcgggcagaucacgaggu

SEQ ID NO: 393583 - RNA, 18 nt, Artificial Sequence
  Synthetic
gugggcagaucacgaggu

SEQ ID NO: 393584 - RNA, 19 nt, Artificial Sequence
  Synthetic
ggugggcagaucacgaggu

SEQ ID NO: 393585 - RNA, 20 nt, Artificial Sequence
  Synthetic
aggugggcagaucacgaggu

SEQ ID NO: 393586 - RNA, 21 nt, Artificial Sequence
  Synthetic
gaggugggcagaucacgaggu

SEQ ID NO: 393587 - RNA, 22 nt, Artificial Sequence
  Synthetic
ugaggugggcagaucacgaggu

SEQ ID NO: 393588 - RNA, 23 nt, Artificial Sequence
  Synthetic
cugaggugggcagaucacgaggu

SEQ ID NO: 393589 - RNA, 24 nt, Artificial Sequence
  Synthetic
gcugaggugggcagaucacgaggu

SEQ ID NO: 393590 - RNA, 18 nt, Artificial Sequence
  Synthetic
gcagaaggaucacgaggu

SEQ ID NO: 393591 - RNA, 19 nt, Artificial Sequence
  Synthetic
ggcagaaggaucacgaggu

SEQ ID NO: 393592 - RNA, 20 nt, Artificial Sequence
  Synthetic
aggcagaaggaucacgaggu

SEQ ID NO: 393593 - RNA, 21 nt, Artificial Sequence
  Synthetic
gaggcagaaggaucacgaggu

SEQ ID NO: 393594 - RNA, 22 nt, Artificial Sequence
  Synthetic
cgaggcagaaggaucacgaggu

SEQ ID NO: 393595 - RNA, 23 nt, Artificial Sequence
  Synthetic
ccgaggcagaaggaucacgaggu

SEQ ID NO: 393596 - RNA, 24 nt, Artificial Sequence
  Synthetic
gccgaggcagaaggaucacgaggu

SEQ ID NO: 393597 - RNA, 18 nt, Artificial Sequence
  Synthetic
gcaggcggaucacgaggu

SEQ ID NO: 393598 - RNA, 19 nt, Artificial Sequence
  Synthetic
ggcaggcggaucacgaggu

SEQ ID NO: 393599 - RNA, 20 nt, Artificial Sequence
  Synthetic
aggcaggcggaucacgaggu

SEQ ID NO: 393600 - RNA, 21 nt, Artificial Sequence
  Synthetic
gaggcaggcggaucacgaggu

SEQ ID NO: 393601 - RNA, 22 nt, Artificial Sequence
  Synthetic
cgaggcaggcggaucacgaggu

SEQ ID NO: 393602 - RNA, 23 nt, Artificial Sequence
  Synthetic
ccgaggcaggcggaucacgaggu

SEQ ID NO: 393603 - RNA, 24 nt, Artificial Sequence
  Synthetic
gccgaggcaggcggaucacgaggu

SEQ ID NO: 393604 - RNA, 21 nt, Artificial Sequence
  Synthetic
gaggcgggcggaucacgaggu

SEQ ID NO: 393605 - RNA, 22 nt, Artificial Sequence
  Synthetic
cgaggcgggcggaucacgaggu

SEQ ID NO: 393606 - RNA, 23 nt, Artificial Sequence
  Synthetic
ccgaggcgggcggaucacgaggu

SEQ ID NO: 393607 - RNA, 24 nt, Artificial Sequence
  Synthetic
gccgaggcgggcggaucacgaggu

SEQ ID NO: 393608 - RNA, 22 nt, Artificial Sequence
  Synthetic
ugaggcgggcggaucacgaggu

SEQ ID NO: 393609 - RNA, 23 nt, Artificial Sequence
  Synthetic
augaggcgggcggaucacgaggu

SEQ ID NO: 393610 - RNA, 24 nt, Artificial Sequence
  Synthetic
gaugaggcgggcggaucacgaggu

SEQ ID NO: 393611 - RNA, 18 nt, Artificial Sequence
  Synthetic
gugggcggaucacgaggu

SEQ ID NO: 393612 - RNA, 19 nt, Artificial Sequence
  Synthetic
ggugggcggaucacgaggu

SEQ ID NO: 393613 - RNA, 20 nt, Artificial Sequence
  Synthetic
aggugggcggaucacgaggu

SEQ ID NO: 393614 - RNA, 21 nt, Artificial Sequence
  Synthetic
aaggugggcggaucacgaggu

SEQ ID NO: 393615 - RNA, 22 nt, Artificial Sequence
  Synthetic
caaggugggcggaucacgaggu

SEQ ID NO: 393616 - RNA, 23 nt, Artificial Sequence
  Synthetic
ccaaggugggcggaucacgaggu

SEQ ID NO: 393617 - RNA, 24 nt, Artificial Sequence
  Synthetic
gccaaggugggcggaucacgaggu

SEQ ID NO: 393618 - RNA, 18 nt, Artificial Sequence
  Synthetic
gcagguggaucacgaggu

SEQ ID NO: 393619 - RNA, 19 nt, Artificial Sequence
  Synthetic
agcagguggaucacgaggu

SEQ ID NO: 393620 - RNA, 20 nt, Artificial Sequence
  Synthetic
aagcagguggaucacgaggu

SEQ ID NO: 393621 - RNA, 21 nt, Artificial Sequence
  Synthetic
gaagcagguggaucacgaggu

SEQ ID NO: 393622 - RNA, 22 nt, Artificial Sequence
  Synthetic
ugaagcagguggaucacgaggu

SEQ ID NO: 393623 - RNA, 23 nt, Artificial Sequence
  Synthetic
cugaagcagguggaucacgaggu

SEQ ID NO: 393624 - RNA, 24 nt, Artificial Sequence
  Synthetic
gcugaagcagguggaucacgaggu

SEQ ID NO: 393625 - RNA, 19 nt, Artificial Sequence
  Synthetic
ggcagguggaucacgaggu

SEQ ID NO: 393626 - RNA, 20 nt, Artificial Sequence
  Synthetic
aggcagguggaucacgaggu

SEQ ID NO: 393627 - RNA, 21 nt, Artificial Sequence
  Synthetic
gaggcagguggaucacgaggu

SEQ ID NO: 393628 - RNA, 22 nt, Artificial Sequence
  Synthetic
ugaggcagguggaucacgaggu

SEQ ID NO: 393629 - RNA, 23 nt, Artificial Sequence
  Synthetic
cugaggcagguggaucacgaggu

SEQ ID NO: 393630 - RNA, 24 nt, Artificial Sequence
  Synthetic
gcugaggcagguggaucacgaggu

SEQ ID NO: 393631 - RNA, 18 nt, Artificial Sequence
  Synthetic
gcggguggaucacgaggu

SEQ ID NO: 393632 - RNA, 19 nt, Artificial Sequence
  Synthetic
ggcggguggaucacgaggu

SEQ ID NO: 393633 - RNA, 20 nt, Artificial Sequence
  Synthetic
aggcggguggaucacgaggu

SEQ ID NO: 393634 - RNA, 18 nt, Artificial Sequence
  Synthetic
gcaguuggaucacgaggu

SEQ ID NO: 393635 - RNA, 19 nt, Artificial Sequence
  Synthetic
ggcaguuggaucacgaggu

SEQ ID NO: 393636 - RNA, 20 nt, Artificial Sequence
  Synthetic
aggcaguuggaucacgaggu

SEQ ID NO: 393637 - RNA, 21 nt, Artificial Sequence
  Synthetic
gaggcaguuggaucacgaggu

SEQ ID NO: 393638 - RNA, 22 nt, Artificial Sequence
  Synthetic
cgaggcaguuggaucacgaggu

SEQ ID NO: 393639 - RNA, 23 nt, Artificial Sequence
  Synthetic
ccgaggcaguuggaucacgaggu

SEQ ID NO: 393640 - RNA, 24 nt, Artificial Sequence
  Synthetic
gccgaggcaguuggaucacgaggu

SEQ ID NO: 393641 - RNA, 18 nt, Artificial Sequence
  Synthetic
gcgggcugaucacgaggu

SEQ ID NO: 393642 - RNA, 19 nt, Artificial Sequence
  Synthetic
ggcgggcugaucacgaggu

SEQ ID NO: 393643 - RNA, 20 nt, Artificial Sequence
  Synthetic
aggcgggcugaucacgaggu

SEQ ID NO: 393644 - RNA, 21 nt, Artificial Sequence
  Synthetic
gaggcgggcugaucacgaggu

SEQ ID NO: 393645 - RNA, 22 nt, Artificial Sequence
  Synthetic
cgaggcgggcugaucacgaggu

SEQ ID NO: 393646 - RNA, 23 nt, Artificial Sequence
  Synthetic
ccgaggcgggcugaucacgaggu

SEQ ID NO: 393647 - RNA, 24 nt, Artificial Sequence
  Synthetic
gccgaggcgggcugaucacgaggu

SEQ ID NO: 393648 - RNA, 18 nt, Artificial Sequence
  Synthetic
aaauguguuaaccgaggu

SEQ ID NO: 393649 - RNA, 19 nt, Artificial Sequence
  Synthetic
aaaauguguuaaccgaggu

SEQ ID NO: 393650 - RNA, 20 nt, Artificial Sequence
  Synthetic
aaaaauguguuaaccgaggu

SEQ ID NO: 393651 - RNA, 21 nt, Artificial Sequence
  Synthetic
uaaaaauguguuaaccgaggu

SEQ ID NO: 393652 - RNA, 22 nt, Artificial Sequence
  Synthetic
uuaaaaauguguuaaccgaggu

SEQ ID NO: 393653 - RNA, 23 nt, Artificial Sequence
  Synthetic
cuuaaaaauguguuaaccgaggu

SEQ ID NO: 393654 - RNA, 24 nt, Artificial Sequence
  Synthetic
acuuaaaaauguguuaaccgaggu

SEQ ID NO: 393655 - RNA, 18 nt, Artificial Sequence
  Synthetic
auuacaugaugccgaggu

SEQ ID NO: 393656 - RNA, 19 nt, Artificial Sequence
  Synthetic
uauuacaugaugccgaggu

SEQ ID NO: 393657 - RNA, 20 nt, Artificial Sequence
  Synthetic
auauuacaugaugccgaggu

SEQ ID NO: 393658 - RNA, 21 nt, Artificial Sequence
  Synthetic
uauauuacaugaugccgaggu

SEQ ID NO: 393659 - RNA, 22 nt, Artificial Sequence
  Synthetic
auauauuacaugaugccgaggu

SEQ ID NO: 393660 - RNA, 23 nt, Artificial Sequence
  Synthetic
gauauauuacaugaugccgaggu

SEQ ID NO: 393661 - RNA, 24 nt, Artificial Sequence
  Synthetic
ugauauauuacaugaugccgaggu

SEQ ID NO: 393662 - RNA, 18 nt, Artificial Sequence
  Synthetic
cgaggccugucgcgaggu

SEQ ID NO: 393663 - RNA, 19 nt, Artificial Sequence
  Synthetic
ccgaggccugucgcgaggu

SEQ ID NO: 393664 - RNA, 20 nt, Artificial Sequence
  Synthetic
accgaggccugucgcgaggu

SEQ ID NO: 393665 - RNA, 21 nt, Artificial Sequence
  Synthetic
caccgaggccugucgcgaggu

SEQ ID NO: 393666 - RNA, 22 nt, Artificial Sequence
  Synthetic
acaccgaggccugucgcgaggu

SEQ ID NO: 393667 - RNA, 23 nt, Artificial Sequence
  Synthetic
cacaccgaggccugucgcgaggu

SEQ ID NO: 393668 - RNA, 24 nt, Artificial Sequence
  Synthetic
acacaccgaggccugucgcgaggu

SEQ ID NO: 393669 - RNA, 18 nt, Artificial Sequence
  Synthetic
cacaaaaaccaucgaggu

SEQ ID NO: 393670 - RNA, 19 nt, Artificial Sequence
  Synthetic
gcacaaaaaccaucgaggu

SEQ ID NO: 393671 - RNA, 20 nt, Artificial Sequence
  Synthetic
agcacaaaaaccaucgaggu

SEQ ID NO: 393672 - RNA, 21 nt, Artificial Sequence
  Synthetic
gagcacaaaaaccaucgaggu

SEQ ID NO: 393673 - RNA, 22 nt, Artificial Sequence
  Synthetic
ggagcacaaaaaccaucgaggu

SEQ ID NO: 393674 - RNA, 23 nt, Artificial Sequence
  Synthetic
aggagcacaaaaaccaucgaggu

SEQ ID NO: 393675 - RNA, 24 nt, Artificial Sequence
  Synthetic
aaggagcacaaaaaccaucgaggu

SEQ ID NO: 393676 - RNA, 18 nt, Artificial Sequence
  Synthetic
aucugaagagaaggaggu

SEQ ID NO: 393677 - RNA, 19 nt, Artificial Sequence
  Synthetic
aaucugaagagaaggaggu

SEQ ID NO: 393678 - RNA, 20 nt, Artificial Sequence
  Synthetic
aaaucugaagagaaggaggu

SEQ ID NO: 393679 - RNA, 21 nt, Artificial Sequence
  Synthetic
uaaaucugaagagaaggaggu

SEQ ID NO: 393680 - RNA, 22 nt, Artificial Sequence
  Synthetic
cuaaaucugaagagaaggaggu

SEQ ID NO: 393681 - RNA, 23 nt, Artificial Sequence
  Synthetic
ccuaaaucugaagagaaggaggu

SEQ ID NO: 393682 - RNA, 24 nt, Artificial Sequence
  Synthetic
accuaaaucugaagagaaggaggu

SEQ ID NO: 393683 - RNA, 18 nt, Artificial Sequence
  Synthetic
aggcuuauuucaggaggu

SEQ ID NO: 393684 - RNA, 19 nt, Artificial Sequence
  Synthetic
caggcuuauuucaggaggu

SEQ ID NO: 393685 - RNA, 20 nt, Artificial Sequence
  Synthetic
acaggcuuauuucaggaggu

SEQ ID NO: 393686 - RNA, 21 nt, Artificial Sequence
  Synthetic
aacaggcuuauuucaggaggu

SEQ ID NO: 393687 - RNA, 22 nt, Artificial Sequence
  Synthetic
caacaggcuuauuucaggaggu

SEQ ID NO: 393688 - RNA, 23 nt, Artificial Sequence
  Synthetic
ucaacaggcuuauuucaggaggu

SEQ ID NO: 393689 - RNA, 24 nt, Artificial Sequence
  Synthetic
aucaacaggcuuauuucaggaggu

SEQ ID NO: 393690 - RNA, 18 nt, Artificial Sequence
  Synthetic
aaccucuauagaggaggu

SEQ ID NO: 393691 - RNA, 19 nt, Artificial Sequence
  Synthetic
caaccucuauagaggaggu

SEQ ID NO: 393692 - RNA, 20 nt, Artificial Sequence
  Synthetic
acaaccucuauagaggaggu

SEQ ID NO: 393693 - RNA, 21 nt, Artificial Sequence
  Synthetic
gacaaccucuauagaggaggu

SEQ ID NO: 393694 - RNA, 22 nt, Artificial Sequence
  Synthetic
agacaaccucuauagaggaggu

SEQ ID NO: 393695 - RNA, 23 nt, Artificial Sequence
  Synthetic
aagacaaccucuauagaggaggu

SEQ ID NO: 393696 - RNA, 24 nt, Artificial Sequence
  Synthetic
gaagacaaccucuauagaggaggu

SEQ ID NO: 393697 - RNA, 18 nt, Artificial Sequence
  Synthetic
aagugguguucgggaggu

SEQ ID NO: 393698 - RNA, 19 nt, Artificial Sequence
  Synthetic
aaagugguguucgggaggu

SEQ ID NO: 393699 - RNA, 20 nt, Artificial Sequence
  Synthetic
aaaagugguguucgggaggu

SEQ ID NO: 393700 - RNA, 21 nt, Artificial Sequence
  Synthetic
uaaaagugguguucgggaggu

SEQ ID NO: 393701 - RNA, 22 nt, Artificial Sequence
  Synthetic
uuaaaagugguguucgggaggu

SEQ ID NO: 393702 - RNA, 23 nt, Artificial Sequence
  Synthetic
uuuaaaagugguguucgggaggu

SEQ ID NO: 393703 - RNA, 24 nt, Artificial Sequence
  Synthetic
uuuuaaaagugguguucgggaggu

SEQ ID NO: 393704 - RNA, 18 nt, Artificial Sequence
  Synthetic
gcuucuaauuggggaggu

SEQ ID NO: 393705 - RNA, 19 nt, Artificial Sequence
  Synthetic
agcuucuaauuggggaggu

SEQ ID NO: 393706 - RNA, 20 nt, Artificial Sequence
  Synthetic
aagcuucuaauuggggaggu

SEQ ID NO: 393707 - RNA, 21 nt, Artificial Sequence
  Synthetic
uaagcuucuaauuggggaggu

SEQ ID NO: 393708 - RNA, 22 nt, Artificial Sequence
  Synthetic
uuaagcuucuaauuggggaggu

SEQ ID NO: 393709 - RNA, 23 nt, Artificial Sequence
  Synthetic
cuuaagcuucuaauuggggaggu

SEQ ID NO: 393710 - RNA, 24 nt, Artificial Sequence
  Synthetic
ccuuaagcuucuaauuggggaggu

SEQ ID NO: 393711 - RNA, 18 nt, Artificial Sequence
  Synthetic
ugucgaggggugggaggu

SEQ ID NO: 393712 - RNA, 19 nt, Artificial Sequence
  Synthetic
cugucgaggggugggaggu

SEQ ID NO: 393713 - RNA, 20 nt, Artificial Sequence
  Synthetic
ccugucgaggggugggaggu

SEQ ID NO: 393714 - RNA, 21 nt, Artificial Sequence
  Synthetic
gccugucgaggggugggaggu

SEQ ID NO: 393715 - RNA, 22 nt, Artificial Sequence
  Synthetic
ggccugucgaggggugggaggu

SEQ ID NO: 393716 - RNA, 23 nt, Artificial Sequence
  Synthetic
gggccugucgaggggugggaggu

SEQ ID NO: 393717 - RNA, 24 nt, Artificial Sequence
  Synthetic
ggggccugucgaggggugggaggu

SEQ ID NO: 393718 - RNA, 18 nt, Artificial Sequence
  Synthetic
gugggcagaucaugaggu

SEQ ID NO: 393719 - RNA, 19 nt, Artificial Sequence
  Synthetic
ggugggcagaucaugaggu

SEQ ID NO: 393720 - RNA, 20 nt, Artificial Sequence
  Synthetic
aggugggcagaucaugaggu

SEQ ID NO: 393721 - RNA, 21 nt, Artificial Sequence
  Synthetic
gaggugggcagaucaugaggu

SEQ ID NO: 393722 - RNA, 22 nt, Artificial Sequence
  Synthetic
cgaggugggcagaucaugaggu

SEQ ID NO: 393723 - RNA, 23 nt, Artificial Sequence
  Synthetic
ccgaggugggcagaucaugaggu

SEQ ID NO: 393724 - RNA, 24 nt, Artificial Sequence
  Synthetic
gccgaggugggcagaucaugaggu

SEQ ID NO: 393725 - RNA, 18 nt, Artificial Sequence
  Synthetic
gcaggcggaucaugaggu

SEQ ID NO: 393726 - RNA, 19 nt, Artificial Sequence
  Synthetic
ggcaggcggaucaugaggu

SEQ ID NO: 393727 - RNA, 20 nt, Artificial Sequence
  Synthetic
aggcaggcggaucaugaggu

SEQ ID NO: 393728 - RNA, 21 nt, Artificial Sequence
  Synthetic
gaggcaggcggaucaugaggu

SEQ ID NO: 393729 - RNA, 22 nt, Artificial Sequence
  Synthetic
cgaggcaggcggaucaugaggu

SEQ ID NO: 393730 - RNA, 23 nt, Artificial Sequence
  Synthetic
ccgaggcaggcggaucaugaggu

SEQ ID NO: 393731 - RNA, 24 nt, Artificial Sequence
  Synthetic
gccgaggcaggcggaucaugaggu

SEQ ID NO: 393732 - RNA, 18 nt, Artificial Sequence
  Synthetic
ugcauagucauaugaggu

SEQ ID NO: 393733 - RNA, 19 nt, Artificial Sequence
  Synthetic
cugcauagucauaugaggu

SEQ ID NO: 393734 - RNA, 20 nt, Artificial Sequence
  Synthetic
ucugcauagucauaugaggu

SEQ ID NO: 393735 - RNA, 21 nt, Artificial Sequence
  Synthetic
uucugcauagucauaugaggu

SEQ ID NO: 393736 - RNA, 22 nt, Artificial Sequence
  Synthetic
cuucugcauagucauaugaggu

SEQ ID NO: 393737 - RNA, 23 nt, Artificial Sequence
  Synthetic
ucuucugcauagucauaugaggu

SEQ ID NO: 393738 - RNA, 24 nt, Artificial Sequence
  Synthetic
gucuucugcauagucauaugaggu

SEQ ID NO: 393739 - RNA, 18 nt, Artificial Sequence
  Synthetic
acgggcagauuaugaggu

SEQ ID NO: 393740 - RNA, 19 nt, Artificial Sequence
  Synthetic
gacgggcagauuaugaggu

SEQ ID NO: 393741 - RNA, 20 nt, Artificial Sequence
  Synthetic
agacgggcagauuaugaggu

SEQ ID NO: 393742 - RNA, 21 nt, Artificial Sequence
  Synthetic
gagacgggcagauuaugaggu

SEQ ID NO: 393743 - RNA, 22 nt, Artificial Sequence
  Synthetic
ugagacgggcagauuaugaggu

SEQ ID NO: 393744 - RNA, 23 nt, Artificial Sequence
  Synthetic
cugagacgggcagauuaugaggu

SEQ ID NO: 393745 - RNA, 24 nt, Artificial Sequence
  Synthetic
gcugagacgggcagauuaugaggu

SEQ ID NO: 393746 - RNA, 19 nt, Artificial Sequence
  Synthetic
ugggcagaucaccugaggu

SEQ ID NO: 393747 - RNA, 20 nt, Artificial Sequence
  Synthetic
gugggcagaucaccugaggu

SEQ ID NO: 393748 - RNA, 24 nt, Artificial Sequence
  Synthetic
ugaggugggcagaucaccugaggu

SEQ ID NO: 393749 - RNA, 18 nt, Artificial Sequence
  Synthetic
aaacggaucaccugaggu

SEQ ID NO: 393750 - RNA, 19 nt, Artificial Sequence
  Synthetic
caaacggaucaccugaggu

SEQ ID NO: 393751 - RNA, 20 nt, Artificial Sequence
  Synthetic
gcaaacggaucaccugaggu

SEQ ID NO: 393752 - RNA, 21 nt, Artificial Sequence
  Synthetic
ggcaaacggaucaccugaggu

SEQ ID NO: 393753 - RNA, 22 nt, Artificial Sequence
  Synthetic
aggcaaacggaucaccugaggu

SEQ ID NO: 393754 - RNA, 23 nt, Artificial Sequence
  Synthetic
gaggcaaacggaucaccugaggu

SEQ ID NO: 393755 - RNA, 24 nt, Artificial Sequence
  Synthetic
cgaggcaaacggaucaccugaggu

SEQ ID NO: 393756 - RNA, 18 nt, Artificial Sequence
  Synthetic
aggcggaucaccugaggu

SEQ ID NO: 393757 - RNA, 19 nt, Artificial Sequence
  Synthetic
caggcggaucaccugaggu

SEQ ID NO: 393758 - RNA, 20 nt, Artificial Sequence
  Synthetic
gcaggcggaucaccugaggu

SEQ ID NO: 393759 - RNA, 21 nt, Artificial Sequence
  Synthetic
ggcaggcggaucaccugaggu

SEQ ID NO: 393760 - RNA, 22 nt, Artificial Sequence
  Synthetic
aggcaggcggaucaccugaggu

SEQ ID NO: 393761 - RNA, 23 nt, Artificial Sequence
  Synthetic
gaggcaggcggaucaccugaggu

SEQ ID NO: 393762 - RNA, 24 nt, Artificial Sequence
  Synthetic
cgaggcaggcggaucaccugaggu

SEQ ID NO: 393763 - RNA, 24 nt, Artificial Sequence
  Synthetic
ugaggcaggcggaucaccugaggu

SEQ ID NO: 393764 - RNA, 18 nt, Artificial Sequence
  Synthetic
cgauggaucaccugaggu

SEQ ID NO: 393765 - RNA, 19 nt, Artificial Sequence
  Synthetic
gcgauggaucaccugaggu

SEQ ID NO: 393766 - RNA, 20 nt, Artificial Sequence
  Synthetic
agcgauggaucaccugaggu

SEQ ID NO: 393767 - RNA, 21 nt, Artificial Sequence
  Synthetic
aagcgauggaucaccugaggu

SEQ ID NO: 393768 - RNA, 22 nt, Artificial Sequence
  Synthetic
gaagcgauggaucaccugaggu

SEQ ID NO: 393769 - RNA, 23 nt, Artificial Sequence
  Synthetic
ugaagcgauggaucaccugaggu

SEQ ID NO: 393770 - RNA, 24 nt, Artificial Sequence
  Synthetic
cugaagcgauggaucaccugaggu

SEQ ID NO: 393771 - RNA, 18 nt, Artificial Sequence
  Synthetic
agguggaucaccugaggu

SEQ ID NO: 393772 - RNA, 19 nt, Artificial Sequence
  Synthetic
cagguggaucaccugaggu

SEQ ID NO: 393773 - RNA, 20 nt, Artificial Sequence
  Synthetic
gcagguggaucaccugaggu

SEQ ID NO: 393774 - RNA, 24 nt, Artificial Sequence
  Synthetic
cgaggcagguggaucaccugaggu

SEQ ID NO: 393775 - RNA, 19 nt, Artificial Sequence
  Synthetic
uggguggaucaccugaggu

SEQ ID NO: 393776 - RNA, 20 nt, Artificial Sequence
  Synthetic
guggguggaucaccugaggu

SEQ ID NO: 393777 - RNA, 21 nt, Artificial Sequence
  Synthetic
gguggguggaucaccugaggu

SEQ ID NO: 393778 - RNA, 22 nt, Artificial Sequence
  Synthetic
agguggguggaucaccugaggu

SEQ ID NO: 393779 - RNA, 23 nt, Artificial Sequence
  Synthetic
gagguggguggaucaccugaggu

SEQ ID NO: 393780 - RNA, 24 nt, Artificial Sequence
  Synthetic
cgagguggguggaucaccugaggu

SEQ ID NO: 393781 - RNA, 18 nt, Artificial Sequence
  Synthetic
ggguguaucaccugaggu

SEQ ID NO: 393782 - RNA, 19 nt, Artificial Sequence
  Synthetic
cggguguaucaccugaggu

SEQ ID NO: 393783 - RNA, 20 nt, Artificial Sequence
  Synthetic
gcggguguaucaccugaggu

SEQ ID NO: 393784 - RNA, 21 nt, Artificial Sequence
  Synthetic
ggcggguguaucaccugaggu

SEQ ID NO: 393785 - RNA, 22 nt, Artificial Sequence
  Synthetic
aggcggguguaucaccugaggu

SEQ ID NO: 393786 - RNA, 23 nt, Artificial Sequence
  Synthetic
gaggcggguguaucaccugaggu

SEQ ID NO: 393787 - RNA, 24 nt, Artificial Sequence
  Synthetic
ugaggcggguguaucaccugaggu

SEQ ID NO: 393788 - RNA, 18 nt, Artificial Sequence
  Synthetic
uucagugggaccugaggu

SEQ ID NO: 393789 - RNA, 19 nt, Artificial Sequence
  Synthetic
cuucagugggaccugaggu

SEQ ID NO: 393790 - RNA, 20 nt, Artificial Sequence
  Synthetic
acuucagugggaccugaggu

SEQ ID NO: 393791 - RNA, 21 nt, Artificial Sequence
  Synthetic
gacuucagugggaccugaggu

SEQ ID NO: 393792 - RNA, 22 nt, Artificial Sequence
  Synthetic
ugacuucagugggaccugaggu

SEQ ID NO: 393793 - RNA, 23 nt, Artificial Sequence
  Synthetic
augacuucagugggaccugaggu

SEQ ID NO: 393794 - RNA, 24 nt, Artificial Sequence
  Synthetic
aaugacuucagugggaccugaggu

SEQ ID NO: 393795 - RNA, 18 nt, Artificial Sequence
  Synthetic
uacucaggaggcugaggu

SEQ ID NO: 393796 - RNA, 19 nt, Artificial Sequence
  Synthetic
cuacucaggaggcugaggu

SEQ ID NO: 393797 - RNA, 20 nt, Artificial Sequence
  Synthetic
acuacucaggaggcugaggu

SEQ ID NO: 393798 - RNA, 21 nt, Artificial Sequence
  Synthetic
aacuacucaggaggcugaggu

SEQ ID NO: 393799 - RNA, 22 nt, Artificial Sequence
  Synthetic
caacuacucaggaggcugaggu

SEQ ID NO: 393800 - RNA, 23 nt, Artificial Sequence
  Synthetic
ccaacuacucaggaggcugaggu

SEQ ID NO: 393801 - RNA, 24 nt, Artificial Sequence
  Synthetic
cccaacuacucaggaggcugaggu

SEQ ID NO: 393802 - RNA, 20 nt, Artificial Sequence
  Synthetic
gcuacucaggaggcugaggu

SEQ ID NO: 393803 - RNA, 22 nt, Artificial Sequence
  Synthetic
uagcuacucaggaggcugaggu

SEQ ID NO: 393804 - RNA, 23 nt, Artificial Sequence
  Synthetic
guagcuacucaggaggcugaggu

SEQ ID NO: 393805 - RNA, 24 nt, Artificial Sequence
  Synthetic
aguagcuacucaggaggcugaggu

SEQ ID NO: 393806 - RNA, 18 nt, Artificial Sequence
  Synthetic
uacucgggaggcugaggu

SEQ ID NO: 393807 - RNA, 19 nt, Artificial Sequence
  Synthetic
cuacucgggaggcugaggu

SEQ ID NO: 393808 - RNA, 20 nt, Artificial Sequence
  Synthetic
gcuacucgggaggcugaggu

SEQ ID NO: 393809 - RNA, 18 nt, Artificial Sequence
  Synthetic
uacuugggaggcugaggu

SEQ ID NO: 393810 - RNA, 19 nt, Artificial Sequence
  Synthetic
cuacuugggaggcugaggu

SEQ ID NO: 393811 - RNA, 20 nt, Artificial Sequence
  Synthetic
gcuacuugggaggcugaggu

SEQ ID NO: 393812 - RNA, 21 nt, Artificial Sequence
  Synthetic
agcuacuugggaggcugaggu

SEQ ID NO: 393813 - RNA, 22 nt, Artificial Sequence
  Synthetic
uagcuacuugggaggcugaggu

SEQ ID NO: 393814 - RNA, 23 nt, Artificial Sequence
  Synthetic
cuagcuacuugggaggcugaggu

SEQ ID NO: 393815 - RNA, 24 nt, Artificial Sequence
  Synthetic
ccuagcuacuugggaggcugaggu

SEQ ID NO: 393816 - RNA, 18 nt, Artificial Sequence
  Synthetic
agcgcaugaugcugaggu

SEQ ID NO: 393817 - RNA, 19 nt, Artificial Sequence
  Synthetic
uagcgcaugaugcugaggu

SEQ ID NO: 393818 - RNA, 20 nt, Artificial Sequence
  Synthetic
auagcgcaugaugcugaggu

SEQ ID NO: 393819 - RNA, 21 nt, Artificial Sequence
  Synthetic
aauagcgcaugaugcugaggu

SEQ ID NO: 393820 - RNA, 22 nt, Artificial Sequence
  Synthetic
gaauagcgcaugaugcugaggu

SEQ ID NO: 393821 - RNA, 23 nt, Artificial Sequence
  Synthetic
ggaauagcgcaugaugcugaggu

SEQ ID NO: 393822 - RNA, 24 nt, Artificial Sequence
  Synthetic
gggaauagcgcaugaugcugaggu

SEQ ID NO: 393823 - RNA, 18 nt, Artificial Sequence
  Synthetic
auugcaugaugcugaggu

SEQ ID NO: 393824 - RNA, 19 nt, Artificial Sequence
  Synthetic
uauugcaugaugcugaggu

SEQ ID NO: 393825 - RNA, 20 nt, Artificial Sequence
  Synthetic
guauugcaugaugcugaggu

SEQ ID NO: 393826 - RNA, 21 nt, Artificial Sequence
  Synthetic
aguauugcaugaugcugaggu

SEQ ID NO: 393827 - RNA, 22 nt, Artificial Sequence
  Synthetic
gaguauugcaugaugcugaggu

SEQ ID NO: 393828 - RNA, 23 nt, Artificial Sequence
  Synthetic
ggaguauugcaugaugcugaggu

SEQ ID NO: 393829 - RNA, 24 nt, Artificial Sequence
  Synthetic
gggaguauugcaugaugcugaggu

SEQ ID NO: 393830 - RNA, 18 nt, Artificial Sequence
  Synthetic
gggcagaucaucugaggu

SEQ ID NO: 393831 - RNA, 19 nt, Artificial Sequence
  Synthetic
ugggcagaucaucugaggu

SEQ ID NO: 393832 - RNA, 20 nt, Artificial Sequence
  Synthetic
augggcagaucaucugaggu

SEQ ID NO: 393833 - RNA, 21 nt, Artificial Sequence
  Synthetic
gaugggcagaucaucugaggu

SEQ ID NO: 393834 - RNA, 22 nt, Artificial Sequence
  Synthetic
agaugggcagaucaucugaggu

SEQ ID NO: 393835 - RNA, 23 nt, Artificial Sequence
  Synthetic
aagaugggcagaucaucugaggu

SEQ ID NO: 393836 - RNA, 24 nt, Artificial Sequence
  Synthetic
caagaugggcagaucaucugaggu

SEQ ID NO: 393837 - RNA, 18 nt, Artificial Sequence
  Synthetic
uacaugggagucugaggu

SEQ ID NO: 393838 - RNA, 19 nt, Artificial Sequence
  Synthetic
cuacaugggagucugaggu

SEQ ID NO: 393839 - RNA, 20 nt, Artificial Sequence
  Synthetic
gcuacaugggagucugaggu

SEQ ID NO: 393840 - RNA, 21 nt, Artificial Sequence
  Synthetic
agcuacaugggagucugaggu

SEQ ID NO: 393841 - RNA, 22 nt, Artificial Sequence
  Synthetic
cagcuacaugggagucugaggu

SEQ ID NO: 393842 - RNA, 23 nt, Artificial Sequence
  Synthetic
ccagcuacaugggagucugaggu

SEQ ID NO: 393843 - RNA, 24 nt, Artificial Sequence
  Synthetic
cccagcuacaugggagucugaggu

SEQ ID NO: 393844 - RNA, 18 nt, Artificial Sequence
  Synthetic
uuacacuccuucugaggu

SEQ ID NO: 393845 - RNA, 19 nt, Artificial Sequence
  Synthetic
uuuacacuccuucugaggu

SEQ ID NO: 393846 - RNA, 20 nt, Artificial Sequence
  Synthetic
auuuacacuccuucugaggu

SEQ ID NO: 393847 - RNA, 21 nt, Artificial Sequence
  Synthetic
aauuuacacuccuucugaggu

SEQ ID NO: 393848 - RNA, 22 nt, Artificial Sequence
  Synthetic
gaauuuacacuccuucugaggu

SEQ ID NO: 393849 - RNA, 23 nt, Artificial Sequence
  Synthetic
ugaauuuacacuccuucugaggu

SEQ ID NO: 393850 - RNA, 24 nt, Artificial Sequence
  Synthetic
uugaauuuacacuccuucugaggu

SEQ ID NO: 393851 - RNA, 18 nt, Artificial Sequence
  Synthetic
ccauuuguaaagugaggu

SEQ ID NO: 393852 - RNA, 19 nt, Artificial Sequence
  Synthetic
uccauuuguaaagugaggu

SEQ ID NO: 393853 - RNA, 20 nt, Artificial Sequence
  Synthetic
cuccauuuguaaagugaggu

SEQ ID NO: 393854 - RNA, 21 nt, Artificial Sequence
  Synthetic
ucuccauuuguaaagugaggu

SEQ ID NO: 393855 - RNA, 22 nt, Artificial Sequence
  Synthetic
uucuccauuuguaaagugaggu

SEQ ID NO: 393856 - RNA, 23 nt, Artificial Sequence
  Synthetic
uuucuccauuuguaaagugaggu

SEQ ID NO: 393857 - RNA, 24 nt, Artificial Sequence
  Synthetic
guuucuccauuuguaaagugaggu

SEQ ID NO: 393858 - RNA, 18 nt, Artificial Sequence
  Synthetic
ugagggcagcagugaggu

SEQ ID NO: 393859 - RNA, 19 nt, Artificial Sequence
  Synthetic
cugagggcagcagugaggu

SEQ ID NO: 393860 - RNA, 20 nt, Artificial Sequence
  Synthetic
gcugagggcagcagugaggu

SEQ ID NO: 393861 - RNA, 21 nt, Artificial Sequence
  Synthetic
ggcugagggcagcagugaggu

SEQ ID NO: 393862 - RNA, 22 nt, Artificial Sequence
  Synthetic
aggcugagggcagcagugaggu

SEQ ID NO: 393863 - RNA, 23 nt, Artificial Sequence
  Synthetic
gaggcugagggcagcagugaggu

SEQ ID NO: 393864 - RNA, 24 nt, Artificial Sequence
  Synthetic
ugaggcugagggcagcagugaggu

SEQ ID NO: 393865 - RNA, 18 nt, Artificial Sequence
  Synthetic
uaaaguagaaggugaggu

SEQ ID NO: 393866 - RNA, 19 nt, Artificial Sequence
  Synthetic
auaaaguagaaggugaggu

SEQ ID NO: 393867 - RNA, 20 nt, Artificial Sequence
  Synthetic
cauaaaguagaaggugaggu

SEQ ID NO: 393868 - RNA, 21 nt, Artificial Sequence
  Synthetic
gcauaaaguagaaggugaggu

SEQ ID NO: 393869 - RNA, 22 nt, Artificial Sequence
  Synthetic
agcauaaaguagaaggugaggu

SEQ ID NO: 393870 - RNA, 23 nt, Artificial Sequence
  Synthetic
gagcauaaaguagaaggugaggu

SEQ ID NO: 393871 - RNA, 24 nt, Artificial Sequence
  Synthetic
ugagcauaaaguagaaggugaggu

SEQ ID NO: 393872 - RNA, 18 nt, Artificial Sequence
  Synthetic
ugucaguuguggugaggu

SEQ ID NO: 393873 - RNA, 19 nt, Artificial Sequence
  Synthetic
augucaguuguggugaggu

SEQ ID NO: 393874 - RNA, 20 nt, Artificial Sequence
  Synthetic
aaugucaguuguggugaggu

SEQ ID NO: 393875 - RNA, 21 nt, Artificial Sequence
  Synthetic
aaaugucaguuguggugaggu

SEQ ID NO: 393876 - RNA, 22 nt, Artificial Sequence
  Synthetic
aaaaugucaguuguggugaggu

SEQ ID NO: 393877 - RNA, 23 nt, Artificial Sequence
  Synthetic
caaaaugucaguuguggugaggu

SEQ ID NO: 393878 - RNA, 24 nt, Artificial Sequence
  Synthetic
ccaaaaugucaguuguggugaggu

SEQ ID NO: 393879 - RNA, 18 nt, Artificial Sequence
  Synthetic
cuguucauaaugugaggu

SEQ ID NO: 393880 - RNA, 19 nt, Artificial Sequence
  Synthetic
ccuguucauaaugugaggu

SEQ ID NO: 393881 - RNA, 20 nt, Artificial Sequence
  Synthetic
cccuguucauaaugugaggu

SEQ ID NO: 393882 - RNA, 21 nt, Artificial Sequence
  Synthetic
ucccuguucauaaugugaggu

SEQ ID NO: 393883 - RNA, 22 nt, Artificial Sequence
  Synthetic
uucccuguucauaaugugaggu

SEQ ID NO: 393884 - RNA, 23 nt, Artificial Sequence
  Synthetic
cuucccuguucauaaugugaggu

SEQ ID NO: 393885 - RNA, 24 nt, Artificial Sequence
  Synthetic
acuucccuguucauaaugugaggu

SEQ ID NO: 393886 - RNA, 18 nt, Artificial Sequence
  Synthetic
acagggauugugugaggu

SEQ ID NO: 393887 - RNA, 19 nt, Artificial Sequence
  Synthetic
cacagggauugugugaggu

SEQ ID NO: 393888 - RNA, 20 nt, Artificial Sequence
  Synthetic
ucacagggauugugugaggu

SEQ ID NO: 393889 - RNA, 21 nt, Artificial Sequence
  Synthetic
aucacagggauugugugaggu

SEQ ID NO: 393890 - RNA, 22 nt, Artificial Sequence
  Synthetic
aaucacagggauugugugaggu

SEQ ID NO: 393891 - RNA, 23 nt, Artificial Sequence
  Synthetic
gaaucacagggauugugugaggu

SEQ ID NO: 393892 - RNA, 24 nt, Artificial Sequence
  Synthetic
ggaaucacagggauugugugaggu

SEQ ID NO: 393893 - RNA, 18 nt, Artificial Sequence
  Synthetic
acagaguuaaauugaggu

SEQ ID NO: 393894 - RNA, 19 nt, Artificial Sequence
  Synthetic
cacagaguuaaauugaggu

SEQ ID NO: 393895 - RNA, 20 nt, Artificial Sequence
  Synthetic
ccacagaguuaaauugaggu

SEQ ID NO: 393896 - RNA, 21 nt, Artificial Sequence
  Synthetic
uccacagaguuaaauugaggu

SEQ ID NO: 393897 - RNA, 22 nt, Artificial Sequence
  Synthetic
uuccacagaguuaaauugaggu

SEQ ID NO: 393898 - RNA, 23 nt, Artificial Sequence
  Synthetic
uuuccacagaguuaaauugaggu

SEQ ID NO: 393899 - RNA, 24 nt, Artificial Sequence
  Synthetic
uuuuccacagaguuaaauugaggu

SEQ ID NO: 393900 - RNA, 18 nt, Artificial Sequence
  Synthetic
uuuuagaacuauugaggu

SEQ ID NO: 393901 - RNA, 19 nt, Artificial Sequence
  Synthetic
auuuuagaacuauugaggu

SEQ ID NO: 393902 - RNA, 20 nt, Artificial Sequence
  Synthetic
cauuuuagaacuauugaggu

SEQ ID NO: 393903 - RNA, 21 nt, Artificial Sequence
  Synthetic
ccauuuuagaacuauugaggu

SEQ ID NO: 393904 - RNA, 22 nt, Artificial Sequence
  Synthetic
uccauuuuagaacuauugaggu

SEQ ID NO: 393905 - RNA, 23 nt, Artificial Sequence
  Synthetic
auccauuuuagaacuauugaggu

SEQ ID NO: 393906 - RNA, 24 nt, Artificial Sequence
  Synthetic
aauccauuuuagaacuauugaggu

SEQ ID NO: 393907 - RNA, 18 nt, Artificial Sequence
  Synthetic
cuuacgugaacuugaggu

SEQ ID NO: 393908 - RNA, 19 nt, Artificial Sequence
  Synthetic
ccuuacgugaacuugaggu

SEQ ID NO: 393909 - RNA, 20 nt, Artificial Sequence
  Synthetic
gccuuacgugaacuugaggu

SEQ ID NO: 393910 - RNA, 21 nt, Artificial Sequence
  Synthetic
agccuuacgugaacuugaggu

SEQ ID NO: 393911 - RNA, 22 nt, Artificial Sequence
  Synthetic
aagccuuacgugaacuugaggu

SEQ ID NO: 393912 - RNA, 23 nt, Artificial Sequence
  Synthetic
uaagccuuacgugaacuugaggu

SEQ ID NO: 393913 - RNA, 24 nt, Artificial Sequence
  Synthetic
auaagccuuacgugaacuugaggu

SEQ ID NO: 393914 - RNA, 18 nt, Artificial Sequence
  Synthetic
ggguggaacacuugaggu

SEQ ID NO: 393915 - RNA, 19 nt, Artificial Sequence
  Synthetic
uggguggaacacuugaggu

SEQ ID NO: 393916 - RNA, 20 nt, Artificial Sequence
  Synthetic
guggguggaacacuugaggu

SEQ ID NO: 393917 - RNA, 21 nt, Artificial Sequence
  Synthetic
gguggguggaacacuugaggu

SEQ ID NO: 393918 - RNA, 22 nt, Artificial Sequence
  Synthetic
agguggguggaacacuugaggu

SEQ ID NO: 393919 - RNA, 23 nt, Artificial Sequence
  Synthetic
gagguggguggaacacuugaggu

SEQ ID NO: 393920 - RNA, 24 nt, Artificial Sequence
  Synthetic
ugagguggguggaacacuugaggu

SEQ ID NO: 393921 - RNA, 18 nt, Artificial Sequence
  Synthetic
gggcagaucacuugaggu

SEQ ID NO: 393922 - RNA, 19 nt, Artificial Sequence
  Synthetic
agggcagaucacuugaggu

SEQ ID NO: 393923 - RNA, 20 nt, Artificial Sequence
  Synthetic
gagggcagaucacuugaggu

SEQ ID NO: 393924 - RNA, 21 nt, Artificial Sequence
  Synthetic
ggagggcagaucacuugaggu

SEQ ID NO: 393925 - RNA, 22 nt, Artificial Sequence
  Synthetic
aggagggcagaucacuugaggu

SEQ ID NO: 393926 - RNA, 23 nt, Artificial Sequence
  Synthetic
gaggagggcagaucacuugaggu

SEQ ID NO: 393927 - RNA, 24 nt, Artificial Sequence
  Synthetic
ugaggagggcagaucacuugaggu

SEQ ID NO: 393928 - RNA, 19 nt, Artificial Sequence
  Synthetic
cagguggaucacuugaggu

SEQ ID NO: 393929 - RNA, 20 nt, Artificial Sequence
  Synthetic
gcagguggaucacuugaggu

SEQ ID NO: 393930 - RNA, 21 nt, Artificial Sequence
  Synthetic
ggcagguggaucacuugaggu

SEQ ID NO: 393931 - RNA, 22 nt, Artificial Sequence
  Synthetic
aggcagguggaucacuugaggu

SEQ ID NO: 393932 - RNA, 23 nt, Artificial Sequence
  Synthetic
gaggcagguggaucacuugaggu

SEQ ID NO: 393933 - RNA, 24 nt, Artificial Sequence
  Synthetic
ugaggcagguggaucacuugaggu

SEQ ID NO: 393934 - RNA, 18 nt, Artificial Sequence
  Synthetic
ggcugcacugcuugaggu

SEQ ID NO: 393935 - RNA, 19 nt, Artificial Sequence
  Synthetic
gggcugcacugcuugaggu

SEQ ID NO: 393936 - RNA, 20 nt, Artificial Sequence
  Synthetic
ugggcugcacugcuugaggu

SEQ ID NO: 393937 - RNA, 21 nt, Artificial Sequence
  Synthetic
gugggcugcacugcuugaggu

SEQ ID NO: 393938 - RNA, 22 nt, Artificial Sequence
  Synthetic
ugugggcugcacugcuugaggu

SEQ ID NO: 393939 - RNA, 23 nt, Artificial Sequence
  Synthetic
cugugggcugcacugcuugaggu

SEQ ID NO: 393940 - RNA, 24 nt, Artificial Sequence
  Synthetic
acugugggcugcacugcuugaggu

SEQ ID NO: 393941 - RNA, 18 nt, Artificial Sequence
  Synthetic
gggcacaucauuugaggu

SEQ ID NO: 393942 - RNA, 19 nt, Artificial Sequence
  Synthetic
cgggcacaucauuugaggu

SEQ ID NO: 393943 - RNA, 20 nt, Artificial Sequence
  Synthetic
gcgggcacaucauuugaggu

SEQ ID NO: 393944 - RNA, 21 nt, Artificial Sequence
  Synthetic
ggcgggcacaucauuugaggu

SEQ ID NO: 393945 - RNA, 22 nt, Artificial Sequence
  Synthetic
aggcgggcacaucauuugaggu

SEQ ID NO: 393946 - RNA, 23 nt, Artificial Sequence
  Synthetic
aaggcgggcacaucauuugaggu

SEQ ID NO: 393947 - RNA, 24 nt, Artificial Sequence
  Synthetic
caaggcgggcacaucauuugaggu

SEQ ID NO: 393948 - RNA, 18 nt, Artificial Sequence
  Synthetic
uccugguacacaauaggu

SEQ ID NO: 393949 - RNA, 19 nt, Artificial Sequence
  Synthetic
auccugguacacaauaggu

SEQ ID NO: 393950 - RNA, 20 nt, Artificial Sequence
  Synthetic
gauccugguacacaauaggu

SEQ ID NO: 393951 - RNA, 21 nt, Artificial Sequence
  Synthetic
agauccugguacacaauaggu

SEQ ID NO: 393952 - RNA, 22 nt, Artificial Sequence
  Synthetic
cagauccugguacacaauaggu

SEQ ID NO: 393953 - RNA, 23 nt, Artificial Sequence
  Synthetic
acagauccugguacacaauaggu

SEQ ID NO: 393954 - RNA, 24 nt, Artificial Sequence
  Synthetic
cacagauccugguacacaauaggu

SEQ ID NO: 393955 - RNA, 18 nt, Artificial Sequence
  Synthetic
guugagauaaacauaggu

SEQ ID NO: 393956 - RNA, 19 nt, Artificial Sequence
  Synthetic
aguugagauaaacauaggu

SEQ ID NO: 393957 - RNA, 20 nt, Artificial Sequence
  Synthetic
uaguugagauaaacauaggu

SEQ ID NO: 393958 - RNA, 21 nt, Artificial Sequence
  Synthetic
cuaguugagauaaacauaggu

SEQ ID NO: 393959 - RNA, 22 nt, Artificial Sequence
  Synthetic
gcuaguugagauaaacauaggu

SEQ ID NO: 393960 - RNA, 23 nt, Artificial Sequence
  Synthetic
ugcuaguugagauaaacauaggu

SEQ ID NO: 393961 - RNA, 24 nt, Artificial Sequence
  Synthetic
augcuaguugagauaaacauaggu

SEQ ID NO: 393962 - RNA, 18 nt, Artificial Sequence
  Synthetic
uuacuggcaaagauaggu

SEQ ID NO: 393963 - RNA, 19 nt, Artificial Sequence
  Synthetic
guuacuggcaaagauaggu

SEQ ID NO: 393964 - RNA, 20 nt, Artificial Sequence
  Synthetic
aguuacuggcaaagauaggu

SEQ ID NO: 393965 - RNA, 21 nt, Artificial Sequence
  Synthetic
caguuacuggcaaagauaggu

SEQ ID NO: 393966 - RNA, 22 nt, Artificial Sequence
  Synthetic
acaguuacuggcaaagauaggu

SEQ ID NO: 393967 - RNA, 23 nt, Artificial Sequence
  Synthetic
aacaguuacuggcaaagauaggu

SEQ ID NO: 393968 - RNA, 24 nt, Artificial Sequence
  Synthetic
caacaguuacuggcaaagauaggu

SEQ ID NO: 393969 - RNA, 18 nt, Artificial Sequence
  Synthetic
ugcaccagugggauaggu

SEQ ID NO: 393970 - RNA, 19 nt, Artificial Sequence
  Synthetic
augcaccagugggauaggu

SEQ ID NO: 393971 - RNA, 20 nt, Artificial Sequence
  Synthetic
aaugcaccagugggauaggu

SEQ ID NO: 393972 - RNA, 21 nt, Artificial Sequence
  Synthetic
caaugcaccagugggauaggu

SEQ ID NO: 393973 - RNA, 22 nt, Artificial Sequence
  Synthetic
acaaugcaccagugggauaggu

SEQ ID NO: 393974 - RNA, 23 nt, Artificial Sequence
  Synthetic
uacaaugcaccagugggauaggu

SEQ ID NO: 393975 - RNA, 24 nt, Artificial Sequence
  Synthetic
cuacaaugcaccagugggauaggu

SEQ ID NO: 393976 - RNA, 18 nt, Artificial Sequence
  Synthetic
caacuaucaacuauaggu

SEQ ID NO: 393977 - RNA, 19 nt, Artificial Sequence
  Synthetic
ucaacuaucaacuauaggu

SEQ ID NO: 393978 - RNA, 20 nt, Artificial Sequence
  Synthetic
aucaacuaucaacuauaggu

SEQ ID NO: 393979 - RNA, 21 nt, Artificial Sequence
  Synthetic
uaucaacuaucaacuauaggu

SEQ ID NO: 393980 - RNA, 22 nt, Artificial Sequence
  Synthetic
uuaucaacuaucaacuauaggu

SEQ ID NO: 393981 - RNA, 23 nt, Artificial Sequence
  Synthetic
guuaucaacuaucaacuauaggu

SEQ ID NO: 393982 - RNA, 24 nt, Artificial Sequence
  Synthetic
aguuaucaacuaucaacuauaggu

SEQ ID NO: 393983 - RNA, 18 nt, Artificial Sequence
  Synthetic
aguaugaaaauccuaggu

SEQ ID NO: 393984 - RNA, 19 nt, Artificial Sequence
  Synthetic
gaguaugaaaauccuaggu

SEQ ID NO: 393985 - RNA, 20 nt, Artificial Sequence
  Synthetic
ugaguaugaaaauccuaggu

SEQ ID NO: 393986 - RNA, 21 nt, Artificial Sequence
  Synthetic
uugaguaugaaaauccuaggu

SEQ ID NO: 393987 - RNA, 22 nt, Artificial Sequence
  Synthetic
auugaguaugaaaauccuaggu

SEQ ID NO: 393988 - RNA, 23 nt, Artificial Sequence
  Synthetic
aauugaguaugaaaauccuaggu

SEQ ID NO: 393989 - RNA, 24 nt, Artificial Sequence
  Synthetic
gaauugaguaugaaaauccuaggu

SEQ ID NO: 393990 - RNA, 18 nt, Artificial Sequence
  Synthetic
cagcugaaaaagcuaggu

SEQ ID NO: 393991 - RNA, 19 nt, Artificial Sequence
  Synthetic
gcagcugaaaaagcuaggu

SEQ ID NO: 393992 - RNA, 20 nt, Artificial Sequence
  Synthetic
ggcagcugaaaaagcuaggu

SEQ ID NO: 393993 - RNA, 21 nt, Artificial Sequence
  Synthetic
aggcagcugaaaaagcuaggu

SEQ ID NO: 393994 - RNA, 22 nt, Artificial Sequence
  Synthetic
caggcagcugaaaaagcuaggu

SEQ ID NO: 393995 - RNA, 23 nt, Artificial Sequence
  Synthetic
ccaggcagcugaaaaagcuaggu

SEQ ID NO: 393996 - RNA, 24 nt, Artificial Sequence
  Synthetic
accaggcagcugaaaaagcuaggu

SEQ ID NO: 393997 - RNA, 18 nt, Artificial Sequence
  Synthetic
ugcaguaauaaucuaggu

SEQ ID NO: 393998 - RNA, 19 nt, Artificial Sequence
  Synthetic
augcaguaauaaucuaggu

SEQ ID NO: 393999 - RNA, 20 nt, Artificial Sequence
  Synthetic
caugcaguaauaaucuaggu

SEQ ID NO: 394000 - RNA, 21 nt, Artificial Sequence
  Synthetic
ucaugcaguaauaaucuaggu

SEQ ID NO: 394001 - RNA, 22 nt, Artificial Sequence
  Synthetic
aucaugcaguaauaaucuaggu

SEQ ID NO: 394002 - RNA, 23 nt, Artificial Sequence
  Synthetic
aaucaugcaguaauaaucuaggu

SEQ ID NO: 394003 - RNA, 24 nt, Artificial Sequence
  Synthetic
aaaucaugcaguaauaaucuaggu

SEQ ID NO: 394004 - RNA, 18 nt, Artificial Sequence
  Synthetic
gugagcuuauuucuaggu

SEQ ID NO: 394005 - RNA, 19 nt, Artificial Sequence
  Synthetic
ugugagcuuauuucuaggu

SEQ ID NO: 394006 - RNA, 20 nt, Artificial Sequence
  Synthetic
augugagcuuauuucuaggu

SEQ ID NO: 394007 - RNA, 21 nt, Artificial Sequence
  Synthetic
uaugugagcuuauuucuaggu

SEQ ID NO: 394008 - RNA, 22 nt, Artificial Sequence
  Synthetic
auaugugagcuuauuucuaggu

SEQ ID NO: 394009 - RNA, 23 nt, Artificial Sequence
  Synthetic
uauaugugagcuuauuucuaggu

SEQ ID NO: 394010 - RNA, 24 nt, Artificial Sequence
  Synthetic
guauaugugagcuuauuucuaggu

SEQ ID NO: 394011 - RNA, 18 nt, Artificial Sequence
  Synthetic
gaugcugauucaguaggu

SEQ ID NO: 394012 - RNA, 19 nt, Artificial Sequence
  Synthetic
ugaugcugauucaguaggu

SEQ ID NO: 394013 - RNA, 20 nt, Artificial Sequence
  Synthetic
cugaugcugauucaguaggu

SEQ ID NO: 394014 - RNA, 21 nt, Artificial Sequence
  Synthetic
acugaugcugauucaguaggu

SEQ ID NO: 394015 - RNA, 22 nt, Artificial Sequence
  Synthetic
aacugaugcugauucaguaggu

SEQ ID NO: 394016 - RNA, 23 nt, Artificial Sequence
  Synthetic
uaacugaugcugauucaguaggu

SEQ ID NO: 394017 - RNA, 24 nt, Artificial Sequence
  Synthetic
uuaacugaugcugauucaguaggu

SEQ ID NO: 394018 - RNA, 18 nt, Artificial Sequence
  Synthetic
ugggccagacagguaggu

SEQ ID NO: 394019 - RNA, 19 nt, Artificial Sequence
  Synthetic
augggccagacagguaggu

SEQ ID NO: 394020 - RNA, 20 nt, Artificial Sequence
  Synthetic
caugggccagacagguaggu

SEQ ID NO: 394021 - RNA, 21 nt, Artificial Sequence
  Synthetic
gcaugggccagacagguaggu

SEQ ID NO: 394022 - RNA, 22 nt, Artificial Sequence
  Synthetic
agcaugggccagacagguaggu

SEQ ID NO: 394023 - RNA, 23 nt, Artificial Sequence
  Synthetic
uagcaugggccagacagguaggu

SEQ ID NO: 394024 - RNA, 24 nt, Artificial Sequence
  Synthetic
auagcaugggccagacagguaggu

SEQ ID NO: 394025 - RNA, 18 nt, Artificial Sequence
  Synthetic
ggucugauacauguaggu

SEQ ID NO: 394026 - RNA, 19 nt, Artificial Sequence
  Synthetic
uggucugauacauguaggu

SEQ ID NO: 394027 - RNA, 20 nt, Artificial Sequence
  Synthetic
auggucugauacauguaggu

SEQ ID NO: 394028 - RNA, 21 nt, Artificial Sequence
  Synthetic
gauggucugauacauguaggu

SEQ ID NO: 394029 - RNA, 22 nt, Artificial Sequence
  Synthetic
ugauggucugauacauguaggu

SEQ ID NO: 394030 - RNA, 23 nt, Artificial Sequence
  Synthetic
gugauggucugauacauguaggu

SEQ ID NO: 394031 - RNA, 24 nt, Artificial Sequence
  Synthetic
agugauggucugauacauguaggu

SEQ ID NO: 394032 - RNA, 18 nt, Artificial Sequence
  Synthetic
uuucuauaauauguaggu

SEQ ID NO: 394033 - RNA, 19 nt, Artificial Sequence
  Synthetic
uuuucuauaauauguaggu

SEQ ID NO: 394034 - RNA, 20 nt, Artificial Sequence
  Synthetic
auuuucuauaauauguaggu

SEQ ID NO: 394035 - RNA, 21 nt, Artificial Sequence
  Synthetic
aauuuucuauaauauguaggu

SEQ ID NO: 394036 - RNA, 22 nt, Artificial Sequence
  Synthetic
gaauuuucuauaauauguaggu

SEQ ID NO: 394037 - RNA, 23 nt, Artificial Sequence
  Synthetic
ggaauuuucuauaauauguaggu

SEQ ID NO: 394038 - RNA, 24 nt, Artificial Sequence
  Synthetic
aggaauuuucuauaauauguaggu

SEQ ID NO: 394039 - RNA, 18 nt, Artificial Sequence
  Synthetic
uuuggaaacuuuguaggu

SEQ ID NO: 394040 - RNA, 19 nt, Artificial Sequence
  Synthetic
auuuggaaacuuuguaggu

SEQ ID NO: 394041 - RNA, 20 nt, Artificial Sequence
  Synthetic
cauuuggaaacuuuguaggu

SEQ ID NO: 394042 - RNA, 21 nt, Artificial Sequence
  Synthetic
acauuuggaaacuuuguaggu

SEQ ID NO: 394043 - RNA, 22 nt, Artificial Sequence
  Synthetic
aacauuuggaaacuuuguaggu

SEQ ID NO: 394044 - RNA, 23 nt, Artificial Sequence
  Synthetic
uaacauuuggaaacuuuguaggu

SEQ ID NO: 394045 - RNA, 24 nt, Artificial Sequence
  Synthetic
uuaacauuuggaaacuuuguaggu

SEQ ID NO: 394046 - RNA, 18 nt, Artificial Sequence
  Synthetic
uuccuuaaaaaauuaggu

SEQ ID NO: 394047 - RNA, 19 nt, Artificial Sequence
  Synthetic
auuccuuaaaaaauuaggu

SEQ ID NO: 394048 - RNA, 20 nt, Artificial Sequence
  Synthetic
aauuccuuaaaaaauuaggu

SEQ ID NO: 394049 - RNA, 21 nt, Artificial Sequence
  Synthetic
gaauuccuuaaaaaauuaggu

SEQ ID NO: 394050 - RNA, 22 nt, Artificial Sequence
  Synthetic
ugaauuccuuaaaaaauuaggu

SEQ ID NO: 394051 - RNA, 23 nt, Artificial Sequence
  Synthetic
augaauuccuuaaaaaauuaggu

SEQ ID NO: 394052 - RNA, 24 nt, Artificial Sequence
  Synthetic
aaugaauuccuuaaaaaauuaggu

SEQ ID NO: 394053 - RNA, 18 nt, Artificial Sequence
  Synthetic
ugguuuaaaaaauuaggu

SEQ ID NO: 394054 - RNA, 19 nt, Artificial Sequence
  Synthetic
uugguuuaaaaaauuaggu

SEQ ID NO: 394055 - RNA, 20 nt, Artificial Sequence
  Synthetic
uuugguuuaaaaaauuaggu

SEQ ID NO: 394056 - RNA, 21 nt, Artificial Sequence
  Synthetic
uuuugguuuaaaaaauuaggu

SEQ ID NO: 394057 - RNA, 22 nt, Artificial Sequence
  Synthetic
guuuugguuuaaaaaauuaggu

SEQ ID NO: 394058 - RNA, 23 nt, Artificial Sequence
  Synthetic
gguuuugguuuaaaaaauuaggu

SEQ ID NO: 394059 - RNA, 24 nt, Artificial Sequence
  Synthetic
ugguuuugguuuaaaaaauuaggu

SEQ ID NO: 394060 - RNA, 18 nt, Artificial Sequence
  Synthetic
acaaauauaaaauuaggu

SEQ ID NO: 394061 - RNA, 19 nt, Artificial Sequence
  Synthetic
gacaaauauaaaauuaggu

SEQ ID NO: 394062 - RNA, 20 nt, Artificial Sequence
  Synthetic
ggacaaauauaaaauuaggu

SEQ ID NO: 394063 - RNA, 21 nt, Artificial Sequence
  Synthetic
aggacaaauauaaaauuaggu

SEQ ID NO: 394064 - RNA, 22 nt, Artificial Sequence
  Synthetic
caggacaaauauaaaauuaggu

SEQ ID NO: 394065 - RNA, 23 nt, Artificial Sequence
  Synthetic
acaggacaaauauaaaauuaggu

SEQ ID NO: 394066 - RNA, 24 nt, Artificial Sequence
  Synthetic
aacaggacaaauauaaaauuaggu

SEQ ID NO: 394067 - RNA, 18 nt, Artificial Sequence
  Synthetic
agucucucaacauuaggu

SEQ ID NO: 394068 - RNA, 19 nt, Artificial Sequence
  Synthetic
aagucucucaacauuaggu

SEQ ID NO: 394069 - RNA, 20 nt, Artificial Sequence
  Synthetic
aaagucucucaacauuaggu

SEQ ID NO: 394070 - RNA, 21 nt, Artificial Sequence
  Synthetic
aaaagucucucaacauuaggu

SEQ ID NO: 394071 - RNA, 22 nt, Artificial Sequence
  Synthetic
aaaaagucucucaacauuaggu

SEQ ID NO: 394072 - RNA, 23 nt, Artificial Sequence
  Synthetic
gaaaaagucucucaacauuaggu

SEQ ID NO: 394073 - RNA, 24 nt, Artificial Sequence
  Synthetic
ggaaaaagucucucaacauuaggu

SEQ ID NO: 394074 - RNA, 18 nt, Artificial Sequence
  Synthetic
uggguuuagagauuaggu

SEQ ID NO: 394075 - RNA, 19 nt, Artificial Sequence
  Synthetic
cuggguuuagagauuaggu

SEQ ID NO: 394076 - RNA, 20 nt, Artificial Sequence
  Synthetic
gcuggguuuagagauuaggu

SEQ ID NO: 394077 - RNA, 21 nt, Artificial Sequence
  Synthetic
agcuggguuuagagauuaggu

SEQ ID NO: 394078 - RNA, 22 nt, Artificial Sequence
  Synthetic
cagcuggguuuagagauuaggu

SEQ ID NO: 394079 - RNA, 23 nt, Artificial Sequence
  Synthetic
ucagcuggguuuagagauuaggu

SEQ ID NO: 394080 - RNA, 24 nt, Artificial Sequence
  Synthetic
gucagcuggguuuagagauuaggu

SEQ ID NO: 394081 - RNA, 18 nt, Artificial Sequence
  Synthetic
ggcaggacgcacuuaggu

SEQ ID NO: 394082 - RNA, 19 nt, Artificial Sequence
  Synthetic
uggcaggacgcacuuaggu

SEQ ID NO: 394083 - RNA, 20 nt, Artificial Sequence
  Synthetic
guggcaggacgcacuuaggu

SEQ ID NO: 394084 - RNA, 21 nt, Artificial Sequence
  Synthetic
gguggcaggacgcacuuaggu

SEQ ID NO: 394085 - RNA, 22 nt, Artificial Sequence
  Synthetic
agguggcaggacgcacuuaggu

SEQ ID NO: 394086 - RNA, 23 nt, Artificial Sequence
  Synthetic
cagguggcaggacgcacuuaggu

SEQ ID NO: 394087 - RNA, 24 nt, Artificial Sequence
  Synthetic
ucagguggcaggacgcacuuaggu

SEQ ID NO: 394088 - RNA, 18 nt, Artificial Sequence
  Synthetic
acugugaagugguuaggu

SEQ ID NO: 394089 - RNA, 19 nt, Artificial Sequence
  Synthetic
uacugugaagugguuaggu

SEQ ID NO: 394090 - RNA, 20 nt, Artificial Sequence
  Synthetic
cuacugugaagugguuaggu

SEQ ID NO: 394091 - RNA, 21 nt, Artificial Sequence
  Synthetic
acuacugugaagugguuaggu

SEQ ID NO: 394092 - RNA, 22 nt, Artificial Sequence
  Synthetic
aacuacugugaagugguuaggu

SEQ ID NO: 394093 - RNA, 23 nt, Artificial Sequence
  Synthetic
uaacuacugugaagugguuaggu

SEQ ID NO: 394094 - RNA, 24 nt, Artificial Sequence
  Synthetic
uuaacuacugugaagugguuaggu

SEQ ID NO: 394095 - RNA, 18 nt, Artificial Sequence
  Synthetic
guuuuggaauuguuaggu

SEQ ID NO: 394096 - RNA, 19 nt, Artificial Sequence
  Synthetic
uguuuuggaauuguuaggu

SEQ ID NO: 394097 - RNA, 20 nt, Artificial Sequence
  Synthetic
uuguuuuggaauuguuaggu

SEQ ID NO: 394098 - RNA, 21 nt, Artificial Sequence
  Synthetic
uuuguuuuggaauuguuaggu

SEQ ID NO: 394099 - RNA, 22 nt, Artificial Sequence
  Synthetic
uuuuguuuuggaauuguuaggu

SEQ ID NO: 394100 - RNA, 23 nt, Artificial Sequence
  Synthetic
auuuuguuuuggaauuguuaggu

SEQ ID NO: 394101 - RNA, 24 nt, Artificial Sequence
  Synthetic
aauuuuguuuuggaauuguuaggu

SEQ ID NO: 394102 - RNA, 18 nt, Artificial Sequence
  Synthetic
aauggaauaaauuuaggu

SEQ ID NO: 394103 - RNA, 19 nt, Artificial Sequence
  Synthetic
uaauggaauaaauuuaggu

SEQ ID NO: 394104 - RNA, 20 nt, Artificial Sequence
  Synthetic
auaauggaauaaauuuaggu

SEQ ID NO: 394105 - RNA, 21 nt, Artificial Sequence
  Synthetic
uauaauggaauaaauuuaggu

SEQ ID NO: 394106 - RNA, 22 nt, Artificial Sequence
  Synthetic
uuauaauggaauaaauuuaggu

SEQ ID NO: 394107 - RNA, 23 nt, Artificial Sequence
  Synthetic
uuuauaauggaauaaauuuaggu

SEQ ID NO: 394108 - RNA, 24 nt, Artificial Sequence
  Synthetic
uuuuauaauggaauaaauuuaggu

SEQ ID NO: 394109 - RNA, 18 nt, Artificial Sequence
  Synthetic
cucaaaaugaguuuaggu

SEQ ID NO: 394110 - RNA, 19 nt, Artificial Sequence
  Synthetic
ucucaaaaugaguuuaggu

SEQ ID NO: 394111 - RNA, 20 nt, Artificial Sequence
  Synthetic
gucucaaaaugaguuuaggu

SEQ ID NO: 394112 - RNA, 21 nt, Artificial Sequence
  Synthetic
agucucaaaaugaguuuaggu

SEQ ID NO: 394113 - RNA, 22 nt, Artificial Sequence
  Synthetic
gagucucaaaaugaguuuaggu

SEQ ID NO: 394114 - RNA, 23 nt, Artificial Sequence
  Synthetic
agagucucaaaaugaguuuaggu

SEQ ID NO: 394115 - RNA, 24 nt, Artificial Sequence
  Synthetic
gagagucucaaaaugaguuuaggu

SEQ ID NO: 394116 - RNA, 18 nt, Artificial Sequence
  Synthetic
aacuauagcuuuuuaggu

SEQ ID NO: 394117 - RNA, 19 nt, Artificial Sequence
  Synthetic
uaacuauagcuuuuuaggu

SEQ ID NO: 394118 - RNA, 20 nt, Artificial Sequence
  Synthetic
guaacuauagcuuuuuaggu

SEQ ID NO: 394119 - RNA, 21 nt, Artificial Sequence
  Synthetic
uguaacuauagcuuuuuaggu

SEQ ID NO: 394120 - RNA, 22 nt, Artificial Sequence
  Synthetic
cuguaacuauagcuuuuuaggu

SEQ ID NO: 394121 - RNA, 23 nt, Artificial Sequence
  Synthetic
ucuguaacuauagcuuuuuaggu

SEQ ID NO: 394122 - RNA, 24 nt, Artificial Sequence
  Synthetic
uucuguaacuauagcuuuuuaggu

SEQ ID NO: 394123 - RNA, 18 nt, Artificial Sequence
  Synthetic
caaaucagaaaaaacggu

SEQ ID NO: 394124 - RNA, 19 nt, Artificial Sequence
  Synthetic
ucaaaucagaaaaaacggu

SEQ ID NO: 394125 - RNA, 20 nt, Artificial Sequence
  Synthetic
uucaaaucagaaaaaacggu

SEQ ID NO: 394126 - RNA, 21 nt, Artificial Sequence
  Synthetic
auucaaaucagaaaaaacggu

SEQ ID NO: 394127 - RNA, 22 nt, Artificial Sequence
  Synthetic
gauucaaaucagaaaaaacggu

SEQ ID NO: 394128 - RNA, 23 nt, Artificial Sequence
  Synthetic
ggauucaaaucagaaaaaacggu

SEQ ID NO: 394129 - RNA, 24 nt, Artificial Sequence
  Synthetic
gggauucaaaucagaaaaaacggu

SEQ ID NO: 394130 - RNA, 18 nt, Artificial Sequence
  Synthetic
uacagucccaccaacggu

SEQ ID NO: 394131 - RNA, 19 nt, Artificial Sequence
  Synthetic
uuacagucccaccaacggu

SEQ ID NO: 394132 - RNA, 20 nt, Artificial Sequence
  Synthetic
uuuacagucccaccaacggu

SEQ ID NO: 394133 - RNA, 21 nt, Artificial Sequence
  Synthetic
guuuacagucccaccaacggu

SEQ ID NO: 394134 - RNA, 22 nt, Artificial Sequence
  Synthetic
aguuuacagucccaccaacggu

SEQ ID NO: 394135 - RNA, 23 nt, Artificial Sequence
  Synthetic
uaguuuacagucccaccaacggu

SEQ ID NO: 394136 - RNA, 24 nt, Artificial Sequence
  Synthetic
cuaguuuacagucccaccaacggu

SEQ ID NO: 394137 - RNA, 18 nt, Artificial Sequence
  Synthetic
uuaugggagaaccacggu

SEQ ID NO: 394138 - RNA, 19 nt, Artificial Sequence
  Synthetic
guuaugggagaaccacggu

SEQ ID NO: 394139 - RNA, 20 nt, Artificial Sequence
  Synthetic
uguuaugggagaaccacggu

SEQ ID NO: 394140 - RNA, 21 nt, Artificial Sequence
  Synthetic
guguuaugggagaaccacggu

SEQ ID NO: 394141 - RNA, 22 nt, Artificial Sequence
  Synthetic
aguguuaugggagaaccacggu

SEQ ID NO: 394142 - RNA, 23 nt, Artificial Sequence
  Synthetic
aaguguuaugggagaaccacggu

SEQ ID NO: 394143 - RNA, 24 nt, Artificial Sequence
  Synthetic
aaaguguuaugggagaaccacggu

SEQ ID NO: 394144 - RNA, 18 nt, Artificial Sequence
  Synthetic
guguuuacuccccacggu

SEQ ID NO: 394145 - RNA, 19 nt, Artificial Sequence
  Synthetic
gguguuuacuccccacggu

SEQ ID NO: 394146 - RNA, 20 nt, Artificial Sequence
  Synthetic
agguguuuacuccccacggu

SEQ ID NO: 394147 - RNA, 21 nt, Artificial Sequence
  Synthetic
aagguguuuacuccccacggu

SEQ ID NO: 394148 - RNA, 22 nt, Artificial Sequence
  Synthetic
gaagguguuuacuccccacggu

SEQ ID NO: 394149 - RNA, 23 nt, Artificial Sequence
  Synthetic
cgaagguguuuacuccccacggu

SEQ ID NO: 394150 - RNA, 24 nt, Artificial Sequence
  Synthetic
ccgaagguguuuacuccccacggu

SEQ ID NO: 394151 - RNA, 18 nt, Artificial Sequence
  Synthetic
uuacauuauaauuacggu

SEQ ID NO: 394152 - RNA, 19 nt, Artificial Sequence
  Synthetic
uuuacauuauaauuacggu

SEQ ID NO: 394153 - RNA, 20 nt, Artificial Sequence
  Synthetic
uuuuacauuauaauuacggu

SEQ ID NO: 394154 - RNA, 21 nt, Artificial Sequence
  Synthetic
uuuuuacauuauaauuacggu

SEQ ID NO: 394155 - RNA, 22 nt, Artificial Sequence
  Synthetic
guuuuuacauuauaauuacggu

SEQ ID NO: 394156 - RNA, 23 nt, Artificial Sequence
  Synthetic
gguuuuuacauuauaauuacggu

SEQ ID NO: 394157 - RNA, 24 nt, Artificial Sequence
  Synthetic
ggguuuuuacauuauaauuacggu

SEQ ID NO: 394158 - RNA, 18 nt, Artificial Sequence
  Synthetic
gggugaagugaacccggu

SEQ ID NO: 394159 - RNA, 19 nt, Artificial Sequence
  Synthetic
ggggugaagugaacccggu

SEQ ID NO: 394160 - RNA, 20 nt, Artificial Sequence
  Synthetic
aggggugaagugaacccggu

SEQ ID NO: 394161 - RNA, 21 nt, Artificial Sequence
  Synthetic
uaggggugaagugaacccggu

SEQ ID NO: 394162 - RNA, 22 nt, Artificial Sequence
  Synthetic
guaggggugaagugaacccggu

SEQ ID NO: 394163 - RNA, 23 nt, Artificial Sequence
  Synthetic
gguaggggugaagugaacccggu

SEQ ID NO: 394164 - RNA, 24 nt, Artificial Sequence
  Synthetic
agguaggggugaagugaacccggu

SEQ ID NO: 394165 - RNA, 18 nt, Artificial Sequence
  Synthetic
agacaugugccuuccggu

SEQ ID NO: 394166 - RNA, 19 nt, Artificial Sequence
  Synthetic
uagacaugugccuuccggu

SEQ ID NO: 394167 - RNA, 20 nt, Artificial Sequence
  Synthetic
uuagacaugugccuuccggu

SEQ ID NO: 394168 - RNA, 21 nt, Artificial Sequence
  Synthetic
uuuagacaugugccuuccggu

SEQ ID NO: 394169 - RNA, 22 nt, Artificial Sequence
  Synthetic
guuuagacaugugccuuccggu

SEQ ID NO: 394170 - RNA, 23 nt, Artificial Sequence
  Synthetic
gguuuagacaugugccuuccggu

SEQ ID NO: 394171 - RNA, 24 nt, Artificial Sequence
  Synthetic
agguuuagacaugugccuuccggu

SEQ ID NO: 394172 - RNA, 18 nt, Artificial Sequence
  Synthetic
gacuuuaaguacagcggu

SEQ ID NO: 394173 - RNA, 19 nt, Artificial Sequence
  Synthetic
ggacuuuaaguacagcggu

SEQ ID NO: 394174 - RNA, 20 nt, Artificial Sequence
  Synthetic
uggacuuuaaguacagcggu

SEQ ID NO: 394175 - RNA, 21 nt, Artificial Sequence
  Synthetic
auggacuuuaaguacagcggu

SEQ ID NO: 394176 - RNA, 22 nt, Artificial Sequence
  Synthetic
aauggacuuuaaguacagcggu

SEQ ID NO: 394177 - RNA, 23 nt, Artificial Sequence
  Synthetic
uaauggacuuuaaguacagcggu

SEQ ID NO: 394178 - RNA, 24 nt, Artificial Sequence
  Synthetic
guaauggacuuuaaguacagcggu

SEQ ID NO: 394179 - RNA, 18 nt, Artificial Sequence
  Synthetic
uaauguaaacagcucggu

SEQ ID NO: 394180 - RNA, 19 nt, Artificial Sequence
  Synthetic
auaauguaaacagcucggu

SEQ ID NO: 394181 - RNA, 20 nt, Artificial Sequence
  Synthetic
uauaauguaaacagcucggu

SEQ ID NO: 394182 - RNA, 21 nt, Artificial Sequence
  Synthetic
cuauaauguaaacagcucggu

SEQ ID NO: 394183 - RNA, 22 nt, Artificial Sequence
  Synthetic
ccuauaauguaaacagcucggu

SEQ ID NO: 394184 - RNA, 23 nt, Artificial Sequence
  Synthetic
cccuauaauguaaacagcucggu

SEQ ID NO: 394185 - RNA, 24 nt, Artificial Sequence
  Synthetic
ucccuauaauguaaacagcucggu

SEQ ID NO: 394186 - RNA, 18 nt, Artificial Sequence
  Synthetic
gugugugugucugucggu

SEQ ID NO: 394187 - RNA, 19 nt, Artificial Sequence
  Synthetic
ugugugugugucugucggu

SEQ ID NO: 394188 - RNA, 20 nt, Artificial Sequence
  Synthetic
gugugugugugucugucggu

SEQ ID NO: 394189 - RNA, 21 nt, Artificial Sequence
  Synthetic
ugugugugugugucugucggu

SEQ ID NO: 394190 - RNA, 22 nt, Artificial Sequence
  Synthetic
gugugugugugugucugucggu

SEQ ID NO: 394191 - RNA, 23 nt, Artificial Sequence
  Synthetic
ugugugugugugugucugucggu

SEQ ID NO: 394192 - RNA, 24 nt, Artificial Sequence
  Synthetic
gugugugugugugugucugucggu

SEQ ID NO: 394193 - RNA, 18 nt, Artificial Sequence
  Synthetic
uguuuauuaugauucggu

SEQ ID NO: 394194 - RNA, 19 nt, Artificial Sequence
  Synthetic
uuguuuauuaugauucggu

SEQ ID NO: 394195 - RNA, 20 nt, Artificial Sequence
  Synthetic
guuguuuauuaugauucggu

SEQ ID NO: 394196 - RNA, 21 nt, Artificial Sequence
  Synthetic
uguuguuuauuaugauucggu

SEQ ID NO: 394197 - RNA, 22 nt, Artificial Sequence
  Synthetic
cuguuguuuauuaugauucggu

SEQ ID NO: 394198 - RNA, 23 nt, Artificial Sequence
  Synthetic
acuguuguuuauuaugauucggu

SEQ ID NO: 394199 - RNA, 24 nt, Artificial Sequence
  Synthetic
aacuguuguuuauuaugauucggu

SEQ ID NO: 394200 - RNA, 18 nt, Artificial Sequence
  Synthetic
cuaucacuaguauucggu

SEQ ID NO: 394201 - RNA, 19 nt, Artificial Sequence
  Synthetic
ccuaucacuaguauucggu

SEQ ID NO: 394202 - RNA, 20 nt, Artificial Sequence
  Synthetic
uccuaucacuaguauucggu

SEQ ID NO: 394203 - RNA, 21 nt, Artificial Sequence
  Synthetic
auccuaucacuaguauucggu

SEQ ID NO: 394204 - RNA, 22 nt, Artificial Sequence
  Synthetic
aauccuaucacuaguauucggu

SEQ ID NO: 394205 - RNA, 23 nt, Artificial Sequence
  Synthetic
aaauccuaucacuaguauucggu

SEQ ID NO: 394206 - RNA, 24 nt, Artificial Sequence
  Synthetic
uaaauccuaucacuaguauucggu

SEQ ID NO: 394207 - RNA, 18 nt, Artificial Sequence
  Synthetic
uccuggugccaaaagggu

SEQ ID NO: 394208 - RNA, 19 nt, Artificial Sequence
  Synthetic
uuccuggugccaaaagggu

SEQ ID NO: 394209 - RNA, 20 nt, Artificial Sequence
  Synthetic
guuccuggugccaaaagggu

SEQ ID NO: 394210 - RNA, 21 nt, Artificial Sequence
  Synthetic
aguuccuggugccaaaagggu

SEQ ID NO: 394211 - RNA, 22 nt, Artificial Sequence
  Synthetic
caguuccuggugccaaaagggu

SEQ ID NO: 394212 - RNA, 23 nt, Artificial Sequence
  Synthetic
ucaguuccuggugccaaaagggu

SEQ ID NO: 394213 - RNA, 24 nt, Artificial Sequence
  Synthetic
aucaguuccuggugccaaaagggu

SEQ ID NO: 394214 - RNA, 18 nt, Artificial Sequence
  Synthetic
gccucggaaacaaagggu

SEQ ID NO: 394215 - RNA, 19 nt, Artificial Sequence
  Synthetic
ugccucggaaacaaagggu

SEQ ID NO: 394216 - RNA, 20 nt, Artificial Sequence
  Synthetic
cugccucggaaacaaagggu

SEQ ID NO: 394217 - RNA, 21 nt, Artificial Sequence
  Synthetic
gcugccucggaaacaaagggu

SEQ ID NO: 394218 - RNA, 22 nt, Artificial Sequence
  Synthetic
agcugccucggaaacaaagggu

SEQ ID NO: 394219 - RNA, 23 nt, Artificial Sequence
  Synthetic
uagcugccucggaaacaaagggu

SEQ ID NO: 394220 - RNA, 24 nt, Artificial Sequence
  Synthetic
auagcugccucggaaacaaagggu

SEQ ID NO: 394221 - RNA, 18 nt, Artificial Sequence
  Synthetic
gcuaugcauuuaaagggu

SEQ ID NO: 394222 - RNA, 19 nt, Artificial Sequence
  Synthetic
agcuaugcauuuaaagggu

SEQ ID NO: 394223 - RNA, 20 nt, Artificial Sequence
  Synthetic
cagcuaugcauuuaaagggu

SEQ ID NO: 394224 - RNA, 21 nt, Artificial Sequence
  Synthetic
acagcuaugcauuuaaagggu

SEQ ID NO: 394225 - RNA, 22 nt, Artificial Sequence
  Synthetic
uacagcuaugcauuuaaagggu

SEQ ID NO: 394226 - RNA, 23 nt, Artificial Sequence
  Synthetic
uuacagcuaugcauuuaaagggu

SEQ ID NO: 394227 - RNA, 24 nt, Artificial Sequence
  Synthetic
cuuacagcuaugcauuuaaagggu

SEQ ID NO: 394228 - RNA, 18 nt, Artificial Sequence
  Synthetic
acuaaguuaaacaagggu

SEQ ID NO: 394229 - RNA, 19 nt, Artificial Sequence
  Synthetic
uacuaaguuaaacaagggu

SEQ ID NO: 394230 - RNA, 20 nt, Artificial Sequence
  Synthetic
guacuaaguuaaacaagggu

SEQ ID NO: 394231 - RNA, 21 nt, Artificial Sequence
  Synthetic
aguacuaaguuaaacaagggu

SEQ ID NO: 394232 - RNA, 22 nt, Artificial Sequence
  Synthetic
caguacuaaguuaaacaagggu

SEQ ID NO: 394233 - RNA, 23 nt, Artificial Sequence
  Synthetic
ccaguacuaaguuaaacaagggu

SEQ ID NO: 394234 - RNA, 24 nt, Artificial Sequence
  Synthetic
cccaguacuaaguuaaacaagggu

SEQ ID NO: 394235 - RNA, 18 nt, Artificial Sequence
  Synthetic
gaugagauaaccaagggu

SEQ ID NO: 394236 - RNA, 19 nt, Artificial Sequence
  Synthetic
agaugagauaaccaagggu

SEQ ID NO: 394237 - RNA, 20 nt, Artificial Sequence
  Synthetic
uagaugagauaaccaagggu

SEQ ID NO: 394238 - RNA, 21 nt, Artificial Sequence
  Synthetic
auagaugagauaaccaagggu

SEQ ID NO: 394239 - RNA, 22 nt, Artificial Sequence
  Synthetic
uauagaugagauaaccaagggu

SEQ ID NO: 394240 - RNA, 23 nt, Artificial Sequence
  Synthetic
uuauagaugagauaaccaagggu

SEQ ID NO: 394241 - RNA, 24 nt, Artificial Sequence
  Synthetic
uuuauagaugagauaaccaagggu

SEQ ID NO: 394242 - RNA, 18 nt, Artificial Sequence
  Synthetic
aagucuuagugcaagggu

SEQ ID NO: 394243 - RNA, 19 nt, Artificial Sequence
  Synthetic
caagucuuagugcaagggu

SEQ ID NO: 394244 - RNA, 20 nt, Artificial Sequence
  Synthetic
ucaagucuuagugcaagggu

SEQ ID NO: 394245 - RNA, 21 nt, Artificial Sequence
  Synthetic
gucaagucuuagugcaagggu

SEQ ID NO: 394246 - RNA, 22 nt, Artificial Sequence
  Synthetic
agucaagucuuagugcaagggu

SEQ ID NO: 394247 - RNA, 23 nt, Artificial Sequence
  Synthetic
uagucaagucuuagugcaagggu

SEQ ID NO: 394248 - RNA, 24 nt, Artificial Sequence
  Synthetic
uuagucaagucuuagugcaagggu

SEQ ID NO: 394249 - RNA, 18 nt, Artificial Sequence
  Synthetic
uuaaaaccuugcaagggu

SEQ ID NO: 394250 - RNA, 19 nt, Artificial Sequence
  Synthetic
auuaaaaccuugcaagggu

SEQ ID NO: 394251 - RNA, 20 nt, Artificial Sequence
  Synthetic
aauuaaaaccuugcaagggu

SEQ ID NO: 394252 - RNA, 21 nt, Artificial Sequence
  Synthetic
uaauuaaaaccuugcaagggu

SEQ ID NO: 394253 - RNA, 22 nt, Artificial Sequence
  Synthetic
guaauuaaaaccuugcaagggu

SEQ ID NO: 394254 - RNA, 23 nt, Artificial Sequence
  Synthetic
cguaauuaaaaccuugcaagggu

SEQ ID NO: 394255 - RNA, 24 nt, Artificial Sequence
  Synthetic
acguaauuaaaaccuugcaagggu

SEQ ID NO: 394256 - RNA, 18 nt, Artificial Sequence
  Synthetic
uaggauggaaucaagggu

SEQ ID NO: 394257 - RNA, 19 nt, Artificial Sequence
  Synthetic
uuaggauggaaucaagggu

SEQ ID NO: 394258 - RNA, 20 nt, Artificial Sequence
  Synthetic
guuaggauggaaucaagggu

SEQ ID NO: 394259 - RNA, 21 nt, Artificial Sequence
  Synthetic
uguuaggauggaaucaagggu

SEQ ID NO: 394260 - RNA, 22 nt, Artificial Sequence
  Synthetic
uuguuaggauggaaucaagggu

SEQ ID NO: 394261 - RNA, 23 nt, Artificial Sequence
  Synthetic
cuuguuaggauggaaucaagggu

SEQ ID NO: 394262 - RNA, 24 nt, Artificial Sequence
  Synthetic
acuuguuaggauggaaucaagggu

SEQ ID NO: 394263 - RNA, 18 nt, Artificial Sequence
  Synthetic
acacaaauaaagaagggu

SEQ ID NO: 394264 - RNA, 19 nt, Artificial Sequence
  Synthetic
cacacaaauaaagaagggu

SEQ ID NO: 394265 - RNA, 20 nt, Artificial Sequence
  Synthetic
gcacacaaauaaagaagggu

SEQ ID NO: 394266 - RNA, 21 nt, Artificial Sequence
  Synthetic
ugcacacaaauaaagaagggu

SEQ ID NO: 394267 - RNA, 22 nt, Artificial Sequence
  Synthetic
gugcacacaaauaaagaagggu

SEQ ID NO: 394268 - RNA, 23 nt, Artificial Sequence
  Synthetic
ggugcacacaaauaaagaagggu

SEQ ID NO: 394269 - RNA, 24 nt, Artificial Sequence
  Synthetic
aggugcacacaaauaaagaagggu

SEQ ID NO: 394270 - RNA, 18 nt, Artificial Sequence
  Synthetic
uacucaggcaaacagggu

SEQ ID NO: 394271 - RNA, 19 nt, Artificial Sequence
  Synthetic
auacucaggcaaacagggu

SEQ ID NO: 394272 - RNA, 20 nt, Artificial Sequence
  Synthetic
gauacucaggcaaacagggu

SEQ ID NO: 394273 - RNA, 21 nt, Artificial Sequence
  Synthetic
ugauacucaggcaaacagggu

SEQ ID NO: 394274 - RNA, 22 nt, Artificial Sequence
  Synthetic
gugauacucaggcaaacagggu

SEQ ID NO: 394275 - RNA, 23 nt, Artificial Sequence
  Synthetic
ggugauacucaggcaaacagggu

SEQ ID NO: 394276 - RNA, 24 nt, Artificial Sequence
  Synthetic
uggugauacucaggcaaacagggu

SEQ ID NO: 394277 - RNA, 18 nt, Artificial Sequence
  Synthetic
aacacuuggacacagggu

SEQ ID NO: 394278 - RNA, 19 nt, Artificial Sequence
  Synthetic
gaacacuuggacacagggu

SEQ ID NO: 394279 - RNA, 20 nt, Artificial Sequence
  Synthetic
agaacacuuggacacagggu

SEQ ID NO: 394280 - RNA, 21 nt, Artificial Sequence
  Synthetic
gagaacacuuggacacagggu

SEQ ID NO: 394281 - RNA, 22 nt, Artificial Sequence
  Synthetic
ugagaacacuuggacacagggu

SEQ ID NO: 394282 - RNA, 23 nt, Artificial Sequence
  Synthetic
augagaacacuuggacacagggu

SEQ ID NO: 394283 - RNA, 24 nt, Artificial Sequence
  Synthetic
aaugagaacacuuggacacagggu

SEQ ID NO: 394284 - RNA, 18 nt, Artificial Sequence
  Synthetic
ggcgggugaccacagggu

SEQ ID NO: 394285 - RNA, 19 nt, Artificial Sequence
  Synthetic
aggcgggugaccacagggu

SEQ ID NO: 394286 - RNA, 20 nt, Artificial Sequence
  Synthetic
aaggcgggugaccacagggu

SEQ ID NO: 394287 - RNA, 21 nt, Artificial Sequence
  Synthetic
caaggcgggugaccacagggu

SEQ ID NO: 394288 - RNA, 22 nt, Artificial Sequence
  Synthetic
ccaaggcgggugaccacagggu

SEQ ID NO: 394289 - RNA, 23 nt, Artificial Sequence
  Synthetic
gccaaggcgggugaccacagggu

SEQ ID NO: 394290 - RNA, 24 nt, Artificial Sequence
  Synthetic
ggccaaggcgggugaccacagggu

SEQ ID NO: 394291 - RNA, 18 nt, Artificial Sequence
  Synthetic
aucuguuggaaucagggu

SEQ ID NO: 394292 - RNA, 19 nt, Artificial Sequence
  Synthetic
aaucuguuggaaucagggu

SEQ ID NO: 394293 - RNA, 20 nt, Artificial Sequence
  Synthetic
caaucuguuggaaucagggu

SEQ ID NO: 394294 - RNA, 21 nt, Artificial Sequence
  Synthetic
gcaaucuguuggaaucagggu

SEQ ID NO: 394295 - RNA, 22 nt, Artificial Sequence
  Synthetic
ggcaaucuguuggaaucagggu

SEQ ID NO: 394296 - RNA, 23 nt, Artificial Sequence
  Synthetic
uggcaaucuguuggaaucagggu

SEQ ID NO: 394297 - RNA, 24 nt, Artificial Sequence
  Synthetic
guggcaaucuguuggaaucagggu

SEQ ID NO: 394298 - RNA, 18 nt, Artificial Sequence
  Synthetic
auaaauuagcaucagggu

SEQ ID NO: 394299 - RNA, 19 nt, Artificial Sequence
  Synthetic
gauaaauuagcaucagggu

SEQ ID NO: 394300 - RNA, 20 nt, Artificial Sequence
  Synthetic
ugauaaauuagcaucagggu

SEQ ID NO: 394301 - RNA, 21 nt, Artificial Sequence
  Synthetic
uugauaaauuagcaucagggu

SEQ ID NO: 394302 - RNA, 22 nt, Artificial Sequence
  Synthetic
guugauaaauuagcaucagggu

SEQ ID NO: 394303 - RNA, 23 nt, Artificial Sequence
  Synthetic
aguugauaaauuagcaucagggu

SEQ ID NO: 394304 - RNA, 24 nt, Artificial Sequence
  Synthetic
uaguugauaaauuagcaucagggu

SEQ ID NO: 394305 - RNA, 18 nt, Artificial Sequence
  Synthetic
aggaaaagaauucagggu

SEQ ID NO: 394306 - RNA, 19 nt, Artificial Sequence
  Synthetic
aaggaaaagaauucagggu

SEQ ID NO: 394307 - RNA, 20 nt, Artificial Sequence
  Synthetic
aaaggaaaagaauucagggu

SEQ ID NO: 394308 - RNA, 21 nt, Artificial Sequence
  Synthetic
aaaaggaaaagaauucagggu

SEQ ID NO: 394309 - RNA, 22 nt, Artificial Sequence
  Synthetic
aaaaaggaaaagaauucagggu

SEQ ID NO: 394310 - RNA, 23 nt, Artificial Sequence
  Synthetic
uaaaaaggaaaagaauucagggu

SEQ ID NO: 394311 - RNA, 24 nt, Artificial Sequence
  Synthetic
guaaaaaggaaaagaauucagggu

SEQ ID NO: 394312 - RNA, 18 nt, Artificial Sequence
  Synthetic
aagacagcagaagagggu

SEQ ID NO: 394313 - RNA, 19 nt, Artificial Sequence
  Synthetic
gaagacagcagaagagggu

SEQ ID NO: 394314 - RNA, 20 nt, Artificial Sequence
  Synthetic
ugaagacagcagaagagggu

SEQ ID NO: 394315 - RNA, 21 nt, Artificial Sequence
  Synthetic
gugaagacagcagaagagggu

SEQ ID NO: 394316 - RNA, 22 nt, Artificial Sequence
  Synthetic
ugugaagacagcagaagagggu

SEQ ID NO: 394317 - RNA, 23 nt, Artificial Sequence
  Synthetic
augugaagacagcagaagagggu

SEQ ID NO: 394318 - RNA, 24 nt, Artificial Sequence
  Synthetic
caugugaagacagcagaagagggu

SEQ ID NO: 394319 - RNA, 18 nt, Artificial Sequence
  Synthetic
gaugagcccccagagggu

SEQ ID NO: 394320 - RNA, 19 nt, Artificial Sequence
  Synthetic
agaugagcccccagagggu

SEQ ID NO: 394321 - RNA, 20 nt, Artificial Sequence
  Synthetic
cagaugagcccccagagggu

SEQ ID NO: 394322 - RNA, 21 nt, Artificial Sequence
  Synthetic
ucagaugagcccccagagggu

SEQ ID NO: 394323 - RNA, 22 nt, Artificial Sequence
  Synthetic
cucagaugagcccccagagggu

SEQ ID NO: 394324 - RNA, 23 nt, Artificial Sequence
  Synthetic
gcucagaugagcccccagagggu

SEQ ID NO: 394325 - RNA, 24 nt, Artificial Sequence
  Synthetic
agcucagaugagcccccagagggu

SEQ ID NO: 394326 - RNA, 18 nt, Artificial Sequence
  Synthetic
gcuuccuuuuuagagggu

SEQ ID NO: 394327 - RNA, 19 nt, Artificial Sequence
  Synthetic
ggcuuccuuuuuagagggu

SEQ ID NO: 394328 - RNA, 20 nt, Artificial Sequence
  Synthetic
uggcuuccuuuuuagagggu

SEQ ID NO: 394329 - RNA, 21 nt, Artificial Sequence
  Synthetic
auggcuuccuuuuuagagggu

SEQ ID NO: 394330 - RNA, 22 nt, Artificial Sequence
  Synthetic
uauggcuuccuuuuuagagggu

SEQ ID NO: 394331 - RNA, 23 nt, Artificial Sequence
  Synthetic
cuauggcuuccuuuuuagagggu

SEQ ID NO: 394332 - RNA, 24 nt, Artificial Sequence
  Synthetic
acuauggcuuccuuuuuagagggu

SEQ ID NO: 394333 - RNA, 18 nt, Artificial Sequence
  Synthetic
agcugaagucucgagggu

SEQ ID NO: 394334 - RNA, 19 nt, Artificial Sequence
  Synthetic
aagcugaagucucgagggu

SEQ ID NO: 394335 - RNA, 20 nt, Artificial Sequence
  Synthetic
aaagcugaagucucgagggu

SEQ ID NO: 394336 - RNA, 21 nt, Artificial Sequence
  Synthetic
caaagcugaagucucgagggu

SEQ ID NO: 394337 - RNA, 22 nt, Artificial Sequence
  Synthetic
acaaagcugaagucucgagggu

SEQ ID NO: 394338 - RNA, 23 nt, Artificial Sequence
  Synthetic
aacaaagcugaagucucgagggu

SEQ ID NO: 394339 - RNA, 24 nt, Artificial Sequence
  Synthetic
aaacaaagcugaagucucgagggu

SEQ ID NO: 394340 - RNA, 18 nt, Artificial Sequence
  Synthetic
gauggagaaacugagggu

SEQ ID NO: 394341 - RNA, 19 nt, Artificial Sequence
  Synthetic
agauggagaaacugagggu

SEQ ID NO: 394342 - RNA, 20 nt, Artificial Sequence
  Synthetic
aagauggagaaacugagggu

SEQ ID NO: 394343 - RNA, 21 nt, Artificial Sequence
  Synthetic
caagauggagaaacugagggu

SEQ ID NO: 394344 - RNA, 22 nt, Artificial Sequence
  Synthetic
ccaagauggagaaacugagggu

SEQ ID NO: 394345 - RNA, 23 nt, Artificial Sequence
  Synthetic
uccaagauggagaaacugagggu

SEQ ID NO: 394346 - RNA, 24 nt, Artificial Sequence
  Synthetic
uuccaagauggagaaacugagggu

SEQ ID NO: 394347 - RNA, 18 nt, Artificial Sequence
  Synthetic
caguuugaagcugagggu

SEQ ID NO: 394348 - RNA, 19 nt, Artificial Sequence
  Synthetic
acaguuugaagcugagggu

SEQ ID NO: 394349 - RNA, 20 nt, Artificial Sequence
  Synthetic
aacaguuugaagcugagggu

SEQ ID NO: 394350 - RNA, 21 nt, Artificial Sequence
  Synthetic
aaacaguuugaagcugagggu

SEQ ID NO: 394351 - RNA, 22 nt, Artificial Sequence
  Synthetic
uaaacaguuugaagcugagggu

SEQ ID NO: 394352 - RNA, 23 nt, Artificial Sequence
  Synthetic
cuaaacaguuugaagcugagggu

SEQ ID NO: 394353 - RNA, 24 nt, Artificial Sequence
  Synthetic
gcuaaacaguuugaagcugagggu

SEQ ID NO: 394354 - RNA, 18 nt, Artificial Sequence
  Synthetic
cucaaacaaugugagggu

SEQ ID NO: 394355 - RNA, 19 nt, Artificial Sequence
  Synthetic
ccucaaacaaugugagggu

SEQ ID NO: 394356 - RNA, 20 nt, Artificial Sequence
  Synthetic
cccucaaacaaugugagggu

SEQ ID NO: 394357 - RNA, 21 nt, Artificial Sequence
  Synthetic
acccucaaacaaugugagggu

SEQ ID NO: 394358 - RNA, 22 nt, Artificial Sequence
  Synthetic
gacccucaaacaaugugagggu

SEQ ID NO: 394359 - RNA, 23 nt, Artificial Sequence
  Synthetic
ugacccucaaacaaugugagggu

SEQ ID NO: 394360 - RNA, 24 nt, Artificial Sequence
  Synthetic
uugacccucaaacaaugugagggu

SEQ ID NO: 394361 - RNA, 18 nt, Artificial Sequence
  Synthetic
cucaaacagugugagggu

SEQ ID NO: 394362 - RNA, 19 nt, Artificial Sequence
  Synthetic
ccucaaacagugugagggu

SEQ ID NO: 394363 - RNA, 20 nt, Artificial Sequence
  Synthetic
cccucaaacagugugagggu

SEQ ID NO: 394364 - RNA, 21 nt, Artificial Sequence
  Synthetic
acccucaaacagugugagggu

SEQ ID NO: 394365 - RNA, 22 nt, Artificial Sequence
  Synthetic
gacccucaaacagugugagggu

SEQ ID NO: 394366 - RNA, 23 nt, Artificial Sequence
  Synthetic
ugacccucaaacagugugagggu

SEQ ID NO: 394367 - RNA, 24 nt, Artificial Sequence
  Synthetic
uugacccucaaacagugugagggu

SEQ ID NO: 394368 - RNA, 18 nt, Artificial Sequence
  Synthetic
ugaagcucuugugagggu

SEQ ID NO: 394369 - RNA, 19 nt, Artificial Sequence
  Synthetic
uugaagcucuugugagggu

SEQ ID NO: 394370 - RNA, 20 nt, Artificial Sequence
  Synthetic
auugaagcucuugugagggu

SEQ ID NO: 394371 - RNA, 21 nt, Artificial Sequence
  Synthetic
uauugaagcucuugugagggu

SEQ ID NO: 394372 - RNA, 22 nt, Artificial Sequence
  Synthetic
auauugaagcucuugugagggu

SEQ ID NO: 394373 - RNA, 23 nt, Artificial Sequence
  Synthetic
aauauugaagcucuugugagggu

SEQ ID NO: 394374 - RNA, 24 nt, Artificial Sequence
  Synthetic
aaauauugaagcucuugugagggu

SEQ ID NO: 394375 - RNA, 18 nt, Artificial Sequence
  Synthetic
acuugggaaguugagggu

SEQ ID NO: 394376 - RNA, 19 nt, Artificial Sequence
  Synthetic
uacuugggaaguugagggu

SEQ ID NO: 394377 - RNA, 20 nt, Artificial Sequence
  Synthetic
uuacuugggaaguugagggu

SEQ ID NO: 394378 - RNA, 21 nt, Artificial Sequence
  Synthetic
auuacuugggaaguugagggu

SEQ ID NO: 394379 - RNA, 22 nt, Artificial Sequence
  Synthetic
uauuacuugggaaguugagggu

SEQ ID NO: 394380 - RNA, 23 nt, Artificial Sequence
  Synthetic
guauuacuugggaaguugagggu

SEQ ID NO: 394381 - RNA, 24 nt, Artificial Sequence
  Synthetic
uguauuacuugggaaguugagggu

SEQ ID NO: 394382 - RNA, 18 nt, Artificial Sequence
  Synthetic
aagcauacaauauagggu

SEQ ID NO: 394383 - RNA, 19 nt, Artificial Sequence
  Synthetic
uaagcauacaauauagggu

SEQ ID NO: 394384 - RNA, 20 nt, Artificial Sequence
  Synthetic
auaagcauacaauauagggu

SEQ ID NO: 394385 - RNA, 21 nt, Artificial Sequence
  Synthetic
aauaagcauacaauauagggu

SEQ ID NO: 394386 - RNA, 22 nt, Artificial Sequence
  Synthetic
aaauaagcauacaauauagggu

SEQ ID NO: 394387 - RNA, 23 nt, Artificial Sequence
  Synthetic
aaaauaagcauacaauauagggu

SEQ ID NO: 394388 - RNA, 24 nt, Artificial Sequence
  Synthetic
gaaaauaagcauacaauauagggu

SEQ ID NO: 394389 - RNA, 18 nt, Artificial Sequence
  Synthetic
uguuaauuaauauagggu

SEQ ID NO: 394390 - RNA, 19 nt, Artificial Sequence
  Synthetic
auguuaauuaauauagggu

SEQ ID NO: 394391 - RNA, 20 nt, Artificial Sequence
  Synthetic
uauguuaauuaauauagggu

SEQ ID NO: 394392 - RNA, 21 nt, Artificial Sequence
  Synthetic
auauguuaauuaauauagggu

SEQ ID NO: 394393 - RNA, 22 nt, Artificial Sequence
  Synthetic
aauauguuaauuaauauagggu

SEQ ID NO: 394394 - RNA, 23 nt, Artificial Sequence
  Synthetic
gaauauguuaauuaauauagggu

SEQ ID NO: 394395 - RNA, 24 nt, Artificial Sequence
  Synthetic
agaauauguuaauuaauauagggu

SEQ ID NO: 394396 - RNA, 18 nt, Artificial Sequence
  Synthetic
guucccaugcacuagggu

SEQ ID NO: 394397 - RNA, 19 nt, Artificial Sequence
  Synthetic
uguucccaugcacuagggu

SEQ ID NO: 394398 - RNA, 20 nt, Artificial Sequence
  Synthetic
uuguucccaugcacuagggu

SEQ ID NO: 394399 - RNA, 21 nt, Artificial Sequence
  Synthetic
auuguucccaugcacuagggu

SEQ ID NO: 394400 - RNA, 22 nt, Artificial Sequence
  Synthetic
uauuguucccaugcacuagggu

SEQ ID NO: 394401 - RNA, 23 nt, Artificial Sequence
  Synthetic
auauuguucccaugcacuagggu

SEQ ID NO: 394402 - RNA, 24 nt, Artificial Sequence
  Synthetic
uauauuguucccaugcacuagggu

SEQ ID NO: 394403 - RNA, 18 nt, Artificial Sequence
  Synthetic
gguaccaagcccuagggu

SEQ ID NO: 394404 - RNA, 19 nt, Artificial Sequence
  Synthetic
ugguaccaagcccuagggu

SEQ ID NO: 394405 - RNA, 20 nt, Artificial Sequence
  Synthetic
cugguaccaagcccuagggu

SEQ ID NO: 394406 - RNA, 21 nt, Artificial Sequence
  Synthetic
ucugguaccaagcccuagggu

SEQ ID NO: 394407 - RNA, 22 nt, Artificial Sequence
  Synthetic
gucugguaccaagcccuagggu

SEQ ID NO: 394408 - RNA, 23 nt, Artificial Sequence
  Synthetic
ugucugguaccaagcccuagggu

SEQ ID NO: 394409 - RNA, 24 nt, Artificial Sequence
  Synthetic
uugucugguaccaagcccuagggu

SEQ ID NO: 394410 - RNA, 18 nt, Artificial Sequence
  Synthetic
uauaaaacugccuagggu

SEQ ID NO: 394411 - RNA, 19 nt, Artificial Sequence
  Synthetic
cuauaaaacugccuagggu

SEQ ID NO: 394412 - RNA, 20 nt, Artificial Sequence
  Synthetic
ccuauaaaacugccuagggu

SEQ ID NO: 394413 - RNA, 21 nt, Artificial Sequence
  Synthetic
uccuauaaaacugccuagggu

SEQ ID NO: 394414 - RNA, 22 nt, Artificial Sequence
  Synthetic
cuccuauaaaacugccuagggu

SEQ ID NO: 394415 - RNA, 23 nt, Artificial Sequence
  Synthetic
ucuccuauaaaacugccuagggu

SEQ ID NO: 394416 - RNA, 24 nt, Artificial Sequence
  Synthetic
uucuccuauaaaacugccuagggu

SEQ ID NO: 394417 - RNA, 18 nt, Artificial Sequence
  Synthetic
ucugauccuggguagggu

SEQ ID NO: 394418 - RNA, 19 nt, Artificial Sequence
  Synthetic
uucugauccuggguagggu

SEQ ID NO: 394419 - RNA, 20 nt, Artificial Sequence
  Synthetic
guucugauccuggguagggu

SEQ ID NO: 394420 - RNA, 21 nt, Artificial Sequence
  Synthetic
gguucugauccuggguagggu

SEQ ID NO: 394421 - RNA, 22 nt, Artificial Sequence
  Synthetic
ugguucugauccuggguagggu

SEQ ID NO: 394422 - RNA, 23 nt, Artificial Sequence
  Synthetic
cugguucugauccuggguagggu

SEQ ID NO: 394423 - RNA, 24 nt, Artificial Sequence
  Synthetic
ucugguucugauccuggguagggu

SEQ ID NO: 394424 - RNA, 18 nt, Artificial Sequence
  Synthetic
ugacagucaucuuagggu

SEQ ID NO: 394425 - RNA, 19 nt, Artificial Sequence
  Synthetic
gugacagucaucuuagggu

SEQ ID NO: 394426 - RNA, 20 nt, Artificial Sequence
  Synthetic
ggugacagucaucuuagggu

SEQ ID NO: 394427 - RNA, 21 nt, Artificial Sequence
  Synthetic
gggugacagucaucuuagggu

SEQ ID NO: 394428 - RNA, 22 nt, Artificial Sequence
  Synthetic
ugggugacagucaucuuagggu

SEQ ID NO: 394429 - RNA, 23 nt, Artificial Sequence
  Synthetic
uugggugacagucaucuuagggu

SEQ ID NO: 394430 - RNA, 24 nt, Artificial Sequence
  Synthetic
guugggugacagucaucuuagggu

SEQ ID NO: 394431 - RNA, 18 nt, Artificial Sequence
  Synthetic
aggggaaaaaguuagggu

SEQ ID NO: 394432 - RNA, 19 nt, Artificial Sequence
  Synthetic
gaggggaaaaaguuagggu

SEQ ID NO: 394433 - RNA, 20 nt, Artificial Sequence
  Synthetic
ugaggggaaaaaguuagggu

SEQ ID NO: 394434 - RNA, 21 nt, Artificial Sequence
  Synthetic
gugaggggaaaaaguuagggu

SEQ ID NO: 394435 - RNA, 22 nt, Artificial Sequence
  Synthetic
ggugaggggaaaaaguuagggu

SEQ ID NO: 394436 - RNA, 23 nt, Artificial Sequence
  Synthetic
gggugaggggaaaaaguuagggu

SEQ ID NO: 394437 - RNA, 24 nt, Artificial Sequence
  Synthetic
agggugaggggaaaaaguuagggu

SEQ ID NO: 394438 - RNA, 18 nt, Artificial Sequence
  Synthetic
gugggugggaguuagggu

SEQ ID NO: 394439 - RNA, 19 nt, Artificial Sequence
  Synthetic
ggugggugggaguuagggu

SEQ ID NO: 394440 - RNA, 20 nt, Artificial Sequence
  Synthetic
aggugggugggaguuagggu

SEQ ID NO: 394441 - RNA, 21 nt, Artificial Sequence
  Synthetic
uaggugggugggaguuagggu

SEQ ID NO: 394442 - RNA, 22 nt, Artificial Sequence
  Synthetic
auaggugggugggaguuagggu

SEQ ID NO: 394443 - RNA, 23 nt, Artificial Sequence
  Synthetic
aauaggugggugggaguuagggu

SEQ ID NO: 394444 - RNA, 24 nt, Artificial Sequence
  Synthetic
uaauaggugggugggaguuagggu

SEQ ID NO: 394445 - RNA, 18 nt, Artificial Sequence
  Synthetic
auuaacccuuguuagggu

SEQ ID NO: 394446 - RNA, 19 nt, Artificial Sequence
  Synthetic
cauuaacccuuguuagggu

SEQ ID NO: 394447 - RNA, 20 nt, Artificial Sequence
  Synthetic
ccauuaacccuuguuagggu

SEQ ID NO: 394448 - RNA, 21 nt, Artificial Sequence
  Synthetic
cccauuaacccuuguuagggu

SEQ ID NO: 394449 - RNA, 22 nt, Artificial Sequence
  Synthetic
ucccauuaacccuuguuagggu

SEQ ID NO: 394450 - RNA, 23 nt, Artificial Sequence
  Synthetic
cucccauuaacccuuguuagggu

SEQ ID NO: 394451 - RNA, 24 nt, Artificial Sequence
  Synthetic
acucccauuaacccuuguuagggu

SEQ ID NO: 394452 - RNA, 18 nt, Artificial Sequence
  Synthetic
gaaccaaccuuaacgggu

SEQ ID NO: 394453 - RNA, 19 nt, Artificial Sequence
  Synthetic
agaaccaaccuuaacgggu

SEQ ID NO: 394454 - RNA, 20 nt, Artificial Sequence
  Synthetic
uagaaccaaccuuaacgggu

SEQ ID NO: 394455 - RNA, 21 nt, Artificial Sequence
  Synthetic
uuagaaccaaccuuaacgggu

SEQ ID NO: 394456 - RNA, 22 nt, Artificial Sequence
  Synthetic
auuagaaccaaccuuaacgggu

SEQ ID NO: 394457 - RNA, 23 nt, Artificial Sequence
  Synthetic
cauuagaaccaaccuuaacgggu

SEQ ID NO: 394458 - RNA, 24 nt, Artificial Sequence
  Synthetic
ucauuagaaccaaccuuaacgggu

SEQ ID NO: 394459 - RNA, 18 nt, Artificial Sequence
  Synthetic
ugaagaaagcucacgggu

SEQ ID NO: 394460 - RNA, 19 nt, Artificial Sequence
  Synthetic
augaagaaagcucacgggu

SEQ ID NO: 394461 - RNA, 20 nt, Artificial Sequence
  Synthetic
uaugaagaaagcucacgggu

SEQ ID NO: 394462 - RNA, 21 nt, Artificial Sequence
  Synthetic
auaugaagaaagcucacgggu

SEQ ID NO: 394463 - RNA, 22 nt, Artificial Sequence
  Synthetic
cauaugaagaaagcucacgggu

SEQ ID NO: 394464 - RNA, 23 nt, Artificial Sequence
  Synthetic
ccauaugaagaaagcucacgggu

SEQ ID NO: 394465 - RNA, 24 nt, Artificial Sequence
  Synthetic
gccauaugaagaaagcucacgggu

SEQ ID NO: 394466 - RNA, 18 nt, Artificial Sequence
  Synthetic
cagaggcaaaagacgggu

SEQ ID NO: 394467 - RNA, 19 nt, Artificial Sequence
  Synthetic
ccagaggcaaaagacgggu

SEQ ID NO: 394468 - RNA, 20 nt, Artificial Sequence
  Synthetic
uccagaggcaaaagacgggu

SEQ ID NO: 394469 - RNA, 21 nt, Artificial Sequence
  Synthetic
cuccagaggcaaaagacgggu

SEQ ID NO: 394470 - RNA, 22 nt, Artificial Sequence
  Synthetic
ccuccagaggcaaaagacgggu

SEQ ID NO: 394471 - RNA, 23 nt, Artificial Sequence
  Synthetic
gccuccagaggcaaaagacgggu

SEQ ID NO: 394472 - RNA, 24 nt, Artificial Sequence
  Synthetic
ugccuccagaggcaaaagacgggu

SEQ ID NO: 394473 - RNA, 18 nt, Artificial Sequence
  Synthetic
gauggagcagguacgggu

SEQ ID NO: 394474 - RNA, 19 nt, Artificial Sequence
  Synthetic
agauggagcagguacgggu

SEQ ID NO: 394475 - RNA, 20 nt, Artificial Sequence
  Synthetic
gagauggagcagguacgggu

SEQ ID NO: 394476 - RNA, 21 nt, Artificial Sequence
  Synthetic
agagauggagcagguacgggu

SEQ ID NO: 394477 - RNA, 22 nt, Artificial Sequence
  Synthetic
aagagauggagcagguacgggu

SEQ ID NO: 394478 - RNA, 23 nt, Artificial Sequence
  Synthetic
aaagagauggagcagguacgggu

SEQ ID NO: 394479 - RNA, 24 nt, Artificial Sequence
  Synthetic
caaagagauggagcagguacgggu

SEQ ID NO: 394480 - RNA, 18 nt, Artificial Sequence
  Synthetic
ucaguccugaaaaggggu

SEQ ID NO: 394481 - RNA, 19 nt, Artificial Sequence
  Synthetic
uucaguccugaaaaggggu

SEQ ID NO: 394482 - RNA, 20 nt, Artificial Sequence
  Synthetic
uuucaguccugaaaaggggu

SEQ ID NO: 394483 - RNA, 21 nt, Artificial Sequence
  Synthetic
auuucaguccugaaaaggggu

SEQ ID NO: 394484 - RNA, 22 nt, Artificial Sequence
  Synthetic
uauuucaguccugaaaaggggu

SEQ ID NO: 394485 - RNA, 23 nt, Artificial Sequence
  Synthetic
guauuucaguccugaaaaggggu

SEQ ID NO: 394486 - RNA, 24 nt, Artificial Sequence
  Synthetic
aguauuucaguccugaaaaggggu

SEQ ID NO: 394487 - RNA, 18 nt, Artificial Sequence
  Synthetic
cgaguuccacaaaggggu

SEQ ID NO: 394488 - RNA, 19 nt, Artificial Sequence
  Synthetic
gcgaguuccacaaaggggu

SEQ ID NO: 394489 - RNA, 20 nt, Artificial Sequence
  Synthetic
ugcgaguuccacaaaggggu

SEQ ID NO: 394490 - RNA, 21 nt, Artificial Sequence
  Synthetic
uugcgaguuccacaaaggggu

SEQ ID NO: 394491 - RNA, 22 nt, Artificial Sequence
  Synthetic
guugcgaguuccacaaaggggu

SEQ ID NO: 394492 - RNA, 23 nt, Artificial Sequence
  Synthetic
uguugcgaguuccacaaaggggu

SEQ ID NO: 394493 - RNA, 24 nt, Artificial Sequence
  Synthetic
cuguugcgaguuccacaaaggggu

SEQ ID NO: 394494 - RNA, 18 nt, Artificial Sequence
  Synthetic
cccggaagcacaaggggu

SEQ ID NO: 394495 - RNA, 19 nt, Artificial Sequence
  Synthetic
ccccggaagcacaaggggu

SEQ ID NO: 394496 - RNA, 20 nt, Artificial Sequence
  Synthetic
accccggaagcacaaggggu

SEQ ID NO: 394497 - RNA, 21 nt, Artificial Sequence
  Synthetic
caccccggaagcacaaggggu

SEQ ID NO: 394498 - RNA, 22 nt, Artificial Sequence
  Synthetic
ucaccccggaagcacaaggggu

SEQ ID NO: 394499 - RNA, 23 nt, Artificial Sequence
  Synthetic
cucaccccggaagcacaaggggu

SEQ ID NO: 394500 - RNA, 24 nt, Artificial Sequence
  Synthetic
ccucaccccggaagcacaaggggu

SEQ ID NO: 394501 - RNA, 18 nt, Artificial Sequence
  Synthetic
agcccaaagucaaggggu

SEQ ID NO: 394502 - RNA, 19 nt, Artificial Sequence
  Synthetic
aagcccaaagucaaggggu

SEQ ID NO: 394503 - RNA, 20 nt, Artificial Sequence
  Synthetic
caagcccaaagucaaggggu

SEQ ID NO: 394504 - RNA, 21 nt, Artificial Sequence
  Synthetic
ccaagcccaaagucaaggggu

SEQ ID NO: 394505 - RNA, 22 nt, Artificial Sequence
  Synthetic
gccaagcccaaagucaaggggu

SEQ ID NO: 394506 - RNA, 23 nt, Artificial Sequence
  Synthetic
ggccaagcccaaagucaaggggu

SEQ ID NO: 394507 - RNA, 24 nt, Artificial Sequence
  Synthetic
uggccaagcccaaagucaaggggu

SEQ ID NO: 394508 - RNA, 18 nt, Artificial Sequence
  Synthetic
augauuguuucaaggggu

SEQ ID NO: 394509 - RNA, 19 nt, Artificial Sequence
  Synthetic
caugauuguuucaaggggu

SEQ ID NO: 394510 - RNA, 20 nt, Artificial Sequence
  Synthetic
ucaugauuguuucaaggggu

SEQ ID NO: 394511 - RNA, 21 nt, Artificial Sequence
  Synthetic
cucaugauuguuucaaggggu

SEQ ID NO: 394512 - RNA, 22 nt, Artificial Sequence
  Synthetic
gcucaugauuguuucaaggggu

SEQ ID NO: 394513 - RNA, 23 nt, Artificial Sequence
  Synthetic
ugcucaugauuguuucaaggggu

SEQ ID NO: 394514 - RNA, 24 nt, Artificial Sequence
  Synthetic
gugcucaugauuguuucaaggggu

SEQ ID NO: 394515 - RNA, 18 nt, Artificial Sequence
  Synthetic
gauuuuuguauaaggggu

SEQ ID NO: 394516 - RNA, 19 nt, Artificial Sequence
  Synthetic
ugauuuuuguauaaggggu

SEQ ID NO: 394517 - RNA, 20 nt, Artificial Sequence
  Synthetic
uugauuuuuguauaaggggu

SEQ ID NO: 394518 - RNA, 21 nt, Artificial Sequence
  Synthetic
guugauuuuuguauaaggggu

SEQ ID NO: 394519 - RNA, 22 nt, Artificial Sequence
  Synthetic
aguugauuuuuguauaaggggu

SEQ ID NO: 394520 - RNA, 23 nt, Artificial Sequence
  Synthetic
gaguugauuuuuguauaaggggu

SEQ ID NO: 394521 - RNA, 24 nt, Artificial Sequence
  Synthetic
ugaguugauuuuuguauaaggggu

SEQ ID NO: 394522 - RNA, 18 nt, Artificial Sequence
  Synthetic
uucugagguaccaggggu

SEQ ID NO: 394523 - RNA, 19 nt, Artificial Sequence
  Synthetic
auucugagguaccaggggu

SEQ ID NO: 394524 - RNA, 20 nt, Artificial Sequence
  Synthetic
cauucugagguaccaggggu

SEQ ID NO: 394525 - RNA, 21 nt, Artificial Sequence
  Synthetic
acauucugagguaccaggggu

SEQ ID NO: 394526 - RNA, 22 nt, Artificial Sequence
  Synthetic
cacauucugagguaccaggggu

SEQ ID NO: 394527 - RNA, 23 nt, Artificial Sequence
  Synthetic
ucacauucugagguaccaggggu

SEQ ID NO: 394528 - RNA, 24 nt, Artificial Sequence
  Synthetic
gucacauucugagguaccaggggu

SEQ ID NO: 394529 - RNA, 18 nt, Artificial Sequence
  Synthetic
ucaccagagcucaggggu

SEQ ID NO: 394530 - RNA, 19 nt, Artificial Sequence
  Synthetic
aucaccagagcucaggggu

SEQ ID NO: 394531 - RNA, 20 nt, Artificial Sequence
  Synthetic
gaucaccagagcucaggggu

SEQ ID NO: 394532 - RNA, 21 nt, Artificial Sequence
  Synthetic
ggaucaccagagcucaggggu

SEQ ID NO: 394533 - RNA, 22 nt, Artificial Sequence
  Synthetic
aggaucaccagagcucaggggu

SEQ ID NO: 394534 - RNA, 23 nt, Artificial Sequence
  Synthetic
gaggaucaccagagcucaggggu

SEQ ID NO: 394535 - RNA, 24 nt, Artificial Sequence
  Synthetic
ggaggaucaccagagcucaggggu

SEQ ID NO: 394536 - RNA, 18 nt, Artificial Sequence
  Synthetic
cggggccugucgaggggu

SEQ ID NO: 394537 - RNA, 19 nt, Artificial Sequence
  Synthetic
ccggggccugucgaggggu

SEQ ID NO: 394538 - RNA, 20 nt, Artificial Sequence
  Synthetic
accggggccugucgaggggu

SEQ ID NO: 394539 - RNA, 21 nt, Artificial Sequence
  Synthetic
caccggggccugucgaggggu

SEQ ID NO: 394540 - RNA, 22 nt, Artificial Sequence
  Synthetic
acaccggggccugucgaggggu

SEQ ID NO: 394541 - RNA, 23 nt, Artificial Sequence
  Synthetic
cacaccggggccugucgaggggu

SEQ ID NO: 394542 - RNA, 24 nt, Artificial Sequence
  Synthetic
acacaccggggccugucgaggggu

SEQ ID NO: 394543 - RNA, 18 nt, Artificial Sequence
  Synthetic
cagggaccagggaggggu

SEQ ID NO: 394544 - RNA, 19 nt, Artificial Sequence
  Synthetic
ccagggaccagggaggggu

SEQ ID NO: 394545 - RNA, 20 nt, Artificial Sequence
  Synthetic
gccagggaccagggaggggu

SEQ ID NO: 394546 - RNA, 21 nt, Artificial Sequence
  Synthetic
ugccagggaccagggaggggu

SEQ ID NO: 394547 - RNA, 22 nt, Artificial Sequence
  Synthetic
uugccagggaccagggaggggu

SEQ ID NO: 394548 - RNA, 23 nt, Artificial Sequence
  Synthetic
guugccagggaccagggaggggu

SEQ ID NO: 394549 - RNA, 24 nt, Artificial Sequence
  Synthetic
gguugccagggaccagggaggggu

SEQ ID NO: 394550 - RNA, 18 nt, Artificial Sequence
  Synthetic
ccuucagggagacggggu

SEQ ID NO: 394551 - RNA, 19 nt, Artificial Sequence
  Synthetic
accuucagggagacggggu

SEQ ID NO: 394552 - RNA, 20 nt, Artificial Sequence
  Synthetic
uaccuucagggagacggggu

SEQ ID NO: 394553 - RNA, 21 nt, Artificial Sequence
  Synthetic
uuaccuucagggagacggggu

SEQ ID NO: 394554 - RNA, 22 nt, Artificial Sequence
  Synthetic
uuuaccuucagggagacggggu

SEQ ID NO: 394555 - RNA, 23 nt, Artificial Sequence
  Synthetic
uuuuaccuucagggagacggggu

SEQ ID NO: 394556 - RNA, 24 nt, Artificial Sequence
  Synthetic
guuuuaccuucagggagacggggu

SEQ ID NO: 394557 - RNA, 18 nt, Artificial Sequence
  Synthetic
gcugggaggcuccggggu

SEQ ID NO: 394558 - RNA, 19 nt, Artificial Sequence
  Synthetic
ugcugggaggcuccggggu

SEQ ID NO: 394559 - RNA, 20 nt, Artificial Sequence
  Synthetic
gugcugggaggcuccggggu

SEQ ID NO: 394560 - RNA, 21 nt, Artificial Sequence
  Synthetic
agugcugggaggcuccggggu

SEQ ID NO: 394561 - RNA, 22 nt, Artificial Sequence
  Synthetic
cagugcugggaggcuccggggu

SEQ ID NO: 394562 - RNA, 23 nt, Artificial Sequence
  Synthetic
gcagugcugggaggcuccggggu

SEQ ID NO: 394563 - RNA, 24 nt, Artificial Sequence
  Synthetic
agcagugcugggaggcuccggggu

SEQ ID NO: 394564 - RNA, 18 nt, Artificial Sequence
  Synthetic
cagcaguuugagcggggu

SEQ ID NO: 394565 - RNA, 19 nt, Artificial Sequence
  Synthetic
ucagcaguuugagcggggu

SEQ ID NO: 394566 - RNA, 20 nt, Artificial Sequence
  Synthetic
cucagcaguuugagcggggu

SEQ ID NO: 394567 - RNA, 21 nt, Artificial Sequence
  Synthetic
ccucagcaguuugagcggggu

SEQ ID NO: 394568 - RNA, 22 nt, Artificial Sequence
  Synthetic
uccucagcaguuugagcggggu

SEQ ID NO: 394569 - RNA, 23 nt, Artificial Sequence
  Synthetic
uuccucagcaguuugagcggggu

SEQ ID NO: 394570 - RNA, 24 nt, Artificial Sequence
  Synthetic
cuuccucagcaguuugagcggggu

SEQ ID NO: 394571 - RNA, 18 nt, Artificial Sequence
  Synthetic
gaaggaaauaacgggggu

SEQ ID NO: 394572 - RNA, 19 nt, Artificial Sequence
  Synthetic
ggaaggaaauaacgggggu

SEQ ID NO: 394573 - RNA, 20 nt, Artificial Sequence
  Synthetic
aggaaggaaauaacgggggu

SEQ ID NO: 394574 - RNA, 21 nt, Artificial Sequence
  Synthetic
aaggaaggaaauaacgggggu

SEQ ID NO: 394575 - RNA, 22 nt, Artificial Sequence
  Synthetic
uaaggaaggaaauaacgggggu

SEQ ID NO: 394576 - RNA, 23 nt, Artificial Sequence
  Synthetic
auaaggaaggaaauaacgggggu

SEQ ID NO: 394577 - RNA, 24 nt, Artificial Sequence
  Synthetic
cauaaggaaggaaauaacgggggu

SEQ ID NO: 394578 - RNA, 18 nt, Artificial Sequence
  Synthetic
gguugggguggcgggggu

SEQ ID NO: 394579 - RNA, 19 nt, Artificial Sequence
  Synthetic
ugguugggguggcgggggu

SEQ ID NO: 394580 - RNA, 20 nt, Artificial Sequence
  Synthetic
cugguugggguggcgggggu

SEQ ID NO: 394581 - RNA, 21 nt, Artificial Sequence
  Synthetic
ccugguugggguggcgggggu

SEQ ID NO: 394582 - RNA, 22 nt, Artificial Sequence
  Synthetic
uccugguugggguggcgggggu

SEQ ID NO: 394583 - RNA, 23 nt, Artificial Sequence
  Synthetic
uuccugguugggguggcgggggu

SEQ ID NO: 394584 - RNA, 24 nt, Artificial Sequence
  Synthetic
auuccugguugggguggcgggggu

SEQ ID NO: 394585 - RNA, 18 nt, Artificial Sequence
  Synthetic
uuuguuuguuuggggggu

SEQ ID NO: 394586 - RNA, 19 nt, Artificial Sequence
  Synthetic
uuuuguuuguuuggggggu

SEQ ID NO: 394587 - RNA, 20 nt, Artificial Sequence
  Synthetic
uuuuuguuuguuuggggggu

SEQ ID NO: 394588 - RNA, 21 nt, Artificial Sequence
  Synthetic
auuuuuguuuguuuggggggu

SEQ ID NO: 394589 - RNA, 22 nt, Artificial Sequence
  Synthetic
aauuuuuguuuguuuggggggu

SEQ ID NO: 394590 - RNA, 23 nt, Artificial Sequence
  Synthetic
aaauuuuuguuuguuuggggggu

SEQ ID NO: 394591 - RNA, 24 nt, Artificial Sequence
  Synthetic
uaaauuuuuguuuguuuggggggu

SEQ ID NO: 394592 - RNA, 18 nt, Artificial Sequence
  Synthetic
aggaggugagaugggggu

SEQ ID NO: 394593 - RNA, 19 nt, Artificial Sequence
  Synthetic
gaggaggugagaugggggu

SEQ ID NO: 394594 - RNA, 20 nt, Artificial Sequence
  Synthetic
ugaggaggugagaugggggu

SEQ ID NO: 394595 - RNA, 21 nt, Artificial Sequence
  Synthetic
cugaggaggugagaugggggu

SEQ ID NO: 394596 - RNA, 22 nt, Artificial Sequence
  Synthetic
ucugaggaggugagaugggggu

SEQ ID NO: 394597 - RNA, 23 nt, Artificial Sequence
  Synthetic
uucugaggaggugagaugggggu

SEQ ID NO: 394598 - RNA, 24 nt, Artificial Sequence
  Synthetic
cuucugaggaggugagaugggggu

SEQ ID NO: 394599 - RNA, 18 nt, Artificial Sequence
  Synthetic
gcugauuugucugggggu

SEQ ID NO: 394600 - RNA, 19 nt, Artificial Sequence
  Synthetic
agcugauuugucugggggu

SEQ ID NO: 394601 - RNA, 20 nt, Artificial Sequence
  Synthetic
uagcugauuugucugggggu

SEQ ID NO: 394602 - RNA, 21 nt, Artificial Sequence
  Synthetic
uuagcugauuugucugggggu

SEQ ID NO: 394603 - RNA, 22 nt, Artificial Sequence
  Synthetic
uuuagcugauuugucugggggu

SEQ ID NO: 394604 - RNA, 23 nt, Artificial Sequence
  Synthetic
uuuuagcugauuugucugggggu

SEQ ID NO: 394605 - RNA, 24 nt, Artificial Sequence
  Synthetic
guuuuagcugauuugucugggggu

SEQ ID NO: 394606 - RNA, 18 nt, Artificial Sequence
  Synthetic
guauuagaaggugggggu

SEQ ID NO: 394607 - RNA, 19 nt, Artificial Sequence
  Synthetic
gguauuagaaggugggggu

SEQ ID NO: 394608 - RNA, 20 nt, Artificial Sequence
  Synthetic
ugguauuagaaggugggggu

SEQ ID NO: 394609 - RNA, 21 nt, Artificial Sequence
  Synthetic
augguauuagaaggugggggu

SEQ ID NO: 394610 - RNA, 22 nt, Artificial Sequence
  Synthetic
gaugguauuagaaggugggggu

SEQ ID NO: 394611 - RNA, 23 nt, Artificial Sequence
  Synthetic
ugaugguauuagaaggugggggu

SEQ ID NO: 394612 - RNA, 24 nt, Artificial Sequence
  Synthetic
gugaugguauuagaaggugggggu

SEQ ID NO: 394613 - RNA, 18 nt, Artificial Sequence
  Synthetic
ggaggccgaggugggggu

SEQ ID NO: 394614 - RNA, 19 nt, Artificial Sequence
  Synthetic
gggaggccgaggugggggu

SEQ ID NO: 394615 - RNA, 20 nt, Artificial Sequence
  Synthetic
ugggaggccgaggugggggu

SEQ ID NO: 394616 - RNA, 21 nt, Artificial Sequence
  Synthetic
uugggaggccgaggugggggu

SEQ ID NO: 394617 - RNA, 22 nt, Artificial Sequence
  Synthetic
uuugggaggccgaggugggggu

SEQ ID NO: 394618 - RNA, 23 nt, Artificial Sequence
  Synthetic
cuuugggaggccgaggugggggu

SEQ ID NO: 394619 - RNA, 24 nt, Artificial Sequence
  Synthetic
acuuugggaggccgaggugggggu

SEQ ID NO: 394620 - RNA, 18 nt, Artificial Sequence
  Synthetic
uuugcugaugaauggggu

SEQ ID NO: 394621 - RNA, 19 nt, Artificial Sequence
  Synthetic
guuugcugaugaauggggu

SEQ ID NO: 394622 - RNA, 20 nt, Artificial Sequence
  Synthetic
gguuugcugaugaauggggu

SEQ ID NO: 394623 - RNA, 21 nt, Artificial Sequence
  Synthetic
agguuugcugaugaauggggu

SEQ ID NO: 394624 - RNA, 22 nt, Artificial Sequence
  Synthetic
cagguuugcugaugaauggggu

SEQ ID NO: 394625 - RNA, 23 nt, Artificial Sequence
  Synthetic
ccagguuugcugaugaauggggu

SEQ ID NO: 394626 - RNA, 24 nt, Artificial Sequence
  Synthetic
accagguuugcugaugaauggggu

SEQ ID NO: 394627 - RNA, 18 nt, Artificial Sequence
  Synthetic
ucaaaaaguacauggggu

SEQ ID NO: 394628 - RNA, 19 nt, Artificial Sequence
  Synthetic
uucaaaaaguacauggggu

SEQ ID NO: 394629 - RNA, 20 nt, Artificial Sequence
  Synthetic
uuucaaaaaguacauggggu

SEQ ID NO: 394630 - RNA, 21 nt, Artificial Sequence
  Synthetic
auuucaaaaaguacauggggu

SEQ ID NO: 394631 - RNA, 22 nt, Artificial Sequence
  Synthetic
uauuucaaaaaguacauggggu

SEQ ID NO: 394632 - RNA, 23 nt, Artificial Sequence
  Synthetic
auauuucaaaaaguacauggggu

SEQ ID NO: 394633 - RNA, 24 nt, Artificial Sequence
  Synthetic
cauauuucaaaaaguacauggggu

SEQ ID NO: 394634 - RNA, 18 nt, Artificial Sequence
  Synthetic
agugaguuuccauggggu

SEQ ID NO: 394635 - RNA, 19 nt, Artificial Sequence
  Synthetic
cagugaguuuccauggggu

SEQ ID NO: 394636 - RNA, 20 nt, Artificial Sequence
  Synthetic
ucagugaguuuccauggggu

SEQ ID NO: 394637 - RNA, 21 nt, Artificial Sequence
  Synthetic
gucagugaguuuccauggggu

SEQ ID NO: 394638 - RNA, 22 nt, Artificial Sequence
  Synthetic
ugucagugaguuuccauggggu

SEQ ID NO: 394639 - RNA, 23 nt, Artificial Sequence
  Synthetic
gugucagugaguuuccauggggu

SEQ ID NO: 394640 - RNA, 24 nt, Artificial Sequence
  Synthetic
ugugucagugaguuuccauggggu

SEQ ID NO: 394641 - RNA, 18 nt, Artificial Sequence
  Synthetic
acaauaugcucauggggu

SEQ ID NO: 394642 - RNA, 19 nt, Artificial Sequence
  Synthetic
cacaauaugcucauggggu

SEQ ID NO: 394643 - RNA, 20 nt, Artificial Sequence
  Synthetic
ccacaauaugcucauggggu

SEQ ID NO: 394644 - RNA, 21 nt, Artificial Sequence
  Synthetic
accacaauaugcucauggggu

SEQ ID NO: 394645 - RNA, 22 nt, Artificial Sequence
  Synthetic
uaccacaauaugcucauggggu

SEQ ID NO: 394646 - RNA, 23 nt, Artificial Sequence
  Synthetic
cuaccacaauaugcucauggggu

SEQ ID NO: 394647 - RNA, 24 nt, Artificial Sequence
  Synthetic
ucuaccacaauaugcucauggggu

SEQ ID NO: 394648 - RNA, 18 nt, Artificial Sequence
  Synthetic
augaaugggguauggggu

SEQ ID NO: 394649 - RNA, 19 nt, Artificial Sequence
  Synthetic
gaugaaugggguauggggu

SEQ ID NO: 394650 - RNA, 20 nt, Artificial Sequence
  Synthetic
ugaugaaugggguauggggu

SEQ ID NO: 394651 - RNA, 21 nt, Artificial Sequence
  Synthetic
cugaugaaugggguauggggu

SEQ ID NO: 394652 - RNA, 22 nt, Artificial Sequence
  Synthetic
gcugaugaaugggguauggggu

SEQ ID NO: 394653 - RNA, 23 nt, Artificial Sequence
  Synthetic
ugcugaugaaugggguauggggu

SEQ ID NO: 394654 - RNA, 24 nt, Artificial Sequence
  Synthetic
uugcugaugaaugggguauggggu

SEQ ID NO: 394655 - RNA, 18 nt, Artificial Sequence
  Synthetic
acuaccagcagcuggggu

SEQ ID NO: 394656 - RNA, 19 nt, Artificial Sequence
  Synthetic
cacuaccagcagcuggggu

SEQ ID NO: 394657 - RNA, 20 nt, Artificial Sequence
  Synthetic
gcacuaccagcagcuggggu

SEQ ID NO: 394658 - RNA, 21 nt, Artificial Sequence
  Synthetic
agcacuaccagcagcuggggu

SEQ ID NO: 394659 - RNA, 22 nt, Artificial Sequence
  Synthetic
uagcacuaccagcagcuggggu

SEQ ID NO: 394660 - RNA, 23 nt, Artificial Sequence
  Synthetic
guagcacuaccagcagcuggggu

SEQ ID NO: 394661 - RNA, 24 nt, Artificial Sequence
  Synthetic
aguagcacuaccagcagcuggggu

SEQ ID NO: 394662 - RNA, 18 nt, Artificial Sequence
  Synthetic
aaggaauaaaaguggggu

SEQ ID NO: 394663 - RNA, 19 nt, Artificial Sequence
  Synthetic
caaggaauaaaaguggggu

SEQ ID NO: 394664 - RNA, 20 nt, Artificial Sequence
  Synthetic
acaaggaauaaaaguggggu

SEQ ID NO: 394665 - RNA, 21 nt, Artificial Sequence
  Synthetic
uacaaggaauaaaaguggggu

SEQ ID NO: 394666 - RNA, 22 nt, Artificial Sequence
  Synthetic
uuacaaggaauaaaaguggggu

SEQ ID NO: 394667 - RNA, 23 nt, Artificial Sequence
  Synthetic
auuacaaggaauaaaaguggggu

SEQ ID NO: 394668 - RNA, 24 nt, Artificial Sequence
  Synthetic
aauuacaaggaauaaaaguggggu

SEQ ID NO: 394669 - RNA, 18 nt, Artificial Sequence
  Synthetic
uggcuucugcaguggggu

SEQ ID NO: 394670 - RNA, 19 nt, Artificial Sequence
  Synthetic
auggcuucugcaguggggu

SEQ ID NO: 394671 - RNA, 20 nt, Artificial Sequence
  Synthetic
gauggcuucugcaguggggu

SEQ ID NO: 394672 - RNA, 21 nt, Artificial Sequence
  Synthetic
agauggcuucugcaguggggu

SEQ ID NO: 394673 - RNA, 22 nt, Artificial Sequence
  Synthetic
cagauggcuucugcaguggggu

SEQ ID NO: 394674 - RNA, 23 nt, Artificial Sequence
  Synthetic
ucagauggcuucugcaguggggu

SEQ ID NO: 394675 - RNA, 24 nt, Artificial Sequence
  Synthetic
cucagauggcuucugcaguggggu

SEQ ID NO: 394676 - RNA, 18 nt, Artificial Sequence
  Synthetic
cagggccugucguggggu

SEQ ID NO: 394677 - RNA, 19 nt, Artificial Sequence
  Synthetic
ccagggccugucguggggu

SEQ ID NO: 394678 - RNA, 20 nt, Artificial Sequence
  Synthetic
accagggccugucguggggu

SEQ ID NO: 394679 - RNA, 21 nt, Artificial Sequence
  Synthetic
caccagggccugucguggggu

SEQ ID NO: 394680 - RNA, 22 nt, Artificial Sequence
  Synthetic
acaccagggccugucguggggu

SEQ ID NO: 394681 - RNA, 23 nt, Artificial Sequence
  Synthetic
cacaccagggccugucguggggu

SEQ ID NO: 394682 - RNA, 24 nt, Artificial Sequence
  Synthetic
acacaccagggccugucguggggu

SEQ ID NO: 394683 - RNA, 18 nt, Artificial Sequence
  Synthetic
cgcacacagugguggggu

SEQ ID NO: 394684 - RNA, 19 nt, Artificial Sequence
  Synthetic
ccgcacacagugguggggu

SEQ ID NO: 394685 - RNA, 20 nt, Artificial Sequence
  Synthetic
gccgcacacagugguggggu

SEQ ID NO: 394686 - RNA, 21 nt, Artificial Sequence
  Synthetic
ugccgcacacagugguggggu

SEQ ID NO: 394687 - RNA, 22 nt, Artificial Sequence
  Synthetic
augccgcacacagugguggggu

SEQ ID NO: 394688 - RNA, 23 nt, Artificial Sequence
  Synthetic
gaugccgcacacagugguggggu

SEQ ID NO: 394689 - RNA, 24 nt, Artificial Sequence
  Synthetic
ugaugccgcacacagugguggggu

SEQ ID NO: 394690 - RNA, 18 nt, Artificial Sequence
  Synthetic
agaaggaaaauguggggu

SEQ ID NO: 394691 - RNA, 19 nt, Artificial Sequence
  Synthetic
cagaaggaaaauguggggu

SEQ ID NO: 394692 - RNA, 20 nt, Artificial Sequence
  Synthetic
gcagaaggaaaauguggggu

SEQ ID NO: 394693 - RNA, 21 nt, Artificial Sequence
  Synthetic
ugcagaaggaaaauguggggu

SEQ ID NO: 394694 - RNA, 22 nt, Artificial Sequence
  Synthetic
gugcagaaggaaaauguggggu

SEQ ID NO: 394695 - RNA, 23 nt, Artificial Sequence
  Synthetic
agugcagaaggaaaauguggggu

SEQ ID NO: 394696 - RNA, 24 nt, Artificial Sequence
  Synthetic
cagugcagaaggaaaauguggggu

SEQ ID NO: 394697 - RNA, 18 nt, Artificial Sequence
  Synthetic
cugaaagcaguguggggu

SEQ ID NO: 394698 - RNA, 19 nt, Artificial Sequence
  Synthetic
ccugaaagcaguguggggu

SEQ ID NO: 394699 - RNA, 20 nt, Artificial Sequence
  Synthetic
uccugaaagcaguguggggu

SEQ ID NO: 394700 - RNA, 21 nt, Artificial Sequence
  Synthetic
auccugaaagcaguguggggu

SEQ ID NO: 394701 - RNA, 22 nt, Artificial Sequence
  Synthetic
uauccugaaagcaguguggggu

SEQ ID NO: 394702 - RNA, 23 nt, Artificial Sequence
  Synthetic
cuauccugaaagcaguguggggu

SEQ ID NO: 394703 - RNA, 24 nt, Artificial Sequence
  Synthetic
acuauccugaaagcaguguggggu

SEQ ID NO: 394704 - RNA, 18 nt, Artificial Sequence
  Synthetic
aauguauguguguggggu

SEQ ID NO: 394705 - RNA, 19 nt, Artificial Sequence
  Synthetic
aaauguauguguguggggu

SEQ ID NO: 394706 - RNA, 20 nt, Artificial Sequence
  Synthetic
aaaauguauguguguggggu

SEQ ID NO: 394707 - RNA, 21 nt, Artificial Sequence
  Synthetic
aaaaauguauguguguggggu

SEQ ID NO: 394708 - RNA, 22 nt, Artificial Sequence
  Synthetic
aaaaaauguauguguguggggu

SEQ ID NO: 394709 - RNA, 23 nt, Artificial Sequence
  Synthetic
aaaaaaauguauguguguggggu

SEQ ID NO: 394710 - RNA, 24 nt, Artificial Sequence
  Synthetic
aaaaaaaauguauguguguggggu

SEQ ID NO: 394711 - RNA, 18 nt, Artificial Sequence
  Synthetic
aagaugagauuguggggu

SEQ ID NO: 394712 - RNA, 19 nt, Artificial Sequence
  Synthetic
uaagaugagauuguggggu

SEQ ID NO: 394713 - RNA, 20 nt, Artificial Sequence
  Synthetic
uuaagaugagauuguggggu

SEQ ID NO: 394714 - RNA, 21 nt, Artificial Sequence
  Synthetic
uuuaagaugagauuguggggu

SEQ ID NO: 394715 - RNA, 22 nt, Artificial Sequence
  Synthetic
auuuaagaugagauuguggggu

SEQ ID NO: 394716 - RNA, 23 nt, Artificial Sequence
  Synthetic
aauuuaagaugagauuguggggu

SEQ ID NO: 394717 - RNA, 24 nt, Artificial Sequence
  Synthetic
caauuuaagaugagauuguggggu

SEQ ID NO: 394718 - RNA, 18 nt, Artificial Sequence
  Synthetic
uggggacuguuguggggu

SEQ ID NO: 394719 - RNA, 19 nt, Artificial Sequence
  Synthetic
cuggggacuguuguggggu

SEQ ID NO: 394720 - RNA, 20 nt, Artificial Sequence
  Synthetic
ucuggggacuguuguggggu

SEQ ID NO: 394721 - RNA, 21 nt, Artificial Sequence
  Synthetic
cucuggggacuguuguggggu

SEQ ID NO: 394722 - RNA, 22 nt, Artificial Sequence
  Synthetic
acucuggggacuguuguggggu

SEQ ID NO: 394723 - RNA, 23 nt, Artificial Sequence
  Synthetic
cacucuggggacuguuguggggu

SEQ ID NO: 394724 - RNA, 24 nt, Artificial Sequence
  Synthetic
acacucuggggacuguuguggggu

SEQ ID NO: 394725 - RNA, 18 nt, Artificial Sequence
  Synthetic
cagggccuguuguggggu

SEQ ID NO: 394726 - RNA, 19 nt, Artificial Sequence
  Synthetic
ccagggccuguuguggggu

SEQ ID NO: 394727 - RNA, 20 nt, Artificial Sequence
  Synthetic
accagggccuguuguggggu

SEQ ID NO: 394728 - RNA, 21 nt, Artificial Sequence
  Synthetic
caccagggccuguuguggggu

SEQ ID NO: 394729 - RNA, 22 nt, Artificial Sequence
  Synthetic
acaccagggccuguuguggggu

SEQ ID NO: 394730 - RNA, 23 nt, Artificial Sequence
  Synthetic
cacaccagggccuguuguggggu

SEQ ID NO: 394731 - RNA, 24 nt, Artificial Sequence
  Synthetic
acacaccagggccuguuguggggu

SEQ ID NO: 394732 - RNA, 18 nt, Artificial Sequence
  Synthetic
cggggccuguuguggggu

SEQ ID NO: 394733 - RNA, 19 nt, Artificial Sequence
  Synthetic
ccggggccuguuguggggu

SEQ ID NO: 394734 - RNA, 20 nt, Artificial Sequence
  Synthetic
accggggccuguuguggggu

SEQ ID NO: 394735 - RNA, 18 nt, Artificial Sequence
  Synthetic
ugucguuuuaauuggggu

SEQ ID NO: 394736 - RNA, 19 nt, Artificial Sequence
  Synthetic
augucguuuuaauuggggu

SEQ ID NO: 394737 - RNA, 20 nt, Artificial Sequence
  Synthetic
uaugucguuuuaauuggggu

SEQ ID NO: 394738 - RNA, 21 nt, Artificial Sequence
  Synthetic
auaugucguuuuaauuggggu

SEQ ID NO: 394739 - RNA, 22 nt, Artificial Sequence
  Synthetic
gauaugucguuuuaauuggggu

SEQ ID NO: 394740 - RNA, 23 nt, Artificial Sequence
  Synthetic
ggauaugucguuuuaauuggggu

SEQ ID NO: 394741 - RNA, 24 nt, Artificial Sequence
  Synthetic
uggauaugucguuuuaauuggggu

SEQ ID NO: 394742 - RNA, 18 nt, Artificial Sequence
  Synthetic
caauucuucccuuggggu

SEQ ID NO: 394743 - RNA, 19 nt, Artificial Sequence
  Synthetic
ccaauucuucccuuggggu

SEQ ID NO: 394744 - RNA, 20 nt, Artificial Sequence
  Synthetic
cccaauucuucccuuggggu

SEQ ID NO: 394745 - RNA, 21 nt, Artificial Sequence
  Synthetic
ccccaauucuucccuuggggu

SEQ ID NO: 394746 - RNA, 22 nt, Artificial Sequence
  Synthetic
uccccaauucuucccuuggggu

SEQ ID NO: 394747 - RNA, 23 nt, Artificial Sequence
  Synthetic
cuccccaauucuucccuuggggu

SEQ ID NO: 394748 - RNA, 24 nt, Artificial Sequence
  Synthetic
ucuccccaauucuucccuuggggu

SEQ ID NO: 394749 - RNA, 18 nt, Artificial Sequence
  Synthetic
gaagcacugaguuggggu

SEQ ID NO: 394750 - RNA, 19 nt, Artificial Sequence
  Synthetic
ugaagcacugaguuggggu

SEQ ID NO: 394751 - RNA, 20 nt, Artificial Sequence
  Synthetic
cugaagcacugaguuggggu

SEQ ID NO: 394752 - RNA, 21 nt, Artificial Sequence
  Synthetic
gcugaagcacugaguuggggu

SEQ ID NO: 394753 - RNA, 22 nt, Artificial Sequence
  Synthetic
ggcugaagcacugaguuggggu

SEQ ID NO: 394754 - RNA, 23 nt, Artificial Sequence
  Synthetic
uggcugaagcacugaguuggggu

SEQ ID NO: 394755 - RNA, 24 nt, Artificial Sequence
  Synthetic
auggcugaagcacugaguuggggu

SEQ ID NO: 394756 - RNA, 18 nt, Artificial Sequence
  Synthetic
aggguugugcuuuggggu

SEQ ID NO: 394757 - RNA, 19 nt, Artificial Sequence
  Synthetic
uaggguugugcuuuggggu

SEQ ID NO: 394758 - RNA, 20 nt, Artificial Sequence
  Synthetic
uuaggguugugcuuuggggu

SEQ ID NO: 394759 - RNA, 21 nt, Artificial Sequence
  Synthetic
guuaggguugugcuuuggggu

SEQ ID NO: 394760 - RNA, 22 nt, Artificial Sequence
  Synthetic
aguuaggguugugcuuuggggu

SEQ ID NO: 394761 - RNA, 23 nt, Artificial Sequence
  Synthetic
caguuaggguugugcuuuggggu

SEQ ID NO: 394762 - RNA, 24 nt, Artificial Sequence
  Synthetic
ccaguuaggguugugcuuuggggu

SEQ ID NO: 394763 - RNA, 18 nt, Artificial Sequence
  Synthetic
aauaaugauguuuggggu

SEQ ID NO: 394764 - RNA, 19 nt, Artificial Sequence
  Synthetic
uaauaaugauguuuggggu

SEQ ID NO: 394765 - RNA, 20 nt, Artificial Sequence
  Synthetic
uuaauaaugauguuuggggu

SEQ ID NO: 394766 - RNA, 21 nt, Artificial Sequence
  Synthetic
uuuaauaaugauguuuggggu

SEQ ID NO: 394767 - RNA, 22 nt, Artificial Sequence
  Synthetic
guuuaauaaugauguuuggggu

SEQ ID NO: 394768 - RNA, 23 nt, Artificial Sequence
  Synthetic
aguuuaauaaugauguuuggggu

SEQ ID NO: 394769 - RNA, 24 nt, Artificial Sequence
  Synthetic
caguuuaauaaugauguuuggggu

SEQ ID NO: 394770 - RNA, 18 nt, Artificial Sequence
  Synthetic
uugggguugggaaugggu

SEQ ID NO: 394771 - RNA, 19 nt, Artificial Sequence
  Synthetic
guugggguugggaaugggu

SEQ ID NO: 394772 - RNA, 20 nt, Artificial Sequence
  Synthetic
aguugggguugggaaugggu

SEQ ID NO: 394773 - RNA, 21 nt, Artificial Sequence
  Synthetic
gaguugggguugggaaugggu

SEQ ID NO: 394774 - RNA, 22 nt, Artificial Sequence
  Synthetic
ugaguugggguugggaaugggu

SEQ ID NO: 394775 - RNA, 23 nt, Artificial Sequence
  Synthetic
cugaguugggguugggaaugggu

SEQ ID NO: 394776 - RNA, 24 nt, Artificial Sequence
  Synthetic
acugaguugggguugggaaugggu

SEQ ID NO: 394777 - RNA, 18 nt, Artificial Sequence
  Synthetic
ugcacaauagacaugggu

SEQ ID NO: 394778 - RNA, 19 nt, Artificial Sequence
  Synthetic
augcacaauagacaugggu

SEQ ID NO: 394779 - RNA, 20 nt, Artificial Sequence
  Synthetic
aaugcacaauagacaugggu

SEQ ID NO: 394780 - RNA, 21 nt, Artificial Sequence
  Synthetic
gaaugcacaauagacaugggu

SEQ ID NO: 394781 - RNA, 22 nt, Artificial Sequence
  Synthetic
agaaugcacaauagacaugggu

SEQ ID NO: 394782 - RNA, 23 nt, Artificial Sequence
  Synthetic
gagaaugcacaauagacaugggu

SEQ ID NO: 394783 - RNA, 24 nt, Artificial Sequence
  Synthetic
agagaaugcacaauagacaugggu

SEQ ID NO: 394784 - RNA, 18 nt, Artificial Sequence
  Synthetic
acauaaaacagcaugggu

SEQ ID NO: 394785 - RNA, 19 nt, Artificial Sequence
  Synthetic
uacauaaaacagcaugggu

SEQ ID NO: 394786 - RNA, 20 nt, Artificial Sequence
  Synthetic
uuacauaaaacagcaugggu

SEQ ID NO: 394787 - RNA, 21 nt, Artificial Sequence
  Synthetic
cuuacauaaaacagcaugggu

SEQ ID NO: 394788 - RNA, 22 nt, Artificial Sequence
  Synthetic
gcuuacauaaaacagcaugggu

SEQ ID NO: 394789 - RNA, 23 nt, Artificial Sequence
  Synthetic
ggcuuacauaaaacagcaugggu

SEQ ID NO: 394790 - RNA, 24 nt, Artificial Sequence
  Synthetic
uggcuuacauaaaacagcaugggu

SEQ ID NO: 394791 - RNA, 18 nt, Artificial Sequence
  Synthetic
agggaauuaggcaugggu

SEQ ID NO: 394792 - RNA, 19 nt, Artificial Sequence
  Synthetic
gagggaauuaggcaugggu

SEQ ID NO: 394793 - RNA, 20 nt, Artificial Sequence
  Synthetic
cgagggaauuaggcaugggu

SEQ ID NO: 394794 - RNA, 21 nt, Artificial Sequence
  Synthetic
gcgagggaauuaggcaugggu

SEQ ID NO: 394795 - RNA, 22 nt, Artificial Sequence
  Synthetic
agcgagggaauuaggcaugggu

SEQ ID NO: 394796 - RNA, 23 nt, Artificial Sequence
  Synthetic
cagcgagggaauuaggcaugggu

SEQ ID NO: 394797 - RNA, 24 nt, Artificial Sequence
  Synthetic
acagcgagggaauuaggcaugggu

SEQ ID NO: 394798 - RNA, 18 nt, Artificial Sequence
  Synthetic
uacaguuuaggcaugggu

SEQ ID NO: 394799 - RNA, 19 nt, Artificial Sequence
  Synthetic
uuacaguuuaggcaugggu

SEQ ID NO: 394800 - RNA, 20 nt, Artificial Sequence
  Synthetic
uuuacaguuuaggcaugggu

SEQ ID NO: 394801 - RNA, 21 nt, Artificial Sequence
  Synthetic
uuuuacaguuuaggcaugggu

SEQ ID NO: 394802 - RNA, 22 nt, Artificial Sequence
  Synthetic
cuuuuacaguuuaggcaugggu

SEQ ID NO: 394803 - RNA, 23 nt, Artificial Sequence
  Synthetic
acuuuuacaguuuaggcaugggu

SEQ ID NO: 394804 - RNA, 24 nt, Artificial Sequence
  Synthetic
cacuuuuacaguuuaggcaugggu

SEQ ID NO: 394805 - RNA, 18 nt, Artificial Sequence
  Synthetic
acaggacuuugcaugggu

SEQ ID NO: 394806 - RNA, 19 nt, Artificial Sequence
  Synthetic
gacaggacuuugcaugggu

SEQ ID NO: 394807 - RNA, 20 nt, Artificial Sequence
  Synthetic
agacaggacuuugcaugggu

SEQ ID NO: 394808 - RNA, 21 nt, Artificial Sequence
  Synthetic
uagacaggacuuugcaugggu

SEQ ID NO: 394809 - RNA, 22 nt, Artificial Sequence
  Synthetic
guagacaggacuuugcaugggu

SEQ ID NO: 394810 - RNA, 23 nt, Artificial Sequence
  Synthetic
gguagacaggacuuugcaugggu

SEQ ID NO: 394811 - RNA, 24 nt, Artificial Sequence
  Synthetic
agguagacaggacuuugcaugggu

SEQ ID NO: 394812 - RNA, 18 nt, Artificial Sequence
  Synthetic
cauuccaugcucaugggu

SEQ ID NO: 394813 - RNA, 19 nt, Artificial Sequence
  Synthetic
acauuccaugcucaugggu

SEQ ID NO: 394814 - RNA, 20 nt, Artificial Sequence
  Synthetic
aacauuccaugcucaugggu

SEQ ID NO: 394815 - RNA, 21 nt, Artificial Sequence
  Synthetic
gaacauuccaugcucaugggu

SEQ ID NO: 394816 - RNA, 22 nt, Artificial Sequence
  Synthetic
agaacauuccaugcucaugggu

SEQ ID NO: 394817 - RNA, 23 nt, Artificial Sequence
  Synthetic
aagaacauuccaugcucaugggu

SEQ ID NO: 394818 - RNA, 24 nt, Artificial Sequence
  Synthetic
gaagaacauuccaugcucaugggu

SEQ ID NO: 394819 - RNA, 18 nt, Artificial Sequence
  Synthetic
uauaacuaucucaugggu

SEQ ID NO: 394820 - RNA, 19 nt, Artificial Sequence
  Synthetic
uuauaacuaucucaugggu

SEQ ID NO: 394821 - RNA, 20 nt, Artificial Sequence
  Synthetic
cuuauaacuaucucaugggu

SEQ ID NO: 394822 - RNA, 21 nt, Artificial Sequence
  Synthetic
acuuauaacuaucucaugggu

SEQ ID NO: 394823 - RNA, 22 nt, Artificial Sequence
  Synthetic
cacuuauaacuaucucaugggu

SEQ ID NO: 394824 - RNA, 23 nt, Artificial Sequence
  Synthetic
ucacuuauaacuaucucaugggu

SEQ ID NO: 394825 - RNA, 24 nt, Artificial Sequence
  Synthetic
cucacuuauaacuaucucaugggu

SEQ ID NO: 394826 - RNA, 18 nt, Artificial Sequence
  Synthetic
aaauaaugauggaugggu

SEQ ID NO: 394827 - RNA, 19 nt, Artificial Sequence
  Synthetic
aaaauaaugauggaugggu

SEQ ID NO: 394828 - RNA, 20 nt, Artificial Sequence
  Synthetic
caaaauaaugauggaugggu

SEQ ID NO: 394829 - RNA, 21 nt, Artificial Sequence
  Synthetic
ucaaaauaaugauggaugggu

SEQ ID NO: 394830 - RNA, 22 nt, Artificial Sequence
  Synthetic
uucaaaauaaugauggaugggu

SEQ ID NO: 394831 - RNA, 23 nt, Artificial Sequence
  Synthetic
auucaaaauaaugauggaugggu

SEQ ID NO: 394832 - RNA, 24 nt, Artificial Sequence
  Synthetic
cauucaaaauaaugauggaugggu

SEQ ID NO: 394833 - RNA, 18 nt, Artificial Sequence
  Synthetic
aucaggauacauaugggu

SEQ ID NO: 394834 - RNA, 19 nt, Artificial Sequence
  Synthetic
uaucaggauacauaugggu

SEQ ID NO: 394835 - RNA, 20 nt, Artificial Sequence
  Synthetic
guaucaggauacauaugggu

SEQ ID NO: 394836 - RNA, 21 nt, Artificial Sequence
  Synthetic
aguaucaggauacauaugggu

SEQ ID NO: 394837 - RNA, 22 nt, Artificial Sequence
  Synthetic
gaguaucaggauacauaugggu

SEQ ID NO: 394838 - RNA, 23 nt, Artificial Sequence
  Synthetic
agaguaucaggauacauaugggu

SEQ ID NO: 394839 - RNA, 24 nt, Artificial Sequence
  Synthetic
uagaguaucaggauacauaugggu

SEQ ID NO: 394840 - RNA, 18 nt, Artificial Sequence
  Synthetic
gaguguagguuuaugggu

SEQ ID NO: 394841 - RNA, 19 nt, Artificial Sequence
  Synthetic
agaguguagguuuaugggu

SEQ ID NO: 394842 - RNA, 20 nt, Artificial Sequence
  Synthetic
cagaguguagguuuaugggu

SEQ ID NO: 394843 - RNA, 21 nt, Artificial Sequence
  Synthetic
gcagaguguagguuuaugggu

SEQ ID NO: 394844 - RNA, 22 nt, Artificial Sequence
  Synthetic
agcagaguguagguuuaugggu

SEQ ID NO: 394845 - RNA, 23 nt, Artificial Sequence
  Synthetic
uagcagaguguagguuuaugggu

SEQ ID NO: 394846 - RNA, 24 nt, Artificial Sequence
  Synthetic
uuagcagaguguagguuuaugggu

SEQ ID NO: 394847 - RNA, 18 nt, Artificial Sequence
  Synthetic
cagucucuuuuuaugggu

SEQ ID NO: 394848 - RNA, 19 nt, Artificial Sequence
  Synthetic
ccagucucuuuuuaugggu

SEQ ID NO: 394849 - RNA, 20 nt, Artificial Sequence
  Synthetic
accagucucuuuuuaugggu

SEQ ID NO: 394850 - RNA, 21 nt, Artificial Sequence
  Synthetic
caccagucucuuuuuaugggu

SEQ ID NO: 394851 - RNA, 22 nt, Artificial Sequence
  Synthetic
ucaccagucucuuuuuaugggu

SEQ ID NO: 394852 - RNA, 23 nt, Artificial Sequence
  Synthetic
uucaccagucucuuuuuaugggu

SEQ ID NO: 394853 - RNA, 24 nt, Artificial Sequence
  Synthetic
uuucaccagucucuuuuuaugggu

SEQ ID NO: 394854 - RNA, 18 nt, Artificial Sequence
  Synthetic
agugacuuggaacugggu

SEQ ID NO: 394855 - RNA, 19 nt, Artificial Sequence
  Synthetic
aagugacuuggaacugggu

SEQ ID NO: 394856 - RNA, 20 nt, Artificial Sequence
  Synthetic
gaagugacuuggaacugggu

SEQ ID NO: 394857 - RNA, 21 nt, Artificial Sequence
  Synthetic
ggaagugacuuggaacugggu

SEQ ID NO: 394858 - RNA, 22 nt, Artificial Sequence
  Synthetic
uggaagugacuuggaacugggu

SEQ ID NO: 394859 - RNA, 23 nt, Artificial Sequence
  Synthetic
guggaagugacuuggaacugggu

SEQ ID NO: 394860 - RNA, 24 nt, Artificial Sequence
  Synthetic
uguggaagugacuuggaacugggu

SEQ ID NO: 394861 - RNA, 18 nt, Artificial Sequence
  Synthetic
uucaaaaauuaacugggu

SEQ ID NO: 394862 - RNA, 19 nt, Artificial Sequence
  Synthetic
auucaaaaauuaacugggu

SEQ ID NO: 394863 - RNA, 20 nt, Artificial Sequence
  Synthetic
aauucaaaaauuaacugggu

SEQ ID NO: 394864 - RNA, 21 nt, Artificial Sequence
  Synthetic
gaauucaaaaauuaacugggu

SEQ ID NO: 394865 - RNA, 22 nt, Artificial Sequence
  Synthetic
agaauucaaaaauuaacugggu

SEQ ID NO: 394866 - RNA, 23 nt, Artificial Sequence
  Synthetic
aagaauucaaaaauuaacugggu

SEQ ID NO: 394867 - RNA, 24 nt, Artificial Sequence
  Synthetic
aaagaauucaaaaauuaacugggu

SEQ ID NO: 394868 - RNA, 18 nt, Artificial Sequence
  Synthetic
aucuuauugacacugggu

SEQ ID NO: 394869 - RNA, 19 nt, Artificial Sequence
  Synthetic
caucuuauugacacugggu

SEQ ID NO: 394870 - RNA, 20 nt, Artificial Sequence
  Synthetic
gcaucuuauugacacugggu

SEQ ID NO: 394871 - RNA, 21 nt, Artificial Sequence
  Synthetic
ugcaucuuauugacacugggu

SEQ ID NO: 394872 - RNA, 22 nt, Artificial Sequence
  Synthetic
cugcaucuuauugacacugggu

SEQ ID NO: 394873 - RNA, 23 nt, Artificial Sequence
  Synthetic
acugcaucuuauugacacugggu

SEQ ID NO: 394874 - RNA, 24 nt, Artificial Sequence
  Synthetic
cacugcaucuuauugacacugggu

SEQ ID NO: 394875 - RNA, 18 nt, Artificial Sequence
  Synthetic
augaagugaugacugggu

SEQ ID NO: 394876 - RNA, 19 nt, Artificial Sequence
  Synthetic
uaugaagugaugacugggu

SEQ ID NO: 394877 - RNA, 20 nt, Artificial Sequence
  Synthetic
cuaugaagugaugacugggu

SEQ ID NO: 394878 - RNA, 21 nt, Artificial Sequence
  Synthetic
acuaugaagugaugacugggu

SEQ ID NO: 394879 - RNA, 22 nt, Artificial Sequence
  Synthetic
aacuaugaagugaugacugggu

SEQ ID NO: 394880 - RNA, 23 nt, Artificial Sequence
  Synthetic
caacuaugaagugaugacugggu

SEQ ID NO: 394881 - RNA, 24 nt, Artificial Sequence
  Synthetic
gcaacuaugaagugaugacugggu

SEQ ID NO: 394882 - RNA, 18 nt, Artificial Sequence
  Synthetic
ugcauuuagugacugggu

SEQ ID NO: 394883 - RNA, 19 nt, Artificial Sequence
  Synthetic
augcauuuagugacugggu

SEQ ID NO: 394884 - RNA, 20 nt, Artificial Sequence
  Synthetic
aaugcauuuagugacugggu

SEQ ID NO: 394885 - RNA, 21 nt, Artificial Sequence
  Synthetic
uaaugcauuuagugacugggu

SEQ ID NO: 394886 - RNA, 22 nt, Artificial Sequence
  Synthetic
uuaaugcauuuagugacugggu

SEQ ID NO: 394887 - RNA, 23 nt, Artificial Sequence
  Synthetic
uuuaaugcauuuagugacugggu

SEQ ID NO: 394888 - RNA, 24 nt, Artificial Sequence
  Synthetic
uuuuaaugcauuuagugacugggu

SEQ ID NO: 394889 - RNA, 18 nt, Artificial Sequence
  Synthetic
ugugaccuauaccugggu

SEQ ID NO: 394890 - RNA, 19 nt, Artificial Sequence
  Synthetic
cugugaccuauaccugggu

SEQ ID NO: 394891 - RNA, 20 nt, Artificial Sequence
  Synthetic
ccugugaccuauaccugggu

SEQ ID NO: 394892 - RNA, 21 nt, Artificial Sequence
  Synthetic
accugugaccuauaccugggu

SEQ ID NO: 394893 - RNA, 22 nt, Artificial Sequence
  Synthetic
gaccugugaccuauaccugggu

SEQ ID NO: 394894 - RNA, 23 nt, Artificial Sequence
  Synthetic
ggaccugugaccuauaccugggu

SEQ ID NO: 394895 - RNA, 24 nt, Artificial Sequence
  Synthetic
aggaccugugaccuauaccugggu

SEQ ID NO: 394896 - RNA, 18 nt, Artificial Sequence
  Synthetic
uuuaaugagcgccugggu

SEQ ID NO: 394897 - RNA, 19 nt, Artificial Sequence
  Synthetic
uuuuaaugagcgccugggu

SEQ ID NO: 394898 - RNA, 20 nt, Artificial Sequence
  Synthetic
guuuuaaugagcgccugggu

SEQ ID NO: 394899 - RNA, 21 nt, Artificial Sequence
  Synthetic
uguuuuaaugagcgccugggu

SEQ ID NO: 394900 - RNA, 22 nt, Artificial Sequence
  Synthetic
cuguuuuaaugagcgccugggu

SEQ ID NO: 394901 - RNA, 23 nt, Artificial Sequence
  Synthetic
gcuguuuuaaugagcgccugggu

SEQ ID NO: 394902 - RNA, 24 nt, Artificial Sequence
  Synthetic
ugcuguuuuaaugagcgccugggu

SEQ ID NO: 394903 - RNA, 18 nt, Artificial Sequence
  Synthetic
caaugauauaggcugggu

SEQ ID NO: 394904 - RNA, 19 nt, Artificial Sequence
  Synthetic
acaaugauauaggcugggu

SEQ ID NO: 394905 - RNA, 20 nt, Artificial Sequence
  Synthetic
aacaaugauauaggcugggu

SEQ ID NO: 394906 - RNA, 21 nt, Artificial Sequence
  Synthetic
uaacaaugauauaggcugggu

SEQ ID NO: 394907 - RNA, 22 nt, Artificial Sequence
  Synthetic
auaacaaugauauaggcugggu

SEQ ID NO: 394908 - RNA, 23 nt, Artificial Sequence
  Synthetic
aauaacaaugauauaggcugggu

SEQ ID NO: 394909 - RNA, 24 nt, Artificial Sequence
  Synthetic
uaauaacaaugauauaggcugggu

SEQ ID NO: 394910 - RNA, 18 nt, Artificial Sequence
  Synthetic
ucugcaaaagggcugggu

SEQ ID NO: 394911 - RNA, 19 nt, Artificial Sequence
  Synthetic
uucugcaaaagggcugggu

SEQ ID NO: 394912 - RNA, 20 nt, Artificial Sequence
  Synthetic
cuucugcaaaagggcugggu

SEQ ID NO: 394913 - RNA, 21 nt, Artificial Sequence
  Synthetic
ucuucugcaaaagggcugggu

SEQ ID NO: 394914 - RNA, 22 nt, Artificial Sequence
  Synthetic
uucuucugcaaaagggcugggu

SEQ ID NO: 394915 - RNA, 23 nt, Artificial Sequence
  Synthetic
uuucuucugcaaaagggcugggu

SEQ ID NO: 394916 - RNA, 24 nt, Artificial Sequence
  Synthetic
uuuucuucugcaaaagggcugggu

SEQ ID NO: 394917 - RNA, 18 nt, Artificial Sequence
  Synthetic
ccuguuuguggucugggu

SEQ ID NO: 394918 - RNA, 19 nt, Artificial Sequence
  Synthetic
accuguuuguggucugggu

SEQ ID NO: 394919 - RNA, 20 nt, Artificial Sequence
  Synthetic
aaccuguuuguggucugggu

SEQ ID NO: 394920 - RNA, 21 nt, Artificial Sequence
  Synthetic
uaaccuguuuguggucugggu

SEQ ID NO: 394921 - RNA, 22 nt, Artificial Sequence
  Synthetic
auaaccuguuuguggucugggu

SEQ ID NO: 394922 - RNA, 23 nt, Artificial Sequence
  Synthetic
uauaaccuguuuguggucugggu

SEQ ID NO: 394923 - RNA, 24 nt, Artificial Sequence
  Synthetic
uuauaaccuguuuguggucugggu

SEQ ID NO: 394924 - RNA, 18 nt, Artificial Sequence
  Synthetic
cgauuuaaaacagugggu

SEQ ID NO: 394925 - RNA, 19 nt, Artificial Sequence
  Synthetic
acgauuuaaaacagugggu

SEQ ID NO: 394926 - RNA, 20 nt, Artificial Sequence
  Synthetic
aacgauuuaaaacagugggu

SEQ ID NO: 394927 - RNA, 21 nt, Artificial Sequence
  Synthetic
aaacgauuuaaaacagugggu

SEQ ID NO: 394928 - RNA, 22 nt, Artificial Sequence
  Synthetic
caaacgauuuaaaacagugggu

SEQ ID NO: 394929 - RNA, 23 nt, Artificial Sequence
  Synthetic
acaaacgauuuaaaacagugggu

SEQ ID NO: 394930 - RNA, 24 nt, Artificial Sequence
  Synthetic
aacaaacgauuuaaaacagugggu

SEQ ID NO: 394931 - RNA, 18 nt, Artificial Sequence
  Synthetic
agcgugugagcagugggu

SEQ ID NO: 394932 - RNA, 19 nt, Artificial Sequence
  Synthetic
gagcgugugagcagugggu

SEQ ID NO: 394933 - RNA, 20 nt, Artificial Sequence
  Synthetic
ggagcgugugagcagugggu

SEQ ID NO: 394934 - RNA, 21 nt, Artificial Sequence
  Synthetic
aggagcgugugagcagugggu

SEQ ID NO: 394935 - RNA, 22 nt, Artificial Sequence
  Synthetic
caggagcgugugagcagugggu

SEQ ID NO: 394936 - RNA, 23 nt, Artificial Sequence
  Synthetic
gcaggagcgugugagcagugggu

SEQ ID NO: 394937 - RNA, 24 nt, Artificial Sequence
  Synthetic
ugcaggagcgugugagcagugggu

SEQ ID NO: 394938 - RNA, 18 nt, Artificial Sequence
  Synthetic
gagacuagaggagugggu

SEQ ID NO: 394939 - RNA, 19 nt, Artificial Sequence
  Synthetic
ugagacuagaggagugggu

SEQ ID NO: 394940 - RNA, 20 nt, Artificial Sequence
  Synthetic
gugagacuagaggagugggu

SEQ ID NO: 394941 - RNA, 21 nt, Artificial Sequence
  Synthetic
agugagacuagaggagugggu

SEQ ID NO: 394942 - RNA, 22 nt, Artificial Sequence
  Synthetic
cagugagacuagaggagugggu

SEQ ID NO: 394943 - RNA, 23 nt, Artificial Sequence
  Synthetic
ucagugagacuagaggagugggu

SEQ ID NO: 394944 - RNA, 24 nt, Artificial Sequence
  Synthetic
aucagugagacuagaggagugggu

SEQ ID NO: 394945 - RNA, 18 nt, Artificial Sequence
  Synthetic
uaauguuuaugagugggu

SEQ ID NO: 394946 - RNA, 19 nt, Artificial Sequence
  Synthetic
uuaauguuuaugagugggu

SEQ ID NO: 394947 - RNA, 20 nt, Artificial Sequence
  Synthetic
cuuaauguuuaugagugggu

SEQ ID NO: 394948 - RNA, 21 nt, Artificial Sequence
  Synthetic
gcuuaauguuuaugagugggu

SEQ ID NO: 394949 - RNA, 22 nt, Artificial Sequence
  Synthetic
ggcuuaauguuuaugagugggu

SEQ ID NO: 394950 - RNA, 23 nt, Artificial Sequence
  Synthetic
aggcuuaauguuuaugagugggu

SEQ ID NO: 394951 - RNA, 24 nt, Artificial Sequence
  Synthetic
aaggcuuaauguuuaugagugggu

SEQ ID NO: 394952 - RNA, 18 nt, Artificial Sequence
  Synthetic
uuccacgcuuucgugggu

SEQ ID NO: 394953 - RNA, 19 nt, Artificial Sequence
  Synthetic
cuuccacgcuuucgugggu

SEQ ID NO: 394954 - RNA, 20 nt, Artificial Sequence
  Synthetic
gcuuccacgcuuucgugggu

SEQ ID NO: 394955 - RNA, 21 nt, Artificial Sequence
  Synthetic
ugcuuccacgcuuucgugggu

SEQ ID NO: 394956 - RNA, 22 nt, Artificial Sequence
  Synthetic
augcuuccacgcuuucgugggu

SEQ ID NO: 394957 - RNA, 23 nt, Artificial Sequence
  Synthetic
caugcuuccacgcuuucgugggu

SEQ ID NO: 394958 - RNA, 24 nt, Artificial Sequence
  Synthetic
ccaugcuuccacgcuuucgugggu

SEQ ID NO: 394959 - RNA, 18 nt, Artificial Sequence
  Synthetic
cuuuuuuggggggugggu

SEQ ID NO: 394960 - RNA, 19 nt, Artificial Sequence
  Synthetic
ucuuuuuuggggggugggu

SEQ ID NO: 394961 - RNA, 20 nt, Artificial Sequence
  Synthetic
uucuuuuuuggggggugggu

SEQ ID NO: 394962 - RNA, 21 nt, Artificial Sequence
  Synthetic
uuucuuuuuuggggggugggu

SEQ ID NO: 394963 - RNA, 22 nt, Artificial Sequence
  Synthetic
cuuucuuuuuuggggggugggu

SEQ ID NO: 394964 - RNA, 23 nt, Artificial Sequence
  Synthetic
ucuuucuuuuuuggggggugggu

SEQ ID NO: 394965 - RNA, 24 nt, Artificial Sequence
  Synthetic
uucuuucuuuuuuggggggugggu

SEQ ID NO: 394966 - RNA, 18 nt, Artificial Sequence
  Synthetic
uuugagaggugggugggu

SEQ ID NO: 394967 - RNA, 19 nt, Artificial Sequence
  Synthetic
auuugagaggugggugggu

SEQ ID NO: 394968 - RNA, 20 nt, Artificial Sequence
  Synthetic
uauuugagaggugggugggu

SEQ ID NO: 394969 - RNA, 21 nt, Artificial Sequence
  Synthetic
cuauuugagaggugggugggu

SEQ ID NO: 394970 - RNA, 22 nt, Artificial Sequence
  Synthetic
gcuauuugagaggugggugggu

SEQ ID NO: 394971 - RNA, 23 nt, Artificial Sequence
  Synthetic
agcuauuugagaggugggugggu

SEQ ID NO: 394972 - RNA, 24 nt, Artificial Sequence
  Synthetic
cagcuauuugagaggugggugggu

SEQ ID NO: 394973 - RNA, 18 nt, Artificial Sequence
  Synthetic
acugauagaaaugugggu

SEQ ID NO: 394974 - RNA, 19 nt, Artificial Sequence
  Synthetic
cacugauagaaaugugggu

SEQ ID NO: 394975 - RNA, 20 nt, Artificial Sequence
  Synthetic
ccacugauagaaaugugggu

SEQ ID NO: 394976 - RNA, 21 nt, Artificial Sequence
  Synthetic
accacugauagaaaugugggu

SEQ ID NO: 394977 - RNA, 22 nt, Artificial Sequence
  Synthetic
aaccacugauagaaaugugggu

SEQ ID NO: 394978 - RNA, 23 nt, Artificial Sequence
  Synthetic
gaaccacugauagaaaugugggu

SEQ ID NO: 394979 - RNA, 24 nt, Artificial Sequence
  Synthetic
ggaaccacugauagaaaugugggu

SEQ ID NO: 394980 - RNA, 18 nt, Artificial Sequence
  Synthetic
auaaaguugguugugggu

SEQ ID NO: 394981 - RNA, 19 nt, Artificial Sequence
  Synthetic
gauaaaguugguugugggu

SEQ ID NO: 394982 - RNA, 20 nt, Artificial Sequence
  Synthetic
ugauaaaguugguugugggu

SEQ ID NO: 394983 - RNA, 21 nt, Artificial Sequence
  Synthetic
augauaaaguugguugugggu

SEQ ID NO: 394984 - RNA, 22 nt, Artificial Sequence
  Synthetic
aaugauaaaguugguugugggu

SEQ ID NO: 394985 - RNA, 23 nt, Artificial Sequence
  Synthetic
aaaugauaaaguugguugugggu

SEQ ID NO: 394986 - RNA, 24 nt, Artificial Sequence
  Synthetic
uaaaugauaaaguugguugugggu

SEQ ID NO: 394987 - RNA, 18 nt, Artificial Sequence
  Synthetic
cacacccaaucauugggu

SEQ ID NO: 394988 - RNA, 19 nt, Artificial Sequence
  Synthetic
ccacacccaaucauugggu

SEQ ID NO: 394989 - RNA, 20 nt, Artificial Sequence
  Synthetic
accacacccaaucauugggu

SEQ ID NO: 394990 - RNA, 21 nt, Artificial Sequence
  Synthetic
caccacacccaaucauugggu

SEQ ID NO: 394991 - RNA, 22 nt, Artificial Sequence
  Synthetic
ccaccacacccaaucauugggu

SEQ ID NO: 394992 - RNA, 23 nt, Artificial Sequence
  Synthetic
cccaccacacccaaucauugggu

SEQ ID NO: 394993 - RNA, 24 nt, Artificial Sequence
  Synthetic
ucccaccacacccaaucauugggu

SEQ ID NO: 394994 - RNA, 18 nt, Artificial Sequence
  Synthetic
aacuguuuaagauugggu

SEQ ID NO: 394995 - RNA, 19 nt, Artificial Sequence
  Synthetic
caacuguuuaagauugggu

SEQ ID NO: 394996 - RNA, 20 nt, Artificial Sequence
  Synthetic
acaacuguuuaagauugggu

SEQ ID NO: 394997 - RNA, 21 nt, Artificial Sequence
  Synthetic
gacaacuguuuaagauugggu

SEQ ID NO: 394998 - RNA, 22 nt, Artificial Sequence
  Synthetic
agacaacuguuuaagauugggu

SEQ ID NO: 394999 - RNA, 23 nt, Artificial Sequence
  Synthetic
aagacaacuguuuaagauugggu

SEQ ID NO: 395000 - RNA, 24 nt, Artificial Sequence
  Synthetic
uaagacaacuguuuaagauugggu

SEQ ID NO: 395001 - RNA, 18 nt, Artificial Sequence
  Synthetic
uaguucaagugauugggu

SEQ ID NO: 395002 - RNA, 19 nt, Artificial Sequence
  Synthetic
auaguucaagugauugggu

SEQ ID NO: 395003 - RNA, 20 nt, Artificial Sequence
  Synthetic
uauaguucaagugauugggu

SEQ ID NO: 395004 - RNA, 21 nt, Artificial Sequence
  Synthetic
guauaguucaagugauugggu

SEQ ID NO: 395005 - RNA, 22 nt, Artificial Sequence
  Synthetic
aguauaguucaagugauugggu

SEQ ID NO: 395006 - RNA, 23 nt, Artificial Sequence
  Synthetic
aaguauaguucaagugauugggu

SEQ ID NO: 395007 - RNA, 24 nt, Artificial Sequence
  Synthetic
aaaguauaguucaagugauugggu

SEQ ID NO: 395008 - RNA, 18 nt, Artificial Sequence
  Synthetic
caugguggccacuugggu

SEQ ID NO: 395009 - RNA, 19 nt, Artificial Sequence
  Synthetic
ucaugguggccacuugggu

SEQ ID NO: 395010 - RNA, 20 nt, Artificial Sequence
  Synthetic
cucaugguggccacuugggu

SEQ ID NO: 395011 - RNA, 21 nt, Artificial Sequence
  Synthetic
ucucaugguggccacuugggu

SEQ ID NO: 395012 - RNA, 22 nt, Artificial Sequence
  Synthetic
uucucaugguggccacuugggu

SEQ ID NO: 395013 - RNA, 23 nt, Artificial Sequence
  Synthetic
auucucaugguggccacuugggu

SEQ ID NO: 395014 - RNA, 24 nt, Artificial Sequence
  Synthetic
uauucucaugguggccacuugggu

SEQ ID NO: 395015 - RNA, 18 nt, Artificial Sequence
  Synthetic
uugucuacaggguugggu

SEQ ID NO: 395016 - RNA, 19 nt, Artificial Sequence
  Synthetic
auugucuacaggguugggu

SEQ ID NO: 395017 - RNA, 20 nt, Artificial Sequence
  Synthetic
gauugucuacaggguugggu

SEQ ID NO: 395018 - RNA, 21 nt, Artificial Sequence
  Synthetic
agauugucuacaggguugggu

SEQ ID NO: 395019 - RNA, 22 nt, Artificial Sequence
  Synthetic
aagauugucuacaggguugggu

SEQ ID NO: 395020 - RNA, 23 nt, Artificial Sequence
  Synthetic
uaagauugucuacaggguugggu

SEQ ID NO: 395021 - RNA, 24 nt, Artificial Sequence
  Synthetic
cuaagauugucuacaggguugggu

SEQ ID NO: 395022 - RNA, 18 nt, Artificial Sequence
  Synthetic
aauagucaaaauuugggu

SEQ ID NO: 395023 - RNA, 19 nt, Artificial Sequence
  Synthetic
aaauagucaaaauuugggu

SEQ ID NO: 395024 - RNA, 20 nt, Artificial Sequence
  Synthetic
aaaauagucaaaauuugggu

SEQ ID NO: 395025 - RNA, 21 nt, Artificial Sequence
  Synthetic
caaaauagucaaaauuugggu

SEQ ID NO: 395026 - RNA, 22 nt, Artificial Sequence
  Synthetic
ccaaaauagucaaaauuugggu

SEQ ID NO: 395027 - RNA, 23 nt, Artificial Sequence
  Synthetic
accaaaauagucaaaauuugggu

SEQ ID NO: 395028 - RNA, 24 nt, Artificial Sequence
  Synthetic
uaccaaaauagucaaaauuugggu

SEQ ID NO: 395029 - RNA, 18 nt, Artificial Sequence
  Synthetic
uaaaacagagauuugggu

SEQ ID NO: 395030 - RNA, 19 nt, Artificial Sequence
  Synthetic
cuaaaacagagauuugggu

SEQ ID NO: 395031 - RNA, 20 nt, Artificial Sequence
  Synthetic
ucuaaaacagagauuugggu

SEQ ID NO: 395032 - RNA, 21 nt, Artificial Sequence
  Synthetic
uucuaaaacagagauuugggu

SEQ ID NO: 395033 - RNA, 22 nt, Artificial Sequence
  Synthetic
auucuaaaacagagauuugggu

SEQ ID NO: 395034 - RNA, 23 nt, Artificial Sequence
  Synthetic
cauucuaaaacagagauuugggu

SEQ ID NO: 395035 - RNA, 24 nt, Artificial Sequence
  Synthetic
acauucuaaaacagagauuugggu

SEQ ID NO: 395036 - RNA, 18 nt, Artificial Sequence
  Synthetic
ucagaaugagauuugggu

SEQ ID NO: 395037 - RNA, 19 nt, Artificial Sequence
  Synthetic
uucagaaugagauuugggu

SEQ ID NO: 395038 - RNA, 20 nt, Artificial Sequence
  Synthetic
auucagaaugagauuugggu

SEQ ID NO: 395039 - RNA, 21 nt, Artificial Sequence
  Synthetic
aauucagaaugagauuugggu

SEQ ID NO: 395040 - RNA, 22 nt, Artificial Sequence
  Synthetic
caauucagaaugagauuugggu

SEQ ID NO: 395041 - RNA, 23 nt, Artificial Sequence
  Synthetic
acaauucagaaugagauuugggu

SEQ ID NO: 395042 - RNA, 24 nt, Artificial Sequence
  Synthetic
uacaauucagaaugagauuugggu

SEQ ID NO: 395043 - RNA, 23 nt, Artificial Sequence
  Synthetic
ggaauucaagaugagauuugggu

SEQ ID NO: 395044 - RNA, 24 nt, Artificial Sequence
  Synthetic
aggaauucaagaugagauuugggu

SEQ ID NO: 395045 - RNA, 18 nt, Artificial Sequence
  Synthetic
ucuagaugagauuugggu

SEQ ID NO: 395046 - RNA, 19 nt, Artificial Sequence
  Synthetic
uucuagaugagauuugggu

SEQ ID NO: 395047 - RNA, 20 nt, Artificial Sequence
  Synthetic
guucuagaugagauuugggu

SEQ ID NO: 395048 - RNA, 21 nt, Artificial Sequence
  Synthetic
aguucuagaugagauuugggu

SEQ ID NO: 395049 - RNA, 22 nt, Artificial Sequence
  Synthetic
caguucuagaugagauuugggu

SEQ ID NO: 395050 - RNA, 23 nt, Artificial Sequence
  Synthetic
acaguucuagaugagauuugggu

SEQ ID NO: 395051 - RNA, 24 nt, Artificial Sequence
  Synthetic
uacaguucuagaugagauuugggu

SEQ ID NO: 395052 - RNA, 18 nt, Artificial Sequence
  Synthetic
uuaauaugagauuugggu

SEQ ID NO: 395053 - RNA, 19 nt, Artificial Sequence
  Synthetic
uuuaauaugagauuugggu

SEQ ID NO: 395054 - RNA, 20 nt, Artificial Sequence
  Synthetic
auuuaauaugagauuugggu

SEQ ID NO: 395055 - RNA, 21 nt, Artificial Sequence
  Synthetic
aauuuaauaugagauuugggu

SEQ ID NO: 395056 - RNA, 22 nt, Artificial Sequence
  Synthetic
caauuuaauaugagauuugggu

SEQ ID NO: 395057 - RNA, 23 nt, Artificial Sequence
  Synthetic
acaauuuaauaugagauuugggu

SEQ ID NO: 395058 - RNA, 24 nt, Artificial Sequence
  Synthetic
uacaauuuaauaugagauuugggu

SEQ ID NO: 395059 - RNA, 18 nt, Artificial Sequence
  Synthetic
ucaagacgggauuugggu

SEQ ID NO: 395060 - RNA, 19 nt, Artificial Sequence
  Synthetic
uucaagacgggauuugggu

SEQ ID NO: 395061 - RNA, 20 nt, Artificial Sequence
  Synthetic
auucaagacgggauuugggu

SEQ ID NO: 395062 - RNA, 21 nt, Artificial Sequence
  Synthetic
aauucaagacgggauuugggu

SEQ ID NO: 395063 - RNA, 22 nt, Artificial Sequence
  Synthetic
caauucaagacgggauuugggu

SEQ ID NO: 395064 - RNA, 23 nt, Artificial Sequence
  Synthetic
gcaauucaagacgggauuugggu

SEQ ID NO: 395065 - RNA, 24 nt, Artificial Sequence
  Synthetic
ugcaauucaagacgggauuugggu

SEQ ID NO: 395066 - RNA, 18 nt, Artificial Sequence
  Synthetic
aacaagagauauuugggu

SEQ ID NO: 395067 - RNA, 19 nt, Artificial Sequence
  Synthetic
aaacaagagauauuugggu

SEQ ID NO: 395068 - RNA, 20 nt, Artificial Sequence
  Synthetic
gaaacaagagauauuugggu

SEQ ID NO: 395069 - RNA, 21 nt, Artificial Sequence
  Synthetic
ugaaacaagagauauuugggu

SEQ ID NO: 395070 - RNA, 22 nt, Artificial Sequence
  Synthetic
uugaaacaagagauauuugggu

SEQ ID NO: 395071 - RNA, 23 nt, Artificial Sequence
  Synthetic
auugaaacaagagauauuugggu

SEQ ID NO: 395072 - RNA, 24 nt, Artificial Sequence
  Synthetic
cauugaaacaagagauauuugggu

SEQ ID NO: 395073 - RNA, 18 nt, Artificial Sequence
  Synthetic
uucugcaauaguuugggu

SEQ ID NO: 395074 - RNA, 19 nt, Artificial Sequence
  Synthetic
uuucugcaauaguuugggu

SEQ ID NO: 395075 - RNA, 20 nt, Artificial Sequence
  Synthetic
uuuucugcaauaguuugggu

SEQ ID NO: 395076 - RNA, 21 nt, Artificial Sequence
  Synthetic
cuuuucugcaauaguuugggu

SEQ ID NO: 395077 - RNA, 22 nt, Artificial Sequence
  Synthetic
ucuuuucugcaauaguuugggu

SEQ ID NO: 395078 - RNA, 23 nt, Artificial Sequence
  Synthetic
aucuuuucugcaauaguuugggu

SEQ ID NO: 395079 - RNA, 24 nt, Artificial Sequence
  Synthetic
gaucuuuucugcaauaguuugggu

SEQ ID NO: 395080 - RNA, 18 nt, Artificial Sequence
  Synthetic
gucuugagacuuuugggu

SEQ ID NO: 395081 - RNA, 19 nt, Artificial Sequence
  Synthetic
ggucuugagacuuuugggu

SEQ ID NO: 395082 - RNA, 20 nt, Artificial Sequence
  Synthetic
uggucuugagacuuuugggu

SEQ ID NO: 395083 - RNA, 21 nt, Artificial Sequence
  Synthetic
auggucuugagacuuuugggu

SEQ ID NO: 395084 - RNA, 22 nt, Artificial Sequence
  Synthetic
aauggucuugagacuuuugggu

SEQ ID NO: 395085 - RNA, 23 nt, Artificial Sequence
  Synthetic
aaauggucuugagacuuuugggu

SEQ ID NO: 395086 - RNA, 24 nt, Artificial Sequence
  Synthetic
aaaauggucuugagacuuuugggu

SEQ ID NO: 395087 - RNA, 18 nt, Artificial Sequence
  Synthetic
cugaggcaggaaaauggu

SEQ ID NO: 395088 - RNA, 19 nt, Artificial Sequence
  Synthetic
gcugaggcaggaaaauggu

SEQ ID NO: 395089 - RNA, 20 nt, Artificial Sequence
  Synthetic
ggcugaggcaggaaaauggu

SEQ ID NO: 395090 - RNA, 21 nt, Artificial Sequence
  Synthetic
aggcugaggcaggaaaauggu

SEQ ID NO: 395091 - RNA, 22 nt, Artificial Sequence
  Synthetic
gaggcugaggcaggaaaauggu

SEQ ID NO: 395092 - RNA, 23 nt, Artificial Sequence
  Synthetic
ggaggcugaggcaggaaaauggu

SEQ ID NO: 395093 - RNA, 24 nt, Artificial Sequence
  Synthetic
gggaggcugaggcaggaaaauggu

SEQ ID NO: 395094 - RNA, 18 nt, Artificial Sequence
  Synthetic
ggggugugcccaaauggu

SEQ ID NO: 395095 - RNA, 19 nt, Artificial Sequence
  Synthetic
uggggugugcccaaauggu

SEQ ID NO: 395096 - RNA, 20 nt, Artificial Sequence
  Synthetic
cuggggugugcccaaauggu

SEQ ID NO: 395097 - RNA, 21 nt, Artificial Sequence
  Synthetic
ccuggggugugcccaaauggu

SEQ ID NO: 395098 - RNA, 22 nt, Artificial Sequence
  Synthetic
accuggggugugcccaaauggu

SEQ ID NO: 395099 - RNA, 23 nt, Artificial Sequence
  Synthetic
aaccuggggugugcccaaauggu

SEQ ID NO: 395100 - RNA, 24 nt, Artificial Sequence
  Synthetic
aaaccuggggugugcccaaauggu

SEQ ID NO: 395101 - RNA, 18 nt, Artificial Sequence
  Synthetic
cucuacuucuuaaauggu

SEQ ID NO: 395102 - RNA, 19 nt, Artificial Sequence
  Synthetic
gcucuacuucuuaaauggu

SEQ ID NO: 395103 - RNA, 20 nt, Artificial Sequence
  Synthetic
ugcucuacuucuuaaauggu

SEQ ID NO: 395104 - RNA, 21 nt, Artificial Sequence
  Synthetic
uugcucuacuucuuaaauggu

SEQ ID NO: 395105 - RNA, 22 nt, Artificial Sequence
  Synthetic
cuugcucuacuucuuaaauggu

SEQ ID NO: 395106 - RNA, 23 nt, Artificial Sequence
  Synthetic
ccuugcucuacuucuuaaauggu

SEQ ID NO: 395107 - RNA, 24 nt, Artificial Sequence
  Synthetic
cccuugcucuacuucuuaaauggu

SEQ ID NO: 395108 - RNA, 18 nt, Artificial Sequence
  Synthetic
cuauaaauuuuaaauggu

SEQ ID NO: 395109 - RNA, 19 nt, Artificial Sequence
  Synthetic
ccuauaaauuuuaaauggu

SEQ ID NO: 395110 - RNA, 20 nt, Artificial Sequence
  Synthetic
uccuauaaauuuuaaauggu

SEQ ID NO: 395111 - RNA, 21 nt, Artificial Sequence
  Synthetic
auccuauaaauuuuaaauggu

SEQ ID NO: 395112 - RNA, 22 nt, Artificial Sequence
  Synthetic
cauccuauaaauuuuaaauggu

SEQ ID NO: 395113 - RNA, 23 nt, Artificial Sequence
  Synthetic
ucauccuauaaauuuuaaauggu

SEQ ID NO: 395114 - RNA, 24 nt, Artificial Sequence
  Synthetic
uucauccuauaaauuuuaaauggu

SEQ ID NO: 395115 - RNA, 18 nt, Artificial Sequence
  Synthetic
uuuuuauuuuacaauggu

SEQ ID NO: 395116 - RNA, 19 nt, Artificial Sequence
  Synthetic
auuuuuauuuuacaauggu

SEQ ID NO: 395117 - RNA, 20 nt, Artificial Sequence
  Synthetic
uauuuuuauuuuacaauggu

SEQ ID NO: 395118 - RNA, 21 nt, Artificial Sequence
  Synthetic
auauuuuuauuuuacaauggu

SEQ ID NO: 395119 - RNA, 22 nt, Artificial Sequence
  Synthetic
gauauuuuuauuuuacaauggu

SEQ ID NO: 395120 - RNA, 23 nt, Artificial Sequence
  Synthetic
ggauauuuuuauuuuacaauggu

SEQ ID NO: 395121 - RNA, 24 nt, Artificial Sequence
  Synthetic
aggauauuuuuauuuuacaauggu

SEQ ID NO: 395122 - RNA, 18 nt, Artificial Sequence
  Synthetic
auucaaaagcccaauggu

SEQ ID NO: 395123 - RNA, 19 nt, Artificial Sequence
  Synthetic
aauucaaaagcccaauggu

SEQ ID NO: 395124 - RNA, 20 nt, Artificial Sequence
  Synthetic
aaauucaaaagcccaauggu

SEQ ID NO: 395125 - RNA, 21 nt, Artificial Sequence
  Synthetic
caaauucaaaagcccaauggu

SEQ ID NO: 395126 - RNA, 22 nt, Artificial Sequence
  Synthetic
ccaaauucaaaagcccaauggu

SEQ ID NO: 395127 - RNA, 23 nt, Artificial Sequence
  Synthetic
accaaauucaaaagcccaauggu

SEQ ID NO: 395128 - RNA, 24 nt, Artificial Sequence
  Synthetic
caccaaauucaaaagcccaauggu

SEQ ID NO: 395129 - RNA, 18 nt, Artificial Sequence
  Synthetic
ucccucugaagcaauggu

SEQ ID NO: 395130 - RNA, 19 nt, Artificial Sequence
  Synthetic
cucccucugaagcaauggu

SEQ ID NO: 395131 - RNA, 20 nt, Artificial Sequence
  Synthetic
gcucccucugaagcaauggu

SEQ ID NO: 395132 - RNA, 21 nt, Artificial Sequence
  Synthetic
ugcucccucugaagcaauggu

SEQ ID NO: 395133 - RNA, 22 nt, Artificial Sequence
  Synthetic
uugcucccucugaagcaauggu

SEQ ID NO: 395134 - RNA, 23 nt, Artificial Sequence
  Synthetic
cuugcucccucugaagcaauggu

SEQ ID NO: 395135 - RNA, 24 nt, Artificial Sequence
  Synthetic
acuugcucccucugaagcaauggu

SEQ ID NO: 395136 - RNA, 18 nt, Artificial Sequence
  Synthetic
uauccuucaaagaauggu

SEQ ID NO: 395137 - RNA, 19 nt, Artificial Sequence
  Synthetic
cuauccuucaaagaauggu

SEQ ID NO: 395138 - RNA, 20 nt, Artificial Sequence
  Synthetic
gcuauccuucaaagaauggu

SEQ ID NO: 395139 - RNA, 21 nt, Artificial Sequence
  Synthetic
ugcuauccuucaaagaauggu

SEQ ID NO: 395140 - RNA, 22 nt, Artificial Sequence
  Synthetic
gugcuauccuucaaagaauggu

SEQ ID NO: 395141 - RNA, 23 nt, Artificial Sequence
  Synthetic
agugcuauccuucaaagaauggu

SEQ ID NO: 395142 - RNA, 24 nt, Artificial Sequence
  Synthetic
cagugcuauccuucaaagaauggu

SEQ ID NO: 395143 - RNA, 18 nt, Artificial Sequence
  Synthetic
gcccauaaauggaauggu

SEQ ID NO: 395144 - RNA, 19 nt, Artificial Sequence
  Synthetic
agcccauaaauggaauggu

SEQ ID NO: 395145 - RNA, 20 nt, Artificial Sequence
  Synthetic
cagcccauaaauggaauggu

SEQ ID NO: 395146 - RNA, 21 nt, Artificial Sequence
  Synthetic
acagcccauaaauggaauggu

SEQ ID NO: 395147 - RNA, 22 nt, Artificial Sequence
  Synthetic
gacagcccauaaauggaauggu

SEQ ID NO: 395148 - RNA, 23 nt, Artificial Sequence
  Synthetic
ggacagcccauaaauggaauggu

SEQ ID NO: 395149 - RNA, 24 nt, Artificial Sequence
  Synthetic
uggacagcccauaaauggaauggu

SEQ ID NO: 395150 - RNA, 18 nt, Artificial Sequence
  Synthetic
auagccaguaugaauggu

SEQ ID NO: 395151 - RNA, 19 nt, Artificial Sequence
  Synthetic
aauagccaguaugaauggu

SEQ ID NO: 395152 - RNA, 20 nt, Artificial Sequence
  Synthetic
uaauagccaguaugaauggu

SEQ ID NO: 395153 - RNA, 21 nt, Artificial Sequence
  Synthetic
auaauagccaguaugaauggu

SEQ ID NO: 395154 - RNA, 22 nt, Artificial Sequence
  Synthetic
aauaauagccaguaugaauggu

SEQ ID NO: 395155 - RNA, 23 nt, Artificial Sequence
  Synthetic
uaauaauagccaguaugaauggu

SEQ ID NO: 395156 - RNA, 24 nt, Artificial Sequence
  Synthetic
uuaauaauagccaguaugaauggu

SEQ ID NO: 395157 - RNA, 18 nt, Artificial Sequence
  Synthetic
agucuugaaguuaauggu

SEQ ID NO: 395158 - RNA, 19 nt, Artificial Sequence
  Synthetic
gagucuugaaguuaauggu

SEQ ID NO: 395159 - RNA, 20 nt, Artificial Sequence
  Synthetic
ugagucuugaaguuaauggu

SEQ ID NO: 395160 - RNA, 21 nt, Artificial Sequence
  Synthetic
augagucuugaaguuaauggu

SEQ ID NO: 395161 - RNA, 22 nt, Artificial Sequence
  Synthetic
gaugagucuugaaguuaauggu

SEQ ID NO: 395162 - RNA, 23 nt, Artificial Sequence
  Synthetic
agaugagucuugaaguuaauggu

SEQ ID NO: 395163 - RNA, 24 nt, Artificial Sequence
  Synthetic
uagaugagucuugaaguuaauggu

SEQ ID NO: 395164 - RNA, 18 nt, Artificial Sequence
  Synthetic
acauuuaucaaacauggu

SEQ ID NO: 395165 - RNA, 19 nt, Artificial Sequence
  Synthetic
aacauuuaucaaacauggu

SEQ ID NO: 395166 - RNA, 20 nt, Artificial Sequence
  Synthetic
caacauuuaucaaacauggu

SEQ ID NO: 395167 - RNA, 21 nt, Artificial Sequence
  Synthetic
acaacauuuaucaaacauggu

SEQ ID NO: 395168 - RNA, 22 nt, Artificial Sequence
  Synthetic
gacaacauuuaucaaacauggu

SEQ ID NO: 395169 - RNA, 23 nt, Artificial Sequence
  Synthetic
ggacaacauuuaucaaacauggu

SEQ ID NO: 395170 - RNA, 24 nt, Artificial Sequence
  Synthetic
uggacaacauuuaucaaacauggu

SEQ ID NO: 395171 - RNA, 18 nt, Artificial Sequence
  Synthetic
aggcuagcagaacauggu

SEQ ID NO: 395172 - RNA, 19 nt, Artificial Sequence
  Synthetic
aaggcuagcagaacauggu

SEQ ID NO: 395173 - RNA, 20 nt, Artificial Sequence
  Synthetic
uaaggcuagcagaacauggu

SEQ ID NO: 395174 - RNA, 21 nt, Artificial Sequence
  Synthetic
auaaggcuagcagaacauggu

SEQ ID NO: 395175 - RNA, 22 nt, Artificial Sequence
  Synthetic
cauaaggcuagcagaacauggu

SEQ ID NO: 395176 - RNA, 23 nt, Artificial Sequence
  Synthetic
acauaaggcuagcagaacauggu

SEQ ID NO: 395177 - RNA, 24 nt, Artificial Sequence
  Synthetic
gacauaaggcuagcagaacauggu

SEQ ID NO: 395178 - RNA, 18 nt, Artificial Sequence
  Synthetic
uuuauuuucuaacauggu

SEQ ID NO: 395179 - RNA, 19 nt, Artificial Sequence
  Synthetic
guuuauuuucuaacauggu

SEQ ID NO: 395180 - RNA, 20 nt, Artificial Sequence
  Synthetic
aguuuauuuucuaacauggu

SEQ ID NO: 395181 - RNA, 21 nt, Artificial Sequence
  Synthetic
aaguuuauuuucuaacauggu

SEQ ID NO: 395182 - RNA, 22 nt, Artificial Sequence
  Synthetic
uaaguuuauuuucuaacauggu

SEQ ID NO: 395183 - RNA, 23 nt, Artificial Sequence
  Synthetic
uuaaguuuauuuucuaacauggu

SEQ ID NO: 395184 - RNA, 24 nt, Artificial Sequence
  Synthetic
uuuaaguuuauuuucuaacauggu

SEQ ID NO: 395185 - RNA, 18 nt, Artificial Sequence
  Synthetic
gcagggaaguaacauggu

SEQ ID NO: 395186 - RNA, 19 nt, Artificial Sequence
  Synthetic
agcagggaaguaacauggu

SEQ ID NO: 395187 - RNA, 20 nt, Artificial Sequence
  Synthetic
gagcagggaaguaacauggu

SEQ ID NO: 395188 - RNA, 21 nt, Artificial Sequence
  Synthetic
ugagcagggaaguaacauggu

SEQ ID NO: 395189 - RNA, 22 nt, Artificial Sequence
  Synthetic
uugagcagggaaguaacauggu

SEQ ID NO: 395190 - RNA, 23 nt, Artificial Sequence
  Synthetic
uuugagcagggaaguaacauggu

SEQ ID NO: 395191 - RNA, 24 nt, Artificial Sequence
  Synthetic
uuuugagcagggaaguaacauggu

SEQ ID NO: 395192 - RNA, 18 nt, Artificial Sequence
  Synthetic
agccacguuacacauggu

SEQ ID NO: 395193 - RNA, 19 nt, Artificial Sequence
  Synthetic
aagccacguuacacauggu

SEQ ID NO: 395194 - RNA, 20 nt, Artificial Sequence
  Synthetic
uaagccacguuacacauggu

SEQ ID NO: 395195 - RNA, 21 nt, Artificial Sequence
  Synthetic
auaagccacguuacacauggu

SEQ ID NO: 395196 - RNA, 22 nt, Artificial Sequence
  Synthetic
uauaagccacguuacacauggu

SEQ ID NO: 395197 - RNA, 23 nt, Artificial Sequence
  Synthetic
auauaagccacguuacacauggu

SEQ ID NO: 395198 - RNA, 24 nt, Artificial Sequence
  Synthetic
cauauaagccacguuacacauggu

SEQ ID NO: 395199 - RNA, 18 nt, Artificial Sequence
  Synthetic
guguagagaucacauggu

SEQ ID NO: 395200 - RNA, 19 nt, Artificial Sequence
  Synthetic
uguguagagaucacauggu

SEQ ID NO: 395201 - RNA, 20 nt, Artificial Sequence
  Synthetic
guguguagagaucacauggu

SEQ ID NO: 395202 - RNA, 21 nt, Artificial Sequence
  Synthetic
gguguguagagaucacauggu

SEQ ID NO: 395203 - RNA, 22 nt, Artificial Sequence
  Synthetic
ugguguguagagaucacauggu

SEQ ID NO: 395204 - RNA, 23 nt, Artificial Sequence
  Synthetic
cugguguguagagaucacauggu

SEQ ID NO: 395205 - RNA, 24 nt, Artificial Sequence
  Synthetic
gcugguguguagagaucacauggu

SEQ ID NO: 395206 - RNA, 18 nt, Artificial Sequence
  Synthetic
uaaauccauuaccauggu

SEQ ID NO: 395207 - RNA, 19 nt, Artificial Sequence
  Synthetic
uuaaauccauuaccauggu

SEQ ID NO: 395208 - RNA, 20 nt, Artificial Sequence
  Synthetic
uuuaaauccauuaccauggu

SEQ ID NO: 395209 - RNA, 21 nt, Artificial Sequence
  Synthetic
auuuaaauccauuaccauggu

SEQ ID NO: 395210 - RNA, 22 nt, Artificial Sequence
  Synthetic
aauuuaaauccauuaccauggu

SEQ ID NO: 395211 - RNA, 23 nt, Artificial Sequence
  Synthetic
uaauuuaaauccauuaccauggu

SEQ ID NO: 395212 - RNA, 24 nt, Artificial Sequence
  Synthetic
uuaauuuaaauccauuaccauggu

SEQ ID NO: 395213 - RNA, 18 nt, Artificial Sequence
  Synthetic
agaucuaaucuccauggu

SEQ ID NO: 395214 - RNA, 19 nt, Artificial Sequence
  Synthetic
cagaucuaaucuccauggu

SEQ ID NO: 395215 - RNA, 20 nt, Artificial Sequence
  Synthetic
acagaucuaaucuccauggu

SEQ ID NO: 395216 - RNA, 21 nt, Artificial Sequence
  Synthetic
uacagaucuaaucuccauggu

SEQ ID NO: 395217 - RNA, 22 nt, Artificial Sequence
  Synthetic
cuacagaucuaaucuccauggu

SEQ ID NO: 395218 - RNA, 23 nt, Artificial Sequence
  Synthetic
gcuacagaucuaaucuccauggu

SEQ ID NO: 395219 - RNA, 24 nt, Artificial Sequence
  Synthetic
ugcuacagaucuaaucuccauggu

SEQ ID NO: 395220 - RNA, 18 nt, Artificial Sequence
  Synthetic
uugauggcagagcauggu

SEQ ID NO: 395221 - RNA, 19 nt, Artificial Sequence
  Synthetic
auugauggcagagcauggu

SEQ ID NO: 395222 - RNA, 20 nt, Artificial Sequence
  Synthetic
aauugauggcagagcauggu

SEQ ID NO: 395223 - RNA, 21 nt, Artificial Sequence
  Synthetic
gaauugauggcagagcauggu

SEQ ID NO: 395224 - RNA, 22 nt, Artificial Sequence
  Synthetic
agaauugauggcagagcauggu

SEQ ID NO: 395225 - RNA, 23 nt, Artificial Sequence
  Synthetic
gagaauugauggcagagcauggu

SEQ ID NO: 395226 - RNA, 24 nt, Artificial Sequence
  Synthetic
ggagaauugauggcagagcauggu

SEQ ID NO: 395227 - RNA, 18 nt, Artificial Sequence
  Synthetic
acaagccggaggcauggu

SEQ ID NO: 395228 - RNA, 19 nt, Artificial Sequence
  Synthetic
gacaagccggaggcauggu

SEQ ID NO: 395229 - RNA, 20 nt, Artificial Sequence
  Synthetic
ggacaagccggaggcauggu

SEQ ID NO: 395230 - RNA, 21 nt, Artificial Sequence
  Synthetic
aggacaagccggaggcauggu

SEQ ID NO: 395231 - RNA, 22 nt, Artificial Sequence
  Synthetic
caggacaagccggaggcauggu

SEQ ID NO: 395232 - RNA, 23 nt, Artificial Sequence
  Synthetic
ucaggacaagccggaggcauggu

SEQ ID NO: 395233 - RNA, 24 nt, Artificial Sequence
  Synthetic
uucaggacaagccggaggcauggu

SEQ ID NO: 395234 - RNA, 18 nt, Artificial Sequence
  Synthetic
aaaaagcuugcucauggu

SEQ ID NO: 395235 - RNA, 19 nt, Artificial Sequence
  Synthetic
aaaaaagcuugcucauggu

SEQ ID NO: 395236 - RNA, 20 nt, Artificial Sequence
  Synthetic
gaaaaaagcuugcucauggu

SEQ ID NO: 395237 - RNA, 21 nt, Artificial Sequence
  Synthetic
agaaaaaagcuugcucauggu

SEQ ID NO: 395238 - RNA, 22 nt, Artificial Sequence
  Synthetic
aagaaaaaagcuugcucauggu

SEQ ID NO: 395239 - RNA, 23 nt, Artificial Sequence
  Synthetic
caagaaaaaagcuugcucauggu

SEQ ID NO: 395240 - RNA, 24 nt, Artificial Sequence
  Synthetic
ccaagaaaaaagcuugcucauggu

SEQ ID NO: 395241 - RNA, 18 nt, Artificial Sequence
  Synthetic
agaaacuuaucucauggu

SEQ ID NO: 395242 - RNA, 19 nt, Artificial Sequence
  Synthetic
uagaaacuuaucucauggu

SEQ ID NO: 395243 - RNA, 20 nt, Artificial Sequence
  Synthetic
uuagaaacuuaucucauggu

SEQ ID NO: 395244 - RNA, 21 nt, Artificial Sequence
  Synthetic
cuuagaaacuuaucucauggu

SEQ ID NO: 395245 - RNA, 22 nt, Artificial Sequence
  Synthetic
acuuagaaacuuaucucauggu

SEQ ID NO: 395246 - RNA, 23 nt, Artificial Sequence
  Synthetic
aacuuagaaacuuaucucauggu

SEQ ID NO: 395247 - RNA, 24 nt, Artificial Sequence
  Synthetic
uaacuuagaaacuuaucucauggu

SEQ ID NO: 395248 - RNA, 18 nt, Artificial Sequence
  Synthetic
agguacuucuuucauggu

SEQ ID NO: 395249 - RNA, 19 nt, Artificial Sequence
  Synthetic
uagguacuucuuucauggu

SEQ ID NO: 395250 - RNA, 20 nt, Artificial Sequence
  Synthetic
uuagguacuucuuucauggu

SEQ ID NO: 395251 - RNA, 21 nt, Artificial Sequence
  Synthetic
auuagguacuucuuucauggu

SEQ ID NO: 395252 - RNA, 22 nt, Artificial Sequence
  Synthetic
cauuagguacuucuuucauggu

SEQ ID NO: 395253 - RNA, 23 nt, Artificial Sequence
  Synthetic
ucauuagguacuucuuucauggu

SEQ ID NO: 395254 - RNA, 24 nt, Artificial Sequence
  Synthetic
cucauuagguacuucuuucauggu

SEQ ID NO: 395255 - RNA, 18 nt, Artificial Sequence
  Synthetic
uuguaguaguuucauggu

SEQ ID NO: 395256 - RNA, 19 nt, Artificial Sequence
  Synthetic
cuuguaguaguuucauggu

SEQ ID NO: 395257 - RNA, 20 nt, Artificial Sequence
  Synthetic
ucuuguaguaguuucauggu

SEQ ID NO: 395258 - RNA, 21 nt, Artificial Sequence
  Synthetic
cucuuguaguaguuucauggu

SEQ ID NO: 395259 - RNA, 22 nt, Artificial Sequence
  Synthetic
ucucuuguaguaguuucauggu

SEQ ID NO: 395260 - RNA, 23 nt, Artificial Sequence
  Synthetic
uucucuuguaguaguuucauggu

SEQ ID NO: 395261 - RNA, 24 nt, Artificial Sequence
  Synthetic
guucucuuguaguaguuucauggu

SEQ ID NO: 395262 - RNA, 18 nt, Artificial Sequence
  Synthetic
gguagcaauaaagauggu

SEQ ID NO: 395263 - RNA, 19 nt, Artificial Sequence
  Synthetic
ugguagcaauaaagauggu

SEQ ID NO: 395264 - RNA, 20 nt, Artificial Sequence
  Synthetic
augguagcaauaaagauggu

SEQ ID NO: 395265 - RNA, 21 nt, Artificial Sequence
  Synthetic
caugguagcaauaaagauggu

SEQ ID NO: 395266 - RNA, 22 nt, Artificial Sequence
  Synthetic
ccaugguagcaauaaagauggu

SEQ ID NO: 395267 - RNA, 23 nt, Artificial Sequence
  Synthetic
accaugguagcaauaaagauggu

SEQ ID NO: 395268 - RNA, 24 nt, Artificial Sequence
  Synthetic
uaccaugguagcaauaaagauggu

SEQ ID NO: 395269 - RNA, 18 nt, Artificial Sequence
  Synthetic
aauccaaauuaagauggu

SEQ ID NO: 395270 - RNA, 19 nt, Artificial Sequence
  Synthetic
uaauccaaauuaagauggu

SEQ ID NO: 395271 - RNA, 20 nt, Artificial Sequence
  Synthetic
cuaauccaaauuaagauggu

SEQ ID NO: 395272 - RNA, 21 nt, Artificial Sequence
  Synthetic
ucuaauccaaauuaagauggu

SEQ ID NO: 395273 - RNA, 22 nt, Artificial Sequence
  Synthetic
aucuaauccaaauuaagauggu

SEQ ID NO: 395274 - RNA, 23 nt, Artificial Sequence
  Synthetic
aaucuaauccaaauuaagauggu

SEQ ID NO: 395275 - RNA, 24 nt, Artificial Sequence
  Synthetic
caaucuaauccaaauuaagauggu

SEQ ID NO: 395276 - RNA, 18 nt, Artificial Sequence
  Synthetic
cagauauucacagauggu

SEQ ID NO: 395277 - RNA, 19 nt, Artificial Sequence
  Synthetic
ccagauauucacagauggu

SEQ ID NO: 395278 - RNA, 20 nt, Artificial Sequence
  Synthetic
accagauauucacagauggu

SEQ ID NO: 395279 - RNA, 21 nt, Artificial Sequence
  Synthetic
aaccagauauucacagauggu

SEQ ID NO: 395280 - RNA, 22 nt, Artificial Sequence
  Synthetic
caaccagauauucacagauggu

SEQ ID NO: 395281 - RNA, 23 nt, Artificial Sequence
  Synthetic
ucaaccagauauucacagauggu

SEQ ID NO: 395282 - RNA, 24 nt, Artificial Sequence
  Synthetic
gucaaccagauauucacagauggu

SEQ ID NO: 395283 - RNA, 18 nt, Artificial Sequence
  Synthetic
ucaccaagucaggauggu

SEQ ID NO: 395284 - RNA, 19 nt, Artificial Sequence
  Synthetic
gucaccaagucaggauggu

SEQ ID NO: 395285 - RNA, 20 nt, Artificial Sequence
  Synthetic
ugucaccaagucaggauggu

SEQ ID NO: 395286 - RNA, 21 nt, Artificial Sequence
  Synthetic
gugucaccaagucaggauggu

SEQ ID NO: 395287 - RNA, 22 nt, Artificial Sequence
  Synthetic
agugucaccaagucaggauggu

SEQ ID NO: 395288 - RNA, 23 nt, Artificial Sequence
  Synthetic
cagugucaccaagucaggauggu

SEQ ID NO: 395289 - RNA, 24 nt, Artificial Sequence
  Synthetic
ucagugucaccaagucaggauggu

SEQ ID NO: 395290 - RNA, 18 nt, Artificial Sequence
  Synthetic
aaauggaagagggauggu

SEQ ID NO: 395291 - RNA, 19 nt, Artificial Sequence
  Synthetic
gaaauggaagagggauggu

SEQ ID NO: 395292 - RNA, 20 nt, Artificial Sequence
  Synthetic
ggaaauggaagagggauggu

SEQ ID NO: 395293 - RNA, 21 nt, Artificial Sequence
  Synthetic
aggaaauggaagagggauggu

SEQ ID NO: 395294 - RNA, 22 nt, Artificial Sequence
  Synthetic
gaggaaauggaagagggauggu

SEQ ID NO: 395295 - RNA, 23 nt, Artificial Sequence
  Synthetic
ggaggaaauggaagagggauggu

SEQ ID NO: 395296 - RNA, 24 nt, Artificial Sequence
  Synthetic
aggaggaaauggaagagggauggu

SEQ ID NO: 395297 - RNA, 18 nt, Artificial Sequence
  Synthetic
cagcaucacggggauggu

SEQ ID NO: 395298 - RNA, 19 nt, Artificial Sequence
  Synthetic
ucagcaucacggggauggu

SEQ ID NO: 395299 - RNA, 20 nt, Artificial Sequence
  Synthetic
aucagcaucacggggauggu

SEQ ID NO: 395300 - RNA, 21 nt, Artificial Sequence
  Synthetic
gaucagcaucacggggauggu

SEQ ID NO: 395301 - RNA, 22 nt, Artificial Sequence
  Synthetic
agaucagcaucacggggauggu

SEQ ID NO: 395302 - RNA, 23 nt, Artificial Sequence
  Synthetic
cagaucagcaucacggggauggu

SEQ ID NO: 395303 - RNA, 24 nt, Artificial Sequence
  Synthetic
ccagaucagcaucacggggauggu

SEQ ID NO: 395304 - RNA, 18 nt, Artificial Sequence
  Synthetic
gguaaauguuaugauggu

SEQ ID NO: 395305 - RNA, 19 nt, Artificial Sequence
  Synthetic
agguaaauguuaugauggu

SEQ ID NO: 395306 - RNA, 20 nt, Artificial Sequence
  Synthetic
gagguaaauguuaugauggu

SEQ ID NO: 395307 - RNA, 21 nt, Artificial Sequence
  Synthetic
ugagguaaauguuaugauggu

SEQ ID NO: 395308 - RNA, 22 nt, Artificial Sequence
  Synthetic
augagguaaauguuaugauggu

SEQ ID NO: 395309 - RNA, 23 nt, Artificial Sequence
  Synthetic
caugagguaaauguuaugauggu

SEQ ID NO: 395310 - RNA, 24 nt, Artificial Sequence
  Synthetic
gcaugagguaaauguuaugauggu

SEQ ID NO: 395311 - RNA, 18 nt, Artificial Sequence
  Synthetic
uuagcuggcugugauggu

SEQ ID NO: 395312 - RNA, 19 nt, Artificial Sequence
  Synthetic
guuagcuggcugugauggu

SEQ ID NO: 395313 - RNA, 20 nt, Artificial Sequence
  Synthetic
aguuagcuggcugugauggu

SEQ ID NO: 395314 - RNA, 21 nt, Artificial Sequence
  Synthetic
aaguuagcuggcugugauggu

SEQ ID NO: 395315 - RNA, 22 nt, Artificial Sequence
  Synthetic
aaaguuagcuggcugugauggu

SEQ ID NO: 395316 - RNA, 23 nt, Artificial Sequence
  Synthetic
aaaaguuagcuggcugugauggu

SEQ ID NO: 395317 - RNA, 24 nt, Artificial Sequence
  Synthetic
aaaaaguuagcuggcugugauggu

SEQ ID NO: 395318 - RNA, 18 nt, Artificial Sequence
  Synthetic
uugauuuuuguauauggu

SEQ ID NO: 395319 - RNA, 19 nt, Artificial Sequence
  Synthetic
uuugauuuuuguauauggu

SEQ ID NO: 395320 - RNA, 20 nt, Artificial Sequence
  Synthetic
auuugauuuuuguauauggu

SEQ ID NO: 395321 - RNA, 21 nt, Artificial Sequence
  Synthetic
gauuugauuuuuguauauggu

SEQ ID NO: 395322 - RNA, 22 nt, Artificial Sequence
  Synthetic
ugauuugauuuuuguauauggu

SEQ ID NO: 395323 - RNA, 23 nt, Artificial Sequence
  Synthetic
uugauuugauuuuuguauauggu

SEQ ID NO: 395324 - RNA, 24 nt, Artificial Sequence
  Synthetic
uuugauuugauuuuuguauauggu

SEQ ID NO: 395325 - RNA, 18 nt, Artificial Sequence
  Synthetic
uuuauugcuuacuauggu

SEQ ID NO: 395326 - RNA, 19 nt, Artificial Sequence
  Synthetic
auuuauugcuuacuauggu

SEQ ID NO: 395327 - RNA, 20 nt, Artificial Sequence
  Synthetic
aauuuauugcuuacuauggu

SEQ ID NO: 395328 - RNA, 21 nt, Artificial Sequence
  Synthetic
aaauuuauugcuuacuauggu

SEQ ID NO: 395329 - RNA, 22 nt, Artificial Sequence
  Synthetic
uaaauuuauugcuuacuauggu

SEQ ID NO: 395330 - RNA, 23 nt, Artificial Sequence
  Synthetic
uuaaauuuauugcuuacuauggu

SEQ ID NO: 395331 - RNA, 24 nt, Artificial Sequence
  Synthetic
guuaaauuuauugcuuacuauggu

SEQ ID NO: 395332 - RNA, 18 nt, Artificial Sequence
  Synthetic
ucucuuguuggcuauggu

SEQ ID NO: 395333 - RNA, 19 nt, Artificial Sequence
  Synthetic
aucucuuguuggcuauggu

SEQ ID NO: 395334 - RNA, 20 nt, Artificial Sequence
  Synthetic
gaucucuuguuggcuauggu

SEQ ID NO: 395335 - RNA, 21 nt, Artificial Sequence
  Synthetic
ugaucucuuguuggcuauggu

SEQ ID NO: 395336 - RNA, 22 nt, Artificial Sequence
  Synthetic
uugaucucuuguuggcuauggu

SEQ ID NO: 395337 - RNA, 23 nt, Artificial Sequence
  Synthetic
uuugaucucuuguuggcuauggu

SEQ ID NO: 395338 - RNA, 24 nt, Artificial Sequence
  Synthetic
auuugaucucuuguuggcuauggu

SEQ ID NO: 395339 - RNA, 18 nt, Artificial Sequence
  Synthetic
uuuucccacaaguauggu

SEQ ID NO: 395340 - RNA, 19 nt, Artificial Sequence
  Synthetic
uuuuucccacaaguauggu

SEQ ID NO: 395341 - RNA, 20 nt, Artificial Sequence
  Synthetic
auuuuucccacaaguauggu

SEQ ID NO: 395342 - RNA, 21 nt, Artificial Sequence
  Synthetic
cauuuuucccacaaguauggu

SEQ ID NO: 395343 - RNA, 22 nt, Artificial Sequence
  Synthetic
ucauuuuucccacaaguauggu

SEQ ID NO: 395344 - RNA, 23 nt, Artificial Sequence
  Synthetic
uucauuuuucccacaaguauggu

SEQ ID NO: 395345 - RNA, 24 nt, Artificial Sequence
  Synthetic
cuucauuuuucccacaaguauggu

SEQ ID NO: 395346 - RNA, 18 nt, Artificial Sequence
  Synthetic
auguaggggagguauggu

SEQ ID NO: 395347 - RNA, 19 nt, Artificial Sequence
  Synthetic
cauguaggggagguauggu

SEQ ID NO: 395348 - RNA, 20 nt, Artificial Sequence
  Synthetic
acauguaggggagguauggu

SEQ ID NO: 395349 - RNA, 21 nt, Artificial Sequence
  Synthetic
cacauguaggggagguauggu

SEQ ID NO: 395350 - RNA, 22 nt, Artificial Sequence
  Synthetic
acacauguaggggagguauggu

SEQ ID NO: 395351 - RNA, 23 nt, Artificial Sequence
  Synthetic
cacacauguaggggagguauggu

SEQ ID NO: 395352 - RNA, 24 nt, Artificial Sequence
  Synthetic
ucacacauguaggggagguauggu

SEQ ID NO: 395353 - RNA, 18 nt, Artificial Sequence
  Synthetic
uuguguaugggguauggu

SEQ ID NO: 395354 - RNA, 19 nt, Artificial Sequence
  Synthetic
cuuguguaugggguauggu

SEQ ID NO: 395355 - RNA, 20 nt, Artificial Sequence
  Synthetic
ccuuguguaugggguauggu

SEQ ID NO: 395356 - RNA, 21 nt, Artificial Sequence
  Synthetic
cccuuguguaugggguauggu

SEQ ID NO: 395357 - RNA, 22 nt, Artificial Sequence
  Synthetic
gcccuuguguaugggguauggu

SEQ ID NO: 395358 - RNA, 23 nt, Artificial Sequence
  Synthetic
agcccuuguguaugggguauggu

SEQ ID NO: 395359 - RNA, 24 nt, Artificial Sequence
  Synthetic
aagcccuuguguaugggguauggu

SEQ ID NO: 395360 - RNA, 18 nt, Artificial Sequence
  Synthetic
uuuuugcauguguauggu

SEQ ID NO: 395361 - RNA, 19 nt, Artificial Sequence
  Synthetic
uuuuuugcauguguauggu

SEQ ID NO: 395362 - RNA, 20 nt, Artificial Sequence
  Synthetic
uuuuuuugcauguguauggu

SEQ ID NO: 395363 - RNA, 21 nt, Artificial Sequence
  Synthetic
uuuuuuuugcauguguauggu

SEQ ID NO: 395364 - RNA, 22 nt, Artificial Sequence
  Synthetic
uuuuuuuuugcauguguauggu

SEQ ID NO: 395365 - RNA, 23 nt, Artificial Sequence
  Synthetic
uuuuuuuuuugcauguguauggu

SEQ ID NO: 395366 - RNA, 24 nt, Artificial Sequence
  Synthetic
auuuuuuuuuugcauguguauggu

SEQ ID NO: 395367 - RNA, 18 nt, Artificial Sequence
  Synthetic
auuuauccaccuuauggu

SEQ ID NO: 395368 - RNA, 19 nt, Artificial Sequence
  Synthetic
cauuuauccaccuuauggu

SEQ ID NO: 395369 - RNA, 20 nt, Artificial Sequence
  Synthetic
ucauuuauccaccuuauggu

SEQ ID NO: 395370 - RNA, 21 nt, Artificial Sequence
  Synthetic
cucauuuauccaccuuauggu

SEQ ID NO: 395371 - RNA, 22 nt, Artificial Sequence
  Synthetic
ccucauuuauccaccuuauggu

SEQ ID NO: 395372 - RNA, 23 nt, Artificial Sequence
  Synthetic
cccucauuuauccaccuuauggu

SEQ ID NO: 395373 - RNA, 24 nt, Artificial Sequence
  Synthetic
ccccucauuuauccaccuuauggu

SEQ ID NO: 395374 - RNA, 18 nt, Artificial Sequence
  Synthetic
ucucauggugcuuauggu

SEQ ID NO: 395375 - RNA, 19 nt, Artificial Sequence
  Synthetic
uucucauggugcuuauggu

SEQ ID NO: 395376 - RNA, 20 nt, Artificial Sequence
  Synthetic
auucucauggugcuuauggu

SEQ ID NO: 395377 - RNA, 21 nt, Artificial Sequence
  Synthetic
gauucucauggugcuuauggu

SEQ ID NO: 395378 - RNA, 22 nt, Artificial Sequence
  Synthetic
agauucucauggugcuuauggu

SEQ ID NO: 395379 - RNA, 23 nt, Artificial Sequence
  Synthetic
uagauucucauggugcuuauggu

SEQ ID NO: 395380 - RNA, 24 nt, Artificial Sequence
  Synthetic
auagauucucauggugcuuauggu

SEQ ID NO: 395381 - RNA, 18 nt, Artificial Sequence
  Synthetic
uguaucaggaguuauggu

SEQ ID NO: 395382 - RNA, 19 nt, Artificial Sequence
  Synthetic
uuguaucaggaguuauggu

SEQ ID NO: 395383 - RNA, 20 nt, Artificial Sequence
  Synthetic
guuguaucaggaguuauggu

SEQ ID NO: 395384 - RNA, 21 nt, Artificial Sequence
  Synthetic
uguuguaucaggaguuauggu

SEQ ID NO: 395385 - RNA, 22 nt, Artificial Sequence
  Synthetic
uuguuguaucaggaguuauggu

SEQ ID NO: 395386 - RNA, 23 nt, Artificial Sequence
  Synthetic
cuuguuguaucaggaguuauggu

SEQ ID NO: 395387 - RNA, 24 nt, Artificial Sequence
  Synthetic
ucuuguuguaucaggaguuauggu

SEQ ID NO: 395388 - RNA, 18 nt, Artificial Sequence
  Synthetic
ucuugaaaauguuauggu

SEQ ID NO: 395389 - RNA, 19 nt, Artificial Sequence
  Synthetic
uucuugaaaauguuauggu

SEQ ID NO: 395390 - RNA, 20 nt, Artificial Sequence
  Synthetic
guucuugaaaauguuauggu

SEQ ID NO: 395391 - RNA, 21 nt, Artificial Sequence
  Synthetic
aguucuugaaaauguuauggu

SEQ ID NO: 395392 - RNA, 22 nt, Artificial Sequence
  Synthetic
caguucuugaaaauguuauggu

SEQ ID NO: 395393 - RNA, 23 nt, Artificial Sequence
  Synthetic
acaguucuugaaaauguuauggu

SEQ ID NO: 395394 - RNA, 24 nt, Artificial Sequence
  Synthetic
uacaguucuugaaaauguuauggu

SEQ ID NO: 395395 - RNA, 18 nt, Artificial Sequence
  Synthetic
aaauaucaauuuuauggu

SEQ ID NO: 395396 - RNA, 19 nt, Artificial Sequence
  Synthetic
aaaauaucaauuuuauggu

SEQ ID NO: 395397 - RNA, 20 nt, Artificial Sequence
  Synthetic
gaaaauaucaauuuuauggu

SEQ ID NO: 395398 - RNA, 21 nt, Artificial Sequence
  Synthetic
ugaaaauaucaauuuuauggu

SEQ ID NO: 395399 - RNA, 22 nt, Artificial Sequence
  Synthetic
uugaaaauaucaauuuuauggu

SEQ ID NO: 395400 - RNA, 23 nt, Artificial Sequence
  Synthetic
cuugaaaauaucaauuuuauggu

SEQ ID NO: 395401 - RNA, 24 nt, Artificial Sequence
  Synthetic
ucuugaaaauaucaauuuuauggu

SEQ ID NO: 395402 - RNA, 18 nt, Artificial Sequence
  Synthetic
ggaggucuacaaacuggu

SEQ ID NO: 395403 - RNA, 19 nt, Artificial Sequence
  Synthetic
uggaggucuacaaacuggu

SEQ ID NO: 395404 - RNA, 20 nt, Artificial Sequence
  Synthetic
cuggaggucuacaaacuggu

SEQ ID NO: 395405 - RNA, 21 nt, Artificial Sequence
  Synthetic
acuggaggucuacaaacuggu

SEQ ID NO: 395406 - RNA, 22 nt, Artificial Sequence
  Synthetic
gacuggaggucuacaaacuggu

SEQ ID NO: 395407 - RNA, 23 nt, Artificial Sequence
  Synthetic
agacuggaggucuacaaacuggu

SEQ ID NO: 395408 - RNA, 24 nt, Artificial Sequence
  Synthetic
gagacuggaggucuacaaacuggu

SEQ ID NO: 395409 - RNA, 18 nt, Artificial Sequence
  Synthetic
aucgccauucuaacuggu

SEQ ID NO: 395410 - RNA, 19 nt, Artificial Sequence
  Synthetic
gaucgccauucuaacuggu

SEQ ID NO: 395411 - RNA, 20 nt, Artificial Sequence
  Synthetic
ugaucgccauucuaacuggu

SEQ ID NO: 395412 - RNA, 21 nt, Artificial Sequence
  Synthetic
augaucgccauucuaacuggu

SEQ ID NO: 395413 - RNA, 22 nt, Artificial Sequence
  Synthetic
aaugaucgccauucuaacuggu

SEQ ID NO: 395414 - RNA, 23 nt, Artificial Sequence
  Synthetic
uaaugaucgccauucuaacuggu

SEQ ID NO: 395415 - RNA, 24 nt, Artificial Sequence
  Synthetic
uuaaugaucgccauucuaacuggu

SEQ ID NO: 395416 - RNA, 18 nt, Artificial Sequence
  Synthetic
uucgccauucuaacuggu

SEQ ID NO: 395417 - RNA, 19 nt, Artificial Sequence
  Synthetic
guucgccauucuaacuggu

SEQ ID NO: 395418 - RNA, 20 nt, Artificial Sequence
  Synthetic
uguucgccauucuaacuggu

SEQ ID NO: 395419 - RNA, 21 nt, Artificial Sequence
  Synthetic
auguucgccauucuaacuggu

SEQ ID NO: 395420 - RNA, 22 nt, Artificial Sequence
  Synthetic
aauguucgccauucuaacuggu

SEQ ID NO: 395421 - RNA, 23 nt, Artificial Sequence
  Synthetic
gaauguucgccauucuaacuggu

SEQ ID NO: 395422 - RNA, 24 nt, Artificial Sequence
  Synthetic
ugaauguucgccauucuaacuggu

SEQ ID NO: 395423 - RNA, 18 nt, Artificial Sequence
  Synthetic
auugccauucuaacuggu

SEQ ID NO: 395424 - RNA, 19 nt, Artificial Sequence
  Synthetic
gauugccauucuaacuggu

SEQ ID NO: 395425 - RNA, 20 nt, Artificial Sequence
  Synthetic
ugauugccauucuaacuggu

SEQ ID NO: 395426 - RNA, 18 nt, Artificial Sequence
  Synthetic
ccaaaguaguuaacuggu

SEQ ID NO: 395427 - RNA, 19 nt, Artificial Sequence
  Synthetic
accaaaguaguuaacuggu

SEQ ID NO: 395428 - RNA, 20 nt, Artificial Sequence
  Synthetic
aaccaaaguaguuaacuggu

SEQ ID NO: 395429 - RNA, 21 nt, Artificial Sequence
  Synthetic
aaaccaaaguaguuaacuggu

SEQ ID NO: 395430 - RNA, 22 nt, Artificial Sequence
  Synthetic
caaaccaaaguaguuaacuggu

SEQ ID NO: 395431 - RNA, 23 nt, Artificial Sequence
  Synthetic
acaaaccaaaguaguuaacuggu

SEQ ID NO: 395432 - RNA, 24 nt, Artificial Sequence
  Synthetic
cacaaaccaaaguaguuaacuggu

SEQ ID NO: 395433 - RNA, 18 nt, Artificial Sequence
  Synthetic
agguugggaaacacuggu

SEQ ID NO: 395434 - RNA, 19 nt, Artificial Sequence
  Synthetic
gagguugggaaacacuggu

SEQ ID NO: 395435 - RNA, 20 nt, Artificial Sequence
  Synthetic
ugagguugggaaacacuggu

SEQ ID NO: 395436 - RNA, 21 nt, Artificial Sequence
  Synthetic
gugagguugggaaacacuggu

SEQ ID NO: 395437 - RNA, 22 nt, Artificial Sequence
  Synthetic
ggugagguugggaaacacuggu

SEQ ID NO: 395438 - RNA, 23 nt, Artificial Sequence
  Synthetic
uggugagguugggaaacacuggu

SEQ ID NO: 395439 - RNA, 24 nt, Artificial Sequence
  Synthetic
guggugagguugggaaacacuggu

SEQ ID NO: 395440 - RNA, 18 nt, Artificial Sequence
  Synthetic
ucuccgguauacacuggu

SEQ ID NO: 395441 - RNA, 19 nt, Artificial Sequence
  Synthetic
uucuccgguauacacuggu

SEQ ID NO: 395442 - RNA, 20 nt, Artificial Sequence
  Synthetic
cuucuccgguauacacuggu

SEQ ID NO: 395443 - RNA, 21 nt, Artificial Sequence
  Synthetic
acuucuccgguauacacuggu

SEQ ID NO: 395444 - RNA, 22 nt, Artificial Sequence
  Synthetic
aacuucuccgguauacacuggu

SEQ ID NO: 395445 - RNA, 23 nt, Artificial Sequence
  Synthetic
aaacuucuccgguauacacuggu

SEQ ID NO: 395446 - RNA, 24 nt, Artificial Sequence
  Synthetic
gaaacuucuccgguauacacuggu

SEQ ID NO: 395447 - RNA, 18 nt, Artificial Sequence
  Synthetic
uuguaugauuccacuggu

SEQ ID NO: 395448 - RNA, 19 nt, Artificial Sequence
  Synthetic
auuguaugauuccacuggu

SEQ ID NO: 395449 - RNA, 20 nt, Artificial Sequence
  Synthetic
uauuguaugauuccacuggu

SEQ ID NO: 395450 - RNA, 21 nt, Artificial Sequence
  Synthetic
auauuguaugauuccacuggu

SEQ ID NO: 395451 - RNA, 22 nt, Artificial Sequence
  Synthetic
aauauuguaugauuccacuggu

SEQ ID NO: 395452 - RNA, 23 nt, Artificial Sequence
  Synthetic
aaauauuguaugauuccacuggu

SEQ ID NO: 395453 - RNA, 24 nt, Artificial Sequence
  Synthetic
aaaauauuguaugauuccacuggu

SEQ ID NO: 395454 - RNA, 18 nt, Artificial Sequence
  Synthetic
agugcugggauuacuggu

SEQ ID NO: 395455 - RNA, 19 nt, Artificial Sequence
  Synthetic
aagugcugggauuacuggu

SEQ ID NO: 395456 - RNA, 20 nt, Artificial Sequence
  Synthetic
aaagugcugggauuacuggu

SEQ ID NO: 395457 - RNA, 21 nt, Artificial Sequence
  Synthetic
caaagugcugggauuacuggu

SEQ ID NO: 395458 - RNA, 22 nt, Artificial Sequence
  Synthetic
ccaaagugcugggauuacuggu

SEQ ID NO: 395459 - RNA, 23 nt, Artificial Sequence
  Synthetic
cccaaagugcugggauuacuggu

SEQ ID NO: 395460 - RNA, 24 nt, Artificial Sequence
  Synthetic
ucccaaagugcugggauuacuggu

SEQ ID NO: 395461 - RNA, 18 nt, Artificial Sequence
  Synthetic
cauuggugauuuacuggu

SEQ ID NO: 395462 - RNA, 19 nt, Artificial Sequence
  Synthetic
ucauuggugauuuacuggu

SEQ ID NO: 395463 - RNA, 20 nt, Artificial Sequence
  Synthetic
gucauuggugauuuacuggu

SEQ ID NO: 395464 - RNA, 21 nt, Artificial Sequence
  Synthetic
ugucauuggugauuuacuggu

SEQ ID NO: 395465 - RNA, 22 nt, Artificial Sequence
  Synthetic
augucauuggugauuuacuggu

SEQ ID NO: 395466 - RNA, 23 nt, Artificial Sequence
  Synthetic
caugucauuggugauuuacuggu

SEQ ID NO: 395467 - RNA, 24 nt, Artificial Sequence
  Synthetic
ccaugucauuggugauuuacuggu

SEQ ID NO: 395468 - RNA, 18 nt, Artificial Sequence
  Synthetic
ucaucuacaagaccuggu

SEQ ID NO: 395469 - RNA, 19 nt, Artificial Sequence
  Synthetic
aucaucuacaagaccuggu

SEQ ID NO: 395470 - RNA, 20 nt, Artificial Sequence
  Synthetic
uaucaucuacaagaccuggu

SEQ ID NO: 395471 - RNA, 21 nt, Artificial Sequence
  Synthetic
guaucaucuacaagaccuggu

SEQ ID NO: 395472 - RNA, 22 nt, Artificial Sequence
  Synthetic
gguaucaucuacaagaccuggu

SEQ ID NO: 395473 - RNA, 23 nt, Artificial Sequence
  Synthetic
ugguaucaucuacaagaccuggu

SEQ ID NO: 395474 - RNA, 24 nt, Artificial Sequence
  Synthetic
uugguaucaucuacaagaccuggu

SEQ ID NO: 395475 - RNA, 18 nt, Artificial Sequence
  Synthetic
ccaagaucagggccuggu

SEQ ID NO: 395476 - RNA, 19 nt, Artificial Sequence
  Synthetic
uccaagaucagggccuggu

SEQ ID NO: 395477 - RNA, 20 nt, Artificial Sequence
  Synthetic
uuccaagaucagggccuggu

SEQ ID NO: 395478 - RNA, 21 nt, Artificial Sequence
  Synthetic
auuccaagaucagggccuggu

SEQ ID NO: 395479 - RNA, 22 nt, Artificial Sequence
  Synthetic
gauuccaagaucagggccuggu

SEQ ID NO: 395480 - RNA, 23 nt, Artificial Sequence
  Synthetic
ggauuccaagaucagggccuggu

SEQ ID NO: 395481 - RNA, 24 nt, Artificial Sequence
  Synthetic
gggauuccaagaucagggccuggu

SEQ ID NO: 395482 - RNA, 18 nt, Artificial Sequence
  Synthetic
uuucucugucugccuggu

SEQ ID NO: 395483 - RNA, 19 nt, Artificial Sequence
  Synthetic
auuucucugucugccuggu

SEQ ID NO: 395484 - RNA, 20 nt, Artificial Sequence
  Synthetic
cauuucucugucugccuggu

SEQ ID NO: 395485 - RNA, 21 nt, Artificial Sequence
  Synthetic
ccauuucucugucugccuggu

SEQ ID NO: 395486 - RNA, 22 nt, Artificial Sequence
  Synthetic
cccauuucucugucugccuggu

SEQ ID NO: 395487 - RNA, 23 nt, Artificial Sequence
  Synthetic
ucccauuucucugucugccuggu

SEQ ID NO: 395488 - RNA, 24 nt, Artificial Sequence
  Synthetic
cucccauuucucugucugccuggu

SEQ ID NO: 395489 - RNA, 18 nt, Artificial Sequence
  Synthetic
uccucauaccauccuggu

SEQ ID NO: 395490 - RNA, 19 nt, Artificial Sequence
  Synthetic
cuccucauaccauccuggu

SEQ ID NO: 395491 - RNA, 20 nt, Artificial Sequence
  Synthetic
acuccucauaccauccuggu

SEQ ID NO: 395492 - RNA, 21 nt, Artificial Sequence
  Synthetic
cacuccucauaccauccuggu

SEQ ID NO: 395493 - RNA, 22 nt, Artificial Sequence
  Synthetic
ucacuccucauaccauccuggu

SEQ ID NO: 395494 - RNA, 23 nt, Artificial Sequence
  Synthetic
cucacuccucauaccauccuggu

SEQ ID NO: 395495 - RNA, 24 nt, Artificial Sequence
  Synthetic
ucucacuccucauaccauccuggu

SEQ ID NO: 395496 - RNA, 18 nt, Artificial Sequence
  Synthetic
uuuacaaacacuccuggu

SEQ ID NO: 395497 - RNA, 19 nt, Artificial Sequence
  Synthetic
auuuacaaacacuccuggu

SEQ ID NO: 395498 - RNA, 20 nt, Artificial Sequence
  Synthetic
cauuuacaaacacuccuggu

SEQ ID NO: 395499 - RNA, 21 nt, Artificial Sequence
  Synthetic
acauuuacaaacacuccuggu

SEQ ID NO: 395500 - RNA, 22 nt, Artificial Sequence
  Synthetic
aacauuuacaaacacuccuggu

SEQ ID NO: 395501 - RNA, 23 nt, Artificial Sequence
  Synthetic
caacauuuacaaacacuccuggu

SEQ ID NO: 395502 - RNA, 24 nt, Artificial Sequence
  Synthetic
ucaacauuuacaaacacuccuggu

SEQ ID NO: 395503 - RNA, 18 nt, Artificial Sequence
  Synthetic
acagaugugguuccuggu

SEQ ID NO: 395504 - RNA, 19 nt, Artificial Sequence
  Synthetic
gacagaugugguuccuggu

SEQ ID NO: 395505 - RNA, 20 nt, Artificial Sequence
  Synthetic
ugacagaugugguuccuggu

SEQ ID NO: 395506 - RNA, 21 nt, Artificial Sequence
  Synthetic
cugacagaugugguuccuggu

SEQ ID NO: 395507 - RNA, 22 nt, Artificial Sequence
  Synthetic
gcugacagaugugguuccuggu

SEQ ID NO: 395508 - RNA, 23 nt, Artificial Sequence
  Synthetic
ugcugacagaugugguuccuggu

SEQ ID NO: 395509 - RNA, 24 nt, Artificial Sequence
  Synthetic
gugcugacagaugugguuccuggu

SEQ ID NO: 395510 - RNA, 18 nt, Artificial Sequence
  Synthetic
aaacauuucuuuccuggu

SEQ ID NO: 395511 - RNA, 19 nt, Artificial Sequence
  Synthetic
gaaacauuucuuuccuggu

SEQ ID NO: 395512 - RNA, 20 nt, Artificial Sequence
  Synthetic
ugaaacauuucuuuccuggu

SEQ ID NO: 395513 - RNA, 21 nt, Artificial Sequence
  Synthetic
gugaaacauuucuuuccuggu

SEQ ID NO: 395514 - RNA, 22 nt, Artificial Sequence
  Synthetic
ugugaaacauuucuuuccuggu

SEQ ID NO: 395515 - RNA, 23 nt, Artificial Sequence
  Synthetic
augugaaacauuucuuuccuggu

SEQ ID NO: 395516 - RNA, 24 nt, Artificial Sequence
  Synthetic
aaugugaaacauuucuuuccuggu

SEQ ID NO: 395517 - RNA, 18 nt, Artificial Sequence
  Synthetic
aguaauuggagagcuggu

SEQ ID NO: 395518 - RNA, 19 nt, Artificial Sequence
  Synthetic
caguaauuggagagcuggu

SEQ ID NO: 395519 - RNA, 20 nt, Artificial Sequence
  Synthetic
acaguaauuggagagcuggu

SEQ ID NO: 395520 - RNA, 21 nt, Artificial Sequence
  Synthetic
uacaguaauuggagagcuggu

SEQ ID NO: 395521 - RNA, 22 nt, Artificial Sequence
  Synthetic
auacaguaauuggagagcuggu

SEQ ID NO: 395522 - RNA, 23 nt, Artificial Sequence
  Synthetic
aauacaguaauuggagagcuggu

SEQ ID NO: 395523 - RNA, 24 nt, Artificial Sequence
  Synthetic
uaauacaguaauuggagagcuggu

SEQ ID NO: 395524 - RNA, 18 nt, Artificial Sequence
  Synthetic
gauuuugaugccgcuggu

SEQ ID NO: 395525 - RNA, 19 nt, Artificial Sequence
  Synthetic
ugauuuugaugccgcuggu

SEQ ID NO: 395526 - RNA, 20 nt, Artificial Sequence
  Synthetic
augauuuugaugccgcuggu

SEQ ID NO: 395527 - RNA, 21 nt, Artificial Sequence
  Synthetic
caugauuuugaugccgcuggu

SEQ ID NO: 395528 - RNA, 22 nt, Artificial Sequence
  Synthetic
ccaugauuuugaugccgcuggu

SEQ ID NO: 395529 - RNA, 23 nt, Artificial Sequence
  Synthetic
uccaugauuuugaugccgcuggu

SEQ ID NO: 395530 - RNA, 24 nt, Artificial Sequence
  Synthetic
uuccaugauuuugaugccgcuggu

SEQ ID NO: 395531 - RNA, 18 nt, Artificial Sequence
  Synthetic
auauauguauaugcuggu

SEQ ID NO: 395532 - RNA, 19 nt, Artificial Sequence
  Synthetic
uauauauguauaugcuggu

SEQ ID NO: 395533 - RNA, 20 nt, Artificial Sequence
  Synthetic
cuauauauguauaugcuggu

SEQ ID NO: 395534 - RNA, 21 nt, Artificial Sequence
  Synthetic
gcuauauauguauaugcuggu

SEQ ID NO: 395535 - RNA, 22 nt, Artificial Sequence
  Synthetic
agcuauauauguauaugcuggu

SEQ ID NO: 395536 - RNA, 23 nt, Artificial Sequence
  Synthetic
uagcuauauauguauaugcuggu

SEQ ID NO: 395537 - RNA, 24 nt, Artificial Sequence
  Synthetic
auagcuauauauguauaugcuggu

SEQ ID NO: 395538 - RNA, 18 nt, Artificial Sequence
  Synthetic
acuuaacacacugcuggu

SEQ ID NO: 395539 - RNA, 19 nt, Artificial Sequence
  Synthetic
cacuuaacacacugcuggu

SEQ ID NO: 395540 - RNA, 20 nt, Artificial Sequence
  Synthetic
acacuuaacacacugcuggu

SEQ ID NO: 395541 - RNA, 21 nt, Artificial Sequence
  Synthetic
aacacuuaacacacugcuggu

SEQ ID NO: 395542 - RNA, 22 nt, Artificial Sequence
  Synthetic
gaacacuuaacacacugcuggu

SEQ ID NO: 395543 - RNA, 23 nt, Artificial Sequence
  Synthetic
ggaacacuuaacacacugcuggu

SEQ ID NO: 395544 - RNA, 24 nt, Artificial Sequence
  Synthetic
aggaacacuuaacacacugcuggu

SEQ ID NO: 395545 - RNA, 18 nt, Artificial Sequence
  Synthetic
aauuguacagcugcuggu

SEQ ID NO: 395546 - RNA, 19 nt, Artificial Sequence
  Synthetic
aaauuguacagcugcuggu

SEQ ID NO: 395547 - RNA, 20 nt, Artificial Sequence
  Synthetic
uaaauuguacagcugcuggu

SEQ ID NO: 395548 - RNA, 21 nt, Artificial Sequence
  Synthetic
auaaauuguacagcugcuggu

SEQ ID NO: 395549 - RNA, 22 nt, Artificial Sequence
  Synthetic
cauaaauuguacagcugcuggu

SEQ ID NO: 395550 - RNA, 23 nt, Artificial Sequence
  Synthetic
gcauaaauuguacagcugcuggu

SEQ ID NO: 395551 - RNA, 24 nt, Artificial Sequence
  Synthetic
ugcauaaauuguacagcugcuggu

SEQ ID NO: 395552 - RNA, 18 nt, Artificial Sequence
  Synthetic
aaggggcuggaaucuggu

SEQ ID NO: 395553 - RNA, 19 nt, Artificial Sequence
  Synthetic
caaggggcuggaaucuggu

SEQ ID NO: 395554 - RNA, 20 nt, Artificial Sequence
  Synthetic
ucaaggggcuggaaucuggu

SEQ ID NO: 395555 - RNA, 21 nt, Artificial Sequence
  Synthetic
aucaaggggcuggaaucuggu

SEQ ID NO: 395556 - RNA, 22 nt, Artificial Sequence
  Synthetic
gaucaaggggcuggaaucuggu

SEQ ID NO: 395557 - RNA, 23 nt, Artificial Sequence
  Synthetic
agaucaaggggcuggaaucuggu

SEQ ID NO: 395558 - RNA, 24 nt, Artificial Sequence
  Synthetic
aagaucaaggggcuggaaucuggu

SEQ ID NO: 395559 - RNA, 18 nt, Artificial Sequence
  Synthetic
ugaggggccacaucuggu

SEQ ID NO: 395560 - RNA, 19 nt, Artificial Sequence
  Synthetic
uugaggggccacaucuggu

SEQ ID NO: 395561 - RNA, 20 nt, Artificial Sequence
  Synthetic
guugaggggccacaucuggu

SEQ ID NO: 395562 - RNA, 21 nt, Artificial Sequence
  Synthetic
gguugaggggccacaucuggu

SEQ ID NO: 395563 - RNA, 22 nt, Artificial Sequence
  Synthetic
agguugaggggccacaucuggu

SEQ ID NO: 395564 - RNA, 23 nt, Artificial Sequence
  Synthetic
aagguugaggggccacaucuggu

SEQ ID NO: 395565 - RNA, 24 nt, Artificial Sequence
  Synthetic
caagguugaggggccacaucuggu

SEQ ID NO: 395566 - RNA, 18 nt, Artificial Sequence
  Synthetic
cuuggaagcucaucuggu

SEQ ID NO: 395567 - RNA, 19 nt, Artificial Sequence
  Synthetic
ucuuggaagcucaucuggu

SEQ ID NO: 395568 - RNA, 20 nt, Artificial Sequence
  Synthetic
uucuuggaagcucaucuggu

SEQ ID NO: 395569 - RNA, 21 nt, Artificial Sequence
  Synthetic
uuucuuggaagcucaucuggu

SEQ ID NO: 395570 - RNA, 22 nt, Artificial Sequence
  Synthetic
uuuucuuggaagcucaucuggu

SEQ ID NO: 395571 - RNA, 23 nt, Artificial Sequence
  Synthetic
uuuuucuuggaagcucaucuggu

SEQ ID NO: 395572 - RNA, 24 nt, Artificial Sequence
  Synthetic
auuuuucuuggaagcucaucuggu

SEQ ID NO: 395573 - RNA, 18 nt, Artificial Sequence
  Synthetic
ugcauuuucugaucuggu

SEQ ID NO: 395574 - RNA, 19 nt, Artificial Sequence
  Synthetic
cugcauuuucugaucuggu

SEQ ID NO: 395575 - RNA, 20 nt, Artificial Sequence
  Synthetic
acugcauuuucugaucuggu

SEQ ID NO: 395576 - RNA, 21 nt, Artificial Sequence
  Synthetic
aacugcauuuucugaucuggu

SEQ ID NO: 395577 - RNA, 22 nt, Artificial Sequence
  Synthetic
caacugcauuuucugaucuggu

SEQ ID NO: 395578 - RNA, 23 nt, Artificial Sequence
  Synthetic
ccaacugcauuuucugaucuggu

SEQ ID NO: 395579 - RNA, 24 nt, Artificial Sequence
  Synthetic
uccaacugcauuuucugaucuggu

SEQ ID NO: 395580 - RNA, 18 nt, Artificial Sequence
  Synthetic
caaauguaccacucuggu

SEQ ID NO: 395581 - RNA, 19 nt, Artificial Sequence
  Synthetic
acaaauguaccacucuggu

SEQ ID NO: 395582 - RNA, 20 nt, Artificial Sequence
  Synthetic
aacaaauguaccacucuggu

SEQ ID NO: 395583 - RNA, 21 nt, Artificial Sequence
  Synthetic
uaacaaauguaccacucuggu

SEQ ID NO: 395584 - RNA, 22 nt, Artificial Sequence
  Synthetic
auaacaaauguaccacucuggu

SEQ ID NO: 395585 - RNA, 23 nt, Artificial Sequence
  Synthetic
uauaacaaauguaccacucuggu

SEQ ID NO: 395586 - RNA, 24 nt, Artificial Sequence
  Synthetic
uuauaacaaauguaccacucuggu

SEQ ID NO: 395587 - RNA, 18 nt, Artificial Sequence
  Synthetic
uucaaaucauucucuggu

SEQ ID NO: 395588 - RNA, 19 nt, Artificial Sequence
  Synthetic
uuucaaaucauucucuggu

SEQ ID NO: 395589 - RNA, 20 nt, Artificial Sequence
  Synthetic
uuuucaaaucauucucuggu

SEQ ID NO: 395590 - RNA, 21 nt, Artificial Sequence
  Synthetic
guuuucaaaucauucucuggu

SEQ ID NO: 395591 - RNA, 22 nt, Artificial Sequence
  Synthetic
gguuuucaaaucauucucuggu

SEQ ID NO: 395592 - RNA, 23 nt, Artificial Sequence
  Synthetic
ugguuuucaaaucauucucuggu

SEQ ID NO: 395593 - RNA, 24 nt, Artificial Sequence
  Synthetic
augguuuucaaaucauucucuggu

SEQ ID NO: 395594 - RNA, 18 nt, Artificial Sequence
  Synthetic
ggaauuagauucucuggu

SEQ ID NO: 395595 - RNA, 19 nt, Artificial Sequence
  Synthetic
uggaauuagauucucuggu

SEQ ID NO: 395596 - RNA, 20 nt, Artificial Sequence
  Synthetic
auggaauuagauucucuggu

SEQ ID NO: 395597 - RNA, 21 nt, Artificial Sequence
  Synthetic
uauggaauuagauucucuggu

SEQ ID NO: 395598 - RNA, 22 nt, Artificial Sequence
  Synthetic
uuauggaauuagauucucuggu

SEQ ID NO: 395599 - RNA, 23 nt, Artificial Sequence
  Synthetic
cuuauggaauuagauucucuggu

SEQ ID NO: 395600 - RNA, 24 nt, Artificial Sequence
  Synthetic
acuuauggaauuagauucucuggu

SEQ ID NO: 395601 - RNA, 18 nt, Artificial Sequence
  Synthetic
gagacacagaauucuggu

SEQ ID NO: 395602 - RNA, 19 nt, Artificial Sequence
  Synthetic
ugagacacagaauucuggu

SEQ ID NO: 395603 - RNA, 20 nt, Artificial Sequence
  Synthetic
cugagacacagaauucuggu

SEQ ID NO: 395604 - RNA, 21 nt, Artificial Sequence
  Synthetic
gcugagacacagaauucuggu

SEQ ID NO: 395605 - RNA, 22 nt, Artificial Sequence
  Synthetic
ugcugagacacagaauucuggu

SEQ ID NO: 395606 - RNA, 23 nt, Artificial Sequence
  Synthetic
uugcugagacacagaauucuggu

SEQ ID NO: 395607 - RNA, 24 nt, Artificial Sequence
  Synthetic
uuugcugagacacagaauucuggu

SEQ ID NO: 395608 - RNA, 18 nt, Artificial Sequence
  Synthetic
ugauuugauuuuucuggu

SEQ ID NO: 395609 - RNA, 19 nt, Artificial Sequence
  Synthetic
cugauuugauuuuucuggu

SEQ ID NO: 395610 - RNA, 20 nt, Artificial Sequence
  Synthetic
ucugauuugauuuuucuggu

SEQ ID NO: 395611 - RNA, 21 nt, Artificial Sequence
  Synthetic
uucugauuugauuuuucuggu

SEQ ID NO: 395612 - RNA, 22 nt, Artificial Sequence
  Synthetic
auucugauuugauuuuucuggu

SEQ ID NO: 395613 - RNA, 23 nt, Artificial Sequence
  Synthetic
aauucugauuugauuuuucuggu

SEQ ID NO: 395614 - RNA, 24 nt, Artificial Sequence
  Synthetic
aaauucugauuugauuuuucuggu

SEQ ID NO: 395615 - RNA, 18 nt, Artificial Sequence
  Synthetic
gggugcacaaacaguggu

SEQ ID NO: 395616 - RNA, 19 nt, Artificial Sequence
  Synthetic
ugggugcacaaacaguggu

SEQ ID NO: 395617 - RNA, 20 nt, Artificial Sequence
  Synthetic
cugggugcacaaacaguggu

SEQ ID NO: 395618 - RNA, 21 nt, Artificial Sequence
  Synthetic
ccugggugcacaaacaguggu

SEQ ID NO: 395619 - RNA, 22 nt, Artificial Sequence
  Synthetic
accugggugcacaaacaguggu

SEQ ID NO: 395620 - RNA, 23 nt, Artificial Sequence
  Synthetic
caccugggugcacaaacaguggu

SEQ ID NO: 395621 - RNA, 24 nt, Artificial Sequence
  Synthetic
gcaccugggugcacaaacaguggu

SEQ ID NO: 395622 - RNA, 18 nt, Artificial Sequence
  Synthetic
ugaacuauucccaguggu

SEQ ID NO: 395623 - RNA, 19 nt, Artificial Sequence
  Synthetic
gugaacuauucccaguggu

SEQ ID NO: 395624 - RNA, 20 nt, Artificial Sequence
  Synthetic
agugaacuauucccaguggu

SEQ ID NO: 395625 - RNA, 21 nt, Artificial Sequence
  Synthetic
cagugaacuauucccaguggu

SEQ ID NO: 395626 - RNA, 22 nt, Artificial Sequence
  Synthetic
gcagugaacuauucccaguggu

SEQ ID NO: 395627 - RNA, 23 nt, Artificial Sequence
  Synthetic
ggcagugaacuauucccaguggu

SEQ ID NO: 395628 - RNA, 24 nt, Artificial Sequence
  Synthetic
aggcagugaacuauucccaguggu

SEQ ID NO: 395629 - RNA, 18 nt, Artificial Sequence
  Synthetic
aagguuauaagcaguggu

SEQ ID NO: 395630 - RNA, 19 nt, Artificial Sequence
  Synthetic
caagguuauaagcaguggu

SEQ ID NO: 395631 - RNA, 20 nt, Artificial Sequence
  Synthetic
ccaagguuauaagcaguggu

SEQ ID NO: 395632 - RNA, 21 nt, Artificial Sequence
  Synthetic
uccaagguuauaagcaguggu

SEQ ID NO: 395633 - RNA, 22 nt, Artificial Sequence
  Synthetic
uuccaagguuauaagcaguggu

SEQ ID NO: 395634 - RNA, 23 nt, Artificial Sequence
  Synthetic
auuccaagguuauaagcaguggu

SEQ ID NO: 395635 - RNA, 24 nt, Artificial Sequence
  Synthetic
aauuccaagguuauaagcaguggu

SEQ ID NO: 395636 - RNA, 18 nt, Artificial Sequence
  Synthetic
aauucuaauagcaguggu

SEQ ID NO: 395637 - RNA, 19 nt, Artificial Sequence
  Synthetic
aaauucuaauagcaguggu

SEQ ID NO: 395638 - RNA, 20 nt, Artificial Sequence
  Synthetic
aaaauucuaauagcaguggu

SEQ ID NO: 395639 - RNA, 21 nt, Artificial Sequence
  Synthetic
uaaaauucuaauagcaguggu

SEQ ID NO: 395640 - RNA, 22 nt, Artificial Sequence
  Synthetic
auaaaauucuaauagcaguggu

SEQ ID NO: 395641 - RNA, 23 nt, Artificial Sequence
  Synthetic
cauaaaauucuaauagcaguggu

SEQ ID NO: 395642 - RNA, 24 nt, Artificial Sequence
  Synthetic
ccauaaaauucuaauagcaguggu

SEQ ID NO: 395643 - RNA, 18 nt, Artificial Sequence
  Synthetic
gauaaaucuagcaguggu

SEQ ID NO: 395644 - RNA, 19 nt, Artificial Sequence
  Synthetic
agauaaaucuagcaguggu

SEQ ID NO: 395645 - RNA, 20 nt, Artificial Sequence
  Synthetic
aagauaaaucuagcaguggu

SEQ ID NO: 395646 - RNA, 21 nt, Artificial Sequence
  Synthetic
gaagauaaaucuagcaguggu

SEQ ID NO: 395647 - RNA, 22 nt, Artificial Sequence
  Synthetic
ggaagauaaaucuagcaguggu

SEQ ID NO: 395648 - RNA, 23 nt, Artificial Sequence
  Synthetic
aggaagauaaaucuagcaguggu

SEQ ID NO: 395649 - RNA, 24 nt, Artificial Sequence
  Synthetic
uaggaagauaaaucuagcaguggu

SEQ ID NO: 395650 - RNA, 18 nt, Artificial Sequence
  Synthetic
auguugaauaggaguggu

SEQ ID NO: 395651 - RNA, 19 nt, Artificial Sequence
  Synthetic
uauguugaauaggaguggu

SEQ ID NO: 395652 - RNA, 20 nt, Artificial Sequence
  Synthetic
cuauguugaauaggaguggu

SEQ ID NO: 395653 - RNA, 21 nt, Artificial Sequence
  Synthetic
acuauguugaauaggaguggu

SEQ ID NO: 395654 - RNA, 22 nt, Artificial Sequence
  Synthetic
cacuauguugaauaggaguggu

SEQ ID NO: 395655 - RNA, 23 nt, Artificial Sequence
  Synthetic
acacuauguugaauaggaguggu

SEQ ID NO: 395656 - RNA, 24 nt, Artificial Sequence
  Synthetic
aacacuauguugaauaggaguggu

SEQ ID NO: 395657 - RNA, 22 nt, Artificial Sequence
  Synthetic
uacuauguugaauaggaguggu

SEQ ID NO: 395658 - RNA, 23 nt, Artificial Sequence
  Synthetic
auacuauguugaauaggaguggu

SEQ ID NO: 395659 - RNA, 24 nt, Artificial Sequence
  Synthetic
aauacuauguugaauaggaguggu

SEQ ID NO: 395660 - RNA, 18 nt, Artificial Sequence
  Synthetic
gaucauucugguaguggu

SEQ ID NO: 395661 - RNA, 19 nt, Artificial Sequence
  Synthetic
agaucauucugguaguggu

SEQ ID NO: 395662 - RNA, 20 nt, Artificial Sequence
  Synthetic
aagaucauucugguaguggu

SEQ ID NO: 395663 - RNA, 21 nt, Artificial Sequence
  Synthetic
aaagaucauucugguaguggu

SEQ ID NO: 395664 - RNA, 22 nt, Artificial Sequence
  Synthetic
aaaagaucauucugguaguggu

SEQ ID NO: 395665 - RNA, 23 nt, Artificial Sequence
  Synthetic
uaaaagaucauucugguaguggu

SEQ ID NO: 395666 - RNA, 24 nt, Artificial Sequence
  Synthetic
uuaaaagaucauucugguaguggu

SEQ ID NO: 395667 - RNA, 18 nt, Artificial Sequence
  Synthetic
cuuagucucugagguggu

SEQ ID NO: 395668 - RNA, 19 nt, Artificial Sequence
  Synthetic
ccuuagucucugagguggu

SEQ ID NO: 395669 - RNA, 20 nt, Artificial Sequence
  Synthetic
cccuuagucucugagguggu

SEQ ID NO: 395670 - RNA, 21 nt, Artificial Sequence
  Synthetic
acccuuagucucugagguggu

SEQ ID NO: 395671 - RNA, 22 nt, Artificial Sequence
  Synthetic
uacccuuagucucugagguggu

SEQ ID NO: 395672 - RNA, 23 nt, Artificial Sequence
  Synthetic
auacccuuagucucugagguggu

SEQ ID NO: 395673 - RNA, 24 nt, Artificial Sequence
  Synthetic
aauacccuuagucucugagguggu

SEQ ID NO: 395674 - RNA, 18 nt, Artificial Sequence
  Synthetic
guggauuuuugcgguggu

SEQ ID NO: 395675 - RNA, 19 nt, Artificial Sequence
  Synthetic
uguggauuuuugcgguggu

SEQ ID NO: 395676 - RNA, 20 nt, Artificial Sequence
  Synthetic
auguggauuuuugcgguggu

SEQ ID NO: 395677 - RNA, 21 nt, Artificial Sequence
  Synthetic
uauguggauuuuugcgguggu

SEQ ID NO: 395678 - RNA, 22 nt, Artificial Sequence
  Synthetic
auauguggauuuuugcgguggu

SEQ ID NO: 395679 - RNA, 23 nt, Artificial Sequence
  Synthetic
aauauguggauuuuugcgguggu

SEQ ID NO: 395680 - RNA, 24 nt, Artificial Sequence
  Synthetic
gaauauguggauuuuugcgguggu

SEQ ID NO: 395681 - RNA, 18 nt, Artificial Sequence
  Synthetic
uguagguggaaggguggu

SEQ ID NO: 395682 - RNA, 19 nt, Artificial Sequence
  Synthetic
auguagguggaaggguggu

SEQ ID NO: 395683 - RNA, 20 nt, Artificial Sequence
  Synthetic
uauguagguggaaggguggu

SEQ ID NO: 395684 - RNA, 21 nt, Artificial Sequence
  Synthetic
guauguagguggaaggguggu

SEQ ID NO: 395685 - RNA, 22 nt, Artificial Sequence
  Synthetic
uguauguagguggaaggguggu

SEQ ID NO: 395686 - RNA, 23 nt, Artificial Sequence
  Synthetic
uuguauguagguggaaggguggu

SEQ ID NO: 395687 - RNA, 24 nt, Artificial Sequence
  Synthetic
guuguauguagguggaaggguggu

SEQ ID NO: 395688 - RNA, 18 nt, Artificial Sequence
  Synthetic
uuacccgggugugguggu

SEQ ID NO: 395689 - RNA, 19 nt, Artificial Sequence
  Synthetic
auuacccgggugugguggu

SEQ ID NO: 395690 - RNA, 20 nt, Artificial Sequence
  Synthetic
aauuacccgggugugguggu

SEQ ID NO: 395691 - RNA, 21 nt, Artificial Sequence
  Synthetic
aaauuacccgggugugguggu

SEQ ID NO: 395692 - RNA, 22 nt, Artificial Sequence
  Synthetic
aaaauuacccgggugugguggu

SEQ ID NO: 395693 - RNA, 23 nt, Artificial Sequence
  Synthetic
aaaaauuacccgggugugguggu

SEQ ID NO: 395694 - RNA, 24 nt, Artificial Sequence
  Synthetic
caaaaauuacccgggugugguggu

SEQ ID NO: 395695 - RNA, 18 nt, Artificial Sequence
  Synthetic
uugaaaagaaaauguggu

SEQ ID NO: 395696 - RNA, 19 nt, Artificial Sequence
  Synthetic
auugaaaagaaaauguggu

SEQ ID NO: 395697 - RNA, 20 nt, Artificial Sequence
  Synthetic
aauugaaaagaaaauguggu

SEQ ID NO: 395698 - RNA, 21 nt, Artificial Sequence
  Synthetic
gaauugaaaagaaaauguggu

SEQ ID NO: 395699 - RNA, 22 nt, Artificial Sequence
  Synthetic
ugaauugaaaagaaaauguggu

SEQ ID NO: 395700 - RNA, 23 nt, Artificial Sequence
  Synthetic
augaauugaaaagaaaauguggu

SEQ ID NO: 395701 - RNA, 24 nt, Artificial Sequence
  Synthetic
gaugaauugaaaagaaaauguggu

SEQ ID NO: 395702 - RNA, 18 nt, Artificial Sequence
  Synthetic
gggagaggugaauguggu

SEQ ID NO: 395703 - RNA, 19 nt, Artificial Sequence
  Synthetic
ugggagaggugaauguggu

SEQ ID NO: 395704 - RNA, 20 nt, Artificial Sequence
  Synthetic
augggagaggugaauguggu

SEQ ID NO: 395705 - RNA, 21 nt, Artificial Sequence
  Synthetic
aaugggagaggugaauguggu

SEQ ID NO: 395706 - RNA, 22 nt, Artificial Sequence
  Synthetic
gaaugggagaggugaauguggu

SEQ ID NO: 395707 - RNA, 23 nt, Artificial Sequence
  Synthetic
agaaugggagaggugaauguggu

SEQ ID NO: 395708 - RNA, 24 nt, Artificial Sequence
  Synthetic
cagaaugggagaggugaauguggu

SEQ ID NO: 395709 - RNA, 18 nt, Artificial Sequence
  Synthetic
guuuuauuccacuguggu

SEQ ID NO: 395710 - RNA, 19 nt, Artificial Sequence
  Synthetic
aguuuuauuccacuguggu

SEQ ID NO: 395711 - RNA, 20 nt, Artificial Sequence
  Synthetic
uaguuuuauuccacuguggu

SEQ ID NO: 395712 - RNA, 21 nt, Artificial Sequence
  Synthetic
uuaguuuuauuccacuguggu

SEQ ID NO: 395713 - RNA, 22 nt, Artificial Sequence
  Synthetic
uuuaguuuuauuccacuguggu

SEQ ID NO: 395714 - RNA, 23 nt, Artificial Sequence
  Synthetic
uuuuaguuuuauuccacuguggu

SEQ ID NO: 395715 - RNA, 24 nt, Artificial Sequence
  Synthetic
uuuuuaguuuuauuccacuguggu

SEQ ID NO: 395716 - RNA, 18 nt, Artificial Sequence
  Synthetic
guuugauugcacuguggu

SEQ ID NO: 395717 - RNA, 19 nt, Artificial Sequence
  Synthetic
aguuugauugcacuguggu

SEQ ID NO: 395718 - RNA, 20 nt, Artificial Sequence
  Synthetic
uaguuugauugcacuguggu

SEQ ID NO: 395719 - RNA, 21 nt, Artificial Sequence
  Synthetic
cuaguuugauugcacuguggu

SEQ ID NO: 395720 - RNA, 22 nt, Artificial Sequence
  Synthetic
ucuaguuugauugcacuguggu

SEQ ID NO: 395721 - RNA, 23 nt, Artificial Sequence
  Synthetic
uucuaguuugauugcacuguggu

SEQ ID NO: 395722 - RNA, 24 nt, Artificial Sequence
  Synthetic
guucuaguuugauugcacuguggu

SEQ ID NO: 395723 - RNA, 18 nt, Artificial Sequence
  Synthetic
auuauucacaccuguggu

SEQ ID NO: 395724 - RNA, 19 nt, Artificial Sequence
  Synthetic
aauuauucacaccuguggu

SEQ ID NO: 395725 - RNA, 20 nt, Artificial Sequence
  Synthetic
uaauuauucacaccuguggu

SEQ ID NO: 395726 - RNA, 21 nt, Artificial Sequence
  Synthetic
uuaauuauucacaccuguggu

SEQ ID NO: 395727 - RNA, 22 nt, Artificial Sequence
  Synthetic
auuaauuauucacaccuguggu

SEQ ID NO: 395728 - RNA, 23 nt, Artificial Sequence
  Synthetic
aauuaauuauucacaccuguggu

SEQ ID NO: 395729 - RNA, 24 nt, Artificial Sequence
  Synthetic
aaauuaauuauucacaccuguggu

SEQ ID NO: 395730 - RNA, 18 nt, Artificial Sequence
  Synthetic
uuauaauuucucuguggu

SEQ ID NO: 395731 - RNA, 19 nt, Artificial Sequence
  Synthetic
uuuauaauuucucuguggu

SEQ ID NO: 395732 - RNA, 20 nt, Artificial Sequence
  Synthetic
auuuauaauuucucuguggu

SEQ ID NO: 395733 - RNA, 21 nt, Artificial Sequence
  Synthetic
cauuuauaauuucucuguggu

SEQ ID NO: 395734 - RNA, 22 nt, Artificial Sequence
  Synthetic
acauuuauaauuucucuguggu

SEQ ID NO: 395735 - RNA, 23 nt, Artificial Sequence
  Synthetic
aacauuuauaauuucucuguggu

SEQ ID NO: 395736 - RNA, 24 nt, Artificial Sequence
  Synthetic
aaacauuuauaauuucucuguggu

SEQ ID NO: 395737 - RNA, 18 nt, Artificial Sequence
  Synthetic
uacuuguuaaaguguggu

SEQ ID NO: 395738 - RNA, 19 nt, Artificial Sequence
  Synthetic
uuacuuguuaaaguguggu

SEQ ID NO: 395739 - RNA, 20 nt, Artificial Sequence
  Synthetic
auuacuuguuaaaguguggu

SEQ ID NO: 395740 - RNA, 21 nt, Artificial Sequence
  Synthetic
uauuacuuguuaaaguguggu

SEQ ID NO: 395741 - RNA, 22 nt, Artificial Sequence
  Synthetic
auauuacuuguuaaaguguggu

SEQ ID NO: 395742 - RNA, 23 nt, Artificial Sequence
  Synthetic
aauauuacuuguuaaaguguggu

SEQ ID NO: 395743 - RNA, 24 nt, Artificial Sequence
  Synthetic
aaauauuacuuguuaaaguguggu

SEQ ID NO: 395744 - RNA, 18 nt, Artificial Sequence
  Synthetic
ugguuggccaaguguggu

SEQ ID NO: 395745 - RNA, 19 nt, Artificial Sequence
  Synthetic
augguuggccaaguguggu

SEQ ID NO: 395746 - RNA, 20 nt, Artificial Sequence
  Synthetic
caugguuggccaaguguggu

SEQ ID NO: 395747 - RNA, 21 nt, Artificial Sequence
  Synthetic
gcaugguuggccaaguguggu

SEQ ID NO: 395748 - RNA, 22 nt, Artificial Sequence
  Synthetic
ggcaugguuggccaaguguggu

SEQ ID NO: 395749 - RNA, 23 nt, Artificial Sequence
  Synthetic
uggcaugguuggccaaguguggu

SEQ ID NO: 395750 - RNA, 24 nt, Artificial Sequence
  Synthetic
uuggcaugguuggccaaguguggu

SEQ ID NO: 395751 - RNA, 18 nt, Artificial Sequence
  Synthetic
uauugucuauaguguggu

SEQ ID NO: 395752 - RNA, 19 nt, Artificial Sequence
  Synthetic
uuauugucuauaguguggu

SEQ ID NO: 395753 - RNA, 20 nt, Artificial Sequence
  Synthetic
auuauugucuauaguguggu

SEQ ID NO: 395754 - RNA, 21 nt, Artificial Sequence
  Synthetic
uauuauugucuauaguguggu

SEQ ID NO: 395755 - RNA, 22 nt, Artificial Sequence
  Synthetic
guauuauugucuauaguguggu

SEQ ID NO: 395756 - RNA, 23 nt, Artificial Sequence
  Synthetic
gguauuauugucuauaguguggu

SEQ ID NO: 395757 - RNA, 24 nt, Artificial Sequence
  Synthetic
ggguauuauugucuauaguguggu

SEQ ID NO: 395758 - RNA, 18 nt, Artificial Sequence
  Synthetic
gucucauuccauuguggu

SEQ ID NO: 395759 - RNA, 19 nt, Artificial Sequence
  Synthetic
agucucauuccauuguggu

SEQ ID NO: 395760 - RNA, 20 nt, Artificial Sequence
  Synthetic
uagucucauuccauuguggu

SEQ ID NO: 395761 - RNA, 21 nt, Artificial Sequence
  Synthetic
cuagucucauuccauuguggu

SEQ ID NO: 395762 - RNA, 22 nt, Artificial Sequence
  Synthetic
ucuagucucauuccauuguggu

SEQ ID NO: 395763 - RNA, 23 nt, Artificial Sequence
  Synthetic
uucuagucucauuccauuguggu

SEQ ID NO: 395764 - RNA, 24 nt, Artificial Sequence
  Synthetic
uuucuagucucauuccauuguggu

SEQ ID NO: 395765 - RNA, 18 nt, Artificial Sequence
  Synthetic
cgauuuuaagauuguggu

SEQ ID NO: 395766 - RNA, 19 nt, Artificial Sequence
  Synthetic
ucgauuuuaagauuguggu

SEQ ID NO: 395767 - RNA, 20 nt, Artificial Sequence
  Synthetic
gucgauuuuaagauuguggu

SEQ ID NO: 395768 - RNA, 21 nt, Artificial Sequence
  Synthetic
ugucgauuuuaagauuguggu

SEQ ID NO: 395769 - RNA, 22 nt, Artificial Sequence
  Synthetic
uugucgauuuuaagauuguggu

SEQ ID NO: 395770 - RNA, 23 nt, Artificial Sequence
  Synthetic
auugucgauuuuaagauuguggu

SEQ ID NO: 395771 - RNA, 24 nt, Artificial Sequence
  Synthetic
aauugucgauuuuaagauuguggu

SEQ ID NO: 395772 - RNA, 18 nt, Artificial Sequence
  Synthetic
cuaauuuuauauuguggu

SEQ ID NO: 395773 - RNA, 19 nt, Artificial Sequence
  Synthetic
ucuaauuuuauauuguggu

SEQ ID NO: 395774 - RNA, 20 nt, Artificial Sequence
  Synthetic
uucuaauuuuauauuguggu

SEQ ID NO: 395775 - RNA, 21 nt, Artificial Sequence
  Synthetic
uuucuaauuuuauauuguggu

SEQ ID NO: 395776 - RNA, 22 nt, Artificial Sequence
  Synthetic
auuucuaauuuuauauuguggu

SEQ ID NO: 395777 - RNA, 23 nt, Artificial Sequence
  Synthetic
gauuucuaauuuuauauuguggu

SEQ ID NO: 395778 - RNA, 24 nt, Artificial Sequence
  Synthetic
ugauuucuaauuuuauauuguggu

SEQ ID NO: 395779 - RNA, 18 nt, Artificial Sequence
  Synthetic
ggaggcauagguuguggu

SEQ ID NO: 395780 - RNA, 19 nt, Artificial Sequence
  Synthetic
uggaggcauagguuguggu

SEQ ID NO: 395781 - RNA, 20 nt, Artificial Sequence
  Synthetic
cuggaggcauagguuguggu

SEQ ID NO: 395782 - RNA, 21 nt, Artificial Sequence
  Synthetic
ccuggaggcauagguuguggu

SEQ ID NO: 395783 - RNA, 22 nt, Artificial Sequence
  Synthetic
cccuggaggcauagguuguggu

SEQ ID NO: 395784 - RNA, 23 nt, Artificial Sequence
  Synthetic
acccuggaggcauagguuguggu

SEQ ID NO: 395785 - RNA, 24 nt, Artificial Sequence
  Synthetic
cacccuggaggcauagguuguggu

SEQ ID NO: 395786 - RNA, 18 nt, Artificial Sequence
  Synthetic
uaacuuguuauuuguggu

SEQ ID NO: 395787 - RNA, 19 nt, Artificial Sequence
  Synthetic
auaacuuguuauuuguggu

SEQ ID NO: 395788 - RNA, 20 nt, Artificial Sequence
  Synthetic
aauaacuuguuauuuguggu

SEQ ID NO: 395789 - RNA, 21 nt, Artificial Sequence
  Synthetic
uaauaacuuguuauuuguggu

SEQ ID NO: 395790 - RNA, 22 nt, Artificial Sequence
  Synthetic
uuaauaacuuguuauuuguggu

SEQ ID NO: 395791 - RNA, 23 nt, Artificial Sequence
  Synthetic
cuuaauaacuuguuauuuguggu

SEQ ID NO: 395792 - RNA, 24 nt, Artificial Sequence
  Synthetic
ccuuaauaacuuguuauuuguggu

SEQ ID NO: 395793 - RNA, 18 nt, Artificial Sequence
  Synthetic
auacacuuuauuuguggu

SEQ ID NO: 395794 - RNA, 19 nt, Artificial Sequence
  Synthetic
cauacacuuuauuuguggu

SEQ ID NO: 395795 - RNA, 20 nt, Artificial Sequence
  Synthetic
acauacacuuuauuuguggu

SEQ ID NO: 395796 - RNA, 21 nt, Artificial Sequence
  Synthetic
cacauacacuuuauuuguggu

SEQ ID NO: 395797 - RNA, 22 nt, Artificial Sequence
  Synthetic
ucacauacacuuuauuuguggu

SEQ ID NO: 395798 - RNA, 23 nt, Artificial Sequence
  Synthetic
cucacauacacuuuauuuguggu

SEQ ID NO: 395799 - RNA, 24 nt, Artificial Sequence
  Synthetic
ccucacauacacuuuauuuguggu

SEQ ID NO: 395800 - RNA, 18 nt, Artificial Sequence
  Synthetic
guuuuugaacuuuguggu

SEQ ID NO: 395801 - RNA, 19 nt, Artificial Sequence
  Synthetic
uguuuuugaacuuuguggu

SEQ ID NO: 395802 - RNA, 20 nt, Artificial Sequence
  Synthetic
uuguuuuugaacuuuguggu

SEQ ID NO: 395803 - RNA, 21 nt, Artificial Sequence
  Synthetic
uuuguuuuugaacuuuguggu

SEQ ID NO: 395804 - RNA, 22 nt, Artificial Sequence
  Synthetic
guuuguuuuugaacuuuguggu

SEQ ID NO: 395805 - RNA, 23 nt, Artificial Sequence
  Synthetic
uguuuguuuuugaacuuuguggu

SEQ ID NO: 395806 - RNA, 24 nt, Artificial Sequence
  Synthetic
uuguuuguuuuugaacuuuguggu

SEQ ID NO: 395807 - RNA, 18 nt, Artificial Sequence
  Synthetic
gggagugcaguuuguggu

SEQ ID NO: 395808 - RNA, 19 nt, Artificial Sequence
  Synthetic
ggggagugcaguuuguggu

SEQ ID NO: 395809 - RNA, 20 nt, Artificial Sequence
  Synthetic
uggggagugcaguuuguggu

SEQ ID NO: 395810 - RNA, 21 nt, Artificial Sequence
  Synthetic
guggggagugcaguuuguggu

SEQ ID NO: 395811 - RNA, 22 nt, Artificial Sequence
  Synthetic
uguggggagugcaguuuguggu

SEQ ID NO: 395812 - RNA, 23 nt, Artificial Sequence
  Synthetic
uuguggggagugcaguuuguggu

SEQ ID NO: 395813 - RNA, 24 nt, Artificial Sequence
  Synthetic
uuuguggggagugcaguuuguggu

SEQ ID NO: 395814 - RNA, 18 nt, Artificial Sequence
  Synthetic
ucaacaacauuuuguggu

SEQ ID NO: 395815 - RNA, 19 nt, Artificial Sequence
  Synthetic
cucaacaacauuuuguggu

SEQ ID NO: 395816 - RNA, 20 nt, Artificial Sequence
  Synthetic
ucucaacaacauuuuguggu

SEQ ID NO: 395817 - RNA, 21 nt, Artificial Sequence
  Synthetic
uucucaacaacauuuuguggu

SEQ ID NO: 395818 - RNA, 22 nt, Artificial Sequence
  Synthetic
uuucucaacaacauuuuguggu

SEQ ID NO: 395819 - RNA, 23 nt, Artificial Sequence
  Synthetic
auuucucaacaacauuuuguggu

SEQ ID NO: 395820 - RNA, 24 nt, Artificial Sequence
  Synthetic
aauuucucaacaacauuuuguggu

SEQ ID NO: 395821 - RNA, 18 nt, Artificial Sequence
  Synthetic
cuuauuauuuuuuguggu

SEQ ID NO: 395822 - RNA, 19 nt, Artificial Sequence
  Synthetic
acuuauuauuuuuuguggu

SEQ ID NO: 395823 - RNA, 20 nt, Artificial Sequence
  Synthetic
uacuuauuauuuuuuguggu

SEQ ID NO: 395824 - RNA, 21 nt, Artificial Sequence
  Synthetic
auacuuauuauuuuuuguggu

SEQ ID NO: 395825 - RNA, 22 nt, Artificial Sequence
  Synthetic
cauacuuauuauuuuuuguggu

SEQ ID NO: 395826 - RNA, 23 nt, Artificial Sequence
  Synthetic
acauacuuauuauuuuuuguggu

SEQ ID NO: 395827 - RNA, 24 nt, Artificial Sequence
  Synthetic
uacauacuuauuauuuuuuguggu

SEQ ID NO: 395828 - RNA, 18 nt, Artificial Sequence
  Synthetic
aauaaacugaaaauuggu

SEQ ID NO: 395829 - RNA, 19 nt, Artificial Sequence
  Synthetic
aaauaaacugaaaauuggu

SEQ ID NO: 395830 - RNA, 20 nt, Artificial Sequence
  Synthetic
gaaauaaacugaaaauuggu

SEQ ID NO: 395831 - RNA, 21 nt, Artificial Sequence
  Synthetic
ggaaauaaacugaaaauuggu

SEQ ID NO: 395832 - RNA, 22 nt, Artificial Sequence
  Synthetic
aggaaauaaacugaaaauuggu

SEQ ID NO: 395833 - RNA, 23 nt, Artificial Sequence
  Synthetic
aaggaaauaaacugaaaauuggu

SEQ ID NO: 395834 - RNA, 24 nt, Artificial Sequence
  Synthetic
aaaggaaauaaacugaaaauuggu

SEQ ID NO: 395835 - RNA, 18 nt, Artificial Sequence
  Synthetic
cauucuuuugaaauuggu

SEQ ID NO: 395836 - RNA, 19 nt, Artificial Sequence
  Synthetic
ucauucuuuugaaauuggu

SEQ ID NO: 395837 - RNA, 20 nt, Artificial Sequence
  Synthetic
aucauucuuuugaaauuggu

SEQ ID NO: 395838 - RNA, 21 nt, Artificial Sequence
  Synthetic
uaucauucuuuugaaauuggu

SEQ ID NO: 395839 - RNA, 22 nt, Artificial Sequence
  Synthetic
cuaucauucuuuugaaauuggu

SEQ ID NO: 395840 - RNA, 23 nt, Artificial Sequence
  Synthetic
gcuaucauucuuuugaaauuggu

SEQ ID NO: 395841 - RNA, 24 nt, Artificial Sequence
  Synthetic
agcuaucauucuuuugaaauuggu

SEQ ID NO: 395842 - RNA, 18 nt, Artificial Sequence
  Synthetic
cauucuauaggaauuggu

SEQ ID NO: 395843 - RNA, 19 nt, Artificial Sequence
  Synthetic
acauucuauaggaauuggu

SEQ ID NO: 395844 - RNA, 20 nt, Artificial Sequence
  Synthetic
gacauucuauaggaauuggu

SEQ ID NO: 395845 - RNA, 21 nt, Artificial Sequence
  Synthetic
ugacauucuauaggaauuggu

SEQ ID NO: 395846 - RNA, 22 nt, Artificial Sequence
  Synthetic
uugacauucuauaggaauuggu

SEQ ID NO: 395847 - RNA, 23 nt, Artificial Sequence
  Synthetic
auugacauucuauaggaauuggu

SEQ ID NO: 395848 - RNA, 24 nt, Artificial Sequence
  Synthetic
cauugacauucuauaggaauuggu

SEQ ID NO: 395849 - RNA, 18 nt, Artificial Sequence
  Synthetic
caacaaggcuuaauuggu

SEQ ID NO: 395850 - RNA, 19 nt, Artificial Sequence
  Synthetic
ucaacaaggcuuaauuggu

SEQ ID NO: 395851 - RNA, 20 nt, Artificial Sequence
  Synthetic
gucaacaaggcuuaauuggu

SEQ ID NO: 395852 - RNA, 21 nt, Artificial Sequence
  Synthetic
agucaacaaggcuuaauuggu

SEQ ID NO: 395853 - RNA, 22 nt, Artificial Sequence
  Synthetic
uagucaacaaggcuuaauuggu

SEQ ID NO: 395854 - RNA, 23 nt, Artificial Sequence
  Synthetic
guagucaacaaggcuuaauuggu

SEQ ID NO: 395855 - RNA, 24 nt, Artificial Sequence
  Synthetic
uguagucaacaaggcuuaauuggu

SEQ ID NO: 395856 - RNA, 18 nt, Artificial Sequence
  Synthetic
agaaaagcccacauuggu

SEQ ID NO: 395857 - RNA, 19 nt, Artificial Sequence
  Synthetic
aagaaaagcccacauuggu

SEQ ID NO: 395858 - RNA, 20 nt, Artificial Sequence
  Synthetic
aaagaaaagcccacauuggu

SEQ ID NO: 395859 - RNA, 21 nt, Artificial Sequence
  Synthetic
aaaagaaaagcccacauuggu

SEQ ID NO: 395860 - RNA, 22 nt, Artificial Sequence
  Synthetic
caaaagaaaagcccacauuggu

SEQ ID NO: 395861 - RNA, 23 nt, Artificial Sequence
  Synthetic
ccaaaagaaaagcccacauuggu

SEQ ID NO: 395862 - RNA, 24 nt, Artificial Sequence
  Synthetic
accaaaagaaaagcccacauuggu

SEQ ID NO: 395863 - RNA, 18 nt, Artificial Sequence
  Synthetic
uuuauaacugucauuggu

SEQ ID NO: 395864 - RNA, 19 nt, Artificial Sequence
  Synthetic
uuuuauaacugucauuggu

SEQ ID NO: 395865 - RNA, 20 nt, Artificial Sequence
  Synthetic
uuuuuauaacugucauuggu

SEQ ID NO: 395866 - RNA, 21 nt, Artificial Sequence
  Synthetic
uuuuuuauaacugucauuggu

SEQ ID NO: 395867 - RNA, 22 nt, Artificial Sequence
  Synthetic
uuuuuuuauaacugucauuggu

SEQ ID NO: 395868 - RNA, 23 nt, Artificial Sequence
  Synthetic
uuuuuuuuauaacugucauuggu

SEQ ID NO: 395869 - RNA, 24 nt, Artificial Sequence
  Synthetic
uuuuuuuuuauaacugucauuggu

SEQ ID NO: 395870 - RNA, 18 nt, Artificial Sequence
  Synthetic
ccugggugcuucauuggu

SEQ ID NO: 395871 - RNA, 19 nt, Artificial Sequence
  Synthetic
uccugggugcuucauuggu

SEQ ID NO: 395872 - RNA, 20 nt, Artificial Sequence
  Synthetic
uuccugggugcuucauuggu

SEQ ID NO: 395873 - RNA, 21 nt, Artificial Sequence
  Synthetic
uuuccugggugcuucauuggu

SEQ ID NO: 395874 - RNA, 22 nt, Artificial Sequence
  Synthetic
guuuccugggugcuucauuggu

SEQ ID NO: 395875 - RNA, 23 nt, Artificial Sequence
  Synthetic
uguuuccugggugcuucauuggu

SEQ ID NO: 395876 - RNA, 24 nt, Artificial Sequence
  Synthetic
uuguuuccugggugcuucauuggu

SEQ ID NO: 395877 - RNA, 18 nt, Artificial Sequence
  Synthetic
gaaaugauuaagauuggu

SEQ ID NO: 395878 - RNA, 19 nt, Artificial Sequence
  Synthetic
agaaaugauuaagauuggu

SEQ ID NO: 395879 - RNA, 20 nt, Artificial Sequence
  Synthetic
cagaaaugauuaagauuggu

SEQ ID NO: 395880 - RNA, 21 nt, Artificial Sequence
  Synthetic
ucagaaaugauuaagauuggu

SEQ ID NO: 395881 - RNA, 22 nt, Artificial Sequence
  Synthetic
gucagaaaugauuaagauuggu

SEQ ID NO: 395882 - RNA, 23 nt, Artificial Sequence
  Synthetic
agucagaaaugauuaagauuggu

SEQ ID NO: 395883 - RNA, 24 nt, Artificial Sequence
  Synthetic
aagucagaaaugauuaagauuggu

SEQ ID NO: 395884 - RNA, 18 nt, Artificial Sequence
  Synthetic
aaguuuuagcugauuggu

SEQ ID NO: 395885 - RNA, 19 nt, Artificial Sequence
  Synthetic
aaaguuuuagcugauuggu

SEQ ID NO: 395886 - RNA, 20 nt, Artificial Sequence
  Synthetic
caaaguuuuagcugauuggu

SEQ ID NO: 395887 - RNA, 21 nt, Artificial Sequence
  Synthetic
acaaaguuuuagcugauuggu

SEQ ID NO: 395888 - RNA, 22 nt, Artificial Sequence
  Synthetic
gacaaaguuuuagcugauuggu

SEQ ID NO: 395889 - RNA, 23 nt, Artificial Sequence
  Synthetic
ugacaaaguuuuagcugauuggu

SEQ ID NO: 395890 - RNA, 24 nt, Artificial Sequence
  Synthetic
uugacaaaguuuuagcugauuggu

SEQ ID NO: 395891 - RNA, 18 nt, Artificial Sequence
  Synthetic
cugacaauagcuauuggu

SEQ ID NO: 395892 - RNA, 19 nt, Artificial Sequence
  Synthetic
ucugacaauagcuauuggu

SEQ ID NO: 395893 - RNA, 20 nt, Artificial Sequence
  Synthetic
gucugacaauagcuauuggu

SEQ ID NO: 395894 - RNA, 21 nt, Artificial Sequence
  Synthetic
agucugacaauagcuauuggu

SEQ ID NO: 395895 - RNA, 22 nt, Artificial Sequence
  Synthetic
cagucugacaauagcuauuggu

SEQ ID NO: 395896 - RNA, 23 nt, Artificial Sequence
  Synthetic
gcagucugacaauagcuauuggu

SEQ ID NO: 395897 - RNA, 24 nt, Artificial Sequence
  Synthetic
agcagucugacaauagcuauuggu

SEQ ID NO: 395898 - RNA, 18 nt, Artificial Sequence
  Synthetic
acauagauaaaacuuggu

SEQ ID NO: 395899 - RNA, 19 nt, Artificial Sequence
  Synthetic
aacauagauaaaacuuggu

SEQ ID NO: 395900 - RNA, 20 nt, Artificial Sequence
  Synthetic
uaacauagauaaaacuuggu

SEQ ID NO: 395901 - RNA, 21 nt, Artificial Sequence
  Synthetic
auaacauagauaaaacuuggu

SEQ ID NO: 395902 - RNA, 22 nt, Artificial Sequence
  Synthetic
cauaacauagauaaaacuuggu

SEQ ID NO: 395903 - RNA, 23 nt, Artificial Sequence
  Synthetic
acauaacauagauaaaacuuggu

SEQ ID NO: 395904 - RNA, 24 nt, Artificial Sequence
  Synthetic
uacauaacauagauaaaacuuggu

SEQ ID NO: 395905 - RNA, 18 nt, Artificial Sequence
  Synthetic
uaccuucauaaccuuggu

SEQ ID NO: 395906 - RNA, 19 nt, Artificial Sequence
  Synthetic
cuaccuucauaaccuuggu

SEQ ID NO: 395907 - RNA, 20 nt, Artificial Sequence
  Synthetic
gcuaccuucauaaccuuggu

SEQ ID NO: 395908 - RNA, 21 nt, Artificial Sequence
  Synthetic
ugcuaccuucauaaccuuggu

SEQ ID NO: 395909 - RNA, 22 nt, Artificial Sequence
  Synthetic
augcuaccuucauaaccuuggu

SEQ ID NO: 395910 - RNA, 23 nt, Artificial Sequence
  Synthetic
uaugcuaccuucauaaccuuggu

SEQ ID NO: 395911 - RNA, 24 nt, Artificial Sequence
  Synthetic
auaugcuaccuucauaaccuuggu

SEQ ID NO: 395912 - RNA, 18 nt, Artificial Sequence
  Synthetic
ggaaugaggcagcuuggu

SEQ ID NO: 395913 - RNA, 19 nt, Artificial Sequence
  Synthetic
uggaaugaggcagcuuggu

SEQ ID NO: 395914 - RNA, 20 nt, Artificial Sequence
  Synthetic
cuggaaugaggcagcuuggu

SEQ ID NO: 395915 - RNA, 21 nt, Artificial Sequence
  Synthetic
acuggaaugaggcagcuuggu

SEQ ID NO: 395916 - RNA, 22 nt, Artificial Sequence
  Synthetic
uacuggaaugaggcagcuuggu

SEQ ID NO: 395917 - RNA, 23 nt, Artificial Sequence
  Synthetic
guacuggaaugaggcagcuuggu

SEQ ID NO: 395918 - RNA, 24 nt, Artificial Sequence
  Synthetic
uguacuggaaugaggcagcuuggu

SEQ ID NO: 395919 - RNA, 18 nt, Artificial Sequence
  Synthetic
agcaagcaucagcuuggu

SEQ ID NO: 395920 - RNA, 19 nt, Artificial Sequence
  Synthetic
cagcaagcaucagcuuggu

SEQ ID NO: 395921 - RNA, 20 nt, Artificial Sequence
  Synthetic
ucagcaagcaucagcuuggu

SEQ ID NO: 395922 - RNA, 21 nt, Artificial Sequence
  Synthetic
gucagcaagcaucagcuuggu

SEQ ID NO: 395923 - RNA, 22 nt, Artificial Sequence
  Synthetic
agucagcaagcaucagcuuggu

SEQ ID NO: 395924 - RNA, 23 nt, Artificial Sequence
  Synthetic
cagucagcaagcaucagcuuggu

SEQ ID NO: 395925 - RNA, 24 nt, Artificial Sequence
  Synthetic
ucagucagcaagcaucagcuuggu

SEQ ID NO: 395926 - RNA, 18 nt, Artificial Sequence
  Synthetic
uuaaauuacaugcuuggu

SEQ ID NO: 395927 - RNA, 19 nt, Artificial Sequence
  Synthetic
uuuaaauuacaugcuuggu

SEQ ID NO: 395928 - RNA, 20 nt, Artificial Sequence
  Synthetic
uuuuaaauuacaugcuuggu

SEQ ID NO: 395929 - RNA, 21 nt, Artificial Sequence
  Synthetic
uuuuuaaauuacaugcuuggu

SEQ ID NO: 395930 - RNA, 22 nt, Artificial Sequence
  Synthetic
uuuuuuaaauuacaugcuuggu

SEQ ID NO: 395931 - RNA, 23 nt, Artificial Sequence
  Synthetic
auuuuuuaaauuacaugcuuggu

SEQ ID NO: 395932 - RNA, 24 nt, Artificial Sequence
  Synthetic
aauuuuuuaaauuacaugcuuggu

SEQ ID NO: 395933 - RNA, 18 nt, Artificial Sequence
  Synthetic
aucauuuauuugcuuggu

SEQ ID NO: 395934 - RNA, 19 nt, Artificial Sequence
  Synthetic
aaucauuuauuugcuuggu

SEQ ID NO: 395935 - RNA, 20 nt, Artificial Sequence
  Synthetic
gaaucauuuauuugcuuggu

SEQ ID NO: 395936 - RNA, 21 nt, Artificial Sequence
  Synthetic
ugaaucauuuauuugcuuggu

SEQ ID NO: 395937 - RNA, 22 nt, Artificial Sequence
  Synthetic
augaaucauuuauuugcuuggu

SEQ ID NO: 395938 - RNA, 23 nt, Artificial Sequence
  Synthetic
aaugaaucauuuauuugcuuggu

SEQ ID NO: 395939 - RNA, 24 nt, Artificial Sequence
  Synthetic
aaaugaaucauuuauuugcuuggu

SEQ ID NO: 395940 - RNA, 18 nt, Artificial Sequence
  Synthetic
ucaagccacaaaguuggu

SEQ ID NO: 395941 - RNA, 19 nt, Artificial Sequence
  Synthetic
uucaagccacaaaguuggu

SEQ ID NO: 395942 - RNA, 20 nt, Artificial Sequence
  Synthetic
uuucaagccacaaaguuggu

SEQ ID NO: 395943 - RNA, 21 nt, Artificial Sequence
  Synthetic
auuucaagccacaaaguuggu

SEQ ID NO: 395944 - RNA, 22 nt, Artificial Sequence
  Synthetic
aauuucaagccacaaaguuggu

SEQ ID NO: 395945 - RNA, 23 nt, Artificial Sequence
  Synthetic
gaauuucaagccacaaaguuggu

SEQ ID NO: 395946 - RNA, 24 nt, Artificial Sequence
  Synthetic
agaauuucaagccacaaaguuggu

SEQ ID NO: 395947 - RNA, 18 nt, Artificial Sequence
  Synthetic
aauacugauuaaguuggu

SEQ ID NO: 395948 - RNA, 19 nt, Artificial Sequence
  Synthetic
aaauacugauuaaguuggu

SEQ ID NO: 395949 - RNA, 20 nt, Artificial Sequence
  Synthetic
gaaauacugauuaaguuggu

SEQ ID NO: 395950 - RNA, 21 nt, Artificial Sequence
  Synthetic
agaaauacugauuaaguuggu

SEQ ID NO: 395951 - RNA, 22 nt, Artificial Sequence
  Synthetic
cagaaauacugauuaaguuggu

SEQ ID NO: 395952 - RNA, 23 nt, Artificial Sequence
  Synthetic
ccagaaauacugauuaaguuggu

SEQ ID NO: 395953 - RNA, 24 nt, Artificial Sequence
  Synthetic
uccagaaauacugauuaaguuggu

SEQ ID NO: 395954 - RNA, 18 nt, Artificial Sequence
  Synthetic
guuucugugucaguuggu

SEQ ID NO: 395955 - RNA, 19 nt, Artificial Sequence
  Synthetic
aguuucugugucaguuggu

SEQ ID NO: 395956 - RNA, 20 nt, Artificial Sequence
  Synthetic
gaguuucugugucaguuggu

SEQ ID NO: 395957 - RNA, 21 nt, Artificial Sequence
  Synthetic
agaguuucugugucaguuggu

SEQ ID NO: 395958 - RNA, 22 nt, Artificial Sequence
  Synthetic
cagaguuucugugucaguuggu

SEQ ID NO: 395959 - RNA, 23 nt, Artificial Sequence
  Synthetic
ccagaguuucugugucaguuggu

SEQ ID NO: 395960 - RNA, 24 nt, Artificial Sequence
  Synthetic
cccagaguuucugugucaguuggu

SEQ ID NO: 395961 - RNA, 18 nt, Artificial Sequence
  Synthetic
agggccguaaagguuggu

SEQ ID NO: 395962 - RNA, 19 nt, Artificial Sequence
  Synthetic
aagggccguaaagguuggu

SEQ ID NO: 395963 - RNA, 20 nt, Artificial Sequence
  Synthetic
gaagggccguaaagguuggu

SEQ ID NO: 395964 - RNA, 21 nt, Artificial Sequence
  Synthetic
ggaagggccguaaagguuggu

SEQ ID NO: 395965 - RNA, 22 nt, Artificial Sequence
  Synthetic
uggaagggccguaaagguuggu

SEQ ID NO: 395966 - RNA, 23 nt, Artificial Sequence
  Synthetic
auggaagggccguaaagguuggu

SEQ ID NO: 395967 - RNA, 24 nt, Artificial Sequence
  Synthetic
gauggaagggccguaaagguuggu

SEQ ID NO: 395968 - RNA, 18 nt, Artificial Sequence
  Synthetic
guuagcuuugugguuggu

SEQ ID NO: 395969 - RNA, 19 nt, Artificial Sequence
  Synthetic
gguuagcuuugugguuggu

SEQ ID NO: 395970 - RNA, 20 nt, Artificial Sequence
  Synthetic
agguuagcuuugugguuggu

SEQ ID NO: 395971 - RNA, 21 nt, Artificial Sequence
  Synthetic
gagguuagcuuugugguuggu

SEQ ID NO: 395972 - RNA, 22 nt, Artificial Sequence
  Synthetic
ugagguuagcuuugugguuggu

SEQ ID NO: 395973 - RNA, 23 nt, Artificial Sequence
  Synthetic
cugagguuagcuuugugguuggu

SEQ ID NO: 395974 - RNA, 24 nt, Artificial Sequence
  Synthetic
gcugagguuagcuuugugguuggu

SEQ ID NO: 395975 - RNA, 18 nt, Artificial Sequence
  Synthetic
caaaagggcuguguuggu

SEQ ID NO: 395976 - RNA, 19 nt, Artificial Sequence
  Synthetic
acaaaagggcuguguuggu

SEQ ID NO: 395977 - RNA, 20 nt, Artificial Sequence
  Synthetic
uacaaaagggcuguguuggu

SEQ ID NO: 395978 - RNA, 21 nt, Artificial Sequence
  Synthetic
auacaaaagggcuguguuggu

SEQ ID NO: 395979 - RNA, 22 nt, Artificial Sequence
  Synthetic
gauacaaaagggcuguguuggu

SEQ ID NO: 395980 - RNA, 23 nt, Artificial Sequence
  Synthetic
ggauacaaaagggcuguguuggu

SEQ ID NO: 395981 - RNA, 24 nt, Artificial Sequence
  Synthetic
aggauacaaaagggcuguguuggu

SEQ ID NO: 395982 - RNA, 18 nt, Artificial Sequence
  Synthetic
uaaaauauauuuguuggu

SEQ ID NO: 395983 - RNA, 19 nt, Artificial Sequence
  Synthetic
uuaaaauauauuuguuggu

SEQ ID NO: 395984 - RNA, 20 nt, Artificial Sequence
  Synthetic
uuuaaaauauauuuguuggu

SEQ ID NO: 395985 - RNA, 21 nt, Artificial Sequence
  Synthetic
cuuuaaaauauauuuguuggu

SEQ ID NO: 395986 - RNA, 22 nt, Artificial Sequence
  Synthetic
ccuuuaaaauauauuuguuggu

SEQ ID NO: 395987 - RNA, 23 nt, Artificial Sequence
  Synthetic
accuuuaaaauauauuuguuggu

SEQ ID NO: 395988 - RNA, 24 nt, Artificial Sequence
  Synthetic
gaccuuuaaaauauauuuguuggu

SEQ ID NO: 395989 - RNA, 18 nt, Artificial Sequence
  Synthetic
ggcuuuaggaaauuuggu

SEQ ID NO: 395990 - RNA, 19 nt, Artificial Sequence
  Synthetic
uggcuuuaggaaauuuggu

SEQ ID NO: 395991 - RNA, 20 nt, Artificial Sequence
  Synthetic
auggcuuuaggaaauuuggu

SEQ ID NO: 395992 - RNA, 21 nt, Artificial Sequence
  Synthetic
uauggcuuuaggaaauuuggu

SEQ ID NO: 395993 - RNA, 22 nt, Artificial Sequence
  Synthetic
cuauggcuuuaggaaauuuggu

SEQ ID NO: 395994 - RNA, 23 nt, Artificial Sequence
  Synthetic
acuauggcuuuaggaaauuuggu

SEQ ID NO: 395995 - RNA, 24 nt, Artificial Sequence
  Synthetic
aacuauggcuuuaggaaauuuggu

SEQ ID NO: 395996 - RNA, 18 nt, Artificial Sequence
  Synthetic
cuucaguuuuaauuuggu

SEQ ID NO: 395997 - RNA, 19 nt, Artificial Sequence
  Synthetic
acuucaguuuuaauuuggu

SEQ ID NO: 395998 - RNA, 20 nt, Artificial Sequence
  Synthetic
uacuucaguuuuaauuuggu

SEQ ID NO: 395999 - RNA, 21 nt, Artificial Sequence
  Synthetic
guacuucaguuuuaauuuggu

SEQ ID NO: 396000 - RNA, 22 nt, Artificial Sequence
  Synthetic
uguacuucaguuuuaauuuggu

SEQ ID NO: 396001 - RNA, 23 nt, Artificial Sequence
  Synthetic
cuguacuucaguuuuaauuuggu

SEQ ID NO: 396002 - RNA, 24 nt, Artificial Sequence
  Synthetic
acuguacuucaguuuuaauuuggu

SEQ ID NO: 396003 - RNA, 18 nt, Artificial Sequence
  Synthetic
aagauacugugauuuggu

SEQ ID NO: 396004 - RNA, 19 nt, Artificial Sequence
  Synthetic
gaagauacugugauuuggu

SEQ ID NO: 396005 - RNA, 20 nt, Artificial Sequence
  Synthetic
agaagauacugugauuuggu

SEQ ID NO: 396006 - RNA, 21 nt, Artificial Sequence
  Synthetic
gagaagauacugugauuuggu

SEQ ID NO: 396007 - RNA, 22 nt, Artificial Sequence
  Synthetic
agagaagauacugugauuuggu

SEQ ID NO: 396008 - RNA, 23 nt, Artificial Sequence
  Synthetic
uagagaagauacugugauuuggu

SEQ ID NO: 396009 - RNA, 24 nt, Artificial Sequence
  Synthetic
uuagagaagauacugugauuuggu

SEQ ID NO: 396010 - RNA, 18 nt, Artificial Sequence
  Synthetic
aauggaaauguauuuggu

SEQ ID NO: 396011 - RNA, 19 nt, Artificial Sequence
  Synthetic
uaauggaaauguauuuggu

SEQ ID NO: 396012 - RNA, 20 nt, Artificial Sequence
  Synthetic
uuaauggaaauguauuuggu

SEQ ID NO: 396013 - RNA, 21 nt, Artificial Sequence
  Synthetic
uuuaauggaaauguauuuggu

SEQ ID NO: 396014 - RNA, 22 nt, Artificial Sequence
  Synthetic
auuuaauggaaauguauuuggu

SEQ ID NO: 396015 - RNA, 23 nt, Artificial Sequence
  Synthetic
uauuuaauggaaauguauuuggu

SEQ ID NO: 396016 - RNA, 24 nt, Artificial Sequence
  Synthetic
auauuuaauggaaauguauuuggu

SEQ ID NO: 396017 - RNA, 18 nt, Artificial Sequence
  Synthetic
auauccugguuauuuggu

SEQ ID NO: 396018 - RNA, 19 nt, Artificial Sequence
  Synthetic
gauauccugguuauuuggu

SEQ ID NO: 396019 - RNA, 20 nt, Artificial Sequence
  Synthetic
agauauccugguuauuuggu

SEQ ID NO: 396020 - RNA, 21 nt, Artificial Sequence
  Synthetic
uagauauccugguuauuuggu

SEQ ID NO: 396021 - RNA, 22 nt, Artificial Sequence
  Synthetic
uuagauauccugguuauuuggu

SEQ ID NO: 396022 - RNA, 23 nt, Artificial Sequence
  Synthetic
auuagauauccugguuauuuggu

SEQ ID NO: 396023 - RNA, 24 nt, Artificial Sequence
  Synthetic
aauuagauauccugguuauuuggu

SEQ ID NO: 396024 - RNA, 18 nt, Artificial Sequence
  Synthetic
caaaauggcugcuuuggu

SEQ ID NO: 396025 - RNA, 19 nt, Artificial Sequence
  Synthetic
acaaaauggcugcuuuggu

SEQ ID NO: 396026 - RNA, 20 nt, Artificial Sequence
  Synthetic
aacaaaauggcugcuuuggu

SEQ ID NO: 396027 - RNA, 21 nt, Artificial Sequence
  Synthetic
uaacaaaauggcugcuuuggu

SEQ ID NO: 396028 - RNA, 22 nt, Artificial Sequence
  Synthetic
auaacaaaauggcugcuuuggu

SEQ ID NO: 396029 - RNA, 23 nt, Artificial Sequence
  Synthetic
aauaacaaaauggcugcuuuggu

SEQ ID NO: 396030 - RNA, 24 nt, Artificial Sequence
  Synthetic
aaauaacaaaauggcugcuuuggu

SEQ ID NO: 396031 - RNA, 18 nt, Artificial Sequence
  Synthetic
uugagcguaaucuuuggu

SEQ ID NO: 396032 - RNA, 19 nt, Artificial Sequence
  Synthetic
auugagcguaaucuuuggu

SEQ ID NO: 396033 - RNA, 20 nt, Artificial Sequence
  Synthetic
aauugagcguaaucuuuggu

SEQ ID NO: 396034 - RNA, 21 nt, Artificial Sequence
  Synthetic
gaauugagcguaaucuuuggu

SEQ ID NO: 396035 - RNA, 22 nt, Artificial Sequence
  Synthetic
agaauugagcguaaucuuuggu

SEQ ID NO: 396036 - RNA, 23 nt, Artificial Sequence
  Synthetic
aagaauugagcguaaucuuuggu

SEQ ID NO: 396037 - RNA, 24 nt, Artificial Sequence
  Synthetic
aaagaauugagcguaaucuuuggu

SEQ ID NO: 396038 - RNA, 18 nt, Artificial Sequence
  Synthetic
ucauggauggauuuuggu

SEQ ID NO: 396039 - RNA, 19 nt, Artificial Sequence
  Synthetic
aucauggauggauuuuggu

SEQ ID NO: 396040 - RNA, 20 nt, Artificial Sequence
  Synthetic
caucauggauggauuuuggu

SEQ ID NO: 396041 - RNA, 21 nt, Artificial Sequence
  Synthetic
ucaucauggauggauuuuggu

SEQ ID NO: 396042 - RNA, 22 nt, Artificial Sequence
  Synthetic
gucaucauggauggauuuuggu

SEQ ID NO: 396043 - RNA, 23 nt, Artificial Sequence
  Synthetic
ugucaucauggauggauuuuggu

SEQ ID NO: 396044 - RNA, 24 nt, Artificial Sequence
  Synthetic
augucaucauggauggauuuuggu

SEQ ID NO: 396045 - RNA, 18 nt, Artificial Sequence
  Synthetic
uuuaugcacaguuuuggu

SEQ ID NO: 396046 - RNA, 19 nt, Artificial Sequence
  Synthetic
cuuuaugcacaguuuuggu

SEQ ID NO: 396047 - RNA, 20 nt, Artificial Sequence
  Synthetic
acuuuaugcacaguuuuggu

SEQ ID NO: 396048 - RNA, 21 nt, Artificial Sequence
  Synthetic
gacuuuaugcacaguuuuggu

SEQ ID NO: 396049 - RNA, 22 nt, Artificial Sequence
  Synthetic
ugacuuuaugcacaguuuuggu

SEQ ID NO: 396050 - RNA, 23 nt, Artificial Sequence
  Synthetic
cugacuuuaugcacaguuuuggu

SEQ ID NO: 396051 - RNA, 24 nt, Artificial Sequence
  Synthetic
gcugacuuuaugcacaguuuuggu

SEQ ID NO: 396052 - RNA, 18 nt, Artificial Sequence
  Synthetic
uugcaagugauuuuuggu

SEQ ID NO: 396053 - RNA, 19 nt, Artificial Sequence
  Synthetic
uuugcaagugauuuuuggu

SEQ ID NO: 396054 - RNA, 20 nt, Artificial Sequence
  Synthetic
auuugcaagugauuuuuggu

SEQ ID NO: 396055 - RNA, 21 nt, Artificial Sequence
  Synthetic
uauuugcaagugauuuuuggu

SEQ ID NO: 396056 - RNA, 22 nt, Artificial Sequence
  Synthetic
uuauuugcaagugauuuuuggu

SEQ ID NO: 396057 - RNA, 23 nt, Artificial Sequence
  Synthetic
uuuauuugcaagugauuuuuggu

SEQ ID NO: 396058 - RNA, 24 nt, Artificial Sequence
  Synthetic
auuuauuugcaagugauuuuuggu

SEQ ID NO: 396059 - RNA, 18 nt, Artificial Sequence
  Synthetic
ggggaggugauuuuuggu

SEQ ID NO: 396060 - RNA, 19 nt, Artificial Sequence
  Synthetic
gggggaggugauuuuuggu

SEQ ID NO: 396061 - RNA, 20 nt, Artificial Sequence
  Synthetic
ugggggaggugauuuuuggu

SEQ ID NO: 396062 - RNA, 21 nt, Artificial Sequence
  Synthetic
uugggggaggugauuuuuggu

SEQ ID NO: 396063 - RNA, 22 nt, Artificial Sequence
  Synthetic
uuugggggaggugauuuuuggu

SEQ ID NO: 396064 - RNA, 23 nt, Artificial Sequence
  Synthetic
auuugggggaggugauuuuuggu

SEQ ID NO: 396065 - RNA, 24 nt, Artificial Sequence
  Synthetic
aauuugggggaggugauuuuuggu

SEQ ID NO: 396066 - RNA, 18 nt, Artificial Sequence
  Synthetic
aaccuuuuuuuuuuuggu

SEQ ID NO: 396067 - RNA, 19 nt, Artificial Sequence
  Synthetic
aaaccuuuuuuuuuuuggu

SEQ ID NO: 396068 - RNA, 20 nt, Artificial Sequence
  Synthetic
aaaaccuuuuuuuuuuuggu

SEQ ID NO: 396069 - RNA, 21 nt, Artificial Sequence
  Synthetic
caaaaccuuuuuuuuuuuggu

SEQ ID NO: 396070 - RNA, 22 nt, Artificial Sequence
  Synthetic
acaaaaccuuuuuuuuuuuggu

SEQ ID NO: 396071 - RNA, 23 nt, Artificial Sequence
  Synthetic
uacaaaaccuuuuuuuuuuuggu

SEQ ID NO: 396072 - RNA, 24 nt, Artificial Sequence
  Synthetic
uuacaaaaccuuuuuuuuuuuggu

SEQ ID NO: 396073 - RNA, 18 nt, Artificial Sequence
  Synthetic
cauuuaaggaaaaaaugu

SEQ ID NO: 396074 - RNA, 19 nt, Artificial Sequence
  Synthetic
ucauuuaaggaaaaaaugu

SEQ ID NO: 396075 - RNA, 20 nt, Artificial Sequence
  Synthetic
aucauuuaaggaaaaaaugu

SEQ ID NO: 396076 - RNA, 21 nt, Artificial Sequence
  Synthetic
gaucauuuaaggaaaaaaugu

SEQ ID NO: 396077 - RNA, 22 nt, Artificial Sequence
  Synthetic
agaucauuuaaggaaaaaaugu

SEQ ID NO: 396078 - RNA, 23 nt, Artificial Sequence
  Synthetic
gagaucauuuaaggaaaaaaugu

SEQ ID NO: 396079 - RNA, 24 nt, Artificial Sequence
  Synthetic
ggagaucauuuaaggaaaaaaugu

SEQ ID NO: 396080 - RNA, 18 nt, Artificial Sequence
  Synthetic
gagccaagauaaaaaugu

SEQ ID NO: 396081 - RNA, 19 nt, Artificial Sequence
  Synthetic
agagccaagauaaaaaugu

SEQ ID NO: 396082 - RNA, 20 nt, Artificial Sequence
  Synthetic
aagagccaagauaaaaaugu

SEQ ID NO: 396083 - RNA, 21 nt, Artificial Sequence
  Synthetic
gaagagccaagauaaaaaugu

SEQ ID NO: 396084 - RNA, 22 nt, Artificial Sequence
  Synthetic
cgaagagccaagauaaaaaugu

SEQ ID NO: 396085 - RNA, 23 nt, Artificial Sequence
  Synthetic
ucgaagagccaagauaaaaaugu

SEQ ID NO: 396086 - RNA, 24 nt, Artificial Sequence
  Synthetic
gucgaagagccaagauaaaaaugu

SEQ ID NO: 396087 - RNA, 18 nt, Artificial Sequence
  Synthetic
uucuuauauuaaaaaugu

SEQ ID NO: 396088 - RNA, 19 nt, Artificial Sequence
  Synthetic
uuucuuauauuaaaaaugu

SEQ ID NO: 396089 - RNA, 20 nt, Artificial Sequence
  Synthetic
auuucuuauauuaaaaaugu

SEQ ID NO: 396090 - RNA, 21 nt, Artificial Sequence
  Synthetic
gauuucuuauauuaaaaaugu

SEQ ID NO: 396091 - RNA, 22 nt, Artificial Sequence
  Synthetic
ugauuucuuauauuaaaaaugu

SEQ ID NO: 396092 - RNA, 23 nt, Artificial Sequence
  Synthetic
augauuucuuauauuaaaaaugu

SEQ ID NO: 396093 - RNA, 24 nt, Artificial Sequence
  Synthetic
aaugauuucuuauauuaaaaaugu

SEQ ID NO: 396094 - RNA, 18 nt, Artificial Sequence
  Synthetic
auggaaaagucaaaaugu

SEQ ID NO: 396095 - RNA, 19 nt, Artificial Sequence
  Synthetic
aauggaaaagucaaaaugu

SEQ ID NO: 396096 - RNA, 20 nt, Artificial Sequence
  Synthetic
aaauggaaaagucaaaaugu

SEQ ID NO: 396097 - RNA, 21 nt, Artificial Sequence
  Synthetic
gaaauggaaaagucaaaaugu

SEQ ID NO: 396098 - RNA, 22 nt, Artificial Sequence
  Synthetic
agaaauggaaaagucaaaaugu

SEQ ID NO: 396099 - RNA, 23 nt, Artificial Sequence
  Synthetic
uagaaauggaaaagucaaaaugu

SEQ ID NO: 396100 - RNA, 24 nt, Artificial Sequence
  Synthetic
guagaaauggaaaagucaaaaugu

SEQ ID NO: 396101 - RNA, 18 nt, Artificial Sequence
  Synthetic
guuccugauucaaaaugu

SEQ ID NO: 396102 - RNA, 19 nt, Artificial Sequence
  Synthetic
aguuccugauucaaaaugu

SEQ ID NO: 396103 - RNA, 20 nt, Artificial Sequence
  Synthetic
gaguuccugauucaaaaugu

SEQ ID NO: 396104 - RNA, 21 nt, Artificial Sequence
  Synthetic
agaguuccugauucaaaaugu

SEQ ID NO: 396105 - RNA, 22 nt, Artificial Sequence
  Synthetic
cagaguuccugauucaaaaugu

SEQ ID NO: 396106 - RNA, 23 nt, Artificial Sequence
  Synthetic
ccagaguuccugauucaaaaugu

SEQ ID NO: 396107 - RNA, 24 nt, Artificial Sequence
  Synthetic
cccagaguuccugauucaaaaugu

SEQ ID NO: 396108 - RNA, 18 nt, Artificial Sequence
  Synthetic
aagaugacaggaaaaugu

SEQ ID NO: 396109 - RNA, 19 nt, Artificial Sequence
  Synthetic
gaagaugacaggaaaaugu

SEQ ID NO: 396110 - RNA, 20 nt, Artificial Sequence
  Synthetic
agaagaugacaggaaaaugu

SEQ ID NO: 396111 - RNA, 21 nt, Artificial Sequence
  Synthetic
uagaagaugacaggaaaaugu

SEQ ID NO: 396112 - RNA, 22 nt, Artificial Sequence
  Synthetic
cuagaagaugacaggaaaaugu

SEQ ID NO: 396113 - RNA, 23 nt, Artificial Sequence
  Synthetic
gcuagaagaugacaggaaaaugu

SEQ ID NO: 396114 - RNA, 24 nt, Artificial Sequence
  Synthetic
ggcuagaagaugacaggaaaaugu

SEQ ID NO: 396115 - RNA, 18 nt, Artificial Sequence
  Synthetic
cuaagaaaaauaaaaugu

SEQ ID NO: 396116 - RNA, 19 nt, Artificial Sequence
  Synthetic
ucuaagaaaaauaaaaugu

SEQ ID NO: 396117 - RNA, 20 nt, Artificial Sequence
  Synthetic
uucuaagaaaaauaaaaugu

SEQ ID NO: 396118 - RNA, 21 nt, Artificial Sequence
  Synthetic
auucuaagaaaaauaaaaugu

SEQ ID NO: 396119 - RNA, 22 nt, Artificial Sequence
  Synthetic
uauucuaagaaaaauaaaaugu

SEQ ID NO: 396120 - RNA, 23 nt, Artificial Sequence
  Synthetic
auauucuaagaaaaauaaaaugu

SEQ ID NO: 396121 - RNA, 24 nt, Artificial Sequence
  Synthetic
uauauucuaagaaaaauaaaaugu

SEQ ID NO: 396122 - RNA, 18 nt, Artificial Sequence
  Synthetic
uauauuaaaauaaaaugu

SEQ ID NO: 396123 - RNA, 19 nt, Artificial Sequence
  Synthetic
uuauauuaaaauaaaaugu

SEQ ID NO: 396124 - RNA, 20 nt, Artificial Sequence
  Synthetic
auuauauuaaaauaaaaugu

SEQ ID NO: 396125 - RNA, 21 nt, Artificial Sequence
  Synthetic
aauuauauuaaaauaaaaugu

SEQ ID NO: 396126 - RNA, 22 nt, Artificial Sequence
  Synthetic
aaauuauauuaaaauaaaaugu

SEQ ID NO: 396127 - RNA, 23 nt, Artificial Sequence
  Synthetic
uaaauuauauuaaaauaaaaugu

SEQ ID NO: 396128 - RNA, 24 nt, Artificial Sequence
  Synthetic
cuaaauuauauuaaaauaaaaugu

SEQ ID NO: 396129 - RNA, 18 nt, Artificial Sequence
  Synthetic
uuacacauaguaaaaugu

SEQ ID NO: 396130 - RNA, 19 nt, Artificial Sequence
  Synthetic
uuuacacauaguaaaaugu

SEQ ID NO: 396131 - RNA, 20 nt, Artificial Sequence
  Synthetic
auuuacacauaguaaaaugu

SEQ ID NO: 396132 - RNA, 21 nt, Artificial Sequence
  Synthetic
cauuuacacauaguaaaaugu

SEQ ID NO: 396133 - RNA, 22 nt, Artificial Sequence
  Synthetic
ucauuuacacauaguaaaaugu

SEQ ID NO: 396134 - RNA, 23 nt, Artificial Sequence
  Synthetic
aucauuuacacauaguaaaaugu

SEQ ID NO: 396135 - RNA, 24 nt, Artificial Sequence
  Synthetic
aaucauuuacacauaguaaaaugu

SEQ ID NO: 396136 - RNA, 18 nt, Artificial Sequence
  Synthetic
cuaguacugaacaaaugu

SEQ ID NO: 396137 - RNA, 19 nt, Artificial Sequence
  Synthetic
gcuaguacugaacaaaugu

SEQ ID NO: 396138 - RNA, 20 nt, Artificial Sequence
  Synthetic
ugcuaguacugaacaaaugu

SEQ ID NO: 396139 - RNA, 21 nt, Artificial Sequence
  Synthetic
uugcuaguacugaacaaaugu

SEQ ID NO: 396140 - RNA, 22 nt, Artificial Sequence
  Synthetic
auugcuaguacugaacaaaugu

SEQ ID NO: 396141 - RNA, 23 nt, Artificial Sequence
  Synthetic
uauugcuaguacugaacaaaugu

SEQ ID NO: 396142 - RNA, 24 nt, Artificial Sequence
  Synthetic
uuauugcuaguacugaacaaaugu

SEQ ID NO: 396143 - RNA, 18 nt, Artificial Sequence
  Synthetic
auaguugucuucaaaugu

SEQ ID NO: 396144 - RNA, 19 nt, Artificial Sequence
  Synthetic
gauaguugucuucaaaugu

SEQ ID NO: 396145 - RNA, 20 nt, Artificial Sequence
  Synthetic
ugauaguugucuucaaaugu

SEQ ID NO: 396146 - RNA, 21 nt, Artificial Sequence
  Synthetic
augauaguugucuucaaaugu

SEQ ID NO: 396147 - RNA, 22 nt, Artificial Sequence
  Synthetic
gaugauaguugucuucaaaugu

SEQ ID NO: 396148 - RNA, 23 nt, Artificial Sequence
  Synthetic
agaugauaguugucuucaaaugu

SEQ ID NO: 396149 - RNA, 24 nt, Artificial Sequence
  Synthetic
gagaugauaguugucuucaaaugu

SEQ ID NO: 396150 - RNA, 18 nt, Artificial Sequence
  Synthetic
uuauaugcaaagaaaugu

SEQ ID NO: 396151 - RNA, 19 nt, Artificial Sequence
  Synthetic
uuuauaugcaaagaaaugu

SEQ ID NO: 396152 - RNA, 20 nt, Artificial Sequence
  Synthetic
guuuauaugcaaagaaaugu

SEQ ID NO: 396153 - RNA, 21 nt, Artificial Sequence
  Synthetic
aguuuauaugcaaagaaaugu

SEQ ID NO: 396154 - RNA, 22 nt, Artificial Sequence
  Synthetic
uaguuuauaugcaaagaaaugu

SEQ ID NO: 396155 - RNA, 23 nt, Artificial Sequence
  Synthetic
cuaguuuauaugcaaagaaaugu

SEQ ID NO: 396156 - RNA, 24 nt, Artificial Sequence
  Synthetic
ucuaguuuauaugcaaagaaaugu

SEQ ID NO: 396157 - RNA, 18 nt, Artificial Sequence
  Synthetic
gaagagggaaagaaaugu

SEQ ID NO: 396158 - RNA, 19 nt, Artificial Sequence
  Synthetic
ugaagagggaaagaaaugu

SEQ ID NO: 396159 - RNA, 20 nt, Artificial Sequence
  Synthetic
augaagagggaaagaaaugu

SEQ ID NO: 396160 - RNA, 21 nt, Artificial Sequence
  Synthetic
aaugaagagggaaagaaaugu

SEQ ID NO: 396161 - RNA, 22 nt, Artificial Sequence
  Synthetic
uaaugaagagggaaagaaaugu

SEQ ID NO: 396162 - RNA, 23 nt, Artificial Sequence
  Synthetic
uuaaugaagagggaaagaaaugu

SEQ ID NO: 396163 - RNA, 24 nt, Artificial Sequence
  Synthetic
guuaaugaagagggaaagaaaugu

SEQ ID NO: 396164 - RNA, 18 nt, Artificial Sequence
  Synthetic
auuguuguuaagaaaugu

SEQ ID NO: 396165 - RNA, 19 nt, Artificial Sequence
  Synthetic
uauuguuguuaagaaaugu

SEQ ID NO: 396166 - RNA, 20 nt, Artificial Sequence
  Synthetic
uuauuguuguuaagaaaugu

SEQ ID NO: 396167 - RNA, 21 nt, Artificial Sequence
  Synthetic
uuuauuguuguuaagaaaugu

SEQ ID NO: 396168 - RNA, 22 nt, Artificial Sequence
  Synthetic
auuuauuguuguuaagaaaugu

SEQ ID NO: 396169 - RNA, 23 nt, Artificial Sequence
  Synthetic
aauuuauuguuguuaagaaaugu

SEQ ID NO: 396170 - RNA, 24 nt, Artificial Sequence
  Synthetic
uaauuuauuguuguuaagaaaugu

SEQ ID NO: 396171 - RNA, 18 nt, Artificial Sequence
  Synthetic
aauuaauguuagaaaugu

SEQ ID NO: 396172 - RNA, 19 nt, Artificial Sequence
  Synthetic
aaauuaauguuagaaaugu

SEQ ID NO: 396173 - RNA, 20 nt, Artificial Sequence
  Synthetic
aaaauuaauguuagaaaugu

SEQ ID NO: 396174 - RNA, 21 nt, Artificial Sequence
  Synthetic
gaaaauuaauguuagaaaugu

SEQ ID NO: 396175 - RNA, 22 nt, Artificial Sequence
  Synthetic
ugaaaauuaauguuagaaaugu

SEQ ID NO: 396176 - RNA, 23 nt, Artificial Sequence
  Synthetic
uugaaaauuaauguuagaaaugu

SEQ ID NO: 396177 - RNA, 24 nt, Artificial Sequence
  Synthetic
uuugaaaauuaauguuagaaaugu

SEQ ID NO: 396178 - RNA, 18 nt, Artificial Sequence
  Synthetic
uauaauuguaggaaaugu

SEQ ID NO: 396179 - RNA, 19 nt, Artificial Sequence
  Synthetic
uuauaauuguaggaaaugu

SEQ ID NO: 396180 - RNA, 20 nt, Artificial Sequence
  Synthetic
auuauaauuguaggaaaugu

SEQ ID NO: 396181 - RNA, 21 nt, Artificial Sequence
  Synthetic
aauuauaauuguaggaaaugu

SEQ ID NO: 396182 - RNA, 22 nt, Artificial Sequence
  Synthetic
aaauuauaauuguaggaaaugu

SEQ ID NO: 396183 - RNA, 23 nt, Artificial Sequence
  Synthetic
aaaauuauaauuguaggaaaugu

SEQ ID NO: 396184 - RNA, 24 nt, Artificial Sequence
  Synthetic
aaaaauuauaauuguaggaaaugu

SEQ ID NO: 396185 - RNA, 18 nt, Artificial Sequence
  Synthetic
cuacugcuuaggaaaugu

SEQ ID NO: 396186 - RNA, 19 nt, Artificial Sequence
  Synthetic
gcuacugcuuaggaaaugu

SEQ ID NO: 396187 - RNA, 20 nt, Artificial Sequence
  Synthetic
agcuacugcuuaggaaaugu

SEQ ID NO: 396188 - RNA, 21 nt, Artificial Sequence
  Synthetic
aagcuacugcuuaggaaaugu

SEQ ID NO: 396189 - RNA, 22 nt, Artificial Sequence
  Synthetic
uaagcuacugcuuaggaaaugu

SEQ ID NO: 396190 - RNA, 23 nt, Artificial Sequence
  Synthetic
uuaagcuacugcuuaggaaaugu

SEQ ID NO: 396191 - RNA, 24 nt, Artificial Sequence
  Synthetic
uuuaagcuacugcuuaggaaaugu

SEQ ID NO: 396192 - RNA, 18 nt, Artificial Sequence
  Synthetic
aaacgaauucugaaaugu

SEQ ID NO: 396193 - RNA, 19 nt, Artificial Sequence
  Synthetic
aaaacgaauucugaaaugu

SEQ ID NO: 396194 - RNA, 20 nt, Artificial Sequence
  Synthetic
aaaaacgaauucugaaaugu

SEQ ID NO: 396195 - RNA, 21 nt, Artificial Sequence
  Synthetic
uaaaaacgaauucugaaaugu

SEQ ID NO: 396196 - RNA, 22 nt, Artificial Sequence
  Synthetic
auaaaaacgaauucugaaaugu

SEQ ID NO: 396197 - RNA, 23 nt, Artificial Sequence
  Synthetic
gauaaaaacgaauucugaaaugu

SEQ ID NO: 396198 - RNA, 24 nt, Artificial Sequence
  Synthetic
ugauaaaaacgaauucugaaaugu

SEQ ID NO: 396199 - RNA, 18 nt, Artificial Sequence
  Synthetic
aguucaaaguugaaaugu

SEQ ID NO: 396200 - RNA, 19 nt, Artificial Sequence
  Synthetic
uaguucaaaguugaaaugu

SEQ ID NO: 396201 - RNA, 20 nt, Artificial Sequence
  Synthetic
guaguucaaaguugaaaugu

SEQ ID NO: 396202 - RNA, 21 nt, Artificial Sequence
  Synthetic
gguaguucaaaguugaaaugu

SEQ ID NO: 396203 - RNA, 22 nt, Artificial Sequence
  Synthetic
ggguaguucaaaguugaaaugu

SEQ ID NO: 396204 - RNA, 23 nt, Artificial Sequence
  Synthetic
gggguaguucaaaguugaaaugu

SEQ ID NO: 396205 - RNA, 24 nt, Artificial Sequence
  Synthetic
ugggguaguucaaaguugaaaugu

SEQ ID NO: 396206 - RNA, 18 nt, Artificial Sequence
  Synthetic
aaauaaauaaauaaaugu

SEQ ID NO: 396207 - RNA, 19 nt, Artificial Sequence
  Synthetic
uaaauaaauaaauaaaugu

SEQ ID NO: 396208 - RNA, 20 nt, Artificial Sequence
  Synthetic
auaaauaaauaaauaaaugu

SEQ ID NO: 396209 - RNA, 21 nt, Artificial Sequence
  Synthetic
aauaaauaaauaaauaaaugu

SEQ ID NO: 396210 - RNA, 22 nt, Artificial Sequence
  Synthetic
aaauaaauaaauaaauaaaugu

SEQ ID NO: 396211 - RNA, 23 nt, Artificial Sequence
  Synthetic
uaaauaaauaaauaaauaaaugu

SEQ ID NO: 396212 - RNA, 24 nt, Artificial Sequence
  Synthetic
auaaauaaauaaauaaauaaaugu

SEQ ID NO: 396213 - RNA, 18 nt, Artificial Sequence
  Synthetic
ucccuuaucccuaaaugu

SEQ ID NO: 396214 - RNA, 19 nt, Artificial Sequence
  Synthetic
cucccuuaucccuaaaugu

SEQ ID NO: 396215 - RNA, 20 nt, Artificial Sequence
  Synthetic
acucccuuaucccuaaaugu

SEQ ID NO: 396216 - RNA, 21 nt, Artificial Sequence
  Synthetic
aacucccuuaucccuaaaugu

SEQ ID NO: 396217 - RNA, 22 nt, Artificial Sequence
  Synthetic
aaacucccuuaucccuaaaugu

SEQ ID NO: 396218 - RNA, 23 nt, Artificial Sequence
  Synthetic
gaaacucccuuaucccuaaaugu

SEQ ID NO: 396219 - RNA, 24 nt, Artificial Sequence
  Synthetic
cgaaacucccuuaucccuaaaugu

SEQ ID NO: 396220 - RNA, 18 nt, Artificial Sequence
  Synthetic
caaauaaaugguaaaugu

SEQ ID NO: 396221 - RNA, 19 nt, Artificial Sequence
  Synthetic
ccaaauaaaugguaaaugu

SEQ ID NO: 396222 - RNA, 20 nt, Artificial Sequence
  Synthetic
cccaaauaaaugguaaaugu

SEQ ID NO: 396223 - RNA, 21 nt, Artificial Sequence
  Synthetic
ccccaaauaaaugguaaaugu

SEQ ID NO: 396224 - RNA, 22 nt, Artificial Sequence
  Synthetic
accccaaauaaaugguaaaugu

SEQ ID NO: 396225 - RNA, 23 nt, Artificial Sequence
  Synthetic
uaccccaaauaaaugguaaaugu

SEQ ID NO: 396226 - RNA, 24 nt, Artificial Sequence
  Synthetic
cuaccccaaauaaaugguaaaugu

SEQ ID NO: 396227 - RNA, 18 nt, Artificial Sequence
  Synthetic
uguuguggauuuaaaugu

SEQ ID NO: 396228 - RNA, 19 nt, Artificial Sequence
  Synthetic
auguuguggauuuaaaugu

SEQ ID NO: 396229 - RNA, 20 nt, Artificial Sequence
  Synthetic
gauguuguggauuuaaaugu

SEQ ID NO: 396230 - RNA, 21 nt, Artificial Sequence
  Synthetic
ggauguuguggauuuaaaugu

SEQ ID NO: 396231 - RNA, 22 nt, Artificial Sequence
  Synthetic
aggauguuguggauuuaaaugu

SEQ ID NO: 396232 - RNA, 23 nt, Artificial Sequence
  Synthetic
uaggauguuguggauuuaaaugu

SEQ ID NO: 396233 - RNA, 24 nt, Artificial Sequence
  Synthetic
cuaggauguuguggauuuaaaugu

SEQ ID NO: 396234 - RNA, 18 nt, Artificial Sequence
  Synthetic
uaaaacuggaaacaaugu

SEQ ID NO: 396235 - RNA, 19 nt, Artificial Sequence
  Synthetic
uuaaaacuggaaacaaugu

SEQ ID NO: 396236 - RNA, 20 nt, Artificial Sequence
  Synthetic
cuuaaaacuggaaacaaugu

SEQ ID NO: 396237 - RNA, 21 nt, Artificial Sequence
  Synthetic
acuuaaaacuggaaacaaugu

SEQ ID NO: 396238 - RNA, 22 nt, Artificial Sequence
  Synthetic
uacuuaaaacuggaaacaaugu

SEQ ID NO: 396239 - RNA, 23 nt, Artificial Sequence
  Synthetic
auacuuaaaacuggaaacaaugu

SEQ ID NO: 396240 - RNA, 24 nt, Artificial Sequence
  Synthetic
gauacuuaaaacuggaaacaaugu

SEQ ID NO: 396241 - RNA, 18 nt, Artificial Sequence
  Synthetic
auauuuuaugaacaaugu

SEQ ID NO: 396242 - RNA, 19 nt, Artificial Sequence
  Synthetic
aauauuuuaugaacaaugu

SEQ ID NO: 396243 - RNA, 20 nt, Artificial Sequence
  Synthetic
caauauuuuaugaacaaugu

SEQ ID NO: 396244 - RNA, 21 nt, Artificial Sequence
  Synthetic
acaauauuuuaugaacaaugu

SEQ ID NO: 396245 - RNA, 22 nt, Artificial Sequence
  Synthetic
aacaauauuuuaugaacaaugu

SEQ ID NO: 396246 - RNA, 23 nt, Artificial Sequence
  Synthetic
aaacaauauuuuaugaacaaugu

SEQ ID NO: 396247 - RNA, 24 nt, Artificial Sequence
  Synthetic
uaaacaauauuuuaugaacaaugu

SEQ ID NO: 396248 - RNA, 18 nt, Artificial Sequence
  Synthetic
uggcagaguacacaaugu

SEQ ID NO: 396249 - RNA, 19 nt, Artificial Sequence
  Synthetic
auggcagaguacacaaugu

SEQ ID NO: 396250 - RNA, 20 nt, Artificial Sequence
  Synthetic
aauggcagaguacacaaugu

SEQ ID NO: 396251 - RNA, 21 nt, Artificial Sequence
  Synthetic
uaauggcagaguacacaaugu

SEQ ID NO: 396252 - RNA, 22 nt, Artificial Sequence
  Synthetic
uuaauggcagaguacacaaugu

SEQ ID NO: 396253 - RNA, 23 nt, Artificial Sequence
  Synthetic
uuuaauggcagaguacacaaugu

SEQ ID NO: 396254 - RNA, 24 nt, Artificial Sequence
  Synthetic
uuuuaauggcagaguacacaaugu

SEQ ID NO: 396255 - RNA, 18 nt, Artificial Sequence
  Synthetic
gaggacguuugacaaugu

SEQ ID NO: 396256 - RNA, 19 nt, Artificial Sequence
  Synthetic
agaggacguuugacaaugu

SEQ ID NO: 396257 - RNA, 20 nt, Artificial Sequence
  Synthetic
cagaggacguuugacaaugu

SEQ ID NO: 396258 - RNA, 21 nt, Artificial Sequence
  Synthetic
gcagaggacguuugacaaugu

SEQ ID NO: 396259 - RNA, 22 nt, Artificial Sequence
  Synthetic
ugcagaggacguuugacaaugu

SEQ ID NO: 396260 - RNA, 23 nt, Artificial Sequence
  Synthetic
cugcagaggacguuugacaaugu

SEQ ID NO: 396261 - RNA, 24 nt, Artificial Sequence
  Synthetic
ccugcagaggacguuugacaaugu

SEQ ID NO: 396262 - RNA, 18 nt, Artificial Sequence
  Synthetic
aaaguagauguacaaugu

SEQ ID NO: 396263 - RNA, 19 nt, Artificial Sequence
  Synthetic
uaaaguagauguacaaugu

SEQ ID NO: 396264 - RNA, 20 nt, Artificial Sequence
  Synthetic
cuaaaguagauguacaaugu

SEQ ID NO: 396265 - RNA, 21 nt, Artificial Sequence
  Synthetic
ccuaaaguagauguacaaugu

SEQ ID NO: 396266 - RNA, 22 nt, Artificial Sequence
  Synthetic
gccuaaaguagauguacaaugu

SEQ ID NO: 396267 - RNA, 23 nt, Artificial Sequence
  Synthetic
ugccuaaaguagauguacaaugu

SEQ ID NO: 396268 - RNA, 24 nt, Artificial Sequence
  Synthetic
gugccuaaaguagauguacaaugu

SEQ ID NO: 396269 - RNA, 18 nt, Artificial Sequence
  Synthetic
uauugugaagaccaaugu

SEQ ID NO: 396270 - RNA, 19 nt, Artificial Sequence
  Synthetic
uuauugugaagaccaaugu

SEQ ID NO: 396271 - RNA, 20 nt, Artificial Sequence
  Synthetic
auuauugugaagaccaaugu

SEQ ID NO: 396272 - RNA, 21 nt, Artificial Sequence
  Synthetic
aauuauugugaagaccaaugu

SEQ ID NO: 396273 - RNA, 22 nt, Artificial Sequence
  Synthetic
aaauuauugugaagaccaaugu

SEQ ID NO: 396274 - RNA, 23 nt, Artificial Sequence
  Synthetic
aaaauuauugugaagaccaaugu

SEQ ID NO: 396275 - RNA, 24 nt, Artificial Sequence
  Synthetic
aaaaauuauugugaagaccaaugu

SEQ ID NO: 396276 - RNA, 18 nt, Artificial Sequence
  Synthetic
aaaugugauuuccaaugu

SEQ ID NO: 396277 - RNA, 19 nt, Artificial Sequence
  Synthetic
gaaaugugauuuccaaugu

SEQ ID NO: 396278 - RNA, 20 nt, Artificial Sequence
  Synthetic
ugaaaugugauuuccaaugu

SEQ ID NO: 396279 - RNA, 21 nt, Artificial Sequence
  Synthetic
uugaaaugugauuuccaaugu

SEQ ID NO: 396280 - RNA, 22 nt, Artificial Sequence
  Synthetic
auugaaaugugauuuccaaugu

SEQ ID NO: 396281 - RNA, 23 nt, Artificial Sequence
  Synthetic
uauugaaaugugauuuccaaugu

SEQ ID NO: 396282 - RNA, 24 nt, Artificial Sequence
  Synthetic
auauugaaaugugauuuccaaugu

SEQ ID NO: 396283 - RNA, 18 nt, Artificial Sequence
  Synthetic
ugucuaguaaagcaaugu

SEQ ID NO: 396284 - RNA, 19 nt, Artificial Sequence
  Synthetic
augucuaguaaagcaaugu

SEQ ID NO: 396285 - RNA, 20 nt, Artificial Sequence
  Synthetic
aaugucuaguaaagcaaugu

SEQ ID NO: 396286 - RNA, 21 nt, Artificial Sequence
  Synthetic
aaaugucuaguaaagcaaugu

SEQ ID NO: 396287 - RNA, 22 nt, Artificial Sequence
  Synthetic
aaaaugucuaguaaagcaaugu

SEQ ID NO: 396288 - RNA, 23 nt, Artificial Sequence
  Synthetic
uaaaaugucuaguaaagcaaugu

SEQ ID NO: 396289 - RNA, 24 nt, Artificial Sequence
  Synthetic
guaaaaugucuaguaaagcaaugu

SEQ ID NO: 396290 - RNA, 18 nt, Artificial Sequence
  Synthetic
ucugucaguaagcaaugu

SEQ ID NO: 396291 - RNA, 19 nt, Artificial Sequence
  Synthetic
uucugucaguaagcaaugu

SEQ ID NO: 396292 - RNA, 20 nt, Artificial Sequence
  Synthetic
guucugucaguaagcaaugu

SEQ ID NO: 396293 - RNA, 21 nt, Artificial Sequence
  Synthetic
aguucugucaguaagcaaugu

SEQ ID NO: 396294 - RNA, 22 nt, Artificial Sequence
  Synthetic
aaguucugucaguaagcaaugu

SEQ ID NO: 396295 - RNA, 23 nt, Artificial Sequence
  Synthetic
aaaguucugucaguaagcaaugu

SEQ ID NO: 396296 - RNA, 24 nt, Artificial Sequence
  Synthetic
aaaaguucugucaguaagcaaugu

SEQ ID NO: 396297 - RNA, 18 nt, Artificial Sequence
  Synthetic
cuggaucuguggcaaugu

SEQ ID NO: 396298 - RNA, 19 nt, Artificial Sequence
  Synthetic
ccuggaucuguggcaaugu

SEQ ID NO: 396299 - RNA, 20 nt, Artificial Sequence
  Synthetic
accuggaucuguggcaaugu

SEQ ID NO: 396300 - RNA, 21 nt, Artificial Sequence
  Synthetic
caccuggaucuguggcaaugu

SEQ ID NO: 396301 - RNA, 22 nt, Artificial Sequence
  Synthetic
ccaccuggaucuguggcaaugu

SEQ ID NO: 396302 - RNA, 23 nt, Artificial Sequence
  Synthetic
uccaccuggaucuguggcaaugu

SEQ ID NO: 396303 - RNA, 24 nt, Artificial Sequence
  Synthetic
cuccaccuggaucuguggcaaugu

SEQ ID NO: 396304 - RNA, 18 nt, Artificial Sequence
  Synthetic
cacuuaaaugugcaaugu

SEQ ID NO: 396305 - RNA, 19 nt, Artificial Sequence
  Synthetic
ucacuuaaaugugcaaugu

SEQ ID NO: 396306 - RNA, 20 nt, Artificial Sequence
  Synthetic
gucacuuaaaugugcaaugu

SEQ ID NO: 396307 - RNA, 21 nt, Artificial Sequence
  Synthetic
ugucacuuaaaugugcaaugu

SEQ ID NO: 396308 - RNA, 22 nt, Artificial Sequence
  Synthetic
augucacuuaaaugugcaaugu

SEQ ID NO: 396309 - RNA, 23 nt, Artificial Sequence
  Synthetic
gaugucacuuaaaugugcaaugu

SEQ ID NO: 396310 - RNA, 24 nt, Artificial Sequence
  Synthetic
ugaugucacuuaaaugugcaaugu

SEQ ID NO: 396311 - RNA, 18 nt, Artificial Sequence
  Synthetic
uagaacauucuucaaugu

SEQ ID NO: 396312 - RNA, 19 nt, Artificial Sequence
  Synthetic
auagaacauucuucaaugu

SEQ ID NO: 396313 - RNA, 20 nt, Artificial Sequence
  Synthetic
uauagaacauucuucaaugu

SEQ ID NO: 396314 - RNA, 21 nt, Artificial Sequence
  Synthetic
uuauagaacauucuucaaugu

SEQ ID NO: 396315 - RNA, 22 nt, Artificial Sequence
  Synthetic
cuuauagaacauucuucaaugu

SEQ ID NO: 396316 - RNA, 23 nt, Artificial Sequence
  Synthetic
ucuuauagaacauucuucaaugu

SEQ ID NO: 396317 - RNA, 24 nt, Artificial Sequence
  Synthetic
aucuuauagaacauucuucaaugu

SEQ ID NO: 396318 - RNA, 18 nt, Artificial Sequence
  Synthetic
ucuuguaauguucaaugu

SEQ ID NO: 396319 - RNA, 19 nt, Artificial Sequence
  Synthetic
aucuuguaauguucaaugu

SEQ ID NO: 396320 - RNA, 20 nt, Artificial Sequence
  Synthetic
uaucuuguaauguucaaugu

SEQ ID NO: 396321 - RNA, 21 nt, Artificial Sequence
  Synthetic
uuaucuuguaauguucaaugu

SEQ ID NO: 396322 - RNA, 22 nt, Artificial Sequence
  Synthetic
uuuaucuuguaauguucaaugu

SEQ ID NO: 396323 - RNA, 23 nt, Artificial Sequence
  Synthetic
auuuaucuuguaauguucaaugu

SEQ ID NO: 396324 - RNA, 24 nt, Artificial Sequence
  Synthetic
aauuuaucuuguaauguucaaugu

SEQ ID NO: 396325 - RNA, 18 nt, Artificial Sequence
  Synthetic
caaugagucuuucaaugu

SEQ ID NO: 396326 - RNA, 19 nt, Artificial Sequence
  Synthetic
acaaugagucuuucaaugu

SEQ ID NO: 396327 - RNA, 20 nt, Artificial Sequence
  Synthetic
gacaaugagucuuucaaugu

SEQ ID NO: 396328 - RNA, 21 nt, Artificial Sequence
  Synthetic
agacaaugagucuuucaaugu

SEQ ID NO: 396329 - RNA, 22 nt, Artificial Sequence
  Synthetic
cagacaaugagucuuucaaugu

SEQ ID NO: 396330 - RNA, 23 nt, Artificial Sequence
  Synthetic
acagacaaugagucuuucaaugu

SEQ ID NO: 396331 - RNA, 24 nt, Artificial Sequence
  Synthetic
gacagacaaugagucuuucaaugu

SEQ ID NO: 396332 - RNA, 18 nt, Artificial Sequence
  Synthetic
accaaaaagaaagaaugu

SEQ ID NO: 396333 - RNA, 19 nt, Artificial Sequence
  Synthetic
aaccaaaaagaaagaaugu

SEQ ID NO: 396334 - RNA, 20 nt, Artificial Sequence
  Synthetic
uaaccaaaaagaaagaaugu

SEQ ID NO: 396335 - RNA, 21 nt, Artificial Sequence
  Synthetic
auaaccaaaaagaaagaaugu

SEQ ID NO: 396336 - RNA, 22 nt, Artificial Sequence
  Synthetic
gauaaccaaaaagaaagaaugu

SEQ ID NO: 396337 - RNA, 23 nt, Artificial Sequence
  Synthetic
ugauaaccaaaaagaaagaaugu

SEQ ID NO: 396338 - RNA, 24 nt, Artificial Sequence
  Synthetic
augauaaccaaaaagaaagaaugu

SEQ ID NO: 396339 - RNA, 18 nt, Artificial Sequence
  Synthetic
auacagaagcaagaaugu

SEQ ID NO: 396340 - RNA, 19 nt, Artificial Sequence
  Synthetic
gauacagaagcaagaaugu

SEQ ID NO: 396341 - RNA, 20 nt, Artificial Sequence
  Synthetic
ggauacagaagcaagaaugu

SEQ ID NO: 396342 - RNA, 21 nt, Artificial Sequence
  Synthetic
gggauacagaagcaagaaugu

SEQ ID NO: 396343 - RNA, 22 nt, Artificial Sequence
  Synthetic
ggggauacagaagcaagaaugu

SEQ ID NO: 396344 - RNA, 23 nt, Artificial Sequence
  Synthetic
aggggauacagaagcaagaaugu

SEQ ID NO: 396345 - RNA, 24 nt, Artificial Sequence
  Synthetic
uaggggauacagaagcaagaaugu

SEQ ID NO: 396346 - RNA, 18 nt, Artificial Sequence
  Synthetic
uuaugaccuuaagaaugu

SEQ ID NO: 396347 - RNA, 19 nt, Artificial Sequence
  Synthetic
cuuaugaccuuaagaaugu

SEQ ID NO: 396348 - RNA, 20 nt, Artificial Sequence
  Synthetic
ccuuaugaccuuaagaaugu

SEQ ID NO: 396349 - RNA, 21 nt, Artificial Sequence
  Synthetic
uccuuaugaccuuaagaaugu

SEQ ID NO: 396350 - RNA, 22 nt, Artificial Sequence
  Synthetic
uuccuuaugaccuuaagaaugu

SEQ ID NO: 396351 - RNA, 23 nt, Artificial Sequence
  Synthetic
cuuccuuaugaccuuaagaaugu

SEQ ID NO: 396352 - RNA, 24 nt, Artificial Sequence
  Synthetic
acuuccuuaugaccuuaagaaugu

SEQ ID NO: 396353 - RNA, 18 nt, Artificial Sequence
  Synthetic
guucaaacaacagaaugu

SEQ ID NO: 396354 - RNA, 19 nt, Artificial Sequence
  Synthetic
uguucaaacaacagaaugu

SEQ ID NO: 396355 - RNA, 20 nt, Artificial Sequence
  Synthetic
cuguucaaacaacagaaugu

SEQ ID NO: 396356 - RNA, 21 nt, Artificial Sequence
  Synthetic
ucuguucaaacaacagaaugu

SEQ ID NO: 396357 - RNA, 22 nt, Artificial Sequence
  Synthetic
gucuguucaaacaacagaaugu

SEQ ID NO: 396358 - RNA, 23 nt, Artificial Sequence
  Synthetic
ugucuguucaaacaacagaaugu

SEQ ID NO: 396359 - RNA, 24 nt, Artificial Sequence
  Synthetic
uugucuguucaaacaacagaaugu

SEQ ID NO: 396360 - RNA, 18 nt, Artificial Sequence
  Synthetic
acuuauagacuagaaugu

SEQ ID NO: 396361 - RNA, 19 nt, Artificial Sequence
  Synthetic
uacuuauagacuagaaugu

SEQ ID NO: 396362 - RNA, 20 nt, Artificial Sequence
  Synthetic
cuacuuauagacuagaaugu

SEQ ID NO: 396363 - RNA, 21 nt, Artificial Sequence
  Synthetic
gcuacuuauagacuagaaugu

SEQ ID NO: 396364 - RNA, 22 nt, Artificial Sequence
  Synthetic
ugcuacuuauagacuagaaugu

SEQ ID NO: 396365 - RNA, 23 nt, Artificial Sequence
  Synthetic
gugcuacuuauagacuagaaugu

SEQ ID NO: 396366 - RNA, 24 nt, Artificial Sequence
  Synthetic
ugugcuacuuauagacuagaaugu

SEQ ID NO: 396367 - RNA, 18 nt, Artificial Sequence
  Synthetic
uuaucgaaaacggaaugu

SEQ ID NO: 396368 - RNA, 19 nt, Artificial Sequence
  Synthetic
cuuaucgaaaacggaaugu

SEQ ID NO: 396369 - RNA, 20 nt, Artificial Sequence
  Synthetic
gcuuaucgaaaacggaaugu

SEQ ID NO: 396370 - RNA, 21 nt, Artificial Sequence
  Synthetic
ggcuuaucgaaaacggaaugu

SEQ ID NO: 396371 - RNA, 22 nt, Artificial Sequence
  Synthetic
uggcuuaucgaaaacggaaugu

SEQ ID NO: 396372 - RNA, 23 nt, Artificial Sequence
  Synthetic
cuggcuuaucgaaaacggaaugu

SEQ ID NO: 396373 - RNA, 24 nt, Artificial Sequence
  Synthetic
acuggcuuaucgaaaacggaaugu

SEQ ID NO: 396374 - RNA, 18 nt, Artificial Sequence
  Synthetic
aaaaguuaccuggaaugu

SEQ ID NO: 396375 - RNA, 19 nt, Artificial Sequence
  Synthetic
caaaaguuaccuggaaugu

SEQ ID NO: 396376 - RNA, 20 nt, Artificial Sequence
  Synthetic
ucaaaaguuaccuggaaugu

SEQ ID NO: 396377 - RNA, 21 nt, Artificial Sequence
  Synthetic
uucaaaaguuaccuggaaugu

SEQ ID NO: 396378 - RNA, 22 nt, Artificial Sequence
  Synthetic
auucaaaaguuaccuggaaugu

SEQ ID NO: 396379 - RNA, 23 nt, Artificial Sequence
  Synthetic
aauucaaaaguuaccuggaaugu

SEQ ID NO: 396380 - RNA, 24 nt, Artificial Sequence
  Synthetic
gaauucaaaaguuaccuggaaugu

SEQ ID NO: 396381 - RNA, 18 nt, Artificial Sequence
  Synthetic
uuaucacaucuggaaugu

SEQ ID NO: 396382 - RNA, 19 nt, Artificial Sequence
  Synthetic
uuuaucacaucuggaaugu

SEQ ID NO: 396383 - RNA, 20 nt, Artificial Sequence
  Synthetic
uuuuaucacaucuggaaugu

SEQ ID NO: 396384 - RNA, 21 nt, Artificial Sequence
  Synthetic
guuuuaucacaucuggaaugu

SEQ ID NO: 396385 - RNA, 22 nt, Artificial Sequence
  Synthetic
uguuuuaucacaucuggaaugu

SEQ ID NO: 396386 - RNA, 23 nt, Artificial Sequence
  Synthetic
guguuuuaucacaucuggaaugu

SEQ ID NO: 396387 - RNA, 24 nt, Artificial Sequence
  Synthetic
uguguuuuaucacaucuggaaugu

SEQ ID NO: 396388 - RNA, 18 nt, Artificial Sequence
  Synthetic
uugaaauuucuggaaugu

SEQ ID NO: 396389 - RNA, 19 nt, Artificial Sequence
  Synthetic
uuugaaauuucuggaaugu

SEQ ID NO: 396390 - RNA, 20 nt, Artificial Sequence
  Synthetic
cuuugaaauuucuggaaugu

SEQ ID NO: 396391 - RNA, 21 nt, Artificial Sequence
  Synthetic
ucuuugaaauuucuggaaugu

SEQ ID NO: 396392 - RNA, 22 nt, Artificial Sequence
  Synthetic
uucuuugaaauuucuggaaugu

SEQ ID NO: 396393 - RNA, 23 nt, Artificial Sequence
  Synthetic
uuucuuugaaauuucuggaaugu

SEQ ID NO: 396394 - RNA, 24 nt, Artificial Sequence
  Synthetic
guuucuuugaaauuucuggaaugu

SEQ ID NO: 396395 - RNA, 18 nt, Artificial Sequence
  Synthetic
guagagaucuuggaaugu

SEQ ID NO: 396396 - RNA, 19 nt, Artificial Sequence
  Synthetic
gguagagaucuuggaaugu

SEQ ID NO: 396397 - RNA, 20 nt, Artificial Sequence
  Synthetic
ugguagagaucuuggaaugu

SEQ ID NO: 396398 - RNA, 21 nt, Artificial Sequence
  Synthetic
uugguagagaucuuggaaugu

SEQ ID NO: 396399 - RNA, 22 nt, Artificial Sequence
  Synthetic
guugguagagaucuuggaaugu

SEQ ID NO: 396400 - RNA, 23 nt, Artificial Sequence
  Synthetic
uguugguagagaucuuggaaugu

SEQ ID NO: 396401 - RNA, 24 nt, Artificial Sequence
  Synthetic
auguugguagagaucuuggaaugu

SEQ ID NO: 396402 - RNA, 18 nt, Artificial Sequence
  Synthetic
ucucacuucaaugaaugu

SEQ ID NO: 396403 - RNA, 19 nt, Artificial Sequence
  Synthetic
cucucacuucaaugaaugu

SEQ ID NO: 396404 - RNA, 20 nt, Artificial Sequence
  Synthetic
ccucucacuucaaugaaugu

SEQ ID NO: 396405 - RNA, 21 nt, Artificial Sequence
  Synthetic
uccucucacuucaaugaaugu

SEQ ID NO: 396406 - RNA, 22 nt, Artificial Sequence
  Synthetic
auccucucacuucaaugaaugu

SEQ ID NO: 396407 - RNA, 23 nt, Artificial Sequence
  Synthetic
cauccucucacuucaaugaaugu

SEQ ID NO: 396408 - RNA, 24 nt, Artificial Sequence
  Synthetic
gcauccucucacuucaaugaaugu

SEQ ID NO: 396409 - RNA, 18 nt, Artificial Sequence
  Synthetic
gagaaggguaaugaaugu

SEQ ID NO: 396410 - RNA, 19 nt, Artificial Sequence
  Synthetic
ggagaaggguaaugaaugu

SEQ ID NO: 396411 - RNA, 20 nt, Artificial Sequence
  Synthetic
aggagaaggguaaugaaugu

SEQ ID NO: 396412 - RNA, 21 nt, Artificial Sequence
  Synthetic
gaggagaaggguaaugaaugu

SEQ ID NO: 396413 - RNA, 22 nt, Artificial Sequence
  Synthetic
ugaggagaaggguaaugaaugu

SEQ ID NO: 396414 - RNA, 23 nt, Artificial Sequence
  Synthetic
gugaggagaaggguaaugaaugu

SEQ ID NO: 396415 - RNA, 24 nt, Artificial Sequence
  Synthetic
ugugaggagaaggguaaugaaugu

SEQ ID NO: 396416 - RNA, 18 nt, Artificial Sequence
  Synthetic
agagaguuucaugaaugu

SEQ ID NO: 396417 - RNA, 19 nt, Artificial Sequence
  Synthetic
gagagaguuucaugaaugu

SEQ ID NO: 396418 - RNA, 20 nt, Artificial Sequence
  Synthetic
agagagaguuucaugaaugu

SEQ ID NO: 396419 - RNA, 21 nt, Artificial Sequence
  Synthetic
gagagagaguuucaugaaugu

SEQ ID NO: 396420 - RNA, 22 nt, Artificial Sequence
  Synthetic
ugagagagaguuucaugaaugu

SEQ ID NO: 396421 - RNA, 23 nt, Artificial Sequence
  Synthetic
augagagagaguuucaugaaugu

SEQ ID NO: 396422 - RNA, 24 nt, Artificial Sequence
  Synthetic
uaugagagagaguuucaugaaugu

SEQ ID NO: 396423 - RNA, 18 nt, Artificial Sequence
  Synthetic
uuuccguucccugaaugu

SEQ ID NO: 396424 - RNA, 19 nt, Artificial Sequence
  Synthetic
cuuuccguucccugaaugu

SEQ ID NO: 396425 - RNA, 20 nt, Artificial Sequence
  Synthetic
gcuuuccguucccugaaugu

SEQ ID NO: 396426 - RNA, 21 nt, Artificial Sequence
  Synthetic
ugcuuuccguucccugaaugu

SEQ ID NO: 396427 - RNA, 22 nt, Artificial Sequence
  Synthetic
cugcuuuccguucccugaaugu

SEQ ID NO: 396428 - RNA, 23 nt, Artificial Sequence
  Synthetic
ucugcuuuccguucccugaaugu

SEQ ID NO: 396429 - RNA, 24 nt, Artificial Sequence
  Synthetic
cucugcuuuccguucccugaaugu

SEQ ID NO: 396430 - RNA, 18 nt, Artificial Sequence
  Synthetic
auuauccaaucugaaugu

SEQ ID NO: 396431 - RNA, 19 nt, Artificial Sequence
  Synthetic
aauuauccaaucugaaugu

SEQ ID NO: 396432 - RNA, 20 nt, Artificial Sequence
  Synthetic
aaauuauccaaucugaaugu

SEQ ID NO: 396433 - RNA, 21 nt, Artificial Sequence
  Synthetic
aaaauuauccaaucugaaugu

SEQ ID NO: 396434 - RNA, 22 nt, Artificial Sequence
  Synthetic
aaaaauuauccaaucugaaugu

SEQ ID NO: 396435 - RNA, 23 nt, Artificial Sequence
  Synthetic
uaaaaauuauccaaucugaaugu

SEQ ID NO: 396436 - RNA, 24 nt, Artificial Sequence
  Synthetic
auaaaaauuauccaaucugaaugu

SEQ ID NO: 396437 - RNA, 18 nt, Artificial Sequence
  Synthetic
ucuuuauauucugaaugu

SEQ ID NO: 396438 - RNA, 19 nt, Artificial Sequence
  Synthetic
aucuuuauauucugaaugu

SEQ ID NO: 396439 - RNA, 20 nt, Artificial Sequence
  Synthetic
uaucuuuauauucugaaugu

SEQ ID NO: 396440 - RNA, 21 nt, Artificial Sequence
  Synthetic
uuaucuuuauauucugaaugu

SEQ ID NO: 396441 - RNA, 22 nt, Artificial Sequence
  Synthetic
auuaucuuuauauucugaaugu

SEQ ID NO: 396442 - RNA, 23 nt, Artificial Sequence
  Synthetic
uauuaucuuuauauucugaaugu

SEQ ID NO: 396443 - RNA, 24 nt, Artificial Sequence
  Synthetic
cuauuaucuuuauauucugaaugu

SEQ ID NO: 396444 - RNA, 18 nt, Artificial Sequence
  Synthetic
aaauguauuguugaaugu

SEQ ID NO: 396445 - RNA, 19 nt, Artificial Sequence
  Synthetic
caaauguauuguugaaugu

SEQ ID NO: 396446 - RNA, 20 nt, Artificial Sequence
  Synthetic
ucaaauguauuguugaaugu

SEQ ID NO: 396447 - RNA, 21 nt, Artificial Sequence
  Synthetic
gucaaauguauuguugaaugu

SEQ ID NO: 396448 - RNA, 22 nt, Artificial Sequence
  Synthetic
agucaaauguauuguugaaugu

SEQ ID NO: 396449 - RNA, 23 nt, Artificial Sequence
  Synthetic
aagucaaauguauuguugaaugu

SEQ ID NO: 396450 - RNA, 24 nt, Artificial Sequence
  Synthetic
aaagucaaauguauuguugaaugu

SEQ ID NO: 396451 - RNA, 18 nt, Artificial Sequence
  Synthetic
uuauugguuguugaaugu

SEQ ID NO: 396452 - RNA, 19 nt, Artificial Sequence
  Synthetic
uuuauugguuguugaaugu

SEQ ID NO: 396453 - RNA, 20 nt, Artificial Sequence
  Synthetic
uuuuauugguuguugaaugu

SEQ ID NO: 396454 - RNA, 21 nt, Artificial Sequence
  Synthetic
auuuuauugguuguugaaugu

SEQ ID NO: 396455 - RNA, 22 nt, Artificial Sequence
  Synthetic
uauuuuauugguuguugaaugu

SEQ ID NO: 396456 - RNA, 23 nt, Artificial Sequence
  Synthetic
uuauuuuauugguuguugaaugu

SEQ ID NO: 396457 - RNA, 24 nt, Artificial Sequence
  Synthetic
uuuauuuuauugguuguugaaugu

SEQ ID NO: 396458 - RNA, 18 nt, Artificial Sequence
  Synthetic
auuuuacaauuugaaugu

SEQ ID NO: 396459 - RNA, 19 nt, Artificial Sequence
  Synthetic
uauuuuacaauuugaaugu

SEQ ID NO: 396460 - RNA, 20 nt, Artificial Sequence
  Synthetic
auauuuuacaauuugaaugu

SEQ ID NO: 396461 - RNA, 21 nt, Artificial Sequence
  Synthetic
uauauuuuacaauuugaaugu

SEQ ID NO: 396462 - RNA, 22 nt, Artificial Sequence
  Synthetic
auauauuuuacaauuugaaugu

SEQ ID NO: 396463 - RNA, 23 nt, Artificial Sequence
  Synthetic
gauauauuuuacaauuugaaugu

SEQ ID NO: 396464 - RNA, 24 nt, Artificial Sequence
  Synthetic
cgauauauuuuacaauuugaaugu

SEQ ID NO: 396465 - RNA, 18 nt, Artificial Sequence
  Synthetic
uuggaaaccuuugaaugu

SEQ ID NO: 396466 - RNA, 19 nt, Artificial Sequence
  Synthetic
auuggaaaccuuugaaugu

SEQ ID NO: 396467 - RNA, 20 nt, Artificial Sequence
  Synthetic
uauuggaaaccuuugaaugu

SEQ ID NO: 396468 - RNA, 21 nt, Artificial Sequence
  Synthetic
uuauuggaaaccuuugaaugu

SEQ ID NO: 396469 - RNA, 22 nt, Artificial Sequence
  Synthetic
guuauuggaaaccuuugaaugu

SEQ ID NO: 396470 - RNA, 23 nt, Artificial Sequence
  Synthetic
uguuauuggaaaccuuugaaugu

SEQ ID NO: 396471 - RNA, 24 nt, Artificial Sequence
  Synthetic
auguuauuggaaaccuuugaaugu

SEQ ID NO: 396472 - RNA, 18 nt, Artificial Sequence
  Synthetic
ccuuauguaaaauaaugu

SEQ ID NO: 396473 - RNA, 19 nt, Artificial Sequence
  Synthetic
accuuauguaaaauaaugu

SEQ ID NO: 396474 - RNA, 20 nt, Artificial Sequence
  Synthetic
caccuuauguaaaauaaugu

SEQ ID NO: 396475 - RNA, 21 nt, Artificial Sequence
  Synthetic
ccaccuuauguaaaauaaugu

SEQ ID NO: 396476 - RNA, 22 nt, Artificial Sequence
  Synthetic
accaccuuauguaaaauaaugu

SEQ ID NO: 396477 - RNA, 23 nt, Artificial Sequence
  Synthetic
caccaccuuauguaaaauaaugu

SEQ ID NO: 396478 - RNA, 24 nt, Artificial Sequence
  Synthetic
ccaccaccuuauguaaaauaaugu

SEQ ID NO: 396479 - RNA, 18 nt, Artificial Sequence
  Synthetic
aggcagcaggaauaaugu

SEQ ID NO: 396480 - RNA, 19 nt, Artificial Sequence
  Synthetic
caggcagcaggaauaaugu

SEQ ID NO: 396481 - RNA, 20 nt, Artificial Sequence
  Synthetic
acaggcagcaggaauaaugu

SEQ ID NO: 396482 - RNA, 21 nt, Artificial Sequence
  Synthetic
cacaggcagcaggaauaaugu

SEQ ID NO: 396483 - RNA, 22 nt, Artificial Sequence
  Synthetic
ccacaggcagcaggaauaaugu

SEQ ID NO: 396484 - RNA, 23 nt, Artificial Sequence
  Synthetic
uccacaggcagcaggaauaaugu

SEQ ID NO: 396485 - RNA, 24 nt, Artificial Sequence
  Synthetic
guccacaggcagcaggaauaaugu

SEQ ID NO: 396486 - RNA, 18 nt, Artificial Sequence
  Synthetic
ucuucuggaacauaaugu

SEQ ID NO: 396487 - RNA, 19 nt, Artificial Sequence
  Synthetic
cucuucuggaacauaaugu

SEQ ID NO: 396488 - RNA, 20 nt, Artificial Sequence
  Synthetic
ucucuucuggaacauaaugu

SEQ ID NO: 396489 - RNA, 21 nt, Artificial Sequence
  Synthetic
cucucuucuggaacauaaugu

SEQ ID NO: 396490 - RNA, 22 nt, Artificial Sequence
  Synthetic
ucucucuucuggaacauaaugu

SEQ ID NO: 396491 - RNA, 23 nt, Artificial Sequence
  Synthetic
cucucucuucuggaacauaaugu

SEQ ID NO: 396492 - RNA, 24 nt, Artificial Sequence
  Synthetic
ucucucucuucuggaacauaaugu

SEQ ID NO: 396493 - RNA, 18 nt, Artificial Sequence
  Synthetic
uauaaggcaucauaaugu

SEQ ID NO: 396494 - RNA, 19 nt, Artificial Sequence
  Synthetic
auauaaggcaucauaaugu

SEQ ID NO: 396495 - RNA, 20 nt, Artificial Sequence
  Synthetic
uauauaaggcaucauaaugu

SEQ ID NO: 396496 - RNA, 21 nt, Artificial Sequence
  Synthetic
guauauaaggcaucauaaugu

SEQ ID NO: 396497 - RNA, 22 nt, Artificial Sequence
  Synthetic
aguauauaaggcaucauaaugu

SEQ ID NO: 396498 - RNA, 23 nt, Artificial Sequence
  Synthetic
uaguauauaaggcaucauaaugu

SEQ ID NO: 396499 - RNA, 24 nt, Artificial Sequence
  Synthetic
uuaguauauaaggcaucauaaugu

SEQ ID NO: 396500 - RNA, 18 nt, Artificial Sequence
  Synthetic
guuccuaaaauauaaugu

SEQ ID NO: 396501 - RNA, 19 nt, Artificial Sequence
  Synthetic
gguuccuaaaauauaaugu

SEQ ID NO: 396502 - RNA, 20 nt, Artificial Sequence
  Synthetic
agguuccuaaaauauaaugu

SEQ ID NO: 396503 - RNA, 21 nt, Artificial Sequence
  Synthetic
uagguuccuaaaauauaaugu

SEQ ID NO: 396504 - RNA, 22 nt, Artificial Sequence
  Synthetic
uuagguuccuaaaauauaaugu

SEQ ID NO: 396505 - RNA, 23 nt, Artificial Sequence
  Synthetic
auuagguuccuaaaauauaaugu

SEQ ID NO: 396506 - RNA, 24 nt, Artificial Sequence
  Synthetic
gauuagguuccuaaaauauaaugu

SEQ ID NO: 396507 - RNA, 18 nt, Artificial Sequence
  Synthetic
cagaaauggcucuaaugu

SEQ ID NO: 396508 - RNA, 19 nt, Artificial Sequence
  Synthetic
acagaaauggcucuaaugu

SEQ ID NO: 396509 - RNA, 20 nt, Artificial Sequence
  Synthetic
aacagaaauggcucuaaugu

SEQ ID NO: 396510 - RNA, 21 nt, Artificial Sequence
  Synthetic
gaacagaaauggcucuaaugu

SEQ ID NO: 396511 - RNA, 22 nt, Artificial Sequence
  Synthetic
ugaacagaaauggcucuaaugu

SEQ ID NO: 396512 - RNA, 23 nt, Artificial Sequence
  Synthetic
cugaacagaaauggcucuaaugu

SEQ ID NO: 396513 - RNA, 24 nt, Artificial Sequence
  Synthetic
ucugaacagaaauggcucuaaugu

SEQ ID NO: 396514 - RNA, 18 nt, Artificial Sequence
  Synthetic
gagaccaagaaguaaugu

SEQ ID NO: 396515 - RNA, 19 nt, Artificial Sequence
  Synthetic
ggagaccaagaaguaaugu

SEQ ID NO: 396516 - RNA, 20 nt, Artificial Sequence
  Synthetic
uggagaccaagaaguaaugu

SEQ ID NO: 396517 - RNA, 21 nt, Artificial Sequence
  Synthetic
guggagaccaagaaguaaugu

SEQ ID NO: 396518 - RNA, 22 nt, Artificial Sequence
  Synthetic
uguggagaccaagaaguaaugu

SEQ ID NO: 396519 - RNA, 23 nt, Artificial Sequence
  Synthetic
cuguggagaccaagaaguaaugu

SEQ ID NO: 396520 - RNA, 24 nt, Artificial Sequence
  Synthetic
ccuguggagaccaagaaguaaugu

SEQ ID NO: 396521 - RNA, 18 nt, Artificial Sequence
  Synthetic
ugaaguugcucguaaugu

SEQ ID NO: 396522 - RNA, 19 nt, Artificial Sequence
  Synthetic
cugaaguugcucguaaugu

SEQ ID NO: 396523 - RNA, 20 nt, Artificial Sequence
  Synthetic
gcugaaguugcucguaaugu

SEQ ID NO: 396524 - RNA, 21 nt, Artificial Sequence
  Synthetic
ggcugaaguugcucguaaugu

SEQ ID NO: 396525 - RNA, 22 nt, Artificial Sequence
  Synthetic
uggcugaaguugcucguaaugu

SEQ ID NO: 396526 - RNA, 23 nt, Artificial Sequence
  Synthetic
uuggcugaaguugcucguaaugu

SEQ ID NO: 396527 - RNA, 24 nt, Artificial Sequence
  Synthetic
cuuggcugaaguugcucguaaugu

SEQ ID NO: 396528 - RNA, 18 nt, Artificial Sequence
  Synthetic
aacacuuuaagguaaugu

SEQ ID NO: 396529 - RNA, 19 nt, Artificial Sequence
  Synthetic
aaacacuuuaagguaaugu

SEQ ID NO: 396530 - RNA, 20 nt, Artificial Sequence
  Synthetic
aaaacacuuuaagguaaugu

SEQ ID NO: 396531 - RNA, 21 nt, Artificial Sequence
  Synthetic
aaaaacacuuuaagguaaugu

SEQ ID NO: 396532 - RNA, 22 nt, Artificial Sequence
  Synthetic
gaaaaacacuuuaagguaaugu

SEQ ID NO: 396533 - RNA, 23 nt, Artificial Sequence
  Synthetic
ggaaaaacacuuuaagguaaugu

SEQ ID NO: 396534 - RNA, 24 nt, Artificial Sequence
  Synthetic
uggaaaaacacuuuaagguaaugu

SEQ ID NO: 396535 - RNA, 18 nt, Artificial Sequence
  Synthetic
aauagaacaugguaaugu

SEQ ID NO: 396536 - RNA, 19 nt, Artificial Sequence
  Synthetic
caauagaacaugguaaugu

SEQ ID NO: 396537 - RNA, 20 nt, Artificial Sequence
  Synthetic
gcaauagaacaugguaaugu

SEQ ID NO: 396538 - RNA, 21 nt, Artificial Sequence
  Synthetic
ugcaauagaacaugguaaugu

SEQ ID NO: 396539 - RNA, 22 nt, Artificial Sequence
  Synthetic
uugcaauagaacaugguaaugu

SEQ ID NO: 396540 - RNA, 23 nt, Artificial Sequence
  Synthetic
auugcaauagaacaugguaaugu

SEQ ID NO: 396541 - RNA, 24 nt, Artificial Sequence
  Synthetic
uauugcaauagaacaugguaaugu

SEQ ID NO: 396542 - RNA, 18 nt, Artificial Sequence
  Synthetic
ggagacauuugguaaugu

SEQ ID NO: 396543 - RNA, 19 nt, Artificial Sequence
  Synthetic
aggagacauuugguaaugu

SEQ ID NO: 396544 - RNA, 20 nt, Artificial Sequence
  Synthetic
caggagacauuugguaaugu

SEQ ID NO: 396545 - RNA, 21 nt, Artificial Sequence
  Synthetic
ucaggagacauuugguaaugu

SEQ ID NO: 396546 - RNA, 22 nt, Artificial Sequence
  Synthetic
cucaggagacauuugguaaugu

SEQ ID NO: 396547 - RNA, 23 nt, Artificial Sequence
  Synthetic
ccucaggagacauuugguaaugu

SEQ ID NO: 396548 - RNA, 24 nt, Artificial Sequence
  Synthetic
uccucaggagacauuugguaaugu

SEQ ID NO: 396549 - RNA, 18 nt, Artificial Sequence
  Synthetic
agaguuguuugguaaugu

SEQ ID NO: 396550 - RNA, 19 nt, Artificial Sequence
  Synthetic
cagaguuguuugguaaugu

SEQ ID NO: 396551 - RNA, 20 nt, Artificial Sequence
  Synthetic
acagaguuguuugguaaugu

SEQ ID NO: 396552 - RNA, 21 nt, Artificial Sequence
  Synthetic
aacagaguuguuugguaaugu

SEQ ID NO: 396553 - RNA, 22 nt, Artificial Sequence
  Synthetic
aaacagaguuguuugguaaugu

SEQ ID NO: 396554 - RNA, 23 nt, Artificial Sequence
  Synthetic
gaaacagaguuguuugguaaugu

SEQ ID NO: 396555 - RNA, 24 nt, Artificial Sequence
  Synthetic
ugaaacagaguuguuugguaaugu

SEQ ID NO: 396556 - RNA, 18 nt, Artificial Sequence
  Synthetic
aaauuugaaaauuaaugu

SEQ ID NO: 396557 - RNA, 19 nt, Artificial Sequence
  Synthetic
aaaauuugaaaauuaaugu

SEQ ID NO: 396558 - RNA, 20 nt, Artificial Sequence
  Synthetic
uaaaauuugaaaauuaaugu

SEQ ID NO: 396559 - RNA, 21 nt, Artificial Sequence
  Synthetic
uuaaaauuugaaaauuaaugu

SEQ ID NO: 396560 - RNA, 22 nt, Artificial Sequence
  Synthetic
cuuaaaauuugaaaauuaaugu

SEQ ID NO: 396561 - RNA, 23 nt, Artificial Sequence
  Synthetic
acuuaaaauuugaaaauuaaugu

SEQ ID NO: 396562 - RNA, 24 nt, Artificial Sequence
  Synthetic
uacuuaaaauuugaaaauuaaugu

SEQ ID NO: 396563 - RNA, 18 nt, Artificial Sequence
  Synthetic
gucucccauuauuaaugu

SEQ ID NO: 396564 - RNA, 19 nt, Artificial Sequence
  Synthetic
agucucccauuauuaaugu

SEQ ID NO: 396565 - RNA, 20 nt, Artificial Sequence
  Synthetic
aagucucccauuauuaaugu

SEQ ID NO: 396566 - RNA, 21 nt, Artificial Sequence
  Synthetic
aaagucucccauuauuaaugu

SEQ ID NO: 396567 - RNA, 22 nt, Artificial Sequence
  Synthetic
uaaagucucccauuauuaaugu

SEQ ID NO: 396568 - RNA, 23 nt, Artificial Sequence
  Synthetic
uuaaagucucccauuauuaaugu

SEQ ID NO: 396569 - RNA, 24 nt, Artificial Sequence
  Synthetic
guuaaagucucccauuauuaaugu

SEQ ID NO: 396570 - RNA, 18 nt, Artificial Sequence
  Synthetic
uuuucauggaguuaaugu

SEQ ID NO: 396571 - RNA, 19 nt, Artificial Sequence
  Synthetic
uuuuucauggaguuaaugu

SEQ ID NO: 396572 - RNA, 20 nt, Artificial Sequence
  Synthetic
auuuuucauggaguuaaugu

SEQ ID NO: 396573 - RNA, 21 nt, Artificial Sequence
  Synthetic
aauuuuucauggaguuaaugu

SEQ ID NO: 396574 - RNA, 22 nt, Artificial Sequence
  Synthetic
caauuuuucauggaguuaaugu

SEQ ID NO: 396575 - RNA, 23 nt, Artificial Sequence
  Synthetic
ucaauuuuucauggaguuaaugu

SEQ ID NO: 396576 - RNA, 24 nt, Artificial Sequence
  Synthetic
cucaauuuuucauggaguuaaugu

SEQ ID NO: 396577 - RNA, 18 nt, Artificial Sequence
  Synthetic
gaucuucauuguuaaugu

SEQ ID NO: 396578 - RNA, 19 nt, Artificial Sequence
  Synthetic
cgaucuucauuguuaaugu

SEQ ID NO: 396579 - RNA, 20 nt, Artificial Sequence
  Synthetic
acgaucuucauuguuaaugu

SEQ ID NO: 396580 - RNA, 21 nt, Artificial Sequence
  Synthetic
aacgaucuucauuguuaaugu

SEQ ID NO: 396581 - RNA, 22 nt, Artificial Sequence
  Synthetic
caacgaucuucauuguuaaugu

SEQ ID NO: 396582 - RNA, 23 nt, Artificial Sequence
  Synthetic
ccaacgaucuucauuguuaaugu

SEQ ID NO: 396583 - RNA, 24 nt, Artificial Sequence
  Synthetic
gccaacgaucuucauuguuaaugu

SEQ ID NO: 396584 - RNA, 18 nt, Artificial Sequence
  Synthetic
auugcauggauuuaaugu

SEQ ID NO: 396585 - RNA, 19 nt, Artificial Sequence
  Synthetic
gauugcauggauuuaaugu

SEQ ID NO: 396586 - RNA, 20 nt, Artificial Sequence
  Synthetic
agauugcauggauuuaaugu

SEQ ID NO: 396587 - RNA, 21 nt, Artificial Sequence
  Synthetic
uagauugcauggauuuaaugu

SEQ ID NO: 396588 - RNA, 22 nt, Artificial Sequence
  Synthetic
uuagauugcauggauuuaaugu

SEQ ID NO: 396589 - RNA, 23 nt, Artificial Sequence
  Synthetic
uuuagauugcauggauuuaaugu

SEQ ID NO: 396590 - RNA, 24 nt, Artificial Sequence
  Synthetic
auuuagauugcauggauuuaaugu

SEQ ID NO: 396591 - RNA, 18 nt, Artificial Sequence
  Synthetic
ucuaacgccaaaacaugu

SEQ ID NO: 396592 - RNA, 19 nt, Artificial Sequence
  Synthetic
uucuaacgccaaaacaugu

SEQ ID NO: 396593 - RNA, 20 nt, Artificial Sequence
  Synthetic
guucuaacgccaaaacaugu

SEQ ID NO: 396594 - RNA, 21 nt, Artificial Sequence
  Synthetic
aguucuaacgccaaaacaugu

SEQ ID NO: 396595 - RNA, 22 nt, Artificial Sequence
  Synthetic
aaguucuaacgccaaaacaugu

SEQ ID NO: 396596 - RNA, 23 nt, Artificial Sequence
  Synthetic
aaaguucuaacgccaaaacaugu

SEQ ID NO: 396597 - RNA, 24 nt, Artificial Sequence
  Synthetic
caaaguucuaacgccaaaacaugu

SEQ ID NO: 396598 - RNA, 18 nt, Artificial Sequence
  Synthetic
ugggugguucuaacaugu

SEQ ID NO: 396599 - RNA, 19 nt, Artificial Sequence
  Synthetic
uugggugguucuaacaugu

SEQ ID NO: 396600 - RNA, 20 nt, Artificial Sequence
  Synthetic
auugggugguucuaacaugu

SEQ ID NO: 396601 - RNA, 21 nt, Artificial Sequence
  Synthetic
aauugggugguucuaacaugu

SEQ ID NO: 396602 - RNA, 22 nt, Artificial Sequence
  Synthetic
uaauugggugguucuaacaugu

SEQ ID NO: 396603 - RNA, 23 nt, Artificial Sequence
  Synthetic
guaauugggugguucuaacaugu

SEQ ID NO: 396604 - RNA, 24 nt, Artificial Sequence
  Synthetic
gguaauugggugguucuaacaugu

SEQ ID NO: 396605 - RNA, 18 nt, Artificial Sequence
  Synthetic
cauagcguuguaacaugu

SEQ ID NO: 396606 - RNA, 19 nt, Artificial Sequence
  Synthetic
ucauagcguuguaacaugu

SEQ ID NO: 396607 - RNA, 20 nt, Artificial Sequence
  Synthetic
uucauagcguuguaacaugu

SEQ ID NO: 396608 - RNA, 21 nt, Artificial Sequence
  Synthetic
cuucauagcguuguaacaugu

SEQ ID NO: 396609 - RNA, 22 nt, Artificial Sequence
  Synthetic
acuucauagcguuguaacaugu

SEQ ID NO: 396610 - RNA, 23 nt, Artificial Sequence
  Synthetic
aacuucauagcguuguaacaugu

SEQ ID NO: 396611 - RNA, 24 nt, Artificial Sequence
  Synthetic
gaacuucauagcguuguaacaugu

SEQ ID NO: 396612 - RNA, 18 nt, Artificial Sequence
  Synthetic
agcuuucaucacacaugu

SEQ ID NO: 396613 - RNA, 19 nt, Artificial Sequence
  Synthetic
aagcuuucaucacacaugu

SEQ ID NO: 396614 - RNA, 20 nt, Artificial Sequence
  Synthetic
gaagcuuucaucacacaugu

SEQ ID NO: 396615 - RNA, 21 nt, Artificial Sequence
  Synthetic
ugaagcuuucaucacacaugu

SEQ ID NO: 396616 - RNA, 22 nt, Artificial Sequence
  Synthetic
cugaagcuuucaucacacaugu

SEQ ID NO: 396617 - RNA, 23 nt, Artificial Sequence
  Synthetic
gcugaagcuuucaucacacaugu

SEQ ID NO: 396618 - RNA, 24 nt, Artificial Sequence
  Synthetic
agcugaagcuuucaucacacaugu

SEQ ID NO: 396619 - RNA, 18 nt, Artificial Sequence
  Synthetic
auugcacaugacacaugu

SEQ ID NO: 396620 - RNA, 19 nt, Artificial Sequence
  Synthetic
gauugcacaugacacaugu

SEQ ID NO: 396621 - RNA, 20 nt, Artificial Sequence
  Synthetic
ggauugcacaugacacaugu

SEQ ID NO: 396622 - RNA, 21 nt, Artificial Sequence
  Synthetic
uggauugcacaugacacaugu

SEQ ID NO: 396623 - RNA, 22 nt, Artificial Sequence
  Synthetic
uuggauugcacaugacacaugu

SEQ ID NO: 396624 - RNA, 23 nt, Artificial Sequence
  Synthetic
uuuggauugcacaugacacaugu

SEQ ID NO: 396625 - RNA, 24 nt, Artificial Sequence
  Synthetic
auuuggauugcacaugacacaugu

SEQ ID NO: 396626 - RNA, 18 nt, Artificial Sequence
  Synthetic
acgaaaaauggcacaugu

SEQ ID NO: 396627 - RNA, 19 nt, Artificial Sequence
  Synthetic
uacgaaaaauggcacaugu

SEQ ID NO: 396628 - RNA, 20 nt, Artificial Sequence
  Synthetic
guacgaaaaauggcacaugu

SEQ ID NO: 396629 - RNA, 21 nt, Artificial Sequence
  Synthetic
gguacgaaaaauggcacaugu

SEQ ID NO: 396630 - RNA, 22 nt, Artificial Sequence
  Synthetic
agguacgaaaaauggcacaugu

SEQ ID NO: 396631 - RNA, 23 nt, Artificial Sequence
  Synthetic
aagguacgaaaaauggcacaugu

SEQ ID NO: 396632 - RNA, 24 nt, Artificial Sequence
  Synthetic
aaagguacgaaaaauggcacaugu

SEQ ID NO: 396633 - RNA, 18 nt, Artificial Sequence
  Synthetic
auuuauuuugucacaugu

SEQ ID NO: 396634 - RNA, 19 nt, Artificial Sequence
  Synthetic
aauuuauuuugucacaugu

SEQ ID NO: 396635 - RNA, 20 nt, Artificial Sequence
  Synthetic
gaauuuauuuugucacaugu

SEQ ID NO: 396636 - RNA, 21 nt, Artificial Sequence
  Synthetic
ugaauuuauuuugucacaugu

SEQ ID NO: 396637 - RNA, 22 nt, Artificial Sequence
  Synthetic
uugaauuuauuuugucacaugu

SEQ ID NO: 396638 - RNA, 23 nt, Artificial Sequence
  Synthetic
cuugaauuuauuuugucacaugu

SEQ ID NO: 396639 - RNA, 24 nt, Artificial Sequence
  Synthetic
ucuugaauuuauuuugucacaugu

SEQ ID NO: 396640 - RNA, 18 nt, Artificial Sequence
  Synthetic
cugcauuuuaagacaugu

SEQ ID NO: 396641 - RNA, 19 nt, Artificial Sequence
  Synthetic
acugcauuuuaagacaugu

SEQ ID NO: 396642 - RNA, 20 nt, Artificial Sequence
  Synthetic
aacugcauuuuaagacaugu

SEQ ID NO: 396643 - RNA, 21 nt, Artificial Sequence
  Synthetic
aaacugcauuuuaagacaugu

SEQ ID NO: 396644 - RNA, 22 nt, Artificial Sequence
  Synthetic
caaacugcauuuuaagacaugu

SEQ ID NO: 396645 - RNA, 23 nt, Artificial Sequence
  Synthetic
gcaaacugcauuuuaagacaugu

SEQ ID NO: 396646 - RNA, 24 nt, Artificial Sequence
  Synthetic
cgcaaacugcauuuuaagacaugu

SEQ ID NO: 396647 - RNA, 18 nt, Artificial Sequence
  Synthetic
ugaaggaggcagacaugu

SEQ ID NO: 396648 - RNA, 19 nt, Artificial Sequence
  Synthetic
gugaaggaggcagacaugu

SEQ ID NO: 396649 - RNA, 20 nt, Artificial Sequence
  Synthetic
ggugaaggaggcagacaugu

SEQ ID NO: 396650 - RNA, 21 nt, Artificial Sequence
  Synthetic
uggugaaggaggcagacaugu

SEQ ID NO: 396651 - RNA, 22 nt, Artificial Sequence
  Synthetic
cuggugaaggaggcagacaugu

SEQ ID NO: 396652 - RNA, 23 nt, Artificial Sequence
  Synthetic
ucuggugaaggaggcagacaugu

SEQ ID NO: 396653 - RNA, 24 nt, Artificial Sequence
  Synthetic
aucuggugaaggaggcagacaugu

SEQ ID NO: 396654 - RNA, 18 nt, Artificial Sequence
  Synthetic
auauuccaggagacaugu

SEQ ID NO: 396655 - RNA, 19 nt, Artificial Sequence
  Synthetic
cauauuccaggagacaugu

SEQ ID NO: 396656 - RNA, 20 nt, Artificial Sequence
  Synthetic
ucauauuccaggagacaugu

SEQ ID NO: 396657 - RNA, 21 nt, Artificial Sequence
  Synthetic
uucauauuccaggagacaugu

SEQ ID NO: 396658 - RNA, 22 nt, Artificial Sequence
  Synthetic
guucauauuccaggagacaugu

SEQ ID NO: 396659 - RNA, 23 nt, Artificial Sequence
  Synthetic
uguucauauuccaggagacaugu

SEQ ID NO: 396660 - RNA, 24 nt, Artificial Sequence
  Synthetic
auguucauauuccaggagacaugu

SEQ ID NO: 396661 - RNA, 18 nt, Artificial Sequence
  Synthetic
auauugaaugagacaugu

SEQ ID NO: 396662 - RNA, 19 nt, Artificial Sequence
  Synthetic
cauauugaaugagacaugu

SEQ ID NO: 396663 - RNA, 20 nt, Artificial Sequence
  Synthetic
gcauauugaaugagacaugu

SEQ ID NO: 396664 - RNA, 21 nt, Artificial Sequence
  Synthetic
ugcauauugaaugagacaugu

SEQ ID NO: 396665 - RNA, 22 nt, Artificial Sequence
  Synthetic
uugcauauugaaugagacaugu

SEQ ID NO: 396666 - RNA, 23 nt, Artificial Sequence
  Synthetic
cuugcauauugaaugagacaugu

SEQ ID NO: 396667 - RNA, 24 nt, Artificial Sequence
  Synthetic
ucuugcauauugaaugagacaugu

SEQ ID NO: 396668 - RNA, 18 nt, Artificial Sequence
  Synthetic
cuugcccucccaccaugu

SEQ ID NO: 396669 - RNA, 19 nt, Artificial Sequence
  Synthetic
ccuugcccucccaccaugu

SEQ ID NO: 396670 - RNA, 20 nt, Artificial Sequence
  Synthetic
uccuugcccucccaccaugu

SEQ ID NO: 396671 - RNA, 21 nt, Artificial Sequence
  Synthetic
uuccuugcccucccaccaugu

SEQ ID NO: 396672 - RNA, 22 nt, Artificial Sequence
  Synthetic
cuuccuugcccucccaccaugu

SEQ ID NO: 396673 - RNA, 23 nt, Artificial Sequence
  Synthetic
gcuuccuugcccucccaccaugu

SEQ ID NO: 396674 - RNA, 24 nt, Artificial Sequence
  Synthetic
agcuuccuugcccucccaccaugu

SEQ ID NO: 396675 - RNA, 18 nt, Artificial Sequence
  Synthetic
agggcuuuuugaccaugu

SEQ ID NO: 396676 - RNA, 19 nt, Artificial Sequence
  Synthetic
aagggcuuuuugaccaugu

SEQ ID NO: 396677 - RNA, 20 nt, Artificial Sequence
  Synthetic
aaagggcuuuuugaccaugu

SEQ ID NO: 396678 - RNA, 21 nt, Artificial Sequence
  Synthetic
caaagggcuuuuugaccaugu

SEQ ID NO: 396679 - RNA, 22 nt, Artificial Sequence
  Synthetic
acaaagggcuuuuugaccaugu

SEQ ID NO: 396680 - RNA, 23 nt, Artificial Sequence
  Synthetic
cacaaagggcuuuuugaccaugu

SEQ ID NO: 396681 - RNA, 24 nt, Artificial Sequence
  Synthetic
ucacaaagggcuuuuugaccaugu

SEQ ID NO: 396682 - RNA, 18 nt, Artificial Sequence
  Synthetic
auaggguucagcccaugu

SEQ ID NO: 396683 - RNA, 19 nt, Artificial Sequence
  Synthetic
cauaggguucagcccaugu

SEQ ID NO: 396684 - RNA, 20 nt, Artificial Sequence
  Synthetic
gcauaggguucagcccaugu

SEQ ID NO: 396685 - RNA, 21 nt, Artificial Sequence
  Synthetic
ugcauaggguucagcccaugu

SEQ ID NO: 396686 - RNA, 22 nt, Artificial Sequence
  Synthetic
cugcauaggguucagcccaugu

SEQ ID NO: 396687 - RNA, 23 nt, Artificial Sequence
  Synthetic
acugcauaggguucagcccaugu

SEQ ID NO: 396688 - RNA, 24 nt, Artificial Sequence
  Synthetic
aacugcauaggguucagcccaugu

SEQ ID NO: 396689 - RNA, 18 nt, Artificial Sequence
  Synthetic
cugccuaucuucccaugu

SEQ ID NO: 396690 - RNA, 19 nt, Artificial Sequence
  Synthetic
acugccuaucuucccaugu

SEQ ID NO: 396691 - RNA, 20 nt, Artificial Sequence
  Synthetic
gacugccuaucuucccaugu

SEQ ID NO: 396692 - RNA, 21 nt, Artificial Sequence
  Synthetic
agacugccuaucuucccaugu

SEQ ID NO: 396693 - RNA, 22 nt, Artificial Sequence
  Synthetic
aagacugccuaucuucccaugu

SEQ ID NO: 396694 - RNA, 23 nt, Artificial Sequence
  Synthetic
caagacugccuaucuucccaugu

SEQ ID NO: 396695 - RNA, 24 nt, Artificial Sequence
  Synthetic
ucaagacugccuaucuucccaugu

SEQ ID NO: 396696 - RNA, 18 nt, Artificial Sequence
  Synthetic
gucacaggucagccaugu

SEQ ID NO: 396697 - RNA, 19 nt, Artificial Sequence
  Synthetic
ugucacaggucagccaugu

SEQ ID NO: 396698 - RNA, 20 nt, Artificial Sequence
  Synthetic
cugucacaggucagccaugu

SEQ ID NO: 396699 - RNA, 21 nt, Artificial Sequence
  Synthetic
gcugucacaggucagccaugu

SEQ ID NO: 396700 - RNA, 22 nt, Artificial Sequence
  Synthetic
agcugucacaggucagccaugu

SEQ ID NO: 396701 - RNA, 23 nt, Artificial Sequence
  Synthetic
uagcugucacaggucagccaugu

SEQ ID NO: 396702 - RNA, 24 nt, Artificial Sequence
  Synthetic
auagcugucacaggucagccaugu

SEQ ID NO: 396703 - RNA, 18 nt, Artificial Sequence
  Synthetic
ugacacugggagccaugu

SEQ ID NO: 396704 - RNA, 19 nt, Artificial Sequence
  Synthetic
cugacacugggagccaugu

SEQ ID NO: 396705 - RNA, 20 nt, Artificial Sequence
  Synthetic
gcugacacugggagccaugu

SEQ ID NO: 396706 - RNA, 21 nt, Artificial Sequence
  Synthetic
cgcugacacugggagccaugu

SEQ ID NO: 396707 - RNA, 22 nt, Artificial Sequence
  Synthetic
gcgcugacacugggagccaugu

SEQ ID NO: 396708 - RNA, 23 nt, Artificial Sequence
  Synthetic
agcgcugacacugggagccaugu

SEQ ID NO: 396709 - RNA, 24 nt, Artificial Sequence
  Synthetic
uagcgcugacacugggagccaugu

SEQ ID NO: 396710 - RNA, 18 nt, Artificial Sequence
  Synthetic
ggauucaggccuccaugu

SEQ ID NO: 396711 - RNA, 19 nt, Artificial Sequence
  Synthetic
aggauucaggccuccaugu

SEQ ID NO: 396712 - RNA, 20 nt, Artificial Sequence
  Synthetic
uaggauucaggccuccaugu

SEQ ID NO: 396713 - RNA, 21 nt, Artificial Sequence
  Synthetic
uuaggauucaggccuccaugu

SEQ ID NO: 396714 - RNA, 22 nt, Artificial Sequence
  Synthetic
guuaggauucaggccuccaugu

SEQ ID NO: 396715 - RNA, 23 nt, Artificial Sequence
  Synthetic
gguuaggauucaggccuccaugu

SEQ ID NO: 396716 - RNA, 24 nt, Artificial Sequence
  Synthetic
ugguuaggauucaggccuccaugu

SEQ ID NO: 396717 - RNA, 18 nt, Artificial Sequence
  Synthetic
aggggacucuguccaugu

SEQ ID NO: 396718 - RNA, 19 nt, Artificial Sequence
  Synthetic
uaggggacucuguccaugu

SEQ ID NO: 396719 - RNA, 20 nt, Artificial Sequence
  Synthetic
uuaggggacucuguccaugu

SEQ ID NO: 396720 - RNA, 21 nt, Artificial Sequence
  Synthetic
uuuaggggacucuguccaugu

SEQ ID NO: 396721 - RNA, 22 nt, Artificial Sequence
  Synthetic
auuuaggggacucuguccaugu

SEQ ID NO: 396722 - RNA, 23 nt, Artificial Sequence
  Synthetic
cauuuaggggacucuguccaugu

SEQ ID NO: 396723 - RNA, 24 nt, Artificial Sequence
  Synthetic
gcauuuaggggacucuguccaugu

SEQ ID NO: 396724 - RNA, 18 nt, Artificial Sequence
  Synthetic
ucucuucugcuuccaugu

SEQ ID NO: 396725 - RNA, 19 nt, Artificial Sequence
  Synthetic
uucucuucugcuuccaugu

SEQ ID NO: 396726 - RNA, 20 nt, Artificial Sequence
  Synthetic
uuucucuucugcuuccaugu

SEQ ID NO: 396727 - RNA, 21 nt, Artificial Sequence
  Synthetic
uuuucucuucugcuuccaugu

SEQ ID NO: 396728 - RNA, 22 nt, Artificial Sequence
  Synthetic
auuuucucuucugcuuccaugu

SEQ ID NO: 396729 - RNA, 23 nt, Artificial Sequence
  Synthetic
cauuuucucuucugcuuccaugu

SEQ ID NO: 396730 - RNA, 24 nt, Artificial Sequence
  Synthetic
acauuuucucuucugcuuccaugu

SEQ ID NO: 396731 - RNA, 18 nt, Artificial Sequence
  Synthetic
uuugcugcuuuuccaugu

SEQ ID NO: 396732 - RNA, 19 nt, Artificial Sequence
  Synthetic
auuugcugcuuuuccaugu

SEQ ID NO: 396733 - RNA, 20 nt, Artificial Sequence
  Synthetic
cauuugcugcuuuuccaugu

SEQ ID NO: 396734 - RNA, 21 nt, Artificial Sequence
  Synthetic
ccauuugcugcuuuuccaugu

SEQ ID NO: 396735 - RNA, 22 nt, Artificial Sequence
  Synthetic
accauuugcugcuuuuccaugu

SEQ ID NO: 396736 - RNA, 23 nt, Artificial Sequence
  Synthetic
uaccauuugcugcuuuuccaugu

SEQ ID NO: 396737 - RNA, 24 nt, Artificial Sequence
  Synthetic
cuaccauuugcugcuuuuccaugu

SEQ ID NO: 396738 - RNA, 18 nt, Artificial Sequence
  Synthetic
gaaauaaaggaagcaugu

SEQ ID NO: 396739 - RNA, 19 nt, Artificial Sequence
  Synthetic
ugaaauaaaggaagcaugu

SEQ ID NO: 396740 - RNA, 20 nt, Artificial Sequence
  Synthetic
gugaaauaaaggaagcaugu

SEQ ID NO: 396741 - RNA, 21 nt, Artificial Sequence
  Synthetic
ggugaaauaaaggaagcaugu

SEQ ID NO: 396742 - RNA, 22 nt, Artificial Sequence
  Synthetic
uggugaaauaaaggaagcaugu

SEQ ID NO: 396743 - RNA, 23 nt, Artificial Sequence
  Synthetic
cuggugaaauaaaggaagcaugu

SEQ ID NO: 396744 - RNA, 24 nt, Artificial Sequence
  Synthetic
acuggugaaauaaaggaagcaugu

SEQ ID NO: 396745 - RNA, 18 nt, Artificial Sequence
  Synthetic
auacuaggaacagcaugu

SEQ ID NO: 396746 - RNA, 19 nt, Artificial Sequence
  Synthetic
aauacuaggaacagcaugu

SEQ ID NO: 396747 - RNA, 20 nt, Artificial Sequence
  Synthetic
uaauacuaggaacagcaugu

SEQ ID NO: 396748 - RNA, 21 nt, Artificial Sequence
  Synthetic
auaauacuaggaacagcaugu

SEQ ID NO: 396749 - RNA, 22 nt, Artificial Sequence
  Synthetic
gauaauacuaggaacagcaugu

SEQ ID NO: 396750 - RNA, 23 nt, Artificial Sequence
  Synthetic
agauaauacuaggaacagcaugu

SEQ ID NO: 396751 - RNA, 24 nt, Artificial Sequence
  Synthetic
aagauaauacuaggaacagcaugu

SEQ ID NO: 396752 - RNA, 18 nt, Artificial Sequence
  Synthetic
gaugucuccagggcaugu

SEQ ID NO: 396753 - RNA, 19 nt, Artificial Sequence
  Synthetic
agaugucuccagggcaugu

SEQ ID NO: 396754 - RNA, 20 nt, Artificial Sequence
  Synthetic
aagaugucuccagggcaugu

SEQ ID NO: 396755 - RNA, 21 nt, Artificial Sequence
  Synthetic
gaagaugucuccagggcaugu

SEQ ID NO: 396756 - RNA, 22 nt, Artificial Sequence
  Synthetic
ggaagaugucuccagggcaugu

SEQ ID NO: 396757 - RNA, 23 nt, Artificial Sequence
  Synthetic
gggaagaugucuccagggcaugu

SEQ ID NO: 396758 - RNA, 24 nt, Artificial Sequence
  Synthetic
ggggaagaugucuccagggcaugu

SEQ ID NO: 396759 - RNA, 18 nt, Artificial Sequence
  Synthetic
aauguaguggaugcaugu

SEQ ID NO: 396760 - RNA, 19 nt, Artificial Sequence
  Synthetic
gaauguaguggaugcaugu

SEQ ID NO: 396761 - RNA, 20 nt, Artificial Sequence
  Synthetic
ugaauguaguggaugcaugu

SEQ ID NO: 396762 - RNA, 21 nt, Artificial Sequence
  Synthetic
augaauguaguggaugcaugu

SEQ ID NO: 396763 - RNA, 22 nt, Artificial Sequence
  Synthetic
gaugaauguaguggaugcaugu

SEQ ID NO: 396764 - RNA, 23 nt, Artificial Sequence
  Synthetic
ugaugaauguaguggaugcaugu

SEQ ID NO: 396765 - RNA, 24 nt, Artificial Sequence
  Synthetic
augaugaauguaguggaugcaugu

SEQ ID NO: 396766 - RNA, 18 nt, Artificial Sequence
  Synthetic
uauagaauuuuugcaugu

SEQ ID NO: 396767 - RNA, 19 nt, Artificial Sequence
  Synthetic
cuauagaauuuuugcaugu

SEQ ID NO: 396768 - RNA, 20 nt, Artificial Sequence
  Synthetic
ucuauagaauuuuugcaugu

SEQ ID NO: 396769 - RNA, 21 nt, Artificial Sequence
  Synthetic
uucuauagaauuuuugcaugu

SEQ ID NO: 396770 - RNA, 22 nt, Artificial Sequence
  Synthetic
auucuauagaauuuuugcaugu

SEQ ID NO: 396771 - RNA, 23 nt, Artificial Sequence
  Synthetic
aauucuauagaauuuuugcaugu

SEQ ID NO: 396772 - RNA, 24 nt, Artificial Sequence
  Synthetic
gaauucuauagaauuuuugcaugu

SEQ ID NO: 396773 - RNA, 18 nt, Artificial Sequence
  Synthetic
gccugcccaauaucaugu

SEQ ID NO: 396774 - RNA, 19 nt, Artificial Sequence
  Synthetic
ugccugcccaauaucaugu

SEQ ID NO: 396775 - RNA, 20 nt, Artificial Sequence
  Synthetic
gugccugcccaauaucaugu

SEQ ID NO: 396776 - RNA, 21 nt, Artificial Sequence
  Synthetic
agugccugcccaauaucaugu

SEQ ID NO: 396777 - RNA, 22 nt, Artificial Sequence
  Synthetic
cagugccugcccaauaucaugu

SEQ ID NO: 396778 - RNA, 23 nt, Artificial Sequence
  Synthetic
ucagugccugcccaauaucaugu

SEQ ID NO: 396779 - RNA, 24 nt, Artificial Sequence
  Synthetic
uucagugccugcccaauaucaugu

SEQ ID NO: 396780 - RNA, 18 nt, Artificial Sequence
  Synthetic
acaaaugcuauaucaugu

SEQ ID NO: 396781 - RNA, 19 nt, Artificial Sequence
  Synthetic
aacaaaugcuauaucaugu

SEQ ID NO: 396782 - RNA, 20 nt, Artificial Sequence
  Synthetic
uaacaaaugcuauaucaugu

SEQ ID NO: 396783 - RNA, 21 nt, Artificial Sequence
  Synthetic
uuaacaaaugcuauaucaugu

SEQ ID NO: 396784 - RNA, 22 nt, Artificial Sequence
  Synthetic
uuuaacaaaugcuauaucaugu

SEQ ID NO: 396785 - RNA, 23 nt, Artificial Sequence
  Synthetic
auuuaacaaaugcuauaucaugu

SEQ ID NO: 396786 - RNA, 24 nt, Artificial Sequence
  Synthetic
cauuuaacaaaugcuauaucaugu

SEQ ID NO: 396787 - RNA, 18 nt, Artificial Sequence
  Synthetic
aaacacaauguaucaugu

SEQ ID NO: 396788 - RNA, 19 nt, Artificial Sequence
  Synthetic
uaaacacaauguaucaugu

SEQ ID NO: 396789 - RNA, 20 nt, Artificial Sequence
  Synthetic
auaaacacaauguaucaugu

SEQ ID NO: 396790 - RNA, 21 nt, Artificial Sequence
  Synthetic
uauaaacacaauguaucaugu

SEQ ID NO: 396791 - RNA, 22 nt, Artificial Sequence
  Synthetic
uuauaaacacaauguaucaugu

SEQ ID NO: 396792 - RNA, 23 nt, Artificial Sequence
  Synthetic
cuuauaaacacaauguaucaugu

SEQ ID NO: 396793 - RNA, 24 nt, Artificial Sequence
  Synthetic
acuuauaaacacaauguaucaugu

SEQ ID NO: 396794 - RNA, 18 nt, Artificial Sequence
  Synthetic
ugagagagacacucaugu

SEQ ID NO: 396795 - RNA, 19 nt, Artificial Sequence
  Synthetic
augagagagacacucaugu

SEQ ID NO: 396796 - RNA, 20 nt, Artificial Sequence
  Synthetic
gaugagagagacacucaugu

SEQ ID NO: 396797 - RNA, 21 nt, Artificial Sequence
  Synthetic
agaugagagagacacucaugu

SEQ ID NO: 396798 - RNA, 22 nt, Artificial Sequence
  Synthetic
aagaugagagagacacucaugu

SEQ ID NO: 396799 - RNA, 23 nt, Artificial Sequence
  Synthetic
aaagaugagagagacacucaugu

SEQ ID NO: 396800 - RNA, 24 nt, Artificial Sequence
  Synthetic
uaaagaugagagagacacucaugu

SEQ ID NO: 396801 - RNA, 18 nt, Artificial Sequence
  Synthetic
ucacccccauacucaugu

SEQ ID NO: 396802 - RNA, 19 nt, Artificial Sequence
  Synthetic
gucacccccauacucaugu

SEQ ID NO: 396803 - RNA, 20 nt, Artificial Sequence
  Synthetic
cgucacccccauacucaugu

SEQ ID NO: 396804 - RNA, 21 nt, Artificial Sequence
  Synthetic
ccgucacccccauacucaugu

SEQ ID NO: 396805 - RNA, 22 nt, Artificial Sequence
  Synthetic
gccgucacccccauacucaugu

SEQ ID NO: 396806 - RNA, 23 nt, Artificial Sequence
  Synthetic
ugccgucacccccauacucaugu

SEQ ID NO: 396807 - RNA, 24 nt, Artificial Sequence
  Synthetic
augccgucacccccauacucaugu

SEQ ID NO: 396808 - RNA, 18 nt, Artificial Sequence
  Synthetic
cuuuguaucaagucaugu

SEQ ID NO: 396809 - RNA, 19 nt, Artificial Sequence
  Synthetic
ucuuuguaucaagucaugu

SEQ ID NO: 396810 - RNA, 20 nt, Artificial Sequence
  Synthetic
uucuuuguaucaagucaugu

SEQ ID NO: 396811 - RNA, 21 nt, Artificial Sequence
  Synthetic
auucuuuguaucaagucaugu

SEQ ID NO: 396812 - RNA, 22 nt, Artificial Sequence
  Synthetic
uauucuuuguaucaagucaugu

SEQ ID NO: 396813 - RNA, 23 nt, Artificial Sequence
  Synthetic
guauucuuuguaucaagucaugu

SEQ ID NO: 396814 - RNA, 24 nt, Artificial Sequence
  Synthetic
uguauucuuuguaucaagucaugu

SEQ ID NO: 396815 - RNA, 18 nt, Artificial Sequence
  Synthetic
ugucucccuaggucaugu

SEQ ID NO: 396816 - RNA, 19 nt, Artificial Sequence
  Synthetic
gugucucccuaggucaugu

SEQ ID NO: 396817 - RNA, 20 nt, Artificial Sequence
  Synthetic
ggugucucccuaggucaugu

SEQ ID NO: 396818 - RNA, 21 nt, Artificial Sequence
  Synthetic
uggugucucccuaggucaugu

SEQ ID NO: 396819 - RNA, 22 nt, Artificial Sequence
  Synthetic
cuggugucucccuaggucaugu

SEQ ID NO: 396820 - RNA, 23 nt, Artificial Sequence
  Synthetic
gcuggugucucccuaggucaugu

SEQ ID NO: 396821 - RNA, 24 nt, Artificial Sequence
  Synthetic
agcuggugucucccuaggucaugu

SEQ ID NO: 396822 - RNA, 18 nt, Artificial Sequence
  Synthetic
uuucaacaguugucaugu

SEQ ID NO: 396823 - RNA, 19 nt, Artificial Sequence
  Synthetic
uuuucaacaguugucaugu

SEQ ID NO: 396824 - RNA, 20 nt, Artificial Sequence
  Synthetic
uuuuucaacaguugucaugu

SEQ ID NO: 396825 - RNA, 21 nt, Artificial Sequence
  Synthetic
auuuuucaacaguugucaugu

SEQ ID NO: 396826 - RNA, 22 nt, Artificial Sequence
  Synthetic
uauuuuucaacaguugucaugu

SEQ ID NO: 396827 - RNA, 23 nt, Artificial Sequence
  Synthetic
uuauuuuucaacaguugucaugu

SEQ ID NO: 396828 - RNA, 24 nt, Artificial Sequence
  Synthetic
cuuauuuuucaacaguugucaugu

SEQ ID NO: 396829 - RNA, 18 nt, Artificial Sequence
  Synthetic
gaagauagauauucaugu

SEQ ID NO: 396830 - RNA, 19 nt, Artificial Sequence
  Synthetic
ugaagauagauauucaugu

SEQ ID NO: 396831 - RNA, 20 nt, Artificial Sequence
  Synthetic
cugaagauagauauucaugu

SEQ ID NO: 396832 - RNA, 21 nt, Artificial Sequence
  Synthetic
ccugaagauagauauucaugu

SEQ ID NO: 396833 - RNA, 22 nt, Artificial Sequence
  Synthetic
gccugaagauagauauucaugu

SEQ ID NO: 396834 - RNA, 23 nt, Artificial Sequence
  Synthetic
ugccugaagauagauauucaugu

SEQ ID NO: 396835 - RNA, 24 nt, Artificial Sequence
  Synthetic
uugccugaagauagauauucaugu

SEQ ID NO: 396836 - RNA, 18 nt, Artificial Sequence
  Synthetic
ugccuaaauuauucaugu

SEQ ID NO: 396837 - RNA, 19 nt, Artificial Sequence
  Synthetic
cugccuaaauuauucaugu

SEQ ID NO: 396838 - RNA, 20 nt, Artificial Sequence
  Synthetic
ccugccuaaauuauucaugu

SEQ ID NO: 396839 - RNA, 21 nt, Artificial Sequence
  Synthetic
uccugccuaaauuauucaugu

SEQ ID NO: 396840 - RNA, 22 nt, Artificial Sequence
  Synthetic
cuccugccuaaauuauucaugu

SEQ ID NO: 396841 - RNA, 23 nt, Artificial Sequence
  Synthetic
ucuccugccuaaauuauucaugu

SEQ ID NO: 396842 - RNA, 24 nt, Artificial Sequence
  Synthetic
gucuccugccuaaauuauucaugu

SEQ ID NO: 396843 - RNA, 18 nt, Artificial Sequence
  Synthetic
uucagcaccucuucaugu

SEQ ID NO: 396844 - RNA, 19 nt, Artificial Sequence
  Synthetic
uuucagcaccucuucaugu

SEQ ID NO: 396845 - RNA, 20 nt, Artificial Sequence
  Synthetic
cuuucagcaccucuucaugu

SEQ ID NO: 396846 - RNA, 21 nt, Artificial Sequence
  Synthetic
ucuuucagcaccucuucaugu

SEQ ID NO: 396847 - RNA, 22 nt, Artificial Sequence
  Synthetic
cucuuucagcaccucuucaugu

SEQ ID NO: 396848 - RNA, 23 nt, Artificial Sequence
  Synthetic
ccucuuucagcaccucuucaugu

SEQ ID NO: 396849 - RNA, 24 nt, Artificial Sequence
  Synthetic
uccucuuucagcaccucuucaugu

SEQ ID NO: 396850 - RNA, 18 nt, Artificial Sequence
  Synthetic
cauauauaugguucaugu

SEQ ID NO: 396851 - RNA, 19 nt, Artificial Sequence
  Synthetic
gcauauauaugguucaugu

SEQ ID NO: 396852 - RNA, 20 nt, Artificial Sequence
  Synthetic
agcauauauaugguucaugu

SEQ ID NO: 396853 - RNA, 21 nt, Artificial Sequence
  Synthetic
aagcauauauaugguucaugu

SEQ ID NO: 396854 - RNA, 22 nt, Artificial Sequence
  Synthetic
aaagcauauauaugguucaugu

SEQ ID NO: 396855 - RNA, 23 nt, Artificial Sequence
  Synthetic
uaaagcauauauaugguucaugu

SEQ ID NO: 396856 - RNA, 24 nt, Artificial Sequence
  Synthetic
auaaagcauauauaugguucaugu

SEQ ID NO: 396857 - RNA, 18 nt, Artificial Sequence
  Synthetic
caaaaaaaccuuucaugu

SEQ ID NO: 396858 - RNA, 19 nt, Artificial Sequence
  Synthetic
ucaaaaaaaccuuucaugu

SEQ ID NO: 396859 - RNA, 20 nt, Artificial Sequence
  Synthetic
aucaaaaaaaccuuucaugu

SEQ ID NO: 396860 - RNA, 21 nt, Artificial Sequence
  Synthetic
caucaaaaaaaccuuucaugu

SEQ ID NO: 396861 - RNA, 22 nt, Artificial Sequence
  Synthetic
acaucaaaaaaaccuuucaugu

SEQ ID NO: 396862 - RNA, 23 nt, Artificial Sequence
  Synthetic
uacaucaaaaaaaccuuucaugu

SEQ ID NO: 396863 - RNA, 24 nt, Artificial Sequence
  Synthetic
cuacaucaaaaaaaccuuucaugu

SEQ ID NO: 396864 - RNA, 18 nt, Artificial Sequence
  Synthetic
aguauuuuauuuucaugu

SEQ ID NO: 396865 - RNA, 19 nt, Artificial Sequence
  Synthetic
aaguauuuuauuuucaugu

SEQ ID NO: 396866 - RNA, 20 nt, Artificial Sequence
  Synthetic
gaaguauuuuauuuucaugu

SEQ ID NO: 396867 - RNA, 21 nt, Artificial Sequence
  Synthetic
ugaaguauuuuauuuucaugu

SEQ ID NO: 396868 - RNA, 22 nt, Artificial Sequence
  Synthetic
augaaguauuuuauuuucaugu

SEQ ID NO: 396869 - RNA, 23 nt, Artificial Sequence
  Synthetic
uaugaaguauuuuauuuucaugu

SEQ ID NO: 396870 - RNA, 24 nt, Artificial Sequence
  Synthetic
guaugaaguauuuuauuuucaugu

SEQ ID NO: 396871 - RNA, 18 nt, Artificial Sequence
  Synthetic
cuaccuagaugaagaugu

SEQ ID NO: 396872 - RNA, 19 nt, Artificial Sequence
  Synthetic
gcuaccuagaugaagaugu

SEQ ID NO: 396873 - RNA, 20 nt, Artificial Sequence
  Synthetic
agcuaccuagaugaagaugu

SEQ ID NO: 396874 - RNA, 21 nt, Artificial Sequence
  Synthetic
gagcuaccuagaugaagaugu

SEQ ID NO: 396875 - RNA, 22 nt, Artificial Sequence
  Synthetic
ggagcuaccuagaugaagaugu

SEQ ID NO: 396876 - RNA, 23 nt, Artificial Sequence
  Synthetic
uggagcuaccuagaugaagaugu

SEQ ID NO: 396877 - RNA, 24 nt, Artificial Sequence
  Synthetic
cuggagcuaccuagaugaagaugu

SEQ ID NO: 396878 - RNA, 18 nt, Artificial Sequence
  Synthetic
aaggcaguuuuaagaugu

SEQ ID NO: 396879 - RNA, 19 nt, Artificial Sequence
  Synthetic
gaaggcaguuuuaagaugu

SEQ ID NO: 396880 - RNA, 20 nt, Artificial Sequence
  Synthetic
ugaaggcaguuuuaagaugu

SEQ ID NO: 396881 - RNA, 21 nt, Artificial Sequence
  Synthetic
augaaggcaguuuuaagaugu

SEQ ID NO: 396882 - RNA, 22 nt, Artificial Sequence
  Synthetic
aaugaaggcaguuuuaagaugu

SEQ ID NO: 396883 - RNA, 23 nt, Artificial Sequence
  Synthetic
aaaugaaggcaguuuuaagaugu

SEQ ID NO: 396884 - RNA, 24 nt, Artificial Sequence
  Synthetic
caaaugaaggcaguuuuaagaugu

SEQ ID NO: 396885 - RNA, 18 nt, Artificial Sequence
  Synthetic
gcauuuaaaaccagaugu

SEQ ID NO: 396886 - RNA, 19 nt, Artificial Sequence
  Synthetic
agcauuuaaaaccagaugu

SEQ ID NO: 396887 - RNA, 20 nt, Artificial Sequence
  Synthetic
uagcauuuaaaaccagaugu

SEQ ID NO: 396888 - RNA, 21 nt, Artificial Sequence
  Synthetic
auagcauuuaaaaccagaugu

SEQ ID NO: 396889 - RNA, 22 nt, Artificial Sequence
  Synthetic
aauagcauuuaaaaccagaugu

SEQ ID NO: 396890 - RNA, 23 nt, Artificial Sequence
  Synthetic
uaauagcauuuaaaaccagaugu

SEQ ID NO: 396891 - RNA, 24 nt, Artificial Sequence
  Synthetic
guaauagcauuuaaaaccagaugu

SEQ ID NO: 396892 - RNA, 18 nt, Artificial Sequence
  Synthetic
ugcaacgcaagcagaugu

SEQ ID NO: 396893 - RNA, 19 nt, Artificial Sequence
  Synthetic
gugcaacgcaagcagaugu

SEQ ID NO: 396894 - RNA, 20 nt, Artificial Sequence
  Synthetic
agugcaacgcaagcagaugu

SEQ ID NO: 396895 - RNA, 21 nt, Artificial Sequence
  Synthetic
cagugcaacgcaagcagaugu

SEQ ID NO: 396896 - RNA, 22 nt, Artificial Sequence
  Synthetic
ucagugcaacgcaagcagaugu

SEQ ID NO: 396897 - RNA, 23 nt, Artificial Sequence
  Synthetic
cucagugcaacgcaagcagaugu

SEQ ID NO: 396898 - RNA, 24 nt, Artificial Sequence
  Synthetic
ucucagugcaacgcaagcagaugu

SEQ ID NO: 396899 - RNA, 18 nt, Artificial Sequence
  Synthetic
ggaguucggaggagaugu

SEQ ID NO: 396900 - RNA, 19 nt, Artificial Sequence
  Synthetic
uggaguucggaggagaugu

SEQ ID NO: 396901 - RNA, 20 nt, Artificial Sequence
  Synthetic
cuggaguucggaggagaugu

SEQ ID NO: 396902 - RNA, 21 nt, Artificial Sequence
  Synthetic
acuggaguucggaggagaugu

SEQ ID NO: 396903 - RNA, 22 nt, Artificial Sequence
  Synthetic
gacuggaguucggaggagaugu

SEQ ID NO: 396904 - RNA, 23 nt, Artificial Sequence
  Synthetic
agacuggaguucggaggagaugu

SEQ ID NO: 396905 - RNA, 24 nt, Artificial Sequence
  Synthetic
uagacuggaguucggaggagaugu

SEQ ID NO: 396906 - RNA, 18 nt, Artificial Sequence
  Synthetic
uauacaucuaggagaugu

SEQ ID NO: 396907 - RNA, 19 nt, Artificial Sequence
  Synthetic
uuauacaucuaggagaugu

SEQ ID NO: 396908 - RNA, 20 nt, Artificial Sequence
  Synthetic
auuauacaucuaggagaugu

SEQ ID NO: 396909 - RNA, 21 nt, Artificial Sequence
  Synthetic
uauuauacaucuaggagaugu

SEQ ID NO: 396910 - RNA, 22 nt, Artificial Sequence
  Synthetic
cuauuauacaucuaggagaugu

SEQ ID NO: 396911 - RNA, 23 nt, Artificial Sequence
  Synthetic
ccuauuauacaucuaggagaugu

SEQ ID NO: 396912 - RNA, 24 nt, Artificial Sequence
  Synthetic
gccuauuauacaucuaggagaugu

SEQ ID NO: 396913 - RNA, 18 nt, Artificial Sequence
  Synthetic
gacagggauaugagaugu

SEQ ID NO: 396914 - RNA, 19 nt, Artificial Sequence
  Synthetic
ggacagggauaugagaugu

SEQ ID NO: 396915 - RNA, 20 nt, Artificial Sequence
  Synthetic
gggacagggauaugagaugu

SEQ ID NO: 396916 - RNA, 21 nt, Artificial Sequence
  Synthetic
ggggacagggauaugagaugu

SEQ ID NO: 396917 - RNA, 22 nt, Artificial Sequence
  Synthetic
gggggacagggauaugagaugu

SEQ ID NO: 396918 - RNA, 23 nt, Artificial Sequence
  Synthetic
ggggggacagggauaugagaugu

SEQ ID NO: 396919 - RNA, 24 nt, Artificial Sequence
  Synthetic
uggggggacagggauaugagaugu

SEQ ID NO: 396920 - RNA, 18 nt, Artificial Sequence
  Synthetic
auugcaacagagcgaugu

SEQ ID NO: 396921 - RNA, 19 nt, Artificial Sequence
  Synthetic
uauugcaacagagcgaugu

SEQ ID NO: 396922 - RNA, 20 nt, Artificial Sequence
  Synthetic
guauugcaacagagcgaugu

SEQ ID NO: 396923 - RNA, 21 nt, Artificial Sequence
  Synthetic
aguauugcaacagagcgaugu

SEQ ID NO: 396924 - RNA, 22 nt, Artificial Sequence
  Synthetic
gaguauugcaacagagcgaugu

SEQ ID NO: 396925 - RNA, 23 nt, Artificial Sequence
  Synthetic
ggaguauugcaacagagcgaugu

SEQ ID NO: 396926 - RNA, 24 nt, Artificial Sequence
  Synthetic
uggaguauugcaacagagcgaugu

SEQ ID NO: 396927 - RNA, 18 nt, Artificial Sequence
  Synthetic
uugccccuggggcgaugu

SEQ ID NO: 396928 - RNA, 19 nt, Artificial Sequence
  Synthetic
guugccccuggggcgaugu

SEQ ID NO: 396929 - RNA, 20 nt, Artificial Sequence
  Synthetic
gguugccccuggggcgaugu

SEQ ID NO: 396930 - RNA, 21 nt, Artificial Sequence
  Synthetic
agguugccccuggggcgaugu

SEQ ID NO: 396931 - RNA, 22 nt, Artificial Sequence
  Synthetic
gagguugccccuggggcgaugu

SEQ ID NO: 396932 - RNA, 23 nt, Artificial Sequence
  Synthetic
agagguugccccuggggcgaugu

SEQ ID NO: 396933 - RNA, 24 nt, Artificial Sequence
  Synthetic
uagagguugccccuggggcgaugu

SEQ ID NO: 396934 - RNA, 18 nt, Artificial Sequence
  Synthetic
aggcaauccaaaggaugu

SEQ ID NO: 396935 - RNA, 19 nt, Artificial Sequence
  Synthetic
aaggcaauccaaaggaugu

SEQ ID NO: 396936 - RNA, 20 nt, Artificial Sequence
  Synthetic
aaaggcaauccaaaggaugu

SEQ ID NO: 396937 - RNA, 21 nt, Artificial Sequence
  Synthetic
aaaaggcaauccaaaggaugu

SEQ ID NO: 396938 - RNA, 22 nt, Artificial Sequence
  Synthetic
uaaaaggcaauccaaaggaugu

SEQ ID NO: 396939 - RNA, 23 nt, Artificial Sequence
  Synthetic
auaaaaggcaauccaaaggaugu

SEQ ID NO: 396940 - RNA, 24 nt, Artificial Sequence
  Synthetic
uauaaaaggcaauccaaaggaugu

SEQ ID NO: 396941 - RNA, 18 nt, Artificial Sequence
  Synthetic
acauuccaagaaggaugu

SEQ ID NO: 396942 - RNA, 19 nt, Artificial Sequence
  Synthetic
cacauuccaagaaggaugu

SEQ ID NO: 396943 - RNA, 20 nt, Artificial Sequence
  Synthetic
ccacauuccaagaaggaugu

SEQ ID NO: 396944 - RNA, 21 nt, Artificial Sequence
  Synthetic
uccacauuccaagaaggaugu

SEQ ID NO: 396945 - RNA, 22 nt, Artificial Sequence
  Synthetic
auccacauuccaagaaggaugu

SEQ ID NO: 396946 - RNA, 23 nt, Artificial Sequence
  Synthetic
cauccacauuccaagaaggaugu

SEQ ID NO: 396947 - RNA, 24 nt, Artificial Sequence
  Synthetic
acauccacauuccaagaaggaugu

SEQ ID NO: 396948 - RNA, 18 nt, Artificial Sequence
  Synthetic
gguagaauauaaggaugu

SEQ ID NO: 396949 - RNA, 19 nt, Artificial Sequence
  Synthetic
ggguagaauauaaggaugu

SEQ ID NO: 396950 - RNA, 20 nt, Artificial Sequence
  Synthetic
aggguagaauauaaggaugu

SEQ ID NO: 396951 - RNA, 21 nt, Artificial Sequence
  Synthetic
caggguagaauauaaggaugu

SEQ ID NO: 396952 - RNA, 22 nt, Artificial Sequence
  Synthetic
ccaggguagaauauaaggaugu

SEQ ID NO: 396953 - RNA, 23 nt, Artificial Sequence
  Synthetic
uccaggguagaauauaaggaugu

SEQ ID NO: 396954 - RNA, 24 nt, Artificial Sequence
  Synthetic
uuccaggguagaauauaaggaugu

SEQ ID NO: 396955 - RNA, 18 nt, Artificial Sequence
  Synthetic
cuagaauucagaggaugu

SEQ ID NO: 396956 - RNA, 19 nt, Artificial Sequence
  Synthetic
ccuagaauucagaggaugu

SEQ ID NO: 396957 - RNA, 20 nt, Artificial Sequence
  Synthetic
gccuagaauucagaggaugu

SEQ ID NO: 396958 - RNA, 21 nt, Artificial Sequence
  Synthetic
ugccuagaauucagaggaugu

SEQ ID NO: 396959 - RNA, 22 nt, Artificial Sequence
  Synthetic
cugccuagaauucagaggaugu

SEQ ID NO: 396960 - RNA, 23 nt, Artificial Sequence
  Synthetic
ucugccuagaauucagaggaugu

SEQ ID NO: 396961 - RNA, 24 nt, Artificial Sequence
  Synthetic
cucugccuagaauucagaggaugu

SEQ ID NO: 396962 - RNA, 18 nt, Artificial Sequence
  Synthetic
uuuauaugaugaggaugu

SEQ ID NO: 396963 - RNA, 19 nt, Artificial Sequence
  Synthetic
guuuauaugaugaggaugu

SEQ ID NO: 396964 - RNA, 20 nt, Artificial Sequence
  Synthetic
aguuuauaugaugaggaugu

SEQ ID NO: 396965 - RNA, 21 nt, Artificial Sequence
  Synthetic
uaguuuauaugaugaggaugu

SEQ ID NO: 396966 - RNA, 22 nt, Artificial Sequence
  Synthetic
uuaguuuauaugaugaggaugu

SEQ ID NO: 396967 - RNA, 23 nt, Artificial Sequence
  Synthetic
uuuaguuuauaugaugaggaugu

SEQ ID NO: 396968 - RNA, 24 nt, Artificial Sequence
  Synthetic
uuuuaguuuauaugaugaggaugu

SEQ ID NO: 396969 - RNA, 18 nt, Artificial Sequence
  Synthetic
aaauguuguugaggaugu

SEQ ID NO: 396970 - RNA, 19 nt, Artificial Sequence
  Synthetic
gaaauguuguugaggaugu

SEQ ID NO: 396971 - RNA, 20 nt, Artificial Sequence
  Synthetic
agaaauguuguugaggaugu

SEQ ID NO: 396972 - RNA, 21 nt, Artificial Sequence
  Synthetic
aagaaauguuguugaggaugu

SEQ ID NO: 396973 - RNA, 22 nt, Artificial Sequence
  Synthetic
uaagaaauguuguugaggaugu

SEQ ID NO: 396974 - RNA, 23 nt, Artificial Sequence
  Synthetic
auaagaaauguuguugaggaugu

SEQ ID NO: 396975 - RNA, 24 nt, Artificial Sequence
  Synthetic
gauaagaaauguuguugaggaugu

SEQ ID NO: 396976 - RNA, 18 nt, Artificial Sequence
  Synthetic
uugggugaauagggaugu

SEQ ID NO: 396977 - RNA, 19 nt, Artificial Sequence
  Synthetic
uuugggugaauagggaugu

SEQ ID NO: 396978 - RNA, 20 nt, Artificial Sequence
  Synthetic
cuuugggugaauagggaugu

SEQ ID NO: 396979 - RNA, 21 nt, Artificial Sequence
  Synthetic
ucuuugggugaauagggaugu

SEQ ID NO: 396980 - RNA, 22 nt, Artificial Sequence
  Synthetic
aucuuugggugaauagggaugu

SEQ ID NO: 396981 - RNA, 23 nt, Artificial Sequence
  Synthetic
aaucuuugggugaauagggaugu

SEQ ID NO: 396982 - RNA, 24 nt, Artificial Sequence
  Synthetic
uaaucuuugggugaauagggaugu

SEQ ID NO: 396983 - RNA, 18 nt, Artificial Sequence
  Synthetic
cuggaagcagugggaugu

SEQ ID NO: 396984 - RNA, 19 nt, Artificial Sequence
  Synthetic
acuggaagcagugggaugu

SEQ ID NO: 396985 - RNA, 20 nt, Artificial Sequence
  Synthetic
aacuggaagcagugggaugu

SEQ ID NO: 396986 - RNA, 21 nt, Artificial Sequence
  Synthetic
caacuggaagcagugggaugu

SEQ ID NO: 396987 - RNA, 22 nt, Artificial Sequence
  Synthetic
gcaacuggaagcagugggaugu

SEQ ID NO: 396988 - RNA, 23 nt, Artificial Sequence
  Synthetic
agcaacuggaagcagugggaugu

SEQ ID NO: 396989 - RNA, 24 nt, Artificial Sequence
  Synthetic
uagcaacuggaagcagugggaugu

SEQ ID NO: 396990 - RNA, 18 nt, Artificial Sequence
  Synthetic
guagcagaagauggaugu

SEQ ID NO: 396991 - RNA, 19 nt, Artificial Sequence
  Synthetic
aguagcagaagauggaugu

SEQ ID NO: 396992 - RNA, 20 nt, Artificial Sequence
  Synthetic
uaguagcagaagauggaugu

SEQ ID NO: 396993 - RNA, 21 nt, Artificial Sequence
  Synthetic
auaguagcagaagauggaugu

SEQ ID NO: 396994 - RNA, 22 nt, Artificial Sequence
  Synthetic
cauaguagcagaagauggaugu

SEQ ID NO: 396995 - RNA, 23 nt, Artificial Sequence
  Synthetic
ccauaguagcagaagauggaugu

SEQ ID NO: 396996 - RNA, 24 nt, Artificial Sequence
  Synthetic
gccauaguagcagaagauggaugu

SEQ ID NO: 396997 - RNA, 18 nt, Artificial Sequence
  Synthetic
ggcuacauggauggaugu

SEQ ID NO: 396998 - RNA, 19 nt, Artificial Sequence
  Synthetic
uggcuacauggauggaugu

SEQ ID NO: 396999 - RNA, 20 nt, Artificial Sequence
  Synthetic
cuggcuacauggauggaugu

SEQ ID NO: 397000 - RNA, 21 nt, Artificial Sequence
  Synthetic
gcuggcuacauggauggaugu

SEQ ID NO: 397001 - RNA, 22 nt, Artificial Sequence
  Synthetic
agcuggcuacauggauggaugu

SEQ ID NO: 397002 - RNA, 23 nt, Artificial Sequence
  Synthetic
uagcuggcuacauggauggaugu

SEQ ID NO: 397003 - RNA, 24 nt, Artificial Sequence
  Synthetic
cuagcuggcuacauggauggaugu

SEQ ID NO: 397004 - RNA, 18 nt, Artificial Sequence
  Synthetic
agagccucuuauggaugu

SEQ ID NO: 397005 - RNA, 19 nt, Artificial Sequence
  Synthetic
uagagccucuuauggaugu

SEQ ID NO: 397006 - RNA, 20 nt, Artificial Sequence
  Synthetic
auagagccucuuauggaugu

SEQ ID NO: 397007 - RNA, 21 nt, Artificial Sequence
  Synthetic
uauagagccucuuauggaugu

SEQ ID NO: 397008 - RNA, 22 nt, Artificial Sequence
  Synthetic
auauagagccucuuauggaugu

SEQ ID NO: 397009 - RNA, 23 nt, Artificial Sequence
  Synthetic
gauauagagccucuuauggaugu

SEQ ID NO: 397010 - RNA, 24 nt, Artificial Sequence
  Synthetic
ugauauagagccucuuauggaugu

SEQ ID NO: 397011 - RNA, 18 nt, Artificial Sequence
  Synthetic
uauaugagaacuggaugu

SEQ ID NO: 397012 - RNA, 19 nt, Artificial Sequence
  Synthetic
guauaugagaacuggaugu

SEQ ID NO: 397013 - RNA, 20 nt, Artificial Sequence
  Synthetic
aguauaugagaacuggaugu

SEQ ID NO: 397014 - RNA, 21 nt, Artificial Sequence
  Synthetic
uaguauaugagaacuggaugu

SEQ ID NO: 397015 - RNA, 22 nt, Artificial Sequence
  Synthetic
auaguauaugagaacuggaugu

SEQ ID NO: 397016 - RNA, 23 nt, Artificial Sequence
  Synthetic
uauaguauaugagaacuggaugu

SEQ ID NO: 397017 - RNA, 24 nt, Artificial Sequence
  Synthetic
uuauaguauaugagaacuggaugu

SEQ ID NO: 397018 - RNA, 18 nt, Artificial Sequence
  Synthetic
aaaggccaggcuggaugu

SEQ ID NO: 397019 - RNA, 19 nt, Artificial Sequence
  Synthetic
aaaaggccaggcuggaugu

SEQ ID NO: 397020 - RNA, 20 nt, Artificial Sequence
  Synthetic
uaaaaggccaggcuggaugu

SEQ ID NO: 397021 - RNA, 21 nt, Artificial Sequence
  Synthetic
guaaaaggccaggcuggaugu

SEQ ID NO: 397022 - RNA, 22 nt, Artificial Sequence
  Synthetic
uguaaaaggccaggcuggaugu

SEQ ID NO: 397023 - RNA, 23 nt, Artificial Sequence
  Synthetic
auguaaaaggccaggcuggaugu

SEQ ID NO: 397024 - RNA, 24 nt, Artificial Sequence
  Synthetic
aauguaaaaggccaggcuggaugu

SEQ ID NO: 397025 - RNA, 18 nt, Artificial Sequence
  Synthetic
agaaaugaauguggaugu

SEQ ID NO: 397026 - RNA, 19 nt, Artificial Sequence
  Synthetic
gagaaaugaauguggaugu

SEQ ID NO: 397027 - RNA, 20 nt, Artificial Sequence
  Synthetic
agagaaaugaauguggaugu

SEQ ID NO: 397028 - RNA, 21 nt, Artificial Sequence
  Synthetic
cagagaaaugaauguggaugu

SEQ ID NO: 397029 - RNA, 22 nt, Artificial Sequence
  Synthetic
ucagagaaaugaauguggaugu

SEQ ID NO: 397030 - RNA, 23 nt, Artificial Sequence
  Synthetic
gucagagaaaugaauguggaugu

SEQ ID NO: 397031 - RNA, 24 nt, Artificial Sequence
  Synthetic
agucagagaaaugaauguggaugu

SEQ ID NO: 397032 - RNA, 18 nt, Artificial Sequence
  Synthetic
ucaguuuaauaaugaugu

SEQ ID NO: 397033 - RNA, 19 nt, Artificial Sequence
  Synthetic
aucaguuuaauaaugaugu

SEQ ID NO: 397034 - RNA, 20 nt, Artificial Sequence
  Synthetic
gaucaguuuaauaaugaugu

SEQ ID NO: 397035 - RNA, 21 nt, Artificial Sequence
  Synthetic
ugaucaguuuaauaaugaugu

SEQ ID NO: 397036 - RNA, 22 nt, Artificial Sequence
  Synthetic
augaucaguuuaauaaugaugu

SEQ ID NO: 397037 - RNA, 23 nt, Artificial Sequence
  Synthetic
caugaucaguuuaauaaugaugu

SEQ ID NO: 397038 - RNA, 24 nt, Artificial Sequence
  Synthetic
ucaugaucaguuuaauaaugaugu

SEQ ID NO: 397039 - RNA, 18 nt, Artificial Sequence
  Synthetic
ucagccauguaaugaugu

SEQ ID NO: 397040 - RNA, 19 nt, Artificial Sequence
  Synthetic
gucagccauguaaugaugu

SEQ ID NO: 397041 - RNA, 20 nt, Artificial Sequence
  Synthetic
agucagccauguaaugaugu

SEQ ID NO: 397042 - RNA, 21 nt, Artificial Sequence
  Synthetic
gagucagccauguaaugaugu

SEQ ID NO: 397043 - RNA, 22 nt, Artificial Sequence
  Synthetic
agagucagccauguaaugaugu

SEQ ID NO: 397044 - RNA, 23 nt, Artificial Sequence
  Synthetic
uagagucagccauguaaugaugu

SEQ ID NO: 397045 - RNA, 24 nt, Artificial Sequence
  Synthetic
cuagagucagccauguaaugaugu

SEQ ID NO: 397046 - RNA, 18 nt, Artificial Sequence
  Synthetic
aggaaaaauuaaugaugu

SEQ ID NO: 397047 - RNA, 19 nt, Artificial Sequence
  Synthetic
uaggaaaaauuaaugaugu

SEQ ID NO: 397048 - RNA, 20 nt, Artificial Sequence
  Synthetic
auaggaaaaauuaaugaugu

SEQ ID NO: 397049 - RNA, 21 nt, Artificial Sequence
  Synthetic
aauaggaaaaauuaaugaugu

SEQ ID NO: 397050 - RNA, 22 nt, Artificial Sequence
  Synthetic
gaauaggaaaaauuaaugaugu

SEQ ID NO: 397051 - RNA, 23 nt, Artificial Sequence
  Synthetic
agaauaggaaaaauuaaugaugu

SEQ ID NO: 397052 - RNA, 24 nt, Artificial Sequence
  Synthetic
aagaauaggaaaaauuaaugaugu

SEQ ID NO: 397053 - RNA, 18 nt, Artificial Sequence
  Synthetic
gcgggcggaucaugaugu

SEQ ID NO: 397054 - RNA, 19 nt, Artificial Sequence
  Synthetic
ggcgggcggaucaugaugu

SEQ ID NO: 397055 - RNA, 20 nt, Artificial Sequence
  Synthetic
aggcgggcggaucaugaugu

SEQ ID NO: 397056 - RNA, 21 nt, Artificial Sequence
  Synthetic
aaggcgggcggaucaugaugu

SEQ ID NO: 397057 - RNA, 22 nt, Artificial Sequence
  Synthetic
caaggcgggcggaucaugaugu

SEQ ID NO: 397058 - RNA, 23 nt, Artificial Sequence
  Synthetic
ccaaggcgggcggaucaugaugu

SEQ ID NO: 397059 - RNA, 24 nt, Artificial Sequence
  Synthetic
gccaaggcgggcggaucaugaugu

SEQ ID NO: 397060 - RNA, 18 nt, Artificial Sequence
  Synthetic
auauuuucuuccugaugu

SEQ ID NO: 397061 - RNA, 19 nt, Artificial Sequence
  Synthetic
uauauuuucuuccugaugu

SEQ ID NO: 397062 - RNA, 20 nt, Artificial Sequence
  Synthetic
auauauuuucuuccugaugu

SEQ ID NO: 397063 - RNA, 21 nt, Artificial Sequence
  Synthetic
cauauauuuucuuccugaugu

SEQ ID NO: 397064 - RNA, 22 nt, Artificial Sequence
  Synthetic
ccauauauuuucuuccugaugu

SEQ ID NO: 397065 - RNA, 23 nt, Artificial Sequence
  Synthetic
accauauauuuucuuccugaugu

SEQ ID NO: 397066 - RNA, 24 nt, Artificial Sequence
  Synthetic
caccauauauuuucuuccugaugu

SEQ ID NO: 397067 - RNA, 18 nt, Artificial Sequence
  Synthetic
gugggaucaggcugaugu

SEQ ID NO: 397068 - RNA, 19 nt, Artificial Sequence
  Synthetic
agugggaucaggcugaugu

SEQ ID NO: 397069 - RNA, 20 nt, Artificial Sequence
  Synthetic
cagugggaucaggcugaugu

SEQ ID NO: 397070 - RNA, 21 nt, Artificial Sequence
  Synthetic
gcagugggaucaggcugaugu

SEQ ID NO: 397071 - RNA, 22 nt, Artificial Sequence
  Synthetic
agcagugggaucaggcugaugu

SEQ ID NO: 397072 - RNA, 23 nt, Artificial Sequence
  Synthetic
uagcagugggaucaggcugaugu

SEQ ID NO: 397073 - RNA, 24 nt, Artificial Sequence
  Synthetic
guagcagugggaucaggcugaugu

SEQ ID NO: 397074 - RNA, 18 nt, Artificial Sequence
  Synthetic
ggguggaucaucugaugu

SEQ ID NO: 397075 - RNA, 19 nt, Artificial Sequence
  Synthetic
cggguggaucaucugaugu

SEQ ID NO: 397076 - RNA, 20 nt, Artificial Sequence
  Synthetic
gcggguggaucaucugaugu

SEQ ID NO: 397077 - RNA, 21 nt, Artificial Sequence
  Synthetic
ggcggguggaucaucugaugu

SEQ ID NO: 397078 - RNA, 22 nt, Artificial Sequence
  Synthetic
aggcggguggaucaucugaugu

SEQ ID NO: 397079 - RNA, 23 nt, Artificial Sequence
  Synthetic
gaggcggguggaucaucugaugu

SEQ ID NO: 397080 - RNA, 24 nt, Artificial Sequence
  Synthetic
cgaggcggguggaucaucugaugu

SEQ ID NO: 397081 - RNA, 18 nt, Artificial Sequence
  Synthetic
acuuuggaacucugaugu

SEQ ID NO: 397082 - RNA, 19 nt, Artificial Sequence
  Synthetic
aacuuuggaacucugaugu

SEQ ID NO: 397083 - RNA, 20 nt, Artificial Sequence
  Synthetic
gaacuuuggaacucugaugu

SEQ ID NO: 397084 - RNA, 21 nt, Artificial Sequence
  Synthetic
agaacuuuggaacucugaugu

SEQ ID NO: 397085 - RNA, 22 nt, Artificial Sequence
  Synthetic
aagaacuuuggaacucugaugu

SEQ ID NO: 397086 - RNA, 23 nt, Artificial Sequence
  Synthetic
aaagaacuuuggaacucugaugu

SEQ ID NO: 397087 - RNA, 24 nt, Artificial Sequence
  Synthetic
gaaagaacuuuggaacucugaugu

SEQ ID NO: 397088 - RNA, 18 nt, Artificial Sequence
  Synthetic
guguuuagguucugaugu

SEQ ID NO: 397089 - RNA, 19 nt, Artificial Sequence
  Synthetic
aguguuuagguucugaugu

SEQ ID NO: 397090 - RNA, 20 nt, Artificial Sequence
  Synthetic
uaguguuuagguucugaugu

SEQ ID NO: 397091 - RNA, 21 nt, Artificial Sequence
  Synthetic
uuaguguuuagguucugaugu

SEQ ID NO: 397092 - RNA, 22 nt, Artificial Sequence
  Synthetic
uuuaguguuuagguucugaugu

SEQ ID NO: 397093 - RNA, 23 nt, Artificial Sequence
  Synthetic
uuuuaguguuuagguucugaugu

SEQ ID NO: 397094 - RNA, 24 nt, Artificial Sequence
  Synthetic
uuuuuaguguuuagguucugaugu

SEQ ID NO: 397095 - RNA, 18 nt, Artificial Sequence
  Synthetic
ucccaggaagggugaugu

SEQ ID NO: 397096 - RNA, 19 nt, Artificial Sequence
  Synthetic
uucccaggaagggugaugu

SEQ ID NO: 397097 - RNA, 20 nt, Artificial Sequence
  Synthetic
uuucccaggaagggugaugu

SEQ ID NO: 397098 - RNA, 21 nt, Artificial Sequence
  Synthetic
auuucccaggaagggugaugu

SEQ ID NO: 397099 - RNA, 22 nt, Artificial Sequence
  Synthetic
cauuucccaggaagggugaugu

SEQ ID NO: 397100 - RNA, 23 nt, Artificial Sequence
  Synthetic
gcauuucccaggaagggugaugu

SEQ ID NO: 397101 - RNA, 24 nt, Artificial Sequence
  Synthetic
agcauuucccaggaagggugaugu

SEQ ID NO: 397102 - RNA, 18 nt, Artificial Sequence
  Synthetic
uuuggauauuggugaugu

SEQ ID NO: 397103 - RNA, 19 nt, Artificial Sequence
  Synthetic
guuuggauauuggugaugu

SEQ ID NO: 397104 - RNA, 20 nt, Artificial Sequence
  Synthetic
gguuuggauauuggugaugu

SEQ ID NO: 397105 - RNA, 21 nt, Artificial Sequence
  Synthetic
ugguuuggauauuggugaugu

SEQ ID NO: 397106 - RNA, 22 nt, Artificial Sequence
  Synthetic
uugguuuggauauuggugaugu

SEQ ID NO: 397107 - RNA, 23 nt, Artificial Sequence
  Synthetic
cuugguuuggauauuggugaugu

SEQ ID NO: 397108 - RNA, 24 nt, Artificial Sequence
  Synthetic
ucuugguuuggauauuggugaugu

SEQ ID NO: 397109 - RNA, 18 nt, Artificial Sequence
  Synthetic
gggccagcucugugaugu

SEQ ID NO: 397110 - RNA, 19 nt, Artificial Sequence
  Synthetic
ggggccagcucugugaugu

SEQ ID NO: 397111 - RNA, 20 nt, Artificial Sequence
  Synthetic
aggggccagcucugugaugu

SEQ ID NO: 397112 - RNA, 21 nt, Artificial Sequence
  Synthetic
aaggggccagcucugugaugu

SEQ ID NO: 397113 - RNA, 22 nt, Artificial Sequence
  Synthetic
gaaggggccagcucugugaugu

SEQ ID NO: 397114 - RNA, 23 nt, Artificial Sequence
  Synthetic
agaaggggccagcucugugaugu

SEQ ID NO: 397115 - RNA, 24 nt, Artificial Sequence
  Synthetic
aagaaggggccagcucugugaugu

SEQ ID NO: 397116 - RNA, 18 nt, Artificial Sequence
  Synthetic
ggguggaccacuugaugu

SEQ ID NO: 397117 - RNA, 19 nt, Artificial Sequence
  Synthetic
uggguggaccacuugaugu

SEQ ID NO: 397118 - RNA, 20 nt, Artificial Sequence
  Synthetic
guggguggaccacuugaugu

SEQ ID NO: 397119 - RNA, 21 nt, Artificial Sequence
  Synthetic
gguggguggaccacuugaugu

SEQ ID NO: 397120 - RNA, 22 nt, Artificial Sequence
  Synthetic
agguggguggaccacuugaugu

SEQ ID NO: 397121 - RNA, 23 nt, Artificial Sequence
  Synthetic
gagguggguggaccacuugaugu

SEQ ID NO: 397122 - RNA, 24 nt, Artificial Sequence
  Synthetic
ggagguggguggaccacuugaugu

SEQ ID NO: 397123 - RNA, 18 nt, Artificial Sequence
  Synthetic
acuuuugguacuugaugu

SEQ ID NO: 397124 - RNA, 19 nt, Artificial Sequence
  Synthetic
cacuuuugguacuugaugu

SEQ ID NO: 397125 - RNA, 20 nt, Artificial Sequence
  Synthetic
gcacuuuugguacuugaugu

SEQ ID NO: 397126 - RNA, 21 nt, Artificial Sequence
  Synthetic
ggcacuuuugguacuugaugu

SEQ ID NO: 397127 - RNA, 22 nt, Artificial Sequence
  Synthetic
aggcacuuuugguacuugaugu

SEQ ID NO: 397128 - RNA, 23 nt, Artificial Sequence
  Synthetic
aaggcacuuuugguacuugaugu

SEQ ID NO: 397129 - RNA, 24 nt, Artificial Sequence
  Synthetic
uaaggcacuuuugguacuugaugu

SEQ ID NO: 397130 - RNA, 18 nt, Artificial Sequence
  Synthetic
gcaaaucccccuugaugu

SEQ ID NO: 397131 - RNA, 19 nt, Artificial Sequence
  Synthetic
agcaaaucccccuugaugu

SEQ ID NO: 397132 - RNA, 20 nt, Artificial Sequence
  Synthetic
cagcaaaucccccuugaugu

SEQ ID NO: 397133 - RNA, 21 nt, Artificial Sequence
  Synthetic
ucagcaaaucccccuugaugu

SEQ ID NO: 397134 - RNA, 22 nt, Artificial Sequence
  Synthetic
gucagcaaaucccccuugaugu

SEQ ID NO: 397135 - RNA, 23 nt, Artificial Sequence
  Synthetic
agucagcaaaucccccuugaugu

SEQ ID NO: 397136 - RNA, 24 nt, Artificial Sequence
  Synthetic
gagucagcaaaucccccuugaugu

SEQ ID NO: 397137 - RNA, 18 nt, Artificial Sequence
  Synthetic
ugagcuuuccuuugaugu

SEQ ID NO: 397138 - RNA, 19 nt, Artificial Sequence
  Synthetic
uugagcuuuccuuugaugu

SEQ ID NO: 397139 - RNA, 20 nt, Artificial Sequence
  Synthetic
cuugagcuuuccuuugaugu

SEQ ID NO: 397140 - RNA, 21 nt, Artificial Sequence
  Synthetic
ucuugagcuuuccuuugaugu

SEQ ID NO: 397141 - RNA, 22 nt, Artificial Sequence
  Synthetic
gucuugagcuuuccuuugaugu

SEQ ID NO: 397142 - RNA, 23 nt, Artificial Sequence
  Synthetic
ggucuugagcuuuccuuugaugu

SEQ ID NO: 397143 - RNA, 24 nt, Artificial Sequence
  Synthetic
uggucuugagcuuuccuuugaugu

SEQ ID NO: 397144 - RNA, 18 nt, Artificial Sequence
  Synthetic
aacuuuaauguuugaugu

SEQ ID NO: 397145 - RNA, 19 nt, Artificial Sequence
  Synthetic
caacuuuaauguuugaugu

SEQ ID NO: 397146 - RNA, 20 nt, Artificial Sequence
  Synthetic
ccaacuuuaauguuugaugu

SEQ ID NO: 397147 - RNA, 21 nt, Artificial Sequence
  Synthetic
cccaacuuuaauguuugaugu

SEQ ID NO: 397148 - RNA, 22 nt, Artificial Sequence
  Synthetic
ucccaacuuuaauguuugaugu

SEQ ID NO: 397149 - RNA, 23 nt, Artificial Sequence
  Synthetic
aucccaacuuuaauguuugaugu

SEQ ID NO: 397150 - RNA, 24 nt, Artificial Sequence
  Synthetic
aaucccaacuuuaauguuugaugu

SEQ ID NO: 397151 - RNA, 18 nt, Artificial Sequence
  Synthetic
agauauggauuuugaugu

SEQ ID NO: 397152 - RNA, 19 nt, Artificial Sequence
  Synthetic
uagauauggauuuugaugu

SEQ ID NO: 397153 - RNA, 20 nt, Artificial Sequence
  Synthetic
uuagauauggauuuugaugu

SEQ ID NO: 397154 - RNA, 21 nt, Artificial Sequence
  Synthetic
cuuagauauggauuuugaugu

SEQ ID NO: 397155 - RNA, 22 nt, Artificial Sequence
  Synthetic
ucuuagauauggauuuugaugu

SEQ ID NO: 397156 - RNA, 23 nt, Artificial Sequence
  Synthetic
uucuuagauauggauuuugaugu

SEQ ID NO: 397157 - RNA, 24 nt, Artificial Sequence
  Synthetic
uuucuuagauauggauuuugaugu

SEQ ID NO: 397158 - RNA, 18 nt, Artificial Sequence
  Synthetic
uucaagcuaaaaauaugu

SEQ ID NO: 397159 - RNA, 19 nt, Artificial Sequence
  Synthetic
uuucaagcuaaaaauaugu

SEQ ID NO: 397160 - RNA, 20 nt, Artificial Sequence
  Synthetic
uuuucaagcuaaaaauaugu

SEQ ID NO: 397161 - RNA, 21 nt, Artificial Sequence
  Synthetic
auuuucaagcuaaaaauaugu

SEQ ID NO: 397162 - RNA, 22 nt, Artificial Sequence
  Synthetic
cauuuucaagcuaaaaauaugu

SEQ ID NO: 397163 - RNA, 23 nt, Artificial Sequence
  Synthetic
acauuuucaagcuaaaaauaugu

SEQ ID NO: 397164 - RNA, 24 nt, Artificial Sequence
  Synthetic
cacauuuucaagcuaaaaauaugu

SEQ ID NO: 397165 - RNA, 18 nt, Artificial Sequence
  Synthetic
uaaaaaagcaaaauaugu

SEQ ID NO: 397166 - RNA, 19 nt, Artificial Sequence
  Synthetic
uuaaaaaagcaaaauaugu

SEQ ID NO: 397167 - RNA, 20 nt, Artificial Sequence
  Synthetic
guuaaaaaagcaaaauaugu

SEQ ID NO: 397168 - RNA, 21 nt, Artificial Sequence
  Synthetic
uguuaaaaaagcaaaauaugu

SEQ ID NO: 397169 - RNA, 22 nt, Artificial Sequence
  Synthetic
uuguuaaaaaagcaaaauaugu

SEQ ID NO: 397170 - RNA, 23 nt, Artificial Sequence
  Synthetic
uuuguuaaaaaagcaaaauaugu

SEQ ID NO: 397171 - RNA, 24 nt, Artificial Sequence
  Synthetic
uuuuguuaaaaaagcaaaauaugu

SEQ ID NO: 397172 - RNA, 18 nt, Artificial Sequence
  Synthetic
ucacugaagaaaauaugu

SEQ ID NO: 397173 - RNA, 19 nt, Artificial Sequence
  Synthetic
cucacugaagaaaauaugu

SEQ ID NO: 397174 - RNA, 20 nt, Artificial Sequence
  Synthetic
acucacugaagaaaauaugu

SEQ ID NO: 397175 - RNA, 21 nt, Artificial Sequence
  Synthetic
uacucacugaagaaaauaugu

SEQ ID NO: 397176 - RNA, 22 nt, Artificial Sequence
  Synthetic
auacucacugaagaaaauaugu

SEQ ID NO: 397177 - RNA, 23 nt, Artificial Sequence
  Synthetic
uauacucacugaagaaaauaugu

SEQ ID NO: 397178 - RNA, 24 nt, Artificial Sequence
  Synthetic
uuauacucacugaagaaaauaugu

SEQ ID NO: 397179 - RNA, 18 nt, Artificial Sequence
  Synthetic
uacugucuacaaauaugu

SEQ ID NO: 397180 - RNA, 19 nt, Artificial Sequence
  Synthetic
auacugucuacaaauaugu

SEQ ID NO: 397181 - RNA, 20 nt, Artificial Sequence
  Synthetic
aauacugucuacaaauaugu

SEQ ID NO: 397182 - RNA, 21 nt, Artificial Sequence
  Synthetic
aaauacugucuacaaauaugu

SEQ ID NO: 397183 - RNA, 22 nt, Artificial Sequence
  Synthetic
aaaauacugucuacaaauaugu

SEQ ID NO: 397184 - RNA, 23 nt, Artificial Sequence
  Synthetic
gaaaauacugucuacaaauaugu

SEQ ID NO: 397185 - RNA, 24 nt, Artificial Sequence
  Synthetic
agaaaauacugucuacaaauaugu

SEQ ID NO: 397186 - RNA, 18 nt, Artificial Sequence
  Synthetic
uuaauaauaacaauaugu

SEQ ID NO: 397187 - RNA, 19 nt, Artificial Sequence
  Synthetic
guuaauaauaacaauaugu

SEQ ID NO: 397188 - RNA, 20 nt, Artificial Sequence
  Synthetic
gguuaauaauaacaauaugu

SEQ ID NO: 397189 - RNA, 21 nt, Artificial Sequence
  Synthetic
agguuaauaauaacaauaugu

SEQ ID NO: 397190 - RNA, 22 nt, Artificial Sequence
  Synthetic
gagguuaauaauaacaauaugu

SEQ ID NO: 397191 - RNA, 23 nt, Artificial Sequence
  Synthetic
ggagguuaauaauaacaauaugu

SEQ ID NO: 397192 - RNA, 24 nt, Artificial Sequence
  Synthetic
uggagguuaauaauaacaauaugu

SEQ ID NO: 397193 - RNA, 18 nt, Artificial Sequence
  Synthetic
ccauauuugacaauaugu

SEQ ID NO: 397194 - RNA, 19 nt, Artificial Sequence
  Synthetic
gccauauuugacaauaugu

SEQ ID NO: 397195 - RNA, 20 nt, Artificial Sequence
  Synthetic
ugccauauuugacaauaugu

SEQ ID NO: 397196 - RNA, 21 nt, Artificial Sequence
  Synthetic
cugccauauuugacaauaugu

SEQ ID NO: 397197 - RNA, 22 nt, Artificial Sequence
  Synthetic
ccugccauauuugacaauaugu

SEQ ID NO: 397198 - RNA, 23 nt, Artificial Sequence
  Synthetic
uccugccauauuugacaauaugu

SEQ ID NO: 397199 - RNA, 24 nt, Artificial Sequence
  Synthetic
guccugccauauuugacaauaugu

SEQ ID NO: 397200 - RNA, 18 nt, Artificial Sequence
  Synthetic
ugcugcaacccaauaugu

SEQ ID NO: 397201 - RNA, 19 nt, Artificial Sequence
  Synthetic
augcugcaacccaauaugu

SEQ ID NO: 397202 - RNA, 20 nt, Artificial Sequence
  Synthetic
caugcugcaacccaauaugu

SEQ ID NO: 397203 - RNA, 21 nt, Artificial Sequence
  Synthetic
ucaugcugcaacccaauaugu

SEQ ID NO: 397204 - RNA, 22 nt, Artificial Sequence
  Synthetic
aucaugcugcaacccaauaugu

SEQ ID NO: 397205 - RNA, 23 nt, Artificial Sequence
  Synthetic
uaucaugcugcaacccaauaugu

SEQ ID NO: 397206 - RNA, 24 nt, Artificial Sequence
  Synthetic
auaucaugcugcaacccaauaugu

SEQ ID NO: 397207 - RNA, 18 nt, Artificial Sequence
  Synthetic
cauauugugucaauaugu

SEQ ID NO: 397208 - RNA, 19 nt, Artificial Sequence
  Synthetic
acauauugugucaauaugu

SEQ ID NO: 397209 - RNA, 20 nt, Artificial Sequence
  Synthetic
aacauauugugucaauaugu

SEQ ID NO: 397210 - RNA, 21 nt, Artificial Sequence
  Synthetic
uaacauauugugucaauaugu

SEQ ID NO: 397211 - RNA, 22 nt, Artificial Sequence
  Synthetic
auaacauauugugucaauaugu

SEQ ID NO: 397212 - RNA, 23 nt, Artificial Sequence
  Synthetic
cauaacauauugugucaauaugu

SEQ ID NO: 397213 - RNA, 24 nt, Artificial Sequence
  Synthetic
acauaacauauugugucaauaugu

SEQ ID NO: 397214 - RNA, 18 nt, Artificial Sequence
  Synthetic
gacuaguugucaauaugu

SEQ ID NO: 397215 - RNA, 19 nt, Artificial Sequence
  Synthetic
ugacuaguugucaauaugu

SEQ ID NO: 397216 - RNA, 20 nt, Artificial Sequence
  Synthetic
augacuaguugucaauaugu

SEQ ID NO: 397217 - RNA, 21 nt, Artificial Sequence
  Synthetic
aaugacuaguugucaauaugu

SEQ ID NO: 397218 - RNA, 22 nt, Artificial Sequence
  Synthetic
aaaugacuaguugucaauaugu

SEQ ID NO: 397219 - RNA, 23 nt, Artificial Sequence
  Synthetic
gaaaugacuaguugucaauaugu

SEQ ID NO: 397220 - RNA, 24 nt, Artificial Sequence
  Synthetic
ggaaaugacuaguugucaauaugu

SEQ ID NO: 397221 - RNA, 18 nt, Artificial Sequence
  Synthetic
acuugguauucaauaugu

SEQ ID NO: 397222 - RNA, 19 nt, Artificial Sequence
  Synthetic
gacuugguauucaauaugu

SEQ ID NO: 397223 - RNA, 20 nt, Artificial Sequence
  Synthetic
agacuugguauucaauaugu

SEQ ID NO: 397224 - RNA, 21 nt, Artificial Sequence
  Synthetic
cagacuugguauucaauaugu

SEQ ID NO: 397225 - RNA, 22 nt, Artificial Sequence
  Synthetic
acagacuugguauucaauaugu

SEQ ID NO: 397226 - RNA, 23 nt, Artificial Sequence
  Synthetic
uacagacuugguauucaauaugu

SEQ ID NO: 397227 - RNA, 24 nt, Artificial Sequence
  Synthetic
uuacagacuugguauucaauaugu

SEQ ID NO: 397228 - RNA, 18 nt, Artificial Sequence
  Synthetic
gaauaacucugaauaugu

SEQ ID NO: 397229 - RNA, 19 nt, Artificial Sequence
  Synthetic
agaauaacucugaauaugu

SEQ ID NO: 397230 - RNA, 20 nt, Artificial Sequence
  Synthetic
uagaauaacucugaauaugu

SEQ ID NO: 397231 - RNA, 21 nt, Artificial Sequence
  Synthetic
auagaauaacucugaauaugu

SEQ ID NO: 397232 - RNA, 22 nt, Artificial Sequence
  Synthetic
gauagaauaacucugaauaugu

SEQ ID NO: 397233 - RNA, 23 nt, Artificial Sequence
  Synthetic
ugauagaauaacucugaauaugu

SEQ ID NO: 397234 - RNA, 24 nt, Artificial Sequence
  Synthetic
augauagaauaacucugaauaugu

SEQ ID NO: 397235 - RNA, 18 nt, Artificial Sequence
  Synthetic
ucuauguuaagcauaugu

SEQ ID NO: 397236 - RNA, 19 nt, Artificial Sequence
  Synthetic
cucuauguuaagcauaugu

SEQ ID NO: 397237 - RNA, 20 nt, Artificial Sequence
  Synthetic
acucuauguuaagcauaugu

SEQ ID NO: 397238 - RNA, 21 nt, Artificial Sequence
  Synthetic
uacucuauguuaagcauaugu

SEQ ID NO: 397239 - RNA, 22 nt, Artificial Sequence
  Synthetic
cuacucuauguuaagcauaugu

SEQ ID NO: 397240 - RNA, 23 nt, Artificial Sequence
  Synthetic
ccuacucuauguuaagcauaugu

SEQ ID NO: 397241 - RNA, 24 nt, Artificial Sequence
  Synthetic
gccuacucuauguuaagcauaugu

SEQ ID NO: 397242 - RNA, 18 nt, Artificial Sequence
  Synthetic
aguccuuauaagauaugu

SEQ ID NO: 397243 - RNA, 19 nt, Artificial Sequence
  Synthetic
uaguccuuauaagauaugu

SEQ ID NO: 397244 - RNA, 20 nt, Artificial Sequence
  Synthetic
auaguccuuauaagauaugu

SEQ ID NO: 397245 - RNA, 21 nt, Artificial Sequence
  Synthetic
aauaguccuuauaagauaugu

SEQ ID NO: 397246 - RNA, 22 nt, Artificial Sequence
  Synthetic
uaauaguccuuauaagauaugu

SEQ ID NO: 397247 - RNA, 23 nt, Artificial Sequence
  Synthetic
guaauaguccuuauaagauaugu

SEQ ID NO: 397248 - RNA, 24 nt, Artificial Sequence
  Synthetic
gguaauaguccuuauaagauaugu

SEQ ID NO: 397249 - RNA, 18 nt, Artificial Sequence
  Synthetic
ccccuuacccagauaugu

SEQ ID NO: 397250 - RNA, 19 nt, Artificial Sequence
  Synthetic
uccccuuacccagauaugu

SEQ ID NO: 397251 - RNA, 20 nt, Artificial Sequence
  Synthetic
guccccuuacccagauaugu

SEQ ID NO: 397252 - RNA, 21 nt, Artificial Sequence
  Synthetic
aguccccuuacccagauaugu

SEQ ID NO: 397253 - RNA, 22 nt, Artificial Sequence
  Synthetic
aaguccccuuacccagauaugu

SEQ ID NO: 397254 - RNA, 23 nt, Artificial Sequence
  Synthetic
gaaguccccuuacccagauaugu

SEQ ID NO: 397255 - RNA, 24 nt, Artificial Sequence
  Synthetic
ggaaguccccuuacccagauaugu

SEQ ID NO: 397256 - RNA, 18 nt, Artificial Sequence
  Synthetic
aagcaacaauggauaugu

SEQ ID NO: 397257 - RNA, 19 nt, Artificial Sequence
  Synthetic
aaagcaacaauggauaugu

SEQ ID NO: 397258 - RNA, 20 nt, Artificial Sequence
  Synthetic
uaaagcaacaauggauaugu

SEQ ID NO: 397259 - RNA, 21 nt, Artificial Sequence
  Synthetic
auaaagcaacaauggauaugu

SEQ ID NO: 397260 - RNA, 22 nt, Artificial Sequence
  Synthetic
uauaaagcaacaauggauaugu

SEQ ID NO: 397261 - RNA, 23 nt, Artificial Sequence
  Synthetic
guauaaagcaacaauggauaugu

SEQ ID NO: 397262 - RNA, 24 nt, Artificial Sequence
  Synthetic
aguauaaagcaacaauggauaugu

SEQ ID NO: 397263 - RNA, 18 nt, Artificial Sequence
  Synthetic
aucugacacaauauaugu

SEQ ID NO: 397264 - RNA, 19 nt, Artificial Sequence
  Synthetic
uaucugacacaauauaugu

SEQ ID NO: 397265 - RNA, 20 nt, Artificial Sequence
  Synthetic
uuaucugacacaauauaugu

SEQ ID NO: 397266 - RNA, 21 nt, Artificial Sequence
  Synthetic
auuaucugacacaauauaugu

SEQ ID NO: 397267 - RNA, 22 nt, Artificial Sequence
  Synthetic
gauuaucugacacaauauaugu

SEQ ID NO: 397268 - RNA, 23 nt, Artificial Sequence
  Synthetic
ggauuaucugacacaauauaugu

SEQ ID NO: 397269 - RNA, 24 nt, Artificial Sequence
  Synthetic
aggauuaucugacacaauauaugu

SEQ ID NO: 397270 - RNA, 18 nt, Artificial Sequence
  Synthetic
cuuugucauccuauaugu

SEQ ID NO: 397271 - RNA, 19 nt, Artificial Sequence
  Synthetic
ucuuugucauccuauaugu

SEQ ID NO: 397272 - RNA, 20 nt, Artificial Sequence
  Synthetic
uucuuugucauccuauaugu

SEQ ID NO: 397273 - RNA, 21 nt, Artificial Sequence
  Synthetic
auucuuugucauccuauaugu

SEQ ID NO: 397274 - RNA, 22 nt, Artificial Sequence
  Synthetic
cauucuuugucauccuauaugu

SEQ ID NO: 397275 - RNA, 23 nt, Artificial Sequence
  Synthetic
acauucuuugucauccuauaugu

SEQ ID NO: 397276 - RNA, 24 nt, Artificial Sequence
  Synthetic
uacauucuuugucauccuauaugu

SEQ ID NO: 397277 - RNA, 18 nt, Artificial Sequence
  Synthetic
ucguaauguauuauaugu

SEQ ID NO: 397278 - RNA, 19 nt, Artificial Sequence
  Synthetic
cucguaauguauuauaugu

SEQ ID NO: 397279 - RNA, 20 nt, Artificial Sequence
  Synthetic
ccucguaauguauuauaugu

SEQ ID NO: 397280 - RNA, 21 nt, Artificial Sequence
  Synthetic
accucguaauguauuauaugu

SEQ ID NO: 397281 - RNA, 22 nt, Artificial Sequence
  Synthetic
uaccucguaauguauuauaugu

SEQ ID NO: 397282 - RNA, 23 nt, Artificial Sequence
  Synthetic
uuaccucguaauguauuauaugu

SEQ ID NO: 397283 - RNA, 24 nt, Artificial Sequence
  Synthetic
uuuaccucguaauguauuauaugu

SEQ ID NO: 397284 - RNA, 18 nt, Artificial Sequence
  Synthetic
ggacuuccuuuuauaugu

SEQ ID NO: 397285 - RNA, 19 nt, Artificial Sequence
  Synthetic
gggacuuccuuuuauaugu

SEQ ID NO: 397286 - RNA, 20 nt, Artificial Sequence
  Synthetic
ggggacuuccuuuuauaugu

SEQ ID NO: 397287 - RNA, 21 nt, Artificial Sequence
  Synthetic
aggggacuuccuuuuauaugu

SEQ ID NO: 397288 - RNA, 22 nt, Artificial Sequence
  Synthetic
aaggggacuuccuuuuauaugu

SEQ ID NO: 397289 - RNA, 23 nt, Artificial Sequence
  Synthetic
uaaggggacuuccuuuuauaugu

SEQ ID NO: 397290 - RNA, 24 nt, Artificial Sequence
  Synthetic
auaaggggacuuccuuuuauaugu

SEQ ID NO: 397291 - RNA, 18 nt, Artificial Sequence
  Synthetic
gaauuuuaucaacuaugu

SEQ ID NO: 397292 - RNA, 19 nt, Artificial Sequence
  Synthetic
ggaauuuuaucaacuaugu

SEQ ID NO: 397293 - RNA, 20 nt, Artificial Sequence
  Synthetic
aggaauuuuaucaacuaugu

SEQ ID NO: 397294 - RNA, 21 nt, Artificial Sequence
  Synthetic
aaggaauuuuaucaacuaugu

SEQ ID NO: 397295 - RNA, 22 nt, Artificial Sequence
  Synthetic
gaaggaauuuuaucaacuaugu

SEQ ID NO: 397296 - RNA, 23 nt, Artificial Sequence
  Synthetic
agaaggaauuuuaucaacuaugu

SEQ ID NO: 397297 - RNA, 24 nt, Artificial Sequence
  Synthetic
cagaaggaauuuuaucaacuaugu

SEQ ID NO: 397298 - RNA, 18 nt, Artificial Sequence
  Synthetic
auaguuugagaacuaugu

SEQ ID NO: 397299 - RNA, 19 nt, Artificial Sequence
  Synthetic
aauaguuugagaacuaugu

SEQ ID NO: 397300 - RNA, 20 nt, Artificial Sequence
  Synthetic
aaauaguuugagaacuaugu

SEQ ID NO: 397301 - RNA, 21 nt, Artificial Sequence
  Synthetic
caaauaguuugagaacuaugu

SEQ ID NO: 397302 - RNA, 22 nt, Artificial Sequence
  Synthetic
acaaauaguuugagaacuaugu

SEQ ID NO: 397303 - RNA, 23 nt, Artificial Sequence
  Synthetic
aacaaauaguuugagaacuaugu

SEQ ID NO: 397304 - RNA, 24 nt, Artificial Sequence
  Synthetic
uaacaaauaguuugagaacuaugu

SEQ ID NO: 397305 - RNA, 18 nt, Artificial Sequence
  Synthetic
uauuguugugaccuaugu

SEQ ID NO: 397306 - RNA, 19 nt, Artificial Sequence
  Synthetic
uuauuguugugaccuaugu

SEQ ID NO: 397307 - RNA, 20 nt, Artificial Sequence
  Synthetic
auuauuguugugaccuaugu

SEQ ID NO: 397308 - RNA, 21 nt, Artificial Sequence
  Synthetic
gauuauuguugugaccuaugu

SEQ ID NO: 397309 - RNA, 22 nt, Artificial Sequence
  Synthetic
agauuauuguugugaccuaugu

SEQ ID NO: 397310 - RNA, 23 nt, Artificial Sequence
  Synthetic
uagauuauuguugugaccuaugu

SEQ ID NO: 397311 - RNA, 24 nt, Artificial Sequence
  Synthetic
auagauuauuguugugaccuaugu

SEQ ID NO: 397312 - RNA, 18 nt, Artificial Sequence
  Synthetic
gggccaacuuaccuaugu

SEQ ID NO: 397313 - RNA, 19 nt, Artificial Sequence
  Synthetic
ggggccaacuuaccuaugu

SEQ ID NO: 397314 - RNA, 20 nt, Artificial Sequence
  Synthetic
uggggccaacuuaccuaugu

SEQ ID NO: 397315 - RNA, 21 nt, Artificial Sequence
  Synthetic
uuggggccaacuuaccuaugu

SEQ ID NO: 397316 - RNA, 22 nt, Artificial Sequence
  Synthetic
uuuggggccaacuuaccuaugu

SEQ ID NO: 397317 - RNA, 23 nt, Artificial Sequence
  Synthetic
cuuuggggccaacuuaccuaugu

SEQ ID NO: 397318 - RNA, 24 nt, Artificial Sequence
  Synthetic
gcuuuggggccaacuuaccuaugu

SEQ ID NO: 397319 - RNA, 18 nt, Artificial Sequence
  Synthetic
aggaguacuggccuaugu

SEQ ID NO: 397320 - RNA, 19 nt, Artificial Sequence
  Synthetic
gaggaguacuggccuaugu

SEQ ID NO: 397321 - RNA, 20 nt, Artificial Sequence
  Synthetic
ugaggaguacuggccuaugu

SEQ ID NO: 397322 - RNA, 21 nt, Artificial Sequence
  Synthetic
uugaggaguacuggccuaugu

SEQ ID NO: 397323 - RNA, 22 nt, Artificial Sequence
  Synthetic
auugaggaguacuggccuaugu

SEQ ID NO: 397324 - RNA, 23 nt, Artificial Sequence
  Synthetic
gauugaggaguacuggccuaugu

SEQ ID NO: 397325 - RNA, 24 nt, Artificial Sequence
  Synthetic
agauugaggaguacuggccuaugu

SEQ ID NO: 397326 - RNA, 18 nt, Artificial Sequence
  Synthetic
ucacaguuugggcuaugu

SEQ ID NO: 397327 - RNA, 19 nt, Artificial Sequence
  Synthetic
uucacaguuugggcuaugu

SEQ ID NO: 397328 - RNA, 20 nt, Artificial Sequence
  Synthetic
uuucacaguuugggcuaugu

SEQ ID NO: 397329 - RNA, 21 nt, Artificial Sequence
  Synthetic
uuuucacaguuugggcuaugu

SEQ ID NO: 397330 - RNA, 22 nt, Artificial Sequence
  Synthetic
guuuucacaguuugggcuaugu

SEQ ID NO: 397331 - RNA, 23 nt, Artificial Sequence
  Synthetic
aguuuucacaguuugggcuaugu

SEQ ID NO: 397332 - RNA, 24 nt, Artificial Sequence
  Synthetic
caguuuucacaguuugggcuaugu

SEQ ID NO: 397333 - RNA, 18 nt, Artificial Sequence
  Synthetic
ugaggaaaagaucuaugu

SEQ ID NO: 397334 - RNA, 19 nt, Artificial Sequence
  Synthetic
uugaggaaaagaucuaugu

SEQ ID NO: 397335 - RNA, 20 nt, Artificial Sequence
  Synthetic
uuugaggaaaagaucuaugu

SEQ ID NO: 397336 - RNA, 21 nt, Artificial Sequence
  Synthetic
guuugaggaaaagaucuaugu

SEQ ID NO: 397337 - RNA, 22 nt, Artificial Sequence
  Synthetic
gguuugaggaaaagaucuaugu

SEQ ID NO: 397338 - RNA, 23 nt, Artificial Sequence
  Synthetic
ugguuugaggaaaagaucuaugu

SEQ ID NO: 397339 - RNA, 24 nt, Artificial Sequence
  Synthetic
augguuugaggaaaagaucuaugu

SEQ ID NO: 397340 - RNA, 18 nt, Artificial Sequence
  Synthetic
cuuacggauuaucuaugu

SEQ ID NO: 397341 - RNA, 19 nt, Artificial Sequence
  Synthetic
acuuacggauuaucuaugu

SEQ ID NO: 397342 - RNA, 20 nt, Artificial Sequence
  Synthetic
aacuuacggauuaucuaugu

SEQ ID NO: 397343 - RNA, 21 nt, Artificial Sequence
  Synthetic
caacuuacggauuaucuaugu

SEQ ID NO: 397344 - RNA, 22 nt, Artificial Sequence
  Synthetic
acaacuuacggauuaucuaugu

SEQ ID NO: 397345 - RNA, 23 nt, Artificial Sequence
  Synthetic
cacaacuuacggauuaucuaugu

SEQ ID NO: 397346 - RNA, 24 nt, Artificial Sequence
  Synthetic
ucacaacuuacggauuaucuaugu

SEQ ID NO: 397347 - RNA, 18 nt, Artificial Sequence
  Synthetic
ccaguggggacucuaugu

SEQ ID NO: 397348 - RNA, 19 nt, Artificial Sequence
  Synthetic
cccaguggggacucuaugu

SEQ ID NO: 397349 - RNA, 20 nt, Artificial Sequence
  Synthetic
ccccaguggggacucuaugu

SEQ ID NO: 397350 - RNA, 21 nt, Artificial Sequence
  Synthetic
gccccaguggggacucuaugu

SEQ ID NO: 397351 - RNA, 22 nt, Artificial Sequence
  Synthetic
ugccccaguggggacucuaugu

SEQ ID NO: 397352 - RNA, 23 nt, Artificial Sequence
  Synthetic
gugccccaguggggacucuaugu

SEQ ID NO: 397353 - RNA, 24 nt, Artificial Sequence
  Synthetic
agugccccaguggggacucuaugu

SEQ ID NO: 397354 - RNA, 18 nt, Artificial Sequence
  Synthetic
aagaagguuagucuaugu

SEQ ID NO: 397355 - RNA, 19 nt, Artificial Sequence
  Synthetic
caagaagguuagucuaugu

SEQ ID NO: 397356 - RNA, 20 nt, Artificial Sequence
  Synthetic
ccaagaagguuagucuaugu

SEQ ID NO: 397357 - RNA, 21 nt, Artificial Sequence
  Synthetic
uccaagaagguuagucuaugu

SEQ ID NO: 397358 - RNA, 22 nt, Artificial Sequence
  Synthetic
auccaagaagguuagucuaugu

SEQ ID NO: 397359 - RNA, 23 nt, Artificial Sequence
  Synthetic
cauccaagaagguuagucuaugu

SEQ ID NO: 397360 - RNA, 24 nt, Artificial Sequence
  Synthetic
acauccaagaagguuagucuaugu

SEQ ID NO: 397361 - RNA, 18 nt, Artificial Sequence
  Synthetic
uuauucagagaaguaugu

SEQ ID NO: 397362 - RNA, 19 nt, Artificial Sequence
  Synthetic
uuuauucagagaaguaugu

SEQ ID NO: 397363 - RNA, 20 nt, Artificial Sequence
  Synthetic
guuuauucagagaaguaugu

SEQ ID NO: 397364 - RNA, 21 nt, Artificial Sequence
  Synthetic
aguuuauucagagaaguaugu

SEQ ID NO: 397365 - RNA, 22 nt, Artificial Sequence
  Synthetic
aaguuuauucagagaaguaugu

SEQ ID NO: 397366 - RNA, 23 nt, Artificial Sequence
  Synthetic
aaaguuuauucagagaaguaugu

SEQ ID NO: 397367 - RNA, 24 nt, Artificial Sequence
  Synthetic
caaaguuuauucagagaaguaugu

SEQ ID NO: 397368 - RNA, 18 nt, Artificial Sequence
  Synthetic
gcauuuauagcaguaugu

SEQ ID NO: 397369 - RNA, 19 nt, Artificial Sequence
  Synthetic
ggcauuuauagcaguaugu

SEQ ID NO: 397370 - RNA, 20 nt, Artificial Sequence
  Synthetic
gggcauuuauagcaguaugu

SEQ ID NO: 397371 - RNA, 21 nt, Artificial Sequence
  Synthetic
ugggcauuuauagcaguaugu

SEQ ID NO: 397372 - RNA, 22 nt, Artificial Sequence
  Synthetic
augggcauuuauagcaguaugu

SEQ ID NO: 397373 - RNA, 23 nt, Artificial Sequence
  Synthetic
aaugggcauuuauagcaguaugu

SEQ ID NO: 397374 - RNA, 24 nt, Artificial Sequence
  Synthetic
gaaugggcauuuauagcaguaugu

SEQ ID NO: 397375 - RNA, 18 nt, Artificial Sequence
  Synthetic
uuaaaaugcuuaguaugu

SEQ ID NO: 397376 - RNA, 19 nt, Artificial Sequence
  Synthetic
cuuaaaaugcuuaguaugu

SEQ ID NO: 397377 - RNA, 20 nt, Artificial Sequence
  Synthetic
ucuuaaaaugcuuaguaugu

SEQ ID NO: 397378 - RNA, 21 nt, Artificial Sequence
  Synthetic
cucuuaaaaugcuuaguaugu

SEQ ID NO: 397379 - RNA, 22 nt, Artificial Sequence
  Synthetic
acucuuaaaaugcuuaguaugu

SEQ ID NO: 397380 - RNA, 23 nt, Artificial Sequence
  Synthetic
uacucuuaaaaugcuuaguaugu

SEQ ID NO: 397381 - RNA, 24 nt, Artificial Sequence
  Synthetic
guacucuuaaaaugcuuaguaugu

SEQ ID NO: 397382 - RNA, 18 nt, Artificial Sequence
  Synthetic
ugcuguauccucguaugu

SEQ ID NO: 397383 - RNA, 19 nt, Artificial Sequence
  Synthetic
uugcuguauccucguaugu

SEQ ID NO: 397384 - RNA, 20 nt, Artificial Sequence
  Synthetic
cuugcuguauccucguaugu

SEQ ID NO: 397385 - RNA, 21 nt, Artificial Sequence
  Synthetic
ucuugcuguauccucguaugu

SEQ ID NO: 397386 - RNA, 22 nt, Artificial Sequence
  Synthetic
uucuugcuguauccucguaugu

SEQ ID NO: 397387 - RNA, 23 nt, Artificial Sequence
  Synthetic
cuucuugcuguauccucguaugu

SEQ ID NO: 397388 - RNA, 24 nt, Artificial Sequence
  Synthetic
ucuucuugcuguauccucguaugu

SEQ ID NO: 397389 - RNA, 18 nt, Artificial Sequence
  Synthetic
gacauugaaaagguaugu

SEQ ID NO: 397390 - RNA, 19 nt, Artificial Sequence
  Synthetic
ugacauugaaaagguaugu

SEQ ID NO: 397391 - RNA, 20 nt, Artificial Sequence
  Synthetic
uugacauugaaaagguaugu

SEQ ID NO: 397392 - RNA, 21 nt, Artificial Sequence
  Synthetic
uuugacauugaaaagguaugu

SEQ ID NO: 397393 - RNA, 22 nt, Artificial Sequence
  Synthetic
guuugacauugaaaagguaugu

SEQ ID NO: 397394 - RNA, 23 nt, Artificial Sequence
  Synthetic
uguuugacauugaaaagguaugu

SEQ ID NO: 397395 - RNA, 24 nt, Artificial Sequence
  Synthetic
guguuugacauugaaaagguaugu

SEQ ID NO: 397396 - RNA, 18 nt, Artificial Sequence
  Synthetic
gaaguuaaauggguaugu

SEQ ID NO: 397397 - RNA, 19 nt, Artificial Sequence
  Synthetic
agaaguuaaauggguaugu

SEQ ID NO: 397398 - RNA, 20 nt, Artificial Sequence
  Synthetic
gagaaguuaaauggguaugu

SEQ ID NO: 397399 - RNA, 21 nt, Artificial Sequence
  Synthetic
ggagaaguuaaauggguaugu

SEQ ID NO: 397400 - RNA, 22 nt, Artificial Sequence
  Synthetic
aggagaaguuaaauggguaugu

SEQ ID NO: 397401 - RNA, 23 nt, Artificial Sequence
  Synthetic
caggagaaguuaaauggguaugu

SEQ ID NO: 397402 - RNA, 24 nt, Artificial Sequence
  Synthetic
gcaggagaaguuaaauggguaugu

SEQ ID NO: 397403 - RNA, 18 nt, Artificial Sequence
  Synthetic
auuuagaaggauguaugu

SEQ ID NO: 397404 - RNA, 19 nt, Artificial Sequence
  Synthetic
uauuuagaaggauguaugu

SEQ ID NO: 397405 - RNA, 20 nt, Artificial Sequence
  Synthetic
uuauuuagaaggauguaugu

SEQ ID NO: 397406 - RNA, 21 nt, Artificial Sequence
  Synthetic
uuuauuuagaaggauguaugu

SEQ ID NO: 397407 - RNA, 22 nt, Artificial Sequence
  Synthetic
auuuauuuagaaggauguaugu

SEQ ID NO: 397408 - RNA, 23 nt, Artificial Sequence
  Synthetic
uauuuauuuagaaggauguaugu

SEQ ID NO: 397409 - RNA, 24 nt, Artificial Sequence
  Synthetic
auauuuauuuagaaggauguaugu

SEQ ID NO: 397410 - RNA, 18 nt, Artificial Sequence
  Synthetic
guguguguguguguaugu

SEQ ID NO: 397411 - RNA, 19 nt, Artificial Sequence
  Synthetic
uguguguguguguguaugu

SEQ ID NO: 397412 - RNA, 20 nt, Artificial Sequence
  Synthetic
guguguguguguguguaugu

SEQ ID NO: 397413 - RNA, 18 nt, Artificial Sequence
  Synthetic
ugaacuagcuuuguaugu

SEQ ID NO: 397414 - RNA, 19 nt, Artificial Sequence
  Synthetic
augaacuagcuuuguaugu

SEQ ID NO: 397415 - RNA, 20 nt, Artificial Sequence
  Synthetic
aaugaacuagcuuuguaugu

SEQ ID NO: 397416 - RNA, 21 nt, Artificial Sequence
  Synthetic
aaaugaacuagcuuuguaugu

SEQ ID NO: 397417 - RNA, 22 nt, Artificial Sequence
  Synthetic
aaaaugaacuagcuuuguaugu

SEQ ID NO: 397418 - RNA, 23 nt, Artificial Sequence
  Synthetic
aaaaaugaacuagcuuuguaugu

SEQ ID NO: 397419 - RNA, 24 nt, Artificial Sequence
  Synthetic
uaaaaaugaacuagcuuuguaugu

SEQ ID NO: 397420 - RNA, 18 nt, Artificial Sequence
  Synthetic
ugugacagcagauuaugu

SEQ ID NO: 397421 - RNA, 19 nt, Artificial Sequence
  Synthetic
augugacagcagauuaugu

SEQ ID NO: 397422 - RNA, 20 nt, Artificial Sequence
  Synthetic
aaugugacagcagauuaugu

SEQ ID NO: 397423 - RNA, 21 nt, Artificial Sequence
  Synthetic
gaaugugacagcagauuaugu

SEQ ID NO: 397424 - RNA, 22 nt, Artificial Sequence
  Synthetic
agaaugugacagcagauuaugu

SEQ ID NO: 397425 - RNA, 23 nt, Artificial Sequence
  Synthetic
aagaaugugacagcagauuaugu

SEQ ID NO: 397426 - RNA, 24 nt, Artificial Sequence
  Synthetic
aaagaaugugacagcagauuaugu

SEQ ID NO: 397427 - RNA, 18 nt, Artificial Sequence
  Synthetic
auguuuaagagauuaugu

SEQ ID NO: 397428 - RNA, 19 nt, Artificial Sequence
  Synthetic
aauguuuaagagauuaugu

SEQ ID NO: 397429 - RNA, 20 nt, Artificial Sequence
  Synthetic
aaauguuuaagagauuaugu

SEQ ID NO: 397430 - RNA, 21 nt, Artificial Sequence
  Synthetic
gaaauguuuaagagauuaugu

SEQ ID NO: 397431 - RNA, 22 nt, Artificial Sequence
  Synthetic
agaaauguuuaagagauuaugu

SEQ ID NO: 397432 - RNA, 23 nt, Artificial Sequence
  Synthetic
aagaaauguuuaagagauuaugu

SEQ ID NO: 397433 - RNA, 24 nt, Artificial Sequence
  Synthetic
uaagaaauguuuaagagauuaugu

SEQ ID NO: 397434 - RNA, 18 nt, Artificial Sequence
  Synthetic
ccaagacuuagauuaugu

SEQ ID NO: 397435 - RNA, 19 nt, Artificial Sequence
  Synthetic
cccaagacuuagauuaugu

SEQ ID NO: 397436 - RNA, 20 nt, Artificial Sequence
  Synthetic
acccaagacuuagauuaugu

SEQ ID NO: 397437 - RNA, 21 nt, Artificial Sequence
  Synthetic
aacccaagacuuagauuaugu

SEQ ID NO: 397438 - RNA, 22 nt, Artificial Sequence
  Synthetic
gaacccaagacuuagauuaugu

SEQ ID NO: 397439 - RNA, 23 nt, Artificial Sequence
  Synthetic
ggaacccaagacuuagauuaugu

SEQ ID NO: 397440 - RNA, 24 nt, Artificial Sequence
  Synthetic
gggaacccaagacuuagauuaugu

SEQ ID NO: 397441 - RNA, 18 nt, Artificial Sequence
  Synthetic
uuuagcacucgauuaugu

SEQ ID NO: 397442 - RNA, 19 nt, Artificial Sequence
  Synthetic
uuuuagcacucgauuaugu

SEQ ID NO: 397443 - RNA, 20 nt, Artificial Sequence
  Synthetic
cuuuuagcacucgauuaugu

SEQ ID NO: 397444 - RNA, 21 nt, Artificial Sequence
  Synthetic
ccuuuuagcacucgauuaugu

SEQ ID NO: 397445 - RNA, 22 nt, Artificial Sequence
  Synthetic
uccuuuuagcacucgauuaugu

SEQ ID NO: 397446 - RNA, 23 nt, Artificial Sequence
  Synthetic
auccuuuuagcacucgauuaugu

SEQ ID NO: 397447 - RNA, 24 nt, Artificial Sequence
  Synthetic
gauccuuuuagcacucgauuaugu

SEQ ID NO: 397448 - RNA, 18 nt, Artificial Sequence
  Synthetic
gagucagucuuauuaugu

SEQ ID NO: 397449 - RNA, 19 nt, Artificial Sequence
  Synthetic
agagucagucuuauuaugu

SEQ ID NO: 397450 - RNA, 20 nt, Artificial Sequence
  Synthetic
cagagucagucuuauuaugu

SEQ ID NO: 397451 - RNA, 21 nt, Artificial Sequence
  Synthetic
ucagagucagucuuauuaugu

SEQ ID NO: 397452 - RNA, 22 nt, Artificial Sequence
  Synthetic
uucagagucagucuuauuaugu

SEQ ID NO: 397453 - RNA, 23 nt, Artificial Sequence
  Synthetic
uuucagagucagucuuauuaugu

SEQ ID NO: 397454 - RNA, 24 nt, Artificial Sequence
  Synthetic
cuuucagagucagucuuauuaugu

SEQ ID NO: 397455 - RNA, 18 nt, Artificial Sequence
  Synthetic
gcgugaucucacuuaugu

SEQ ID NO: 397456 - RNA, 19 nt, Artificial Sequence
  Synthetic
ugcgugaucucacuuaugu

SEQ ID NO: 397457 - RNA, 20 nt, Artificial Sequence
  Synthetic
cugcgugaucucacuuaugu

SEQ ID NO: 397458 - RNA, 21 nt, Artificial Sequence
  Synthetic
acugcgugaucucacuuaugu

SEQ ID NO: 397459 - RNA, 22 nt, Artificial Sequence
  Synthetic
uacugcgugaucucacuuaugu

SEQ ID NO: 397460 - RNA, 23 nt, Artificial Sequence
  Synthetic
auacugcgugaucucacuuaugu

SEQ ID NO: 397461 - RNA, 24 nt, Artificial Sequence
  Synthetic
aauacugcgugaucucacuuaugu

SEQ ID NO: 397462 - RNA, 18 nt, Artificial Sequence
  Synthetic
uuuuucaucuacuuaugu

SEQ ID NO: 397463 - RNA, 19 nt, Artificial Sequence
  Synthetic
uuuuuucaucuacuuaugu

SEQ ID NO: 397464 - RNA, 20 nt, Artificial Sequence
  Synthetic
uuuuuuucaucuacuuaugu

SEQ ID NO: 397465 - RNA, 21 nt, Artificial Sequence
  Synthetic
cuuuuuuucaucuacuuaugu

SEQ ID NO: 397466 - RNA, 22 nt, Artificial Sequence
  Synthetic
ucuuuuuuucaucuacuuaugu

SEQ ID NO: 397467 - RNA, 23 nt, Artificial Sequence
  Synthetic
uucuuuuuuucaucuacuuaugu

SEQ ID NO: 397468 - RNA, 24 nt, Artificial Sequence
  Synthetic
uuucuuuuuuucaucuacuuaugu

SEQ ID NO: 397469 - RNA, 18 nt, Artificial Sequence
  Synthetic
cuuauauaugaguuaugu

SEQ ID NO: 397470 - RNA, 19 nt, Artificial Sequence
  Synthetic
ucuuauauaugaguuaugu

SEQ ID NO: 397471 - RNA, 20 nt, Artificial Sequence
  Synthetic
uucuuauauaugaguuaugu

SEQ ID NO: 397472 - RNA, 21 nt, Artificial Sequence
  Synthetic
uuucuuauauaugaguuaugu

SEQ ID NO: 397473 - RNA, 22 nt, Artificial Sequence
  Synthetic
auuucuuauauaugaguuaugu

SEQ ID NO: 397474 - RNA, 23 nt, Artificial Sequence
  Synthetic
gauuucuuauauaugaguuaugu

SEQ ID NO: 397475 - RNA, 24 nt, Artificial Sequence
  Synthetic
ugauuucuuauauaugaguuaugu

SEQ ID NO: 397476 - RNA, 18 nt, Artificial Sequence
  Synthetic
cuaaccuauacuuuaugu

SEQ ID NO: 397477 - RNA, 19 nt, Artificial Sequence
  Synthetic
ucuaaccuauacuuuaugu

SEQ ID NO: 397478 - RNA, 20 nt, Artificial Sequence
  Synthetic
gucuaaccuauacuuuaugu

SEQ ID NO: 397479 - RNA, 21 nt, Artificial Sequence
  Synthetic
ugucuaaccuauacuuuaugu

SEQ ID NO: 397480 - RNA, 22 nt, Artificial Sequence
  Synthetic
uugucuaaccuauacuuuaugu

SEQ ID NO: 397481 - RNA, 23 nt, Artificial Sequence
  Synthetic
uuugucuaaccuauacuuuaugu

SEQ ID NO: 397482 - RNA, 24 nt, Artificial Sequence
  Synthetic
auuugucuaaccuauacuuuaugu

SEQ ID NO: 397483 - RNA, 18 nt, Artificial Sequence
  Synthetic
agaugccugccuuuaugu

SEQ ID NO: 397484 - RNA, 19 nt, Artificial Sequence
  Synthetic
cagaugccugccuuuaugu

SEQ ID NO: 397485 - RNA, 20 nt, Artificial Sequence
  Synthetic
gcagaugccugccuuuaugu

SEQ ID NO: 397486 - RNA, 21 nt, Artificial Sequence
  Synthetic
ggcagaugccugccuuuaugu

SEQ ID NO: 397487 - RNA, 22 nt, Artificial Sequence
  Synthetic
aggcagaugccugccuuuaugu

SEQ ID NO: 397488 - RNA, 23 nt, Artificial Sequence
  Synthetic
gaggcagaugccugccuuuaugu

SEQ ID NO: 397489 - RNA, 24 nt, Artificial Sequence
  Synthetic
ggaggcagaugccugccuuuaugu

SEQ ID NO: 397490 - RNA, 18 nt, Artificial Sequence
  Synthetic
uugaaaacuccuuuaugu

SEQ ID NO: 397491 - RNA, 19 nt, Artificial Sequence
  Synthetic
uuugaaaacuccuuuaugu

SEQ ID NO: 397492 - RNA, 20 nt, Artificial Sequence
  Synthetic
uuuugaaaacuccuuuaugu

SEQ ID NO: 397493 - RNA, 21 nt, Artificial Sequence
  Synthetic
auuuugaaaacuccuuuaugu

SEQ ID NO: 397494 - RNA, 22 nt, Artificial Sequence
  Synthetic
uauuuugaaaacuccuuuaugu

SEQ ID NO: 397495 - RNA, 23 nt, Artificial Sequence
  Synthetic
auauuuugaaaacuccuuuaugu

SEQ ID NO: 397496 - RNA, 24 nt, Artificial Sequence
  Synthetic
cauauuuugaaaacuccuuuaugu

SEQ ID NO: 397497 - RNA, 18 nt, Artificial Sequence
  Synthetic
uguauuucggcuuuaugu

SEQ ID NO: 397498 - RNA, 19 nt, Artificial Sequence
  Synthetic
guguauuucggcuuuaugu

SEQ ID NO: 397499 - RNA, 20 nt, Artificial Sequence
  Synthetic
uguguauuucggcuuuaugu

SEQ ID NO: 397500 - RNA, 21 nt, Artificial Sequence
  Synthetic
guguguauuucggcuuuaugu

SEQ ID NO: 397501 - RNA, 22 nt, Artificial Sequence
  Synthetic
aguguguauuucggcuuuaugu

SEQ ID NO: 397502 - RNA, 23 nt, Artificial Sequence
  Synthetic
caguguguauuucggcuuuaugu

SEQ ID NO: 397503 - RNA, 24 nt, Artificial Sequence
  Synthetic
gcaguguguauuucggcuuuaugu

SEQ ID NO: 397504 - RNA, 18 nt, Artificial Sequence
  Synthetic
aaggugauaucuuuaugu

SEQ ID NO: 397505 - RNA, 19 nt, Artificial Sequence
  Synthetic
gaaggugauaucuuuaugu

SEQ ID NO: 397506 - RNA, 20 nt, Artificial Sequence
  Synthetic
ugaaggugauaucuuuaugu

SEQ ID NO: 397507 - RNA, 21 nt, Artificial Sequence
  Synthetic
uugaaggugauaucuuuaugu

SEQ ID NO: 397508 - RNA, 22 nt, Artificial Sequence
  Synthetic
uuugaaggugauaucuuuaugu

SEQ ID NO: 397509 - RNA, 23 nt, Artificial Sequence
  Synthetic
uuuugaaggugauaucuuuaugu

SEQ ID NO: 397510 - RNA, 24 nt, Artificial Sequence
  Synthetic
uuuuugaaggugauaucuuuaugu

SEQ ID NO: 397511 - RNA, 18 nt, Artificial Sequence
  Synthetic
auuauucuggguuuaugu

SEQ ID NO: 397512 - RNA, 19 nt, Artificial Sequence
  Synthetic
uauuauucuggguuuaugu

SEQ ID NO: 397513 - RNA, 20 nt, Artificial Sequence
  Synthetic
guauuauucuggguuuaugu

SEQ ID NO: 397514 - RNA, 21 nt, Artificial Sequence
  Synthetic
aguauuauucuggguuuaugu

SEQ ID NO: 397515 - RNA, 22 nt, Artificial Sequence
  Synthetic
caguauuauucuggguuuaugu

SEQ ID NO: 397516 - RNA, 23 nt, Artificial Sequence
  Synthetic
gcaguauuauucuggguuuaugu

SEQ ID NO: 397517 - RNA, 24 nt, Artificial Sequence
  Synthetic
ggcaguauuauucuggguuuaugu

SEQ ID NO: 397518 - RNA, 18 nt, Artificial Sequence
  Synthetic
auuuaaaacuguuuaugu

SEQ ID NO: 397519 - RNA, 19 nt, Artificial Sequence
  Synthetic
cauuuaaaacuguuuaugu

SEQ ID NO: 397520 - RNA, 20 nt, Artificial Sequence
  Synthetic
ccauuuaaaacuguuuaugu

SEQ ID NO: 397521 - RNA, 21 nt, Artificial Sequence
  Synthetic
uccauuuaaaacuguuuaugu

SEQ ID NO: 397522 - RNA, 22 nt, Artificial Sequence
  Synthetic
guccauuuaaaacuguuuaugu

SEQ ID NO: 397523 - RNA, 23 nt, Artificial Sequence
  Synthetic
gguccauuuaaaacuguuuaugu

SEQ ID NO: 397524 - RNA, 24 nt, Artificial Sequence
  Synthetic
ggguccauuuaaaacuguuuaugu

SEQ ID NO: 397525 - RNA, 18 nt, Artificial Sequence
  Synthetic
cacuauuucuguuuaugu

SEQ ID NO: 397526 - RNA, 19 nt, Artificial Sequence
  Synthetic
ccacuauuucuguuuaugu

SEQ ID NO: 397527 - RNA, 20 nt, Artificial Sequence
  Synthetic
uccacuauuucuguuuaugu

SEQ ID NO: 397528 - RNA, 21 nt, Artificial Sequence
  Synthetic
uuccacuauuucuguuuaugu

SEQ ID NO: 397529 - RNA, 22 nt, Artificial Sequence
  Synthetic
uuuccacuauuucuguuuaugu

SEQ ID NO: 397530 - RNA, 23 nt, Artificial Sequence
  Synthetic
auuuccacuauuucuguuuaugu

SEQ ID NO: 397531 - RNA, 24 nt, Artificial Sequence
  Synthetic
aauuuccacuauuucuguuuaugu

SEQ ID NO: 397532 - RNA, 18 nt, Artificial Sequence
  Synthetic
uaaaaaauuauuuuaugu

SEQ ID NO: 397533 - RNA, 19 nt, Artificial Sequence
  Synthetic
cuaaaaaauuauuuuaugu

SEQ ID NO: 397534 - RNA, 20 nt, Artificial Sequence
  Synthetic
acuaaaaaauuauuuuaugu

SEQ ID NO: 397535 - RNA, 21 nt, Artificial Sequence
  Synthetic
gacuaaaaaauuauuuuaugu

SEQ ID NO: 397536 - RNA, 22 nt, Artificial Sequence
  Synthetic
ugacuaaaaaauuauuuuaugu

SEQ ID NO: 397537 - RNA, 23 nt, Artificial Sequence
  Synthetic
augacuaaaaaauuauuuuaugu

SEQ ID NO: 397538 - RNA, 24 nt, Artificial Sequence
  Synthetic
aaugacuaaaaaauuauuuuaugu

SEQ ID NO: 397539 - RNA, 18 nt, Artificial Sequence
  Synthetic
agauacagacuuuuaugu

SEQ ID NO: 397540 - RNA, 19 nt, Artificial Sequence
  Synthetic
aagauacagacuuuuaugu

SEQ ID NO: 397541 - RNA, 20 nt, Artificial Sequence
  Synthetic
aaagauacagacuuuuaugu

SEQ ID NO: 397542 - RNA, 21 nt, Artificial Sequence
  Synthetic
uaaagauacagacuuuuaugu

SEQ ID NO: 397543 - RNA, 22 nt, Artificial Sequence
  Synthetic
guaaagauacagacuuuuaugu

SEQ ID NO: 397544 - RNA, 23 nt, Artificial Sequence
  Synthetic
uguaaagauacagacuuuuaugu

SEQ ID NO: 397545 - RNA, 24 nt, Artificial Sequence
  Synthetic
guguaaagauacagacuuuuaugu

SEQ ID NO: 397546 - RNA, 18 nt, Artificial Sequence
  Synthetic
cucugaauauuuuuaugu

SEQ ID NO: 397547 - RNA, 19 nt, Artificial Sequence
  Synthetic
ccucugaauauuuuuaugu

SEQ ID NO: 397548 - RNA, 20 nt, Artificial Sequence
  Synthetic
gccucugaauauuuuuaugu

SEQ ID NO: 397549 - RNA, 21 nt, Artificial Sequence
  Synthetic
ugccucugaauauuuuuaugu

SEQ ID NO: 397550 - RNA, 22 nt, Artificial Sequence
  Synthetic
cugccucugaauauuuuuaugu

SEQ ID NO: 397551 - RNA, 23 nt, Artificial Sequence
  Synthetic
ucugccucugaauauuuuuaugu

SEQ ID NO: 397552 - RNA, 24 nt, Artificial Sequence
  Synthetic
uucugccucugaauauuuuuaugu

SEQ ID NO: 397553 - RNA, 18 nt, Artificial Sequence
  Synthetic
uuuggaaauuuuuuaugu

SEQ ID NO: 397554 - RNA, 19 nt, Artificial Sequence
  Synthetic
cuuuggaaauuuuuuaugu

SEQ ID NO: 397555 - RNA, 20 nt, Artificial Sequence
  Synthetic
gcuuuggaaauuuuuuaugu

SEQ ID NO: 397556 - RNA, 21 nt, Artificial Sequence
  Synthetic
ggcuuuggaaauuuuuuaugu

SEQ ID NO: 397557 - RNA, 22 nt, Artificial Sequence
  Synthetic
gggcuuuggaaauuuuuuaugu

SEQ ID NO: 397558 - RNA, 23 nt, Artificial Sequence
  Synthetic
ugggcuuuggaaauuuuuuaugu

SEQ ID NO: 397559 - RNA, 24 nt, Artificial Sequence
  Synthetic
augggcuuuggaaauuuuuuaugu

SEQ ID NO: 397560 - RNA, 18 nt, Artificial Sequence
  Synthetic
uucuagaacaaaaacugu

SEQ ID NO: 397561 - RNA, 19 nt, Artificial Sequence
  Synthetic
cuucuagaacaaaaacugu

SEQ ID NO: 397562 - RNA, 20 nt, Artificial Sequence
  Synthetic
acuucuagaacaaaaacugu

SEQ ID NO: 397563 - RNA, 21 nt, Artificial Sequence
  Synthetic
aacuucuagaacaaaaacugu

SEQ ID NO: 397564 - RNA, 22 nt, Artificial Sequence
  Synthetic
aaacuucuagaacaaaaacugu

SEQ ID NO: 397565 - RNA, 23 nt, Artificial Sequence
  Synthetic
aaaacuucuagaacaaaaacugu

SEQ ID NO: 397566 - RNA, 24 nt, Artificial Sequence
  Synthetic
caaaacuucuagaacaaaaacugu

SEQ ID NO: 397567 - RNA, 18 nt, Artificial Sequence
  Synthetic
acguauuucacaaacugu

SEQ ID NO: 397568 - RNA, 19 nt, Artificial Sequence
  Synthetic
aacguauuucacaaacugu

SEQ ID NO: 397569 - RNA, 20 nt, Artificial Sequence
  Synthetic
aaacguauuucacaaacugu

SEQ ID NO: 397570 - RNA, 21 nt, Artificial Sequence
  Synthetic
gaaacguauuucacaaacugu

SEQ ID NO: 397571 - RNA, 22 nt, Artificial Sequence
  Synthetic
agaaacguauuucacaaacugu

SEQ ID NO: 397572 - RNA, 23 nt, Artificial Sequence
  Synthetic
aagaaacguauuucacaaacugu

SEQ ID NO: 397573 - RNA, 24 nt, Artificial Sequence
  Synthetic
caagaaacguauuucacaaacugu

SEQ ID NO: 397574 - RNA, 18 nt, Artificial Sequence
  Synthetic
uuaggguugccaaacugu

SEQ ID NO: 397575 - RNA, 19 nt, Artificial Sequence
  Synthetic
uuuaggguugccaaacugu

SEQ ID NO: 397576 - RNA, 20 nt, Artificial Sequence
  Synthetic
auuuaggguugccaaacugu

SEQ ID NO: 397577 - RNA, 21 nt, Artificial Sequence
  Synthetic
uauuuaggguugccaaacugu

SEQ ID NO: 397578 - RNA, 22 nt, Artificial Sequence
  Synthetic
guauuuaggguugccaaacugu

SEQ ID NO: 397579 - RNA, 23 nt, Artificial Sequence
  Synthetic
gguauuuaggguugccaaacugu

SEQ ID NO: 397580 - RNA, 24 nt, Artificial Sequence
  Synthetic
agguauuuaggguugccaaacugu

SEQ ID NO: 397581 - RNA, 18 nt, Artificial Sequence
  Synthetic
ucaugcuaaagaaacugu

SEQ ID NO: 397582 - RNA, 19 nt, Artificial Sequence
  Synthetic
uucaugcuaaagaaacugu

SEQ ID NO: 397583 - RNA, 20 nt, Artificial Sequence
  Synthetic
uuucaugcuaaagaaacugu

SEQ ID NO: 397584 - RNA, 21 nt, Artificial Sequence
  Synthetic
cuuucaugcuaaagaaacugu

SEQ ID NO: 397585 - RNA, 22 nt, Artificial Sequence
  Synthetic
ccuuucaugcuaaagaaacugu

SEQ ID NO: 397586 - RNA, 23 nt, Artificial Sequence
  Synthetic
cccuuucaugcuaaagaaacugu

SEQ ID NO: 397587 - RNA, 24 nt, Artificial Sequence
  Synthetic
ccccuuucaugcuaaagaaacugu

SEQ ID NO: 397588 - RNA, 18 nt, Artificial Sequence
  Synthetic
cuucucuagagcaacugu

SEQ ID NO: 397589 - RNA, 19 nt, Artificial Sequence
  Synthetic
ccuucucuagagcaacugu

SEQ ID NO: 397590 - RNA, 20 nt, Artificial Sequence
  Synthetic
uccuucucuagagcaacugu

SEQ ID NO: 397591 - RNA, 21 nt, Artificial Sequence
  Synthetic
uuccuucucuagagcaacugu

SEQ ID NO: 397592 - RNA, 22 nt, Artificial Sequence
  Synthetic
auuccuucucuagagcaacugu

SEQ ID NO: 397593 - RNA, 23 nt, Artificial Sequence
  Synthetic
cauuccuucucuagagcaacugu

SEQ ID NO: 397594 - RNA, 24 nt, Artificial Sequence
  Synthetic
ccauuccuucucuagagcaacugu

SEQ ID NO: 397595 - RNA, 18 nt, Artificial Sequence
  Synthetic
cuguaaucccagaacugu

SEQ ID NO: 397596 - RNA, 19 nt, Artificial Sequence
  Synthetic
ucuguaaucccagaacugu

SEQ ID NO: 397597 - RNA, 20 nt, Artificial Sequence
  Synthetic
uucuguaaucccagaacugu

SEQ ID NO: 397598 - RNA, 21 nt, Artificial Sequence
  Synthetic
cuucuguaaucccagaacugu

SEQ ID NO: 397599 - RNA, 22 nt, Artificial Sequence
  Synthetic
acuucuguaaucccagaacugu

SEQ ID NO: 397600 - RNA, 23 nt, Artificial Sequence
  Synthetic
cacuucuguaaucccagaacugu

SEQ ID NO: 397601 - RNA, 24 nt, Artificial Sequence
  Synthetic
ucacuucuguaaucccagaacugu

SEQ ID NO: 397602 - RNA, 18 nt, Artificial Sequence
  Synthetic
gguugagaguagaacugu

SEQ ID NO: 397603 - RNA, 19 nt, Artificial Sequence
  Synthetic
ggguugagaguagaacugu

SEQ ID NO: 397604 - RNA, 20 nt, Artificial Sequence
  Synthetic
uggguugagaguagaacugu

SEQ ID NO: 397605 - RNA, 21 nt, Artificial Sequence
  Synthetic
cuggguugagaguagaacugu

SEQ ID NO: 397606 - RNA, 22 nt, Artificial Sequence
  Synthetic
ucuggguugagaguagaacugu

SEQ ID NO: 397607 - RNA, 23 nt, Artificial Sequence
  Synthetic
uucuggguugagaguagaacugu

SEQ ID NO: 397608 - RNA, 24 nt, Artificial Sequence
  Synthetic
cuucuggguugagaguagaacugu

SEQ ID NO: 397609 - RNA, 18 nt, Artificial Sequence
  Synthetic
ugauuuuuaaauaacugu

SEQ ID NO: 397610 - RNA, 19 nt, Artificial Sequence
  Synthetic
cugauuuuuaaauaacugu

SEQ ID NO: 397611 - RNA, 20 nt, Artificial Sequence
  Synthetic
acugauuuuuaaauaacugu

SEQ ID NO: 397612 - RNA, 21 nt, Artificial Sequence
  Synthetic
cacugauuuuuaaauaacugu

SEQ ID NO: 397613 - RNA, 22 nt, Artificial Sequence
  Synthetic
acacugauuuuuaaauaacugu

SEQ ID NO: 397614 - RNA, 23 nt, Artificial Sequence
  Synthetic
uacacugauuuuuaaauaacugu

SEQ ID NO: 397615 - RNA, 24 nt, Artificial Sequence
  Synthetic
uuacacugauuuuuaaauaacugu

SEQ ID NO: 397616 - RNA, 18 nt, Artificial Sequence
  Synthetic
gaaaggucuuuuaacugu

SEQ ID NO: 397617 - RNA, 19 nt, Artificial Sequence
  Synthetic
ugaaaggucuuuuaacugu

SEQ ID NO: 397618 - RNA, 20 nt, Artificial Sequence
  Synthetic
augaaaggucuuuuaacugu

SEQ ID NO: 397619 - RNA, 21 nt, Artificial Sequence
  Synthetic
caugaaaggucuuuuaacugu

SEQ ID NO: 397620 - RNA, 22 nt, Artificial Sequence
  Synthetic
acaugaaaggucuuuuaacugu

SEQ ID NO: 397621 - RNA, 23 nt, Artificial Sequence
  Synthetic
aacaugaaaggucuuuuaacugu

SEQ ID NO: 397622 - RNA, 24 nt, Artificial Sequence
  Synthetic
caacaugaaaggucuuuuaacugu

SEQ ID NO: 397623 - RNA, 18 nt, Artificial Sequence
  Synthetic
aaguauuauaaacacugu

SEQ ID NO: 397624 - RNA, 19 nt, Artificial Sequence
  Synthetic
caaguauuauaaacacugu

SEQ ID NO: 397625 - RNA, 20 nt, Artificial Sequence
  Synthetic
ucaaguauuauaaacacugu

SEQ ID NO: 397626 - RNA, 21 nt, Artificial Sequence
  Synthetic
cucaaguauuauaaacacugu

SEQ ID NO: 397627 - RNA, 22 nt, Artificial Sequence
  Synthetic
gcucaaguauuauaaacacugu

SEQ ID NO: 397628 - RNA, 23 nt, Artificial Sequence
  Synthetic
agcucaaguauuauaaacacugu

SEQ ID NO: 397629 - RNA, 24 nt, Artificial Sequence
  Synthetic
aagcucaaguauuauaaacacugu

SEQ ID NO: 397630 - RNA, 18 nt, Artificial Sequence
  Synthetic
gcuuacaugcaacacugu

SEQ ID NO: 397631 - RNA, 19 nt, Artificial Sequence
  Synthetic
ugcuuacaugcaacacugu

SEQ ID NO: 397632 - RNA, 20 nt, Artificial Sequence
  Synthetic
augcuuacaugcaacacugu

SEQ ID NO: 397633 - RNA, 21 nt, Artificial Sequence
  Synthetic
caugcuuacaugcaacacugu

SEQ ID NO: 397634 - RNA, 22 nt, Artificial Sequence
  Synthetic
ccaugcuuacaugcaacacugu

SEQ ID NO: 397635 - RNA, 23 nt, Artificial Sequence
  Synthetic
cccaugcuuacaugcaacacugu

SEQ ID NO: 397636 - RNA, 24 nt, Artificial Sequence
  Synthetic
ccccaugcuuacaugcaacacugu

SEQ ID NO: 397637 - RNA, 18 nt, Artificial Sequence
  Synthetic
ucaacagccacacacugu

SEQ ID NO: 397638 - RNA, 19 nt, Artificial Sequence
  Synthetic
aucaacagccacacacugu

SEQ ID NO: 397639 - RNA, 20 nt, Artificial Sequence
  Synthetic
uaucaacagccacacacugu

SEQ ID NO: 397640 - RNA, 21 nt, Artificial Sequence
  Synthetic
auaucaacagccacacacugu

SEQ ID NO: 397641 - RNA, 22 nt, Artificial Sequence
  Synthetic
aauaucaacagccacacacugu

SEQ ID NO: 397642 - RNA, 23 nt, Artificial Sequence
  Synthetic
gaauaucaacagccacacacugu

SEQ ID NO: 397643 - RNA, 24 nt, Artificial Sequence
  Synthetic
agaauaucaacagccacacacugu

SEQ ID NO: 397644 - RNA, 18 nt, Artificial Sequence
  Synthetic
agaaggggcucacacugu

SEQ ID NO: 397645 - RNA, 19 nt, Artificial Sequence
  Synthetic
cagaaggggcucacacugu

SEQ ID NO: 397646 - RNA, 20 nt, Artificial Sequence
  Synthetic
ucagaaggggcucacacugu

SEQ ID NO: 397647 - RNA, 21 nt, Artificial Sequence
  Synthetic
uucagaaggggcucacacugu

SEQ ID NO: 397648 - RNA, 22 nt, Artificial Sequence
  Synthetic
auucagaaggggcucacacugu

SEQ ID NO: 397649 - RNA, 23 nt, Artificial Sequence
  Synthetic
cauucagaaggggcucacacugu

SEQ ID NO: 397650 - RNA, 24 nt, Artificial Sequence
  Synthetic
gcauucagaaggggcucacacugu

SEQ ID NO: 397651 - RNA, 18 nt, Artificial Sequence
  Synthetic
caagccaaacaccacugu

SEQ ID NO: 397652 - RNA, 19 nt, Artificial Sequence
  Synthetic
ucaagccaaacaccacugu

SEQ ID NO: 397653 - RNA, 20 nt, Artificial Sequence
  Synthetic
aucaagccaaacaccacugu

SEQ ID NO: 397654 - RNA, 21 nt, Artificial Sequence
  Synthetic
uaucaagccaaacaccacugu

SEQ ID NO: 397655 - RNA, 22 nt, Artificial Sequence
  Synthetic
uuaucaagccaaacaccacugu

SEQ ID NO: 397656 - RNA, 23 nt, Artificial Sequence
  Synthetic
guuaucaagccaaacaccacugu

SEQ ID NO: 397657 - RNA, 24 nt, Artificial Sequence
  Synthetic
uguuaucaagccaaacaccacugu

SEQ ID NO: 397658 - RNA, 18 nt, Artificial Sequence
  Synthetic
uaaugaugauaccacugu

SEQ ID NO: 397659 - RNA, 19 nt, Artificial Sequence
  Synthetic
guaaugaugauaccacugu

SEQ ID NO: 397660 - RNA, 20 nt, Artificial Sequence
  Synthetic
gguaaugaugauaccacugu

SEQ ID NO: 397661 - RNA, 21 nt, Artificial Sequence
  Synthetic
ugguaaugaugauaccacugu

SEQ ID NO: 397662 - RNA, 22 nt, Artificial Sequence
  Synthetic
cugguaaugaugauaccacugu

SEQ ID NO: 397663 - RNA, 23 nt, Artificial Sequence
  Synthetic
gcugguaaugaugauaccacugu

SEQ ID NO: 397664 - RNA, 24 nt, Artificial Sequence
  Synthetic
ggcugguaaugaugauaccacugu

SEQ ID NO: 397665 - RNA, 18 nt, Artificial Sequence
  Synthetic
ucaugcuccucccacugu

SEQ ID NO: 397666 - RNA, 19 nt, Artificial Sequence
  Synthetic
cucaugcuccucccacugu

SEQ ID NO: 397667 - RNA, 20 nt, Artificial Sequence
  Synthetic
ccucaugcuccucccacugu

SEQ ID NO: 397668 - RNA, 21 nt, Artificial Sequence
  Synthetic
cccucaugcuccucccacugu

SEQ ID NO: 397669 - RNA, 22 nt, Artificial Sequence
  Synthetic
ucccucaugcuccucccacugu

SEQ ID NO: 397670 - RNA, 23 nt, Artificial Sequence
  Synthetic
uucccucaugcuccucccacugu

SEQ ID NO: 397671 - RNA, 24 nt, Artificial Sequence
  Synthetic
uuucccucaugcuccucccacugu

SEQ ID NO: 397672 - RNA, 18 nt, Artificial Sequence
  Synthetic
uacuccauccugcacugu

SEQ ID NO: 397673 - RNA, 19 nt, Artificial Sequence
  Synthetic
uuacuccauccugcacugu

SEQ ID NO: 397674 - RNA, 20 nt, Artificial Sequence
  Synthetic
uuuacuccauccugcacugu

SEQ ID NO: 397675 - RNA, 21 nt, Artificial Sequence
  Synthetic
cuuuacuccauccugcacugu

SEQ ID NO: 397676 - RNA, 22 nt, Artificial Sequence
  Synthetic
ccuuuacuccauccugcacugu

SEQ ID NO: 397677 - RNA, 23 nt, Artificial Sequence
  Synthetic
uccuuuacuccauccugcacugu

SEQ ID NO: 397678 - RNA, 24 nt, Artificial Sequence
  Synthetic
cuccuuuacuccauccugcacugu

SEQ ID NO: 397679 - RNA, 18 nt, Artificial Sequence
  Synthetic
uauaagauugugcacugu

SEQ ID NO: 397680 - RNA, 19 nt, Artificial Sequence
  Synthetic
auauaagauugugcacugu

SEQ ID NO: 397681 - RNA, 20 nt, Artificial Sequence
  Synthetic
uauauaagauugugcacugu

SEQ ID NO: 397682 - RNA, 21 nt, Artificial Sequence
  Synthetic
uuauauaagauugugcacugu

SEQ ID NO: 397683 - RNA, 22 nt, Artificial Sequence
  Synthetic
guuauauaagauugugcacugu

SEQ ID NO: 397684 - RNA, 23 nt, Artificial Sequence
  Synthetic
gguuauauaagauugugcacugu

SEQ ID NO: 397685 - RNA, 24 nt, Artificial Sequence
  Synthetic
agguuauauaagauugugcacugu

SEQ ID NO: 397686 - RNA, 18 nt, Artificial Sequence
  Synthetic
cuaagugcuuugcacugu

SEQ ID NO: 397687 - RNA, 19 nt, Artificial Sequence
  Synthetic
ucuaagugcuuugcacugu

SEQ ID NO: 397688 - RNA, 20 nt, Artificial Sequence
  Synthetic
uucuaagugcuuugcacugu

SEQ ID NO: 397689 - RNA, 21 nt, Artificial Sequence
  Synthetic
auucuaagugcuuugcacugu

SEQ ID NO: 397690 - RNA, 22 nt, Artificial Sequence
  Synthetic
uauucuaagugcuuugcacugu

SEQ ID NO: 397691 - RNA, 23 nt, Artificial Sequence
  Synthetic
guauucuaagugcuuugcacugu

SEQ ID NO: 397692 - RNA, 24 nt, Artificial Sequence
  Synthetic
uguauucuaagugcuuugcacugu

SEQ ID NO: 397693 - RNA, 18 nt, Artificial Sequence
  Synthetic
agauuggucuuucacugu

SEQ ID NO: 397694 - RNA, 19 nt, Artificial Sequence
  Synthetic
aagauuggucuuucacugu

SEQ ID NO: 397695 - RNA, 20 nt, Artificial Sequence
  Synthetic
uaagauuggucuuucacugu

SEQ ID NO: 397696 - RNA, 21 nt, Artificial Sequence
  Synthetic
uuaagauuggucuuucacugu

SEQ ID NO: 397697 - RNA, 22 nt, Artificial Sequence
  Synthetic
uuuaagauuggucuuucacugu

SEQ ID NO: 397698 - RNA, 23 nt, Artificial Sequence
  Synthetic
guuuaagauuggucuuucacugu

SEQ ID NO: 397699 - RNA, 24 nt, Artificial Sequence
  Synthetic
gguuuaagauuggucuuucacugu

SEQ ID NO: 397700 - RNA, 18 nt, Artificial Sequence
  Synthetic
uggaggagguuucacugu

SEQ ID NO: 397701 - RNA, 19 nt, Artificial Sequence
  Synthetic
auggaggagguuucacugu

SEQ ID NO: 397702 - RNA, 20 nt, Artificial Sequence
  Synthetic
aauggaggagguuucacugu

SEQ ID NO: 397703 - RNA, 21 nt, Artificial Sequence
  Synthetic
uaauggaggagguuucacugu

SEQ ID NO: 397704 - RNA, 22 nt, Artificial Sequence
  Synthetic
uuaauggaggagguuucacugu

SEQ ID NO: 397705 - RNA, 23 nt, Artificial Sequence
  Synthetic
cuuaauggaggagguuucacugu

SEQ ID NO: 397706 - RNA, 24 nt, Artificial Sequence
  Synthetic
acuuaauggaggagguuucacugu

SEQ ID NO: 397707 - RNA, 18 nt, Artificial Sequence
  Synthetic
guccugguccaggacugu

SEQ ID NO: 397708 - RNA, 19 nt, Artificial Sequence
  Synthetic
gguccugguccaggacugu

SEQ ID NO: 397709 - RNA, 20 nt, Artificial Sequence
  Synthetic
ugguccugguccaggacugu

SEQ ID NO: 397710 - RNA, 21 nt, Artificial Sequence
  Synthetic
cugguccugguccaggacugu

SEQ ID NO: 397711 - RNA, 22 nt, Artificial Sequence
  Synthetic
ccugguccugguccaggacugu

SEQ ID NO: 397712 - RNA, 23 nt, Artificial Sequence
  Synthetic
cccugguccugguccaggacugu

SEQ ID NO: 397713 - RNA, 24 nt, Artificial Sequence
  Synthetic
gcccugguccugguccaggacugu

SEQ ID NO: 397714 - RNA, 18 nt, Artificial Sequence
  Synthetic
cuggggcaggaggacugu

SEQ ID NO: 397715 - RNA, 19 nt, Artificial Sequence
  Synthetic
gcuggggcaggaggacugu

SEQ ID NO: 397716 - RNA, 20 nt, Artificial Sequence
  Synthetic
ggcuggggcaggaggacugu

SEQ ID NO: 397717 - RNA, 21 nt, Artificial Sequence
  Synthetic
aggcuggggcaggaggacugu

SEQ ID NO: 397718 - RNA, 22 nt, Artificial Sequence
  Synthetic
aaggcuggggcaggaggacugu

SEQ ID NO: 397719 - RNA, 23 nt, Artificial Sequence
  Synthetic
aaaggcuggggcaggaggacugu

SEQ ID NO: 397720 - RNA, 24 nt, Artificial Sequence
  Synthetic
gaaaggcuggggcaggaggacugu

SEQ ID NO: 397721 - RNA, 18 nt, Artificial Sequence
  Synthetic
aagacuuugggugacugu

SEQ ID NO: 397722 - RNA, 19 nt, Artificial Sequence
  Synthetic
uaagacuuugggugacugu

SEQ ID NO: 397723 - RNA, 20 nt, Artificial Sequence
  Synthetic
uuaagacuuugggugacugu

SEQ ID NO: 397724 - RNA, 21 nt, Artificial Sequence
  Synthetic
guuaagacuuugggugacugu

SEQ ID NO: 397725 - RNA, 22 nt, Artificial Sequence
  Synthetic
aguuaagacuuugggugacugu

SEQ ID NO: 397726 - RNA, 23 nt, Artificial Sequence
  Synthetic
gaguuaagacuuugggugacugu

SEQ ID NO: 397727 - RNA, 24 nt, Artificial Sequence
  Synthetic
ugaguuaagacuuugggugacugu

SEQ ID NO: 397728 - RNA, 18 nt, Artificial Sequence
  Synthetic
cuaaacuauauugacugu

SEQ ID NO: 397729 - RNA, 19 nt, Artificial Sequence
  Synthetic
acuaaacuauauugacugu

SEQ ID NO: 397730 - RNA, 20 nt, Artificial Sequence
  Synthetic
aacuaaacuauauugacugu

SEQ ID NO: 397731 - RNA, 21 nt, Artificial Sequence
  Synthetic
caacuaaacuauauugacugu

SEQ ID NO: 397732 - RNA, 22 nt, Artificial Sequence
  Synthetic
ucaacuaaacuauauugacugu

SEQ ID NO: 397733 - RNA, 23 nt, Artificial Sequence
  Synthetic
uucaacuaaacuauauugacugu

SEQ ID NO: 397734 - RNA, 24 nt, Artificial Sequence
  Synthetic
auucaacuaaacuauauugacugu

SEQ ID NO: 397735 - RNA, 18 nt, Artificial Sequence
  Synthetic
uuacccuccaacuacugu

SEQ ID NO: 397736 - RNA, 19 nt, Artificial Sequence
  Synthetic
uuuacccuccaacuacugu

SEQ ID NO: 397737 - RNA, 20 nt, Artificial Sequence
  Synthetic
cuuuacccuccaacuacugu

SEQ ID NO: 397738 - RNA, 21 nt, Artificial Sequence
  Synthetic
acuuuacccuccaacuacugu

SEQ ID NO: 397739 - RNA, 22 nt, Artificial Sequence
  Synthetic
gacuuuacccuccaacuacugu

SEQ ID NO: 397740 - RNA, 23 nt, Artificial Sequence
  Synthetic
ugacuuuacccuccaacuacugu

SEQ ID NO: 397741 - RNA, 24 nt, Artificial Sequence
  Synthetic
augacuuuacccuccaacuacugu

SEQ ID NO: 397742 - RNA, 18 nt, Artificial Sequence
  Synthetic
gcuuuuuguuucuacugu

SEQ ID NO: 397743 - RNA, 19 nt, Artificial Sequence
  Synthetic
ugcuuuuuguuucuacugu

SEQ ID NO: 397744 - RNA, 20 nt, Artificial Sequence
  Synthetic
uugcuuuuuguuucuacugu

SEQ ID NO: 397745 - RNA, 21 nt, Artificial Sequence
  Synthetic
uuugcuuuuuguuucuacugu

SEQ ID NO: 397746 - RNA, 22 nt, Artificial Sequence
  Synthetic
auuugcuuuuuguuucuacugu

SEQ ID NO: 397747 - RNA, 23 nt, Artificial Sequence
  Synthetic
gauuugcuuuuuguuucuacugu

SEQ ID NO: 397748 - RNA, 24 nt, Artificial Sequence
  Synthetic
ggauuugcuuuuuguuucuacugu

SEQ ID NO: 397749 - RNA, 18 nt, Artificial Sequence
  Synthetic
aaaacaacaaaguacugu

SEQ ID NO: 397750 - RNA, 19 nt, Artificial Sequence
  Synthetic
caaaacaacaaaguacugu

SEQ ID NO: 397751 - RNA, 20 nt, Artificial Sequence
  Synthetic
ucaaaacaacaaaguacugu

SEQ ID NO: 397752 - RNA, 21 nt, Artificial Sequence
  Synthetic
aucaaaacaacaaaguacugu

SEQ ID NO: 397753 - RNA, 22 nt, Artificial Sequence
  Synthetic
aaucaaaacaacaaaguacugu

SEQ ID NO: 397754 - RNA, 23 nt, Artificial Sequence
  Synthetic
caaucaaaacaacaaaguacugu

SEQ ID NO: 397755 - RNA, 24 nt, Artificial Sequence
  Synthetic
ucaaucaaaacaacaaaguacugu

SEQ ID NO: 397756 - RNA, 18 nt, Artificial Sequence
  Synthetic
aggguccauauguacugu

SEQ ID NO: 397757 - RNA, 19 nt, Artificial Sequence
  Synthetic
aaggguccauauguacugu

SEQ ID NO: 397758 - RNA, 20 nt, Artificial Sequence
  Synthetic
gaaggguccauauguacugu

SEQ ID NO: 397759 - RNA, 21 nt, Artificial Sequence
  Synthetic
agaaggguccauauguacugu

SEQ ID NO: 397760 - RNA, 22 nt, Artificial Sequence
  Synthetic
aagaaggguccauauguacugu

SEQ ID NO: 397761 - RNA, 23 nt, Artificial Sequence
  Synthetic
uaagaaggguccauauguacugu

SEQ ID NO: 397762 - RNA, 24 nt, Artificial Sequence
  Synthetic
auaagaaggguccauauguacugu

SEQ ID NO: 397763 - RNA, 18 nt, Artificial Sequence
  Synthetic
ucuuugucauuuuacugu

SEQ ID NO: 397764 - RNA, 19 nt, Artificial Sequence
  Synthetic
uucuuugucauuuuacugu

SEQ ID NO: 397765 - RNA, 20 nt, Artificial Sequence
  Synthetic
uuucuuugucauuuuacugu

SEQ ID NO: 397766 - RNA, 21 nt, Artificial Sequence
  Synthetic
uuuucuuugucauuuuacugu

SEQ ID NO: 397767 - RNA, 22 nt, Artificial Sequence
  Synthetic
auuuucuuugucauuuuacugu

SEQ ID NO: 397768 - RNA, 23 nt, Artificial Sequence
  Synthetic
cauuuucuuugucauuuuacugu

SEQ ID NO: 397769 - RNA, 24 nt, Artificial Sequence
  Synthetic
ucauuuucuuugucauuuuacugu

SEQ ID NO: 397770 - RNA, 18 nt, Artificial Sequence
  Synthetic
aacucugagcacaccugu

SEQ ID NO: 397771 - RNA, 19 nt, Artificial Sequence
  Synthetic
aaacucugagcacaccugu

SEQ ID NO: 397772 - RNA, 20 nt, Artificial Sequence
  Synthetic
caaacucugagcacaccugu

SEQ ID NO: 397773 - RNA, 21 nt, Artificial Sequence
  Synthetic
ucaaacucugagcacaccugu

SEQ ID NO: 397774 - RNA, 22 nt, Artificial Sequence
  Synthetic
gucaaacucugagcacaccugu

SEQ ID NO: 397775 - RNA, 23 nt, Artificial Sequence
  Synthetic
agucaaacucugagcacaccugu

SEQ ID NO: 397776 - RNA, 24 nt, Artificial Sequence
  Synthetic
uagucaaacucugagcacaccugu

SEQ ID NO: 397777 - RNA, 18 nt, Artificial Sequence
  Synthetic
gcacugcaaaagaccugu

SEQ ID NO: 397778 - RNA, 19 nt, Artificial Sequence
  Synthetic
ugcacugcaaaagaccugu

SEQ ID NO: 397779 - RNA, 20 nt, Artificial Sequence
  Synthetic
uugcacugcaaaagaccugu

SEQ ID NO: 397780 - RNA, 21 nt, Artificial Sequence
  Synthetic
uuugcacugcaaaagaccugu

SEQ ID NO: 397781 - RNA, 22 nt, Artificial Sequence
  Synthetic
cuuugcacugcaaaagaccugu

SEQ ID NO: 397782 - RNA, 23 nt, Artificial Sequence
  Synthetic
ccuuugcacugcaaaagaccugu

SEQ ID NO: 397783 - RNA, 24 nt, Artificial Sequence
  Synthetic
accuuugcacugcaaaagaccugu

SEQ ID NO: 397784 - RNA, 18 nt, Artificial Sequence
  Synthetic
gugcaacaacugaccugu

SEQ ID NO: 397785 - RNA, 19 nt, Artificial Sequence
  Synthetic
ggugcaacaacugaccugu

SEQ ID NO: 397786 - RNA, 20 nt, Artificial Sequence
  Synthetic
uggugcaacaacugaccugu

SEQ ID NO: 397787 - RNA, 21 nt, Artificial Sequence
  Synthetic
cuggugcaacaacugaccugu

SEQ ID NO: 397788 - RNA, 22 nt, Artificial Sequence
  Synthetic
acuggugcaacaacugaccugu

SEQ ID NO: 397789 - RNA, 23 nt, Artificial Sequence
  Synthetic
gacuggugcaacaacugaccugu

SEQ ID NO: 397790 - RNA, 24 nt, Artificial Sequence
  Synthetic
ugacuggugcaacaacugaccugu

SEQ ID NO: 397791 - RNA, 18 nt, Artificial Sequence
  Synthetic
uacaggucagugaccugu

SEQ ID NO: 397792 - RNA, 19 nt, Artificial Sequence
  Synthetic
guacaggucagugaccugu

SEQ ID NO: 397793 - RNA, 20 nt, Artificial Sequence
  Synthetic
aguacaggucagugaccugu

SEQ ID NO: 397794 - RNA, 21 nt, Artificial Sequence
  Synthetic
caguacaggucagugaccugu

SEQ ID NO: 397795 - RNA, 22 nt, Artificial Sequence
  Synthetic
ccaguacaggucagugaccugu

SEQ ID NO: 397796 - RNA, 23 nt, Artificial Sequence
  Synthetic
accaguacaggucagugaccugu

SEQ ID NO: 397797 - RNA, 24 nt, Artificial Sequence
  Synthetic
gaccaguacaggucagugaccugu

SEQ ID NO: 397798 - RNA, 18 nt, Artificial Sequence
  Synthetic
uauacuugcuuuaccugu

SEQ ID NO: 397799 - RNA, 19 nt, Artificial Sequence
  Synthetic
uuauacuugcuuuaccugu

SEQ ID NO: 397800 - RNA, 20 nt, Artificial Sequence
  Synthetic
cuuauacuugcuuuaccugu

SEQ ID NO: 397801 - RNA, 21 nt, Artificial Sequence
  Synthetic
ccuuauacuugcuuuaccugu

SEQ ID NO: 397802 - RNA, 22 nt, Artificial Sequence
  Synthetic
cccuuauacuugcuuuaccugu

SEQ ID NO: 397803 - RNA, 23 nt, Artificial Sequence
  Synthetic
gcccuuauacuugcuuuaccugu

SEQ ID NO: 397804 - RNA, 24 nt, Artificial Sequence
  Synthetic
ggcccuuauacuugcuuuaccugu

SEQ ID NO: 397805 - RNA, 18 nt, Artificial Sequence
  Synthetic
ugccauuauucacccugu

SEQ ID NO: 397806 - RNA, 19 nt, Artificial Sequence
  Synthetic
uugccauuauucacccugu

SEQ ID NO: 397807 - RNA, 20 nt, Artificial Sequence
  Synthetic
auugccauuauucacccugu

SEQ ID NO: 397808 - RNA, 21 nt, Artificial Sequence
  Synthetic
gauugccauuauucacccugu

SEQ ID NO: 397809 - RNA, 22 nt, Artificial Sequence
  Synthetic
ggauugccauuauucacccugu

SEQ ID NO: 397810 - RNA, 23 nt, Artificial Sequence
  Synthetic
uggauugccauuauucacccugu

SEQ ID NO: 397811 - RNA, 24 nt, Artificial Sequence
  Synthetic
uuggauugccauuauucacccugu

SEQ ID NO: 397812 - RNA, 18 nt, Artificial Sequence
  Synthetic
gacagagcaagacccugu

SEQ ID NO: 397813 - RNA, 19 nt, Artificial Sequence
  Synthetic
ugacagagcaagacccugu

SEQ ID NO: 397814 - RNA, 20 nt, Artificial Sequence
  Synthetic
augacagagcaagacccugu

SEQ ID NO: 397815 - RNA, 21 nt, Artificial Sequence
  Synthetic
aaugacagagcaagacccugu

SEQ ID NO: 397816 - RNA, 22 nt, Artificial Sequence
  Synthetic
gaaugacagagcaagacccugu

SEQ ID NO: 397817 - RNA, 23 nt, Artificial Sequence
  Synthetic
agaaugacagagcaagacccugu

SEQ ID NO: 397818 - RNA, 24 nt, Artificial Sequence
  Synthetic
cagaaugacagagcaagacccugu

SEQ ID NO: 397819 - RNA, 18 nt, Artificial Sequence
  Synthetic
gacagaaagaggcccugu

SEQ ID NO: 397820 - RNA, 19 nt, Artificial Sequence
  Synthetic
cgacagaaagaggcccugu

SEQ ID NO: 397821 - RNA, 20 nt, Artificial Sequence
  Synthetic
gcgacagaaagaggcccugu

SEQ ID NO: 397822 - RNA, 21 nt, Artificial Sequence
  Synthetic
ggcgacagaaagaggcccugu

SEQ ID NO: 397823 - RNA, 22 nt, Artificial Sequence
  Synthetic
gggcgacagaaagaggcccugu

SEQ ID NO: 397824 - RNA, 23 nt, Artificial Sequence
  Synthetic
ugggcgacagaaagaggcccugu

SEQ ID NO: 397825 - RNA, 24 nt, Artificial Sequence
  Synthetic
cugggcgacagaaagaggcccugu

SEQ ID NO: 397826 - RNA, 18 nt, Artificial Sequence
  Synthetic
uguuuaaacccucccugu

SEQ ID NO: 397827 - RNA, 19 nt, Artificial Sequence
  Synthetic
uuguuuaaacccucccugu

SEQ ID NO: 397828 - RNA, 20 nt, Artificial Sequence
  Synthetic
auuguuuaaacccucccugu

SEQ ID NO: 397829 - RNA, 21 nt, Artificial Sequence
  Synthetic
gauuguuuaaacccucccugu

SEQ ID NO: 397830 - RNA, 22 nt, Artificial Sequence
  Synthetic
ugauuguuuaaacccucccugu

SEQ ID NO: 397831 - RNA, 23 nt, Artificial Sequence
  Synthetic
uugauuguuuaaacccucccugu

SEQ ID NO: 397832 - RNA, 24 nt, Artificial Sequence
  Synthetic
uuugauuguuuaaacccucccugu

SEQ ID NO: 397833 - RNA, 18 nt, Artificial Sequence
  Synthetic
uacaugacuuuucccugu

SEQ ID NO: 397834 - RNA, 19 nt, Artificial Sequence
  Synthetic
cuacaugacuuuucccugu

SEQ ID NO: 397835 - RNA, 20 nt, Artificial Sequence
  Synthetic
acuacaugacuuuucccugu

SEQ ID NO: 397836 - RNA, 21 nt, Artificial Sequence
  Synthetic
cacuacaugacuuuucccugu

SEQ ID NO: 397837 - RNA, 22 nt, Artificial Sequence
  Synthetic
ccacuacaugacuuuucccugu

SEQ ID NO: 397838 - RNA, 23 nt, Artificial Sequence
  Synthetic
cccacuacaugacuuuucccugu

SEQ ID NO: 397839 - RNA, 24 nt, Artificial Sequence
  Synthetic
gcccacuacaugacuuuucccugu

SEQ ID NO: 397840 - RNA, 18 nt, Artificial Sequence
  Synthetic
aagucagugguagccugu

SEQ ID NO: 397841 - RNA, 19 nt, Artificial Sequence
  Synthetic
aaagucagugguagccugu

SEQ ID NO: 397842 - RNA, 20 nt, Artificial Sequence
  Synthetic
gaaagucagugguagccugu

SEQ ID NO: 397843 - RNA, 21 nt, Artificial Sequence
  Synthetic
agaaagucagugguagccugu

SEQ ID NO: 397844 - RNA, 22 nt, Artificial Sequence
  Synthetic
aagaaagucagugguagccugu

SEQ ID NO: 397845 - RNA, 23 nt, Artificial Sequence
  Synthetic
aaagaaagucagugguagccugu

SEQ ID NO: 397846 - RNA, 24 nt, Artificial Sequence
  Synthetic
uaaagaaagucagugguagccugu

SEQ ID NO: 397847 - RNA, 18 nt, Artificial Sequence
  Synthetic
uaagggaaaaaggccugu

SEQ ID NO: 397848 - RNA, 19 nt, Artificial Sequence
  Synthetic
uuaagggaaaaaggccugu

SEQ ID NO: 397849 - RNA, 20 nt, Artificial Sequence
  Synthetic
auuaagggaaaaaggccugu

SEQ ID NO: 397850 - RNA, 21 nt, Artificial Sequence
  Synthetic
uauuaagggaaaaaggccugu

SEQ ID NO: 397851 - RNA, 22 nt, Artificial Sequence
  Synthetic
uuauuaagggaaaaaggccugu

SEQ ID NO: 397852 - RNA, 23 nt, Artificial Sequence
  Synthetic
auuauuaagggaaaaaggccugu

SEQ ID NO: 397853 - RNA, 24 nt, Artificial Sequence
  Synthetic
uauuauuaagggaaaaaggccugu

SEQ ID NO: 397854 - RNA, 18 nt, Artificial Sequence
  Synthetic
acacacacugaggccugu

SEQ ID NO: 397855 - RNA, 19 nt, Artificial Sequence
  Synthetic
aacacacacugaggccugu

SEQ ID NO: 397856 - RNA, 20 nt, Artificial Sequence
  Synthetic
caacacacacugaggccugu

SEQ ID NO: 397857 - RNA, 21 nt, Artificial Sequence
  Synthetic
acaacacacacugaggccugu

SEQ ID NO: 397858 - RNA, 22 nt, Artificial Sequence
  Synthetic
aacaacacacacugaggccugu

SEQ ID NO: 397859 - RNA, 23 nt, Artificial Sequence
  Synthetic
gaacaacacacacugaggccugu

SEQ ID NO: 397860 - RNA, 24 nt, Artificial Sequence
  Synthetic
ggaacaacacacacugaggccugu

SEQ ID NO: 397861 - RNA, 18 nt, Artificial Sequence
  Synthetic
ggguugaguguggccugu

SEQ ID NO: 397862 - RNA, 19 nt, Artificial Sequence
  Synthetic
uggguugaguguggccugu

SEQ ID NO: 397863 - RNA, 20 nt, Artificial Sequence
  Synthetic
auggguugaguguggccugu

SEQ ID NO: 397864 - RNA, 21 nt, Artificial Sequence
  Synthetic
aauggguugaguguggccugu

SEQ ID NO: 397865 - RNA, 22 nt, Artificial Sequence
  Synthetic
gaauggguugaguguggccugu

SEQ ID NO: 397866 - RNA, 23 nt, Artificial Sequence
  Synthetic
agaauggguugaguguggccugu

SEQ ID NO: 397867 - RNA, 24 nt, Artificial Sequence
  Synthetic
aagaauggguugaguguggccugu

SEQ ID NO: 397868 - RNA, 18 nt, Artificial Sequence
  Synthetic
uuaaagaaagaugccugu

SEQ ID NO: 397869 - RNA, 19 nt, Artificial Sequence
  Synthetic
cuuaaagaaagaugccugu

SEQ ID NO: 397870 - RNA, 20 nt, Artificial Sequence
  Synthetic
ucuuaaagaaagaugccugu

SEQ ID NO: 397871 - RNA, 21 nt, Artificial Sequence
  Synthetic
cucuuaaagaaagaugccugu

SEQ ID NO: 397872 - RNA, 22 nt, Artificial Sequence
  Synthetic
ucucuuaaagaaagaugccugu

SEQ ID NO: 397873 - RNA, 23 nt, Artificial Sequence
  Synthetic
gucucuuaaagaaagaugccugu

SEQ ID NO: 397874 - RNA, 24 nt, Artificial Sequence
  Synthetic
ugucucuuaaagaaagaugccugu

SEQ ID NO: 397875 - RNA, 18 nt, Artificial Sequence
  Synthetic
acugaaaauucugccugu

SEQ ID NO: 397876 - RNA, 19 nt, Artificial Sequence
  Synthetic
aacugaaaauucugccugu

SEQ ID NO: 397877 - RNA, 20 nt, Artificial Sequence
  Synthetic
gaacugaaaauucugccugu

SEQ ID NO: 397878 - RNA, 21 nt, Artificial Sequence
  Synthetic
ugaacugaaaauucugccugu

SEQ ID NO: 397879 - RNA, 22 nt, Artificial Sequence
  Synthetic
augaacugaaaauucugccugu

SEQ ID NO: 397880 - RNA, 23 nt, Artificial Sequence
  Synthetic
aaugaacugaaaauucugccugu

SEQ ID NO: 397881 - RNA, 24 nt, Artificial Sequence
  Synthetic
uaaugaacugaaaauucugccugu

SEQ ID NO: 397882 - RNA, 18 nt, Artificial Sequence
  Synthetic
uaccaauccguugccugu

SEQ ID NO: 397883 - RNA, 19 nt, Artificial Sequence
  Synthetic
guaccaauccguugccugu

SEQ ID NO: 397884 - RNA, 20 nt, Artificial Sequence
  Synthetic
cguaccaauccguugccugu

SEQ ID NO: 397885 - RNA, 21 nt, Artificial Sequence
  Synthetic
ccguaccaauccguugccugu

SEQ ID NO: 397886 - RNA, 22 nt, Artificial Sequence
  Synthetic
cccguaccaauccguugccugu

SEQ ID NO: 397887 - RNA, 23 nt, Artificial Sequence
  Synthetic
acccguaccaauccguugccugu

SEQ ID NO: 397888 - RNA, 24 nt, Artificial Sequence
  Synthetic
gacccguaccaauccguugccugu

SEQ ID NO: 397889 - RNA, 18 nt, Artificial Sequence
  Synthetic
ggguccuucggguccugu

SEQ ID NO: 397890 - RNA, 19 nt, Artificial Sequence
  Synthetic
aggguccuucggguccugu

SEQ ID NO: 397891 - RNA, 20 nt, Artificial Sequence
  Synthetic
gaggguccuucggguccugu

SEQ ID NO: 397892 - RNA, 21 nt, Artificial Sequence
  Synthetic
ggaggguccuucggguccugu

SEQ ID NO: 397893 - RNA, 22 nt, Artificial Sequence
  Synthetic
uggaggguccuucggguccugu

SEQ ID NO: 397894 - RNA, 23 nt, Artificial Sequence
  Synthetic
cuggaggguccuucggguccugu

SEQ ID NO: 397895 - RNA, 24 nt, Artificial Sequence
  Synthetic
ccuggaggguccuucggguccugu

SEQ ID NO: 397896 - RNA, 18 nt, Artificial Sequence
  Synthetic
agauauuaaguguccugu

SEQ ID NO: 397897 - RNA, 19 nt, Artificial Sequence
  Synthetic
gagauauuaaguguccugu

SEQ ID NO: 397898 - RNA, 20 nt, Artificial Sequence
  Synthetic
ugagauauuaaguguccugu

SEQ ID NO: 397899 - RNA, 21 nt, Artificial Sequence
  Synthetic
uugagauauuaaguguccugu

SEQ ID NO: 397900 - RNA, 22 nt, Artificial Sequence
  Synthetic
cuugagauauuaaguguccugu

SEQ ID NO: 397901 - RNA, 23 nt, Artificial Sequence
  Synthetic
acuugagauauuaaguguccugu

SEQ ID NO: 397902 - RNA, 24 nt, Artificial Sequence
  Synthetic
gacuugagauauuaaguguccugu

SEQ ID NO: 397903 - RNA, 18 nt, Artificial Sequence
  Synthetic
uuaugaaguguuuccugu

SEQ ID NO: 397904 - RNA, 19 nt, Artificial Sequence
  Synthetic
cuuaugaaguguuuccugu

SEQ ID NO: 397905 - RNA, 20 nt, Artificial Sequence
  Synthetic
acuuaugaaguguuuccugu

SEQ ID NO: 397906 - RNA, 21 nt, Artificial Sequence
  Synthetic
cacuuaugaaguguuuccugu

SEQ ID NO: 397907 - RNA, 22 nt, Artificial Sequence
  Synthetic
acacuuaugaaguguuuccugu

SEQ ID NO: 397908 - RNA, 23 nt, Artificial Sequence
  Synthetic
aacacuuaugaaguguuuccugu

SEQ ID NO: 397909 - RNA, 24 nt, Artificial Sequence
  Synthetic
caacacuuaugaaguguuuccugu

SEQ ID NO: 397910 - RNA, 18 nt, Artificial Sequence
  Synthetic
aaauuuuggcaaagcugu

SEQ ID NO: 397911 - RNA, 19 nt, Artificial Sequence
  Synthetic
gaaauuuuggcaaagcugu

SEQ ID NO: 397912 - RNA, 20 nt, Artificial Sequence
  Synthetic
ggaaauuuuggcaaagcugu

SEQ ID NO: 397913 - RNA, 21 nt, Artificial Sequence
  Synthetic
aggaaauuuuggcaaagcugu

SEQ ID NO: 397914 - RNA, 22 nt, Artificial Sequence
  Synthetic
aaggaaauuuuggcaaagcugu

SEQ ID NO: 397915 - RNA, 23 nt, Artificial Sequence
  Synthetic
gaaggaaauuuuggcaaagcugu

SEQ ID NO: 397916 - RNA, 24 nt, Artificial Sequence
  Synthetic
ggaaggaaauuuuggcaaagcugu

SEQ ID NO: 397917 - RNA, 18 nt, Artificial Sequence
  Synthetic
uacaaggcagaaagcugu

SEQ ID NO: 397918 - RNA, 19 nt, Artificial Sequence
  Synthetic
auacaaggcagaaagcugu

SEQ ID NO: 397919 - RNA, 20 nt, Artificial Sequence
  Synthetic
aauacaaggcagaaagcugu

SEQ ID NO: 397920 - RNA, 21 nt, Artificial Sequence
  Synthetic
caauacaaggcagaaagcugu

SEQ ID NO: 397921 - RNA, 22 nt, Artificial Sequence
  Synthetic
gcaauacaaggcagaaagcugu

SEQ ID NO: 397922 - RNA, 23 nt, Artificial Sequence
  Synthetic
agcaauacaaggcagaaagcugu

SEQ ID NO: 397923 - RNA, 24 nt, Artificial Sequence
  Synthetic
cagcaauacaaggcagaaagcugu

SEQ ID NO: 397924 - RNA, 18 nt, Artificial Sequence
  Synthetic
aggacagcaucaagcugu

SEQ ID NO: 397925 - RNA, 19 nt, Artificial Sequence
  Synthetic
gaggacagcaucaagcugu

SEQ ID NO: 397926 - RNA, 20 nt, Artificial Sequence
  Synthetic
ugaggacagcaucaagcugu

SEQ ID NO: 397927 - RNA, 21 nt, Artificial Sequence
  Synthetic
augaggacagcaucaagcugu

SEQ ID NO: 397928 - RNA, 22 nt, Artificial Sequence
  Synthetic
caugaggacagcaucaagcugu

SEQ ID NO: 397929 - RNA, 23 nt, Artificial Sequence
  Synthetic
ucaugaggacagcaucaagcugu

SEQ ID NO: 397930 - RNA, 24 nt, Artificial Sequence
  Synthetic
aucaugaggacagcaucaagcugu

SEQ ID NO: 397931 - RNA, 18 nt, Artificial Sequence
  Synthetic
ggagagcaucccagcugu

SEQ ID NO: 397932 - RNA, 19 nt, Artificial Sequence
  Synthetic
cggagagcaucccagcugu

SEQ ID NO: 397933 - RNA, 20 nt, Artificial Sequence
  Synthetic
ucggagagcaucccagcugu

SEQ ID NO: 397934 - RNA, 21 nt, Artificial Sequence
  Synthetic
uucggagagcaucccagcugu

SEQ ID NO: 397935 - RNA, 22 nt, Artificial Sequence
  Synthetic
cuucggagagcaucccagcugu

SEQ ID NO: 397936 - RNA, 23 nt, Artificial Sequence
  Synthetic
ccuucggagagcaucccagcugu

SEQ ID NO: 397937 - RNA, 24 nt, Artificial Sequence
  Synthetic
gccuucggagagcaucccagcugu

SEQ ID NO: 397938 - RNA, 18 nt, Artificial Sequence
  Synthetic
cgugaacugggcagcugu

SEQ ID NO: 397939 - RNA, 19 nt, Artificial Sequence
  Synthetic
ccgugaacugggcagcugu

SEQ ID NO: 397940 - RNA, 20 nt, Artificial Sequence
  Synthetic
uccgugaacugggcagcugu

SEQ ID NO: 397941 - RNA, 21 nt, Artificial Sequence
  Synthetic
uuccgugaacugggcagcugu

SEQ ID NO: 397942 - RNA, 22 nt, Artificial Sequence
  Synthetic
uuuccgugaacugggcagcugu

SEQ ID NO: 397943 - RNA, 23 nt, Artificial Sequence
  Synthetic
cuuuccgugaacugggcagcugu

SEQ ID NO: 397944 - RNA, 24 nt, Artificial Sequence
  Synthetic
gcuuuccgugaacugggcagcugu

SEQ ID NO: 397945 - RNA, 18 nt, Artificial Sequence
  Synthetic
acaaaauugggcagcugu

SEQ ID NO: 397946 - RNA, 19 nt, Artificial Sequence
  Synthetic
cacaaaauugggcagcugu

SEQ ID NO: 397947 - RNA, 20 nt, Artificial Sequence
  Synthetic
gcacaaaauugggcagcugu

SEQ ID NO: 397948 - RNA, 21 nt, Artificial Sequence
  Synthetic
agcacaaaauugggcagcugu

SEQ ID NO: 397949 - RNA, 22 nt, Artificial Sequence
  Synthetic
aagcacaaaauugggcagcugu

SEQ ID NO: 397950 - RNA, 23 nt, Artificial Sequence
  Synthetic
caagcacaaaauugggcagcugu

SEQ ID NO: 397951 - RNA, 24 nt, Artificial Sequence
  Synthetic
ucaagcacaaaauugggcagcugu

SEQ ID NO: 397952 - RNA, 18 nt, Artificial Sequence
  Synthetic
aguaaacacuucagcugu

SEQ ID NO: 397953 - RNA, 19 nt, Artificial Sequence
  Synthetic
uaguaaacacuucagcugu

SEQ ID NO: 397954 - RNA, 20 nt, Artificial Sequence
  Synthetic
auaguaaacacuucagcugu

SEQ ID NO: 397955 - RNA, 21 nt, Artificial Sequence
  Synthetic
aauaguaaacacuucagcugu

SEQ ID NO: 397956 - RNA, 22 nt, Artificial Sequence
  Synthetic
aaauaguaaacacuucagcugu

SEQ ID NO: 397957 - RNA, 23 nt, Artificial Sequence
  Synthetic
aaaauaguaaacacuucagcugu

SEQ ID NO: 397958 - RNA, 24 nt, Artificial Sequence
  Synthetic
caaaauaguaaacacuucagcugu

SEQ ID NO: 397959 - RNA, 18 nt, Artificial Sequence
  Synthetic
ucauugauuuagagcugu

SEQ ID NO: 397960 - RNA, 19 nt, Artificial Sequence
  Synthetic
uucauugauuuagagcugu

SEQ ID NO: 397961 - RNA, 20 nt, Artificial Sequence
  Synthetic
guucauugauuuagagcugu

SEQ ID NO: 397962 - RNA, 21 nt, Artificial Sequence
  Synthetic
aguucauugauuuagagcugu

SEQ ID NO: 397963 - RNA, 22 nt, Artificial Sequence
  Synthetic
gaguucauugauuuagagcugu

SEQ ID NO: 397964 - RNA, 23 nt, Artificial Sequence
  Synthetic
ggaguucauugauuuagagcugu

SEQ ID NO: 397965 - RNA, 24 nt, Artificial Sequence
  Synthetic
aggaguucauugauuuagagcugu

SEQ ID NO: 397966 - RNA, 18 nt, Artificial Sequence
  Synthetic
acugccuaguggagcugu

SEQ ID NO: 397967 - RNA, 19 nt, Artificial Sequence
  Synthetic
cacugccuaguggagcugu

SEQ ID NO: 397968 - RNA, 20 nt, Artificial Sequence
  Synthetic
gcacugccuaguggagcugu

SEQ ID NO: 397969 - RNA, 21 nt, Artificial Sequence
  Synthetic
ggcacugccuaguggagcugu

SEQ ID NO: 397970 - RNA, 22 nt, Artificial Sequence
  Synthetic
gggcacugccuaguggagcugu

SEQ ID NO: 397971 - RNA, 23 nt, Artificial Sequence
  Synthetic
ggggcacugccuaguggagcugu

SEQ ID NO: 397972 - RNA, 24 nt, Artificial Sequence
  Synthetic
uggggcacugccuaguggagcugu

SEQ ID NO: 397973 - RNA, 18 nt, Artificial Sequence
  Synthetic
uucuagauauauagcugu

SEQ ID NO: 397974 - RNA, 19 nt, Artificial Sequence
  Synthetic
auucuagauauauagcugu

SEQ ID NO: 397975 - RNA, 20 nt, Artificial Sequence
  Synthetic
gauucuagauauauagcugu

SEQ ID NO: 397976 - RNA, 21 nt, Artificial Sequence
  Synthetic
ugauucuagauauauagcugu

SEQ ID NO: 397977 - RNA, 22 nt, Artificial Sequence
  Synthetic
uugauucuagauauauagcugu

SEQ ID NO: 397978 - RNA, 23 nt, Artificial Sequence
  Synthetic
guugauucuagauauauagcugu

SEQ ID NO: 397979 - RNA, 24 nt, Artificial Sequence
  Synthetic
aguugauucuagauauauagcugu

SEQ ID NO: 397980 - RNA, 18 nt, Artificial Sequence
  Synthetic
uugucugcuuguagcugu

SEQ ID NO: 397981 - RNA, 19 nt, Artificial Sequence
  Synthetic
auugucugcuuguagcugu

SEQ ID NO: 397982 - RNA, 20 nt, Artificial Sequence
  Synthetic
aauugucugcuuguagcugu

SEQ ID NO: 397983 - RNA, 21 nt, Artificial Sequence
  Synthetic
gaauugucugcuuguagcugu

SEQ ID NO: 397984 - RNA, 22 nt, Artificial Sequence
  Synthetic
ugaauugucugcuuguagcugu

SEQ ID NO: 397985 - RNA, 23 nt, Artificial Sequence
  Synthetic
cugaauugucugcuuguagcugu

SEQ ID NO: 397986 - RNA, 24 nt, Artificial Sequence
  Synthetic
ucugaauugucugcuuguagcugu

SEQ ID NO: 397987 - RNA, 18 nt, Artificial Sequence
  Synthetic
gcugcauuuauuagcugu

SEQ ID NO: 397988 - RNA, 19 nt, Artificial Sequence
  Synthetic
ugcugcauuuauuagcugu

SEQ ID NO: 397989 - RNA, 20 nt, Artificial Sequence
  Synthetic
uugcugcauuuauuagcugu

SEQ ID NO: 397990 - RNA, 21 nt, Artificial Sequence
  Synthetic
cuugcugcauuuauuagcugu

SEQ ID NO: 397991 - RNA, 22 nt, Artificial Sequence
  Synthetic
ucuugcugcauuuauuagcugu

SEQ ID NO: 397992 - RNA, 23 nt, Artificial Sequence
  Synthetic
aucuugcugcauuuauuagcugu

SEQ ID NO: 397993 - RNA, 24 nt, Artificial Sequence
  Synthetic
aaucuugcugcauuuauuagcugu

SEQ ID NO: 397994 - RNA, 18 nt, Artificial Sequence
  Synthetic
ccuaugcaucuuagcugu

SEQ ID NO: 397995 - RNA, 19 nt, Artificial Sequence
  Synthetic
uccuaugcaucuuagcugu

SEQ ID NO: 397996 - RNA, 20 nt, Artificial Sequence
  Synthetic
cuccuaugcaucuuagcugu

SEQ ID NO: 397997 - RNA, 21 nt, Artificial Sequence
  Synthetic
ucuccuaugcaucuuagcugu

SEQ ID NO: 397998 - RNA, 22 nt, Artificial Sequence
  Synthetic
cucuccuaugcaucuuagcugu

SEQ ID NO: 397999 - RNA, 23 nt, Artificial Sequence
  Synthetic
ucucuccuaugcaucuuagcugu

SEQ ID NO: 398000 - RNA, 24 nt, Artificial Sequence
  Synthetic
uucucuccuaugcaucuuagcugu

SEQ ID NO: 398001 - RNA, 18 nt, Artificial Sequence
  Synthetic
aaaauaaauaaucgcugu

SEQ ID NO: 398002 - RNA, 19 nt, Artificial Sequence
  Synthetic
gaaaauaaauaaucgcugu

SEQ ID NO: 398003 - RNA, 20 nt, Artificial Sequence
  Synthetic
agaaaauaaauaaucgcugu

SEQ ID NO: 398004 - RNA, 21 nt, Artificial Sequence
  Synthetic
aagaaaauaaauaaucgcugu

SEQ ID NO: 398005 - RNA, 22 nt, Artificial Sequence
  Synthetic
uaagaaaauaaauaaucgcugu

SEQ ID NO: 398006 - RNA, 23 nt, Artificial Sequence
  Synthetic
uuaagaaaauaaauaaucgcugu

SEQ ID NO: 398007 - RNA, 24 nt, Artificial Sequence
  Synthetic
guuaagaaaauaaauaaucgcugu

SEQ ID NO: 398008 - RNA, 18 nt, Artificial Sequence
  Synthetic
cagucucagagaggcugu

SEQ ID NO: 398009 - RNA, 19 nt, Artificial Sequence
  Synthetic
gcagucucagagaggcugu

SEQ ID NO: 398010 - RNA, 20 nt, Artificial Sequence
  Synthetic
agcagucucagagaggcugu

SEQ ID NO: 398011 - RNA, 21 nt, Artificial Sequence
  Synthetic
aagcagucucagagaggcugu

SEQ ID NO: 398012 - RNA, 22 nt, Artificial Sequence
  Synthetic
aaagcagucucagagaggcugu

SEQ ID NO: 398013 - RNA, 23 nt, Artificial Sequence
  Synthetic
gaaagcagucucagagaggcugu

SEQ ID NO: 398014 - RNA, 24 nt, Artificial Sequence
  Synthetic
agaaagcagucucagagaggcugu

SEQ ID NO: 398015 - RNA, 18 nt, Artificial Sequence
  Synthetic
acauuuuauugaggcugu

SEQ ID NO: 398016 - RNA, 19 nt, Artificial Sequence
  Synthetic
aacauuuuauugaggcugu

SEQ ID NO: 398017 - RNA, 20 nt, Artificial Sequence
  Synthetic
gaacauuuuauugaggcugu

SEQ ID NO: 398018 - RNA, 21 nt, Artificial Sequence
  Synthetic
cgaacauuuuauugaggcugu

SEQ ID NO: 398019 - RNA, 22 nt, Artificial Sequence
  Synthetic
ucgaacauuuuauugaggcugu

SEQ ID NO: 398020 - RNA, 23 nt, Artificial Sequence
  Synthetic
cucgaacauuuuauugaggcugu

SEQ ID NO: 398021 - RNA, 24 nt, Artificial Sequence
  Synthetic
ccucgaacauuuuauugaggcugu

SEQ ID NO: 398022 - RNA, 18 nt, Artificial Sequence
  Synthetic
aaaccuaucaucggcugu

SEQ ID NO: 398023 - RNA, 19 nt, Artificial Sequence
  Synthetic
aaaaccuaucaucggcugu

SEQ ID NO: 398024 - RNA, 20 nt, Artificial Sequence
  Synthetic
aaaaaccuaucaucggcugu

SEQ ID NO: 398025 - RNA, 21 nt, Artificial Sequence
  Synthetic
uaaaaaccuaucaucggcugu

SEQ ID NO: 398026 - RNA, 22 nt, Artificial Sequence
  Synthetic
auaaaaaccuaucaucggcugu

SEQ ID NO: 398027 - RNA, 23 nt, Artificial Sequence
  Synthetic
aauaaaaaccuaucaucggcugu

SEQ ID NO: 398028 - RNA, 24 nt, Artificial Sequence
  Synthetic
aaauaaaaaccuaucaucggcugu

SEQ ID NO: 398029 - RNA, 18 nt, Artificial Sequence
  Synthetic
augguggcacauggcugu

SEQ ID NO: 398030 - RNA, 19 nt, Artificial Sequence
  Synthetic
caugguggcacauggcugu

SEQ ID NO: 398031 - RNA, 20 nt, Artificial Sequence
  Synthetic
gcaugguggcacauggcugu

SEQ ID NO: 398032 - RNA, 21 nt, Artificial Sequence
  Synthetic
ggcaugguggcacauggcugu

SEQ ID NO: 398033 - RNA, 22 nt, Artificial Sequence
  Synthetic
gggcaugguggcacauggcugu

SEQ ID NO: 398034 - RNA, 23 nt, Artificial Sequence
  Synthetic
ugggcaugguggcacauggcugu

SEQ ID NO: 398035 - RNA, 24 nt, Artificial Sequence
  Synthetic
cugggcaugguggcacauggcugu

SEQ ID NO: 398036 - RNA, 18 nt, Artificial Sequence
  Synthetic
auacugaacccuggcugu

SEQ ID NO: 398037 - RNA, 19 nt, Artificial Sequence
  Synthetic
aauacugaacccuggcugu

SEQ ID NO: 398038 - RNA, 20 nt, Artificial Sequence
  Synthetic
uaauacugaacccuggcugu

SEQ ID NO: 398039 - RNA, 21 nt, Artificial Sequence
  Synthetic
auaauacugaacccuggcugu

SEQ ID NO: 398040 - RNA, 22 nt, Artificial Sequence
  Synthetic
aauaauacugaacccuggcugu

SEQ ID NO: 398041 - RNA, 23 nt, Artificial Sequence
  Synthetic
uaauaauacugaacccuggcugu

SEQ ID NO: 398042 - RNA, 24 nt, Artificial Sequence
  Synthetic
uuaauaauacugaacccuggcugu

SEQ ID NO: 398043 - RNA, 18 nt, Artificial Sequence
  Synthetic
ucagaggauucaugcugu

SEQ ID NO: 398044 - RNA, 19 nt, Artificial Sequence
  Synthetic
cucagaggauucaugcugu

SEQ ID NO: 398045 - RNA, 20 nt, Artificial Sequence
  Synthetic
ccucagaggauucaugcugu

SEQ ID NO: 398046 - RNA, 21 nt, Artificial Sequence
  Synthetic
cccucagaggauucaugcugu

SEQ ID NO: 398047 - RNA, 22 nt, Artificial Sequence
  Synthetic
gcccucagaggauucaugcugu

SEQ ID NO: 398048 - RNA, 23 nt, Artificial Sequence
  Synthetic
agcccucagaggauucaugcugu

SEQ ID NO: 398049 - RNA, 24 nt, Artificial Sequence
  Synthetic
aagcccucagaggauucaugcugu

SEQ ID NO: 398050 - RNA, 18 nt, Artificial Sequence
  Synthetic
cauauccagagaugcugu

SEQ ID NO: 398051 - RNA, 19 nt, Artificial Sequence
  Synthetic
gcauauccagagaugcugu

SEQ ID NO: 398052 - RNA, 20 nt, Artificial Sequence
  Synthetic
ggcauauccagagaugcugu

SEQ ID NO: 398053 - RNA, 21 nt, Artificial Sequence
  Synthetic
gggcauauccagagaugcugu

SEQ ID NO: 398054 - RNA, 22 nt, Artificial Sequence
  Synthetic
cgggcauauccagagaugcugu

SEQ ID NO: 398055 - RNA, 23 nt, Artificial Sequence
  Synthetic
ccgggcauauccagagaugcugu

SEQ ID NO: 398056 - RNA, 24 nt, Artificial Sequence
  Synthetic
cccgggcauauccagagaugcugu

SEQ ID NO: 398057 - RNA, 18 nt, Artificial Sequence
  Synthetic
uugugugggugaugcugu

SEQ ID NO: 398058 - RNA, 19 nt, Artificial Sequence
  Synthetic
auugugugggugaugcugu

SEQ ID NO: 398059 - RNA, 20 nt, Artificial Sequence
  Synthetic
uauugugugggugaugcugu

SEQ ID NO: 398060 - RNA, 21 nt, Artificial Sequence
  Synthetic
auauugugugggugaugcugu

SEQ ID NO: 398061 - RNA, 22 nt, Artificial Sequence
  Synthetic
gauauugugugggugaugcugu

SEQ ID NO: 398062 - RNA, 23 nt, Artificial Sequence
  Synthetic
ugauauugugugggugaugcugu

SEQ ID NO: 398063 - RNA, 24 nt, Artificial Sequence
  Synthetic
cugauauugugugggugaugcugu

SEQ ID NO: 398064 - RNA, 18 nt, Artificial Sequence
  Synthetic
cccauggucaacugcugu

SEQ ID NO: 398065 - RNA, 19 nt, Artificial Sequence
  Synthetic
acccauggucaacugcugu

SEQ ID NO: 398066 - RNA, 20 nt, Artificial Sequence
  Synthetic
gacccauggucaacugcugu

SEQ ID NO: 398067 - RNA, 21 nt, Artificial Sequence
  Synthetic
ugacccauggucaacugcugu

SEQ ID NO: 398068 - RNA, 22 nt, Artificial Sequence
  Synthetic
gugacccauggucaacugcugu

SEQ ID NO: 398069 - RNA, 23 nt, Artificial Sequence
  Synthetic
agugacccauggucaacugcugu

SEQ ID NO: 398070 - RNA, 24 nt, Artificial Sequence
  Synthetic
cagugacccauggucaacugcugu

SEQ ID NO: 398071 - RNA, 18 nt, Artificial Sequence
  Synthetic
caucgguuuaucugcugu

SEQ ID NO: 398072 - RNA, 19 nt, Artificial Sequence
  Synthetic
ccaucgguuuaucugcugu

SEQ ID NO: 398073 - RNA, 20 nt, Artificial Sequence
  Synthetic
gccaucgguuuaucugcugu

SEQ ID NO: 398074 - RNA, 21 nt, Artificial Sequence
  Synthetic
agccaucgguuuaucugcugu

SEQ ID NO: 398075 - RNA, 22 nt, Artificial Sequence
  Synthetic
aagccaucgguuuaucugcugu

SEQ ID NO: 398076 - RNA, 23 nt, Artificial Sequence
  Synthetic
uaagccaucgguuuaucugcugu

SEQ ID NO: 398077 - RNA, 24 nt, Artificial Sequence
  Synthetic
cuaagccaucgguuuaucugcugu

SEQ ID NO: 398078 - RNA, 18 nt, Artificial Sequence
  Synthetic
aucaccucagucugcugu

SEQ ID NO: 398079 - RNA, 19 nt, Artificial Sequence
  Synthetic
gaucaccucagucugcugu

SEQ ID NO: 398080 - RNA, 20 nt, Artificial Sequence
  Synthetic
ggaucaccucagucugcugu

SEQ ID NO: 398081 - RNA, 21 nt, Artificial Sequence
  Synthetic
aggaucaccucagucugcugu

SEQ ID NO: 398082 - RNA, 22 nt, Artificial Sequence
  Synthetic
uaggaucaccucagucugcugu

SEQ ID NO: 398083 - RNA, 23 nt, Artificial Sequence
  Synthetic
cuaggaucaccucagucugcugu

SEQ ID NO: 398084 - RNA, 24 nt, Artificial Sequence
  Synthetic
ccuaggaucaccucagucugcugu

SEQ ID NO: 398085 - RNA, 18 nt, Artificial Sequence
  Synthetic
ccaaggaaacagugcugu

SEQ ID NO: 398086 - RNA, 19 nt, Artificial Sequence
  Synthetic
uccaaggaaacagugcugu

SEQ ID NO: 398087 - RNA, 20 nt, Artificial Sequence
  Synthetic
uuccaaggaaacagugcugu

SEQ ID NO: 398088 - RNA, 21 nt, Artificial Sequence
  Synthetic
uuuccaaggaaacagugcugu

SEQ ID NO: 398089 - RNA, 22 nt, Artificial Sequence
  Synthetic
guuuccaaggaaacagugcugu

SEQ ID NO: 398090 - RNA, 23 nt, Artificial Sequence
  Synthetic
uguuuccaaggaaacagugcugu

SEQ ID NO: 398091 - RNA, 24 nt, Artificial Sequence
  Synthetic
guguuuccaaggaaacagugcugu

SEQ ID NO: 398092 - RNA, 18 nt, Artificial Sequence
  Synthetic
uggggaagucagugcugu

SEQ ID NO: 398093 - RNA, 19 nt, Artificial Sequence
  Synthetic
cuggggaagucagugcugu

SEQ ID NO: 398094 - RNA, 20 nt, Artificial Sequence
  Synthetic
ccuggggaagucagugcugu

SEQ ID NO: 398095 - RNA, 21 nt, Artificial Sequence
  Synthetic
uccuggggaagucagugcugu

SEQ ID NO: 398096 - RNA, 22 nt, Artificial Sequence
  Synthetic
auccuggggaagucagugcugu

SEQ ID NO: 398097 - RNA, 23 nt, Artificial Sequence
  Synthetic
aauccuggggaagucagugcugu

SEQ ID NO: 398098 - RNA, 24 nt, Artificial Sequence
  Synthetic
uaauccuggggaagucagugcugu

SEQ ID NO: 398099 - RNA, 18 nt, Artificial Sequence
  Synthetic
cucucuaucaggugcugu

SEQ ID NO: 398100 - RNA, 19 nt, Artificial Sequence
  Synthetic
acucucuaucaggugcugu

SEQ ID NO: 398101 - RNA, 20 nt, Artificial Sequence
  Synthetic
aacucucuaucaggugcugu

SEQ ID NO: 398102 - RNA, 21 nt, Artificial Sequence
  Synthetic
gaacucucuaucaggugcugu

SEQ ID NO: 398103 - RNA, 22 nt, Artificial Sequence
  Synthetic
agaacucucuaucaggugcugu

SEQ ID NO: 398104 - RNA, 23 nt, Artificial Sequence
  Synthetic
uagaacucucuaucaggugcugu

SEQ ID NO: 398105 - RNA, 24 nt, Artificial Sequence
  Synthetic
guagaacucucuaucaggugcugu

SEQ ID NO: 398106 - RNA, 18 nt, Artificial Sequence
  Synthetic
agauaucuaaugugcugu

SEQ ID NO: 398107 - RNA, 19 nt, Artificial Sequence
  Synthetic
uagauaucuaaugugcugu

SEQ ID NO: 398108 - RNA, 20 nt, Artificial Sequence
  Synthetic
uuagauaucuaaugugcugu

SEQ ID NO: 398109 - RNA, 21 nt, Artificial Sequence
  Synthetic
cuuagauaucuaaugugcugu

SEQ ID NO: 398110 - RNA, 22 nt, Artificial Sequence
  Synthetic
ucuuagauaucuaaugugcugu

SEQ ID NO: 398111 - RNA, 23 nt, Artificial Sequence
  Synthetic
uucuuagauaucuaaugugcugu

SEQ ID NO: 398112 - RNA, 24 nt, Artificial Sequence
  Synthetic
uuucuuagauaucuaaugugcugu

SEQ ID NO: 398113 - RNA, 18 nt, Artificial Sequence
  Synthetic
uggaggcgauugugcugu

SEQ ID NO: 398114 - RNA, 19 nt, Artificial Sequence
  Synthetic
auggaggcgauugugcugu

SEQ ID NO: 398115 - RNA, 20 nt, Artificial Sequence
  Synthetic
gauggaggcgauugugcugu

SEQ ID NO: 398116 - RNA, 21 nt, Artificial Sequence
  Synthetic
agauggaggcgauugugcugu

SEQ ID NO: 398117 - RNA, 22 nt, Artificial Sequence
  Synthetic
gagauggaggcgauugugcugu

SEQ ID NO: 398118 - RNA, 23 nt, Artificial Sequence
  Synthetic
ggagauggaggcgauugugcugu

SEQ ID NO: 398119 - RNA, 24 nt, Artificial Sequence
  Synthetic
gggagauggaggcgauugugcugu

SEQ ID NO: 398120 - RNA, 18 nt, Artificial Sequence
  Synthetic
aaaguaaucacaaucugu

SEQ ID NO: 398121 - RNA, 19 nt, Artificial Sequence
  Synthetic
uaaaguaaucacaaucugu

SEQ ID NO: 398122 - RNA, 20 nt, Artificial Sequence
  Synthetic
auaaaguaaucacaaucugu

SEQ ID NO: 398123 - RNA, 21 nt, Artificial Sequence
  Synthetic
aauaaaguaaucacaaucugu

SEQ ID NO: 398124 - RNA, 22 nt, Artificial Sequence
  Synthetic
uaauaaaguaaucacaaucugu

SEQ ID NO: 398125 - RNA, 23 nt, Artificial Sequence
  Synthetic
auaauaaaguaaucacaaucugu

SEQ ID NO: 398126 - RNA, 24 nt, Artificial Sequence
  Synthetic
gauaauaaaguaaucacaaucugu

SEQ ID NO: 398127 - RNA, 18 nt, Artificial Sequence
  Synthetic
acagaauugagaaucugu

SEQ ID NO: 398128 - RNA, 19 nt, Artificial Sequence
  Synthetic
uacagaauugagaaucugu

SEQ ID NO: 398129 - RNA, 20 nt, Artificial Sequence
  Synthetic
guacagaauugagaaucugu

SEQ ID NO: 398130 - RNA, 21 nt, Artificial Sequence
  Synthetic
gguacagaauugagaaucugu

SEQ ID NO: 398131 - RNA, 22 nt, Artificial Sequence
  Synthetic
ggguacagaauugagaaucugu

SEQ ID NO: 398132 - RNA, 23 nt, Artificial Sequence
  Synthetic
uggguacagaauugagaaucugu

SEQ ID NO: 398133 - RNA, 24 nt, Artificial Sequence
  Synthetic
auggguacagaauugagaaucugu

SEQ ID NO: 398134 - RNA, 18 nt, Artificial Sequence
  Synthetic
cauauucugauaaucugu

SEQ ID NO: 398135 - RNA, 19 nt, Artificial Sequence
  Synthetic
acauauucugauaaucugu

SEQ ID NO: 398136 - RNA, 20 nt, Artificial Sequence
  Synthetic
uacauauucugauaaucugu

SEQ ID NO: 398137 - RNA, 21 nt, Artificial Sequence
  Synthetic
uuacauauucugauaaucugu

SEQ ID NO: 398138 - RNA, 22 nt, Artificial Sequence
  Synthetic
auuacauauucugauaaucugu

SEQ ID NO: 398139 - RNA, 23 nt, Artificial Sequence
  Synthetic
aauuacauauucugauaaucugu

SEQ ID NO: 398140 - RNA, 24 nt, Artificial Sequence
  Synthetic
uaauuacauauucugauaaucugu

SEQ ID NO: 398141 - RNA, 18 nt, Artificial Sequence
  Synthetic
uuuuguuuuuacaucugu

SEQ ID NO: 398142 - RNA, 19 nt, Artificial Sequence
  Synthetic
uuuuuguuuuuacaucugu

SEQ ID NO: 398143 - RNA, 20 nt, Artificial Sequence
  Synthetic
cuuuuuguuuuuacaucugu

SEQ ID NO: 398144 - RNA, 21 nt, Artificial Sequence
  Synthetic
ucuuuuuguuuuuacaucugu

SEQ ID NO: 398145 - RNA, 22 nt, Artificial Sequence
  Synthetic
uucuuuuuguuuuuacaucugu

SEQ ID NO: 398146 - RNA, 23 nt, Artificial Sequence
  Synthetic
uuucuuuuuguuuuuacaucugu

SEQ ID NO: 398147 - RNA, 24 nt, Artificial Sequence
  Synthetic
uuuucuuuuuguuuuuacaucugu

SEQ ID NO: 398148 - RNA, 18 nt, Artificial Sequence
  Synthetic
gauuugagagucaucugu

SEQ ID NO: 398149 - RNA, 19 nt, Artificial Sequence
  Synthetic
agauuugagagucaucugu

SEQ ID NO: 398150 - RNA, 20 nt, Artificial Sequence
  Synthetic
cagauuugagagucaucugu

SEQ ID NO: 398151 - RNA, 21 nt, Artificial Sequence
  Synthetic
gcagauuugagagucaucugu

SEQ ID NO: 398152 - RNA, 22 nt, Artificial Sequence
  Synthetic
ugcagauuugagagucaucugu

SEQ ID NO: 398153 - RNA, 23 nt, Artificial Sequence
  Synthetic
augcagauuugagagucaucugu

SEQ ID NO: 398154 - RNA, 24 nt, Artificial Sequence
  Synthetic
gaugcagauuugagagucaucugu

SEQ ID NO: 398155 - RNA, 18 nt, Artificial Sequence
  Synthetic
aauugacuugucaucugu

SEQ ID NO: 398156 - RNA, 19 nt, Artificial Sequence
  Synthetic
aaauugacuugucaucugu

SEQ ID NO: 398157 - RNA, 20 nt, Artificial Sequence
  Synthetic
aaaauugacuugucaucugu

SEQ ID NO: 398158 - RNA, 21 nt, Artificial Sequence
  Synthetic
caaaauugacuugucaucugu

SEQ ID NO: 398159 - RNA, 22 nt, Artificial Sequence
  Synthetic
ccaaaauugacuugucaucugu

SEQ ID NO: 398160 - RNA, 23 nt, Artificial Sequence
  Synthetic
gccaaaauugacuugucaucugu

SEQ ID NO: 398161 - RNA, 24 nt, Artificial Sequence
  Synthetic
agccaaaauugacuugucaucugu

SEQ ID NO: 398162 - RNA, 18 nt, Artificial Sequence
  Synthetic
aaguaaaacuucaucugu

SEQ ID NO: 398163 - RNA, 19 nt, Artificial Sequence
  Synthetic
aaaguaaaacuucaucugu

SEQ ID NO: 398164 - RNA, 20 nt, Artificial Sequence
  Synthetic
aaaaguaaaacuucaucugu

SEQ ID NO: 398165 - RNA, 21 nt, Artificial Sequence
  Synthetic
aaaaaguaaaacuucaucugu

SEQ ID NO: 398166 - RNA, 22 nt, Artificial Sequence
  Synthetic
aaaaaaguaaaacuucaucugu

SEQ ID NO: 398167 - RNA, 23 nt, Artificial Sequence
  Synthetic
aaaaaaaguaaaacuucaucugu

SEQ ID NO: 398168 - RNA, 24 nt, Artificial Sequence
  Synthetic
aaaaaaaaguaaaacuucaucugu

SEQ ID NO: 398169 - RNA, 18 nt, Artificial Sequence
  Synthetic
uggaaccucuucaucugu

SEQ ID NO: 398170 - RNA, 19 nt, Artificial Sequence
  Synthetic
auggaaccucuucaucugu

SEQ ID NO: 398171 - RNA, 20 nt, Artificial Sequence
  Synthetic
cauggaaccucuucaucugu

SEQ ID NO: 398172 - RNA, 21 nt, Artificial Sequence
  Synthetic
ccauggaaccucuucaucugu

SEQ ID NO: 398173 - RNA, 22 nt, Artificial Sequence
  Synthetic
accauggaaccucuucaucugu

SEQ ID NO: 398174 - RNA, 23 nt, Artificial Sequence
  Synthetic
aaccauggaaccucuucaucugu

SEQ ID NO: 398175 - RNA, 24 nt, Artificial Sequence
  Synthetic
uaaccauggaaccucuucaucugu

SEQ ID NO: 398176 - RNA, 18 nt, Artificial Sequence
  Synthetic
cugagaguaauuaucugu

SEQ ID NO: 398177 - RNA, 19 nt, Artificial Sequence
  Synthetic
acugagaguaauuaucugu

SEQ ID NO: 398178 - RNA, 20 nt, Artificial Sequence
  Synthetic
gacugagaguaauuaucugu

SEQ ID NO: 398179 - RNA, 21 nt, Artificial Sequence
  Synthetic
agacugagaguaauuaucugu

SEQ ID NO: 398180 - RNA, 22 nt, Artificial Sequence
  Synthetic
gagacugagaguaauuaucugu

SEQ ID NO: 398181 - RNA, 23 nt, Artificial Sequence
  Synthetic
agagacugagaguaauuaucugu

SEQ ID NO: 398182 - RNA, 24 nt, Artificial Sequence
  Synthetic
uagagacugagaguaauuaucugu

SEQ ID NO: 398183 - RNA, 18 nt, Artificial Sequence
  Synthetic
acaaagggaguuaucugu

SEQ ID NO: 398184 - RNA, 19 nt, Artificial Sequence
  Synthetic
aacaaagggaguuaucugu

SEQ ID NO: 398185 - RNA, 20 nt, Artificial Sequence
  Synthetic
aaacaaagggaguuaucugu

SEQ ID NO: 398186 - RNA, 21 nt, Artificial Sequence
  Synthetic
uaaacaaagggaguuaucugu

SEQ ID NO: 398187 - RNA, 22 nt, Artificial Sequence
  Synthetic
auaaacaaagggaguuaucugu

SEQ ID NO: 398188 - RNA, 23 nt, Artificial Sequence
  Synthetic
aauaaacaaagggaguuaucugu

SEQ ID NO: 398189 - RNA, 24 nt, Artificial Sequence
  Synthetic
uaauaaacaaagggaguuaucugu

SEQ ID NO: 398190 - RNA, 18 nt, Artificial Sequence
  Synthetic
aaacacagacaacucugu

SEQ ID NO: 398191 - RNA, 19 nt, Artificial Sequence
  Synthetic
aaaacacagacaacucugu

SEQ ID NO: 398192 - RNA, 20 nt, Artificial Sequence
  Synthetic
uaaaacacagacaacucugu

SEQ ID NO: 398193 - RNA, 21 nt, Artificial Sequence
  Synthetic
auaaaacacagacaacucugu

SEQ ID NO: 398194 - RNA, 22 nt, Artificial Sequence
  Synthetic
gauaaaacacagacaacucugu

SEQ ID NO: 398195 - RNA, 23 nt, Artificial Sequence
  Synthetic
ugauaaaacacagacaacucugu

SEQ ID NO: 398196 - RNA, 24 nt, Artificial Sequence
  Synthetic
uugauaaaacacagacaacucugu

SEQ ID NO: 398197 - RNA, 18 nt, Artificial Sequence
  Synthetic
uuuuacagaacacucugu

SEQ ID NO: 398198 - RNA, 19 nt, Artificial Sequence
  Synthetic
uuuuuacagaacacucugu

SEQ ID NO: 398199 - RNA, 20 nt, Artificial Sequence
  Synthetic
uuuuuuacagaacacucugu

SEQ ID NO: 398200 - RNA, 21 nt, Artificial Sequence
  Synthetic
cuuuuuuacagaacacucugu

SEQ ID NO: 398201 - RNA, 22 nt, Artificial Sequence
  Synthetic
ucuuuuuuacagaacacucugu

SEQ ID NO: 398202 - RNA, 23 nt, Artificial Sequence
  Synthetic
uucuuuuuuacagaacacucugu

SEQ ID NO: 398203 - RNA, 24 nt, Artificial Sequence
  Synthetic
auucuuuuuuacagaacacucugu

SEQ ID NO: 398204 - RNA, 18 nt, Artificial Sequence
  Synthetic
ucuuugggauuacucugu

SEQ ID NO: 398205 - RNA, 19 nt, Artificial Sequence
  Synthetic
uucuuugggauuacucugu

SEQ ID NO: 398206 - RNA, 20 nt, Artificial Sequence
  Synthetic
cuucuuugggauuacucugu

SEQ ID NO: 398207 - RNA, 21 nt, Artificial Sequence
  Synthetic
acuucuuugggauuacucugu

SEQ ID NO: 398208 - RNA, 22 nt, Artificial Sequence
  Synthetic
aacuucuuugggauuacucugu

SEQ ID NO: 398209 - RNA, 23 nt, Artificial Sequence
  Synthetic
gaacuucuuugggauuacucugu

SEQ ID NO: 398210 - RNA, 24 nt, Artificial Sequence
  Synthetic
ugaacuucuuugggauuacucugu

SEQ ID NO: 398211 - RNA, 18 nt, Artificial Sequence
  Synthetic
acuucuucacagcucugu

SEQ ID NO: 398212 - RNA, 19 nt, Artificial Sequence
  Synthetic
aacuucuucacagcucugu

SEQ ID NO: 398213 - RNA, 20 nt, Artificial Sequence
  Synthetic
caacuucuucacagcucugu

SEQ ID NO: 398214 - RNA, 21 nt, Artificial Sequence
  Synthetic
ucaacuucuucacagcucugu

SEQ ID NO: 398215 - RNA, 22 nt, Artificial Sequence
  Synthetic
uucaacuucuucacagcucugu

SEQ ID NO: 398216 - RNA, 23 nt, Artificial Sequence
  Synthetic
uuucaacuucuucacagcucugu

SEQ ID NO: 398217 - RNA, 24 nt, Artificial Sequence
  Synthetic
auuucaacuucuucacagcucugu

SEQ ID NO: 398218 - RNA, 18 nt, Artificial Sequence
  Synthetic
gcucccuaaucgcucugu

SEQ ID NO: 398219 - RNA, 19 nt, Artificial Sequence
  Synthetic
agcucccuaaucgcucugu

SEQ ID NO: 398220 - RNA, 20 nt, Artificial Sequence
  Synthetic
uagcucccuaaucgcucugu

SEQ ID NO: 398221 - RNA, 21 nt, Artificial Sequence
  Synthetic
cuagcucccuaaucgcucugu

SEQ ID NO: 398222 - RNA, 22 nt, Artificial Sequence
  Synthetic
acuagcucccuaaucgcucugu

SEQ ID NO: 398223 - RNA, 23 nt, Artificial Sequence
  Synthetic
aacuagcucccuaaucgcucugu

SEQ ID NO: 398224 - RNA, 24 nt, Artificial Sequence
  Synthetic
caacuagcucccuaaucgcucugu

SEQ ID NO: 398225 - RNA, 18 nt, Artificial Sequence
  Synthetic
cuuagcauucgucucugu

SEQ ID NO: 398226 - RNA, 19 nt, Artificial Sequence
  Synthetic
ucuuagcauucgucucugu

SEQ ID NO: 398227 - RNA, 20 nt, Artificial Sequence
  Synthetic
uucuuagcauucgucucugu

SEQ ID NO: 398228 - RNA, 21 nt, Artificial Sequence
  Synthetic
auucuuagcauucgucucugu

SEQ ID NO: 398229 - RNA, 22 nt, Artificial Sequence
  Synthetic
gauucuuagcauucgucucugu

SEQ ID NO: 398230 - RNA, 23 nt, Artificial Sequence
  Synthetic
agauucuuagcauucgucucugu

SEQ ID NO: 398231 - RNA, 24 nt, Artificial Sequence
  Synthetic
cagauucuuagcauucgucucugu

SEQ ID NO: 398232 - RNA, 18 nt, Artificial Sequence
  Synthetic
gggccauuuggucucugu

SEQ ID NO: 398233 - RNA, 19 nt, Artificial Sequence
  Synthetic
ugggccauuuggucucugu

SEQ ID NO: 398234 - RNA, 20 nt, Artificial Sequence
  Synthetic
augggccauuuggucucugu

SEQ ID NO: 398235 - RNA, 21 nt, Artificial Sequence
  Synthetic
caugggccauuuggucucugu

SEQ ID NO: 398236 - RNA, 22 nt, Artificial Sequence
  Synthetic
ucaugggccauuuggucucugu

SEQ ID NO: 398237 - RNA, 23 nt, Artificial Sequence
  Synthetic
uucaugggccauuuggucucugu

SEQ ID NO: 398238 - RNA, 24 nt, Artificial Sequence
  Synthetic
cuucaugggccauuuggucucugu

SEQ ID NO: 398239 - RNA, 18 nt, Artificial Sequence
  Synthetic
gggugaggagaagucugu

SEQ ID NO: 398240 - RNA, 19 nt, Artificial Sequence
  Synthetic
ugggugaggagaagucugu

SEQ ID NO: 398241 - RNA, 20 nt, Artificial Sequence
  Synthetic
uugggugaggagaagucugu

SEQ ID NO: 398242 - RNA, 21 nt, Artificial Sequence
  Synthetic
auugggugaggagaagucugu

SEQ ID NO: 398243 - RNA, 22 nt, Artificial Sequence
  Synthetic
cauugggugaggagaagucugu

SEQ ID NO: 398244 - RNA, 23 nt, Artificial Sequence
  Synthetic
ucauugggugaggagaagucugu

SEQ ID NO: 398245 - RNA, 24 nt, Artificial Sequence
  Synthetic
aucauugggugaggagaagucugu

SEQ ID NO: 398246 - RNA, 18 nt, Artificial Sequence
  Synthetic
uagcaugagccagucugu

SEQ ID NO: 398247 - RNA, 19 nt, Artificial Sequence
  Synthetic
auagcaugagccagucugu

SEQ ID NO: 398248 - RNA, 20 nt, Artificial Sequence
  Synthetic
cauagcaugagccagucugu

SEQ ID NO: 398249 - RNA, 21 nt, Artificial Sequence
  Synthetic
ucauagcaugagccagucugu

SEQ ID NO: 398250 - RNA, 22 nt, Artificial Sequence
  Synthetic
aucauagcaugagccagucugu

SEQ ID NO: 398251 - RNA, 23 nt, Artificial Sequence
  Synthetic
aaucauagcaugagccagucugu

SEQ ID NO: 398252 - RNA, 24 nt, Artificial Sequence
  Synthetic
gaaucauagcaugagccagucugu

SEQ ID NO: 398253 - RNA, 18 nt, Artificial Sequence
  Synthetic
ggaagugagguugucugu

SEQ ID NO: 398254 - RNA, 19 nt, Artificial Sequence
  Synthetic
aggaagugagguugucugu

SEQ ID NO: 398255 - RNA, 20 nt, Artificial Sequence
  Synthetic
uaggaagugagguugucugu

SEQ ID NO: 398256 - RNA, 21 nt, Artificial Sequence
  Synthetic
guaggaagugagguugucugu

SEQ ID NO: 398257 - RNA, 22 nt, Artificial Sequence
  Synthetic
aguaggaagugagguugucugu

SEQ ID NO: 398258 - RNA, 23 nt, Artificial Sequence
  Synthetic
aaguaggaagugagguugucugu

SEQ ID NO: 398259 - RNA, 24 nt, Artificial Sequence
  Synthetic
aaaguaggaagugagguugucugu

SEQ ID NO: 398260 - RNA, 18 nt, Artificial Sequence
  Synthetic
aaagggaaaacauucugu

SEQ ID NO: 398261 - RNA, 19 nt, Artificial Sequence
  Synthetic
gaaagggaaaacauucugu

SEQ ID NO: 398262 - RNA, 20 nt, Artificial Sequence
  Synthetic
agaaagggaaaacauucugu

SEQ ID NO: 398263 - RNA, 21 nt, Artificial Sequence
  Synthetic
gagaaagggaaaacauucugu

SEQ ID NO: 398264 - RNA, 22 nt, Artificial Sequence
  Synthetic
ggagaaagggaaaacauucugu

SEQ ID NO: 398265 - RNA, 23 nt, Artificial Sequence
  Synthetic
aggagaaagggaaaacauucugu

SEQ ID NO: 398266 - RNA, 24 nt, Artificial Sequence
  Synthetic
uaggagaaagggaaaacauucugu

SEQ ID NO: 398267 - RNA, 18 nt, Artificial Sequence
  Synthetic
cggguaauugcauucugu

SEQ ID NO: 398268 - RNA, 19 nt, Artificial Sequence
  Synthetic
ccggguaauugcauucugu

SEQ ID NO: 398269 - RNA, 20 nt, Artificial Sequence
  Synthetic
cccggguaauugcauucugu

SEQ ID NO: 398270 - RNA, 21 nt, Artificial Sequence
  Synthetic
ucccggguaauugcauucugu

SEQ ID NO: 398271 - RNA, 22 nt, Artificial Sequence
  Synthetic
uucccggguaauugcauucugu

SEQ ID NO: 398272 - RNA, 23 nt, Artificial Sequence
  Synthetic
auucccggguaauugcauucugu

SEQ ID NO: 398273 - RNA, 24 nt, Artificial Sequence
  Synthetic
aauucccggguaauugcauucugu

SEQ ID NO: 398274 - RNA, 18 nt, Artificial Sequence
  Synthetic
uauugaaauagauucugu

SEQ ID NO: 398275 - RNA, 19 nt, Artificial Sequence
  Synthetic
guauugaaauagauucugu

SEQ ID NO: 398276 - RNA, 20 nt, Artificial Sequence
  Synthetic
uguauugaaauagauucugu

SEQ ID NO: 398277 - RNA, 21 nt, Artificial Sequence
  Synthetic
cuguauugaaauagauucugu

SEQ ID NO: 398278 - RNA, 22 nt, Artificial Sequence
  Synthetic
acuguauugaaauagauucugu

SEQ ID NO: 398279 - RNA, 23 nt, Artificial Sequence
  Synthetic
uacuguauugaaauagauucugu

SEQ ID NO: 398280 - RNA, 24 nt, Artificial Sequence
  Synthetic
uuacuguauugaaauagauucugu

SEQ ID NO: 398281 - RNA, 18 nt, Artificial Sequence
  Synthetic
aucucuuucugauucugu

SEQ ID NO: 398282 - RNA, 19 nt, Artificial Sequence
  Synthetic
caucucuuucugauucugu

SEQ ID NO: 398283 - RNA, 20 nt, Artificial Sequence
  Synthetic
ucaucucuuucugauucugu

SEQ ID NO: 398284 - RNA, 21 nt, Artificial Sequence
  Synthetic
gucaucucuuucugauucugu

SEQ ID NO: 398285 - RNA, 22 nt, Artificial Sequence
  Synthetic
ugucaucucuuucugauucugu

SEQ ID NO: 398286 - RNA, 23 nt, Artificial Sequence
  Synthetic
gugucaucucuuucugauucugu

SEQ ID NO: 398287 - RNA, 24 nt, Artificial Sequence
  Synthetic
ggugucaucucuuucugauucugu

SEQ ID NO: 398288 - RNA, 18 nt, Artificial Sequence
  Synthetic
uuagcaaacuuauucugu

SEQ ID NO: 398289 - RNA, 19 nt, Artificial Sequence
  Synthetic
guuagcaaacuuauucugu

SEQ ID NO: 398290 - RNA, 20 nt, Artificial Sequence
  Synthetic
aguuagcaaacuuauucugu

SEQ ID NO: 398291 - RNA, 21 nt, Artificial Sequence
  Synthetic
aaguuagcaaacuuauucugu

SEQ ID NO: 398292 - RNA, 22 nt, Artificial Sequence
  Synthetic
gaaguuagcaaacuuauucugu

SEQ ID NO: 398293 - RNA, 23 nt, Artificial Sequence
  Synthetic
agaaguuagcaaacuuauucugu

SEQ ID NO: 398294 - RNA, 24 nt, Artificial Sequence
  Synthetic
cagaaguuagcaaacuuauucugu

SEQ ID NO: 398295 - RNA, 18 nt, Artificial Sequence
  Synthetic
auguaauucuuauucugu

SEQ ID NO: 398296 - RNA, 19 nt, Artificial Sequence
  Synthetic
aauguaauucuuauucugu

SEQ ID NO: 398297 - RNA, 20 nt, Artificial Sequence
  Synthetic
caauguaauucuuauucugu

SEQ ID NO: 398298 - RNA, 21 nt, Artificial Sequence
  Synthetic
acaauguaauucuuauucugu

SEQ ID NO: 398299 - RNA, 22 nt, Artificial Sequence
  Synthetic
aacaauguaauucuuauucugu

SEQ ID NO: 398300 - RNA, 23 nt, Artificial Sequence
  Synthetic
aaacaauguaauucuuauucugu

SEQ ID NO: 398301 - RNA, 24 nt, Artificial Sequence
  Synthetic
caaacaauguaauucuuauucugu

SEQ ID NO: 398302 - RNA, 18 nt, Artificial Sequence
  Synthetic
cacuguuucuuauucugu

SEQ ID NO: 398303 - RNA, 19 nt, Artificial Sequence
  Synthetic
gcacuguuucuuauucugu

SEQ ID NO: 398304 - RNA, 20 nt, Artificial Sequence
  Synthetic
ggcacuguuucuuauucugu

SEQ ID NO: 398305 - RNA, 21 nt, Artificial Sequence
  Synthetic
uggcacuguuucuuauucugu

SEQ ID NO: 398306 - RNA, 22 nt, Artificial Sequence
  Synthetic
guggcacuguuucuuauucugu

SEQ ID NO: 398307 - RNA, 23 nt, Artificial Sequence
  Synthetic
uguggcacuguuucuuauucugu

SEQ ID NO: 398308 - RNA, 24 nt, Artificial Sequence
  Synthetic
guguggcacuguuucuuauucugu

SEQ ID NO: 398309 - RNA, 18 nt, Artificial Sequence
  Synthetic
acacucuggcacuucugu

SEQ ID NO: 398310 - RNA, 19 nt, Artificial Sequence
  Synthetic
cacacucuggcacuucugu

SEQ ID NO: 398311 - RNA, 20 nt, Artificial Sequence
  Synthetic
ucacacucuggcacuucugu

SEQ ID NO: 398312 - RNA, 21 nt, Artificial Sequence
  Synthetic
aucacacucuggcacuucugu

SEQ ID NO: 398313 - RNA, 22 nt, Artificial Sequence
  Synthetic
gaucacacucuggcacuucugu

SEQ ID NO: 398314 - RNA, 23 nt, Artificial Sequence
  Synthetic
agaucacacucuggcacuucugu

SEQ ID NO: 398315 - RNA, 24 nt, Artificial Sequence
  Synthetic
cagaucacacucuggcacuucugu

SEQ ID NO: 398316 - RNA, 18 nt, Artificial Sequence
  Synthetic
acguaguuuuccuucugu

SEQ ID NO: 398317 - RNA, 19 nt, Artificial Sequence
  Synthetic
cacguaguuuuccuucugu

SEQ ID NO: 398318 - RNA, 20 nt, Artificial Sequence
  Synthetic
gcacguaguuuuccuucugu

SEQ ID NO: 398319 - RNA, 21 nt, Artificial Sequence
  Synthetic
ugcacguaguuuuccuucugu

SEQ ID NO: 398320 - RNA, 22 nt, Artificial Sequence
  Synthetic
uugcacguaguuuuccuucugu

SEQ ID NO: 398321 - RNA, 23 nt, Artificial Sequence
  Synthetic
uuugcacguaguuuuccuucugu

SEQ ID NO: 398322 - RNA, 24 nt, Artificial Sequence
  Synthetic
uuuugcacguaguuuuccuucugu

SEQ ID NO: 398323 - RNA, 18 nt, Artificial Sequence
  Synthetic
cuuugguugagcuucugu

SEQ ID NO: 398324 - RNA, 19 nt, Artificial Sequence
  Synthetic
acuuugguugagcuucugu

SEQ ID NO: 398325 - RNA, 20 nt, Artificial Sequence
  Synthetic
uacuuugguugagcuucugu

SEQ ID NO: 398326 - RNA, 21 nt, Artificial Sequence
  Synthetic
cuacuuugguugagcuucugu

SEQ ID NO: 398327 - RNA, 22 nt, Artificial Sequence
  Synthetic
acuacuuugguugagcuucugu

SEQ ID NO: 398328 - RNA, 23 nt, Artificial Sequence
  Synthetic
uacuacuuugguugagcuucugu

SEQ ID NO: 398329 - RNA, 24 nt, Artificial Sequence
  Synthetic
uuacuacuuugguugagcuucugu

SEQ ID NO: 398330 - RNA, 18 nt, Artificial Sequence
  Synthetic
augcauugcuucuucugu

SEQ ID NO: 398331 - RNA, 19 nt, Artificial Sequence
  Synthetic
caugcauugcuucuucugu

SEQ ID NO: 398332 - RNA, 20 nt, Artificial Sequence
  Synthetic
ucaugcauugcuucuucugu

SEQ ID NO: 398333 - RNA, 21 nt, Artificial Sequence
  Synthetic
cucaugcauugcuucuucugu

SEQ ID NO: 398334 - RNA, 22 nt, Artificial Sequence
  Synthetic
ucucaugcauugcuucuucugu

SEQ ID NO: 398335 - RNA, 23 nt, Artificial Sequence
  Synthetic
cucucaugcauugcuucuucugu

SEQ ID NO: 398336 - RNA, 24 nt, Artificial Sequence
  Synthetic
ucucucaugcauugcuucuucugu

SEQ ID NO: 398337 - RNA, 18 nt, Artificial Sequence
  Synthetic
gggagaauguucuucugu

SEQ ID NO: 398338 - RNA, 19 nt, Artificial Sequence
  Synthetic
ggggagaauguucuucugu

SEQ ID NO: 398339 - RNA, 20 nt, Artificial Sequence
  Synthetic
aggggagaauguucuucugu

SEQ ID NO: 398340 - RNA, 21 nt, Artificial Sequence
  Synthetic
aaggggagaauguucuucugu

SEQ ID NO: 398341 - RNA, 22 nt, Artificial Sequence
  Synthetic
gaaggggagaauguucuucugu

SEQ ID NO: 398342 - RNA, 23 nt, Artificial Sequence
  Synthetic
agaaggggagaauguucuucugu

SEQ ID NO: 398343 - RNA, 24 nt, Artificial Sequence
  Synthetic
uagaaggggagaauguucuucugu

SEQ ID NO: 398344 - RNA, 18 nt, Artificial Sequence
  Synthetic
cagcuggcuuucuucugu

SEQ ID NO: 398345 - RNA, 19 nt, Artificial Sequence
  Synthetic
ccagcuggcuuucuucugu

SEQ ID NO: 398346 - RNA, 20 nt, Artificial Sequence
  Synthetic
accagcuggcuuucuucugu

SEQ ID NO: 398347 - RNA, 21 nt, Artificial Sequence
  Synthetic
uaccagcuggcuuucuucugu

SEQ ID NO: 398348 - RNA, 22 nt, Artificial Sequence
  Synthetic
uuaccagcuggcuuucuucugu

SEQ ID NO: 398349 - RNA, 23 nt, Artificial Sequence
  Synthetic
uuuaccagcuggcuuucuucugu

SEQ ID NO: 398350 - RNA, 24 nt, Artificial Sequence
  Synthetic
auuuaccagcuggcuuucuucugu

SEQ ID NO: 398351 - RNA, 18 nt, Artificial Sequence
  Synthetic
acagucagucuguucugu

SEQ ID NO: 398352 - RNA, 19 nt, Artificial Sequence
  Synthetic
uacagucagucuguucugu

SEQ ID NO: 398353 - RNA, 20 nt, Artificial Sequence
  Synthetic
auacagucagucuguucugu

SEQ ID NO: 398354 - RNA, 21 nt, Artificial Sequence
  Synthetic
uauacagucagucuguucugu

SEQ ID NO: 398355 - RNA, 22 nt, Artificial Sequence
  Synthetic
cuauacagucagucuguucugu

SEQ ID NO: 398356 - RNA, 23 nt, Artificial Sequence
  Synthetic
gcuauacagucagucuguucugu

SEQ ID NO: 398357 - RNA, 24 nt, Artificial Sequence
  Synthetic
agcuauacagucagucuguucugu

SEQ ID NO: 398358 - RNA, 18 nt, Artificial Sequence
  Synthetic
aguagcaggcauuucugu

SEQ ID NO: 398359 - RNA, 19 nt, Artificial Sequence
  Synthetic
aaguagcaggcauuucugu

SEQ ID NO: 398360 - RNA, 20 nt, Artificial Sequence
  Synthetic
gaaguagcaggcauuucugu

SEQ ID NO: 398361 - RNA, 21 nt, Artificial Sequence
  Synthetic
agaaguagcaggcauuucugu

SEQ ID NO: 398362 - RNA, 22 nt, Artificial Sequence
  Synthetic
uagaaguagcaggcauuucugu

SEQ ID NO: 398363 - RNA, 23 nt, Artificial Sequence
  Synthetic
auagaaguagcaggcauuucugu

SEQ ID NO: 398364 - RNA, 24 nt, Artificial Sequence
  Synthetic
aauagaaguagcaggcauuucugu

SEQ ID NO: 398365 - RNA, 18 nt, Artificial Sequence
  Synthetic
caauguuugcauuucugu

SEQ ID NO: 398366 - RNA, 19 nt, Artificial Sequence
  Synthetic
ucaauguuugcauuucugu

SEQ ID NO: 398367 - RNA, 20 nt, Artificial Sequence
  Synthetic
uucaauguuugcauuucugu

SEQ ID NO: 398368 - RNA, 21 nt, Artificial Sequence
  Synthetic
uuucaauguuugcauuucugu

SEQ ID NO: 398369 - RNA, 22 nt, Artificial Sequence
  Synthetic
uuuucaauguuugcauuucugu

SEQ ID NO: 398370 - RNA, 23 nt, Artificial Sequence
  Synthetic
cuuuucaauguuugcauuucugu

SEQ ID NO: 398371 - RNA, 24 nt, Artificial Sequence
  Synthetic
acuuuucaauguuugcauuucugu

SEQ ID NO: 398372 - RNA, 18 nt, Artificial Sequence
  Synthetic
uuagcaaacaguuucugu

SEQ ID NO: 398373 - RNA, 19 nt, Artificial Sequence
  Synthetic
uuuagcaaacaguuucugu

SEQ ID NO: 398374 - RNA, 20 nt, Artificial Sequence
  Synthetic
uuuuagcaaacaguuucugu

SEQ ID NO: 398375 - RNA, 21 nt, Artificial Sequence
  Synthetic
uuuuuagcaaacaguuucugu

SEQ ID NO: 398376 - RNA, 22 nt, Artificial Sequence
  Synthetic
cuuuuuagcaaacaguuucugu

SEQ ID NO: 398377 - RNA, 23 nt, Artificial Sequence
  Synthetic
acuuuuuagcaaacaguuucugu

SEQ ID NO: 398378 - RNA, 24 nt, Artificial Sequence
  Synthetic
cacuuuuuagcaaacaguuucugu

SEQ ID NO: 398379 - RNA, 18 nt, Artificial Sequence
  Synthetic
ucuaugucagguuucugu

SEQ ID NO: 398380 - RNA, 19 nt, Artificial Sequence
  Synthetic
cucuaugucagguuucugu

SEQ ID NO: 398381 - RNA, 20 nt, Artificial Sequence
  Synthetic
acucuaugucagguuucugu

SEQ ID NO: 398382 - RNA, 21 nt, Artificial Sequence
  Synthetic
aacucuaugucagguuucugu

SEQ ID NO: 398383 - RNA, 22 nt, Artificial Sequence
  Synthetic
gaacucuaugucagguuucugu

SEQ ID NO: 398384 - RNA, 23 nt, Artificial Sequence
  Synthetic
ggaacucuaugucagguuucugu

SEQ ID NO: 398385 - RNA, 24 nt, Artificial Sequence
  Synthetic
aggaacucuaugucagguuucugu

SEQ ID NO: 398386 - RNA, 18 nt, Artificial Sequence
  Synthetic
cauuacacuguuuucugu

SEQ ID NO: 398387 - RNA, 19 nt, Artificial Sequence
  Synthetic
ccauuacacuguuuucugu

SEQ ID NO: 398388 - RNA, 20 nt, Artificial Sequence
  Synthetic
cccauuacacuguuuucugu

SEQ ID NO: 398389 - RNA, 21 nt, Artificial Sequence
  Synthetic
acccauuacacuguuuucugu

SEQ ID NO: 398390 - RNA, 22 nt, Artificial Sequence
  Synthetic
gacccauuacacuguuuucugu

SEQ ID NO: 398391 - RNA, 23 nt, Artificial Sequence
  Synthetic
ugacccauuacacuguuuucugu

SEQ ID NO: 398392 - RNA, 24 nt, Artificial Sequence
  Synthetic
cugacccauuacacuguuuucugu

SEQ ID NO: 398393 - RNA, 18 nt, Artificial Sequence
  Synthetic
cugcuuuguguuuucugu

SEQ ID NO: 398394 - RNA, 19 nt, Artificial Sequence
  Synthetic
acugcuuuguguuuucugu

SEQ ID NO: 398395 - RNA, 20 nt, Artificial Sequence
  Synthetic
cacugcuuuguguuuucugu

SEQ ID NO: 398396 - RNA, 21 nt, Artificial Sequence
  Synthetic
acacugcuuuguguuuucugu

SEQ ID NO: 398397 - RNA, 22 nt, Artificial Sequence
  Synthetic
uacacugcuuuguguuuucugu

SEQ ID NO: 398398 - RNA, 23 nt, Artificial Sequence
  Synthetic
auacacugcuuuguguuuucugu

SEQ ID NO: 398399 - RNA, 24 nt, Artificial Sequence
  Synthetic
aauacacugcuuuguguuuucugu

SEQ ID NO: 398400 - RNA, 18 nt, Artificial Sequence
  Synthetic
uauauauauuuuuucugu

SEQ ID NO: 398401 - RNA, 19 nt, Artificial Sequence
  Synthetic
guauauauauuuuuucugu

SEQ ID NO: 398402 - RNA, 20 nt, Artificial Sequence
  Synthetic
uguauauauauuuuuucugu

SEQ ID NO: 398403 - RNA, 21 nt, Artificial Sequence
  Synthetic
auguauauauauuuuuucugu

SEQ ID NO: 398404 - RNA, 22 nt, Artificial Sequence
  Synthetic
gauguauauauauuuuuucugu

SEQ ID NO: 398405 - RNA, 23 nt, Artificial Sequence
  Synthetic
agauguauauauauuuuuucugu

SEQ ID NO: 398406 - RNA, 24 nt, Artificial Sequence
  Synthetic
uagauguauauauauuuuuucugu

SEQ ID NO: 398407 - RNA, 18 nt, Artificial Sequence
  Synthetic
uuugagaauaaaaagugu

SEQ ID NO: 398408 - RNA, 19 nt, Artificial Sequence
  Synthetic
uuuugagaauaaaaagugu

SEQ ID NO: 398409 - RNA, 20 nt, Artificial Sequence
  Synthetic
auuuugagaauaaaaagugu

SEQ ID NO: 398410 - RNA, 21 nt, Artificial Sequence
  Synthetic
uauuuugagaauaaaaagugu

SEQ ID NO: 398411 - RNA, 22 nt, Artificial Sequence
  Synthetic
uuauuuugagaauaaaaagugu

SEQ ID NO: 398412 - RNA, 23 nt, Artificial Sequence
  Synthetic
uuuauuuugagaauaaaaagugu

SEQ ID NO: 398413 - RNA, 24 nt, Artificial Sequence
  Synthetic
auuuauuuugagaauaaaaagugu

SEQ ID NO: 398414 - RNA, 18 nt, Artificial Sequence
  Synthetic
gugaucacuaaaaagugu

SEQ ID NO: 398415 - RNA, 19 nt, Artificial Sequence
  Synthetic
agugaucacuaaaaagugu

SEQ ID NO: 398416 - RNA, 20 nt, Artificial Sequence
  Synthetic
aagugaucacuaaaaagugu

SEQ ID NO: 398417 - RNA, 21 nt, Artificial Sequence
  Synthetic
aaagugaucacuaaaaagugu

SEQ ID NO: 398418 - RNA, 22 nt, Artificial Sequence
  Synthetic
gaaagugaucacuaaaaagugu

SEQ ID NO: 398419 - RNA, 23 nt, Artificial Sequence
  Synthetic
agaaagugaucacuaaaaagugu

SEQ ID NO: 398420 - RNA, 24 nt, Artificial Sequence
  Synthetic
cagaaagugaucacuaaaaagugu

SEQ ID NO: 398421 - RNA, 18 nt, Artificial Sequence
  Synthetic
gugcuaauuugaaagugu

SEQ ID NO: 398422 - RNA, 19 nt, Artificial Sequence
  Synthetic
agugcuaauuugaaagugu

SEQ ID NO: 398423 - RNA, 20 nt, Artificial Sequence
  Synthetic
cagugcuaauuugaaagugu

SEQ ID NO: 398424 - RNA, 21 nt, Artificial Sequence
  Synthetic
acagugcuaauuugaaagugu

SEQ ID NO: 398425 - RNA, 22 nt, Artificial Sequence
  Synthetic
gacagugcuaauuugaaagugu

SEQ ID NO: 398426 - RNA, 23 nt, Artificial Sequence
  Synthetic
cgacagugcuaauuugaaagugu

SEQ ID NO: 398427 - RNA, 24 nt, Artificial Sequence
  Synthetic
acgacagugcuaauuugaaagugu

SEQ ID NO: 398428 - RNA, 18 nt, Artificial Sequence
  Synthetic
gucauuuuucuaaagugu

SEQ ID NO: 398429 - RNA, 19 nt, Artificial Sequence
  Synthetic
cgucauuuuucuaaagugu

SEQ ID NO: 398430 - RNA, 20 nt, Artificial Sequence
  Synthetic
ccgucauuuuucuaaagugu

SEQ ID NO: 398431 - RNA, 21 nt, Artificial Sequence
  Synthetic
gccgucauuuuucuaaagugu

SEQ ID NO: 398432 - RNA, 22 nt, Artificial Sequence
  Synthetic
ggccgucauuuuucuaaagugu

SEQ ID NO: 398433 - RNA, 23 nt, Artificial Sequence
  Synthetic
uggccgucauuuuucuaaagugu

SEQ ID NO: 398434 - RNA, 24 nt, Artificial Sequence
  Synthetic
guggccgucauuuuucuaaagugu

SEQ ID NO: 398435 - RNA, 18 nt, Artificial Sequence
  Synthetic
uuaaacugaaacaagugu

SEQ ID NO: 398436 - RNA, 19 nt, Artificial Sequence
  Synthetic
cuuaaacugaaacaagugu

SEQ ID NO: 398437 - RNA, 20 nt, Artificial Sequence
  Synthetic
ucuuaaacugaaacaagugu

SEQ ID NO: 398438 - RNA, 21 nt, Artificial Sequence
  Synthetic
uucuuaaacugaaacaagugu

SEQ ID NO: 398439 - RNA, 22 nt, Artificial Sequence
  Synthetic
guucuuaaacugaaacaagugu

SEQ ID NO: 398440 - RNA, 23 nt, Artificial Sequence
  Synthetic
gguucuuaaacugaaacaagugu

SEQ ID NO: 398441 - RNA, 24 nt, Artificial Sequence
  Synthetic
ugguucuuaaacugaaacaagugu

SEQ ID NO: 398442 - RNA, 18 nt, Artificial Sequence
  Synthetic
gauaccaugagcaagugu

SEQ ID NO: 398443 - RNA, 19 nt, Artificial Sequence
  Synthetic
ggauaccaugagcaagugu

SEQ ID NO: 398444 - RNA, 20 nt, Artificial Sequence
  Synthetic
cggauaccaugagcaagugu

SEQ ID NO: 398445 - RNA, 21 nt, Artificial Sequence
  Synthetic
acggauaccaugagcaagugu

SEQ ID NO: 398446 - RNA, 22 nt, Artificial Sequence
  Synthetic
uacggauaccaugagcaagugu

SEQ ID NO: 398447 - RNA, 23 nt, Artificial Sequence
  Synthetic
cuacggauaccaugagcaagugu

SEQ ID NO: 398448 - RNA, 24 nt, Artificial Sequence
  Synthetic
gcuacggauaccaugagcaagugu

SEQ ID NO: 398449 - RNA, 18 nt, Artificial Sequence
  Synthetic
agagacugaggcaagugu

SEQ ID NO: 398450 - RNA, 19 nt, Artificial Sequence
  Synthetic
aagagacugaggcaagugu

SEQ ID NO: 398451 - RNA, 20 nt, Artificial Sequence
  Synthetic
gaagagacugaggcaagugu

SEQ ID NO: 398452 - RNA, 21 nt, Artificial Sequence
  Synthetic
agaagagacugaggcaagugu

SEQ ID NO: 398453 - RNA, 22 nt, Artificial Sequence
  Synthetic
aagaagagacugaggcaagugu

SEQ ID NO: 398454 - RNA, 23 nt, Artificial Sequence
  Synthetic
gaagaagagacugaggcaagugu

SEQ ID NO: 398455 - RNA, 24 nt, Artificial Sequence
  Synthetic
agaagaagagacugaggcaagugu

SEQ ID NO: 398456 - RNA, 18 nt, Artificial Sequence
  Synthetic
ugaaagacagugaagugu

SEQ ID NO: 398457 - RNA, 19 nt, Artificial Sequence
  Synthetic
uugaaagacagugaagugu

SEQ ID NO: 398458 - RNA, 20 nt, Artificial Sequence
  Synthetic
guugaaagacagugaagugu

SEQ ID NO: 398459 - RNA, 21 nt, Artificial Sequence
  Synthetic
aguugaaagacagugaagugu

SEQ ID NO: 398460 - RNA, 22 nt, Artificial Sequence
  Synthetic
gaguugaaagacagugaagugu

SEQ ID NO: 398461 - RNA, 23 nt, Artificial Sequence
  Synthetic
ggaguugaaagacagugaagugu

SEQ ID NO: 398462 - RNA, 24 nt, Artificial Sequence
  Synthetic
uggaguugaaagacagugaagugu

SEQ ID NO: 398463 - RNA, 18 nt, Artificial Sequence
  Synthetic
cuggaaaaugugaagugu

SEQ ID NO: 398464 - RNA, 19 nt, Artificial Sequence
  Synthetic
ucuggaaaaugugaagugu

SEQ ID NO: 398465 - RNA, 20 nt, Artificial Sequence
  Synthetic
uucuggaaaaugugaagugu

SEQ ID NO: 398466 - RNA, 21 nt, Artificial Sequence
  Synthetic
auucuggaaaaugugaagugu

SEQ ID NO: 398467 - RNA, 22 nt, Artificial Sequence
  Synthetic
cauucuggaaaaugugaagugu

SEQ ID NO: 398468 - RNA, 23 nt, Artificial Sequence
  Synthetic
ccauucuggaaaaugugaagugu

SEQ ID NO: 398469 - RNA, 24 nt, Artificial Sequence
  Synthetic
uccauucuggaaaaugugaagugu

SEQ ID NO: 398470 - RNA, 18 nt, Artificial Sequence
  Synthetic
uuuucucuuucuaagugu

SEQ ID NO: 398471 - RNA, 19 nt, Artificial Sequence
  Synthetic
uuuuucucuuucuaagugu

SEQ ID NO: 398472 - RNA, 20 nt, Artificial Sequence
  Synthetic
guuuuucucuuucuaagugu

SEQ ID NO: 398473 - RNA, 21 nt, Artificial Sequence
  Synthetic
cguuuuucucuuucuaagugu

SEQ ID NO: 398474 - RNA, 22 nt, Artificial Sequence
  Synthetic
acguuuuucucuuucuaagugu

SEQ ID NO: 398475 - RNA, 23 nt, Artificial Sequence
  Synthetic
gacguuuuucucuuucuaagugu

SEQ ID NO: 398476 - RNA, 24 nt, Artificial Sequence
  Synthetic
ggacguuuuucucuuucuaagugu

SEQ ID NO: 398477 - RNA, 18 nt, Artificial Sequence
  Synthetic
agcugagagcuuaagugu

SEQ ID NO: 398478 - RNA, 19 nt, Artificial Sequence
  Synthetic
uagcugagagcuuaagugu

SEQ ID NO: 398479 - RNA, 20 nt, Artificial Sequence
  Synthetic
guagcugagagcuuaagugu

SEQ ID NO: 398480 - RNA, 21 nt, Artificial Sequence
  Synthetic
gguagcugagagcuuaagugu

SEQ ID NO: 398481 - RNA, 22 nt, Artificial Sequence
  Synthetic
ggguagcugagagcuuaagugu

SEQ ID NO: 398482 - RNA, 23 nt, Artificial Sequence
  Synthetic
aggguagcugagagcuuaagugu

SEQ ID NO: 398483 - RNA, 24 nt, Artificial Sequence
  Synthetic
gaggguagcugagagcuuaagugu

SEQ ID NO: 398484 - RNA, 18 nt, Artificial Sequence
  Synthetic
auuauaguucuuaagugu

SEQ ID NO: 398485 - RNA, 19 nt, Artificial Sequence
  Synthetic
uauuauaguucuuaagugu

SEQ ID NO: 398486 - RNA, 20 nt, Artificial Sequence
  Synthetic
auauuauaguucuuaagugu

SEQ ID NO: 398487 - RNA, 21 nt, Artificial Sequence
  Synthetic
uauauuauaguucuuaagugu

SEQ ID NO: 398488 - RNA, 22 nt, Artificial Sequence
  Synthetic
cuauauuauaguucuuaagugu

SEQ ID NO: 398489 - RNA, 23 nt, Artificial Sequence
  Synthetic
gcuauauuauaguucuuaagugu

SEQ ID NO: 398490 - RNA, 24 nt, Artificial Sequence
  Synthetic
ugcuauauuauaguucuuaagugu

SEQ ID NO: 398491 - RNA, 18 nt, Artificial Sequence
  Synthetic
ugucuuuguuaacagugu

SEQ ID NO: 398492 - RNA, 19 nt, Artificial Sequence
  Synthetic
augucuuuguuaacagugu

SEQ ID NO: 398493 - RNA, 20 nt, Artificial Sequence
  Synthetic
uaugucuuuguuaacagugu

SEQ ID NO: 398494 - RNA, 21 nt, Artificial Sequence
  Synthetic
auaugucuuuguuaacagugu

SEQ ID NO: 398495 - RNA, 22 nt, Artificial Sequence
  Synthetic
gauaugucuuuguuaacagugu

SEQ ID NO: 398496 - RNA, 23 nt, Artificial Sequence
  Synthetic
agauaugucuuuguuaacagugu

SEQ ID NO: 398497 - RNA, 24 nt, Artificial Sequence
  Synthetic
cagauaugucuuuguuaacagugu

SEQ ID NO: 398498 - RNA, 18 nt, Artificial Sequence
  Synthetic
agggauggaauacagugu

SEQ ID NO: 398499 - RNA, 19 nt, Artificial Sequence
  Synthetic
uagggauggaauacagugu

SEQ ID NO: 398500 - RNA, 20 nt, Artificial Sequence
  Synthetic
uuagggauggaauacagugu

SEQ ID NO: 398501 - RNA, 21 nt, Artificial Sequence
  Synthetic
cuuagggauggaauacagugu

SEQ ID NO: 398502 - RNA, 22 nt, Artificial Sequence
  Synthetic
ucuuagggauggaauacagugu

SEQ ID NO: 398503 - RNA, 23 nt, Artificial Sequence
  Synthetic
uucuuagggauggaauacagugu

SEQ ID NO: 398504 - RNA, 24 nt, Artificial Sequence
  Synthetic
uuucuuagggauggaauacagugu

SEQ ID NO: 398505 - RNA, 18 nt, Artificial Sequence
  Synthetic
uacuagaauauacagugu

SEQ ID NO: 398506 - RNA, 19 nt, Artificial Sequence
  Synthetic
auacuagaauauacagugu

SEQ ID NO: 398507 - RNA, 20 nt, Artificial Sequence
  Synthetic
aauacuagaauauacagugu

SEQ ID NO: 398508 - RNA, 21 nt, Artificial Sequence
  Synthetic
caauacuagaauauacagugu

SEQ ID NO: 398509 - RNA, 22 nt, Artificial Sequence
  Synthetic
gcaauacuagaauauacagugu

SEQ ID NO: 398510 - RNA, 23 nt, Artificial Sequence
  Synthetic
ugcaauacuagaauauacagugu

SEQ ID NO: 398511 - RNA, 24 nt, Artificial Sequence
  Synthetic
cugcaauacuagaauauacagugu

SEQ ID NO: 398512 - RNA, 18 nt, Artificial Sequence
  Synthetic
ccaggcacauuccagugu

SEQ ID NO: 398513 - RNA, 19 nt, Artificial Sequence
  Synthetic
uccaggcacauuccagugu

SEQ ID NO: 398514 - RNA, 20 nt, Artificial Sequence
  Synthetic
cuccaggcacauuccagugu

SEQ ID NO: 398515 - RNA, 21 nt, Artificial Sequence
  Synthetic
ccuccaggcacauuccagugu

SEQ ID NO: 398516 - RNA, 22 nt, Artificial Sequence
  Synthetic
uccuccaggcacauuccagugu

SEQ ID NO: 398517 - RNA, 23 nt, Artificial Sequence
  Synthetic
cuccuccaggcacauuccagugu

SEQ ID NO: 398518 - RNA, 24 nt, Artificial Sequence
  Synthetic
acuccuccaggcacauuccagugu

SEQ ID NO: 398519 - RNA, 18 nt, Artificial Sequence
  Synthetic
uagcaaggauuccagugu

SEQ ID NO: 398520 - RNA, 19 nt, Artificial Sequence
  Synthetic
auagcaaggauuccagugu

SEQ ID NO: 398521 - RNA, 20 nt, Artificial Sequence
  Synthetic
aauagcaaggauuccagugu

SEQ ID NO: 398522 - RNA, 21 nt, Artificial Sequence
  Synthetic
aaauagcaaggauuccagugu

SEQ ID NO: 398523 - RNA, 22 nt, Artificial Sequence
  Synthetic
caaauagcaaggauuccagugu

SEQ ID NO: 398524 - RNA, 23 nt, Artificial Sequence
  Synthetic
acaaauagcaaggauuccagugu

SEQ ID NO: 398525 - RNA, 24 nt, Artificial Sequence
  Synthetic
aacaaauagcaaggauuccagugu

SEQ ID NO: 398526 - RNA, 18 nt, Artificial Sequence
  Synthetic
aauuucagaaggcagugu

SEQ ID NO: 398527 - RNA, 19 nt, Artificial Sequence
  Synthetic
gaauuucagaaggcagugu

SEQ ID NO: 398528 - RNA, 20 nt, Artificial Sequence
  Synthetic
ugaauuucagaaggcagugu

SEQ ID NO: 398529 - RNA, 21 nt, Artificial Sequence
  Synthetic
augaauuucagaaggcagugu

SEQ ID NO: 398530 - RNA, 22 nt, Artificial Sequence
  Synthetic
uaugaauuucagaaggcagugu

SEQ ID NO: 398531 - RNA, 23 nt, Artificial Sequence
  Synthetic
cuaugaauuucagaaggcagugu

SEQ ID NO: 398532 - RNA, 24 nt, Artificial Sequence
  Synthetic
gcuaugaauuucagaaggcagugu

SEQ ID NO: 398533 - RNA, 18 nt, Artificial Sequence
  Synthetic
ggaaguggcuggcagugu

SEQ ID NO: 398534 - RNA, 19 nt, Artificial Sequence
  Synthetic
aggaaguggcuggcagugu

SEQ ID NO: 398535 - RNA, 20 nt, Artificial Sequence
  Synthetic
aaggaaguggcuggcagugu

SEQ ID NO: 398536 - RNA, 21 nt, Artificial Sequence
  Synthetic
caaggaaguggcuggcagugu

SEQ ID NO: 398537 - RNA, 22 nt, Artificial Sequence
  Synthetic
acaaggaaguggcuggcagugu

SEQ ID NO: 398538 - RNA, 23 nt, Artificial Sequence
  Synthetic
gacaaggaaguggcuggcagugu

SEQ ID NO: 398539 - RNA, 24 nt, Artificial Sequence
  Synthetic
agacaaggaaguggcuggcagugu

SEQ ID NO: 398540 - RNA, 18 nt, Artificial Sequence
  Synthetic
ccacugaauaaucagugu

SEQ ID NO: 398541 - RNA, 19 nt, Artificial Sequence
  Synthetic
accacugaauaaucagugu

SEQ ID NO: 398542 - RNA, 20 nt, Artificial Sequence
  Synthetic
gaccacugaauaaucagugu

SEQ ID NO: 398543 - RNA, 21 nt, Artificial Sequence
  Synthetic
ugaccacugaauaaucagugu

SEQ ID NO: 398544 - RNA, 22 nt, Artificial Sequence
  Synthetic
augaccacugaauaaucagugu

SEQ ID NO: 398545 - RNA, 23 nt, Artificial Sequence
  Synthetic
aaugaccacugaauaaucagugu

SEQ ID NO: 398546 - RNA, 24 nt, Artificial Sequence
  Synthetic
uaaugaccacugaauaaucagugu

SEQ ID NO: 398547 - RNA, 18 nt, Artificial Sequence
  Synthetic
uuuugcuacgcucagugu

SEQ ID NO: 398548 - RNA, 19 nt, Artificial Sequence
  Synthetic
cuuuugcuacgcucagugu

SEQ ID NO: 398549 - RNA, 20 nt, Artificial Sequence
  Synthetic
ccuuuugcuacgcucagugu

SEQ ID NO: 398550 - RNA, 21 nt, Artificial Sequence
  Synthetic
uccuuuugcuacgcucagugu

SEQ ID NO: 398551 - RNA, 22 nt, Artificial Sequence
  Synthetic
cuccuuuugcuacgcucagugu

SEQ ID NO: 398552 - RNA, 23 nt, Artificial Sequence
  Synthetic
ucuccuuuugcuacgcucagugu

SEQ ID NO: 398553 - RNA, 24 nt, Artificial Sequence
  Synthetic
gucuccuuuugcuacgcucagugu

SEQ ID NO: 398554 - RNA, 18 nt, Artificial Sequence
  Synthetic
uuacaggcacuucagugu

SEQ ID NO: 398555 - RNA, 19 nt, Artificial Sequence
  Synthetic
auuacaggcacuucagugu

SEQ ID NO: 398556 - RNA, 20 nt, Artificial Sequence
  Synthetic
cauuacaggcacuucagugu

SEQ ID NO: 398557 - RNA, 21 nt, Artificial Sequence
  Synthetic
ucauuacaggcacuucagugu

SEQ ID NO: 398558 - RNA, 22 nt, Artificial Sequence
  Synthetic
gucauuacaggcacuucagugu

SEQ ID NO: 398559 - RNA, 23 nt, Artificial Sequence
  Synthetic
agucauuacaggcacuucagugu

SEQ ID NO: 398560 - RNA, 24 nt, Artificial Sequence
  Synthetic
uagucauuacaggcacuucagugu

SEQ ID NO: 398561 - RNA, 18 nt, Artificial Sequence
  Synthetic
ucaaaaugcuuucagugu

SEQ ID NO: 398562 - RNA, 19 nt, Artificial Sequence
  Synthetic
aucaaaaugcuuucagugu

SEQ ID NO: 398563 - RNA, 20 nt, Artificial Sequence
  Synthetic
aaucaaaaugcuuucagugu

SEQ ID NO: 398564 - RNA, 21 nt, Artificial Sequence
  Synthetic
caaucaaaaugcuuucagugu

SEQ ID NO: 398565 - RNA, 22 nt, Artificial Sequence
  Synthetic
ucaaucaaaaugcuuucagugu

SEQ ID NO: 398566 - RNA, 23 nt, Artificial Sequence
  Synthetic
aucaaucaaaaugcuuucagugu

SEQ ID NO: 398567 - RNA, 24 nt, Artificial Sequence
  Synthetic
caucaaucaaaaugcuuucagugu

SEQ ID NO: 398568 - RNA, 18 nt, Artificial Sequence
  Synthetic
uaagaacagaaagagugu

SEQ ID NO: 398569 - RNA, 19 nt, Artificial Sequence
  Synthetic
cuaagaacagaaagagugu

SEQ ID NO: 398570 - RNA, 20 nt, Artificial Sequence
  Synthetic
gcuaagaacagaaagagugu

SEQ ID NO: 398571 - RNA, 21 nt, Artificial Sequence
  Synthetic
ugcuaagaacagaaagagugu

SEQ ID NO: 398572 - RNA, 22 nt, Artificial Sequence
  Synthetic
gugcuaagaacagaaagagugu

SEQ ID NO: 398573 - RNA, 23 nt, Artificial Sequence
  Synthetic
ugugcuaagaacagaaagagugu

SEQ ID NO: 398574 - RNA, 24 nt, Artificial Sequence
  Synthetic
augugcuaagaacagaaagagugu

SEQ ID NO: 398575 - RNA, 18 nt, Artificial Sequence
  Synthetic
caacucaguaaagagugu

SEQ ID NO: 398576 - RNA, 19 nt, Artificial Sequence
  Synthetic
gcaacucaguaaagagugu

SEQ ID NO: 398577 - RNA, 20 nt, Artificial Sequence
  Synthetic
ugcaacucaguaaagagugu

SEQ ID NO: 398578 - RNA, 21 nt, Artificial Sequence
  Synthetic
cugcaacucaguaaagagugu

SEQ ID NO: 398579 - RNA, 22 nt, Artificial Sequence
  Synthetic
ccugcaacucaguaaagagugu

SEQ ID NO: 398580 - RNA, 23 nt, Artificial Sequence
  Synthetic
accugcaacucaguaaagagugu

SEQ ID NO: 398581 - RNA, 24 nt, Artificial Sequence
  Synthetic
gaccugcaacucaguaaagagugu

SEQ ID NO: 398582 - RNA, 18 nt, Artificial Sequence
  Synthetic
agcuaagccugagagugu

SEQ ID NO: 398583 - RNA, 19 nt, Artificial Sequence
  Synthetic
gagcuaagccugagagugu

SEQ ID NO: 398584 - RNA, 20 nt, Artificial Sequence
  Synthetic
agagcuaagccugagagugu

SEQ ID NO: 398585 - RNA, 21 nt, Artificial Sequence
  Synthetic
aagagcuaagccugagagugu

SEQ ID NO: 398586 - RNA, 22 nt, Artificial Sequence
  Synthetic
aaagagcuaagccugagagugu

SEQ ID NO: 398587 - RNA, 23 nt, Artificial Sequence
  Synthetic
uaaagagcuaagccugagagugu

SEQ ID NO: 398588 - RNA, 24 nt, Artificial Sequence
  Synthetic
uuaaagagcuaagccugagagugu

SEQ ID NO: 398589 - RNA, 18 nt, Artificial Sequence
  Synthetic
aaagugaagugggagugu

SEQ ID NO: 398590 - RNA, 19 nt, Artificial Sequence
  Synthetic
aaaagugaagugggagugu

SEQ ID NO: 398591 - RNA, 20 nt, Artificial Sequence
  Synthetic
gaaaagugaagugggagugu

SEQ ID NO: 398592 - RNA, 21 nt, Artificial Sequence
  Synthetic
agaaaagugaagugggagugu

SEQ ID NO: 398593 - RNA, 22 nt, Artificial Sequence
  Synthetic
aagaaaagugaagugggagugu

SEQ ID NO: 398594 - RNA, 23 nt, Artificial Sequence
  Synthetic
aaagaaaagugaagugggagugu

SEQ ID NO: 398595 - RNA, 24 nt, Artificial Sequence
  Synthetic
aaaagaaaagugaagugggagugu

SEQ ID NO: 398596 - RNA, 18 nt, Artificial Sequence
  Synthetic
aacuggauaccugagugu

SEQ ID NO: 398597 - RNA, 19 nt, Artificial Sequence
  Synthetic
aaacuggauaccugagugu

SEQ ID NO: 398598 - RNA, 20 nt, Artificial Sequence
  Synthetic
gaaacuggauaccugagugu

SEQ ID NO: 398599 - RNA, 21 nt, Artificial Sequence
  Synthetic
agaaacuggauaccugagugu

SEQ ID NO: 398600 - RNA, 22 nt, Artificial Sequence
  Synthetic
cagaaacuggauaccugagugu

SEQ ID NO: 398601 - RNA, 23 nt, Artificial Sequence
  Synthetic
ucagaaacuggauaccugagugu

SEQ ID NO: 398602 - RNA, 24 nt, Artificial Sequence
  Synthetic
uucagaaacuggauaccugagugu

SEQ ID NO: 398603 - RNA, 18 nt, Artificial Sequence
  Synthetic
cauggaacuucugagugu

SEQ ID NO: 398604 - RNA, 19 nt, Artificial Sequence
  Synthetic
ccauggaacuucugagugu

SEQ ID NO: 398605 - RNA, 20 nt, Artificial Sequence
  Synthetic
accauggaacuucugagugu

SEQ ID NO: 398606 - RNA, 21 nt, Artificial Sequence
  Synthetic
aaccauggaacuucugagugu

SEQ ID NO: 398607 - RNA, 22 nt, Artificial Sequence
  Synthetic
aaaccauggaacuucugagugu

SEQ ID NO: 398608 - RNA, 23 nt, Artificial Sequence
  Synthetic
caaaccauggaacuucugagugu

SEQ ID NO: 398609 - RNA, 24 nt, Artificial Sequence
  Synthetic
ucaaaccauggaacuucugagugu

SEQ ID NO: 398610 - RNA, 18 nt, Artificial Sequence
  Synthetic
cuuaccuaaggugagugu

SEQ ID NO: 398611 - RNA, 19 nt, Artificial Sequence
  Synthetic
acuuaccuaaggugagugu

SEQ ID NO: 398612 - RNA, 20 nt, Artificial Sequence
  Synthetic
uacuuaccuaaggugagugu

SEQ ID NO: 398613 - RNA, 21 nt, Artificial Sequence
  Synthetic
uuacuuaccuaaggugagugu

SEQ ID NO: 398614 - RNA, 22 nt, Artificial Sequence
  Synthetic
uuuacuuaccuaaggugagugu

SEQ ID NO: 398615 - RNA, 23 nt, Artificial Sequence
  Synthetic
uuuuacuuaccuaaggugagugu

SEQ ID NO: 398616 - RNA, 24 nt, Artificial Sequence
  Synthetic
uuuuuacuuaccuaaggugagugu

SEQ ID NO: 398617 - RNA, 18 nt, Artificial Sequence
  Synthetic
uuguaauauggugagugu

SEQ ID NO: 398618 - RNA, 19 nt, Artificial Sequence
  Synthetic
guuguaauauggugagugu

SEQ ID NO: 398619 - RNA, 20 nt, Artificial Sequence
  Synthetic
gguuguaauauggugagugu

SEQ ID NO: 398620 - RNA, 21 nt, Artificial Sequence
  Synthetic
agguuguaauauggugagugu

SEQ ID NO: 398621 - RNA, 22 nt, Artificial Sequence
  Synthetic
aagguuguaauauggugagugu

SEQ ID NO: 398622 - RNA, 23 nt, Artificial Sequence
  Synthetic
caagguuguaauauggugagugu

SEQ ID NO: 398623 - RNA, 24 nt, Artificial Sequence
  Synthetic
acaagguuguaauauggugagugu

SEQ ID NO: 398624 - RNA, 18 nt, Artificial Sequence
  Synthetic
uccuauucaacauagugu

SEQ ID NO: 398625 - RNA, 19 nt, Artificial Sequence
  Synthetic
cuccuauucaacauagugu

SEQ ID NO: 398626 - RNA, 20 nt, Artificial Sequence
  Synthetic
acuccuauucaacauagugu

SEQ ID NO: 398627 - RNA, 20 nt, Artificial Sequence
  Synthetic
gcuccuauucaacauagugu

SEQ ID NO: 398628 - RNA, 21 nt, Artificial Sequence
  Synthetic
cgcuccuauucaacauagugu

SEQ ID NO: 398629 - RNA, 22 nt, Artificial Sequence
  Synthetic
ccgcuccuauucaacauagugu

SEQ ID NO: 398630 - RNA, 23 nt, Artificial Sequence
  Synthetic
accgcuccuauucaacauagugu

SEQ ID NO: 398631 - RNA, 24 nt, Artificial Sequence
  Synthetic
caccgcuccuauucaacauagugu

SEQ ID NO: 398632 - RNA, 18 nt, Artificial Sequence
  Synthetic
gaggcauccuuguagugu

SEQ ID NO: 398633 - RNA, 19 nt, Artificial Sequence
  Synthetic
ggaggcauccuuguagugu

SEQ ID NO: 398634 - RNA, 20 nt, Artificial Sequence
  Synthetic
aggaggcauccuuguagugu

SEQ ID NO: 398635 - RNA, 21 nt, Artificial Sequence
  Synthetic
caggaggcauccuuguagugu

SEQ ID NO: 398636 - RNA, 22 nt, Artificial Sequence
  Synthetic
acaggaggcauccuuguagugu

SEQ ID NO: 398637 - RNA, 23 nt, Artificial Sequence
  Synthetic
cacaggaggcauccuuguagugu

SEQ ID NO: 398638 - RNA, 24 nt, Artificial Sequence
  Synthetic
acacaggaggcauccuuguagugu

SEQ ID NO: 398639 - RNA, 18 nt, Artificial Sequence
  Synthetic
ucuggcuaaacuuagugu

SEQ ID NO: 398640 - RNA, 19 nt, Artificial Sequence
  Synthetic
gucuggcuaaacuuagugu

SEQ ID NO: 398641 - RNA, 20 nt, Artificial Sequence
  Synthetic
agucuggcuaaacuuagugu

SEQ ID NO: 398642 - RNA, 21 nt, Artificial Sequence
  Synthetic
aagucuggcuaaacuuagugu

SEQ ID NO: 398643 - RNA, 22 nt, Artificial Sequence
  Synthetic
gaagucuggcuaaacuuagugu

SEQ ID NO: 398644 - RNA, 23 nt, Artificial Sequence
  Synthetic
ugaagucuggcuaaacuuagugu

SEQ ID NO: 398645 - RNA, 24 nt, Artificial Sequence
  Synthetic
gugaagucuggcuaaacuuagugu

SEQ ID NO: 398646 - RNA, 18 nt, Artificial Sequence
  Synthetic
gauacucaagcuuagugu

SEQ ID NO: 398647 - RNA, 19 nt, Artificial Sequence
  Synthetic
ggauacucaagcuuagugu

SEQ ID NO: 398648 - RNA, 20 nt, Artificial Sequence
  Synthetic
gggauacucaagcuuagugu

SEQ ID NO: 398649 - RNA, 21 nt, Artificial Sequence
  Synthetic
ugggauacucaagcuuagugu

SEQ ID NO: 398650 - RNA, 22 nt, Artificial Sequence
  Synthetic
cugggauacucaagcuuagugu

SEQ ID NO: 398651 - RNA, 23 nt, Artificial Sequence
  Synthetic
ccugggauacucaagcuuagugu

SEQ ID NO: 398652 - RNA, 24 nt, Artificial Sequence
  Synthetic
accugggauacucaagcuuagugu

SEQ ID NO: 398653 - RNA, 18 nt, Artificial Sequence
  Synthetic
uacuuuauagcuuagugu

SEQ ID NO: 398654 - RNA, 19 nt, Artificial Sequence
  Synthetic
guacuuuauagcuuagugu

SEQ ID NO: 398655 - RNA, 20 nt, Artificial Sequence
  Synthetic
uguacuuuauagcuuagugu

SEQ ID NO: 398656 - RNA, 21 nt, Artificial Sequence
  Synthetic
uuguacuuuauagcuuagugu

SEQ ID NO: 398657 - RNA, 22 nt, Artificial Sequence
  Synthetic
uuuguacuuuauagcuuagugu

SEQ ID NO: 398658 - RNA, 23 nt, Artificial Sequence
  Synthetic
auuuguacuuuauagcuuagugu

SEQ ID NO: 398659 - RNA, 24 nt, Artificial Sequence
  Synthetic
gauuuguacuuuauagcuuagugu

SEQ ID NO: 398660 - RNA, 18 nt, Artificial Sequence
  Synthetic
uucuuggggucaacgugu

SEQ ID NO: 398661 - RNA, 19 nt, Artificial Sequence
  Synthetic
guucuuggggucaacgugu

SEQ ID NO: 398662 - RNA, 20 nt, Artificial Sequence
  Synthetic
uguucuuggggucaacgugu

SEQ ID NO: 398663 - RNA, 21 nt, Artificial Sequence
  Synthetic
guguucuuggggucaacgugu

SEQ ID NO: 398664 - RNA, 22 nt, Artificial Sequence
  Synthetic
aguguucuuggggucaacgugu

SEQ ID NO: 398665 - RNA, 23 nt, Artificial Sequence
  Synthetic
gaguguucuuggggucaacgugu

SEQ ID NO: 398666 - RNA, 24 nt, Artificial Sequence
  Synthetic
ggaguguucuuggggucaacgugu

SEQ ID NO: 398667 - RNA, 18 nt, Artificial Sequence
  Synthetic
gucauauucugaacgugu

SEQ ID NO: 398668 - RNA, 19 nt, Artificial Sequence
  Synthetic
agucauauucugaacgugu

SEQ ID NO: 398669 - RNA, 20 nt, Artificial Sequence
  Synthetic
uagucauauucugaacgugu

SEQ ID NO: 398670 - RNA, 21 nt, Artificial Sequence
  Synthetic
auagucauauucugaacgugu

SEQ ID NO: 398671 - RNA, 22 nt, Artificial Sequence
  Synthetic
aauagucauauucugaacgugu

SEQ ID NO: 398672 - RNA, 23 nt, Artificial Sequence
  Synthetic
aaauagucauauucugaacgugu

SEQ ID NO: 398673 - RNA, 24 nt, Artificial Sequence
  Synthetic
gaaauagucauauucugaacgugu

SEQ ID NO: 398674 - RNA, 18 nt, Artificial Sequence
  Synthetic
acaccauaagcuacgugu

SEQ ID NO: 398675 - RNA, 19 nt, Artificial Sequence
  Synthetic
gacaccauaagcuacgugu

SEQ ID NO: 398676 - RNA, 20 nt, Artificial Sequence
  Synthetic
ugacaccauaagcuacgugu

SEQ ID NO: 398677 - RNA, 21 nt, Artificial Sequence
  Synthetic
augacaccauaagcuacgugu

SEQ ID NO: 398678 - RNA, 22 nt, Artificial Sequence
  Synthetic
caugacaccauaagcuacgugu

SEQ ID NO: 398679 - RNA, 23 nt, Artificial Sequence
  Synthetic
ccaugacaccauaagcuacgugu

SEQ ID NO: 398680 - RNA, 24 nt, Artificial Sequence
  Synthetic
cccaugacaccauaagcuacgugu

SEQ ID NO: 398681 - RNA, 18 nt, Artificial Sequence
  Synthetic
aauaaacauuuaccgugu

SEQ ID NO: 398682 - RNA, 19 nt, Artificial Sequence
  Synthetic
aaauaaacauuuaccgugu

SEQ ID NO: 398683 - RNA, 20 nt, Artificial Sequence
  Synthetic
uaaauaaacauuuaccgugu

SEQ ID NO: 398684 - RNA, 21 nt, Artificial Sequence
  Synthetic
uuaaauaaacauuuaccgugu

SEQ ID NO: 398685 - RNA, 22 nt, Artificial Sequence
  Synthetic
cuuaaauaaacauuuaccgugu

SEQ ID NO: 398686 - RNA, 23 nt, Artificial Sequence
  Synthetic
ucuuaaauaaacauuuaccgugu

SEQ ID NO: 398687 - RNA, 24 nt, Artificial Sequence
  Synthetic
gucuuaaauaaacauuuaccgugu

SEQ ID NO: 398688 - RNA, 18 nt, Artificial Sequence
  Synthetic
uaauugaguaguccgugu

SEQ ID NO: 398689 - RNA, 19 nt, Artificial Sequence
  Synthetic
uuaauugaguaguccgugu

SEQ ID NO: 398690 - RNA, 20 nt, Artificial Sequence
  Synthetic
auuaauugaguaguccgugu

SEQ ID NO: 398691 - RNA, 21 nt, Artificial Sequence
  Synthetic
cauuaauugaguaguccgugu

SEQ ID NO: 398692 - RNA, 22 nt, Artificial Sequence
  Synthetic
ucauuaauugaguaguccgugu

SEQ ID NO: 398693 - RNA, 23 nt, Artificial Sequence
  Synthetic
gucauuaauugaguaguccgugu

SEQ ID NO: 398694 - RNA, 24 nt, Artificial Sequence
  Synthetic
agucauuaauugaguaguccgugu

SEQ ID NO: 398695 - RNA, 18 nt, Artificial Sequence
  Synthetic
uauuggguaacugcgugu

SEQ ID NO: 398696 - RNA, 19 nt, Artificial Sequence
  Synthetic
uuauuggguaacugcgugu

SEQ ID NO: 398697 - RNA, 20 nt, Artificial Sequence
  Synthetic
auuauuggguaacugcgugu

SEQ ID NO: 398698 - RNA, 21 nt, Artificial Sequence
  Synthetic
uauuauuggguaacugcgugu

SEQ ID NO: 398699 - RNA, 22 nt, Artificial Sequence
  Synthetic
cuauuauuggguaacugcgugu

SEQ ID NO: 398700 - RNA, 23 nt, Artificial Sequence
  Synthetic
ucuauuauuggguaacugcgugu

SEQ ID NO: 398701 - RNA, 24 nt, Artificial Sequence
  Synthetic
uucuauuauuggguaacugcgugu

SEQ ID NO: 398702 - RNA, 18 nt, Artificial Sequence
  Synthetic
uguaacagaaaaaggugu

SEQ ID NO: 398703 - RNA, 19 nt, Artificial Sequence
  Synthetic
auguaacagaaaaaggugu

SEQ ID NO: 398704 - RNA, 20 nt, Artificial Sequence
  Synthetic
aauguaacagaaaaaggugu

SEQ ID NO: 398705 - RNA, 21 nt, Artificial Sequence
  Synthetic
caauguaacagaaaaaggugu

SEQ ID NO: 398706 - RNA, 22 nt, Artificial Sequence
  Synthetic
ucaauguaacagaaaaaggugu

SEQ ID NO: 398707 - RNA, 23 nt, Artificial Sequence
  Synthetic
uucaauguaacagaaaaaggugu

SEQ ID NO: 398708 - RNA, 24 nt, Artificial Sequence
  Synthetic
uuucaauguaacagaaaaaggugu

SEQ ID NO: 398709 - RNA, 18 nt, Artificial Sequence
  Synthetic
ucaaaggcugcaaggugu

SEQ ID NO: 398710 - RNA, 19 nt, Artificial Sequence
  Synthetic
uucaaaggcugcaaggugu

SEQ ID NO: 398711 - RNA, 20 nt, Artificial Sequence
  Synthetic
uuucaaaggcugcaaggugu

SEQ ID NO: 398712 - RNA, 21 nt, Artificial Sequence
  Synthetic
uuuucaaaggcugcaaggugu

SEQ ID NO: 398713 - RNA, 22 nt, Artificial Sequence
  Synthetic
cuuuucaaaggcugcaaggugu

SEQ ID NO: 398714 - RNA, 23 nt, Artificial Sequence
  Synthetic
gcuuuucaaaggcugcaaggugu

SEQ ID NO: 398715 - RNA, 24 nt, Artificial Sequence
  Synthetic
ugcuuuucaaaggcugcaaggugu

SEQ ID NO: 398716 - RNA, 18 nt, Artificial Sequence
  Synthetic
agucugagaucaaggugu

SEQ ID NO: 398717 - RNA, 19 nt, Artificial Sequence
  Synthetic
aagucugagaucaaggugu

SEQ ID NO: 398718 - RNA, 20 nt, Artificial Sequence
  Synthetic
gaagucugagaucaaggugu

SEQ ID NO: 398719 - RNA, 21 nt, Artificial Sequence
  Synthetic
agaagucugagaucaaggugu

SEQ ID NO: 398720 - RNA, 22 nt, Artificial Sequence
  Synthetic
uagaagucugagaucaaggugu

SEQ ID NO: 398721 - RNA, 23 nt, Artificial Sequence
  Synthetic
auagaagucugagaucaaggugu

SEQ ID NO: 398722 - RNA, 24 nt, Artificial Sequence
  Synthetic
gauagaagucugagaucaaggugu

SEQ ID NO: 398723 - RNA, 21 nt, Artificial Sequence
  Synthetic
auuaauuuuuguauaaggugu

SEQ ID NO: 398724 - RNA, 22 nt, Artificial Sequence
  Synthetic
aauuaauuuuuguauaaggugu

SEQ ID NO: 398725 - RNA, 23 nt, Artificial Sequence
  Synthetic
uaauuaauuuuuguauaaggugu

SEQ ID NO: 398726 - RNA, 24 nt, Artificial Sequence
  Synthetic
uuaauuaauuuuuguauaaggugu

SEQ ID NO: 398727 - RNA, 21 nt, Artificial Sequence
  Synthetic
guuaauuuuuguauaaggugu

SEQ ID NO: 398728 - RNA, 22 nt, Artificial Sequence
  Synthetic
aguuaauuuuuguauaaggugu

SEQ ID NO: 398729 - RNA, 23 nt, Artificial Sequence
  Synthetic
gaguuaauuuuuguauaaggugu

SEQ ID NO: 398730 - RNA, 24 nt, Artificial Sequence
  Synthetic
ugaguuaauuuuuguauaaggugu

SEQ ID NO: 398731 - RNA, 18 nt, Artificial Sequence
  Synthetic
gauuuuuguauaaggugu

SEQ ID NO: 398732 - RNA, 19 nt, Artificial Sequence
  Synthetic
ugauuuuuguauaaggugu

SEQ ID NO: 398733 - RNA, 20 nt, Artificial Sequence
  Synthetic
uugauuuuuguauaaggugu

SEQ ID NO: 398734 - RNA, 18 nt, Artificial Sequence
  Synthetic
gaaaaggaguucaggugu

SEQ ID NO: 398735 - RNA, 19 nt, Artificial Sequence
  Synthetic
ggaaaaggaguucaggugu

SEQ ID NO: 398736 - RNA, 20 nt, Artificial Sequence
  Synthetic
uggaaaaggaguucaggugu

SEQ ID NO: 398737 - RNA, 21 nt, Artificial Sequence
  Synthetic
guggaaaaggaguucaggugu

SEQ ID NO: 398738 - RNA, 22 nt, Artificial Sequence
  Synthetic
uguggaaaaggaguucaggugu

SEQ ID NO: 398739 - RNA, 23 nt, Artificial Sequence
  Synthetic
cuguggaaaaggaguucaggugu

SEQ ID NO: 398740 - RNA, 24 nt, Artificial Sequence
  Synthetic
gcuguggaaaaggaguucaggugu

SEQ ID NO: 398741 - RNA, 18 nt, Artificial Sequence
  Synthetic
uccauuuauaugaggugu

SEQ ID NO: 398742 - RNA, 19 nt, Artificial Sequence
  Synthetic
uuccauuuauaugaggugu

SEQ ID NO: 398743 - RNA, 20 nt, Artificial Sequence
  Synthetic
auuccauuuauaugaggugu

SEQ ID NO: 398744 - RNA, 21 nt, Artificial Sequence
  Synthetic
gauuccauuuauaugaggugu

SEQ ID NO: 398745 - RNA, 22 nt, Artificial Sequence
  Synthetic
ugauuccauuuauaugaggugu

SEQ ID NO: 398746 - RNA, 23 nt, Artificial Sequence
  Synthetic
augauuccauuuauaugaggugu

SEQ ID NO: 398747 - RNA, 24 nt, Artificial Sequence
  Synthetic
aaugauuccauuuauaugaggugu

SEQ ID NO: 398748 - RNA, 18 nt, Artificial Sequence
  Synthetic
uggaauaaauuuaggugu

SEQ ID NO: 398749 - RNA, 19 nt, Artificial Sequence
  Synthetic
auggaauaaauuuaggugu

SEQ ID NO: 398750 - RNA, 20 nt, Artificial Sequence
  Synthetic
aauggaauaaauuuaggugu

SEQ ID NO: 398751 - RNA, 21 nt, Artificial Sequence
  Synthetic
uaauggaauaaauuuaggugu

SEQ ID NO: 398752 - RNA, 22 nt, Artificial Sequence
  Synthetic
auaauggaauaaauuuaggugu

SEQ ID NO: 398753 - RNA, 23 nt, Artificial Sequence
  Synthetic
uauaauggaauaaauuuaggugu

SEQ ID NO: 398754 - RNA, 24 nt, Artificial Sequence
  Synthetic
uuauaauggaauaaauuuaggugu

SEQ ID NO: 398755 - RNA, 18 nt, Artificial Sequence
  Synthetic
aaauaugguuuuaggugu

SEQ ID NO: 398756 - RNA, 19 nt, Artificial Sequence
  Synthetic
gaaauaugguuuuaggugu

SEQ ID NO: 398757 - RNA, 20 nt, Artificial Sequence
  Synthetic
ugaaauaugguuuuaggugu

SEQ ID NO: 398758 - RNA, 21 nt, Artificial Sequence
  Synthetic
augaaauaugguuuuaggugu

SEQ ID NO: 398759 - RNA, 22 nt, Artificial Sequence
  Synthetic
uaugaaauaugguuuuaggugu

SEQ ID NO: 398760 - RNA, 23 nt, Artificial Sequence
  Synthetic
uuaugaaauaugguuuuaggugu

SEQ ID NO: 398761 - RNA, 24 nt, Artificial Sequence
  Synthetic
auuaugaaauaugguuuuaggugu

SEQ ID NO: 398762 - RNA, 18 nt, Artificial Sequence
  Synthetic
agaccagagauacggugu

SEQ ID NO: 398763 - RNA, 19 nt, Artificial Sequence
  Synthetic
uagaccagagauacggugu

SEQ ID NO: 398764 - RNA, 20 nt, Artificial Sequence
  Synthetic
auagaccagagauacggugu

SEQ ID NO: 398765 - RNA, 21 nt, Artificial Sequence
  Synthetic
aauagaccagagauacggugu

SEQ ID NO: 398766 - RNA, 22 nt, Artificial Sequence
  Synthetic
aaauagaccagagauacggugu

SEQ ID NO: 398767 - RNA, 23 nt, Artificial Sequence
  Synthetic
uaaauagaccagagauacggugu

SEQ ID NO: 398768 - RNA, 24 nt, Artificial Sequence
  Synthetic
guaaauagaccagagauacggugu

SEQ ID NO: 398769 - RNA, 18 nt, Artificial Sequence
  Synthetic
acaugugccuuccggugu

SEQ ID NO: 398770 - RNA, 19 nt, Artificial Sequence
  Synthetic
gacaugugccuuccggugu

SEQ ID NO: 398771 - RNA, 20 nt, Artificial Sequence
  Synthetic
agacaugugccuuccggugu

SEQ ID NO: 398772 - RNA, 21 nt, Artificial Sequence
  Synthetic
uagacaugugccuuccggugu

SEQ ID NO: 398773 - RNA, 22 nt, Artificial Sequence
  Synthetic
uuagacaugugccuuccggugu

SEQ ID NO: 398774 - RNA, 23 nt, Artificial Sequence
  Synthetic
uuuagacaugugccuuccggugu

SEQ ID NO: 398775 - RNA, 24 nt, Artificial Sequence
  Synthetic
guuuagacaugugccuuccggugu

SEQ ID NO: 398776 - RNA, 18 nt, Artificial Sequence
  Synthetic
caggauugggcagggugu

SEQ ID NO: 398777 - RNA, 19 nt, Artificial Sequence
  Synthetic
ucaggauugggcagggugu

SEQ ID NO: 398778 - RNA, 20 nt, Artificial Sequence
  Synthetic
cucaggauugggcagggugu

SEQ ID NO: 398779 - RNA, 21 nt, Artificial Sequence
  Synthetic
acucaggauugggcagggugu

SEQ ID NO: 398780 - RNA, 22 nt, Artificial Sequence
  Synthetic
uacucaggauugggcagggugu

SEQ ID NO: 398781 - RNA, 23 nt, Artificial Sequence
  Synthetic
auacucaggauugggcagggugu

SEQ ID NO: 398782 - RNA, 24 nt, Artificial Sequence
  Synthetic
cauacucaggauugggcagggugu

SEQ ID NO: 398783 - RNA, 18 nt, Artificial Sequence
  Synthetic
aagcucuugugagggugu

SEQ ID NO: 398784 - RNA, 19 nt, Artificial Sequence
  Synthetic
gaagcucuugugagggugu

SEQ ID NO: 398785 - RNA, 20 nt, Artificial Sequence
  Synthetic
ugaagcucuugugagggugu

SEQ ID NO: 398786 - RNA, 21 nt, Artificial Sequence
  Synthetic
uugaagcucuugugagggugu

SEQ ID NO: 398787 - RNA, 22 nt, Artificial Sequence
  Synthetic
auugaagcucuugugagggugu

SEQ ID NO: 398788 - RNA, 23 nt, Artificial Sequence
  Synthetic
uauugaagcucuugugagggugu

SEQ ID NO: 398789 - RNA, 24 nt, Artificial Sequence
  Synthetic
auauugaagcucuugugagggugu

SEQ ID NO: 398790 - RNA, 18 nt, Artificial Sequence
  Synthetic
cagaagccaaaugggugu

SEQ ID NO: 398791 - RNA, 19 nt, Artificial Sequence
  Synthetic
acagaagccaaaugggugu

SEQ ID NO: 398792 - RNA, 20 nt, Artificial Sequence
  Synthetic
gacagaagccaaaugggugu

SEQ ID NO: 398793 - RNA, 21 nt, Artificial Sequence
  Synthetic
ugacagaagccaaaugggugu

SEQ ID NO: 398794 - RNA, 22 nt, Artificial Sequence
  Synthetic
gugacagaagccaaaugggugu

SEQ ID NO: 398795 - RNA, 23 nt, Artificial Sequence
  Synthetic
ggugacagaagccaaaugggugu

SEQ ID NO: 398796 - RNA, 24 nt, Artificial Sequence
  Synthetic
gggugacagaagccaaaugggugu

SEQ ID NO: 398797 - RNA, 18 nt, Artificial Sequence
  Synthetic
caaaaauuaacugggugu

SEQ ID NO: 398798 - RNA, 19 nt, Artificial Sequence
  Synthetic
ucaaaaauuaacugggugu

SEQ ID NO: 398799 - RNA, 20 nt, Artificial Sequence
  Synthetic
uucaaaaauuaacugggugu

SEQ ID NO: 398800 - RNA, 21 nt, Artificial Sequence
  Synthetic
auucaaaaauuaacugggugu

SEQ ID NO: 398801 - RNA, 22 nt, Artificial Sequence
  Synthetic
aauucaaaaauuaacugggugu

SEQ ID NO: 398802 - RNA, 23 nt, Artificial Sequence
  Synthetic
gaauucaaaaauuaacugggugu

SEQ ID NO: 398803 - RNA, 24 nt, Artificial Sequence
  Synthetic
agaauucaaaaauuaacugggugu

SEQ ID NO: 398804 - RNA, 18 nt, Artificial Sequence
  Synthetic
gaacaugcaugugggugu

SEQ ID NO: 398805 - RNA, 19 nt, Artificial Sequence
  Synthetic
ugaacaugcaugugggugu

SEQ ID NO: 398806 - RNA, 20 nt, Artificial Sequence
  Synthetic
cugaacaugcaugugggugu

SEQ ID NO: 398807 - RNA, 21 nt, Artificial Sequence
  Synthetic
ucugaacaugcaugugggugu

SEQ ID NO: 398808 - RNA, 22 nt, Artificial Sequence
  Synthetic
cucugaacaugcaugugggugu

SEQ ID NO: 398809 - RNA, 23 nt, Artificial Sequence
  Synthetic
ucucugaacaugcaugugggugu

SEQ ID NO: 398810 - RNA, 24 nt, Artificial Sequence
  Synthetic
uucucugaacaugcaugugggugu

SEQ ID NO: 398811 - RNA, 18 nt, Artificial Sequence
  Synthetic
gaaguaagcacauggugu

SEQ ID NO: 398812 - RNA, 19 nt, Artificial Sequence
  Synthetic
ugaaguaagcacauggugu

SEQ ID NO: 398813 - RNA, 20 nt, Artificial Sequence
  Synthetic
augaaguaagcacauggugu

SEQ ID NO: 398814 - RNA, 21 nt, Artificial Sequence
  Synthetic
caugaaguaagcacauggugu

SEQ ID NO: 398815 - RNA, 22 nt, Artificial Sequence
  Synthetic
acaugaaguaagcacauggugu

SEQ ID NO: 398816 - RNA, 23 nt, Artificial Sequence
  Synthetic
gacaugaaguaagcacauggugu

SEQ ID NO: 398817 - RNA, 24 nt, Artificial Sequence
  Synthetic
agacaugaaguaagcacauggugu

SEQ ID NO: 398818 - RNA, 18 nt, Artificial Sequence
  Synthetic
aucuaaucuccauggugu

SEQ ID NO: 398819 - RNA, 19 nt, Artificial Sequence
  Synthetic
gaucuaaucuccauggugu

SEQ ID NO: 398820 - RNA, 20 nt, Artificial Sequence
  Synthetic
agaucuaaucuccauggugu

SEQ ID NO: 398821 - RNA, 21 nt, Artificial Sequence
  Synthetic
cagaucuaaucuccauggugu

SEQ ID NO: 398822 - RNA, 22 nt, Artificial Sequence
  Synthetic
acagaucuaaucuccauggugu

SEQ ID NO: 398823 - RNA, 23 nt, Artificial Sequence
  Synthetic
uacagaucuaaucuccauggugu

SEQ ID NO: 398824 - RNA, 24 nt, Artificial Sequence
  Synthetic
cuacagaucuaaucuccauggugu

SEQ ID NO: 398825 - RNA, 18 nt, Artificial Sequence
  Synthetic
ugguagaaagcauggugu

SEQ ID NO: 398826 - RNA, 19 nt, Artificial Sequence
  Synthetic
gugguagaaagcauggugu

SEQ ID NO: 398827 - RNA, 20 nt, Artificial Sequence
  Synthetic
ugugguagaaagcauggugu

SEQ ID NO: 398828 - RNA, 21 nt, Artificial Sequence
  Synthetic
cugugguagaaagcauggugu

SEQ ID NO: 398829 - RNA, 22 nt, Artificial Sequence
  Synthetic
ccugugguagaaagcauggugu

SEQ ID NO: 398830 - RNA, 23 nt, Artificial Sequence
  Synthetic
gccugugguagaaagcauggugu

SEQ ID NO: 398831 - RNA, 24 nt, Artificial Sequence
  Synthetic
agccugugguagaaagcauggugu

SEQ ID NO: 398832 - RNA, 18 nt, Artificial Sequence
  Synthetic
guugaaaagugauggugu

SEQ ID NO: 398833 - RNA, 19 nt, Artificial Sequence
  Synthetic
aguugaaaagugauggugu

SEQ ID NO: 398834 - RNA, 20 nt, Artificial Sequence
  Synthetic
aaguugaaaagugauggugu

SEQ ID NO: 398835 - RNA, 21 nt, Artificial Sequence
  Synthetic
aaaguugaaaagugauggugu

SEQ ID NO: 398836 - RNA, 22 nt, Artificial Sequence
  Synthetic
aaaaguugaaaagugauggugu

SEQ ID NO: 398837 - RNA, 23 nt, Artificial Sequence
  Synthetic
aaaaaguugaaaagugauggugu

SEQ ID NO: 398838 - RNA, 24 nt, Artificial Sequence
  Synthetic
gaaaaaguugaaaagugauggugu

SEQ ID NO: 398839 - RNA, 18 nt, Artificial Sequence
  Synthetic
aauuuuuguauauggugu

SEQ ID NO: 398840 - RNA, 19 nt, Artificial Sequence
  Synthetic
uaauuuuuguauauggugu

SEQ ID NO: 398841 - RNA, 20 nt, Artificial Sequence
  Synthetic
uuaauuuuuguauauggugu

SEQ ID NO: 398842 - RNA, 21 nt, Artificial Sequence
  Synthetic
guuaauuuuuguauauggugu

SEQ ID NO: 398843 - RNA, 22 nt, Artificial Sequence
  Synthetic
aguuaauuuuuguauauggugu

SEQ ID NO: 398844 - RNA, 23 nt, Artificial Sequence
  Synthetic
gaguuaauuuuuguauauggugu

SEQ ID NO: 398845 - RNA, 24 nt, Artificial Sequence
  Synthetic
ugaguuaauuuuuguauauggugu

SEQ ID NO: 398846 - RNA, 18 nt, Artificial Sequence
  Synthetic
ggcacacaugucuggugu

SEQ ID NO: 398847 - RNA, 19 nt, Artificial Sequence
  Synthetic
aggcacacaugucuggugu

SEQ ID NO: 398848 - RNA, 20 nt, Artificial Sequence
  Synthetic
caggcacacaugucuggugu

SEQ ID NO: 398849 - RNA, 21 nt, Artificial Sequence
  Synthetic
acaggcacacaugucuggugu

SEQ ID NO: 398850 - RNA, 22 nt, Artificial Sequence
  Synthetic
cacaggcacacaugucuggugu

SEQ ID NO: 398851 - RNA, 23 nt, Artificial Sequence
  Synthetic
acacaggcacacaugucuggugu

SEQ ID NO: 398852 - RNA, 24 nt, Artificial Sequence
  Synthetic
aacacaggcacacaugucuggugu

SEQ ID NO: 398853 - RNA, 18 nt, Artificial Sequence
  Synthetic
auuuuuuaaaaguggugu

SEQ ID NO: 398854 - RNA, 19 nt, Artificial Sequence
  Synthetic
aauuuuuuaaaaguggugu

SEQ ID NO: 398855 - RNA, 20 nt, Artificial Sequence
  Synthetic
aaauuuuuuaaaaguggugu

SEQ ID NO: 398856 - RNA, 21 nt, Artificial Sequence
  Synthetic
aaaauuuuuuaaaaguggugu

SEQ ID NO: 398857 - RNA, 22 nt, Artificial Sequence
  Synthetic
aaaaauuuuuuaaaaguggugu

SEQ ID NO: 398858 - RNA, 23 nt, Artificial Sequence
  Synthetic
aaaaaauuuuuuaaaaguggugu

SEQ ID NO: 398859 - RNA, 24 nt, Artificial Sequence
  Synthetic
aaaaaaauuuuuuaaaaguggugu

SEQ ID NO: 398860 - RNA, 18 nt, Artificial Sequence
  Synthetic
aaagucauccuguggugu

SEQ ID NO: 398861 - RNA, 19 nt, Artificial Sequence
  Synthetic
aaaagucauccuguggugu

SEQ ID NO: 398862 - RNA, 20 nt, Artificial Sequence
  Synthetic
aaaaagucauccuguggugu

SEQ ID NO: 398863 - RNA, 21 nt, Artificial Sequence
  Synthetic
uaaaaagucauccuguggugu

SEQ ID NO: 398864 - RNA, 22 nt, Artificial Sequence
  Synthetic
uuaaaaagucauccuguggugu

SEQ ID NO: 398865 - RNA, 23 nt, Artificial Sequence
  Synthetic
guuaaaaagucauccuguggugu

SEQ ID NO: 398866 - RNA, 24 nt, Artificial Sequence
  Synthetic
uguuaaaaagucauccuguggugu

SEQ ID NO: 398867 - RNA, 18 nt, Artificial Sequence
  Synthetic
uguuuauuucauuggugu

SEQ ID NO: 398868 - RNA, 19 nt, Artificial Sequence
  Synthetic
auguuuauuucauuggugu

SEQ ID NO: 398869 - RNA, 20 nt, Artificial Sequence
  Synthetic
uauguuuauuucauuggugu

SEQ ID NO: 398870 - RNA, 21 nt, Artificial Sequence
  Synthetic
uuauguuuauuucauuggugu

SEQ ID NO: 398871 - RNA, 22 nt, Artificial Sequence
  Synthetic
cuuauguuuauuucauuggugu

SEQ ID NO: 398872 - RNA, 23 nt, Artificial Sequence
  Synthetic
acuuauguuuauuucauuggugu

SEQ ID NO: 398873 - RNA, 24 nt, Artificial Sequence
  Synthetic
aacuuauguuuauuucauuggugu

SEQ ID NO: 398874 - RNA, 18 nt, Artificial Sequence
  Synthetic
ucaaauauagguuggugu

SEQ ID NO: 398875 - RNA, 19 nt, Artificial Sequence
  Synthetic
gucaaauauagguuggugu

SEQ ID NO: 398876 - RNA, 20 nt, Artificial Sequence
  Synthetic
agucaaauauagguuggugu

SEQ ID NO: 398877 - RNA, 21 nt, Artificial Sequence
  Synthetic
gagucaaauauagguuggugu

SEQ ID NO: 398878 - RNA, 22 nt, Artificial Sequence
  Synthetic
ugagucaaauauagguuggugu

SEQ ID NO: 398879 - RNA, 23 nt, Artificial Sequence
  Synthetic
cugagucaaauauagguuggugu

SEQ ID NO: 398880 - RNA, 24 nt, Artificial Sequence
  Synthetic
ccugagucaaauauagguuggugu

SEQ ID NO: 398881 - RNA, 18 nt, Artificial Sequence
  Synthetic
uaccagcagauuuggugu

SEQ ID NO: 398882 - RNA, 19 nt, Artificial Sequence
  Synthetic
auaccagcagauuuggugu

SEQ ID NO: 398883 - RNA, 20 nt, Artificial Sequence
  Synthetic
aauaccagcagauuuggugu

SEQ ID NO: 398884 - RNA, 21 nt, Artificial Sequence
  Synthetic
aaauaccagcagauuuggugu

SEQ ID NO: 398885 - RNA, 22 nt, Artificial Sequence
  Synthetic
aaaauaccagcagauuuggugu

SEQ ID NO: 398886 - RNA, 23 nt, Artificial Sequence
  Synthetic
caaaauaccagcagauuuggugu

SEQ ID NO: 398887 - RNA, 24 nt, Artificial Sequence
  Synthetic
ucaaaauaccagcagauuuggugu

SEQ ID NO: 398888 - RNA, 18 nt, Artificial Sequence
  Synthetic
auuucagcuaaaaugugu

SEQ ID NO: 398889 - RNA, 19 nt, Artificial Sequence
  Synthetic
cauuucagcuaaaaugugu

SEQ ID NO: 398890 - RNA, 20 nt, Artificial Sequence
  Synthetic
gcauuucagcuaaaaugugu

SEQ ID NO: 398891 - RNA, 21 nt, Artificial Sequence
  Synthetic
agcauuucagcuaaaaugugu

SEQ ID NO: 398892 - RNA, 22 nt, Artificial Sequence
  Synthetic
uagcauuucagcuaaaaugugu

SEQ ID NO: 398893 - RNA, 23 nt, Artificial Sequence
  Synthetic
cuagcauuucagcuaaaaugugu

SEQ ID NO: 398894 - RNA, 24 nt, Artificial Sequence
  Synthetic
acuagcauuucagcuaaaaugugu

SEQ ID NO: 398895 - RNA, 18 nt, Artificial Sequence
  Synthetic
aucauuaaacaaaugugu

SEQ ID NO: 398896 - RNA, 19 nt, Artificial Sequence
  Synthetic
aaucauuaaacaaaugugu

SEQ ID NO: 398897 - RNA, 20 nt, Artificial Sequence
  Synthetic
uaaucauuaaacaaaugugu

SEQ ID NO: 398898 - RNA, 21 nt, Artificial Sequence
  Synthetic
auaaucauuaaacaaaugugu

SEQ ID NO: 398899 - RNA, 22 nt, Artificial Sequence
  Synthetic
aauaaucauuaaacaaaugugu

SEQ ID NO: 398900 - RNA, 23 nt, Artificial Sequence
  Synthetic
aaauaaucauuaaacaaaugugu

SEQ ID NO: 398901 - RNA, 24 nt, Artificial Sequence
  Synthetic
uaaauaaucauuaaacaaaugugu

SEQ ID NO: 398902 - RNA, 18 nt, Artificial Sequence
  Synthetic
uuguggauuuaaaugugu

SEQ ID NO: 398903 - RNA, 19 nt, Artificial Sequence
  Synthetic
guuguggauuuaaaugugu

SEQ ID NO: 398904 - RNA, 20 nt, Artificial Sequence
  Synthetic
uguuguggauuuaaaugugu

SEQ ID NO: 398905 - RNA, 21 nt, Artificial Sequence
  Synthetic
auguuguggauuuaaaugugu

SEQ ID NO: 398906 - RNA, 22 nt, Artificial Sequence
  Synthetic
gauguuguggauuuaaaugugu

SEQ ID NO: 398907 - RNA, 23 nt, Artificial Sequence
  Synthetic
ggauguuguggauuuaaaugugu

SEQ ID NO: 398908 - RNA, 24 nt, Artificial Sequence
  Synthetic
aggauguuguggauuuaaaugugu

SEQ ID NO: 398909 - RNA, 18 nt, Artificial Sequence
  Synthetic
aguggguguucaaugugu

SEQ ID NO: 398910 - RNA, 19 nt, Artificial Sequence
  Synthetic
aaguggguguucaaugugu

SEQ ID NO: 398911 - RNA, 20 nt, Artificial Sequence
  Synthetic
aaaguggguguucaaugugu

SEQ ID NO: 398912 - RNA, 21 nt, Artificial Sequence
  Synthetic
caaaguggguguucaaugugu

SEQ ID NO: 398913 - RNA, 22 nt, Artificial Sequence
  Synthetic
acaaaguggguguucaaugugu

SEQ ID NO: 398914 - RNA, 23 nt, Artificial Sequence
  Synthetic
cacaaaguggguguucaaugugu

SEQ ID NO: 398915 - RNA, 24 nt, Artificial Sequence
  Synthetic
gcacaaaguggguguucaaugugu

SEQ ID NO: 398916 - RNA, 18 nt, Artificial Sequence
  Synthetic
cacaguugcagaaugugu

SEQ ID NO: 398917 - RNA, 19 nt, Artificial Sequence
  Synthetic
ccacaguugcagaaugugu

SEQ ID NO: 398918 - RNA, 20 nt, Artificial Sequence
  Synthetic
accacaguugcagaaugugu

SEQ ID NO: 398919 - RNA, 21 nt, Artificial Sequence
  Synthetic
aaccacaguugcagaaugugu

SEQ ID NO: 398920 - RNA, 22 nt, Artificial Sequence
  Synthetic
aaaccacaguugcagaaugugu

SEQ ID NO: 398921 - RNA, 23 nt, Artificial Sequence
  Synthetic
uaaaccacaguugcagaaugugu

SEQ ID NO: 398922 - RNA, 24 nt, Artificial Sequence
  Synthetic
auaaaccacaguugcagaaugugu

SEQ ID NO: 398923 - RNA, 18 nt, Artificial Sequence
  Synthetic
aucacaucuggaaugugu

SEQ ID NO: 398924 - RNA, 19 nt, Artificial Sequence
  Synthetic
uaucacaucuggaaugugu

SEQ ID NO: 398925 - RNA, 20 nt, Artificial Sequence
  Synthetic
uuaucacaucuggaaugugu

SEQ ID NO: 398926 - RNA, 21 nt, Artificial Sequence
  Synthetic
uuuaucacaucuggaaugugu

SEQ ID NO: 398927 - RNA, 22 nt, Artificial Sequence
  Synthetic
uuuuaucacaucuggaaugugu

SEQ ID NO: 398928 - RNA, 23 nt, Artificial Sequence
  Synthetic
guuuuaucacaucuggaaugugu

SEQ ID NO: 398929 - RNA, 24 nt, Artificial Sequence
  Synthetic
uguuuuaucacaucuggaaugugu

SEQ ID NO: 398930 - RNA, 18 nt, Artificial Sequence
  Synthetic
ucaauaaugguaaugugu

SEQ ID NO: 398931 - RNA, 19 nt, Artificial Sequence
  Synthetic
aucaauaaugguaaugugu

SEQ ID NO: 398932 - RNA, 20 nt, Artificial Sequence
  Synthetic
aaucaauaaugguaaugugu

SEQ ID NO: 398933 - RNA, 21 nt, Artificial Sequence
  Synthetic
aaaucaauaaugguaaugugu

SEQ ID NO: 398934 - RNA, 22 nt, Artificial Sequence
  Synthetic
aaaaucaauaaugguaaugugu

SEQ ID NO: 398935 - RNA, 23 nt, Artificial Sequence
  Synthetic
gaaaaucaauaaugguaaugugu

SEQ ID NO: 398936 - RNA, 24 nt, Artificial Sequence
  Synthetic
ggaaaaucaauaaugguaaugugu

SEQ ID NO: 398937 - RNA, 18 nt, Artificial Sequence
  Synthetic
auuaaaggauuaaugugu

SEQ ID NO: 398938 - RNA, 19 nt, Artificial Sequence
  Synthetic
gauuaaaggauuaaugugu

SEQ ID NO: 398939 - RNA, 20 nt, Artificial Sequence
  Synthetic
ggauuaaaggauuaaugugu

SEQ ID NO: 398940 - RNA, 21 nt, Artificial Sequence
  Synthetic
aggauuaaaggauuaaugugu

SEQ ID NO: 398941 - RNA, 22 nt, Artificial Sequence
  Synthetic
uaggauuaaaggauuaaugugu

SEQ ID NO: 398942 - RNA, 23 nt, Artificial Sequence
  Synthetic
cuaggauuaaaggauuaaugugu

SEQ ID NO: 398943 - RNA, 24 nt, Artificial Sequence
  Synthetic
ucuaggauuaaaggauuaaugugu

SEQ ID NO: 398944 - RNA, 18 nt, Artificial Sequence
  Synthetic
gagcuuugaaacaugugu

SEQ ID NO: 398945 - RNA, 19 nt, Artificial Sequence
  Synthetic
cgagcuuugaaacaugugu

SEQ ID NO: 398946 - RNA, 20 nt, Artificial Sequence
  Synthetic
acgagcuuugaaacaugugu

SEQ ID NO: 398947 - RNA, 21 nt, Artificial Sequence
  Synthetic
uacgagcuuugaaacaugugu

SEQ ID NO: 398948 - RNA, 22 nt, Artificial Sequence
  Synthetic
uuacgagcuuugaaacaugugu

SEQ ID NO: 398949 - RNA, 23 nt, Artificial Sequence
  Synthetic
uuuacgagcuuugaaacaugugu

SEQ ID NO: 398950 - RNA, 24 nt, Artificial Sequence
  Synthetic
uuuuacgagcuuugaaacaugugu

SEQ ID NO: 398951 - RNA, 18 nt, Artificial Sequence
  Synthetic
auugucuuuuacaugugu

SEQ ID NO: 398952 - RNA, 19 nt, Artificial Sequence
  Synthetic
gauugucuuuuacaugugu

SEQ ID NO: 398953 - RNA, 20 nt, Artificial Sequence
  Synthetic
ggauugucuuuuacaugugu

SEQ ID NO: 398954 - RNA, 21 nt, Artificial Sequence
  Synthetic
aggauugucuuuuacaugugu

SEQ ID NO: 398955 - RNA, 22 nt, Artificial Sequence
  Synthetic
aaggauugucuuuuacaugugu

SEQ ID NO: 398956 - RNA, 23 nt, Artificial Sequence
  Synthetic
aaaggauugucuuuuacaugugu

SEQ ID NO: 398957 - RNA, 24 nt, Artificial Sequence
  Synthetic
caaaggauugucuuuuacaugugu

SEQ ID NO: 398958 - RNA, 18 nt, Artificial Sequence
  Synthetic
cauucuuuguccaugugu

SEQ ID NO: 398959 - RNA, 19 nt, Artificial Sequence
  Synthetic
acauucuuuguccaugugu

SEQ ID NO: 398960 - RNA, 20 nt, Artificial Sequence
  Synthetic
aacauucuuuguccaugugu

SEQ ID NO: 398961 - RNA, 21 nt, Artificial Sequence
  Synthetic
aaacauucuuuguccaugugu

SEQ ID NO: 398962 - RNA, 22 nt, Artificial Sequence
  Synthetic
aaaacauucuuuguccaugugu

SEQ ID NO: 398963 - RNA, 23 nt, Artificial Sequence
  Synthetic
aaaaacauucuuuguccaugugu

SEQ ID NO: 398964 - RNA, 24 nt, Artificial Sequence
  Synthetic
uaaaaacauucuuuguccaugugu

SEQ ID NO: 398965 - RNA, 18 nt, Artificial Sequence
  Synthetic
cuauguuguagcaugugu

SEQ ID NO: 398966 - RNA, 19 nt, Artificial Sequence
  Synthetic
ucuauguuguagcaugugu

SEQ ID NO: 398967 - RNA, 20 nt, Artificial Sequence
  Synthetic
aucuauguuguagcaugugu

SEQ ID NO: 398968 - RNA, 21 nt, Artificial Sequence
  Synthetic
caucuauguuguagcaugugu

SEQ ID NO: 398969 - RNA, 22 nt, Artificial Sequence
  Synthetic
ucaucuauguuguagcaugugu

SEQ ID NO: 398970 - RNA, 23 nt, Artificial Sequence
  Synthetic
uucaucuauguuguagcaugugu

SEQ ID NO: 398971 - RNA, 24 nt, Artificial Sequence
  Synthetic
guucaucuauguuguagcaugugu

SEQ ID NO: 398972 - RNA, 18 nt, Artificial Sequence
  Synthetic
agaaggucuuucaugugu

SEQ ID NO: 398973 - RNA, 19 nt, Artificial Sequence
  Synthetic
cagaaggucuuucaugugu

SEQ ID NO: 398974 - RNA, 20 nt, Artificial Sequence
  Synthetic
gcagaaggucuuucaugugu

SEQ ID NO: 398975 - RNA, 21 nt, Artificial Sequence
  Synthetic
ugcagaaggucuuucaugugu

SEQ ID NO: 398976 - RNA, 22 nt, Artificial Sequence
  Synthetic
uugcagaaggucuuucaugugu

SEQ ID NO: 398977 - RNA, 23 nt, Artificial Sequence
  Synthetic
uuugcagaaggucuuucaugugu

SEQ ID NO: 398978 - RNA, 24 nt, Artificial Sequence
  Synthetic
cuuugcagaaggucuuucaugugu

SEQ ID NO: 398979 - RNA, 18 nt, Artificial Sequence
  Synthetic
gggugaggagcgaugugu

SEQ ID NO: 398980 - RNA, 19 nt, Artificial Sequence
  Synthetic
ugggugaggagcgaugugu

SEQ ID NO: 398981 - RNA, 20 nt, Artificial Sequence
  Synthetic
augggugaggagcgaugugu

SEQ ID NO: 398982 - RNA, 21 nt, Artificial Sequence
  Synthetic
aaugggugaggagcgaugugu

SEQ ID NO: 398983 - RNA, 22 nt, Artificial Sequence
  Synthetic
gaaugggugaggagcgaugugu

SEQ ID NO: 398984 - RNA, 23 nt, Artificial Sequence
  Synthetic
ggaaugggugaggagcgaugugu

SEQ ID NO: 398985 - RNA, 24 nt, Artificial Sequence
  Synthetic
gggaaugggugaggagcgaugugu

SEQ ID NO: 398986 - RNA, 18 nt, Artificial Sequence
  Synthetic
uguaucagaaggaugugu

SEQ ID NO: 398987 - RNA, 19 nt, Artificial Sequence
  Synthetic
uuguaucagaaggaugugu

SEQ ID NO: 398988 - RNA, 20 nt, Artificial Sequence
  Synthetic
auuguaucagaaggaugugu

SEQ ID NO: 398989 - RNA, 21 nt, Artificial Sequence
  Synthetic
aauuguaucagaaggaugugu

SEQ ID NO: 398990 - RNA, 22 nt, Artificial Sequence
  Synthetic
aaauuguaucagaaggaugugu

SEQ ID NO: 398991 - RNA, 23 nt, Artificial Sequence
  Synthetic
aaaauuguaucagaaggaugugu

SEQ ID NO: 398992 - RNA, 24 nt, Artificial Sequence
  Synthetic
aaaaauuguaucagaaggaugugu

SEQ ID NO: 398993 - RNA, 18 nt, Artificial Sequence
  Synthetic
agaaugcuuuugaugugu

SEQ ID NO: 398994 - RNA, 19 nt, Artificial Sequence
  Synthetic
cagaaugcuuuugaugugu

SEQ ID NO: 398995 - RNA, 20 nt, Artificial Sequence
  Synthetic
ucagaaugcuuuugaugugu

SEQ ID NO: 398996 - RNA, 21 nt, Artificial Sequence
  Synthetic
aucagaaugcuuuugaugugu

SEQ ID NO: 398997 - RNA, 22 nt, Artificial Sequence
  Synthetic
aaucagaaugcuuuugaugugu

SEQ ID NO: 398998 - RNA, 23 nt, Artificial Sequence
  Synthetic
uaaucagaaugcuuuugaugugu

SEQ ID NO: 398999 - RNA, 24 nt, Artificial Sequence
  Synthetic
auaaucagaaugcuuuugaugugu

SEQ ID NO: 399000 - RNA, 18 nt, Artificial Sequence
  Synthetic
uuuaucauuuauaugugu

SEQ ID NO: 399001 - RNA, 19 nt, Artificial Sequence
  Synthetic
auuuaucauuuauaugugu

SEQ ID NO: 399002 - RNA, 20 nt, Artificial Sequence
  Synthetic
uauuuaucauuuauaugugu

SEQ ID NO: 399003 - RNA, 21 nt, Artificial Sequence
  Synthetic
guauuuaucauuuauaugugu

SEQ ID NO: 399004 - RNA, 22 nt, Artificial Sequence
  Synthetic
aguauuuaucauuuauaugugu

SEQ ID NO: 399005 - RNA, 23 nt, Artificial Sequence
  Synthetic
aaguauuuaucauuuauaugugu

SEQ ID NO: 399006 - RNA, 24 nt, Artificial Sequence
  Synthetic
caaguauuuaucauuuauaugugu

SEQ ID NO: 399007 - RNA, 18 nt, Artificial Sequence
  Synthetic
uuaaguauaaguaugugu

SEQ ID NO: 399008 - RNA, 19 nt, Artificial Sequence
  Synthetic
auuaaguauaaguaugugu

SEQ ID NO: 399009 - RNA, 20 nt, Artificial Sequence
  Synthetic
aauuaaguauaaguaugugu

SEQ ID NO: 399010 - RNA, 21 nt, Artificial Sequence
  Synthetic
gaauuaaguauaaguaugugu

SEQ ID NO: 399011 - RNA, 22 nt, Artificial Sequence
  Synthetic
ugaauuaaguauaaguaugugu

SEQ ID NO: 399012 - RNA, 23 nt, Artificial Sequence
  Synthetic
cugaauuaaguauaaguaugugu

SEQ ID NO: 399013 - RNA, 24 nt, Artificial Sequence
  Synthetic
acugaauuaaguauaaguaugugu

SEQ ID NO: 399014 - RNA, 18 nt, Artificial Sequence
  Synthetic
gaaaaaaaauguaugugu

SEQ ID NO: 399015 - RNA, 19 nt, Artificial Sequence
  Synthetic
ggaaaaaaaauguaugugu

SEQ ID NO: 399016 - RNA, 20 nt, Artificial Sequence
  Synthetic
aggaaaaaaaauguaugugu

SEQ ID NO: 399017 - RNA, 21 nt, Artificial Sequence
  Synthetic
uaggaaaaaaaauguaugugu

SEQ ID NO: 399018 - RNA, 22 nt, Artificial Sequence
  Synthetic
auaggaaaaaaaauguaugugu

SEQ ID NO: 399019 - RNA, 23 nt, Artificial Sequence
  Synthetic
gauaggaaaaaaaauguaugugu

SEQ ID NO: 399020 - RNA, 24 nt, Artificial Sequence
  Synthetic
cgauaggaaaaaaaauguaugugu

SEQ ID NO: 399021 - RNA, 18 nt, Artificial Sequence
  Synthetic
aaaaugguaauuaugugu

SEQ ID NO: 399022 - RNA, 19 nt, Artificial Sequence
  Synthetic
uaaaaugguaauuaugugu

SEQ ID NO: 399023 - RNA, 20 nt, Artificial Sequence
  Synthetic
uuaaaaugguaauuaugugu

SEQ ID NO: 399024 - RNA, 21 nt, Artificial Sequence
  Synthetic
auuaaaaugguaauuaugugu

SEQ ID NO: 399025 - RNA, 22 nt, Artificial Sequence
  Synthetic
aauuaaaaugguaauuaugugu

SEQ ID NO: 399026 - RNA, 23 nt, Artificial Sequence
  Synthetic
aaauuaaaaugguaauuaugugu

SEQ ID NO: 399027 - RNA, 24 nt, Artificial Sequence
  Synthetic
uaaauuaaaaugguaauuaugugu

SEQ ID NO: 399028 - RNA, 18 nt, Artificial Sequence
  Synthetic
uaaaauauucuuaugugu

SEQ ID NO: 399029 - RNA, 19 nt, Artificial Sequence
  Synthetic
guaaaauauucuuaugugu

SEQ ID NO: 399030 - RNA, 20 nt, Artificial Sequence
  Synthetic
gguaaaauauucuuaugugu

SEQ ID NO: 399031 - RNA, 21 nt, Artificial Sequence
  Synthetic
ugguaaaauauucuuaugugu

SEQ ID NO: 399032 - RNA, 22 nt, Artificial Sequence
  Synthetic
uugguaaaauauucuuaugugu

SEQ ID NO: 399033 - RNA, 23 nt, Artificial Sequence
  Synthetic
uuugguaaaauauucuuaugugu

SEQ ID NO: 399034 - RNA, 24 nt, Artificial Sequence
  Synthetic
auuugguaaaauauucuuaugugu

SEQ ID NO: 399035 - RNA, 18 nt, Artificial Sequence
  Synthetic
agguaaugcagacugugu

SEQ ID NO: 399036 - RNA, 19 nt, Artificial Sequence
  Synthetic
cagguaaugcagacugugu

SEQ ID NO: 399037 - RNA, 20 nt, Artificial Sequence
  Synthetic
ucagguaaugcagacugugu

SEQ ID NO: 399038 - RNA, 21 nt, Artificial Sequence
  Synthetic
aucagguaaugcagacugugu

SEQ ID NO: 399039 - RNA, 22 nt, Artificial Sequence
  Synthetic
caucagguaaugcagacugugu

SEQ ID NO: 399040 - RNA, 23 nt, Artificial Sequence
  Synthetic
ccaucagguaaugcagacugugu

SEQ ID NO: 399041 - RNA, 24 nt, Artificial Sequence
  Synthetic
uccaucagguaaugcagacugugu

SEQ ID NO: 399042 - RNA, 18 nt, Artificial Sequence
  Synthetic
ugacaggguagacugugu

SEQ ID NO: 399043 - RNA, 19 nt, Artificial Sequence
  Synthetic
cugacaggguagacugugu

SEQ ID NO: 399044 - RNA, 20 nt, Artificial Sequence
  Synthetic
gcugacaggguagacugugu

SEQ ID NO: 399045 - RNA, 21 nt, Artificial Sequence
  Synthetic
ugcugacaggguagacugugu

SEQ ID NO: 399046 - RNA, 22 nt, Artificial Sequence
  Synthetic
augcugacaggguagacugugu

SEQ ID NO: 399047 - RNA, 23 nt, Artificial Sequence
  Synthetic
caugcugacaggguagacugugu

SEQ ID NO: 399048 - RNA, 24 nt, Artificial Sequence
  Synthetic
acaugcugacaggguagacugugu

SEQ ID NO: 399049 - RNA, 18 nt, Artificial Sequence
  Synthetic
aaucauguacgacugugu

SEQ ID NO: 399050 - RNA, 19 nt, Artificial Sequence
  Synthetic
aaaucauguacgacugugu

SEQ ID NO: 399051 - RNA, 20 nt, Artificial Sequence
  Synthetic
gaaaucauguacgacugugu

SEQ ID NO: 399052 - RNA, 21 nt, Artificial Sequence
  Synthetic
ugaaaucauguacgacugugu

SEQ ID NO: 399053 - RNA, 22 nt, Artificial Sequence
  Synthetic
gugaaaucauguacgacugugu

SEQ ID NO: 399054 - RNA, 23 nt, Artificial Sequence
  Synthetic
agugaaaucauguacgacugugu

SEQ ID NO: 399055 - RNA, 24 nt, Artificial Sequence
  Synthetic
cagugaaaucauguacgacugugu

SEQ ID NO: 399056 - RNA, 18 nt, Artificial Sequence
  Synthetic
aaacuauauugacugugu

SEQ ID NO: 399057 - RNA, 19 nt, Artificial Sequence
  Synthetic
uaaacuauauugacugugu

SEQ ID NO: 399058 - RNA, 20 nt, Artificial Sequence
  Synthetic
cuaaacuauauugacugugu

SEQ ID NO: 399059 - RNA, 21 nt, Artificial Sequence
  Synthetic
acuaaacuauauugacugugu

SEQ ID NO: 399060 - RNA, 22 nt, Artificial Sequence
  Synthetic
aacuaaacuauauugacugugu

SEQ ID NO: 399061 - RNA, 23 nt, Artificial Sequence
  Synthetic
caacuaaacuauauugacugugu

SEQ ID NO: 399062 - RNA, 24 nt, Artificial Sequence
  Synthetic
ucaacuaaacuauauugacugugu

SEQ ID NO: 399063 - RNA, 18 nt, Artificial Sequence
  Synthetic
guguugagacaccugugu

SEQ ID NO: 399064 - RNA, 19 nt, Artificial Sequence
  Synthetic
uguguugagacaccugugu

SEQ ID NO: 399065 - RNA, 20 nt, Artificial Sequence
  Synthetic
uuguguugagacaccugugu

SEQ ID NO: 399066 - RNA, 21 nt, Artificial Sequence
  Synthetic
uuuguguugagacaccugugu

SEQ ID NO: 399067 - RNA, 22 nt, Artificial Sequence
  Synthetic
uuuuguguugagacaccugugu

SEQ ID NO: 399068 - RNA, 23 nt, Artificial Sequence
  Synthetic
guuuuguguugagacaccugugu

SEQ ID NO: 399069 - RNA, 24 nt, Artificial Sequence
  Synthetic
gguuuuguguugagacaccugugu

SEQ ID NO: 399070 - RNA, 18 nt, Artificial Sequence
  Synthetic
gaauuuaugucccugugu

SEQ ID NO: 399071 - RNA, 19 nt, Artificial Sequence
  Synthetic
ggaauuuaugucccugugu

SEQ ID NO: 399072 - RNA, 20 nt, Artificial Sequence
  Synthetic
uggaauuuaugucccugugu

SEQ ID NO: 399073 - RNA, 21 nt, Artificial Sequence
  Synthetic
cuggaauuuaugucccugugu

SEQ ID NO: 399074 - RNA, 22 nt, Artificial Sequence
  Synthetic
ccuggaauuuaugucccugugu

SEQ ID NO: 399075 - RNA, 23 nt, Artificial Sequence
  Synthetic
uccuggaauuuaugucccugugu

SEQ ID NO: 399076 - RNA, 24 nt, Artificial Sequence
  Synthetic
auccuggaauuuaugucccugugu

SEQ ID NO: 399077 - RNA, 18 nt, Artificial Sequence
  Synthetic
caggaaaguugccugugu

SEQ ID NO: 399078 - RNA, 19 nt, Artificial Sequence
  Synthetic
acaggaaaguugccugugu

SEQ ID NO: 399079 - RNA, 20 nt, Artificial Sequence
  Synthetic
uacaggaaaguugccugugu

SEQ ID NO: 399080 - RNA, 21 nt, Artificial Sequence
  Synthetic
auacaggaaaguugccugugu

SEQ ID NO: 399081 - RNA, 22 nt, Artificial Sequence
  Synthetic
gauacaggaaaguugccugugu

SEQ ID NO: 399082 - RNA, 23 nt, Artificial Sequence
  Synthetic
agauacaggaaaguugccugugu

SEQ ID NO: 399083 - RNA, 24 nt, Artificial Sequence
  Synthetic
uagauacaggaaaguugccugugu

SEQ ID NO: 399084 - RNA, 18 nt, Artificial Sequence
  Synthetic
ugaaauguuacgcugugu

SEQ ID NO: 399085 - RNA, 19 nt, Artificial Sequence
  Synthetic
uugaaauguuacgcugugu

SEQ ID NO: 399086 - RNA, 20 nt, Artificial Sequence
  Synthetic
auugaaauguuacgcugugu

SEQ ID NO: 399087 - RNA, 21 nt, Artificial Sequence
  Synthetic
uauugaaauguuacgcugugu

SEQ ID NO: 399088 - RNA, 22 nt, Artificial Sequence
  Synthetic
uuauugaaauguuacgcugugu

SEQ ID NO: 399089 - RNA, 23 nt, Artificial Sequence
  Synthetic
auuauugaaauguuacgcugugu

SEQ ID NO: 399090 - RNA, 24 nt, Artificial Sequence
  Synthetic
aauuauugaaauguuacgcugugu

SEQ ID NO: 399091 - RNA, 18 nt, Artificial Sequence
  Synthetic
ccaguggggacucugugu

SEQ ID NO: 399092 - RNA, 19 nt, Artificial Sequence
  Synthetic
cccaguggggacucugugu

SEQ ID NO: 399093 - RNA, 20 nt, Artificial Sequence
  Synthetic
ccccaguggggacucugugu

SEQ ID NO: 399094 - RNA, 21 nt, Artificial Sequence
  Synthetic
gccccaguggggacucugugu

SEQ ID NO: 399095 - RNA, 22 nt, Artificial Sequence
  Synthetic
ugccccaguggggacucugugu

SEQ ID NO: 399096 - RNA, 23 nt, Artificial Sequence
  Synthetic
gugccccaguggggacucugugu

SEQ ID NO: 399097 - RNA, 24 nt, Artificial Sequence
  Synthetic
agugccccaguggggacucugugu

SEQ ID NO: 399098 - RNA, 18 nt, Artificial Sequence
  Synthetic
cugaaucagugucugugu

SEQ ID NO: 399099 - RNA, 19 nt, Artificial Sequence
  Synthetic
acugaaucagugucugugu

SEQ ID NO: 399100 - RNA, 20 nt, Artificial Sequence
  Synthetic
uacugaaucagugucugugu

SEQ ID NO: 399101 - RNA, 21 nt, Artificial Sequence
  Synthetic
cuacugaaucagugucugugu

SEQ ID NO: 399102 - RNA, 22 nt, Artificial Sequence
  Synthetic
ccuacugaaucagugucugugu

SEQ ID NO: 399103 - RNA, 23 nt, Artificial Sequence
  Synthetic
accuacugaaucagugucugugu

SEQ ID NO: 399104 - RNA, 24 nt, Artificial Sequence
  Synthetic
aaccuacugaaucagugucugugu

SEQ ID NO: 399105 - RNA, 18 nt, Artificial Sequence
  Synthetic
uugaaucagugucugugu

SEQ ID NO: 399106 - RNA, 19 nt, Artificial Sequence
  Synthetic
auugaaucagugucugugu

SEQ ID NO: 399107 - RNA, 20 nt, Artificial Sequence
  Synthetic
uauugaaucagugucugugu

SEQ ID NO: 399108 - RNA, 21 nt, Artificial Sequence
  Synthetic
cuauugaaucagugucugugu

SEQ ID NO: 399109 - RNA, 22 nt, Artificial Sequence
  Synthetic
ccuauugaaucagugucugugu

SEQ ID NO: 399110 - RNA, 23 nt, Artificial Sequence
  Synthetic
accuauugaaucagugucugugu

SEQ ID NO: 399111 - RNA, 24 nt, Artificial Sequence
  Synthetic
aaccuauugaaucagugucugugu

SEQ ID NO: 399112 - RNA, 18 nt, Artificial Sequence
  Synthetic
agggaaaacauucugugu

SEQ ID NO: 399113 - RNA, 19 nt, Artificial Sequence
  Synthetic
aagggaaaacauucugugu

SEQ ID NO: 399114 - RNA, 20 nt, Artificial Sequence
  Synthetic
aaagggaaaacauucugugu

SEQ ID NO: 399115 - RNA, 21 nt, Artificial Sequence
  Synthetic
gaaagggaaaacauucugugu

SEQ ID NO: 399116 - RNA, 22 nt, Artificial Sequence
  Synthetic
agaaagggaaaacauucugugu

SEQ ID NO: 399117 - RNA, 23 nt, Artificial Sequence
  Synthetic
gagaaagggaaaacauucugugu

SEQ ID NO: 399118 - RNA, 24 nt, Artificial Sequence
  Synthetic
ggagaaagggaaaacauucugugu

SEQ ID NO: 399119 - RNA, 18 nt, Artificial Sequence
  Synthetic
uauaauagucuucugugu

SEQ ID NO: 399120 - RNA, 19 nt, Artificial Sequence
  Synthetic
uuauaauagucuucugugu

SEQ ID NO: 399121 - RNA, 20 nt, Artificial Sequence
  Synthetic
uuuauaauagucuucugugu

SEQ ID NO: 399122 - RNA, 21 nt, Artificial Sequence
  Synthetic
uuuuauaauagucuucugugu

SEQ ID NO: 399123 - RNA, 22 nt, Artificial Sequence
  Synthetic
cuuuuauaauagucuucugugu

SEQ ID NO: 399124 - RNA, 23 nt, Artificial Sequence
  Synthetic
acuuuuauaauagucuucugugu

SEQ ID NO: 399125 - RNA, 24 nt, Artificial Sequence
  Synthetic
aacuuuuauaauagucuucugugu

SEQ ID NO: 399126 - RNA, 18 nt, Artificial Sequence
  Synthetic
auguuugcauuucugugu

SEQ ID NO: 399127 - RNA, 19 nt, Artificial Sequence
  Synthetic
aauguuugcauuucugugu

SEQ ID NO: 399128 - RNA, 20 nt, Artificial Sequence
  Synthetic
caauguuugcauuucugugu

SEQ ID NO: 399129 - RNA, 21 nt, Artificial Sequence
  Synthetic
ucaauguuugcauuucugugu

SEQ ID NO: 399130 - RNA, 22 nt, Artificial Sequence
  Synthetic
uucaauguuugcauuucugugu

SEQ ID NO: 399131 - RNA, 23 nt, Artificial Sequence
  Synthetic
uuucaauguuugcauuucugugu

SEQ ID NO: 399132 - RNA, 24 nt, Artificial Sequence
  Synthetic
uuuucaauguuugcauuucugugu

SEQ ID NO: 399133 - RNA, 18 nt, Artificial Sequence
  Synthetic
aaagagaaaagggugugu

SEQ ID NO: 399134 - RNA, 19 nt, Artificial Sequence
  Synthetic
gaaagagaaaagggugugu

SEQ ID NO: 399135 - RNA, 20 nt, Artificial Sequence
  Synthetic
agaaagagaaaagggugugu

SEQ ID NO: 399136 - RNA, 21 nt, Artificial Sequence
  Synthetic
cagaaagagaaaagggugugu

SEQ ID NO: 399137 - RNA, 22 nt, Artificial Sequence
  Synthetic
ucagaaagagaaaagggugugu

SEQ ID NO: 399138 - RNA, 23 nt, Artificial Sequence
  Synthetic
uucagaaagagaaaagggugugu

SEQ ID NO: 399139 - RNA, 24 nt, Artificial Sequence
  Synthetic
auucagaaagagaaaagggugugu

SEQ ID NO: 399140 - RNA, 18 nt, Artificial Sequence
  Synthetic
uucuucuaaaaugugugu

SEQ ID NO: 399141 - RNA, 19 nt, Artificial Sequence
  Synthetic
uuucuucuaaaaugugugu

SEQ ID NO: 399142 - RNA, 20 nt, Artificial Sequence
  Synthetic
cuuucuucuaaaaugugugu

SEQ ID NO: 399143 - RNA, 21 nt, Artificial Sequence
  Synthetic
ucuuucuucuaaaaugugugu

SEQ ID NO: 399144 - RNA, 22 nt, Artificial Sequence
  Synthetic
cucuuucuucuaaaaugugugu

SEQ ID NO: 399145 - RNA, 23 nt, Artificial Sequence
  Synthetic
ucucuuucuucuaaaaugugugu

SEQ ID NO: 399146 - RNA, 24 nt, Artificial Sequence
  Synthetic
cucucuuucuucuaaaaugugugu

SEQ ID NO: 399147 - RNA, 18 nt, Artificial Sequence
  Synthetic
cauuaaacaaaugugugu

SEQ ID NO: 399148 - RNA, 19 nt, Artificial Sequence
  Synthetic
ucauuaaacaaaugugugu

SEQ ID NO: 399149 - RNA, 20 nt, Artificial Sequence
  Synthetic
aucauuaaacaaaugugugu

SEQ ID NO: 399150 - RNA, 21 nt, Artificial Sequence
  Synthetic
aaucauuaaacaaaugugugu

SEQ ID NO: 399151 - RNA, 22 nt, Artificial Sequence
  Synthetic
uaaucauuaaacaaaugugugu

SEQ ID NO: 399152 - RNA, 23 nt, Artificial Sequence
  Synthetic
auaaucauuaaacaaaugugugu

SEQ ID NO: 399153 - RNA, 24 nt, Artificial Sequence
  Synthetic
aauaaucauuaaacaaaugugugu

SEQ ID NO: 399154 - RNA, 18 nt, Artificial Sequence
  Synthetic
uugguguuggaugugugu

SEQ ID NO: 399155 - RNA, 19 nt, Artificial Sequence
  Synthetic
guugguguuggaugugugu

SEQ ID NO: 399156 - RNA, 20 nt, Artificial Sequence
  Synthetic
aguugguguuggaugugugu

SEQ ID NO: 399157 - RNA, 21 nt, Artificial Sequence
  Synthetic
uaguugguguuggaugugugu

SEQ ID NO: 399158 - RNA, 22 nt, Artificial Sequence
  Synthetic
uuaguugguguuggaugugugu

SEQ ID NO: 399159 - RNA, 23 nt, Artificial Sequence
  Synthetic
guuaguugguguuggaugugugu

SEQ ID NO: 399160 - RNA, 24 nt, Artificial Sequence
  Synthetic
uguuaguugguguuggaugugugu

SEQ ID NO: 399161 - RNA, 18 nt, Artificial Sequence
  Synthetic
guaggaguguaugugugu

SEQ ID NO: 399162 - RNA, 19 nt, Artificial Sequence
  Synthetic
uguaggaguguaugugugu

SEQ ID NO: 399163 - RNA, 20 nt, Artificial Sequence
  Synthetic
uuguaggaguguaugugugu

SEQ ID NO: 399164 - RNA, 21 nt, Artificial Sequence
  Synthetic
uuuguaggaguguaugugugu

SEQ ID NO: 399165 - RNA, 22 nt, Artificial Sequence
  Synthetic
cuuuguaggaguguaugugugu

SEQ ID NO: 399166 - RNA, 23 nt, Artificial Sequence
  Synthetic
ucuuuguaggaguguaugugugu

SEQ ID NO: 399167 - RNA, 24 nt, Artificial Sequence
  Synthetic
uucuuuguaggaguguaugugugu

SEQ ID NO: 399168 - RNA, 18 nt, Artificial Sequence
  Synthetic
auuuaugucccugugugu

SEQ ID NO: 399169 - RNA, 19 nt, Artificial Sequence
  Synthetic
aauuuaugucccugugugu

SEQ ID NO: 399170 - RNA, 20 nt, Artificial Sequence
  Synthetic
gaauuuaugucccugugugu

SEQ ID NO: 399171 - RNA, 21 nt, Artificial Sequence
  Synthetic
ggaauuuaugucccugugugu

SEQ ID NO: 399172 - RNA, 22 nt, Artificial Sequence
  Synthetic
uggaauuuaugucccugugugu

SEQ ID NO: 399173 - RNA, 23 nt, Artificial Sequence
  Synthetic
cuggaauuuaugucccugugugu

SEQ ID NO: 399174 - RNA, 24 nt, Artificial Sequence
  Synthetic
ccuggaauuuaugucccugugugu

SEQ ID NO: 399175 - RNA, 18 nt, Artificial Sequence
  Synthetic
gcucauaauucugugugu

SEQ ID NO: 399176 - RNA, 19 nt, Artificial Sequence
  Synthetic
ugcucauaauucugugugu

SEQ ID NO: 399177 - RNA, 20 nt, Artificial Sequence
  Synthetic
uugcucauaauucugugugu

SEQ ID NO: 399178 - RNA, 21 nt, Artificial Sequence
  Synthetic
auugcucauaauucugugugu

SEQ ID NO: 399179 - RNA, 22 nt, Artificial Sequence
  Synthetic
uauugcucauaauucugugugu

SEQ ID NO: 399180 - RNA, 23 nt, Artificial Sequence
  Synthetic
uuauugcucauaauucugugugu

SEQ ID NO: 399181 - RNA, 24 nt, Artificial Sequence
  Synthetic
uuuauugcucauaauucugugugu

SEQ ID NO: 399182 - RNA, 18 nt, Artificial Sequence
  Synthetic
gguguuggaugugugugu

SEQ ID NO: 399183 - RNA, 19 nt, Artificial Sequence
  Synthetic
ugguguuggaugugugugu

SEQ ID NO: 399184 - RNA, 20 nt, Artificial Sequence
  Synthetic
uugguguuggaugugugugu

SEQ ID NO: 399185 - RNA, 21 nt, Artificial Sequence
  Synthetic
guugguguuggaugugugugu

SEQ ID NO: 399186 - RNA, 22 nt, Artificial Sequence
  Synthetic
aguugguguuggaugugugugu

SEQ ID NO: 399187 - RNA, 23 nt, Artificial Sequence
  Synthetic
uaguugguguuggaugugugugu

SEQ ID NO: 399188 - RNA, 24 nt, Artificial Sequence
  Synthetic
uuaguugguguuggaugugugugu

SEQ ID NO: 399189 - RNA, 18 nt, Artificial Sequence
  Synthetic
cuuugugugugugugugu

SEQ ID NO: 399190 - RNA, 19 nt, Artificial Sequence
  Synthetic
ucuuugugugugugugugu

SEQ ID NO: 399191 - RNA, 20 nt, Artificial Sequence
  Synthetic
gucuuugugugugugugugu

SEQ ID NO: 399192 - RNA, 21 nt, Artificial Sequence
  Synthetic
ugucuuugugugugugugugu

SEQ ID NO: 399193 - RNA, 22 nt, Artificial Sequence
  Synthetic
augucuuugugugugugugugu

SEQ ID NO: 399194 - RNA, 23 nt, Artificial Sequence
  Synthetic
uaugucuuugugugugugugugu

SEQ ID NO: 399195 - RNA, 24 nt, Artificial Sequence
  Synthetic
uuaugucuuugugugugugugugu

SEQ ID NO: 399196 - RNA, 18 nt, Artificial Sequence
  Synthetic
uuacuauugugugugugu

SEQ ID NO: 399197 - RNA, 19 nt, Artificial Sequence
  Synthetic
guuacuauugugugugugu

SEQ ID NO: 399198 - RNA, 20 nt, Artificial Sequence
  Synthetic
aguuacuauugugugugugu

SEQ ID NO: 399199 - RNA, 21 nt, Artificial Sequence
  Synthetic
uaguuacuauugugugugugu

SEQ ID NO: 399200 - RNA, 22 nt, Artificial Sequence
  Synthetic
auaguuacuauugugugugugu

SEQ ID NO: 399201 - RNA, 23 nt, Artificial Sequence
  Synthetic
aauaguuacuauugugugugugu

SEQ ID NO: 399202 - RNA, 24 nt, Artificial Sequence
  Synthetic
aaauaguuacuauugugugugugu

SEQ ID NO: 399203 - RNA, 18 nt, Artificial Sequence
  Synthetic
agccaauaaccauugugu

SEQ ID NO: 399204 - RNA, 19 nt, Artificial Sequence
  Synthetic
gagccaauaaccauugugu

SEQ ID NO: 399205 - RNA, 20 nt, Artificial Sequence
  Synthetic
ggagccaauaaccauugugu

SEQ ID NO: 399206 - RNA, 21 nt, Artificial Sequence
  Synthetic
aggagccaauaaccauugugu

SEQ ID NO: 399207 - RNA, 22 nt, Artificial Sequence
  Synthetic
gaggagccaauaaccauugugu

SEQ ID NO: 399208 - RNA, 23 nt, Artificial Sequence
  Synthetic
ugaggagccaauaaccauugugu

SEQ ID NO: 399209 - RNA, 24 nt, Artificial Sequence
  Synthetic
augaggagccaauaaccauugugu

SEQ ID NO: 399210 - RNA, 18 nt, Artificial Sequence
  Synthetic
auuaaaaaugcauugugu

SEQ ID NO: 399211 - RNA, 19 nt, Artificial Sequence
  Synthetic
uauuaaaaaugcauugugu

SEQ ID NO: 399212 - RNA, 20 nt, Artificial Sequence
  Synthetic
uuauuaaaaaugcauugugu

SEQ ID NO: 399213 - RNA, 21 nt, Artificial Sequence
  Synthetic
uuuauuaaaaaugcauugugu

SEQ ID NO: 399214 - RNA, 22 nt, Artificial Sequence
  Synthetic
cuuuauuaaaaaugcauugugu

SEQ ID NO: 399215 - RNA, 23 nt, Artificial Sequence
  Synthetic
acuuuauuaaaaaugcauugugu

SEQ ID NO: 399216 - RNA, 24 nt, Artificial Sequence
  Synthetic
aacuuuauuaaaaaugcauugugu

SEQ ID NO: 399217 - RNA, 18 nt, Artificial Sequence
  Synthetic
cuaaauugaucauugugu

SEQ ID NO: 399218 - RNA, 19 nt, Artificial Sequence
  Synthetic
ucuaaauugaucauugugu

SEQ ID NO: 399219 - RNA, 20 nt, Artificial Sequence
  Synthetic
gucuaaauugaucauugugu

SEQ ID NO: 399220 - RNA, 21 nt, Artificial Sequence
  Synthetic
ugucuaaauugaucauugugu

SEQ ID NO: 399221 - RNA, 22 nt, Artificial Sequence
  Synthetic
uugucuaaauugaucauugugu

SEQ ID NO: 399222 - RNA, 23 nt, Artificial Sequence
  Synthetic
auugucuaaauugaucauugugu

SEQ ID NO: 399223 - RNA, 24 nt, Artificial Sequence
  Synthetic
gauugucuaaauugaucauugugu

SEQ ID NO: 399224 - RNA, 18 nt, Artificial Sequence
  Synthetic
guguuaaacagauugugu

SEQ ID NO: 399225 - RNA, 19 nt, Artificial Sequence
  Synthetic
aguguuaaacagauugugu

SEQ ID NO: 399226 - RNA, 20 nt, Artificial Sequence
  Synthetic
uaguguuaaacagauugugu

SEQ ID NO: 399227 - RNA, 21 nt, Artificial Sequence
  Synthetic
uuaguguuaaacagauugugu

SEQ ID NO: 399228 - RNA, 22 nt, Artificial Sequence
  Synthetic
uuuaguguuaaacagauugugu

SEQ ID NO: 399229 - RNA, 23 nt, Artificial Sequence
  Synthetic
guuuaguguuaaacagauugugu

SEQ ID NO: 399230 - RNA, 24 nt, Artificial Sequence
  Synthetic
uguuuaguguuaaacagauugugu

SEQ ID NO: 399231 - RNA, 18 nt, Artificial Sequence
  Synthetic
uuuuuguguugauugugu

SEQ ID NO: 399232 - RNA, 19 nt, Artificial Sequence
  Synthetic
auuuuuguguugauugugu

SEQ ID NO: 399233 - RNA, 20 nt, Artificial Sequence
  Synthetic
uauuuuuguguugauugugu

SEQ ID NO: 399234 - RNA, 21 nt, Artificial Sequence
  Synthetic
cuauuuuuguguugauugugu

SEQ ID NO: 399235 - RNA, 22 nt, Artificial Sequence
  Synthetic
ccuauuuuuguguugauugugu

SEQ ID NO: 399236 - RNA, 23 nt, Artificial Sequence
  Synthetic
accuauuuuuguguugauugugu

SEQ ID NO: 399237 - RNA, 24 nt, Artificial Sequence
  Synthetic
uaccuauuuuuguguugauugugu

SEQ ID NO: 399238 - RNA, 18 nt, Artificial Sequence
  Synthetic
uuauguaugaccuugugu

SEQ ID NO: 399239 - RNA, 19 nt, Artificial Sequence
  Synthetic
uuuauguaugaccuugugu

SEQ ID NO: 399240 - RNA, 20 nt, Artificial Sequence
  Synthetic
uuuuauguaugaccuugugu

SEQ ID NO: 399241 - RNA, 21 nt, Artificial Sequence
  Synthetic
auuuuauguaugaccuugugu

SEQ ID NO: 399242 - RNA, 22 nt, Artificial Sequence
  Synthetic
uauuuuauguaugaccuugugu

SEQ ID NO: 399243 - RNA, 23 nt, Artificial Sequence
  Synthetic
auauuuuauguaugaccuugugu

SEQ ID NO: 399244 - RNA, 24 nt, Artificial Sequence
  Synthetic
uauauuuuauguaugaccuugugu

SEQ ID NO: 399245 - RNA, 18 nt, Artificial Sequence
  Synthetic
aaaagaaagcccuugugu

SEQ ID NO: 399246 - RNA, 19 nt, Artificial Sequence
  Synthetic
uaaaagaaagcccuugugu

SEQ ID NO: 399247 - RNA, 20 nt, Artificial Sequence
  Synthetic
cuaaaagaaagcccuugugu

SEQ ID NO: 399248 - RNA, 21 nt, Artificial Sequence
  Synthetic
ucuaaaagaaagcccuugugu

SEQ ID NO: 399249 - RNA, 22 nt, Artificial Sequence
  Synthetic
uucuaaaagaaagcccuugugu

SEQ ID NO: 399250 - RNA, 23 nt, Artificial Sequence
  Synthetic
auucuaaaagaaagcccuugugu

SEQ ID NO: 399251 - RNA, 24 nt, Artificial Sequence
  Synthetic
aauucuaaaagaaagcccuugugu

SEQ ID NO: 399252 - RNA, 18 nt, Artificial Sequence
  Synthetic
uuggcuugguccuugugu

SEQ ID NO: 399253 - RNA, 19 nt, Artificial Sequence
  Synthetic
auuggcuugguccuugugu

SEQ ID NO: 399254 - RNA, 20 nt, Artificial Sequence
  Synthetic
uauuggcuugguccuugugu

SEQ ID NO: 399255 - RNA, 21 nt, Artificial Sequence
  Synthetic
cuauuggcuugguccuugugu

SEQ ID NO: 399256 - RNA, 22 nt, Artificial Sequence
  Synthetic
ucuauuggcuugguccuugugu

SEQ ID NO: 399257 - RNA, 23 nt, Artificial Sequence
  Synthetic
gucuauuggcuugguccuugugu

SEQ ID NO: 399258 - RNA, 24 nt, Artificial Sequence
  Synthetic
ugucuauuggcuugguccuugugu

SEQ ID NO: 399259 - RNA, 18 nt, Artificial Sequence
  Synthetic
aauacuuccugcuugugu

SEQ ID NO: 399260 - RNA, 19 nt, Artificial Sequence
  Synthetic
uaauacuuccugcuugugu

SEQ ID NO: 399261 - RNA, 20 nt, Artificial Sequence
  Synthetic
auaauacuuccugcuugugu

SEQ ID NO: 399262 - RNA, 21 nt, Artificial Sequence
  Synthetic
aauaauacuuccugcuugugu

SEQ ID NO: 399263 - RNA, 22 nt, Artificial Sequence
  Synthetic
aaauaauacuuccugcuugugu

SEQ ID NO: 399264 - RNA, 23 nt, Artificial Sequence
  Synthetic
aaaauaauacuuccugcuugugu

SEQ ID NO: 399265 - RNA, 24 nt, Artificial Sequence
  Synthetic
gaaaauaauacuuccugcuugugu

SEQ ID NO: 399266 - RNA, 18 nt, Artificial Sequence
  Synthetic
uaauaauauaauuugugu

SEQ ID NO: 399267 - RNA, 19 nt, Artificial Sequence
  Synthetic
guaauaauauaauuugugu

SEQ ID NO: 399268 - RNA, 20 nt, Artificial Sequence
  Synthetic
uguaauaauauaauuugugu

SEQ ID NO: 399269 - RNA, 21 nt, Artificial Sequence
  Synthetic
cuguaauaauauaauuugugu

SEQ ID NO: 399270 - RNA, 22 nt, Artificial Sequence
  Synthetic
ccuguaauaauauaauuugugu

SEQ ID NO: 399271 - RNA, 23 nt, Artificial Sequence
  Synthetic
cccuguaauaauauaauuugugu

SEQ ID NO: 399272 - RNA, 24 nt, Artificial Sequence
  Synthetic
ucccuguaauaauauaauuugugu

SEQ ID NO: 399273 - RNA, 18 nt, Artificial Sequence
  Synthetic
uucucauuugauuugugu

SEQ ID NO: 399274 - RNA, 19 nt, Artificial Sequence
  Synthetic
auucucauuugauuugugu

SEQ ID NO: 399275 - RNA, 20 nt, Artificial Sequence
  Synthetic
aauucucauuugauuugugu

SEQ ID NO: 399276 - RNA, 21 nt, Artificial Sequence
  Synthetic
caauucucauuugauuugugu

SEQ ID NO: 399277 - RNA, 22 nt, Artificial Sequence
  Synthetic
acaauucucauuugauuugugu

SEQ ID NO: 399278 - RNA, 23 nt, Artificial Sequence
  Synthetic
cacaauucucauuugauuugugu

SEQ ID NO: 399279 - RNA, 24 nt, Artificial Sequence
  Synthetic
gcacaauucucauuugauuugugu

SEQ ID NO: 399280 - RNA, 18 nt, Artificial Sequence
  Synthetic
uuggucauuuauuugugu

SEQ ID NO: 399281 - RNA, 19 nt, Artificial Sequence
  Synthetic
auuggucauuuauuugugu

SEQ ID NO: 399282 - RNA, 20 nt, Artificial Sequence
  Synthetic
cauuggucauuuauuugugu

SEQ ID NO: 399283 - RNA, 21 nt, Artificial Sequence
  Synthetic
acauuggucauuuauuugugu

SEQ ID NO: 399284 - RNA, 22 nt, Artificial Sequence
  Synthetic
aacauuggucauuuauuugugu

SEQ ID NO: 399285 - RNA, 23 nt, Artificial Sequence
  Synthetic
aaacauuggucauuuauuugugu

SEQ ID NO: 399286 - RNA, 24 nt, Artificial Sequence
  Synthetic
caaacauuggucauuuauuugugu

SEQ ID NO: 399287 - RNA, 18 nt, Artificial Sequence
  Synthetic
uuuaccauugcuuugugu

SEQ ID NO: 399288 - RNA, 19 nt, Artificial Sequence
  Synthetic
auuuaccauugcuuugugu

SEQ ID NO: 399289 - RNA, 20 nt, Artificial Sequence
  Synthetic
cauuuaccauugcuuugugu

SEQ ID NO: 399290 - RNA, 21 nt, Artificial Sequence
  Synthetic
acauuuaccauugcuuugugu

SEQ ID NO: 399291 - RNA, 22 nt, Artificial Sequence
  Synthetic
aacauuuaccauugcuuugugu

SEQ ID NO: 399292 - RNA, 23 nt, Artificial Sequence
  Synthetic
aaacauuuaccauugcuuugugu

SEQ ID NO: 399293 - RNA, 24 nt, Artificial Sequence
  Synthetic
caaacauuuaccauugcuuugugu

SEQ ID NO: 399294 - RNA, 18 nt, Artificial Sequence
  Synthetic
aagaaaaauguuuugugu

SEQ ID NO: 399295 - RNA, 19 nt, Artificial Sequence
  Synthetic
caagaaaaauguuuugugu

SEQ ID NO: 399296 - RNA, 20 nt, Artificial Sequence
  Synthetic
ccaagaaaaauguuuugugu

SEQ ID NO: 399297 - RNA, 21 nt, Artificial Sequence
  Synthetic
accaagaaaaauguuuugugu

SEQ ID NO: 399298 - RNA, 22 nt, Artificial Sequence
  Synthetic
uaccaagaaaaauguuuugugu

SEQ ID NO: 399299 - RNA, 23 nt, Artificial Sequence
  Synthetic
guaccaagaaaaauguuuugugu

SEQ ID NO: 399300 - RNA, 24 nt, Artificial Sequence
  Synthetic
uguaccaagaaaaauguuuugugu

SEQ ID NO: 399301 - RNA, 18 nt, Artificial Sequence
  Synthetic
guuccuguuguuuugugu

SEQ ID NO: 399302 - RNA, 19 nt, Artificial Sequence
  Synthetic
uguuccuguuguuuugugu

SEQ ID NO: 399303 - RNA, 20 nt, Artificial Sequence
  Synthetic
guguuccuguuguuuugugu

SEQ ID NO: 399304 - RNA, 21 nt, Artificial Sequence
  Synthetic
uguguuccuguuguuuugugu

SEQ ID NO: 399305 - RNA, 22 nt, Artificial Sequence
  Synthetic
guguguuccuguuguuuugugu

SEQ ID NO: 399306 - RNA, 23 nt, Artificial Sequence
  Synthetic
uguguguuccuguuguuuugugu

SEQ ID NO: 399307 - RNA, 24 nt, Artificial Sequence
  Synthetic
cuguguguuccuguuguuuugugu

SEQ ID NO: 399308 - RNA, 18 nt, Artificial Sequence
  Synthetic
ugagaaacaaaaaauugu

SEQ ID NO: 399309 - RNA, 19 nt, Artificial Sequence
  Synthetic
uugagaaacaaaaaauugu

SEQ ID NO: 399310 - RNA, 20 nt, Artificial Sequence
  Synthetic
cuugagaaacaaaaaauugu

SEQ ID NO: 399311 - RNA, 21 nt, Artificial Sequence
  Synthetic
ucuugagaaacaaaaaauugu

SEQ ID NO: 399312 - RNA, 22 nt, Artificial Sequence
  Synthetic
cucuugagaaacaaaaaauugu

SEQ ID NO: 399313 - RNA, 23 nt, Artificial Sequence
  Synthetic
gcucuugagaaacaaaaaauugu

SEQ ID NO: 399314 - RNA, 24 nt, Artificial Sequence
  Synthetic
ugcucuugagaaacaaaaaauugu

SEQ ID NO: 399315 - RNA, 18 nt, Artificial Sequence
  Synthetic
uauuauacugaaaauugu

SEQ ID NO: 399316 - RNA, 19 nt, Artificial Sequence
  Synthetic
auauuauacugaaaauugu

SEQ ID NO: 399317 - RNA, 20 nt, Artificial Sequence
  Synthetic
cauauuauacugaaaauugu

SEQ ID NO: 399318 - RNA, 21 nt, Artificial Sequence
  Synthetic
acauauuauacugaaaauugu

SEQ ID NO: 399319 - RNA, 22 nt, Artificial Sequence
  Synthetic
aacauauuauacugaaaauugu

SEQ ID NO: 399320 - RNA, 23 nt, Artificial Sequence
  Synthetic
aaacauauuauacugaaaauugu

SEQ ID NO: 399321 - RNA, 24 nt, Artificial Sequence
  Synthetic
caaacauauuauacugaaaauugu

SEQ ID NO: 399322 - RNA, 18 nt, Artificial Sequence
  Synthetic
uaugauauuagaaauugu

SEQ ID NO: 399323 - RNA, 19 nt, Artificial Sequence
  Synthetic
uuaugauauuagaaauugu

SEQ ID NO: 399324 - RNA, 20 nt, Artificial Sequence
  Synthetic
auuaugauauuagaaauugu

SEQ ID NO: 399325 - RNA, 21 nt, Artificial Sequence
  Synthetic
uauuaugauauuagaaauugu

SEQ ID NO: 399326 - RNA, 22 nt, Artificial Sequence
  Synthetic
cuauuaugauauuagaaauugu

SEQ ID NO: 399327 - RNA, 23 nt, Artificial Sequence
  Synthetic
acuauuaugauauuagaaauugu

SEQ ID NO: 399328 - RNA, 24 nt, Artificial Sequence
  Synthetic
aacuauuaugauauuagaaauugu

SEQ ID NO: 399329 - RNA, 18 nt, Artificial Sequence
  Synthetic
ugauaaacuauaaauugu

SEQ ID NO: 399330 - RNA, 19 nt, Artificial Sequence
  Synthetic
cugauaaacuauaaauugu

SEQ ID NO: 399331 - RNA, 20 nt, Artificial Sequence
  Synthetic
ccugauaaacuauaaauugu

SEQ ID NO: 399332 - RNA, 21 nt, Artificial Sequence
  Synthetic
cccugauaaacuauaaauugu

SEQ ID NO: 399333 - RNA, 22 nt, Artificial Sequence
  Synthetic
acccugauaaacuauaaauugu

SEQ ID NO: 399334 - RNA, 23 nt, Artificial Sequence
  Synthetic
cacccugauaaacuauaaauugu

SEQ ID NO: 399335 - RNA, 24 nt, Artificial Sequence
  Synthetic
acacccugauaaacuauaaauugu

SEQ ID NO: 399336 - RNA, 18 nt, Artificial Sequence
  Synthetic
uggguacagaacaauugu

SEQ ID NO: 399337 - RNA, 19 nt, Artificial Sequence
  Synthetic
uuggguacagaacaauugu

SEQ ID NO: 399338 - RNA, 20 nt, Artificial Sequence
  Synthetic
uuuggguacagaacaauugu

SEQ ID NO: 399339 - RNA, 21 nt, Artificial Sequence
  Synthetic
auuuggguacagaacaauugu

SEQ ID NO: 399340 - RNA, 22 nt, Artificial Sequence
  Synthetic
cauuuggguacagaacaauugu

SEQ ID NO: 399341 - RNA, 23 nt, Artificial Sequence
  Synthetic
gcauuuggguacagaacaauugu

SEQ ID NO: 399342 - RNA, 24 nt, Artificial Sequence
  Synthetic
ugcauuuggguacagaacaauugu

SEQ ID NO: 399343 - RNA, 18 nt, Artificial Sequence
  Synthetic
uagaaugcacccaauugu

SEQ ID NO: 399344 - RNA, 19 nt, Artificial Sequence
  Synthetic
guagaaugcacccaauugu

SEQ ID NO: 399345 - RNA, 20 nt, Artificial Sequence
  Synthetic
uguagaaugcacccaauugu

SEQ ID NO: 399346 - RNA, 21 nt, Artificial Sequence
  Synthetic
auguagaaugcacccaauugu

SEQ ID NO: 399347 - RNA, 22 nt, Artificial Sequence
  Synthetic
uauguagaaugcacccaauugu

SEQ ID NO: 399348 - RNA, 23 nt, Artificial Sequence
  Synthetic
uuauguagaaugcacccaauugu

SEQ ID NO: 399349 - RNA, 24 nt, Artificial Sequence
  Synthetic
cuuauguagaaugcacccaauugu

SEQ ID NO: 399350 - RNA, 18 nt, Artificial Sequence
  Synthetic
acagaucaauccaauugu

SEQ ID NO: 399351 - RNA, 19 nt, Artificial Sequence
  Synthetic
cacagaucaauccaauugu

SEQ ID NO: 399352 - RNA, 20 nt, Artificial Sequence
  Synthetic
acacagaucaauccaauugu

SEQ ID NO: 399353 - RNA, 21 nt, Artificial Sequence
  Synthetic
uacacagaucaauccaauugu

SEQ ID NO: 399354 - RNA, 22 nt, Artificial Sequence
  Synthetic
uuacacagaucaauccaauugu

SEQ ID NO: 399355 - RNA, 23 nt, Artificial Sequence
  Synthetic
guuacacagaucaauccaauugu

SEQ ID NO: 399356 - RNA, 24 nt, Artificial Sequence
  Synthetic
aguuacacagaucaauccaauugu

SEQ ID NO: 399357 - RNA, 18 nt, Artificial Sequence
  Synthetic
aucuggagaugcaauugu

SEQ ID NO: 399358 - RNA, 19 nt, Artificial Sequence
  Synthetic
gaucuggagaugcaauugu

SEQ ID NO: 399359 - RNA, 20 nt, Artificial Sequence
  Synthetic
agaucuggagaugcaauugu

SEQ ID NO: 399360 - RNA, 21 nt, Artificial Sequence
  Synthetic
gagaucuggagaugcaauugu

SEQ ID NO: 399361 - RNA, 22 nt, Artificial Sequence
  Synthetic
ggagaucuggagaugcaauugu

SEQ ID NO: 399362 - RNA, 23 nt, Artificial Sequence
  Synthetic
aggagaucuggagaugcaauugu

SEQ ID NO: 399363 - RNA, 24 nt, Artificial Sequence
  Synthetic
aaggagaucuggagaugcaauugu

SEQ ID NO: 399364 - RNA, 18 nt, Artificial Sequence
  Synthetic
ucaccuuagaagaauugu

SEQ ID NO: 399365 - RNA, 19 nt, Artificial Sequence
  Synthetic
gucaccuuagaagaauugu

SEQ ID NO: 399366 - RNA, 20 nt, Artificial Sequence
  Synthetic
agucaccuuagaagaauugu

SEQ ID NO: 399367 - RNA, 21 nt, Artificial Sequence
  Synthetic
aagucaccuuagaagaauugu

SEQ ID NO: 399368 - RNA, 22 nt, Artificial Sequence
  Synthetic
aaagucaccuuagaagaauugu

SEQ ID NO: 399369 - RNA, 23 nt, Artificial Sequence
  Synthetic
gaaagucaccuuagaagaauugu

SEQ ID NO: 399370 - RNA, 24 nt, Artificial Sequence
  Synthetic
agaaagucaccuuagaagaauugu

SEQ ID NO: 399371 - RNA, 18 nt, Artificial Sequence
  Synthetic
cugaggcaggagaauugu

SEQ ID NO: 399372 - RNA, 19 nt, Artificial Sequence
  Synthetic
gcugaggcaggagaauugu

SEQ ID NO: 399373 - RNA, 20 nt, Artificial Sequence
  Synthetic
ggcugaggcaggagaauugu

SEQ ID NO: 399374 - RNA, 21 nt, Artificial Sequence
  Synthetic
aggcugaggcaggagaauugu

SEQ ID NO: 399375 - RNA, 22 nt, Artificial Sequence
  Synthetic
caggcugaggcaggagaauugu

SEQ ID NO: 399376 - RNA, 23 nt, Artificial Sequence
  Synthetic
gcaggcugaggcaggagaauugu

SEQ ID NO: 399377 - RNA, 24 nt, Artificial Sequence
  Synthetic
agcaggcugaggcaggagaauugu

SEQ ID NO: 399378 - RNA, 18 nt, Artificial Sequence
  Synthetic
uucaagauauagaauugu

SEQ ID NO: 399379 - RNA, 19 nt, Artificial Sequence
  Synthetic
uuucaagauauagaauugu

SEQ ID NO: 399380 - RNA, 20 nt, Artificial Sequence
  Synthetic
uuuucaagauauagaauugu

SEQ ID NO: 399381 - RNA, 21 nt, Artificial Sequence
  Synthetic
uuuuucaagauauagaauugu

SEQ ID NO: 399382 - RNA, 22 nt, Artificial Sequence
  Synthetic
uuuuuucaagauauagaauugu

SEQ ID NO: 399383 - RNA, 23 nt, Artificial Sequence
  Synthetic
uuuuuuucaagauauagaauugu

SEQ ID NO: 399384 - RNA, 24 nt, Artificial Sequence
  Synthetic
uuuuuuuucaagauauagaauugu

SEQ ID NO: 399385 - RNA, 18 nt, Artificial Sequence
  Synthetic
uauuuaguuaggaauugu

SEQ ID NO: 399386 - RNA, 19 nt, Artificial Sequence
  Synthetic
guauuuaguuaggaauugu

SEQ ID NO: 399387 - RNA, 20 nt, Artificial Sequence
  Synthetic
gguauuuaguuaggaauugu

SEQ ID NO: 399388 - RNA, 21 nt, Artificial Sequence
  Synthetic
ugguauuuaguuaggaauugu

SEQ ID NO: 399389 - RNA, 22 nt, Artificial Sequence
  Synthetic
cugguauuuaguuaggaauugu

SEQ ID NO: 399390 - RNA, 23 nt, Artificial Sequence
  Synthetic
ucugguauuuaguuaggaauugu

SEQ ID NO: 399391 - RNA, 24 nt, Artificial Sequence
  Synthetic
aucugguauuuaguuaggaauugu

SEQ ID NO: 399392 - RNA, 18 nt, Artificial Sequence
  Synthetic
uguauauucuauaauugu

SEQ ID NO: 399393 - RNA, 19 nt, Artificial Sequence
  Synthetic
auguauauucuauaauugu

SEQ ID NO: 399394 - RNA, 20 nt, Artificial Sequence
  Synthetic
aauguauauucuauaauugu

SEQ ID NO: 399395 - RNA, 21 nt, Artificial Sequence
  Synthetic
gaauguauauucuauaauugu

SEQ ID NO: 399396 - RNA, 22 nt, Artificial Sequence
  Synthetic
agaauguauauucuauaauugu

SEQ ID NO: 399397 - RNA, 23 nt, Artificial Sequence
  Synthetic
aagaauguauauucuauaauugu

SEQ ID NO: 399398 - RNA, 24 nt, Artificial Sequence
  Synthetic
uaagaauguauauucuauaauugu

SEQ ID NO: 399399 - RNA, 18 nt, Artificial Sequence
  Synthetic
aacaaaaauuauaauugu

SEQ ID NO: 399400 - RNA, 19 nt, Artificial Sequence
  Synthetic
gaacaaaaauuauaauugu

SEQ ID NO: 399401 - RNA, 20 nt, Artificial Sequence
  Synthetic
agaacaaaaauuauaauugu

SEQ ID NO: 399402 - RNA, 21 nt, Artificial Sequence
  Synthetic
aagaacaaaaauuauaauugu

SEQ ID NO: 399403 - RNA, 22 nt, Artificial Sequence
  Synthetic
gaagaacaaaaauuauaauugu

SEQ ID NO: 399404 - RNA, 23 nt, Artificial Sequence
  Synthetic
agaagaacaaaaauuauaauugu

SEQ ID NO: 399405 - RNA, 24 nt, Artificial Sequence
  Synthetic
aagaagaacaaaaauuauaauugu

SEQ ID NO: 399406 - RNA, 18 nt, Artificial Sequence
  Synthetic
agguuugucacuaauugu

SEQ ID NO: 399407 - RNA, 19 nt, Artificial Sequence
  Synthetic
aagguuugucacuaauugu

SEQ ID NO: 399408 - RNA, 20 nt, Artificial Sequence
  Synthetic
uaagguuugucacuaauugu

SEQ ID NO: 399409 - RNA, 21 nt, Artificial Sequence
  Synthetic
uuaagguuugucacuaauugu

SEQ ID NO: 399410 - RNA, 22 nt, Artificial Sequence
  Synthetic
auuaagguuugucacuaauugu

SEQ ID NO: 399411 - RNA, 23 nt, Artificial Sequence
  Synthetic
aauuaagguuugucacuaauugu

SEQ ID NO: 399412 - RNA, 24 nt, Artificial Sequence
  Synthetic
gaauuaagguuugucacuaauugu

SEQ ID NO: 399413 - RNA, 18 nt, Artificial Sequence
  Synthetic
uuugggaaacuuaauugu

SEQ ID NO: 399414 - RNA, 19 nt, Artificial Sequence
  Synthetic
auuugggaaacuuaauugu

SEQ ID NO: 399415 - RNA, 20 nt, Artificial Sequence
  Synthetic
aauuugggaaacuuaauugu

SEQ ID NO: 399416 - RNA, 21 nt, Artificial Sequence
  Synthetic
gaauuugggaaacuuaauugu

SEQ ID NO: 399417 - RNA, 22 nt, Artificial Sequence
  Synthetic
ugaauuugggaaacuuaauugu

SEQ ID NO: 399418 - RNA, 23 nt, Artificial Sequence
  Synthetic
uugaauuugggaaacuuaauugu

SEQ ID NO: 399419 - RNA, 24 nt, Artificial Sequence
  Synthetic
cuugaauuugggaaacuuaauugu

SEQ ID NO: 399420 - RNA, 18 nt, Artificial Sequence
  Synthetic
gaagaguuucuuaauugu

SEQ ID NO: 399421 - RNA, 19 nt, Artificial Sequence
  Synthetic
agaagaguuucuuaauugu

SEQ ID NO: 399422 - RNA, 20 nt, Artificial Sequence
  Synthetic
aagaagaguuucuuaauugu

SEQ ID NO: 399423 - RNA, 21 nt, Artificial Sequence
  Synthetic
gaagaagaguuucuuaauugu

SEQ ID NO: 399424 - RNA, 22 nt, Artificial Sequence
  Synthetic
ggaagaagaguuucuuaauugu

SEQ ID NO: 399425 - RNA, 23 nt, Artificial Sequence
  Synthetic
aggaagaagaguuucuuaauugu

SEQ ID NO: 399426 - RNA, 24 nt, Artificial Sequence
  Synthetic
aaggaagaagaguuucuuaauugu

SEQ ID NO: 399427 - RNA, 18 nt, Artificial Sequence
  Synthetic
guauuuguucaacauugu

SEQ ID NO: 399428 - RNA, 19 nt, Artificial Sequence
  Synthetic
aguauuuguucaacauugu

SEQ ID NO: 399429 - RNA, 20 nt, Artificial Sequence
  Synthetic
caguauuuguucaacauugu

SEQ ID NO: 399430 - RNA, 21 nt, Artificial Sequence
  Synthetic
acaguauuuguucaacauugu

SEQ ID NO: 399431 - RNA, 22 nt, Artificial Sequence
  Synthetic
uacaguauuuguucaacauugu

SEQ ID NO: 399432 - RNA, 23 nt, Artificial Sequence
  Synthetic
auacaguauuuguucaacauugu

SEQ ID NO: 399433 - RNA, 24 nt, Artificial Sequence
  Synthetic
uauacaguauuuguucaacauugu

SEQ ID NO: 399434 - RNA, 18 nt, Artificial Sequence
  Synthetic
acaaaguauccacauugu

SEQ ID NO: 399435 - RNA, 19 nt, Artificial Sequence
  Synthetic
aacaaaguauccacauugu

SEQ ID NO: 399436 - RNA, 20 nt, Artificial Sequence
  Synthetic
aaacaaaguauccacauugu

SEQ ID NO: 399437 - RNA, 21 nt, Artificial Sequence
  Synthetic
uaaacaaaguauccacauugu

SEQ ID NO: 399438 - RNA, 22 nt, Artificial Sequence
  Synthetic
cuaaacaaaguauccacauugu

SEQ ID NO: 399439 - RNA, 23 nt, Artificial Sequence
  Synthetic
gcuaaacaaaguauccacauugu

SEQ ID NO: 399440 - RNA, 24 nt, Artificial Sequence
  Synthetic
ugcuaaacaaaguauccacauugu

SEQ ID NO: 399441 - RNA, 18 nt, Artificial Sequence
  Synthetic
augguugccauacauugu

SEQ ID NO: 399442 - RNA, 19 nt, Artificial Sequence
  Synthetic
aaugguugccauacauugu

SEQ ID NO: 399443 - RNA, 20 nt, Artificial Sequence
  Synthetic
aaaugguugccauacauugu

SEQ ID NO: 399444 - RNA, 21 nt, Artificial Sequence
  Synthetic
aaaaugguugccauacauugu

SEQ ID NO: 399445 - RNA, 22 nt, Artificial Sequence
  Synthetic
aaaaaugguugccauacauugu

SEQ ID NO: 399446 - RNA, 23 nt, Artificial Sequence
  Synthetic
gaaaaaugguugccauacauugu

SEQ ID NO: 399447 - RNA, 24 nt, Artificial Sequence
  Synthetic
agaaaaaugguugccauacauugu

SEQ ID NO: 399448 - RNA, 18 nt, Artificial Sequence
  Synthetic
ggagccaauaaccauugu

SEQ ID NO: 399449 - RNA, 19 nt, Artificial Sequence
  Synthetic
aggagccaauaaccauugu

SEQ ID NO: 399450 - RNA, 20 nt, Artificial Sequence
  Synthetic
gaggagccaauaaccauugu

SEQ ID NO: 399451 - RNA, 21 nt, Artificial Sequence
  Synthetic
ugaggagccaauaaccauugu

SEQ ID NO: 399452 - RNA, 22 nt, Artificial Sequence
  Synthetic
augaggagccaauaaccauugu

SEQ ID NO: 399453 - RNA, 23 nt, Artificial Sequence
  Synthetic
caugaggagccaauaaccauugu

SEQ ID NO: 399454 - RNA, 24 nt, Artificial Sequence
  Synthetic
acaugaggagccaauaaccauugu

SEQ ID NO: 399455 - RNA, 18 nt, Artificial Sequence
  Synthetic
gaccuuugaagccauugu

SEQ ID NO: 399456 - RNA, 19 nt, Artificial Sequence
  Synthetic
ggaccuuugaagccauugu

SEQ ID NO: 399457 - RNA, 20 nt, Artificial Sequence
  Synthetic
uggaccuuugaagccauugu

SEQ ID NO: 399458 - RNA, 21 nt, Artificial Sequence
  Synthetic
guggaccuuugaagccauugu

SEQ ID NO: 399459 - RNA, 22 nt, Artificial Sequence
  Synthetic
gguggaccuuugaagccauugu

SEQ ID NO: 399460 - RNA, 23 nt, Artificial Sequence
  Synthetic
ggguggaccuuugaagccauugu

SEQ ID NO: 399461 - RNA, 24 nt, Artificial Sequence
  Synthetic
aggguggaccuuugaagccauugu

SEQ ID NO: 399462 - RNA, 18 nt, Artificial Sequence
  Synthetic
aagauaaaauggcauugu

SEQ ID NO: 399463 - RNA, 19 nt, Artificial Sequence
  Synthetic
gaagauaaaauggcauugu

SEQ ID NO: 399464 - RNA, 20 nt, Artificial Sequence
  Synthetic
agaagauaaaauggcauugu

SEQ ID NO: 399465 - RNA, 21 nt, Artificial Sequence
  Synthetic
cagaagauaaaauggcauugu

SEQ ID NO: 399466 - RNA, 22 nt, Artificial Sequence
  Synthetic
gcagaagauaaaauggcauugu

SEQ ID NO: 399467 - RNA, 23 nt, Artificial Sequence
  Synthetic
agcagaagauaaaauggcauugu

SEQ ID NO: 399468 - RNA, 24 nt, Artificial Sequence
  Synthetic
aagcagaagauaaaauggcauugu

SEQ ID NO: 399469 - RNA, 18 nt, Artificial Sequence
  Synthetic
aaucagaaucugcauugu

SEQ ID NO: 399470 - RNA, 19 nt, Artificial Sequence
  Synthetic
gaaucagaaucugcauugu

SEQ ID NO: 399471 - RNA, 20 nt, Artificial Sequence
  Synthetic
ugaaucagaaucugcauugu

SEQ ID NO: 399472 - RNA, 21 nt, Artificial Sequence
  Synthetic
uugaaucagaaucugcauugu

SEQ ID NO: 399473 - RNA, 22 nt, Artificial Sequence
  Synthetic
guugaaucagaaucugcauugu

SEQ ID NO: 399474 - RNA, 23 nt, Artificial Sequence
  Synthetic
uguugaaucagaaucugcauugu

SEQ ID NO: 399475 - RNA, 24 nt, Artificial Sequence
  Synthetic
cuguugaaucagaaucugcauugu

SEQ ID NO: 399476 - RNA, 18 nt, Artificial Sequence
  Synthetic
acuuaagacucucauugu

SEQ ID NO: 399477 - RNA, 19 nt, Artificial Sequence
  Synthetic
uacuuaagacucucauugu

SEQ ID NO: 399478 - RNA, 20 nt, Artificial Sequence
  Synthetic
uuacuuaagacucucauugu

SEQ ID NO: 399479 - RNA, 21 nt, Artificial Sequence
  Synthetic
auuacuuaagacucucauugu

SEQ ID NO: 399480 - RNA, 22 nt, Artificial Sequence
  Synthetic
gauuacuuaagacucucauugu

SEQ ID NO: 399481 - RNA, 23 nt, Artificial Sequence
  Synthetic
ugauuacuuaagacucucauugu

SEQ ID NO: 399482 - RNA, 24 nt, Artificial Sequence
  Synthetic
augauuacuuaagacucucauugu

SEQ ID NO: 399483 - RNA, 18 nt, Artificial Sequence
  Synthetic
gaauuggaaagucauugu

SEQ ID NO: 399484 - RNA, 19 nt, Artificial Sequence
  Synthetic
agaauuggaaagucauugu

SEQ ID NO: 399485 - RNA, 20 nt, Artificial Sequence
  Synthetic
aagaauuggaaagucauugu

SEQ ID NO: 399486 - RNA, 21 nt, Artificial Sequence
  Synthetic
gaagaauuggaaagucauugu

SEQ ID NO: 399487 - RNA, 22 nt, Artificial Sequence
  Synthetic
ugaagaauuggaaagucauugu

SEQ ID NO: 399488 - RNA, 23 nt, Artificial Sequence
  Synthetic
augaagaauuggaaagucauugu

SEQ ID NO: 399489 - RNA, 24 nt, Artificial Sequence
  Synthetic
gaugaagaauuggaaagucauugu

SEQ ID NO: 399490 - RNA, 18 nt, Artificial Sequence
  Synthetic
uucauacauauucauugu

SEQ ID NO: 399491 - RNA, 19 nt, Artificial Sequence
  Synthetic
uuucauacauauucauugu

SEQ ID NO: 399492 - RNA, 20 nt, Artificial Sequence
  Synthetic
guuucauacauauucauugu

SEQ ID NO: 399493 - RNA, 21 nt, Artificial Sequence
  Synthetic
uguuucauacauauucauugu

SEQ ID NO: 399494 - RNA, 22 nt, Artificial Sequence
  Synthetic
guguuucauacauauucauugu

SEQ ID NO: 399495 - RNA, 23 nt, Artificial Sequence
  Synthetic
gguguuucauacauauucauugu

SEQ ID NO: 399496 - RNA, 24 nt, Artificial Sequence
  Synthetic
ugguguuucauacauauucauugu

SEQ ID NO: 399497 - RNA, 18 nt, Artificial Sequence
  Synthetic
acuuaauagguucauugu

SEQ ID NO: 399498 - RNA, 19 nt, Artificial Sequence
  Synthetic
uacuuaauagguucauugu

SEQ ID NO: 399499 - RNA, 20 nt, Artificial Sequence
  Synthetic
cuacuuaauagguucauugu

SEQ ID NO: 399500 - RNA, 21 nt, Artificial Sequence
  Synthetic
ucuacuuaauagguucauugu

SEQ ID NO: 399501 - RNA, 22 nt, Artificial Sequence
  Synthetic
aucuacuuaauagguucauugu

SEQ ID NO: 399502 - RNA, 23 nt, Artificial Sequence
  Synthetic
caucuacuuaauagguucauugu

SEQ ID NO: 399503 - RNA, 24 nt, Artificial Sequence
  Synthetic
acaucuacuuaauagguucauugu

SEQ ID NO: 399504 - RNA, 18 nt, Artificial Sequence
  Synthetic
cuuuuacaaggagauugu

SEQ ID NO: 399505 - RNA, 19 nt, Artificial Sequence
  Synthetic
gcuuuuacaaggagauugu

SEQ ID NO: 399506 - RNA, 20 nt, Artificial Sequence
  Synthetic
ugcuuuuacaaggagauugu

SEQ ID NO: 399507 - RNA, 21 nt, Artificial Sequence
  Synthetic
cugcuuuuacaaggagauugu

SEQ ID NO: 399508 - RNA, 22 nt, Artificial Sequence
  Synthetic
gcugcuuuuacaaggagauugu

SEQ ID NO: 399509 - RNA, 23 nt, Artificial Sequence
  Synthetic
agcugcuuuuacaaggagauugu

SEQ ID NO: 399510 - RNA, 24 nt, Artificial Sequence
  Synthetic
uagcugcuuuuacaaggagauugu

SEQ ID NO: 399511 - RNA, 18 nt, Artificial Sequence
  Synthetic
gagcacaagggagauugu

SEQ ID NO: 399512 - RNA, 19 nt, Artificial Sequence
  Synthetic
agagcacaagggagauugu

SEQ ID NO: 399513 - RNA, 20 nt, Artificial Sequence
  Synthetic
aagagcacaagggagauugu

SEQ ID NO: 399514 - RNA, 21 nt, Artificial Sequence
  Synthetic
gaagagcacaagggagauugu

SEQ ID NO: 399515 - RNA, 22 nt, Artificial Sequence
  Synthetic
agaagagcacaagggagauugu

SEQ ID NO: 399516 - RNA, 23 nt, Artificial Sequence
  Synthetic
gagaagagcacaagggagauugu

SEQ ID NO: 399517 - RNA, 24 nt, Artificial Sequence
  Synthetic
agagaagagcacaagggagauugu

SEQ ID NO: 399518 - RNA, 18 nt, Artificial Sequence
  Synthetic
cuaaggugggaggauugu

SEQ ID NO: 399519 - RNA, 19 nt, Artificial Sequence
  Synthetic
gcuaaggugggaggauugu

SEQ ID NO: 399520 - RNA, 20 nt, Artificial Sequence
  Synthetic
ggcuaaggugggaggauugu

SEQ ID NO: 399521 - RNA, 21 nt, Artificial Sequence
  Synthetic
aggcuaaggugggaggauugu

SEQ ID NO: 399522 - RNA, 22 nt, Artificial Sequence
  Synthetic
aaggcuaaggugggaggauugu

SEQ ID NO: 399523 - RNA, 23 nt, Artificial Sequence
  Synthetic
gaaggcuaaggugggaggauugu

SEQ ID NO: 399524 - RNA, 24 nt, Artificial Sequence
  Synthetic
ggaaggcuaaggugggaggauugu

SEQ ID NO: 399525 - RNA, 18 nt, Artificial Sequence
  Synthetic
uggaaucacagggauugu

SEQ ID NO: 399526 - RNA, 19 nt, Artificial Sequence
  Synthetic
auggaaucacagggauugu

SEQ ID NO: 399527 - RNA, 20 nt, Artificial Sequence
  Synthetic
gauggaaucacagggauugu

SEQ ID NO: 399528 - RNA, 21 nt, Artificial Sequence
  Synthetic
ugauggaaucacagggauugu

SEQ ID NO: 399529 - RNA, 22 nt, Artificial Sequence
  Synthetic
cugauggaaucacagggauugu

SEQ ID NO: 399530 - RNA, 23 nt, Artificial Sequence
  Synthetic
gcugauggaaucacagggauugu

SEQ ID NO: 399531 - RNA, 24 nt, Artificial Sequence
  Synthetic
agcugauggaaucacagggauugu

SEQ ID NO: 399532 - RNA, 18 nt, Artificial Sequence
  Synthetic
auuaacucauaugauugu

SEQ ID NO: 399533 - RNA, 19 nt, Artificial Sequence
  Synthetic
cauuaacucauaugauugu

SEQ ID NO: 399534 - RNA, 20 nt, Artificial Sequence
  Synthetic
ccauuaacucauaugauugu

SEQ ID NO: 399535 - RNA, 21 nt, Artificial Sequence
  Synthetic
gccauuaacucauaugauugu

SEQ ID NO: 399536 - RNA, 22 nt, Artificial Sequence
  Synthetic
agccauuaacucauaugauugu

SEQ ID NO: 399537 - RNA, 23 nt, Artificial Sequence
  Synthetic
aagccauuaacucauaugauugu

SEQ ID NO: 399538 - RNA, 24 nt, Artificial Sequence
  Synthetic
uaagccauuaacucauaugauugu

SEQ ID NO: 399539 - RNA, 18 nt, Artificial Sequence
  Synthetic
ugaccucuaacugauugu

SEQ ID NO: 399540 - RNA, 19 nt, Artificial Sequence
  Synthetic
cugaccucuaacugauugu

SEQ ID NO: 399541 - RNA, 20 nt, Artificial Sequence
  Synthetic
ucugaccucuaacugauugu

SEQ ID NO: 399542 - RNA, 21 nt, Artificial Sequence
  Synthetic
uucugaccucuaacugauugu

SEQ ID NO: 399543 - RNA, 22 nt, Artificial Sequence
  Synthetic
auucugaccucuaacugauugu

SEQ ID NO: 399544 - RNA, 23 nt, Artificial Sequence
  Synthetic
cauucugaccucuaacugauugu

SEQ ID NO: 399545 - RNA, 24 nt, Artificial Sequence
  Synthetic
gcauucugaccucuaacugauugu

SEQ ID NO: 399546 - RNA, 18 nt, Artificial Sequence
  Synthetic
aacuuccccagugauugu

SEQ ID NO: 399547 - RNA, 19 nt, Artificial Sequence
  Synthetic
uaacuuccccagugauugu

SEQ ID NO: 399548 - RNA, 20 nt, Artificial Sequence
  Synthetic
guaacuuccccagugauugu

SEQ ID NO: 399549 - RNA, 21 nt, Artificial Sequence
  Synthetic
aguaacuuccccagugauugu

SEQ ID NO: 399550 - RNA, 22 nt, Artificial Sequence
  Synthetic
aaguaacuuccccagugauugu

SEQ ID NO: 399551 - RNA, 23 nt, Artificial Sequence
  Synthetic
gaaguaacuuccccagugauugu

SEQ ID NO: 399552 - RNA, 24 nt, Artificial Sequence
  Synthetic
ggaaguaacuuccccagugauugu

SEQ ID NO: 399553 - RNA, 18 nt, Artificial Sequence
  Synthetic
gaaaagcaaaaauauugu

SEQ ID NO: 399554 - RNA, 19 nt, Artificial Sequence
  Synthetic
agaaaagcaaaaauauugu

SEQ ID NO: 399555 - RNA, 20 nt, Artificial Sequence
  Synthetic
aagaaaagcaaaaauauugu

SEQ ID NO: 399556 - RNA, 21 nt, Artificial Sequence
  Synthetic
aaagaaaagcaaaaauauugu

SEQ ID NO: 399557 - RNA, 22 nt, Artificial Sequence
  Synthetic
aaaagaaaagcaaaaauauugu

SEQ ID NO: 399558 - RNA, 23 nt, Artificial Sequence
  Synthetic
uaaaagaaaagcaaaaauauugu

SEQ ID NO: 399559 - RNA, 24 nt, Artificial Sequence
  Synthetic
auaaaagaaaagcaaaaauauugu

SEQ ID NO: 399560 - RNA, 18 nt, Artificial Sequence
  Synthetic
ggcuucuuuagauauugu

SEQ ID NO: 399561 - RNA, 19 nt, Artificial Sequence
  Synthetic
gggcuucuuuagauauugu

SEQ ID NO: 399562 - RNA, 20 nt, Artificial Sequence
  Synthetic
agggcuucuuuagauauugu

SEQ ID NO: 399563 - RNA, 21 nt, Artificial Sequence
  Synthetic
cagggcuucuuuagauauugu

SEQ ID NO: 399564 - RNA, 22 nt, Artificial Sequence
  Synthetic
gcagggcuucuuuagauauugu

SEQ ID NO: 399565 - RNA, 23 nt, Artificial Sequence
  Synthetic
ugcagggcuucuuuagauauugu

SEQ ID NO: 399566 - RNA, 24 nt, Artificial Sequence
  Synthetic
uugcagggcuucuuuagauauugu

SEQ ID NO: 399567 - RNA, 18 nt, Artificial Sequence
  Synthetic
ugagagcauauauauugu

SEQ ID NO: 399568 - RNA, 19 nt, Artificial Sequence
  Synthetic
uugagagcauauauauugu

SEQ ID NO: 399569 - RNA, 20 nt, Artificial Sequence
  Synthetic
uuugagagcauauauauugu

SEQ ID NO: 399570 - RNA, 21 nt, Artificial Sequence
  Synthetic
uuuugagagcauauauauugu

SEQ ID NO: 399571 - RNA, 22 nt, Artificial Sequence
  Synthetic
cuuuugagagcauauauauugu

SEQ ID NO: 399572 - RNA, 23 nt, Artificial Sequence
  Synthetic
gcuuuugagagcauauauauugu

SEQ ID NO: 399573 - RNA, 24 nt, Artificial Sequence
  Synthetic
ugcuuuugagagcauauauauugu

SEQ ID NO: 399574 - RNA, 18 nt, Artificial Sequence
  Synthetic
ugagaugcacacuauugu

SEQ ID NO: 399575 - RNA, 19 nt, Artificial Sequence
  Synthetic
augagaugcacacuauugu

SEQ ID NO: 399576 - RNA, 20 nt, Artificial Sequence
  Synthetic
aaugagaugcacacuauugu

SEQ ID NO: 399577 - RNA, 21 nt, Artificial Sequence
  Synthetic
caaugagaugcacacuauugu

SEQ ID NO: 399578 - RNA, 22 nt, Artificial Sequence
  Synthetic
acaaugagaugcacacuauugu

SEQ ID NO: 399579 - RNA, 23 nt, Artificial Sequence
  Synthetic
gacaaugagaugcacacuauugu

SEQ ID NO: 399580 - RNA, 24 nt, Artificial Sequence
  Synthetic
ugacaaugagaugcacacuauugu

SEQ ID NO: 399581 - RNA, 18 nt, Artificial Sequence
  Synthetic
cuugaaaucagcuauugu

SEQ ID NO: 399582 - RNA, 19 nt, Artificial Sequence
  Synthetic
gcuugaaaucagcuauugu

SEQ ID NO: 399583 - RNA, 20 nt, Artificial Sequence
  Synthetic
ugcuugaaaucagcuauugu

SEQ ID NO: 399584 - RNA, 21 nt, Artificial Sequence
  Synthetic
uugcuugaaaucagcuauugu

SEQ ID NO: 399585 - RNA, 22 nt, Artificial Sequence
  Synthetic
guugcuugaaaucagcuauugu

SEQ ID NO: 399586 - RNA, 23 nt, Artificial Sequence
  Synthetic
aguugcuugaaaucagcuauugu

SEQ ID NO: 399587 - RNA, 24 nt, Artificial Sequence
  Synthetic
uaguugcuugaaaucagcuauugu

SEQ ID NO: 399588 - RNA, 18 nt, Artificial Sequence
  Synthetic
caaagagaggucuauugu

SEQ ID NO: 399589 - RNA, 19 nt, Artificial Sequence
  Synthetic
gcaaagagaggucuauugu

SEQ ID NO: 399590 - RNA, 20 nt, Artificial Sequence
  Synthetic
agcaaagagaggucuauugu

SEQ ID NO: 399591 - RNA, 21 nt, Artificial Sequence
  Synthetic
gagcaaagagaggucuauugu

SEQ ID NO: 399592 - RNA, 22 nt, Artificial Sequence
  Synthetic
agagcaaagagaggucuauugu

SEQ ID NO: 399593 - RNA, 23 nt, Artificial Sequence
  Synthetic
cagagcaaagagaggucuauugu

SEQ ID NO: 399594 - RNA, 24 nt, Artificial Sequence
  Synthetic
acagagcaaagagaggucuauugu

SEQ ID NO: 399595 - RNA, 18 nt, Artificial Sequence
  Synthetic
guaggucugggguauugu

SEQ ID NO: 399596 - RNA, 19 nt, Artificial Sequence
  Synthetic
aguaggucugggguauugu

SEQ ID NO: 399597 - RNA, 20 nt, Artificial Sequence
  Synthetic
caguaggucugggguauugu

SEQ ID NO: 399598 - RNA, 21 nt, Artificial Sequence
  Synthetic
ucaguaggucugggguauugu

SEQ ID NO: 399599 - RNA, 22 nt, Artificial Sequence
  Synthetic
uucaguaggucugggguauugu

SEQ ID NO: 399600 - RNA, 23 nt, Artificial Sequence
  Synthetic
auucaguaggucugggguauugu

SEQ ID NO: 399601 - RNA, 24 nt, Artificial Sequence
  Synthetic
gauucaguaggucugggguauugu

SEQ ID NO: 399602 - RNA, 18 nt, Artificial Sequence
  Synthetic
gauauuacaaauuauugu

SEQ ID NO: 399603 - RNA, 19 nt, Artificial Sequence
  Synthetic
ugauauuacaaauuauugu

SEQ ID NO: 399604 - RNA, 20 nt, Artificial Sequence
  Synthetic
gugauauuacaaauuauugu

SEQ ID NO: 399605 - RNA, 21 nt, Artificial Sequence
  Synthetic
ugugauauuacaaauuauugu

SEQ ID NO: 399606 - RNA, 22 nt, Artificial Sequence
  Synthetic
augugauauuacaaauuauugu

SEQ ID NO: 399607 - RNA, 23 nt, Artificial Sequence
  Synthetic
gaugugauauuacaaauuauugu

SEQ ID NO: 399608 - RNA, 24 nt, Artificial Sequence
  Synthetic
agaugugauauuacaaauuauugu

SEQ ID NO: 399609 - RNA, 18 nt, Artificial Sequence
  Synthetic
acaaggccugguuauugu

SEQ ID NO: 399610 - RNA, 19 nt, Artificial Sequence
  Synthetic
uacaaggccugguuauugu

SEQ ID NO: 399611 - RNA, 20 nt, Artificial Sequence
  Synthetic
uuacaaggccugguuauugu

SEQ ID NO: 399612 - RNA, 21 nt, Artificial Sequence
  Synthetic
auuacaaggccugguuauugu

SEQ ID NO: 399613 - RNA, 22 nt, Artificial Sequence
  Synthetic
aauuacaaggccugguuauugu

SEQ ID NO: 399614 - RNA, 23 nt, Artificial Sequence
  Synthetic
aaauuacaaggccugguuauugu

SEQ ID NO: 399615 - RNA, 24 nt, Artificial Sequence
  Synthetic
uaaauuacaaggccugguuauugu

SEQ ID NO: 399616 - RNA, 18 nt, Artificial Sequence
  Synthetic
guuuuuaugcuuuauugu

SEQ ID NO: 399617 - RNA, 19 nt, Artificial Sequence
  Synthetic
uguuuuuaugcuuuauugu

SEQ ID NO: 399618 - RNA, 20 nt, Artificial Sequence
  Synthetic
uuguuuuuaugcuuuauugu

SEQ ID NO: 399619 - RNA, 21 nt, Artificial Sequence
  Synthetic
uuuguuuuuaugcuuuauugu

SEQ ID NO: 399620 - RNA, 22 nt, Artificial Sequence
  Synthetic
uuuuguuuuuaugcuuuauugu

SEQ ID NO: 399621 - RNA, 23 nt, Artificial Sequence
  Synthetic
guuuuguuuuuaugcuuuauugu

SEQ ID NO: 399622 - RNA, 24 nt, Artificial Sequence
  Synthetic
uguuuuguuuuuaugcuuuauugu

SEQ ID NO: 399623 - RNA, 18 nt, Artificial Sequence
  Synthetic
ucuucucgaaaaacuugu

SEQ ID NO: 399624 - RNA, 19 nt, Artificial Sequence
  Synthetic
uucuucucgaaaaacuugu

SEQ ID NO: 399625 - RNA, 20 nt, Artificial Sequence
  Synthetic
auucuucucgaaaaacuugu

SEQ ID NO: 399626 - RNA, 21 nt, Artificial Sequence
  Synthetic
gauucuucucgaaaaacuugu

SEQ ID NO: 399627 - RNA, 22 nt, Artificial Sequence
  Synthetic
ggauucuucucgaaaaacuugu

SEQ ID NO: 399628 - RNA, 23 nt, Artificial Sequence
  Synthetic
uggauucuucucgaaaaacuugu

SEQ ID NO: 399629 - RNA, 24 nt, Artificial Sequence
  Synthetic
auggauucuucucgaaaaacuugu

SEQ ID NO: 399630 - RNA, 18 nt, Artificial Sequence
  Synthetic
guucaguggacaacuugu

SEQ ID NO: 399631 - RNA, 19 nt, Artificial Sequence
  Synthetic
uguucaguggacaacuugu

SEQ ID NO: 399632 - RNA, 20 nt, Artificial Sequence
  Synthetic
uuguucaguggacaacuugu

SEQ ID NO: 399633 - RNA, 21 nt, Artificial Sequence
  Synthetic
auuguucaguggacaacuugu

SEQ ID NO: 399634 - RNA, 22 nt, Artificial Sequence
  Synthetic
aauuguucaguggacaacuugu

SEQ ID NO: 399635 - RNA, 23 nt, Artificial Sequence
  Synthetic
aaauuguucaguggacaacuugu

SEQ ID NO: 399636 - RNA, 24 nt, Artificial Sequence
  Synthetic
caaauuguucaguggacaacuugu

SEQ ID NO: 399637 - RNA, 18 nt, Artificial Sequence
  Synthetic
aucagugaaauaacuugu

SEQ ID NO: 399638 - RNA, 19 nt, Artificial Sequence
  Synthetic
aaucagugaaauaacuugu

SEQ ID NO: 399639 - RNA, 20 nt, Artificial Sequence
  Synthetic
uaaucagugaaauaacuugu

SEQ ID NO: 399640 - RNA, 21 nt, Artificial Sequence
  Synthetic
auaaucagugaaauaacuugu

SEQ ID NO: 399641 - RNA, 22 nt, Artificial Sequence
  Synthetic
uauaaucagugaaauaacuugu

SEQ ID NO: 399642 - RNA, 23 nt, Artificial Sequence
  Synthetic
uuauaaucagugaaauaacuugu

SEQ ID NO: 399643 - RNA, 24 nt, Artificial Sequence
  Synthetic
uuuauaaucagugaaauaacuugu

SEQ ID NO: 399644 - RNA, 18 nt, Artificial Sequence
  Synthetic
uuugggguaaagacuugu

SEQ ID NO: 399645 - RNA, 19 nt, Artificial Sequence
  Synthetic
uuuugggguaaagacuugu

SEQ ID NO: 399646 - RNA, 20 nt, Artificial Sequence
  Synthetic
auuuugggguaaagacuugu

SEQ ID NO: 399647 - RNA, 21 nt, Artificial Sequence
  Synthetic
uauuuugggguaaagacuugu

SEQ ID NO: 399648 - RNA, 22 nt, Artificial Sequence
  Synthetic
uuauuuugggguaaagacuugu

SEQ ID NO: 399649 - RNA, 23 nt, Artificial Sequence
  Synthetic
guuauuuugggguaaagacuugu

SEQ ID NO: 399650 - RNA, 24 nt, Artificial Sequence
  Synthetic
gguuauuuugggguaaagacuugu

SEQ ID NO: 399651 - RNA, 18 nt, Artificial Sequence
  Synthetic
guguggcuguagacuugu

SEQ ID NO: 399652 - RNA, 19 nt, Artificial Sequence
  Synthetic
gguguggcuguagacuugu

SEQ ID NO: 399653 - RNA, 20 nt, Artificial Sequence
  Synthetic
ugguguggcuguagacuugu

SEQ ID NO: 399654 - RNA, 21 nt, Artificial Sequence
  Synthetic
cugguguggcuguagacuugu

SEQ ID NO: 399655 - RNA, 22 nt, Artificial Sequence
  Synthetic
gcugguguggcuguagacuugu

SEQ ID NO: 399656 - RNA, 23 nt, Artificial Sequence
  Synthetic
ggcugguguggcuguagacuugu

SEQ ID NO: 399657 - RNA, 24 nt, Artificial Sequence
  Synthetic
aggcugguguggcuguagacuugu

SEQ ID NO: 399658 - RNA, 18 nt, Artificial Sequence
  Synthetic
aagaaguaaaauacuugu

SEQ ID NO: 399659 - RNA, 19 nt, Artificial Sequence
  Synthetic
caagaaguaaaauacuugu

SEQ ID NO: 399660 - RNA, 20 nt, Artificial Sequence
  Synthetic
acaagaaguaaaauacuugu

SEQ ID NO: 399661 - RNA, 21 nt, Artificial Sequence
  Synthetic
gacaagaaguaaaauacuugu

SEQ ID NO: 399662 - RNA, 22 nt, Artificial Sequence
  Synthetic
agacaagaaguaaaauacuugu

SEQ ID NO: 399663 - RNA, 23 nt, Artificial Sequence
  Synthetic
uagacaagaaguaaaauacuugu

SEQ ID NO: 399664 - RNA, 24 nt, Artificial Sequence
  Synthetic
uuagacaagaaguaaaauacuugu

SEQ ID NO: 399665 - RNA, 18 nt, Artificial Sequence
  Synthetic
guauggcuagauacuugu

SEQ ID NO: 399666 - RNA, 19 nt, Artificial Sequence
  Synthetic
aguauggcuagauacuugu

SEQ ID NO: 399667 - RNA, 20 nt, Artificial Sequence
  Synthetic
uaguauggcuagauacuugu

SEQ ID NO: 399668 - RNA, 21 nt, Artificial Sequence
  Synthetic
cuaguauggcuagauacuugu

SEQ ID NO: 399669 - RNA, 22 nt, Artificial Sequence
  Synthetic
ccuaguauggcuagauacuugu

SEQ ID NO: 399670 - RNA, 23 nt, Artificial Sequence
  Synthetic
uccuaguauggcuagauacuugu

SEQ ID NO: 399671 - RNA, 24 nt, Artificial Sequence
  Synthetic
uuccuaguauggcuagauacuugu

SEQ ID NO: 399672 - RNA, 18 nt, Artificial Sequence
  Synthetic
caguguaauuauacuugu

SEQ ID NO: 399673 - RNA, 19 nt, Artificial Sequence
  Synthetic
ccaguguaauuauacuugu

SEQ ID NO: 399674 - RNA, 20 nt, Artificial Sequence
  Synthetic
accaguguaauuauacuugu

SEQ ID NO: 399675 - RNA, 21 nt, Artificial Sequence
  Synthetic
aaccaguguaauuauacuugu

SEQ ID NO: 399676 - RNA, 22 nt, Artificial Sequence
  Synthetic
caaccaguguaauuauacuugu

SEQ ID NO: 399677 - RNA, 23 nt, Artificial Sequence
  Synthetic
ccaaccaguguaauuauacuugu

SEQ ID NO: 399678 - RNA, 24 nt, Artificial Sequence
  Synthetic
uccaaccaguguaauuauacuugu

SEQ ID NO: 399679 - RNA, 18 nt, Artificial Sequence
  Synthetic
uaaucguacacuacuugu

SEQ ID NO: 399680 - RNA, 19 nt, Artificial Sequence
  Synthetic
guaaucguacacuacuugu

SEQ ID NO: 399681 - RNA, 20 nt, Artificial Sequence
  Synthetic
uguaaucguacacuacuugu

SEQ ID NO: 399682 - RNA, 21 nt, Artificial Sequence
  Synthetic
uuguaaucguacacuacuugu

SEQ ID NO: 399683 - RNA, 22 nt, Artificial Sequence
  Synthetic
uuuguaaucguacacuacuugu

SEQ ID NO: 399684 - RNA, 23 nt, Artificial Sequence
  Synthetic
auuuguaaucguacacuacuugu

SEQ ID NO: 399685 - RNA, 24 nt, Artificial Sequence
  Synthetic
uauuuguaaucguacacuacuugu

SEQ ID NO: 399686 - RNA, 18 nt, Artificial Sequence
  Synthetic
uucuaguauacuacuugu

SEQ ID NO: 399687 - RNA, 19 nt, Artificial Sequence
  Synthetic
cuucuaguauacuacuugu

SEQ ID NO: 399688 - RNA, 20 nt, Artificial Sequence
  Synthetic
ucuucuaguauacuacuugu

SEQ ID NO: 399689 - RNA, 21 nt, Artificial Sequence
  Synthetic
aucuucuaguauacuacuugu

SEQ ID NO: 399690 - RNA, 22 nt, Artificial Sequence
  Synthetic
uaucuucuaguauacuacuugu

SEQ ID NO: 399691 - RNA, 23 nt, Artificial Sequence
  Synthetic
guaucuucuaguauacuacuugu

SEQ ID NO: 399692 - RNA, 24 nt, Artificial Sequence
  Synthetic
cguaucuucuaguauacuacuugu

SEQ ID NO: 399693 - RNA, 18 nt, Artificial Sequence
  Synthetic
aggcuuucuauuacuugu

SEQ ID NO: 399694 - RNA, 19 nt, Artificial Sequence
  Synthetic
uaggcuuucuauuacuugu

SEQ ID NO: 399695 - RNA, 20 nt, Artificial Sequence
  Synthetic
auaggcuuucuauuacuugu

SEQ ID NO: 399696 - RNA, 21 nt, Artificial Sequence
  Synthetic
aauaggcuuucuauuacuugu

SEQ ID NO: 399697 - RNA, 22 nt, Artificial Sequence
  Synthetic
gaauaggcuuucuauuacuugu

SEQ ID NO: 399698 - RNA, 23 nt, Artificial Sequence
  Synthetic
agaauaggcuuucuauuacuugu

SEQ ID NO: 399699 - RNA, 24 nt, Artificial Sequence
  Synthetic
cagaauaggcuuucuauuacuugu

SEQ ID NO: 399700 - RNA, 18 nt, Artificial Sequence
  Synthetic
auuguauuauuuacuugu

SEQ ID NO: 399701 - RNA, 19 nt, Artificial Sequence
  Synthetic
cauuguauuauuuacuugu

SEQ ID NO: 399702 - RNA, 20 nt, Artificial Sequence
  Synthetic
acauuguauuauuuacuugu

SEQ ID NO: 399703 - RNA, 21 nt, Artificial Sequence
  Synthetic
uacauuguauuauuuacuugu

SEQ ID NO: 399704 - RNA, 22 nt, Artificial Sequence
  Synthetic
uuacauuguauuauuuacuugu

SEQ ID NO: 399705 - RNA, 23 nt, Artificial Sequence
  Synthetic
uuuacauuguauuauuuacuugu

SEQ ID NO: 399706 - RNA, 24 nt, Artificial Sequence
  Synthetic
uuuuacauuguauuauuuacuugu

SEQ ID NO: 399707 - RNA, 18 nt, Artificial Sequence
  Synthetic
aguuucuguuuuacuugu

SEQ ID NO: 399708 - RNA, 19 nt, Artificial Sequence
  Synthetic
caguuucuguuuuacuugu

SEQ ID NO: 399709 - RNA, 20 nt, Artificial Sequence
  Synthetic
ucaguuucuguuuuacuugu

SEQ ID NO: 399710 - RNA, 21 nt, Artificial Sequence
  Synthetic
uucaguuucuguuuuacuugu

SEQ ID NO: 399711 - RNA, 22 nt, Artificial Sequence
  Synthetic
auucaguuucuguuuuacuugu

SEQ ID NO: 399712 - RNA, 23 nt, Artificial Sequence
  Synthetic
cauucaguuucuguuuuacuugu

SEQ ID NO: 399713 - RNA, 24 nt, Artificial Sequence
  Synthetic
acauucaguuucuguuuuacuugu

SEQ ID NO: 399714 - RNA, 18 nt, Artificial Sequence
  Synthetic
accagaguacaaccuugu

SEQ ID NO: 399715 - RNA, 19 nt, Artificial Sequence
  Synthetic
aaccagaguacaaccuugu

SEQ ID NO: 399716 - RNA, 20 nt, Artificial Sequence
  Synthetic
uaaccagaguacaaccuugu

SEQ ID NO: 399717 - RNA, 21 nt, Artificial Sequence
  Synthetic
uuaaccagaguacaaccuugu

SEQ ID NO: 399718 - RNA, 22 nt, Artificial Sequence
  Synthetic
guuaaccagaguacaaccuugu

SEQ ID NO: 399719 - RNA, 23 nt, Artificial Sequence
  Synthetic
uguuaaccagaguacaaccuugu

SEQ ID NO: 399720 - RNA, 24 nt, Artificial Sequence
  Synthetic
auguuaaccagaguacaaccuugu

SEQ ID NO: 399721 - RNA, 18 nt, Artificial Sequence
  Synthetic
ucacaagaaagaccuugu

SEQ ID NO: 399722 - RNA, 19 nt, Artificial Sequence
  Synthetic
uucacaagaaagaccuugu

SEQ ID NO: 399723 - RNA, 20 nt, Artificial Sequence
  Synthetic
uuucacaagaaagaccuugu

SEQ ID NO: 399724 - RNA, 21 nt, Artificial Sequence
  Synthetic
guuucacaagaaagaccuugu

SEQ ID NO: 399725 - RNA, 22 nt, Artificial Sequence
  Synthetic
gguuucacaagaaagaccuugu

SEQ ID NO: 399726 - RNA, 23 nt, Artificial Sequence
  Synthetic
cgguuucacaagaaagaccuugu

SEQ ID NO: 399727 - RNA, 24 nt, Artificial Sequence
  Synthetic
acgguuucacaagaaagaccuugu

SEQ ID NO: 399728 - RNA, 18 nt, Artificial Sequence
  Synthetic
uuuuauguaugaccuugu

SEQ ID NO: 399729 - RNA, 19 nt, Artificial Sequence
  Synthetic
auuuuauguaugaccuugu

SEQ ID NO: 399730 - RNA, 20 nt, Artificial Sequence
  Synthetic
uauuuuauguaugaccuugu

SEQ ID NO: 399731 - RNA, 21 nt, Artificial Sequence
  Synthetic
auauuuuauguaugaccuugu

SEQ ID NO: 399732 - RNA, 22 nt, Artificial Sequence
  Synthetic
uauauuuuauguaugaccuugu

SEQ ID NO: 399733 - RNA, 23 nt, Artificial Sequence
  Synthetic
auauauuuuauguaugaccuugu

SEQ ID NO: 399734 - RNA, 24 nt, Artificial Sequence
  Synthetic
aauauauuuuauguaugaccuugu

SEQ ID NO: 399735 - RNA, 18 nt, Artificial Sequence
  Synthetic
agucaguagauaccuugu

SEQ ID NO: 399736 - RNA, 19 nt, Artificial Sequence
  Synthetic
aagucaguagauaccuugu

SEQ ID NO: 399737 - RNA, 20 nt, Artificial Sequence
  Synthetic
caagucaguagauaccuugu

SEQ ID NO: 399738 - RNA, 21 nt, Artificial Sequence
  Synthetic
gcaagucaguagauaccuugu

SEQ ID NO: 399739 - RNA, 22 nt, Artificial Sequence
  Synthetic
cgcaagucaguagauaccuugu

SEQ ID NO: 399740 - RNA, 23 nt, Artificial Sequence
  Synthetic
ucgcaagucaguagauaccuugu

SEQ ID NO: 399741 - RNA, 24 nt, Artificial Sequence
  Synthetic
aucgcaagucaguagauaccuugu

SEQ ID NO: 399742 - RNA, 18 nt, Artificial Sequence
  Synthetic
acacgacuaagcccuugu

SEQ ID NO: 399743 - RNA, 19 nt, Artificial Sequence
  Synthetic
uacacgacuaagcccuugu

SEQ ID NO: 399744 - RNA, 20 nt, Artificial Sequence
  Synthetic
cuacacgacuaagcccuugu

SEQ ID NO: 399745 - RNA, 21 nt, Artificial Sequence
  Synthetic
gcuacacgacuaagcccuugu

SEQ ID NO: 399746 - RNA, 22 nt, Artificial Sequence
  Synthetic
ggcuacacgacuaagcccuugu

SEQ ID NO: 399747 - RNA, 23 nt, Artificial Sequence
  Synthetic
uggcuacacgacuaagcccuugu

SEQ ID NO: 399748 - RNA, 24 nt, Artificial Sequence
  Synthetic
auggcuacacgacuaagcccuugu

SEQ ID NO: 399749 - RNA, 18 nt, Artificial Sequence
  Synthetic
uuuagucuaaucccuugu

SEQ ID NO: 399750 - RNA, 19 nt, Artificial Sequence
  Synthetic
guuuagucuaaucccuugu

SEQ ID NO: 399751 - RNA, 20 nt, Artificial Sequence
  Synthetic
gguuuagucuaaucccuugu

SEQ ID NO: 399752 - RNA, 21 nt, Artificial Sequence
  Synthetic
ugguuuagucuaaucccuugu

SEQ ID NO: 399753 - RNA, 22 nt, Artificial Sequence
  Synthetic
uugguuuagucuaaucccuugu

SEQ ID NO: 399754 - RNA, 23 nt, Artificial Sequence
  Synthetic
uuugguuuagucuaaucccuugu

SEQ ID NO: 399755 - RNA, 24 nt, Artificial Sequence
  Synthetic
auuugguuuagucuaaucccuugu

SEQ ID NO: 399756 - RNA, 18 nt, Artificial Sequence
  Synthetic
guuaauaaaacgccuugu

SEQ ID NO: 399757 - RNA, 19 nt, Artificial Sequence
  Synthetic
gguuaauaaaacgccuugu

SEQ ID NO: 399758 - RNA, 20 nt, Artificial Sequence
  Synthetic
agguuaauaaaacgccuugu

SEQ ID NO: 399759 - RNA, 21 nt, Artificial Sequence
  Synthetic
gagguuaauaaaacgccuugu

SEQ ID NO: 399760 - RNA, 22 nt, Artificial Sequence
  Synthetic
agagguuaauaaaacgccuugu

SEQ ID NO: 399761 - RNA, 23 nt, Artificial Sequence
  Synthetic
aagagguuaauaaaacgccuugu

SEQ ID NO: 399762 - RNA, 24 nt, Artificial Sequence
  Synthetic
aaagagguuaauaaaacgccuugu

SEQ ID NO: 399763 - RNA, 18 nt, Artificial Sequence
  Synthetic
acccagaaggggccuugu

SEQ ID NO: 399764 - RNA, 19 nt, Artificial Sequence
  Synthetic
gacccagaaggggccuugu

SEQ ID NO: 399765 - RNA, 20 nt, Artificial Sequence
  Synthetic
agacccagaaggggccuugu

SEQ ID NO: 399766 - RNA, 21 nt, Artificial Sequence
  Synthetic
gagacccagaaggggccuugu

SEQ ID NO: 399767 - RNA, 22 nt, Artificial Sequence
  Synthetic
agagacccagaaggggccuugu

SEQ ID NO: 399768 - RNA, 23 nt, Artificial Sequence
  Synthetic
aagagacccagaaggggccuugu

SEQ ID NO: 399769 - RNA, 24 nt, Artificial Sequence
  Synthetic
aaagagacccagaaggggccuugu

SEQ ID NO: 399770 - RNA, 18 nt, Artificial Sequence
  Synthetic
auaguacagaugccuugu

SEQ ID NO: 399771 - RNA, 19 nt, Artificial Sequence
  Synthetic
uauaguacagaugccuugu

SEQ ID NO: 399772 - RNA, 20 nt, Artificial Sequence
  Synthetic
uuauaguacagaugccuugu

SEQ ID NO: 399773 - RNA, 21 nt, Artificial Sequence
  Synthetic
auuauaguacagaugccuugu

SEQ ID NO: 399774 - RNA, 22 nt, Artificial Sequence
  Synthetic
aauuauaguacagaugccuugu

SEQ ID NO: 399775 - RNA, 23 nt, Artificial Sequence
  Synthetic
caauuauaguacagaugccuugu

SEQ ID NO: 399776 - RNA, 24 nt, Artificial Sequence
  Synthetic
ccaauuauaguacagaugccuugu

SEQ ID NO: 399777 - RNA, 18 nt, Artificial Sequence
  Synthetic
agguuauaucugccuugu

SEQ ID NO: 399778 - RNA, 19 nt, Artificial Sequence
  Synthetic
cagguuauaucugccuugu

SEQ ID NO: 399779 - RNA, 20 nt, Artificial Sequence
  Synthetic
gcagguuauaucugccuugu

SEQ ID NO: 399780 - RNA, 21 nt, Artificial Sequence
  Synthetic
ugcagguuauaucugccuugu

SEQ ID NO: 399781 - RNA, 22 nt, Artificial Sequence
  Synthetic
cugcagguuauaucugccuugu

SEQ ID NO: 399782 - RNA, 23 nt, Artificial Sequence
  Synthetic
gcugcagguuauaucugccuugu

SEQ ID NO: 399783 - RNA, 24 nt, Artificial Sequence
  Synthetic
agcugcagguuauaucugccuugu

SEQ ID NO: 399784 - RNA, 18 nt, Artificial Sequence
  Synthetic
aggcugacaaauccuugu

SEQ ID NO: 399785 - RNA, 19 nt, Artificial Sequence
  Synthetic
aaggcugacaaauccuugu

SEQ ID NO: 399786 - RNA, 20 nt, Artificial Sequence
  Synthetic
aaaggcugacaaauccuugu

SEQ ID NO: 399787 - RNA, 21 nt, Artificial Sequence
  Synthetic
caaaggcugacaaauccuugu

SEQ ID NO: 399788 - RNA, 22 nt, Artificial Sequence
  Synthetic
ucaaaggcugacaaauccuugu

SEQ ID NO: 399789 - RNA, 23 nt, Artificial Sequence
  Synthetic
gucaaaggcugacaaauccuugu

SEQ ID NO: 399790 - RNA, 24 nt, Artificial Sequence
  Synthetic
agucaaaggcugacaaauccuugu

SEQ ID NO: 399791 - RNA, 18 nt, Artificial Sequence
  Synthetic
aacauggaacauccuugu

SEQ ID NO: 399792 - RNA, 19 nt, Artificial Sequence
  Synthetic
aaacauggaacauccuugu

SEQ ID NO: 399793 - RNA, 20 nt, Artificial Sequence
  Synthetic
uaaacauggaacauccuugu

SEQ ID NO: 399794 - RNA, 21 nt, Artificial Sequence
  Synthetic
uuaaacauggaacauccuugu

SEQ ID NO: 399795 - RNA, 22 nt, Artificial Sequence
  Synthetic
auuaaacauggaacauccuugu

SEQ ID NO: 399796 - RNA, 23 nt, Artificial Sequence
  Synthetic
uauuaaacauggaacauccuugu

SEQ ID NO: 399797 - RNA, 24 nt, Artificial Sequence
  Synthetic
cuauuaaacauggaacauccuugu

SEQ ID NO: 399798 - RNA, 18 nt, Artificial Sequence
  Synthetic
uaaauauggccuccuugu

SEQ ID NO: 399799 - RNA, 19 nt, Artificial Sequence
  Synthetic
cuaaauauggccuccuugu

SEQ ID NO: 399800 - RNA, 20 nt, Artificial Sequence
  Synthetic
ucuaaauauggccuccuugu

SEQ ID NO: 399801 - RNA, 21 nt, Artificial Sequence
  Synthetic
aucuaaauauggccuccuugu

SEQ ID NO: 399802 - RNA, 22 nt, Artificial Sequence
  Synthetic
aaucuaaauauggccuccuugu

SEQ ID NO: 399803 - RNA, 23 nt, Artificial Sequence
  Synthetic
uaaucuaaauauggccuccuugu

SEQ ID NO: 399804 - RNA, 24 nt, Artificial Sequence
  Synthetic
guaaucuaaauauggccuccuugu

SEQ ID NO: 399805 - RNA, 18 nt, Artificial Sequence
  Synthetic
caucaccugaaagcuugu

SEQ ID NO: 399806 - RNA, 19 nt, Artificial Sequence
  Synthetic
gcaucaccugaaagcuugu

SEQ ID NO: 399807 - RNA, 20 nt, Artificial Sequence
  Synthetic
ggcaucaccugaaagcuugu

SEQ ID NO: 399808 - RNA, 21 nt, Artificial Sequence
  Synthetic
cggcaucaccugaaagcuugu

SEQ ID NO: 399809 - RNA, 22 nt, Artificial Sequence
  Synthetic
ucggcaucaccugaaagcuugu

SEQ ID NO: 399810 - RNA, 23 nt, Artificial Sequence
  Synthetic
cucggcaucaccugaaagcuugu

SEQ ID NO: 399811 - RNA, 24 nt, Artificial Sequence
  Synthetic
gcucggcaucaccugaaagcuugu

SEQ ID NO: 399812 - RNA, 18 nt, Artificial Sequence
  Synthetic
aauuagauaacagcuugu

SEQ ID NO: 399813 - RNA, 19 nt, Artificial Sequence
  Synthetic
caauuagauaacagcuugu

SEQ ID NO: 399814 - RNA, 20 nt, Artificial Sequence
  Synthetic
acaauuagauaacagcuugu

SEQ ID NO: 399815 - RNA, 21 nt, Artificial Sequence
  Synthetic
aacaauuagauaacagcuugu

SEQ ID NO: 399816 - RNA, 22 nt, Artificial Sequence
  Synthetic
uaacaauuagauaacagcuugu

SEQ ID NO: 399817 - RNA, 23 nt, Artificial Sequence
  Synthetic
auaacaauuagauaacagcuugu

SEQ ID NO: 399818 - RNA, 24 nt, Artificial Sequence
  Synthetic
aauaacaauuagauaacagcuugu

SEQ ID NO: 399819 - RNA, 18 nt, Artificial Sequence
  Synthetic
auaggcuaacuagcuugu

SEQ ID NO: 399820 - RNA, 19 nt, Artificial Sequence
  Synthetic
aauaggcuaacuagcuugu

SEQ ID NO: 399821 - RNA, 20 nt, Artificial Sequence
  Synthetic
aaauaggcuaacuagcuugu

SEQ ID NO: 399822 - RNA, 21 nt, Artificial Sequence
  Synthetic
aaaauaggcuaacuagcuugu

SEQ ID NO: 399823 - RNA, 22 nt, Artificial Sequence
  Synthetic
uaaaauaggcuaacuagcuugu

SEQ ID NO: 399824 - RNA, 23 nt, Artificial Sequence
  Synthetic
auaaaauaggcuaacuagcuugu

SEQ ID NO: 399825 - RNA, 24 nt, Artificial Sequence
  Synthetic
cauaaaauaggcuaacuagcuugu

SEQ ID NO: 399826 - RNA, 18 nt, Artificial Sequence
  Synthetic
cugguggaugaggcuugu

SEQ ID NO: 399827 - RNA, 19 nt, Artificial Sequence
  Synthetic
ucugguggaugaggcuugu

SEQ ID NO: 399828 - RNA, 20 nt, Artificial Sequence
  Synthetic
cucugguggaugaggcuugu

SEQ ID NO: 399829 - RNA, 21 nt, Artificial Sequence
  Synthetic
ccucugguggaugaggcuugu

SEQ ID NO: 399830 - RNA, 22 nt, Artificial Sequence
  Synthetic
uccucugguggaugaggcuugu

SEQ ID NO: 399831 - RNA, 23 nt, Artificial Sequence
  Synthetic
cuccucugguggaugaggcuugu

SEQ ID NO: 399832 - RNA, 24 nt, Artificial Sequence
  Synthetic
ucuccucugguggaugaggcuugu

SEQ ID NO: 399833 - RNA, 18 nt, Artificial Sequence
  Synthetic
uacaucucccuggcuugu

SEQ ID NO: 399834 - RNA, 19 nt, Artificial Sequence
  Synthetic
guacaucucccuggcuugu

SEQ ID NO: 399835 - RNA, 20 nt, Artificial Sequence
  Synthetic
aguacaucucccuggcuugu

SEQ ID NO: 399836 - RNA, 21 nt, Artificial Sequence
  Synthetic
gaguacaucucccuggcuugu

SEQ ID NO: 399837 - RNA, 22 nt, Artificial Sequence
  Synthetic
cgaguacaucucccuggcuugu

SEQ ID NO: 399838 - RNA, 23 nt, Artificial Sequence
  Synthetic
acgaguacaucucccuggcuugu

SEQ ID NO: 399839 - RNA, 24 nt, Artificial Sequence
  Synthetic
uacgaguacaucucccuggcuugu

SEQ ID NO: 399840 - RNA, 18 nt, Artificial Sequence
  Synthetic
uugacauauucugcuugu

SEQ ID NO: 399841 - RNA, 19 nt, Artificial Sequence
  Synthetic
uuugacauauucugcuugu

SEQ ID NO: 399842 - RNA, 20 nt, Artificial Sequence
  Synthetic
cuuugacauauucugcuugu

SEQ ID NO: 399843 - RNA, 21 nt, Artificial Sequence
  Synthetic
ucuuugacauauucugcuugu

SEQ ID NO: 399844 - RNA, 22 nt, Artificial Sequence
  Synthetic
gucuuugacauauucugcuugu

SEQ ID NO: 399845 - RNA, 23 nt, Artificial Sequence
  Synthetic
ugucuuugacauauucugcuugu

SEQ ID NO: 399846 - RNA, 24 nt, Artificial Sequence
  Synthetic
uugucuuugacauauucugcuugu

SEQ ID NO: 399847 - RNA, 18 nt, Artificial Sequence
  Synthetic
agagaagugaaaucuugu

SEQ ID NO: 399848 - RNA, 19 nt, Artificial Sequence
  Synthetic
uagagaagugaaaucuugu

SEQ ID NO: 399849 - RNA, 20 nt, Artificial Sequence
  Synthetic
auagagaagugaaaucuugu

SEQ ID NO: 399850 - RNA, 21 nt, Artificial Sequence
  Synthetic
aauagagaagugaaaucuugu

SEQ ID NO: 399851 - RNA, 22 nt, Artificial Sequence
  Synthetic
caauagagaagugaaaucuugu

SEQ ID NO: 399852 - RNA, 23 nt, Artificial Sequence
  Synthetic
ucaauagagaagugaaaucuugu

SEQ ID NO: 399853 - RNA, 24 nt, Artificial Sequence
  Synthetic
uucaauagagaagugaaaucuugu

SEQ ID NO: 399854 - RNA, 18 nt, Artificial Sequence
  Synthetic
uaaggaaaguaaucuugu

SEQ ID NO: 399855 - RNA, 19 nt, Artificial Sequence
  Synthetic
auaaggaaaguaaucuugu

SEQ ID NO: 399856 - RNA, 20 nt, Artificial Sequence
  Synthetic
aauaaggaaaguaaucuugu

SEQ ID NO: 399857 - RNA, 21 nt, Artificial Sequence
  Synthetic
gaauaaggaaaguaaucuugu

SEQ ID NO: 399858 - RNA, 22 nt, Artificial Sequence
  Synthetic
agaauaaggaaaguaaucuugu

SEQ ID NO: 399859 - RNA, 23 nt, Artificial Sequence
  Synthetic
aagaauaaggaaaguaaucuugu

SEQ ID NO: 399860 - RNA, 24 nt, Artificial Sequence
  Synthetic
aaagaauaaggaaaguaaucuugu

SEQ ID NO: 399861 - RNA, 18 nt, Artificial Sequence
  Synthetic
ugaguuuggagcucuugu

SEQ ID NO: 399862 - RNA, 19 nt, Artificial Sequence
  Synthetic
uugaguuuggagcucuugu

SEQ ID NO: 399863 - RNA, 20 nt, Artificial Sequence
  Synthetic
guugaguuuggagcucuugu

SEQ ID NO: 399864 - RNA, 21 nt, Artificial Sequence
  Synthetic
uguugaguuuggagcucuugu

SEQ ID NO: 399865 - RNA, 22 nt, Artificial Sequence
  Synthetic
cuguugaguuuggagcucuugu

SEQ ID NO: 399866 - RNA, 23 nt, Artificial Sequence
  Synthetic
ucuguugaguuuggagcucuugu

SEQ ID NO: 399867 - RNA, 24 nt, Artificial Sequence
  Synthetic
cucuguugaguuuggagcucuugu

SEQ ID NO: 399868 - RNA, 18 nt, Artificial Sequence
  Synthetic
aaucuuuucggcucuugu

SEQ ID NO: 399869 - RNA, 19 nt, Artificial Sequence
  Synthetic
gaaucuuuucggcucuugu

SEQ ID NO: 399870 - RNA, 20 nt, Artificial Sequence
  Synthetic
agaaucuuuucggcucuugu

SEQ ID NO: 399871 - RNA, 21 nt, Artificial Sequence
  Synthetic
aagaaucuuuucggcucuugu

SEQ ID NO: 399872 - RNA, 22 nt, Artificial Sequence
  Synthetic
aaagaaucuuuucggcucuugu

SEQ ID NO: 399873 - RNA, 23 nt, Artificial Sequence
  Synthetic
aaaagaaucuuuucggcucuugu

SEQ ID NO: 399874 - RNA, 24 nt, Artificial Sequence
  Synthetic
uaaaagaaucuuuucggcucuugu

SEQ ID NO: 399875 - RNA, 18 nt, Artificial Sequence
  Synthetic
uauacaaaucucucuugu

SEQ ID NO: 399876 - RNA, 19 nt, Artificial Sequence
  Synthetic
uuauacaaaucucucuugu

SEQ ID NO: 399877 - RNA, 20 nt, Artificial Sequence
  Synthetic
uuuauacaaaucucucuugu

SEQ ID NO: 399878 - RNA, 21 nt, Artificial Sequence
  Synthetic
uuuuauacaaaucucucuugu

SEQ ID NO: 399879 - RNA, 22 nt, Artificial Sequence
  Synthetic
auuuuauacaaaucucucuugu

SEQ ID NO: 399880 - RNA, 23 nt, Artificial Sequence
  Synthetic
uauuuuauacaaaucucucuugu

SEQ ID NO: 399881 - RNA, 24 nt, Artificial Sequence
  Synthetic
auauuuuauacaaaucucucuugu

SEQ ID NO: 399882 - RNA, 18 nt, Artificial Sequence
  Synthetic
ucccacucuuucucuugu

SEQ ID NO: 399883 - RNA, 19 nt, Artificial Sequence
  Synthetic
aucccacucuuucucuugu

SEQ ID NO: 399884 - RNA, 20 nt, Artificial Sequence
  Synthetic
caucccacucuuucucuugu

SEQ ID NO: 399885 - RNA, 21 nt, Artificial Sequence
  Synthetic
ucaucccacucuuucucuugu

SEQ ID NO: 399886 - RNA, 22 nt, Artificial Sequence
  Synthetic
aucaucccacucuuucucuugu

SEQ ID NO: 399887 - RNA, 23 nt, Artificial Sequence
  Synthetic
aaucaucccacucuuucucuugu

SEQ ID NO: 399888 - RNA, 24 nt, Artificial Sequence
  Synthetic
aaaucaucccacucuuucucuugu

SEQ ID NO: 399889 - RNA, 18 nt, Artificial Sequence
  Synthetic
ucagaccuuuggucuugu

SEQ ID NO: 399890 - RNA, 19 nt, Artificial Sequence
  Synthetic
uucagaccuuuggucuugu

SEQ ID NO: 399891 - RNA, 20 nt, Artificial Sequence
  Synthetic
uuucagaccuuuggucuugu

SEQ ID NO: 399892 - RNA, 21 nt, Artificial Sequence
  Synthetic
uuuucagaccuuuggucuugu

SEQ ID NO: 399893 - RNA, 22 nt, Artificial Sequence
  Synthetic
uuuuucagaccuuuggucuugu

SEQ ID NO: 399894 - RNA, 23 nt, Artificial Sequence
  Synthetic
auuuuucagaccuuuggucuugu

SEQ ID NO: 399895 - RNA, 24 nt, Artificial Sequence
  Synthetic
uauuuuucagaccuuuggucuugu

SEQ ID NO: 399896 - RNA, 18 nt, Artificial Sequence
  Synthetic
cuguugcuuuggucuugu

SEQ ID NO: 399897 - RNA, 19 nt, Artificial Sequence
  Synthetic
acuguugcuuuggucuugu

SEQ ID NO: 399898 - RNA, 20 nt, Artificial Sequence
  Synthetic
cacuguugcuuuggucuugu

SEQ ID NO: 399899 - RNA, 21 nt, Artificial Sequence
  Synthetic
gcacuguugcuuuggucuugu

SEQ ID NO: 399900 - RNA, 22 nt, Artificial Sequence
  Synthetic
ugcacuguugcuuuggucuugu

SEQ ID NO: 399901 - RNA, 23 nt, Artificial Sequence
  Synthetic
augcacuguugcuuuggucuugu

SEQ ID NO: 399902 - RNA, 24 nt, Artificial Sequence
  Synthetic
caugcacuguugcuuuggucuugu

SEQ ID NO: 399903 - RNA, 18 nt, Artificial Sequence
  Synthetic
cccacuggaaugucuugu

SEQ ID NO: 399904 - RNA, 19 nt, Artificial Sequence
  Synthetic
ucccacuggaaugucuugu

SEQ ID NO: 399905 - RNA, 20 nt, Artificial Sequence
  Synthetic
aucccacuggaaugucuugu

SEQ ID NO: 399906 - RNA, 21 nt, Artificial Sequence
  Synthetic
uaucccacuggaaugucuugu

SEQ ID NO: 399907 - RNA, 22 nt, Artificial Sequence
  Synthetic
uuaucccacuggaaugucuugu

SEQ ID NO: 399908 - RNA, 23 nt, Artificial Sequence
  Synthetic
uuuaucccacuggaaugucuugu

SEQ ID NO: 399909 - RNA, 24 nt, Artificial Sequence
  Synthetic
uuuuaucccacuggaaugucuugu

SEQ ID NO: 399910 - RNA, 18 nt, Artificial Sequence
  Synthetic
acaggcugacugucuugu

SEQ ID NO: 399911 - RNA, 19 nt, Artificial Sequence
  Synthetic
gacaggcugacugucuugu

SEQ ID NO: 399912 - RNA, 20 nt, Artificial Sequence
  Synthetic
ggacaggcugacugucuugu

SEQ ID NO: 399913 - RNA, 21 nt, Artificial Sequence
  Synthetic
aggacaggcugacugucuugu

SEQ ID NO: 399914 - RNA, 22 nt, Artificial Sequence
  Synthetic
aaggacaggcugacugucuugu

SEQ ID NO: 399915 - RNA, 23 nt, Artificial Sequence
  Synthetic
aaaggacaggcugacugucuugu

SEQ ID NO: 399916 - RNA, 24 nt, Artificial Sequence
  Synthetic
caaaggacaggcugacugucuugu

SEQ ID NO: 399917 - RNA, 18 nt, Artificial Sequence
  Synthetic
cauaacauggugucuugu

SEQ ID NO: 399918 - RNA, 19 nt, Artificial Sequence
  Synthetic
ucauaacauggugucuugu

SEQ ID NO: 399919 - RNA, 20 nt, Artificial Sequence
  Synthetic
uucauaacauggugucuugu

SEQ ID NO: 399920 - RNA, 21 nt, Artificial Sequence
  Synthetic
auucauaacauggugucuugu

SEQ ID NO: 399921 - RNA, 22 nt, Artificial Sequence
  Synthetic
uauucauaacauggugucuugu

SEQ ID NO: 399922 - RNA, 23 nt, Artificial Sequence
  Synthetic
auauucauaacauggugucuugu

SEQ ID NO: 399923 - RNA, 24 nt, Artificial Sequence
  Synthetic
gauauucauaacauggugucuugu

SEQ ID NO: 399924 - RNA, 18 nt, Artificial Sequence
  Synthetic
uuaaaaagcccuucuugu

SEQ ID NO: 399925 - RNA, 19 nt, Artificial Sequence
  Synthetic
guuaaaaagcccuucuugu

SEQ ID NO: 399926 - RNA, 20 nt, Artificial Sequence
  Synthetic
uguuaaaaagcccuucuugu

SEQ ID NO: 399927 - RNA, 21 nt, Artificial Sequence
  Synthetic
auguuaaaaagcccuucuugu

SEQ ID NO: 399928 - RNA, 22 nt, Artificial Sequence
  Synthetic
cauguuaaaaagcccuucuugu

SEQ ID NO: 399929 - RNA, 23 nt, Artificial Sequence
  Synthetic
acauguuaaaaagcccuucuugu

SEQ ID NO: 399930 - RNA, 24 nt, Artificial Sequence
  Synthetic
gacauguuaaaaagcccuucuugu

SEQ ID NO: 399931 - RNA, 18 nt, Artificial Sequence
  Synthetic
aaguugcaguuaaguugu

SEQ ID NO: 399932 - RNA, 19 nt, Artificial Sequence
  Synthetic
gaaguugcaguuaaguugu

SEQ ID NO: 399933 - RNA, 20 nt, Artificial Sequence
  Synthetic
ugaaguugcaguuaaguugu

SEQ ID NO: 399934 - RNA, 21 nt, Artificial Sequence
  Synthetic
uugaaguugcaguuaaguugu

SEQ ID NO: 399935 - RNA, 22 nt, Artificial Sequence
  Synthetic
uuugaaguugcaguuaaguugu

SEQ ID NO: 399936 - RNA, 23 nt, Artificial Sequence
  Synthetic
uuuugaaguugcaguuaaguugu

SEQ ID NO: 399937 - RNA, 24 nt, Artificial Sequence
  Synthetic
auuuugaaguugcaguuaaguugu

SEQ ID NO: 399938 - RNA, 18 nt, Artificial Sequence
  Synthetic
aagauggcaaacaguugu

SEQ ID NO: 399939 - RNA, 19 nt, Artificial Sequence
  Synthetic
caagauggcaaacaguugu

SEQ ID NO: 399940 - RNA, 20 nt, Artificial Sequence
  Synthetic
ucaagauggcaaacaguugu

SEQ ID NO: 399941 - RNA, 21 nt, Artificial Sequence
  Synthetic
uucaagauggcaaacaguugu

SEQ ID NO: 399942 - RNA, 22 nt, Artificial Sequence
  Synthetic
auucaagauggcaaacaguugu

SEQ ID NO: 399943 - RNA, 23 nt, Artificial Sequence
  Synthetic
aauucaagauggcaaacaguugu

SEQ ID NO: 399944 - RNA, 24 nt, Artificial Sequence
  Synthetic
gaauucaagauggcaaacaguugu

SEQ ID NO: 399945 - RNA, 18 nt, Artificial Sequence
  Synthetic
gacauuggaugcaguugu

SEQ ID NO: 399946 - RNA, 19 nt, Artificial Sequence
  Synthetic
ggacauuggaugcaguugu

SEQ ID NO: 399947 - RNA, 20 nt, Artificial Sequence
  Synthetic
gggacauuggaugcaguugu

SEQ ID NO: 399948 - RNA, 21 nt, Artificial Sequence
  Synthetic
agggacauuggaugcaguugu

SEQ ID NO: 399949 - RNA, 22 nt, Artificial Sequence
  Synthetic
aagggacauuggaugcaguugu

SEQ ID NO: 399950 - RNA, 23 nt, Artificial Sequence
  Synthetic
gaagggacauuggaugcaguugu

SEQ ID NO: 399951 - RNA, 24 nt, Artificial Sequence
  Synthetic
ggaagggacauuggaugcaguugu

SEQ ID NO: 399952 - RNA, 18 nt, Artificial Sequence
  Synthetic
guaggauguuggaguugu

SEQ ID NO: 399953 - RNA, 19 nt, Artificial Sequence
  Synthetic
gguaggauguuggaguugu

SEQ ID NO: 399954 - RNA, 20 nt, Artificial Sequence
  Synthetic
ugguaggauguuggaguugu

SEQ ID NO: 399955 - RNA, 21 nt, Artificial Sequence
  Synthetic
gugguaggauguuggaguugu

SEQ ID NO: 399956 - RNA, 22 nt, Artificial Sequence
  Synthetic
ugugguaggauguuggaguugu

SEQ ID NO: 399957 - RNA, 23 nt, Artificial Sequence
  Synthetic
cugugguaggauguuggaguugu

SEQ ID NO: 399958 - RNA, 24 nt, Artificial Sequence
  Synthetic
gcugugguaggauguuggaguugu

SEQ ID NO: 399959 - RNA, 18 nt, Artificial Sequence
  Synthetic
guagaaaaaucuaguugu

SEQ ID NO: 399960 - RNA, 19 nt, Artificial Sequence
  Synthetic
gguagaaaaaucuaguugu

SEQ ID NO: 399961 - RNA, 20 nt, Artificial Sequence
  Synthetic
ggguagaaaaaucuaguugu

SEQ ID NO: 399962 - RNA, 21 nt, Artificial Sequence
  Synthetic
gggguagaaaaaucuaguugu

SEQ ID NO: 399963 - RNA, 22 nt, Artificial Sequence
  Synthetic
ugggguagaaaaaucuaguugu

SEQ ID NO: 399964 - RNA, 23 nt, Artificial Sequence
  Synthetic
augggguagaaaaaucuaguugu

SEQ ID NO: 399965 - RNA, 24 nt, Artificial Sequence
  Synthetic
caugggguagaaaaaucuaguugu

SEQ ID NO: 399966 - RNA, 18 nt, Artificial Sequence
  Synthetic
cagggucaggguaguugu

SEQ ID NO: 399967 - RNA, 19 nt, Artificial Sequence
  Synthetic
ccagggucaggguaguugu

SEQ ID NO: 399968 - RNA, 20 nt, Artificial Sequence
  Synthetic
accagggucaggguaguugu

SEQ ID NO: 399969 - RNA, 21 nt, Artificial Sequence
  Synthetic
uaccagggucaggguaguugu

SEQ ID NO: 399970 - RNA, 22 nt, Artificial Sequence
  Synthetic
uuaccagggucaggguaguugu

SEQ ID NO: 399971 - RNA, 23 nt, Artificial Sequence
  Synthetic
guuaccagggucaggguaguugu

SEQ ID NO: 399972 - RNA, 24 nt, Artificial Sequence
  Synthetic
gguuaccagggucaggguaguugu

SEQ ID NO: 399973 - RNA, 18 nt, Artificial Sequence
  Synthetic
aacuucucguguaguugu

SEQ ID NO: 399974 - RNA, 19 nt, Artificial Sequence
  Synthetic
caacuucucguguaguugu

SEQ ID NO: 399975 - RNA, 20 nt, Artificial Sequence
  Synthetic
gcaacuucucguguaguugu

SEQ ID NO: 399976 - RNA, 21 nt, Artificial Sequence
  Synthetic
ggcaacuucucguguaguugu

SEQ ID NO: 399977 - RNA, 22 nt, Artificial Sequence
  Synthetic
cggcaacuucucguguaguugu

SEQ ID NO: 399978 - RNA, 23 nt, Artificial Sequence
  Synthetic
ucggcaacuucucguguaguugu

SEQ ID NO: 399979 - RNA, 24 nt, Artificial Sequence
  Synthetic
cucggcaacuucucguguaguugu

SEQ ID NO: 399980 - RNA, 18 nt, Artificial Sequence
  Synthetic
uagaccugaagccguugu

SEQ ID NO: 399981 - RNA, 19 nt, Artificial Sequence
  Synthetic
cuagaccugaagccguugu

SEQ ID NO: 399982 - RNA, 20 nt, Artificial Sequence
  Synthetic
ccuagaccugaagccguugu

SEQ ID NO: 399983 - RNA, 21 nt, Artificial Sequence
  Synthetic
uccuagaccugaagccguugu

SEQ ID NO: 399984 - RNA, 22 nt, Artificial Sequence
  Synthetic
cuccuagaccugaagccguugu

SEQ ID NO: 399985 - RNA, 23 nt, Artificial Sequence
  Synthetic
ucuccuagaccugaagccguugu

SEQ ID NO: 399986 - RNA, 24 nt, Artificial Sequence
  Synthetic
cucuccuagaccugaagccguugu

SEQ ID NO: 399987 - RNA, 18 nt, Artificial Sequence
  Synthetic
ugaguucauguccguugu

SEQ ID NO: 399988 - RNA, 19 nt, Artificial Sequence
  Synthetic
augaguucauguccguugu

SEQ ID NO: 399989 - RNA, 20 nt, Artificial Sequence
  Synthetic
gaugaguucauguccguugu

SEQ ID NO: 399990 - RNA, 21 nt, Artificial Sequence
  Synthetic
ugaugaguucauguccguugu

SEQ ID NO: 399991 - RNA, 22 nt, Artificial Sequence
  Synthetic
augaugaguucauguccguugu

SEQ ID NO: 399992 - RNA, 23 nt, Artificial Sequence
  Synthetic
aaugaugaguucauguccguugu

SEQ ID NO: 399993 - RNA, 24 nt, Artificial Sequence
  Synthetic
aaaugaugaguucauguccguugu

SEQ ID NO: 399994 - RNA, 18 nt, Artificial Sequence
  Synthetic
uuauauaagcaagguugu

SEQ ID NO: 399995 - RNA, 19 nt, Artificial Sequence
  Synthetic
uuuauauaagcaagguugu

SEQ ID NO: 399996 - RNA, 20 nt, Artificial Sequence
  Synthetic
cuuuauauaagcaagguugu

SEQ ID NO: 399997 - RNA, 21 nt, Artificial Sequence
  Synthetic
ucuuuauauaagcaagguugu

SEQ ID NO: 399998 - RNA, 22 nt, Artificial Sequence
  Synthetic
cucuuuauauaagcaagguugu

SEQ ID NO: 399999 - RNA, 23 nt, Artificial Sequence
  Synthetic
ccucuuuauauaagcaagguugu

SEQ ID NO: 400000 - RNA, 24 nt, Artificial Sequence
  Synthetic
uccucuuuauauaagcaagguugu

SEQ ID NO: 400001 - RNA, 18 nt, Artificial Sequence
  Synthetic
aggauguguguagguugu

SEQ ID NO: 400002 - RNA, 19 nt, Artificial Sequence
  Synthetic
gaggauguguguagguugu

SEQ ID NO: 400003 - RNA, 20 nt, Artificial Sequence
  Synthetic
ggaggauguguguagguugu

SEQ ID NO: 400004 - RNA, 21 nt, Artificial Sequence
  Synthetic
aggaggauguguguagguugu

SEQ ID NO: 400005 - RNA, 22 nt, Artificial Sequence
  Synthetic
uaggaggauguguguagguugu

SEQ ID NO: 400006 - RNA, 23 nt, Artificial Sequence
  Synthetic
auaggaggauguguguagguugu

SEQ ID NO: 400007 - RNA, 24 nt, Artificial Sequence
  Synthetic
uauaggaggauguguguagguugu

SEQ ID NO: 400008 - RNA, 18 nt, Artificial Sequence
  Synthetic
gaaaagcugcaggguugu

SEQ ID NO: 400009 - RNA, 19 nt, Artificial Sequence
  Synthetic
agaaaagcugcaggguugu

SEQ ID NO: 400010 - RNA, 20 nt, Artificial Sequence
  Synthetic
cagaaaagcugcaggguugu

SEQ ID NO: 400011 - RNA, 21 nt, Artificial Sequence
  Synthetic
ucagaaaagcugcaggguugu

SEQ ID NO: 400012 - RNA, 22 nt, Artificial Sequence
  Synthetic
uucagaaaagcugcaggguugu

SEQ ID NO: 400013 - RNA, 23 nt, Artificial Sequence
  Synthetic
cuucagaaaagcugcaggguugu

SEQ ID NO: 400014 - RNA, 24 nt, Artificial Sequence
  Synthetic
ucuucagaaaagcugcaggguugu

SEQ ID NO: 400015 - RNA, 18 nt, Artificial Sequence
  Synthetic
gcuuugucacgugguugu

SEQ ID NO: 400016 - RNA, 19 nt, Artificial Sequence
  Synthetic
ggcuuugucacgugguugu

SEQ ID NO: 400017 - RNA, 20 nt, Artificial Sequence
  Synthetic
gggcuuugucacgugguugu

SEQ ID NO: 400018 - RNA, 21 nt, Artificial Sequence
  Synthetic
agggcuuugucacgugguugu

SEQ ID NO: 400019 - RNA, 22 nt, Artificial Sequence
  Synthetic
aagggcuuugucacgugguugu

SEQ ID NO: 400020 - RNA, 23 nt, Artificial Sequence
  Synthetic
gaagggcuuugucacgugguugu

SEQ ID NO: 400021 - RNA, 24 nt, Artificial Sequence
  Synthetic
agaagggcuuugucacgugguugu

SEQ ID NO: 400022 - RNA, 18 nt, Artificial Sequence
  Synthetic
ugacuucagccauguugu

SEQ ID NO: 400023 - RNA, 19 nt, Artificial Sequence
  Synthetic
uugacuucagccauguugu

SEQ ID NO: 400024 - RNA, 20 nt, Artificial Sequence
  Synthetic
guugacuucagccauguugu

SEQ ID NO: 400025 - RNA, 21 nt, Artificial Sequence
  Synthetic
gguugacuucagccauguugu

SEQ ID NO: 400026 - RNA, 22 nt, Artificial Sequence
  Synthetic
agguugacuucagccauguugu

SEQ ID NO: 400027 - RNA, 23 nt, Artificial Sequence
  Synthetic
cagguugacuucagccauguugu

SEQ ID NO: 400028 - RNA, 24 nt, Artificial Sequence
  Synthetic
ucagguugacuucagccauguugu

SEQ ID NO: 400029 - RNA, 18 nt, Artificial Sequence
  Synthetic
gcagcggcaaacuguugu

SEQ ID NO: 400030 - RNA, 19 nt, Artificial Sequence
  Synthetic
ggcagcggcaaacuguugu

SEQ ID NO: 400031 - RNA, 20 nt, Artificial Sequence
  Synthetic
gggcagcggcaaacuguugu

SEQ ID NO: 400032 - RNA, 21 nt, Artificial Sequence
  Synthetic
ugggcagcggcaaacuguugu

SEQ ID NO: 400033 - RNA, 22 nt, Artificial Sequence
  Synthetic
uugggcagcggcaaacuguugu

SEQ ID NO: 400034 - RNA, 23 nt, Artificial Sequence
  Synthetic
auugggcagcggcaaacuguugu

SEQ ID NO: 400035 - RNA, 24 nt, Artificial Sequence
  Synthetic
cauugggcagcggcaaacuguugu

SEQ ID NO: 400036 - RNA, 18 nt, Artificial Sequence
  Synthetic
augcuuauacacuguugu

SEQ ID NO: 400037 - RNA, 19 nt, Artificial Sequence
  Synthetic
gaugcuuauacacuguugu

SEQ ID NO: 400038 - RNA, 20 nt, Artificial Sequence
  Synthetic
ggaugcuuauacacuguugu

SEQ ID NO: 400039 - RNA, 21 nt, Artificial Sequence
  Synthetic
gggaugcuuauacacuguugu

SEQ ID NO: 400040 - RNA, 22 nt, Artificial Sequence
  Synthetic
ggggaugcuuauacacuguugu

SEQ ID NO: 400041 - RNA, 23 nt, Artificial Sequence
  Synthetic
aggggaugcuuauacacuguugu

SEQ ID NO: 400042 - RNA, 24 nt, Artificial Sequence
  Synthetic
aaggggaugcuuauacacuguugu

SEQ ID NO: 400043 - RNA, 18 nt, Artificial Sequence
  Synthetic
ucauuauucuucuguugu

SEQ ID NO: 400044 - RNA, 19 nt, Artificial Sequence
  Synthetic
aucauuauucuucuguugu

SEQ ID NO: 400045 - RNA, 20 nt, Artificial Sequence
  Synthetic
uaucauuauucuucuguugu

SEQ ID NO: 400046 - RNA, 21 nt, Artificial Sequence
  Synthetic
guaucauuauucuucuguugu

SEQ ID NO: 400047 - RNA, 22 nt, Artificial Sequence
  Synthetic
cguaucauuauucuucuguugu

SEQ ID NO: 400048 - RNA, 23 nt, Artificial Sequence
  Synthetic
ccguaucauuauucuucuguugu

SEQ ID NO: 400049 - RNA, 24 nt, Artificial Sequence
  Synthetic
accguaucauuauucuucuguugu

SEQ ID NO: 400050 - RNA, 18 nt, Artificial Sequence
  Synthetic
ccacacaauuucuguugu

SEQ ID NO: 400051 - RNA, 19 nt, Artificial Sequence
  Synthetic
accacacaauuucuguugu

SEQ ID NO: 400052 - RNA, 20 nt, Artificial Sequence
  Synthetic
caccacacaauuucuguugu

SEQ ID NO: 400053 - RNA, 21 nt, Artificial Sequence
  Synthetic
ucaccacacaauuucuguugu

SEQ ID NO: 400054 - RNA, 22 nt, Artificial Sequence
  Synthetic
uucaccacacaauuucuguugu

SEQ ID NO: 400055 - RNA, 23 nt, Artificial Sequence
  Synthetic
auucaccacacaauuucuguugu

SEQ ID NO: 400056 - RNA, 24 nt, Artificial Sequence
  Synthetic
aauucaccacacaauuucuguugu

SEQ ID NO: 400057 - RNA, 18 nt, Artificial Sequence
  Synthetic
ucuuucaguucguguugu

SEQ ID NO: 400058 - RNA, 19 nt, Artificial Sequence
  Synthetic
uucuuucaguucguguugu

SEQ ID NO: 400059 - RNA, 20 nt, Artificial Sequence
  Synthetic
uuucuuucaguucguguugu

SEQ ID NO: 400060 - RNA, 21 nt, Artificial Sequence
  Synthetic
auuucuuucaguucguguugu

SEQ ID NO: 400061 - RNA, 22 nt, Artificial Sequence
  Synthetic
gauuucuuucaguucguguugu

SEQ ID NO: 400062 - RNA, 23 nt, Artificial Sequence
  Synthetic
agauuucuuucaguucguguugu

SEQ ID NO: 400063 - RNA, 24 nt, Artificial Sequence
  Synthetic
gagauuucuuucaguucguguugu

SEQ ID NO: 400064 - RNA, 18 nt, Artificial Sequence
  Synthetic
agaccugguugguguugu

SEQ ID NO: 400065 - RNA, 19 nt, Artificial Sequence
  Synthetic
gagaccugguugguguugu

SEQ ID NO: 400066 - RNA, 20 nt, Artificial Sequence
  Synthetic
ugagaccugguugguguugu

SEQ ID NO: 400067 - RNA, 21 nt, Artificial Sequence
  Synthetic
augagaccugguugguguugu

SEQ ID NO: 400068 - RNA, 22 nt, Artificial Sequence
  Synthetic
uaugagaccugguugguguugu

SEQ ID NO: 400069 - RNA, 23 nt, Artificial Sequence
  Synthetic
guaugagaccugguugguguugu

SEQ ID NO: 400070 - RNA, 24 nt, Artificial Sequence
  Synthetic
gguaugagaccugguugguguugu

SEQ ID NO: 400071 - RNA, 18 nt, Artificial Sequence
  Synthetic
guaauucccauguguugu

SEQ ID NO: 400072 - RNA, 19 nt, Artificial Sequence
  Synthetic
uguaauucccauguguugu

SEQ ID NO: 400073 - RNA, 20 nt, Artificial Sequence
  Synthetic
cuguaauucccauguguugu

SEQ ID NO: 400074 - RNA, 21 nt, Artificial Sequence
  Synthetic
ccuguaauucccauguguugu

SEQ ID NO: 400075 - RNA, 22 nt, Artificial Sequence
  Synthetic
cccuguaauucccauguguugu

SEQ ID NO: 400076 - RNA, 23 nt, Artificial Sequence
  Synthetic
ucccuguaauucccauguguugu

SEQ ID NO: 400077 - RNA, 24 nt, Artificial Sequence
  Synthetic
aucccuguaauucccauguguugu

SEQ ID NO: 400078 - RNA, 18 nt, Artificial Sequence
  Synthetic
augacaccauuguguugu

SEQ ID NO: 400079 - RNA, 19 nt, Artificial Sequence
  Synthetic
aaugacaccauuguguugu

SEQ ID NO: 400080 - RNA, 20 nt, Artificial Sequence
  Synthetic
gaaugacaccauuguguugu

SEQ ID NO: 400081 - RNA, 21 nt, Artificial Sequence
  Synthetic
agaaugacaccauuguguugu

SEQ ID NO: 400082 - RNA, 22 nt, Artificial Sequence
  Synthetic
cagaaugacaccauuguguugu

SEQ ID NO: 400083 - RNA, 23 nt, Artificial Sequence
  Synthetic
gcagaaugacaccauuguguugu

SEQ ID NO: 400084 - RNA, 24 nt, Artificial Sequence
  Synthetic
ugcagaaugacaccauuguguugu

SEQ ID NO: 400085 - RNA, 18 nt, Artificial Sequence
  Synthetic
uguguccauuuguguugu

SEQ ID NO: 400086 - RNA, 19 nt, Artificial Sequence
  Synthetic
auguguccauuuguguugu

SEQ ID NO: 400087 - RNA, 20 nt, Artificial Sequence
  Synthetic
gauguguccauuuguguugu

SEQ ID NO: 400088 - RNA, 21 nt, Artificial Sequence
  Synthetic
ugauguguccauuuguguugu

SEQ ID NO: 400089 - RNA, 22 nt, Artificial Sequence
  Synthetic
uugauguguccauuuguguugu

SEQ ID NO: 400090 - RNA, 23 nt, Artificial Sequence
  Synthetic
auugauguguccauuuguguugu

SEQ ID NO: 400091 - RNA, 24 nt, Artificial Sequence
  Synthetic
uauugauguguccauuuguguugu

SEQ ID NO: 400092 - RNA, 18 nt, Artificial Sequence
  Synthetic
auaauuccuacuuguugu

SEQ ID NO: 400093 - RNA, 19 nt, Artificial Sequence
  Synthetic
cauaauuccuacuuguugu

SEQ ID NO: 400094 - RNA, 20 nt, Artificial Sequence
  Synthetic
ccauaauuccuacuuguugu

SEQ ID NO: 400095 - RNA, 21 nt, Artificial Sequence
  Synthetic
cccauaauuccuacuuguugu

SEQ ID NO: 400096 - RNA, 22 nt, Artificial Sequence
  Synthetic
ucccauaauuccuacuuguugu

SEQ ID NO: 400097 - RNA, 23 nt, Artificial Sequence
  Synthetic
cucccauaauuccuacuuguugu

SEQ ID NO: 400098 - RNA, 24 nt, Artificial Sequence
  Synthetic
acucccauaauuccuacuuguugu

SEQ ID NO: 400099 - RNA, 18 nt, Artificial Sequence
  Synthetic
agagcuaacaguuguugu

SEQ ID NO: 400100 - RNA, 19 nt, Artificial Sequence
  Synthetic
cagagcuaacaguuguugu

SEQ ID NO: 400101 - RNA, 20 nt, Artificial Sequence
  Synthetic
ucagagcuaacaguuguugu

SEQ ID NO: 400102 - RNA, 21 nt, Artificial Sequence
  Synthetic
uucagagcuaacaguuguugu

SEQ ID NO: 400103 - RNA, 22 nt, Artificial Sequence
  Synthetic
cuucagagcuaacaguuguugu

SEQ ID NO: 400104 - RNA, 23 nt, Artificial Sequence
  Synthetic
acuucagagcuaacaguuguugu

SEQ ID NO: 400105 - RNA, 24 nt, Artificial Sequence
  Synthetic
cacuucagagcuaacaguuguugu

SEQ ID NO: 400106 - RNA, 18 nt, Artificial Sequence
  Synthetic
uaaagcuaaauuuguugu

SEQ ID NO: 400107 - RNA, 19 nt, Artificial Sequence
  Synthetic
cuaaagcuaaauuuguugu

SEQ ID NO: 400108 - RNA, 20 nt, Artificial Sequence
  Synthetic
ucuaaagcuaaauuuguugu

SEQ ID NO: 400109 - RNA, 21 nt, Artificial Sequence
  Synthetic
uucuaaagcuaaauuuguugu

SEQ ID NO: 400110 - RNA, 22 nt, Artificial Sequence
  Synthetic
uuucuaaagcuaaauuuguugu

SEQ ID NO: 400111 - RNA, 23 nt, Artificial Sequence
  Synthetic
uuuucuaaagcuaaauuuguugu

SEQ ID NO: 400112 - RNA, 24 nt, Artificial Sequence
  Synthetic
cuuuucuaaagcuaaauuuguugu

SEQ ID NO: 400113 - RNA, 18 nt, Artificial Sequence
  Synthetic
uauuuucuucaaauuugu

SEQ ID NO: 400114 - RNA, 19 nt, Artificial Sequence
  Synthetic
cuauuuucuucaaauuugu

SEQ ID NO: 400115 - RNA, 20 nt, Artificial Sequence
  Synthetic
ucuauuuucuucaaauuugu

SEQ ID NO: 400116 - RNA, 21 nt, Artificial Sequence
  Synthetic
uucuauuuucuucaaauuugu

SEQ ID NO: 400117 - RNA, 22 nt, Artificial Sequence
  Synthetic
auucuauuuucuucaaauuugu

SEQ ID NO: 400118 - RNA, 23 nt, Artificial Sequence
  Synthetic
uauucuauuuucuucaaauuugu

SEQ ID NO: 400119 - RNA, 24 nt, Artificial Sequence
  Synthetic
auauucuauuuucuucaaauuugu

SEQ ID NO: 400120 - RNA, 18 nt, Artificial Sequence
  Synthetic
aacuaaaguccaauuugu

SEQ ID NO: 400121 - RNA, 19 nt, Artificial Sequence
  Synthetic
uaacuaaaguccaauuugu

SEQ ID NO: 400122 - RNA, 20 nt, Artificial Sequence
  Synthetic
guaacuaaaguccaauuugu

SEQ ID NO: 400123 - RNA, 21 nt, Artificial Sequence
  Synthetic
uguaacuaaaguccaauuugu

SEQ ID NO: 400124 - RNA, 22 nt, Artificial Sequence
  Synthetic
uuguaacuaaaguccaauuugu

SEQ ID NO: 400125 - RNA, 23 nt, Artificial Sequence
  Synthetic
auuguaacuaaaguccaauuugu

SEQ ID NO: 400126 - RNA, 24 nt, Artificial Sequence
  Synthetic
cauuguaacuaaaguccaauuugu

SEQ ID NO: 400127 - RNA, 18 nt, Artificial Sequence
  Synthetic
acaaacauuugaauuugu

SEQ ID NO: 400128 - RNA, 19 nt, Artificial Sequence
  Synthetic
gacaaacauuugaauuugu

SEQ ID NO: 400129 - RNA, 20 nt, Artificial Sequence
  Synthetic
agacaaacauuugaauuugu

SEQ ID NO: 400130 - RNA, 21 nt, Artificial Sequence
  Synthetic
aagacaaacauuugaauuugu

SEQ ID NO: 400131 - RNA, 22 nt, Artificial Sequence
  Synthetic
caagacaaacauuugaauuugu

SEQ ID NO: 400132 - RNA, 23 nt, Artificial Sequence
  Synthetic
gcaagacaaacauuugaauuugu

SEQ ID NO: 400133 - RNA, 24 nt, Artificial Sequence
  Synthetic
agcaagacaaacauuugaauuugu

SEQ ID NO: 400134 - RNA, 18 nt, Artificial Sequence
  Synthetic
cauuuggagguaauuugu

SEQ ID NO: 400135 - RNA, 19 nt, Artificial Sequence
  Synthetic
ucauuuggagguaauuugu

SEQ ID NO: 400136 - RNA, 20 nt, Artificial Sequence
  Synthetic
aucauuuggagguaauuugu

SEQ ID NO: 400137 - RNA, 21 nt, Artificial Sequence
  Synthetic
gaucauuuggagguaauuugu

SEQ ID NO: 400138 - RNA, 22 nt, Artificial Sequence
  Synthetic
ugaucauuuggagguaauuugu

SEQ ID NO: 400139 - RNA, 23 nt, Artificial Sequence
  Synthetic
uugaucauuuggagguaauuugu

SEQ ID NO: 400140 - RNA, 24 nt, Artificial Sequence
  Synthetic
uuugaucauuuggagguaauuugu

SEQ ID NO: 400141 - RNA, 18 nt, Artificial Sequence
  Synthetic
guuguucuccacauuugu

SEQ ID NO: 400142 - RNA, 19 nt, Artificial Sequence
  Synthetic
uguuguucuccacauuugu

SEQ ID NO: 400143 - RNA, 20 nt, Artificial Sequence
  Synthetic
cuguuguucuccacauuugu

SEQ ID NO: 400144 - RNA, 21 nt, Artificial Sequence
  Synthetic
ucuguuguucuccacauuugu

SEQ ID NO: 400145 - RNA, 22 nt, Artificial Sequence
  Synthetic
cucuguuguucuccacauuugu

SEQ ID NO: 400146 - RNA, 23 nt, Artificial Sequence
  Synthetic
gcucuguuguucuccacauuugu

SEQ ID NO: 400147 - RNA, 24 nt, Artificial Sequence
  Synthetic
ggcucuguuguucuccacauuugu

SEQ ID NO: 400148 - RNA, 18 nt, Artificial Sequence
  Synthetic
auuauuuuaaagauuugu

SEQ ID NO: 400149 - RNA, 19 nt, Artificial Sequence
  Synthetic
aauuauuuuaaagauuugu

SEQ ID NO: 400150 - RNA, 20 nt, Artificial Sequence
  Synthetic
aaauuauuuuaaagauuugu

SEQ ID NO: 400151 - RNA, 21 nt, Artificial Sequence
  Synthetic
uaaauuauuuuaaagauuugu

SEQ ID NO: 400152 - RNA, 22 nt, Artificial Sequence
  Synthetic
guaaauuauuuuaaagauuugu

SEQ ID NO: 400153 - RNA, 23 nt, Artificial Sequence
  Synthetic
uguaaauuauuuuaaagauuugu

SEQ ID NO: 400154 - RNA, 24 nt, Artificial Sequence
  Synthetic
cuguaaauuauuuuaaagauuugu

SEQ ID NO: 400155 - RNA, 18 nt, Artificial Sequence
  Synthetic
uuaauuuuuaagauuugu

SEQ ID NO: 400156 - RNA, 19 nt, Artificial Sequence
  Synthetic
uuuaauuuuuaagauuugu

SEQ ID NO: 400157 - RNA, 20 nt, Artificial Sequence
  Synthetic
uuuuaauuuuuaagauuugu

SEQ ID NO: 400158 - RNA, 21 nt, Artificial Sequence
  Synthetic
cuuuuaauuuuuaagauuugu

SEQ ID NO: 400159 - RNA, 22 nt, Artificial Sequence
  Synthetic
acuuuuaauuuuuaagauuugu

SEQ ID NO: 400160 - RNA, 23 nt, Artificial Sequence
  Synthetic
uacuuuuaauuuuuaagauuugu

SEQ ID NO: 400161 - RNA, 24 nt, Artificial Sequence
  Synthetic
auacuuuuaauuuuuaagauuugu

SEQ ID NO: 400162 - RNA, 18 nt, Artificial Sequence
  Synthetic
caaauaaaggagauuugu

SEQ ID NO: 400163 - RNA, 19 nt, Artificial Sequence
  Synthetic
gcaaauaaaggagauuugu

SEQ ID NO: 400164 - RNA, 20 nt, Artificial Sequence
  Synthetic
agcaaauaaaggagauuugu

SEQ ID NO: 400165 - RNA, 21 nt, Artificial Sequence
  Synthetic
gagcaaauaaaggagauuugu

SEQ ID NO: 400166 - RNA, 22 nt, Artificial Sequence
  Synthetic
agagcaaauaaaggagauuugu

SEQ ID NO: 400167 - RNA, 23 nt, Artificial Sequence
  Synthetic
uagagcaaauaaaggagauuugu

SEQ ID NO: 400168 - RNA, 24 nt, Artificial Sequence
  Synthetic
auagagcaaauaaaggagauuugu

SEQ ID NO: 400169 - RNA, 18 nt, Artificial Sequence
  Synthetic
augauuaaauagauuugu

SEQ ID NO: 400170 - RNA, 19 nt, Artificial Sequence
  Synthetic
gaugauuaaauagauuugu

SEQ ID NO: 400171 - RNA, 20 nt, Artificial Sequence
  Synthetic
agaugauuaaauagauuugu

SEQ ID NO: 400172 - RNA, 21 nt, Artificial Sequence
  Synthetic
uagaugauuaaauagauuugu

SEQ ID NO: 400173 - RNA, 22 nt, Artificial Sequence
  Synthetic
uuagaugauuaaauagauuugu

SEQ ID NO: 400174 - RNA, 23 nt, Artificial Sequence
  Synthetic
uuuagaugauuaaauagauuugu

SEQ ID NO: 400175 - RNA, 24 nt, Artificial Sequence
  Synthetic
uuuuagaugauuaaauagauuugu

SEQ ID NO: 400176 - RNA, 18 nt, Artificial Sequence
  Synthetic
uuguuuuagcugauuugu

SEQ ID NO: 400177 - RNA, 19 nt, Artificial Sequence
  Synthetic
uuuguuuuagcugauuugu

SEQ ID NO: 400178 - RNA, 20 nt, Artificial Sequence
  Synthetic
uuuuguuuuagcugauuugu

SEQ ID NO: 400179 - RNA, 21 nt, Artificial Sequence
  Synthetic
guuuuguuuuagcugauuugu

SEQ ID NO: 400180 - RNA, 22 nt, Artificial Sequence
  Synthetic
uguuuuguuuuagcugauuugu

SEQ ID NO: 400181 - RNA, 23 nt, Artificial Sequence
  Synthetic
auguuuuguuuuagcugauuugu

SEQ ID NO: 400182 - RNA, 24 nt, Artificial Sequence
  Synthetic
aauguuuuguuuuagcugauuugu

SEQ ID NO: 400183 - RNA, 18 nt, Artificial Sequence
  Synthetic
aauucucauuugauuugu

SEQ ID NO: 400184 - RNA, 19 nt, Artificial Sequence
  Synthetic
caauucucauuugauuugu

SEQ ID NO: 400185 - RNA, 20 nt, Artificial Sequence
  Synthetic
acaauucucauuugauuugu

SEQ ID NO: 400186 - RNA, 21 nt, Artificial Sequence
  Synthetic
cacaauucucauuugauuugu

SEQ ID NO: 400187 - RNA, 22 nt, Artificial Sequence
  Synthetic
gcacaauucucauuugauuugu

SEQ ID NO: 400188 - RNA, 23 nt, Artificial Sequence
  Synthetic
agcacaauucucauuugauuugu

SEQ ID NO: 400189 - RNA, 24 nt, Artificial Sequence
  Synthetic
gagcacaauucucauuugauuugu

SEQ ID NO: 400190 - RNA, 18 nt, Artificial Sequence
  Synthetic
gugguuauaaauauuugu

SEQ ID NO: 400191 - RNA, 19 nt, Artificial Sequence
  Synthetic
agugguuauaaauauuugu

SEQ ID NO: 400192 - RNA, 20 nt, Artificial Sequence
  Synthetic
uagugguuauaaauauuugu

SEQ ID NO: 400193 - RNA, 21 nt, Artificial Sequence
  Synthetic
auagugguuauaaauauuugu

SEQ ID NO: 400194 - RNA, 22 nt, Artificial Sequence
  Synthetic
cauagugguuauaaauauuugu

SEQ ID NO: 400195 - RNA, 23 nt, Artificial Sequence
  Synthetic
ucauagugguuauaaauauuugu

SEQ ID NO: 400196 - RNA, 24 nt, Artificial Sequence
  Synthetic
aucauagugguuauaaauauuugu

SEQ ID NO: 400197 - RNA, 18 nt, Artificial Sequence
  Synthetic
acuuuugaacauauuugu

SEQ ID NO: 400198 - RNA, 19 nt, Artificial Sequence
  Synthetic
uacuuuugaacauauuugu

SEQ ID NO: 400199 - RNA, 20 nt, Artificial Sequence
  Synthetic
uuacuuuugaacauauuugu

SEQ ID NO: 400200 - RNA, 21 nt, Artificial Sequence
  Synthetic
auuacuuuugaacauauuugu

SEQ ID NO: 400201 - RNA, 22 nt, Artificial Sequence
  Synthetic
aauuacuuuugaacauauuugu

SEQ ID NO: 400202 - RNA, 23 nt, Artificial Sequence
  Synthetic
gaauuacuuuugaacauauuugu

SEQ ID NO: 400203 - RNA, 24 nt, Artificial Sequence
  Synthetic
ugaauuacuuuugaacauauuugu

SEQ ID NO: 400204 - RNA, 18 nt, Artificial Sequence
  Synthetic
auaaagcaccauauuugu

SEQ ID NO: 400205 - RNA, 19 nt, Artificial Sequence
  Synthetic
gauaaagcaccauauuugu

SEQ ID NO: 400206 - RNA, 20 nt, Artificial Sequence
  Synthetic
agauaaagcaccauauuugu

SEQ ID NO: 400207 - RNA, 21 nt, Artificial Sequence
  Synthetic
aagauaaagcaccauauuugu

SEQ ID NO: 400208 - RNA, 22 nt, Artificial Sequence
  Synthetic
caagauaaagcaccauauuugu

SEQ ID NO: 400209 - RNA, 23 nt, Artificial Sequence
  Synthetic
acaagauaaagcaccauauuugu

SEQ ID NO: 400210 - RNA, 24 nt, Artificial Sequence
  Synthetic
aacaagauaaagcaccauauuugu

SEQ ID NO: 400211 - RNA, 18 nt, Artificial Sequence
  Synthetic
aaaucugaauguauuugu

SEQ ID NO: 400212 - RNA, 19 nt, Artificial Sequence
  Synthetic
caaaucugaauguauuugu

SEQ ID NO: 400213 - RNA, 20 nt, Artificial Sequence
  Synthetic
acaaaucugaauguauuugu

SEQ ID NO: 400214 - RNA, 21 nt, Artificial Sequence
  Synthetic
gacaaaucugaauguauuugu

SEQ ID NO: 400215 - RNA, 22 nt, Artificial Sequence
  Synthetic
ugacaaaucugaauguauuugu

SEQ ID NO: 400216 - RNA, 23 nt, Artificial Sequence
  Synthetic
gugacaaaucugaauguauuugu

SEQ ID NO: 400217 - RNA, 24 nt, Artificial Sequence
  Synthetic
ggugacaaaucugaauguauuugu

SEQ ID NO: 400218 - RNA, 18 nt, Artificial Sequence
  Synthetic
uaauuacauguuauuugu

SEQ ID NO: 400219 - RNA, 19 nt, Artificial Sequence
  Synthetic
guaauuacauguuauuugu

SEQ ID NO: 400220 - RNA, 20 nt, Artificial Sequence
  Synthetic
uguaauuacauguuauuugu

SEQ ID NO: 400221 - RNA, 21 nt, Artificial Sequence
  Synthetic
uuguaauuacauguuauuugu

SEQ ID NO: 400222 - RNA, 22 nt, Artificial Sequence
  Synthetic
uuuguaauuacauguuauuugu

SEQ ID NO: 400223 - RNA, 23 nt, Artificial Sequence
  Synthetic
guuuguaauuacauguuauuugu

SEQ ID NO: 400224 - RNA, 24 nt, Artificial Sequence
  Synthetic
aguuuguaauuacauguuauuugu

SEQ ID NO: 400225 - RNA, 18 nt, Artificial Sequence
  Synthetic
uuaauaaguuaacuuugu

SEQ ID NO: 400226 - RNA, 19 nt, Artificial Sequence
  Synthetic
cuuaauaaguuaacuuugu

SEQ ID NO: 400227 - RNA, 20 nt, Artificial Sequence
  Synthetic
ucuuaauaaguuaacuuugu

SEQ ID NO: 400228 - RNA, 21 nt, Artificial Sequence
  Synthetic
uucuuaauaaguuaacuuugu

SEQ ID NO: 400229 - RNA, 22 nt, Artificial Sequence
  Synthetic
cuucuuaauaaguuaacuuugu

SEQ ID NO: 400230 - RNA, 23 nt, Artificial Sequence
  Synthetic
gcuucuuaauaaguuaacuuugu

SEQ ID NO: 400231 - RNA, 24 nt, Artificial Sequence
  Synthetic
ugcuucuuaauaaguuaacuuugu

SEQ ID NO: 400232 - RNA, 18 nt, Artificial Sequence
  Synthetic
uauguauauggacuuugu

SEQ ID NO: 400233 - RNA, 19 nt, Artificial Sequence
  Synthetic
guauguauauggacuuugu

SEQ ID NO: 400234 - RNA, 20 nt, Artificial Sequence
  Synthetic
gguauguauauggacuuugu

SEQ ID NO: 400235 - RNA, 21 nt, Artificial Sequence
  Synthetic
ugguauguauauggacuuugu

SEQ ID NO: 400236 - RNA, 22 nt, Artificial Sequence
  Synthetic
cugguauguauauggacuuugu

SEQ ID NO: 400237 - RNA, 23 nt, Artificial Sequence
  Synthetic
ccugguauguauauggacuuugu

SEQ ID NO: 400238 - RNA, 24 nt, Artificial Sequence
  Synthetic
accugguauguauauggacuuugu

SEQ ID NO: 400239 - RNA, 18 nt, Artificial Sequence
  Synthetic
aaaaggaaaauacuuugu

SEQ ID NO: 400240 - RNA, 19 nt, Artificial Sequence
  Synthetic
gaaaaggaaaauacuuugu

SEQ ID NO: 400241 - RNA, 20 nt, Artificial Sequence
  Synthetic
agaaaaggaaaauacuuugu

SEQ ID NO: 400242 - RNA, 21 nt, Artificial Sequence
  Synthetic
uagaaaaggaaaauacuuugu

SEQ ID NO: 400243 - RNA, 22 nt, Artificial Sequence
  Synthetic
guagaaaaggaaaauacuuugu

SEQ ID NO: 400244 - RNA, 23 nt, Artificial Sequence
  Synthetic
uguagaaaaggaaaauacuuugu

SEQ ID NO: 400245 - RNA, 24 nt, Artificial Sequence
  Synthetic
uuguagaaaaggaaaauacuuugu

SEQ ID NO: 400246 - RNA, 18 nt, Artificial Sequence
  Synthetic
uccaugacggaccuuugu

SEQ ID NO: 400247 - RNA, 19 nt, Artificial Sequence
  Synthetic
uuccaugacggaccuuugu

SEQ ID NO: 400248 - RNA, 20 nt, Artificial Sequence
  Synthetic
uuuccaugacggaccuuugu

SEQ ID NO: 400249 - RNA, 21 nt, Artificial Sequence
  Synthetic
cuuuccaugacggaccuuugu

SEQ ID NO: 400250 - RNA, 22 nt, Artificial Sequence
  Synthetic
gcuuuccaugacggaccuuugu

SEQ ID NO: 400251 - RNA, 23 nt, Artificial Sequence
  Synthetic
agcuuuccaugacggaccuuugu

SEQ ID NO: 400252 - RNA, 24 nt, Artificial Sequence
  Synthetic
aagcuuuccaugacggaccuuugu

SEQ ID NO: 400253 - RNA, 18 nt, Artificial Sequence
  Synthetic
ugaguucacauccuuugu

SEQ ID NO: 400254 - RNA, 19 nt, Artificial Sequence
  Synthetic
augaguucacauccuuugu

SEQ ID NO: 400255 - RNA, 20 nt, Artificial Sequence
  Synthetic
gaugaguucacauccuuugu

SEQ ID NO: 400256 - RNA, 21 nt, Artificial Sequence
  Synthetic
ggaugaguucacauccuuugu

SEQ ID NO: 400257 - RNA, 22 nt, Artificial Sequence
  Synthetic
aggaugaguucacauccuuugu

SEQ ID NO: 400258 - RNA, 23 nt, Artificial Sequence
  Synthetic
aaggaugaguucacauccuuugu

SEQ ID NO: 400259 - RNA, 24 nt, Artificial Sequence
  Synthetic
aaaggaugaguucacauccuuugu

SEQ ID NO: 400260 - RNA, 18 nt, Artificial Sequence
  Synthetic
ugaguucaaguccuuugu

SEQ ID NO: 400261 - RNA, 19 nt, Artificial Sequence
  Synthetic
augaguucaaguccuuugu

SEQ ID NO: 400262 - RNA, 20 nt, Artificial Sequence
  Synthetic
gaugaguucaaguccuuugu

SEQ ID NO: 400263 - RNA, 21 nt, Artificial Sequence
  Synthetic
ggaugaguucaaguccuuugu

SEQ ID NO: 400264 - RNA, 22 nt, Artificial Sequence
  Synthetic
aggaugaguucaaguccuuugu

SEQ ID NO: 400265 - RNA, 23 nt, Artificial Sequence
  Synthetic
gaggaugaguucaaguccuuugu

SEQ ID NO: 400266 - RNA, 24 nt, Artificial Sequence
  Synthetic
agaggaugaguucaaguccuuugu

SEQ ID NO: 400267 - RNA, 18 nt, Artificial Sequence
  Synthetic
ugaguucacguccuuugu

SEQ ID NO: 400268 - RNA, 19 nt, Artificial Sequence
  Synthetic
augaguucacguccuuugu

SEQ ID NO: 400269 - RNA, 20 nt, Artificial Sequence
  Synthetic
gaugaguucacguccuuugu

SEQ ID NO: 400270 - RNA, 21 nt, Artificial Sequence
  Synthetic
ggaugaguucacguccuuugu

SEQ ID NO: 400271 - RNA, 22 nt, Artificial Sequence
  Synthetic
aggaugaguucacguccuuugu

SEQ ID NO: 400272 - RNA, 23 nt, Artificial Sequence
  Synthetic
aaggaugaguucacguccuuugu

SEQ ID NO: 400273 - RNA, 24 nt, Artificial Sequence
  Synthetic
aaaggaugaguucacguccuuugu

SEQ ID NO: 400274 - RNA, 18 nt, Artificial Sequence
  Synthetic
ugaguucauguccuuugu

SEQ ID NO: 400275 - RNA, 19 nt, Artificial Sequence
  Synthetic
augaguucauguccuuugu

SEQ ID NO: 400276 - RNA, 20 nt, Artificial Sequence
  Synthetic
gaugaguucauguccuuugu

SEQ ID NO: 400277 - RNA, 21 nt, Artificial Sequence
  Synthetic
ggaugaguucauguccuuugu

SEQ ID NO: 400278 - RNA, 22 nt, Artificial Sequence
  Synthetic
aggaugaguucauguccuuugu

SEQ ID NO: 400279 - RNA, 23 nt, Artificial Sequence
  Synthetic
aaggaugaguucauguccuuugu

SEQ ID NO: 400280 - RNA, 24 nt, Artificial Sequence
  Synthetic
aaaggaugaguucauguccuuugu

SEQ ID NO: 400281 - RNA, 21 nt, Artificial Sequence
  Synthetic
ugaugaguucauguccuuugu

SEQ ID NO: 400282 - RNA, 22 nt, Artificial Sequence
  Synthetic
augaugaguucauguccuuugu

SEQ ID NO: 400283 - RNA, 23 nt, Artificial Sequence
  Synthetic
aaugaugaguucauguccuuugu

SEQ ID NO: 400284 - RNA, 24 nt, Artificial Sequence
  Synthetic
aaaugaugaguucauguccuuugu

SEQ ID NO: 400285 - RNA, 18 nt, Artificial Sequence
  Synthetic
ugcguucguguccuuugu

SEQ ID NO: 400286 - RNA, 19 nt, Artificial Sequence
  Synthetic
augcguucguguccuuugu

SEQ ID NO: 400287 - RNA, 20 nt, Artificial Sequence
  Synthetic
gaugcguucguguccuuugu

SEQ ID NO: 400288 - RNA, 21 nt, Artificial Sequence
  Synthetic
ggaugcguucguguccuuugu

SEQ ID NO: 400289 - RNA, 22 nt, Artificial Sequence
  Synthetic
aggaugcguucguguccuuugu

SEQ ID NO: 400290 - RNA, 23 nt, Artificial Sequence
  Synthetic
aaggaugcguucguguccuuugu

SEQ ID NO: 400291 - RNA, 24 nt, Artificial Sequence
  Synthetic
aaaggaugcguucguguccuuugu

SEQ ID NO: 400292 - RNA, 18 nt, Artificial Sequence
  Synthetic
gcaauggcaaagcuuugu

SEQ ID NO: 400293 - RNA, 19 nt, Artificial Sequence
  Synthetic
agcaauggcaaagcuuugu

SEQ ID NO: 400294 - RNA, 20 nt, Artificial Sequence
  Synthetic
uagcaauggcaaagcuuugu

SEQ ID NO: 400295 - RNA, 21 nt, Artificial Sequence
  Synthetic
cuagcaauggcaaagcuuugu

SEQ ID NO: 400296 - RNA, 22 nt, Artificial Sequence
  Synthetic
acuagcaauggcaaagcuuugu

SEQ ID NO: 400297 - RNA, 23 nt, Artificial Sequence
  Synthetic
cacuagcaauggcaaagcuuugu

SEQ ID NO: 400298 - RNA, 24 nt, Artificial Sequence
  Synthetic
acacuagcaauggcaaagcuuugu

SEQ ID NO: 400299 - RNA, 18 nt, Artificial Sequence
  Synthetic
uguuaauauaagcuuugu

SEQ ID NO: 400300 - RNA, 19 nt, Artificial Sequence
  Synthetic
cuguuaauauaagcuuugu

SEQ ID NO: 400301 - RNA, 20 nt, Artificial Sequence
  Synthetic
gcuguuaauauaagcuuugu

SEQ ID NO: 400302 - RNA, 21 nt, Artificial Sequence
  Synthetic
agcuguuaauauaagcuuugu

SEQ ID NO: 400303 - RNA, 22 nt, Artificial Sequence
  Synthetic
aagcuguuaauauaagcuuugu

SEQ ID NO: 400304 - RNA, 23 nt, Artificial Sequence
  Synthetic
uaagcuguuaauauaagcuuugu

SEQ ID NO: 400305 - RNA, 24 nt, Artificial Sequence
  Synthetic
uuaagcuguuaauauaagcuuugu

SEQ ID NO: 400306 - RNA, 18 nt, Artificial Sequence
  Synthetic
agggguaguaagcuuugu

SEQ ID NO: 400307 - RNA, 19 nt, Artificial Sequence
  Synthetic
aagggguaguaagcuuugu

SEQ ID NO: 400308 - RNA, 20 nt, Artificial Sequence
  Synthetic
gaagggguaguaagcuuugu

SEQ ID NO: 400309 - RNA, 21 nt, Artificial Sequence
  Synthetic
ggaagggguaguaagcuuugu

SEQ ID NO: 400310 - RNA, 22 nt, Artificial Sequence
  Synthetic
aggaagggguaguaagcuuugu

SEQ ID NO: 400311 - RNA, 23 nt, Artificial Sequence
  Synthetic
uaggaagggguaguaagcuuugu

SEQ ID NO: 400312 - RNA, 24 nt, Artificial Sequence
  Synthetic
guaggaagggguaguaagcuuugu

SEQ ID NO: 400313 - RNA, 18 nt, Artificial Sequence
  Synthetic
uaugugcuugugcuuugu

SEQ ID NO: 400314 - RNA, 19 nt, Artificial Sequence
  Synthetic
cuaugugcuugugcuuugu

SEQ ID NO: 400315 - RNA, 20 nt, Artificial Sequence
  Synthetic
ccuaugugcuugugcuuugu

SEQ ID NO: 400316 - RNA, 21 nt, Artificial Sequence
  Synthetic
uccuaugugcuugugcuuugu

SEQ ID NO: 400317 - RNA, 22 nt, Artificial Sequence
  Synthetic
guccuaugugcuugugcuuugu

SEQ ID NO: 400318 - RNA, 23 nt, Artificial Sequence
  Synthetic
uguccuaugugcuugugcuuugu

SEQ ID NO: 400319 - RNA, 24 nt, Artificial Sequence
  Synthetic
cuguccuaugugcuugugcuuugu

SEQ ID NO: 400320 - RNA, 18 nt, Artificial Sequence
  Synthetic
aauuuuacuccucuuugu

SEQ ID NO: 400321 - RNA, 19 nt, Artificial Sequence
  Synthetic
aaauuuuacuccucuuugu

SEQ ID NO: 400322 - RNA, 20 nt, Artificial Sequence
  Synthetic
uaaauuuuacuccucuuugu

SEQ ID NO: 400323 - RNA, 21 nt, Artificial Sequence
  Synthetic
guaaauuuuacuccucuuugu

SEQ ID NO: 400324 - RNA, 22 nt, Artificial Sequence
  Synthetic
uguaaauuuuacuccucuuugu

SEQ ID NO: 400325 - RNA, 23 nt, Artificial Sequence
  Synthetic
uuguaaauuuuacuccucuuugu

SEQ ID NO: 400326 - RNA, 24 nt, Artificial Sequence
  Synthetic
cuuguaaauuuuacuccucuuugu

SEQ ID NO: 400327 - RNA, 18 nt, Artificial Sequence
  Synthetic
cauaguauuccucuuugu

SEQ ID NO: 400328 - RNA, 19 nt, Artificial Sequence
  Synthetic
acauaguauuccucuuugu

SEQ ID NO: 400329 - RNA, 20 nt, Artificial Sequence
  Synthetic
aacauaguauuccucuuugu

SEQ ID NO: 400330 - RNA, 21 nt, Artificial Sequence
  Synthetic
gaacauaguauuccucuuugu

SEQ ID NO: 400331 - RNA, 22 nt, Artificial Sequence
  Synthetic
ugaacauaguauuccucuuugu

SEQ ID NO: 400332 - RNA, 23 nt, Artificial Sequence
  Synthetic
uugaacauaguauuccucuuugu

SEQ ID NO: 400333 - RNA, 24 nt, Artificial Sequence
  Synthetic
guugaacauaguauuccucuuugu

SEQ ID NO: 400334 - RNA, 18 nt, Artificial Sequence
  Synthetic
aaaaguuuauuucuuugu

SEQ ID NO: 400335 - RNA, 19 nt, Artificial Sequence
  Synthetic
caaaaguuuauuucuuugu

SEQ ID NO: 400336 - RNA, 20 nt, Artificial Sequence
  Synthetic
acaaaaguuuauuucuuugu

SEQ ID NO: 400337 - RNA, 21 nt, Artificial Sequence
  Synthetic
gacaaaaguuuauuucuuugu

SEQ ID NO: 400338 - RNA, 22 nt, Artificial Sequence
  Synthetic
ggacaaaaguuuauuucuuugu

SEQ ID NO: 400339 - RNA, 23 nt, Artificial Sequence
  Synthetic
aggacaaaaguuuauuucuuugu

SEQ ID NO: 400340 - RNA, 24 nt, Artificial Sequence
  Synthetic
caggacaaaaguuuauuucuuugu

SEQ ID NO: 400341 - RNA, 18 nt, Artificial Sequence
  Synthetic
uuagaugacuuucuuugu

SEQ ID NO: 400342 - RNA, 19 nt, Artificial Sequence
  Synthetic
uuuagaugacuuucuuugu

SEQ ID NO: 400343 - RNA, 20 nt, Artificial Sequence
  Synthetic
auuuagaugacuuucuuugu

SEQ ID NO: 400344 - RNA, 21 nt, Artificial Sequence
  Synthetic
aauuuagaugacuuucuuugu

SEQ ID NO: 400345 - RNA, 22 nt, Artificial Sequence
  Synthetic
gaauuuagaugacuuucuuugu

SEQ ID NO: 400346 - RNA, 23 nt, Artificial Sequence
  Synthetic
agaauuuagaugacuuucuuugu

SEQ ID NO: 400347 - RNA, 24 nt, Artificial Sequence
  Synthetic
gagaauuuagaugacuuucuuugu

SEQ ID NO: 400348 - RNA, 18 nt, Artificial Sequence
  Synthetic
uccugggcuuuucuuugu

SEQ ID NO: 400349 - RNA, 19 nt, Artificial Sequence
  Synthetic
guccugggcuuuucuuugu

SEQ ID NO: 400350 - RNA, 20 nt, Artificial Sequence
  Synthetic
gguccugggcuuuucuuugu

SEQ ID NO: 400351 - RNA, 21 nt, Artificial Sequence
  Synthetic
ugguccugggcuuuucuuugu

SEQ ID NO: 400352 - RNA, 22 nt, Artificial Sequence
  Synthetic
uugguccugggcuuuucuuugu

SEQ ID NO: 400353 - RNA, 23 nt, Artificial Sequence
  Synthetic
uuugguccugggcuuuucuuugu

SEQ ID NO: 400354 - RNA, 24 nt, Artificial Sequence
  Synthetic
auuugguccugggcuuuucuuugu

SEQ ID NO: 400355 - RNA, 18 nt, Artificial Sequence
  Synthetic
cauuuuuuugaaguuugu

SEQ ID NO: 400356 - RNA, 19 nt, Artificial Sequence
  Synthetic
gcauuuuuuugaaguuugu

SEQ ID NO: 400357 - RNA, 20 nt, Artificial Sequence
  Synthetic
ggcauuuuuuugaaguuugu

SEQ ID NO: 400358 - RNA, 21 nt, Artificial Sequence
  Synthetic
uggcauuuuuuugaaguuugu

SEQ ID NO: 400359 - RNA, 22 nt, Artificial Sequence
  Synthetic
uuggcauuuuuuugaaguuugu

SEQ ID NO: 400360 - RNA, 23 nt, Artificial Sequence
  Synthetic
auuggcauuuuuuugaaguuugu

SEQ ID NO: 400361 - RNA, 24 nt, Artificial Sequence
  Synthetic
uauuggcauuuuuuugaaguuugu

SEQ ID NO: 400362 - RNA, 18 nt, Artificial Sequence
  Synthetic
aggaaugaauaaguuugu

SEQ ID NO: 400363 - RNA, 19 nt, Artificial Sequence
  Synthetic
gaggaaugaauaaguuugu

SEQ ID NO: 400364 - RNA, 20 nt, Artificial Sequence
  Synthetic
ggaggaaugaauaaguuugu

SEQ ID NO: 400365 - RNA, 21 nt, Artificial Sequence
  Synthetic
aggaggaaugaauaaguuugu

SEQ ID NO: 400366 - RNA, 22 nt, Artificial Sequence
  Synthetic
gaggaggaaugaauaaguuugu

SEQ ID NO: 400367 - RNA, 23 nt, Artificial Sequence
  Synthetic
ggaggaggaaugaauaaguuugu

SEQ ID NO: 400368 - RNA, 24 nt, Artificial Sequence
  Synthetic
uggaggaggaaugaauaaguuugu

SEQ ID NO: 400369 - RNA, 18 nt, Artificial Sequence
  Synthetic
uauuugccuacaguuugu

SEQ ID NO: 400370 - RNA, 19 nt, Artificial Sequence
  Synthetic
uuauuugccuacaguuugu

SEQ ID NO: 400371 - RNA, 20 nt, Artificial Sequence
  Synthetic
auuauuugccuacaguuugu

SEQ ID NO: 400372 - RNA, 21 nt, Artificial Sequence
  Synthetic
aauuauuugccuacaguuugu

SEQ ID NO: 400373 - RNA, 22 nt, Artificial Sequence
  Synthetic
gaauuauuugccuacaguuugu

SEQ ID NO: 400374 - RNA, 23 nt, Artificial Sequence
  Synthetic
agaauuauuugccuacaguuugu

SEQ ID NO: 400375 - RNA, 24 nt, Artificial Sequence
  Synthetic
aagaauuauuugccuacaguuugu

SEQ ID NO: 400376 - RNA, 18 nt, Artificial Sequence
  Synthetic
auaggcauugcaguuugu

SEQ ID NO: 400377 - RNA, 19 nt, Artificial Sequence
  Synthetic
aauaggcauugcaguuugu

SEQ ID NO: 400378 - RNA, 20 nt, Artificial Sequence
  Synthetic
uaauaggcauugcaguuugu

SEQ ID NO: 400379 - RNA, 21 nt, Artificial Sequence
  Synthetic
cuaauaggcauugcaguuugu

SEQ ID NO: 400380 - RNA, 22 nt, Artificial Sequence
  Synthetic
acuaauaggcauugcaguuugu

SEQ ID NO: 400381 - RNA, 23 nt, Artificial Sequence
  Synthetic
uacuaauaggcauugcaguuugu

SEQ ID NO: 400382 - RNA, 24 nt, Artificial Sequence
  Synthetic
cuacuaauaggcauugcaguuugu

SEQ ID NO: 400383 - RNA, 18 nt, Artificial Sequence
  Synthetic
gaguuagggagaguuugu

SEQ ID NO: 400384 - RNA, 19 nt, Artificial Sequence
  Synthetic
ggaguuagggagaguuugu

SEQ ID NO: 400385 - RNA, 20 nt, Artificial Sequence
  Synthetic
aggaguuagggagaguuugu

SEQ ID NO: 400386 - RNA, 21 nt, Artificial Sequence
  Synthetic
uaggaguuagggagaguuugu

SEQ ID NO: 400387 - RNA, 22 nt, Artificial Sequence
  Synthetic
guaggaguuagggagaguuugu

SEQ ID NO: 400388 - RNA, 23 nt, Artificial Sequence
  Synthetic
aguaggaguuagggagaguuugu

SEQ ID NO: 400389 - RNA, 24 nt, Artificial Sequence
  Synthetic
aaguaggaguuagggagaguuugu

SEQ ID NO: 400390 - RNA, 18 nt, Artificial Sequence
  Synthetic
agggugugaggaguuugu

SEQ ID NO: 400391 - RNA, 19 nt, Artificial Sequence
  Synthetic
gagggugugaggaguuugu

SEQ ID NO: 400392 - RNA, 20 nt, Artificial Sequence
  Synthetic
ugagggugugaggaguuugu

SEQ ID NO: 400393 - RNA, 21 nt, Artificial Sequence
  Synthetic
gugagggugugaggaguuugu

SEQ ID NO: 400394 - RNA, 22 nt, Artificial Sequence
  Synthetic
ugugagggugugaggaguuugu

SEQ ID NO: 400395 - RNA, 23 nt, Artificial Sequence
  Synthetic
uugugagggugugaggaguuugu

SEQ ID NO: 400396 - RNA, 24 nt, Artificial Sequence
  Synthetic
cuugugagggugugaggaguuugu

SEQ ID NO: 400397 - RNA, 18 nt, Artificial Sequence
  Synthetic
acguacuauuccguuugu

SEQ ID NO: 400398 - RNA, 19 nt, Artificial Sequence
  Synthetic
cacguacuauuccguuugu

SEQ ID NO: 400399 - RNA, 20 nt, Artificial Sequence
  Synthetic
gcacguacuauuccguuugu

SEQ ID NO: 400400 - RNA, 21 nt, Artificial Sequence
  Synthetic
ugcacguacuauuccguuugu

SEQ ID NO: 400401 - RNA, 22 nt, Artificial Sequence
  Synthetic
uugcacguacuauuccguuugu

SEQ ID NO: 400402 - RNA, 23 nt, Artificial Sequence
  Synthetic
uuugcacguacuauuccguuugu

SEQ ID NO: 400403 - RNA, 24 nt, Artificial Sequence
  Synthetic
cuuugcacguacuauuccguuugu

SEQ ID NO: 400404 - RNA, 18 nt, Artificial Sequence
  Synthetic
cagucuuaucagguuugu

SEQ ID NO: 400405 - RNA, 19 nt, Artificial Sequence
  Synthetic
acagucuuaucagguuugu

SEQ ID NO: 400406 - RNA, 20 nt, Artificial Sequence
  Synthetic
cacagucuuaucagguuugu

SEQ ID NO: 400407 - RNA, 21 nt, Artificial Sequence
  Synthetic
gcacagucuuaucagguuugu

SEQ ID NO: 400408 - RNA, 22 nt, Artificial Sequence
  Synthetic
ugcacagucuuaucagguuugu

SEQ ID NO: 400409 - RNA, 23 nt, Artificial Sequence
  Synthetic
cugcacagucuuaucagguuugu

SEQ ID NO: 400410 - RNA, 24 nt, Artificial Sequence
  Synthetic
acugcacagucuuaucagguuugu

SEQ ID NO: 400411 - RNA, 18 nt, Artificial Sequence
  Synthetic
gugucagcuccuguuugu

SEQ ID NO: 400412 - RNA, 19 nt, Artificial Sequence
  Synthetic
ugugucagcuccuguuugu

SEQ ID NO: 400413 - RNA, 20 nt, Artificial Sequence
  Synthetic
cugugucagcuccuguuugu

SEQ ID NO: 400414 - RNA, 21 nt, Artificial Sequence
  Synthetic
gcugugucagcuccuguuugu

SEQ ID NO: 400415 - RNA, 22 nt, Artificial Sequence
  Synthetic
agcugugucagcuccuguuugu

SEQ ID NO: 400416 - RNA, 23 nt, Artificial Sequence
  Synthetic
cagcugugucagcuccuguuugu

SEQ ID NO: 400417 - RNA, 24 nt, Artificial Sequence
  Synthetic
ccagcugugucagcuccuguuugu

SEQ ID NO: 400418 - RNA, 18 nt, Artificial Sequence
  Synthetic
uuuuuuuuguuuguuugu

SEQ ID NO: 400419 - RNA, 19 nt, Artificial Sequence
  Synthetic
cuuuuuuuuguuuguuugu

SEQ ID NO: 400420 - RNA, 20 nt, Artificial Sequence
  Synthetic
ucuuuuuuuuguuuguuugu

SEQ ID NO: 400421 - RNA, 21 nt, Artificial Sequence
  Synthetic
aucuuuuuuuuguuuguuugu

SEQ ID NO: 400422 - RNA, 22 nt, Artificial Sequence
  Synthetic
aaucuuuuuuuuguuuguuugu

SEQ ID NO: 400423 - RNA, 23 nt, Artificial Sequence
  Synthetic
aaaucuuuuuuuuguuuguuugu

SEQ ID NO: 400424 - RNA, 24 nt, Artificial Sequence
  Synthetic
caaaucuuuuuuuuguuuguuugu

SEQ ID NO: 400425 - RNA, 18 nt, Artificial Sequence
  Synthetic
ccuuaaauuuuuguuugu

SEQ ID NO: 400426 - RNA, 19 nt, Artificial Sequence
  Synthetic
uccuuaaauuuuuguuugu

SEQ ID NO: 400427 - RNA, 20 nt, Artificial Sequence
  Synthetic
cuccuuaaauuuuuguuugu

SEQ ID NO: 400428 - RNA, 21 nt, Artificial Sequence
  Synthetic
gcuccuuaaauuuuuguuugu

SEQ ID NO: 400429 - RNA, 22 nt, Artificial Sequence
  Synthetic
ugcuccuuaaauuuuuguuugu

SEQ ID NO: 400430 - RNA, 23 nt, Artificial Sequence
  Synthetic
cugcuccuuaaauuuuuguuugu

SEQ ID NO: 400431 - RNA, 24 nt, Artificial Sequence
  Synthetic
ccugcuccuuaaauuuuuguuugu

SEQ ID NO: 400432 - RNA, 18 nt, Artificial Sequence
  Synthetic
cauauuuuuaaauuuugu

SEQ ID NO: 400433 - RNA, 19 nt, Artificial Sequence
  Synthetic
ucauauuuuuaaauuuugu

SEQ ID NO: 400434 - RNA, 20 nt, Artificial Sequence
  Synthetic
uucauauuuuuaaauuuugu

SEQ ID NO: 400435 - RNA, 21 nt, Artificial Sequence
  Synthetic
uuucauauuuuuaaauuuugu

SEQ ID NO: 400436 - RNA, 22 nt, Artificial Sequence
  Synthetic
auuucauauuuuuaaauuuugu

SEQ ID NO: 400437 - RNA, 23 nt, Artificial Sequence
  Synthetic
aauuucauauuuuuaaauuuugu

SEQ ID NO: 400438 - RNA, 24 nt, Artificial Sequence
  Synthetic
gaauuucauauuuuuaaauuuugu

SEQ ID NO: 400439 - RNA, 18 nt, Artificial Sequence
  Synthetic
uuuuaaaauuaauuuugu

SEQ ID NO: 400440 - RNA, 19 nt, Artificial Sequence
  Synthetic
auuuuaaaauuaauuuugu

SEQ ID NO: 400441 - RNA, 20 nt, Artificial Sequence
  Synthetic
uauuuuaaaauuaauuuugu

SEQ ID NO: 400442 - RNA, 21 nt, Artificial Sequence
  Synthetic
cuauuuuaaaauuaauuuugu

SEQ ID NO: 400443 - RNA, 22 nt, Artificial Sequence
  Synthetic
acuauuuuaaaauuaauuuugu

SEQ ID NO: 400444 - RNA, 23 nt, Artificial Sequence
  Synthetic
gacuauuuuaaaauuaauuuugu

SEQ ID NO: 400445 - RNA, 24 nt, Artificial Sequence
  Synthetic
ugacuauuuuaaaauuaauuuugu

SEQ ID NO: 400446 - RNA, 18 nt, Artificial Sequence
  Synthetic
accuaaagauuauuuugu

SEQ ID NO: 400447 - RNA, 19 nt, Artificial Sequence
  Synthetic
gaccuaaagauuauuuugu

SEQ ID NO: 400448 - RNA, 20 nt, Artificial Sequence
  Synthetic
ugaccuaaagauuauuuugu

SEQ ID NO: 400449 - RNA, 21 nt, Artificial Sequence
  Synthetic
uugaccuaaagauuauuuugu

SEQ ID NO: 400450 - RNA, 22 nt, Artificial Sequence
  Synthetic
uuugaccuaaagauuauuuugu

SEQ ID NO: 400451 - RNA, 23 nt, Artificial Sequence
  Synthetic
auuugaccuaaagauuauuuugu

SEQ ID NO: 400452 - RNA, 24 nt, Artificial Sequence
  Synthetic
gauuugaccuaaagauuauuuugu

SEQ ID NO: 400453 - RNA, 18 nt, Artificial Sequence
  Synthetic
augauaucagacuuuugu

SEQ ID NO: 400454 - RNA, 19 nt, Artificial Sequence
  Synthetic
aaugauaucagacuuuugu

SEQ ID NO: 400455 - RNA, 20 nt, Artificial Sequence
  Synthetic
caaugauaucagacuuuugu

SEQ ID NO: 400456 - RNA, 21 nt, Artificial Sequence
  Synthetic
ccaaugauaucagacuuuugu

SEQ ID NO: 400457 - RNA, 22 nt, Artificial Sequence
  Synthetic
gccaaugauaucagacuuuugu

SEQ ID NO: 400458 - RNA, 23 nt, Artificial Sequence
  Synthetic
agccaaugauaucagacuuuugu

SEQ ID NO: 400459 - RNA, 24 nt, Artificial Sequence
  Synthetic
aagccaaugauaucagacuuuugu

SEQ ID NO: 400460 - RNA, 18 nt, Artificial Sequence
  Synthetic
aaacuuugagacuuuugu

SEQ ID NO: 400461 - RNA, 19 nt, Artificial Sequence
  Synthetic
uaaacuuugagacuuuugu

SEQ ID NO: 400462 - RNA, 20 nt, Artificial Sequence
  Synthetic
guaaacuuugagacuuuugu

SEQ ID NO: 400463 - RNA, 21 nt, Artificial Sequence
  Synthetic
aguaaacuuugagacuuuugu

SEQ ID NO: 400464 - RNA, 22 nt, Artificial Sequence
  Synthetic
uaguaaacuuugagacuuuugu

SEQ ID NO: 400465 - RNA, 23 nt, Artificial Sequence
  Synthetic
cuaguaaacuuugagacuuuugu

SEQ ID NO: 400466 - RNA, 24 nt, Artificial Sequence
  Synthetic
acuaguaaacuuugagacuuuugu

SEQ ID NO: 400467 - RNA, 18 nt, Artificial Sequence
  Synthetic
ccagagaaggacuuuugu

SEQ ID NO: 400468 - RNA, 19 nt, Artificial Sequence
  Synthetic
gccagagaaggacuuuugu

SEQ ID NO: 400469 - RNA, 20 nt, Artificial Sequence
  Synthetic
agccagagaaggacuuuugu

SEQ ID NO: 400470 - RNA, 21 nt, Artificial Sequence
  Synthetic
aagccagagaaggacuuuugu

SEQ ID NO: 400471 - RNA, 22 nt, Artificial Sequence
  Synthetic
gaagccagagaaggacuuuugu

SEQ ID NO: 400472 - RNA, 23 nt, Artificial Sequence
  Synthetic
agaagccagagaaggacuuuugu

SEQ ID NO: 400473 - RNA, 24 nt, Artificial Sequence
  Synthetic
gagaagccagagaaggacuuuugu

SEQ ID NO: 400474 - RNA, 18 nt, Artificial Sequence
  Synthetic
cucaacaaauacuuuugu

SEQ ID NO: 400475 - RNA, 19 nt, Artificial Sequence
  Synthetic
acucaacaaauacuuuugu

SEQ ID NO: 400476 - RNA, 20 nt, Artificial Sequence
  Synthetic
uacucaacaaauacuuuugu

SEQ ID NO: 400477 - RNA, 21 nt, Artificial Sequence
  Synthetic
uuacucaacaaauacuuuugu

SEQ ID NO: 400478 - RNA, 22 nt, Artificial Sequence
  Synthetic
cuuacucaacaaauacuuuugu

SEQ ID NO: 400479 - RNA, 23 nt, Artificial Sequence
  Synthetic
acuuacucaacaaauacuuuugu

SEQ ID NO: 400480 - RNA, 24 nt, Artificial Sequence
  Synthetic
uacuuacucaacaaauacuuuugu

SEQ ID NO: 400481 - RNA, 18 nt, Artificial Sequence
  Synthetic
agcuuguucuacuuuugu

SEQ ID NO: 400482 - RNA, 19 nt, Artificial Sequence
  Synthetic
gagcuuguucuacuuuugu

SEQ ID NO: 400483 - RNA, 20 nt, Artificial Sequence
  Synthetic
cgagcuuguucuacuuuugu

SEQ ID NO: 400484 - RNA, 21 nt, Artificial Sequence
  Synthetic
ccgagcuuguucuacuuuugu

SEQ ID NO: 400485 - RNA, 22 nt, Artificial Sequence
  Synthetic
gccgagcuuguucuacuuuugu

SEQ ID NO: 400486 - RNA, 23 nt, Artificial Sequence
  Synthetic
agccgagcuuguucuacuuuugu

SEQ ID NO: 400487 - RNA, 24 nt, Artificial Sequence
  Synthetic
aagccgagcuuguucuacuuuugu

SEQ ID NO: 400488 - RNA, 18 nt, Artificial Sequence
  Synthetic
cuuauuuuacccuuuugu

SEQ ID NO: 400489 - RNA, 19 nt, Artificial Sequence
  Synthetic
ucuuauuuuacccuuuugu

SEQ ID NO: 400490 - RNA, 20 nt, Artificial Sequence
  Synthetic
uucuuauuuuacccuuuugu

SEQ ID NO: 400491 - RNA, 21 nt, Artificial Sequence
  Synthetic
cuucuuauuuuacccuuuugu

SEQ ID NO: 400492 - RNA, 22 nt, Artificial Sequence
  Synthetic
gcuucuuauuuuacccuuuugu

SEQ ID NO: 400493 - RNA, 23 nt, Artificial Sequence
  Synthetic
ugcuucuuauuuuacccuuuugu

SEQ ID NO: 400494 - RNA, 24 nt, Artificial Sequence
  Synthetic
uugcuucuuauuuuacccuuuugu

SEQ ID NO: 400495 - RNA, 18 nt, Artificial Sequence
  Synthetic
uucaggaaagccuuuugu

SEQ ID NO: 400496 - RNA, 19 nt, Artificial Sequence
  Synthetic
auucaggaaagccuuuugu

SEQ ID NO: 400497 - RNA, 20 nt, Artificial Sequence
  Synthetic
uauucaggaaagccuuuugu

SEQ ID NO: 400498 - RNA, 21 nt, Artificial Sequence
  Synthetic
auauucaggaaagccuuuugu

SEQ ID NO: 400499 - RNA, 22 nt, Artificial Sequence
  Synthetic
aauauucaggaaagccuuuugu

SEQ ID NO: 400500 - RNA, 23 nt, Artificial Sequence
  Synthetic
aaauauucaggaaagccuuuugu

SEQ ID NO: 400501 - RNA, 24 nt, Artificial Sequence
  Synthetic
caaauauucaggaaagccuuuugu

SEQ ID NO: 400502 - RNA, 18 nt, Artificial Sequence
  Synthetic
uacagucacgccuuuugu

SEQ ID NO: 400503 - RNA, 19 nt, Artificial Sequence
  Synthetic
auacagucacgccuuuugu

SEQ ID NO: 400504 - RNA, 20 nt, Artificial Sequence
  Synthetic
cauacagucacgccuuuugu

SEQ ID NO: 400505 - RNA, 21 nt, Artificial Sequence
  Synthetic
gcauacagucacgccuuuugu

SEQ ID NO: 400506 - RNA, 22 nt, Artificial Sequence
  Synthetic
agcauacagucacgccuuuugu

SEQ ID NO: 400507 - RNA, 23 nt, Artificial Sequence
  Synthetic
aagcauacagucacgccuuuugu

SEQ ID NO: 400508 - RNA, 24 nt, Artificial Sequence
  Synthetic
aaagcauacagucacgccuuuugu

SEQ ID NO: 400509 - RNA, 18 nt, Artificial Sequence
  Synthetic
acuaaauacuucuuuugu

SEQ ID NO: 400510 - RNA, 19 nt, Artificial Sequence
  Synthetic
gacuaaauacuucuuuugu

SEQ ID NO: 400511 - RNA, 20 nt, Artificial Sequence
  Synthetic
agacuaaauacuucuuuugu

SEQ ID NO: 400512 - RNA, 21 nt, Artificial Sequence
  Synthetic
aagacuaaauacuucuuuugu

SEQ ID NO: 400513 - RNA, 22 nt, Artificial Sequence
  Synthetic
uaagacuaaauacuucuuuugu

SEQ ID NO: 400514 - RNA, 23 nt, Artificial Sequence
  Synthetic
cuaagacuaaauacuucuuuugu

SEQ ID NO: 400515 - RNA, 24 nt, Artificial Sequence
  Synthetic
acuaagacuaaauacuucuuuugu

SEQ ID NO: 400516 - RNA, 18 nt, Artificial Sequence
  Synthetic
ugacaaucccaguuuugu

SEQ ID NO: 400517 - RNA, 19 nt, Artificial Sequence
  Synthetic
gugacaaucccaguuuugu

SEQ ID NO: 400518 - RNA, 20 nt, Artificial Sequence
  Synthetic
ggugacaaucccaguuuugu

SEQ ID NO: 400519 - RNA, 21 nt, Artificial Sequence
  Synthetic
gggugacaaucccaguuuugu

SEQ ID NO: 400520 - RNA, 22 nt, Artificial Sequence
  Synthetic
agggugacaaucccaguuuugu

SEQ ID NO: 400521 - RNA, 23 nt, Artificial Sequence
  Synthetic
aagggugacaaucccaguuuugu

SEQ ID NO: 400522 - RNA, 24 nt, Artificial Sequence
  Synthetic
aaagggugacaaucccaguuuugu

SEQ ID NO: 400523 - RNA, 18 nt, Artificial Sequence
  Synthetic
cacugucauauguuuugu

SEQ ID NO: 400524 - RNA, 19 nt, Artificial Sequence
  Synthetic
acacugucauauguuuugu

SEQ ID NO: 400525 - RNA, 20 nt, Artificial Sequence
  Synthetic
aacacugucauauguuuugu

SEQ ID NO: 400526 - RNA, 21 nt, Artificial Sequence
  Synthetic
caacacugucauauguuuugu

SEQ ID NO: 400527 - RNA, 22 nt, Artificial Sequence
  Synthetic
ucaacacugucauauguuuugu

SEQ ID NO: 400528 - RNA, 23 nt, Artificial Sequence
  Synthetic
aucaacacugucauauguuuugu

SEQ ID NO: 400529 - RNA, 24 nt, Artificial Sequence
  Synthetic
aaucaacacugucauauguuuugu

SEQ ID NO: 400530 - RNA, 18 nt, Artificial Sequence
  Synthetic
uauaaaugauuguuuugu

SEQ ID NO: 400531 - RNA, 19 nt, Artificial Sequence
  Synthetic
uuauaaaugauuguuuugu

SEQ ID NO: 400532 - RNA, 20 nt, Artificial Sequence
  Synthetic
auuauaaaugauuguuuugu

SEQ ID NO: 400533 - RNA, 21 nt, Artificial Sequence
  Synthetic
aauuauaaaugauuguuuugu

SEQ ID NO: 400534 - RNA, 22 nt, Artificial Sequence
  Synthetic
caauuauaaaugauuguuuugu

SEQ ID NO: 400535 - RNA, 23 nt, Artificial Sequence
  Synthetic
gcaauuauaaaugauuguuuugu

SEQ ID NO: 400536 - RNA, 24 nt, Artificial Sequence
  Synthetic
agcaauuauaaaugauuguuuugu

SEQ ID NO: 400537 - RNA, 18 nt, Artificial Sequence
  Synthetic
agaaaaugagauuuuugu

SEQ ID NO: 400538 - RNA, 19 nt, Artificial Sequence
  Synthetic
gagaaaaugagauuuuugu

SEQ ID NO: 400539 - RNA, 20 nt, Artificial Sequence
  Synthetic
agagaaaaugagauuuuugu

SEQ ID NO: 400540 - RNA, 21 nt, Artificial Sequence
  Synthetic
aagagaaaaugagauuuuugu

SEQ ID NO: 400541 - RNA, 22 nt, Artificial Sequence
  Synthetic
aaagagaaaaugagauuuuugu

SEQ ID NO: 400542 - RNA, 23 nt, Artificial Sequence
  Synthetic
uaaagagaaaaugagauuuuugu

SEQ ID NO: 400543 - RNA, 24 nt, Artificial Sequence
  Synthetic
uuaaagagaaaaugagauuuuugu

SEQ ID NO: 400544 - RNA, 18 nt, Artificial Sequence
  Synthetic
acaaaacuuuauuuuugu

SEQ ID NO: 400545 - RNA, 19 nt, Artificial Sequence
  Synthetic
aacaaaacuuuauuuuugu

SEQ ID NO: 400546 - RNA, 20 nt, Artificial Sequence
  Synthetic
uaacaaaacuuuauuuuugu

SEQ ID NO: 400547 - RNA, 21 nt, Artificial Sequence
  Synthetic
uuaacaaaacuuuauuuuugu

SEQ ID NO: 400548 - RNA, 22 nt, Artificial Sequence
  Synthetic
uuuaacaaaacuuuauuuuugu

SEQ ID NO: 400549 - RNA, 23 nt, Artificial Sequence
  Synthetic
auuuaacaaaacuuuauuuuugu

SEQ ID NO: 400550 - RNA, 24 nt, Artificial Sequence
  Synthetic
gauuuaacaaaacuuuauuuuugu

SEQ ID NO: 400551 - RNA, 18 nt, Artificial Sequence
  Synthetic
cuuuuuauuacuuuuugu

SEQ ID NO: 400552 - RNA, 19 nt, Artificial Sequence
  Synthetic
ucuuuuuauuacuuuuugu

SEQ ID NO: 400553 - RNA, 20 nt, Artificial Sequence
  Synthetic
gucuuuuuauuacuuuuugu

SEQ ID NO: 400554 - RNA, 21 nt, Artificial Sequence
  Synthetic
ggucuuuuuauuacuuuuugu

SEQ ID NO: 400555 - RNA, 22 nt, Artificial Sequence
  Synthetic
uggucuuuuuauuacuuuuugu

SEQ ID NO: 400556 - RNA, 23 nt, Artificial Sequence
  Synthetic
uuggucuuuuuauuacuuuuugu

SEQ ID NO: 400557 - RNA, 24 nt, Artificial Sequence
  Synthetic
guuggucuuuuuauuacuuuuugu

SEQ ID NO: 400558 - RNA, 18 nt, Artificial Sequence
  Synthetic
cuccucccuucuuuuugu

SEQ ID NO: 400559 - RNA, 19 nt, Artificial Sequence
  Synthetic
ucuccucccuucuuuuugu

SEQ ID NO: 400560 - RNA, 20 nt, Artificial Sequence
  Synthetic
cucuccucccuucuuuuugu

SEQ ID NO: 400561 - RNA, 21 nt, Artificial Sequence
  Synthetic
ccucuccucccuucuuuuugu

SEQ ID NO: 400562 - RNA, 22 nt, Artificial Sequence
  Synthetic
accucuccucccuucuuuuugu

SEQ ID NO: 400563 - RNA, 23 nt, Artificial Sequence
  Synthetic
gaccucuccucccuucuuuuugu

SEQ ID NO: 400564 - RNA, 24 nt, Artificial Sequence
  Synthetic
agaccucuccucccuucuuuuugu

SEQ ID NO: 400565 - RNA, 18 nt, Artificial Sequence
  Synthetic
gccuucugagguuuuugu

SEQ ID NO: 400566 - RNA, 19 nt, Artificial Sequence
  Synthetic
ugccuucugagguuuuugu

SEQ ID NO: 400567 - RNA, 20 nt, Artificial Sequence
  Synthetic
uugccuucugagguuuuugu

SEQ ID NO: 400568 - RNA, 21 nt, Artificial Sequence
  Synthetic
cuugccuucugagguuuuugu

SEQ ID NO: 400569 - RNA, 22 nt, Artificial Sequence
  Synthetic
acuugccuucugagguuuuugu

SEQ ID NO: 400570 - RNA, 23 nt, Artificial Sequence
  Synthetic
uacuugccuucugagguuuuugu

SEQ ID NO: 400571 - RNA, 24 nt, Artificial Sequence
  Synthetic
uuacuugccuucugagguuuuugu

SEQ ID NO: 400572 - RNA, 18 nt, Artificial Sequence
  Synthetic
uggagaaaggguuuuugu

SEQ ID NO: 400573 - RNA, 19 nt, Artificial Sequence
  Synthetic
cuggagaaaggguuuuugu

SEQ ID NO: 400574 - RNA, 20 nt, Artificial Sequence
  Synthetic
ccuggagaaaggguuuuugu

SEQ ID NO: 400575 - RNA, 21 nt, Artificial Sequence
  Synthetic
gccuggagaaaggguuuuugu

SEQ ID NO: 400576 - RNA, 22 nt, Artificial Sequence
  Synthetic
ugccuggagaaaggguuuuugu

SEQ ID NO: 400577 - RNA, 23 nt, Artificial Sequence
  Synthetic
augccuggagaaaggguuuuugu

SEQ ID NO: 400578 - RNA, 24 nt, Artificial Sequence
  Synthetic
uaugccuggagaaaggguuuuugu

SEQ ID NO: 400579 - RNA, 18 nt, Artificial Sequence
  Synthetic
cuuuauuucauuuuuugu

SEQ ID NO: 400580 - RNA, 19 nt, Artificial Sequence
  Synthetic
acuuuauuucauuuuuugu

SEQ ID NO: 400581 - RNA, 20 nt, Artificial Sequence
  Synthetic
aacuuuauuucauuuuuugu

SEQ ID NO: 400582 - RNA, 21 nt, Artificial Sequence
  Synthetic
aaacuuuauuucauuuuuugu

SEQ ID NO: 400583 - RNA, 22 nt, Artificial Sequence
  Synthetic
aaaacuuuauuucauuuuuugu

SEQ ID NO: 400584 - RNA, 23 nt, Artificial Sequence
  Synthetic
uaaaacuuuauuucauuuuuugu

SEQ ID NO: 400585 - RNA, 24 nt, Artificial Sequence
  Synthetic
guaaaacuuuauuucauuuuuugu

SEQ ID NO: 400586 - RNA, 18 nt, Artificial Sequence
  Synthetic
cucagaaaaaaaaaaauu

SEQ ID NO: 400587 - RNA, 19 nt, Artificial Sequence
  Synthetic
ucucagaaaaaaaaaaauu

SEQ ID NO: 400588 - RNA, 20 nt, Artificial Sequence
  Synthetic
aucucagaaaaaaaaaaauu

SEQ ID NO: 400589 - RNA, 21 nt, Artificial Sequence
  Synthetic
caucucagaaaaaaaaaaauu

SEQ ID NO: 400590 - RNA, 22 nt, Artificial Sequence
  Synthetic
ccaucucagaaaaaaaaaaauu

SEQ ID NO: 400591 - RNA, 23 nt, Artificial Sequence
  Synthetic
uccaucucagaaaaaaaaaaauu

SEQ ID NO: 400592 - RNA, 24 nt, Artificial Sequence
  Synthetic
cuccaucucagaaaaaaaaaaauu

SEQ ID NO: 400593 - RNA, 18 nt, Artificial Sequence
  Synthetic
uaaguaaaaaaaaaaauu

SEQ ID NO: 400594 - RNA, 19 nt, Artificial Sequence
  Synthetic
cuaaguaaaaaaaaaaauu

SEQ ID NO: 400595 - RNA, 20 nt, Artificial Sequence
  Synthetic
acuaaguaaaaaaaaaaauu

SEQ ID NO: 400596 - RNA, 21 nt, Artificial Sequence
  Synthetic
aacuaaguaaaaaaaaaaauu

SEQ ID NO: 400597 - RNA, 22 nt, Artificial Sequence
  Synthetic
aaacuaaguaaaaaaaaaaauu

SEQ ID NO: 400598 - RNA, 23 nt, Artificial Sequence
  Synthetic
gaaacuaaguaaaaaaaaaaauu

SEQ ID NO: 400599 - RNA, 24 nt, Artificial Sequence
  Synthetic
ggaaacuaaguaaaaaaaaaaauu

SEQ ID NO: 400600 - RNA, 18 nt, Artificial Sequence
  Synthetic
aaacacuaaaaaaaaauu

SEQ ID NO: 400601 - RNA, 19 nt, Artificial Sequence
  Synthetic
uaaacacuaaaaaaaaauu

SEQ ID NO: 400602 - RNA, 20 nt, Artificial Sequence
  Synthetic
uuaaacacuaaaaaaaaauu

SEQ ID NO: 400603 - RNA, 21 nt, Artificial Sequence
  Synthetic
auuaaacacuaaaaaaaaauu

SEQ ID NO: 400604 - RNA, 22 nt, Artificial Sequence
  Synthetic
uauuaaacacuaaaaaaaaauu

SEQ ID NO: 400605 - RNA, 23 nt, Artificial Sequence
  Synthetic
guauuaaacacuaaaaaaaaauu

SEQ ID NO: 400606 - RNA, 24 nt, Artificial Sequence
  Synthetic
aguauuaaacacuaaaaaaaaauu

SEQ ID NO: 400607 - RNA, 18 nt, Artificial Sequence
  Synthetic
uuggacagacaaaaaauu

SEQ ID NO: 400608 - RNA, 19 nt, Artificial Sequence
  Synthetic
auuggacagacaaaaaauu

SEQ ID NO: 400609 - RNA, 20 nt, Artificial Sequence
  Synthetic
uauuggacagacaaaaaauu

SEQ ID NO: 400610 - RNA, 21 nt, Artificial Sequence
  Synthetic
auauuggacagacaaaaaauu

SEQ ID NO: 400611 - RNA, 22 nt, Artificial Sequence
  Synthetic
gauauuggacagacaaaaaauu

SEQ ID NO: 400612 - RNA, 23 nt, Artificial Sequence
  Synthetic
ggauauuggacagacaaaaaauu

SEQ ID NO: 400613 - RNA, 24 nt, Artificial Sequence
  Synthetic
gggauauuggacagacaaaaaauu

SEQ ID NO: 400614 - RNA, 18 nt, Artificial Sequence
  Synthetic
gaguucuuagaaaaaauu

SEQ ID NO: 400615 - RNA, 19 nt, Artificial Sequence
  Synthetic
ggaguucuuagaaaaaauu

SEQ ID NO: 400616 - RNA, 20 nt, Artificial Sequence
  Synthetic
uggaguucuuagaaaaaauu

SEQ ID NO: 400617 - RNA, 21 nt, Artificial Sequence
  Synthetic
uuggaguucuuagaaaaaauu

SEQ ID NO: 400618 - RNA, 22 nt, Artificial Sequence
  Synthetic
uuuggaguucuuagaaaaaauu

SEQ ID NO: 400619 - RNA, 23 nt, Artificial Sequence
  Synthetic
uuuuggaguucuuagaaaaaauu

SEQ ID NO: 400620 - RNA, 24 nt, Artificial Sequence
  Synthetic
auuuuggaguucuuagaaaaaauu

SEQ ID NO: 400621 - RNA, 18 nt, Artificial Sequence
  Synthetic
aauuugcaggaaaaaauu

SEQ ID NO: 400622 - RNA, 19 nt, Artificial Sequence
  Synthetic
aaauuugcaggaaaaaauu

SEQ ID NO: 400623 - RNA, 20 nt, Artificial Sequence
  Synthetic
gaaauuugcaggaaaaaauu

SEQ ID NO: 400624 - RNA, 21 nt, Artificial Sequence
  Synthetic
ugaaauuugcaggaaaaaauu

SEQ ID NO: 400625 - RNA, 22 nt, Artificial Sequence
  Synthetic
cugaaauuugcaggaaaaaauu

SEQ ID NO: 400626 - RNA, 23 nt, Artificial Sequence
  Synthetic
ucugaaauuugcaggaaaaaauu

SEQ ID NO: 400627 - RNA, 24 nt, Artificial Sequence
  Synthetic
aucugaaauuugcaggaaaaaauu

SEQ ID NO: 400628 - RNA, 18 nt, Artificial Sequence
  Synthetic
auuaauacugaaaaaauu

SEQ ID NO: 400629 - RNA, 19 nt, Artificial Sequence
  Synthetic
aauuaauacugaaaaaauu

SEQ ID NO: 400630 - RNA, 20 nt, Artificial Sequence
  Synthetic
aaauuaauacugaaaaaauu

SEQ ID NO: 400631 - RNA, 21 nt, Artificial Sequence
  Synthetic
gaaauuaauacugaaaaaauu

SEQ ID NO: 400632 - RNA, 22 nt, Artificial Sequence
  Synthetic
agaaauuaauacugaaaaaauu

SEQ ID NO: 400633 - RNA, 23 nt, Artificial Sequence
  Synthetic
aagaaauuaauacugaaaaaauu

SEQ ID NO: 400634 - RNA, 24 nt, Artificial Sequence
  Synthetic
caagaaauuaauacugaaaaaauu

SEQ ID NO: 400635 - RNA, 18 nt, Artificial Sequence
  Synthetic
uaaaaaagauaaaaaauu

SEQ ID NO: 400636 - RNA, 19 nt, Artificial Sequence
  Synthetic
auaaaaaagauaaaaaauu

SEQ ID NO: 400637 - RNA, 20 nt, Artificial Sequence
  Synthetic
aauaaaaaagauaaaaaauu

SEQ ID NO: 400638 - RNA, 21 nt, Artificial Sequence
  Synthetic
aaauaaaaaagauaaaaaauu

SEQ ID NO: 400639 - RNA, 22 nt, Artificial Sequence
  Synthetic
aaaauaaaaaagauaaaaaauu

SEQ ID NO: 400640 - RNA, 23 nt, Artificial Sequence
  Synthetic
uaaaauaaaaaagauaaaaaauu

SEQ ID NO: 400641 - RNA, 24 nt, Artificial Sequence
  Synthetic
auaaaauaaaaaagauaaaaaauu

SEQ ID NO: 400642 - RNA, 18 nt, Artificial Sequence
  Synthetic
aagaccccuuaaaaaauu

SEQ ID NO: 400643 - RNA, 19 nt, Artificial Sequence
  Synthetic
uaagaccccuuaaaaaauu

SEQ ID NO: 400644 - RNA, 20 nt, Artificial Sequence
  Synthetic
cuaagaccccuuaaaaaauu

SEQ ID NO: 400645 - RNA, 21 nt, Artificial Sequence
  Synthetic
ccuaagaccccuuaaaaaauu

SEQ ID NO: 400646 - RNA, 22 nt, Artificial Sequence
  Synthetic
uccuaagaccccuuaaaaaauu

SEQ ID NO: 400647 - RNA, 23 nt, Artificial Sequence
  Synthetic
cuccuaagaccccuuaaaaaauu

SEQ ID NO: 400648 - RNA, 24 nt, Artificial Sequence
  Synthetic
acuccuaagaccccuuaaaaaauu

SEQ ID NO: 400649 - RNA, 18 nt, Artificial Sequence
  Synthetic
aacucuuagacaaaaauu

SEQ ID NO: 400650 - RNA, 19 nt, Artificial Sequence
  Synthetic
uaacucuuagacaaaaauu

SEQ ID NO: 400651 - RNA, 20 nt, Artificial Sequence
  Synthetic
auaacucuuagacaaaaauu

SEQ ID NO: 400652 - RNA, 21 nt, Artificial Sequence
  Synthetic
uauaacucuuagacaaaaauu

SEQ ID NO: 400653 - RNA, 22 nt, Artificial Sequence
  Synthetic
uuauaacucuuagacaaaaauu

SEQ ID NO: 400654 - RNA, 23 nt, Artificial Sequence
  Synthetic
cuuauaacucuuagacaaaaauu

SEQ ID NO: 400655 - RNA, 24 nt, Artificial Sequence
  Synthetic
ucuuauaacucuuagacaaaaauu

SEQ ID NO: 400656 - RNA, 18 nt, Artificial Sequence
  Synthetic
uggaaaagcccaaaaauu

SEQ ID NO: 400657 - RNA, 19 nt, Artificial Sequence
  Synthetic
guggaaaagcccaaaaauu

SEQ ID NO: 400658 - RNA, 20 nt, Artificial Sequence
  Synthetic
aguggaaaagcccaaaaauu

SEQ ID NO: 400659 - RNA, 21 nt, Artificial Sequence
  Synthetic
uaguggaaaagcccaaaaauu

SEQ ID NO: 400660 - RNA, 22 nt, Artificial Sequence
  Synthetic
uuaguggaaaagcccaaaaauu

SEQ ID NO: 400661 - RNA, 23 nt, Artificial Sequence
  Synthetic
uuuaguggaaaagcccaaaaauu

SEQ ID NO: 400662 - RNA, 24 nt, Artificial Sequence
  Synthetic
cuuuaguggaaaagcccaaaaauu

SEQ ID NO: 400663 - RNA, 18 nt, Artificial Sequence
  Synthetic
gaagguaagagaaaaauu

SEQ ID NO: 400664 - RNA, 19 nt, Artificial Sequence
  Synthetic
ggaagguaagagaaaaauu

SEQ ID NO: 400665 - RNA, 20 nt, Artificial Sequence
  Synthetic
aggaagguaagagaaaaauu

SEQ ID NO: 400666 - RNA, 21 nt, Artificial Sequence
  Synthetic
aaggaagguaagagaaaaauu

SEQ ID NO: 400667 - RNA, 22 nt, Artificial Sequence
  Synthetic
uaaggaagguaagagaaaaauu

SEQ ID NO: 400668 - RNA, 23 nt, Artificial Sequence
  Synthetic
auaaggaagguaagagaaaaauu

SEQ ID NO: 400669 - RNA, 24 nt, Artificial Sequence
  Synthetic
aauaaggaagguaagagaaaaauu

SEQ ID NO: 400670 - RNA, 18 nt, Artificial Sequence
  Synthetic
aagaaaaggagaaaaauu

SEQ ID NO: 400671 - RNA, 19 nt, Artificial Sequence
  Synthetic
aaagaaaaggagaaaaauu

SEQ ID NO: 400672 - RNA, 20 nt, Artificial Sequence
  Synthetic
aaaagaaaaggagaaaaauu

SEQ ID NO: 400673 - RNA, 21 nt, Artificial Sequence
  Synthetic
gaaaagaaaaggagaaaaauu

SEQ ID NO: 400674 - RNA, 22 nt, Artificial Sequence
  Synthetic
agaaaagaaaaggagaaaaauu

SEQ ID NO: 400675 - RNA, 23 nt, Artificial Sequence
  Synthetic
aagaaaagaaaaggagaaaaauu

SEQ ID NO: 400676 - RNA, 24 nt, Artificial Sequence
  Synthetic
aaagaaaagaaaaggagaaaaauu

SEQ ID NO: 400677 - RNA, 18 nt, Artificial Sequence
  Synthetic
ggaagguauagaaaaauu

SEQ ID NO: 400678 - RNA, 19 nt, Artificial Sequence
  Synthetic
aggaagguauagaaaaauu

SEQ ID NO: 400679 - RNA, 20 nt, Artificial Sequence
  Synthetic
gaggaagguauagaaaaauu

SEQ ID NO: 400680 - RNA, 21 nt, Artificial Sequence
  Synthetic
ggaggaagguauagaaaaauu

SEQ ID NO: 400681 - RNA, 22 nt, Artificial Sequence
  Synthetic
uggaggaagguauagaaaaauu

SEQ ID NO: 400682 - RNA, 23 nt, Artificial Sequence
  Synthetic
auggaggaagguauagaaaaauu

SEQ ID NO: 400683 - RNA, 24 nt, Artificial Sequence
  Synthetic
cauggaggaagguauagaaaaauu

SEQ ID NO: 400684 - RNA, 18 nt, Artificial Sequence
  Synthetic
gaugucagaggaaaaauu

SEQ ID NO: 400685 - RNA, 19 nt, Artificial Sequence
  Synthetic
cgaugucagaggaaaaauu

SEQ ID NO: 400686 - RNA, 20 nt, Artificial Sequence
  Synthetic
gcgaugucagaggaaaaauu

SEQ ID NO: 400687 - RNA, 21 nt, Artificial Sequence
  Synthetic
agcgaugucagaggaaaaauu

SEQ ID NO: 400688 - RNA, 22 nt, Artificial Sequence
  Synthetic
gagcgaugucagaggaaaaauu

SEQ ID NO: 400689 - RNA, 23 nt, Artificial Sequence
  Synthetic
agagcgaugucagaggaaaaauu

SEQ ID NO: 400690 - RNA, 24 nt, Artificial Sequence
  Synthetic
cagagcgaugucagaggaaaaauu

SEQ ID NO: 400691 - RNA, 18 nt, Artificial Sequence
  Synthetic
aaucaccaaauaaaaauu

SEQ ID NO: 400692 - RNA, 19 nt, Artificial Sequence
  Synthetic
aaaucaccaaauaaaaauu

SEQ ID NO: 400693 - RNA, 20 nt, Artificial Sequence
  Synthetic
aaaaucaccaaauaaaaauu

SEQ ID NO: 400694 - RNA, 21 nt, Artificial Sequence
  Synthetic
aaaaaucaccaaauaaaaauu

SEQ ID NO: 400695 - RNA, 22 nt, Artificial Sequence
  Synthetic
aaaaaaucaccaaauaaaaauu

SEQ ID NO: 400696 - RNA, 23 nt, Artificial Sequence
  Synthetic
caaaaaaucaccaaauaaaaauu

SEQ ID NO: 400697 - RNA, 24 nt, Artificial Sequence
  Synthetic
ucaaaaaaucaccaaauaaaaauu

SEQ ID NO: 400698 - RNA, 18 nt, Artificial Sequence
  Synthetic
gucaguaguauaaaaauu

SEQ ID NO: 400699 - RNA, 19 nt, Artificial Sequence
  Synthetic
ugucaguaguauaaaaauu

SEQ ID NO: 400700 - RNA, 20 nt, Artificial Sequence
  Synthetic
augucaguaguauaaaaauu

SEQ ID NO: 400701 - RNA, 21 nt, Artificial Sequence
  Synthetic
aaugucaguaguauaaaaauu

SEQ ID NO: 400702 - RNA, 22 nt, Artificial Sequence
  Synthetic
aaaugucaguaguauaaaaauu

SEQ ID NO: 400703 - RNA, 23 nt, Artificial Sequence
  Synthetic
aaaaugucaguaguauaaaaauu

SEQ ID NO: 400704 - RNA, 24 nt, Artificial Sequence
  Synthetic
caaaaugucaguaguauaaaaauu

SEQ ID NO: 400705 - RNA, 18 nt, Artificial Sequence
  Synthetic
ugacaacuuuuaaaaauu

SEQ ID NO: 400706 - RNA, 19 nt, Artificial Sequence
  Synthetic
uugacaacuuuuaaaaauu

SEQ ID NO: 400707 - RNA, 20 nt, Artificial Sequence
  Synthetic
auugacaacuuuuaaaaauu

SEQ ID NO: 400708 - RNA, 21 nt, Artificial Sequence
  Synthetic
aauugacaacuuuuaaaaauu

SEQ ID NO: 400709 - RNA, 22 nt, Artificial Sequence
  Synthetic
uaauugacaacuuuuaaaaauu

SEQ ID NO: 400710 - RNA, 23 nt, Artificial Sequence
  Synthetic
auaauugacaacuuuuaaaaauu

SEQ ID NO: 400711 - RNA, 24 nt, Artificial Sequence
  Synthetic
aauaauugacaacuuuuaaaaauu

SEQ ID NO: 400712 - RNA, 18 nt, Artificial Sequence
  Synthetic
ucuuuaggaugcaaaauu

SEQ ID NO: 400713 - RNA, 19 nt, Artificial Sequence
  Synthetic
aucuuuaggaugcaaaauu

SEQ ID NO: 400714 - RNA, 20 nt, Artificial Sequence
  Synthetic
uaucuuuaggaugcaaaauu

SEQ ID NO: 400715 - RNA, 21 nt, Artificial Sequence
  Synthetic
guaucuuuaggaugcaaaauu

SEQ ID NO: 400716 - RNA, 22 nt, Artificial Sequence
  Synthetic
aguaucuuuaggaugcaaaauu

SEQ ID NO: 400717 - RNA, 23 nt, Artificial Sequence
  Synthetic
uaguaucuuuaggaugcaaaauu

SEQ ID NO: 400718 - RNA, 24 nt, Artificial Sequence
  Synthetic
auaguaucuuuaggaugcaaaauu

SEQ ID NO: 400719 - RNA, 18 nt, Artificial Sequence
  Synthetic
cauaaaacuaucaaaauu

SEQ ID NO: 400720 - RNA, 19 nt, Artificial Sequence
  Synthetic
acauaaaacuaucaaaauu

SEQ ID NO: 400721 - RNA, 20 nt, Artificial Sequence
  Synthetic
aacauaaaacuaucaaaauu

SEQ ID NO: 400722 - RNA, 21 nt, Artificial Sequence
  Synthetic
aaacauaaaacuaucaaaauu

SEQ ID NO: 400723 - RNA, 22 nt, Artificial Sequence
  Synthetic
aaaacauaaaacuaucaaaauu

SEQ ID NO: 400724 - RNA, 23 nt, Artificial Sequence
  Synthetic
uaaaacauaaaacuaucaaaauu

SEQ ID NO: 400725 - RNA, 24 nt, Artificial Sequence
  Synthetic
guaaaacauaaaacuaucaaaauu

SEQ ID NO: 400726 - RNA, 18 nt, Artificial Sequence
  Synthetic
guuugauugcucaaaauu

SEQ ID NO: 400727 - RNA, 19 nt, Artificial Sequence
  Synthetic
aguuugauugcucaaaauu

SEQ ID NO: 400728 - RNA, 20 nt, Artificial Sequence
  Synthetic
gaguuugauugcucaaaauu

SEQ ID NO: 400729 - RNA, 21 nt, Artificial Sequence
  Synthetic
ggaguuugauugcucaaaauu

SEQ ID NO: 400730 - RNA, 22 nt, Artificial Sequence
  Synthetic
aggaguuugauugcucaaaauu

SEQ ID NO: 400731 - RNA, 23 nt, Artificial Sequence
  Synthetic
aaggaguuugauugcucaaaauu

SEQ ID NO: 400732 - RNA, 24 nt, Artificial Sequence
  Synthetic
caaggaguuugauugcucaaaauu

SEQ ID NO: 400733 - RNA, 18 nt, Artificial Sequence
  Synthetic
ucccaaagucucaaaauu

SEQ ID NO: 400734 - RNA, 19 nt, Artificial Sequence
  Synthetic
cucccaaagucucaaaauu

SEQ ID NO: 400735 - RNA, 20 nt, Artificial Sequence
  Synthetic
ccucccaaagucucaaaauu

SEQ ID NO: 400736 - RNA, 21 nt, Artificial Sequence
  Synthetic
uccucccaaagucucaaaauu

SEQ ID NO: 400737 - RNA, 22 nt, Artificial Sequence
  Synthetic
cuccucccaaagucucaaaauu

SEQ ID NO: 400738 - RNA, 23 nt, Artificial Sequence
  Synthetic
ucuccucccaaagucucaaaauu

SEQ ID NO: 400739 - RNA, 24 nt, Artificial Sequence
  Synthetic
cucuccucccaaagucucaaaauu

SEQ ID NO: 400740 - RNA, 18 nt, Artificial Sequence
  Synthetic
uaggggcaugucaaaauu

SEQ ID NO: 400741 - RNA, 19 nt, Artificial Sequence
  Synthetic
auaggggcaugucaaaauu

SEQ ID NO: 400742 - RNA, 20 nt, Artificial Sequence
  Synthetic
cauaggggcaugucaaaauu

SEQ ID NO: 400743 - RNA, 21 nt, Artificial Sequence
  Synthetic
ucauaggggcaugucaaaauu

SEQ ID NO: 400744 - RNA, 22 nt, Artificial Sequence
  Synthetic
uucauaggggcaugucaaaauu

SEQ ID NO: 400745 - RNA, 23 nt, Artificial Sequence
  Synthetic
auucauaggggcaugucaaaauu

SEQ ID NO: 400746 - RNA, 24 nt, Artificial Sequence
  Synthetic
aauucauaggggcaugucaaaauu

SEQ ID NO: 400747 - RNA, 18 nt, Artificial Sequence
  Synthetic
gaacccggucagaaaauu

SEQ ID NO: 400748 - RNA, 19 nt, Artificial Sequence
  Synthetic
ugaacccggucagaaaauu

SEQ ID NO: 400749 - RNA, 20 nt, Artificial Sequence
  Synthetic
gugaacccggucagaaaauu

SEQ ID NO: 400750 - RNA, 21 nt, Artificial Sequence
  Synthetic
agugaacccggucagaaaauu

SEQ ID NO: 400751 - RNA, 22 nt, Artificial Sequence
  Synthetic
aagugaacccggucagaaaauu

SEQ ID NO: 400752 - RNA, 23 nt, Artificial Sequence
  Synthetic
gaagugaacccggucagaaaauu

SEQ ID NO: 400753 - RNA, 24 nt, Artificial Sequence
  Synthetic
ugaagugaacccggucagaaaauu

SEQ ID NO: 400754 - RNA, 18 nt, Artificial Sequence
  Synthetic
ccuuguaauuagaaaauu

SEQ ID NO: 400755 - RNA, 19 nt, Artificial Sequence
  Synthetic
accuuguaauuagaaaauu

SEQ ID NO: 400756 - RNA, 20 nt, Artificial Sequence
  Synthetic
gaccuuguaauuagaaaauu

SEQ ID NO: 400757 - RNA, 21 nt, Artificial Sequence
  Synthetic
ugaccuuguaauuagaaaauu

SEQ ID NO: 400758 - RNA, 22 nt, Artificial Sequence
  Synthetic
augaccuuguaauuagaaaauu

SEQ ID NO: 400759 - RNA, 23 nt, Artificial Sequence
  Synthetic
caugaccuuguaauuagaaaauu

SEQ ID NO: 400760 - RNA, 24 nt, Artificial Sequence
  Synthetic
acaugaccuuguaauuagaaaauu

SEQ ID NO: 400761 - RNA, 18 nt, Artificial Sequence
  Synthetic
ucuguugauuagaaaauu

SEQ ID NO: 400762 - RNA, 19 nt, Artificial Sequence
  Synthetic
gucuguugauuagaaaauu

SEQ ID NO: 400763 - RNA, 20 nt, Artificial Sequence
  Synthetic
agucuguugauuagaaaauu

SEQ ID NO: 400764 - RNA, 21 nt, Artificial Sequence
  Synthetic
cagucuguugauuagaaaauu

SEQ ID NO: 400765 - RNA, 22 nt, Artificial Sequence
  Synthetic
acagucuguugauuagaaaauu

SEQ ID NO: 400766 - RNA, 23 nt, Artificial Sequence
  Synthetic
gacagucuguugauuagaaaauu

SEQ ID NO: 400767 - RNA, 24 nt, Artificial Sequence
  Synthetic
ugacagucuguugauuagaaaauu

SEQ ID NO: 400768 - RNA, 18 nt, Artificial Sequence
  Synthetic
uauaaguuuuagaaaauu

SEQ ID NO: 400769 - RNA, 19 nt, Artificial Sequence
  Synthetic
guauaaguuuuagaaaauu

SEQ ID NO: 400770 - RNA, 20 nt, Artificial Sequence
  Synthetic
aguauaaguuuuagaaaauu

SEQ ID NO: 400771 - RNA, 21 nt, Artificial Sequence
  Synthetic
aaguauaaguuuuagaaaauu

SEQ ID NO: 400772 - RNA, 22 nt, Artificial Sequence
  Synthetic
gaaguauaaguuuuagaaaauu

SEQ ID NO: 400773 - RNA, 23 nt, Artificial Sequence
  Synthetic
ggaaguauaaguuuuagaaaauu

SEQ ID NO: 400774 - RNA, 24 nt, Artificial Sequence
  Synthetic
aggaaguauaaguuuuagaaaauu

SEQ ID NO: 400775 - RNA, 18 nt, Artificial Sequence
  Synthetic
aaagagucaaggaaaauu

SEQ ID NO: 400776 - RNA, 19 nt, Artificial Sequence
  Synthetic
caaagagucaaggaaaauu

SEQ ID NO: 400777 - RNA, 20 nt, Artificial Sequence
  Synthetic
gcaaagagucaaggaaaauu

SEQ ID NO: 400778 - RNA, 21 nt, Artificial Sequence
  Synthetic
agcaaagagucaaggaaaauu

SEQ ID NO: 400779 - RNA, 22 nt, Artificial Sequence
  Synthetic
aagcaaagagucaaggaaaauu

SEQ ID NO: 400780 - RNA, 23 nt, Artificial Sequence
  Synthetic
gaagcaaagagucaaggaaaauu

SEQ ID NO: 400781 - RNA, 24 nt, Artificial Sequence
  Synthetic
ggaagcaaagagucaaggaaaauu

SEQ ID NO: 400782 - RNA, 18 nt, Artificial Sequence
  Synthetic
uuucauauguggaaaauu

SEQ ID NO: 400783 - RNA, 19 nt, Artificial Sequence
  Synthetic
auuucauauguggaaaauu

SEQ ID NO: 400784 - RNA, 20 nt, Artificial Sequence
  Synthetic
uauuucauauguggaaaauu

SEQ ID NO: 400785 - RNA, 21 nt, Artificial Sequence
  Synthetic
guauuucauauguggaaaauu

SEQ ID NO: 400786 - RNA, 22 nt, Artificial Sequence
  Synthetic
aguauuucauauguggaaaauu

SEQ ID NO: 400787 - RNA, 23 nt, Artificial Sequence
  Synthetic
gaguauuucauauguggaaaauu

SEQ ID NO: 400788 - RNA, 24 nt, Artificial Sequence
  Synthetic
cgaguauuucauauguggaaaauu

SEQ ID NO: 400789 - RNA, 18 nt, Artificial Sequence
  Synthetic
augaauagggugaaaauu

SEQ ID NO: 400790 - RNA, 19 nt, Artificial Sequence
  Synthetic
caugaauagggugaaaauu

SEQ ID NO: 400791 - RNA, 20 nt, Artificial Sequence
  Synthetic
ccaugaauagggugaaaauu

SEQ ID NO: 400792 - RNA, 21 nt, Artificial Sequence
  Synthetic
cccaugaauagggugaaaauu

SEQ ID NO: 400793 - RNA, 22 nt, Artificial Sequence
  Synthetic
ccccaugaauagggugaaaauu

SEQ ID NO: 400794 - RNA, 23 nt, Artificial Sequence
  Synthetic
gccccaugaauagggugaaaauu

SEQ ID NO: 400795 - RNA, 24 nt, Artificial Sequence
  Synthetic
agccccaugaauagggugaaaauu

SEQ ID NO: 400796 - RNA, 18 nt, Artificial Sequence
  Synthetic
acaucccccuugaaaauu

SEQ ID NO: 400797 - RNA, 19 nt, Artificial Sequence
  Synthetic
cacaucccccuugaaaauu

SEQ ID NO: 400798 - RNA, 20 nt, Artificial Sequence
  Synthetic
ccacaucccccuugaaaauu

SEQ ID NO: 400799 - RNA, 21 nt, Artificial Sequence
  Synthetic
accacaucccccuugaaaauu

SEQ ID NO: 400800 - RNA, 22 nt, Artificial Sequence
  Synthetic
caccacaucccccuugaaaauu

SEQ ID NO: 400801 - RNA, 23 nt, Artificial Sequence
  Synthetic
ccaccacaucccccuugaaaauu

SEQ ID NO: 400802 - RNA, 24 nt, Artificial Sequence
  Synthetic
cccaccacaucccccuugaaaauu

SEQ ID NO: 400803 - RNA, 18 nt, Artificial Sequence
  Synthetic
acacucauuuugaaaauu

SEQ ID NO: 400804 - RNA, 19 nt, Artificial Sequence
  Synthetic
gacacucauuuugaaaauu

SEQ ID NO: 400805 - RNA, 20 nt, Artificial Sequence
  Synthetic
agacacucauuuugaaaauu

SEQ ID NO: 400806 - RNA, 21 nt, Artificial Sequence
  Synthetic
cagacacucauuuugaaaauu

SEQ ID NO: 400807 - RNA, 22 nt, Artificial Sequence
  Synthetic
gcagacacucauuuugaaaauu

SEQ ID NO: 400808 - RNA, 23 nt, Artificial Sequence
  Synthetic
ugcagacacucauuuugaaaauu

SEQ ID NO: 400809 - RNA, 24 nt, Artificial Sequence
  Synthetic
uugcagacacucauuuugaaaauu

SEQ ID NO: 400810 - RNA, 18 nt, Artificial Sequence
  Synthetic
cauuuugagaauaaaauu

SEQ ID NO: 400811 - RNA, 19 nt, Artificial Sequence
  Synthetic
ucauuuugagaauaaaauu

SEQ ID NO: 400812 - RNA, 20 nt, Artificial Sequence
  Synthetic
cucauuuugagaauaaaauu

SEQ ID NO: 400813 - RNA, 21 nt, Artificial Sequence
  Synthetic
acucauuuugagaauaaaauu

SEQ ID NO: 400814 - RNA, 22 nt, Artificial Sequence
  Synthetic
aacucauuuugagaauaaaauu

SEQ ID NO: 400815 - RNA, 23 nt, Artificial Sequence
  Synthetic
caacucauuuugagaauaaaauu

SEQ ID NO: 400816 - RNA, 24 nt, Artificial Sequence
  Synthetic
gcaacucauuuugagaauaaaauu

SEQ ID NO: 400817 - RNA, 18 nt, Artificial Sequence
  Synthetic
guuauggaagauaaaauu

SEQ ID NO: 400818 - RNA, 19 nt, Artificial Sequence
  Synthetic
aguuauggaagauaaaauu

SEQ ID NO: 400819 - RNA, 20 nt, Artificial Sequence
  Synthetic
caguuauggaagauaaaauu

SEQ ID NO: 400820 - RNA, 21 nt, Artificial Sequence
  Synthetic
ucaguuauggaagauaaaauu

SEQ ID NO: 400821 - RNA, 22 nt, Artificial Sequence
  Synthetic
uucaguuauggaagauaaaauu

SEQ ID NO: 400822 - RNA, 23 nt, Artificial Sequence
  Synthetic
uuucaguuauggaagauaaaauu

SEQ ID NO: 400823 - RNA, 24 nt, Artificial Sequence
  Synthetic
guuucaguuauggaagauaaaauu

SEQ ID NO: 400824 - RNA, 18 nt, Artificial Sequence
  Synthetic
cuaagauccuauaaaauu

SEQ ID NO: 400825 - RNA, 19 nt, Artificial Sequence
  Synthetic
ccuaagauccuauaaaauu

SEQ ID NO: 400826 - RNA, 20 nt, Artificial Sequence
  Synthetic
uccuaagauccuauaaaauu

SEQ ID NO: 400827 - RNA, 21 nt, Artificial Sequence
  Synthetic
uuccuaagauccuauaaaauu

SEQ ID NO: 400828 - RNA, 22 nt, Artificial Sequence
  Synthetic
uuuccuaagauccuauaaaauu

SEQ ID NO: 400829 - RNA, 23 nt, Artificial Sequence
  Synthetic
guuuccuaagauccuauaaaauu

SEQ ID NO: 400830 - RNA, 24 nt, Artificial Sequence
  Synthetic
gguuuccuaagauccuauaaaauu

SEQ ID NO: 400831 - RNA, 18 nt, Artificial Sequence
  Synthetic
ucuuaagccacuaaaauu

SEQ ID NO: 400832 - RNA, 19 nt, Artificial Sequence
  Synthetic
uucuuaagccacuaaaauu

SEQ ID NO: 400833 - RNA, 20 nt, Artificial Sequence
  Synthetic
uuucuuaagccacuaaaauu

SEQ ID NO: 400834 - RNA, 21 nt, Artificial Sequence
  Synthetic
uuuucuuaagccacuaaaauu

SEQ ID NO: 400835 - RNA, 22 nt, Artificial Sequence
  Synthetic
cuuuucuuaagccacuaaaauu

SEQ ID NO: 400836 - RNA, 23 nt, Artificial Sequence
  Synthetic
ucuuuucuuaagccacuaaaauu

SEQ ID NO: 400837 - RNA, 24 nt, Artificial Sequence
  Synthetic
uucuuuucuuaagccacuaaaauu

SEQ ID NO: 400838 - RNA, 18 nt, Artificial Sequence
  Synthetic
aaaaauuguaguaaaauu

SEQ ID NO: 400839 - RNA, 19 nt, Artificial Sequence
  Synthetic
aaaaaauuguaguaaaauu

SEQ ID NO: 400840 - RNA, 20 nt, Artificial Sequence
  Synthetic
uaaaaaauuguaguaaaauu

SEQ ID NO: 400841 - RNA, 21 nt, Artificial Sequence
  Synthetic
uuaaaaaauuguaguaaaauu

SEQ ID NO: 400842 - RNA, 22 nt, Artificial Sequence
  Synthetic
uuuaaaaaauuguaguaaaauu

SEQ ID NO: 400843 - RNA, 23 nt, Artificial Sequence
  Synthetic
uuuuaaaaaauuguaguaaaauu

SEQ ID NO: 400844 - RNA, 24 nt, Artificial Sequence
  Synthetic
uuuuuaaaaaauuguaguaaaauu

SEQ ID NO: 400845 - RNA, 18 nt, Artificial Sequence
  Synthetic
aauuuaacauguaaaauu

SEQ ID NO: 400846 - RNA, 19 nt, Artificial Sequence
  Synthetic
caauuuaacauguaaaauu

SEQ ID NO: 400847 - RNA, 20 nt, Artificial Sequence
  Synthetic
ccaauuuaacauguaaaauu

SEQ ID NO: 400848 - RNA, 21 nt, Artificial Sequence
  Synthetic
uccaauuuaacauguaaaauu

SEQ ID NO: 400849 - RNA, 22 nt, Artificial Sequence
  Synthetic
uuccaauuuaacauguaaaauu

SEQ ID NO: 400850 - RNA, 23 nt, Artificial Sequence
  Synthetic
cuuccaauuuaacauguaaaauu

SEQ ID NO: 400851 - RNA, 24 nt, Artificial Sequence
  Synthetic
acuuccaauuuaacauguaaaauu

SEQ ID NO: 400852 - RNA, 18 nt, Artificial Sequence
  Synthetic
ccuggcacaauuaaaauu

SEQ ID NO: 400853 - RNA, 19 nt, Artificial Sequence
  Synthetic
accuggcacaauuaaaauu

SEQ ID NO: 400854 - RNA, 20 nt, Artificial Sequence
  Synthetic
gaccuggcacaauuaaaauu

SEQ ID NO: 400855 - RNA, 21 nt, Artificial Sequence
  Synthetic
agaccuggcacaauuaaaauu

SEQ ID NO: 400856 - RNA, 22 nt, Artificial Sequence
  Synthetic
uagaccuggcacaauuaaaauu

SEQ ID NO: 400857 - RNA, 23 nt, Artificial Sequence
  Synthetic
cuagaccuggcacaauuaaaauu

SEQ ID NO: 400858 - RNA, 24 nt, Artificial Sequence
  Synthetic
acuagaccuggcacaauuaaaauu

SEQ ID NO: 400859 - RNA, 18 nt, Artificial Sequence
  Synthetic
acaggagccauuaaaauu

SEQ ID NO: 400860 - RNA, 19 nt, Artificial Sequence
  Synthetic
aacaggagccauuaaaauu

SEQ ID NO: 400861 - RNA, 20 nt, Artificial Sequence
  Synthetic
uaacaggagccauuaaaauu

SEQ ID NO: 400862 - RNA, 21 nt, Artificial Sequence
  Synthetic
uuaacaggagccauuaaaauu

SEQ ID NO: 400863 - RNA, 22 nt, Artificial Sequence
  Synthetic
guuaacaggagccauuaaaauu

SEQ ID NO: 400864 - RNA, 23 nt, Artificial Sequence
  Synthetic
gguuaacaggagccauuaaaauu

SEQ ID NO: 400865 - RNA, 24 nt, Artificial Sequence
  Synthetic
ugguuaacaggagccauuaaaauu

SEQ ID NO: 400866 - RNA, 18 nt, Artificial Sequence
  Synthetic
gguuucaauauuaaaauu

SEQ ID NO: 400867 - RNA, 19 nt, Artificial Sequence
  Synthetic
agguuucaauauuaaaauu

SEQ ID NO: 400868 - RNA, 20 nt, Artificial Sequence
  Synthetic
gagguuucaauauuaaaauu

SEQ ID NO: 400869 - RNA, 21 nt, Artificial Sequence
  Synthetic
ugagguuucaauauuaaaauu

SEQ ID NO: 400870 - RNA, 22 nt, Artificial Sequence
  Synthetic
uugagguuucaauauuaaaauu

SEQ ID NO: 400871 - RNA, 23 nt, Artificial Sequence
  Synthetic
uuugagguuucaauauuaaaauu

SEQ ID NO: 400872 - RNA, 24 nt, Artificial Sequence
  Synthetic
auuugagguuucaauauuaaaauu

SEQ ID NO: 400873 - RNA, 18 nt, Artificial Sequence
  Synthetic
uauaagauauuuaaaauu

SEQ ID NO: 400874 - RNA, 19 nt, Artificial Sequence
  Synthetic
auauaagauauuuaaaauu

SEQ ID NO: 400875 - RNA, 20 nt, Artificial Sequence
  Synthetic
uauauaagauauuuaaaauu

SEQ ID NO: 400876 - RNA, 21 nt, Artificial Sequence
  Synthetic
uuauauaagauauuuaaaauu

SEQ ID NO: 400877 - RNA, 22 nt, Artificial Sequence
  Synthetic
cuuauauaagauauuuaaaauu

SEQ ID NO: 400878 - RNA, 23 nt, Artificial Sequence
  Synthetic
ucuuauauaagauauuuaaaauu

SEQ ID NO: 400879 - RNA, 24 nt, Artificial Sequence
  Synthetic
gucuuauauaagauauuuaaaauu

SEQ ID NO: 400880 - RNA, 18 nt, Artificial Sequence
  Synthetic
uuuuuccauuuuaaaauu

SEQ ID NO: 400881 - RNA, 19 nt, Artificial Sequence
  Synthetic
cuuuuuccauuuuaaaauu

SEQ ID NO: 400882 - RNA, 20 nt, Artificial Sequence
  Synthetic
gcuuuuuccauuuuaaaauu

SEQ ID NO: 400883 - RNA, 21 nt, Artificial Sequence
  Synthetic
ugcuuuuuccauuuuaaaauu

SEQ ID NO: 400884 - RNA, 22 nt, Artificial Sequence
  Synthetic
augcuuuuuccauuuuaaaauu

SEQ ID NO: 400885 - RNA, 23 nt, Artificial Sequence
  Synthetic
uaugcuuuuuccauuuuaaaauu

SEQ ID NO: 400886 - RNA, 24 nt, Artificial Sequence
  Synthetic
auaugcuuuuuccauuuuaaaauu

SEQ ID NO: 400887 - RNA, 18 nt, Artificial Sequence
  Synthetic
auuuuuucuuuuaaaauu

SEQ ID NO: 400888 - RNA, 19 nt, Artificial Sequence
  Synthetic
uauuuuuucuuuuaaaauu

SEQ ID NO: 400889 - RNA, 20 nt, Artificial Sequence
  Synthetic
cuauuuuuucuuuuaaaauu

SEQ ID NO: 400890 - RNA, 21 nt, Artificial Sequence
  Synthetic
gcuauuuuuucuuuuaaaauu

SEQ ID NO: 400891 - RNA, 22 nt, Artificial Sequence
  Synthetic
ugcuauuuuuucuuuuaaaauu

SEQ ID NO: 400892 - RNA, 23 nt, Artificial Sequence
  Synthetic
uugcuauuuuuucuuuuaaaauu

SEQ ID NO: 400893 - RNA, 24 nt, Artificial Sequence
  Synthetic
cuugcuauuuuuucuuuuaaaauu

SEQ ID NO: 400894 - RNA, 18 nt, Artificial Sequence
  Synthetic
auucaaaguuuuaaaauu

SEQ ID NO: 400895 - RNA, 19 nt, Artificial Sequence
  Synthetic
uauucaaaguuuuaaaauu

SEQ ID NO: 400896 - RNA, 20 nt, Artificial Sequence
  Synthetic
auauucaaaguuuuaaaauu

SEQ ID NO: 400897 - RNA, 21 nt, Artificial Sequence
  Synthetic
cauauucaaaguuuuaaaauu

SEQ ID NO: 400898 - RNA, 22 nt, Artificial Sequence
  Synthetic
gcauauucaaaguuuuaaaauu

SEQ ID NO: 400899 - RNA, 23 nt, Artificial Sequence
  Synthetic
agcauauucaaaguuuuaaaauu

SEQ ID NO: 400900 - RNA, 24 nt, Artificial Sequence
  Synthetic
uagcauauucaaaguuuuaaaauu

SEQ ID NO: 400901 - RNA, 18 nt, Artificial Sequence
  Synthetic
ugauaaacaacacaaauu

SEQ ID NO: 400902 - RNA, 19 nt, Artificial Sequence
  Synthetic
augauaaacaacacaaauu

SEQ ID NO: 400903 - RNA, 20 nt, Artificial Sequence
  Synthetic
caugauaaacaacacaaauu

SEQ ID NO: 400904 - RNA, 21 nt, Artificial Sequence
  Synthetic
acaugauaaacaacacaaauu

SEQ ID NO: 400905 - RNA, 22 nt, Artificial Sequence
  Synthetic
aacaugauaaacaacacaaauu

SEQ ID NO: 400906 - RNA, 23 nt, Artificial Sequence
  Synthetic
caacaugauaaacaacacaaauu

SEQ ID NO: 400907 - RNA, 24 nt, Artificial Sequence
  Synthetic
gcaacaugauaaacaacacaaauu

SEQ ID NO: 400908 - RNA, 18 nt, Artificial Sequence
  Synthetic
uuuuuaaugucacaaauu

SEQ ID NO: 400909 - RNA, 19 nt, Artificial Sequence
  Synthetic
uuuuuuaaugucacaaauu

SEQ ID NO: 400910 - RNA, 20 nt, Artificial Sequence
  Synthetic
uuuuuuuaaugucacaaauu

SEQ ID NO: 400911 - RNA, 21 nt, Artificial Sequence
  Synthetic
auuuuuuuaaugucacaaauu

SEQ ID NO: 400912 - RNA, 22 nt, Artificial Sequence
  Synthetic
uauuuuuuuaaugucacaaauu

SEQ ID NO: 400913 - RNA, 23 nt, Artificial Sequence
  Synthetic
cuauuuuuuuaaugucacaaauu

SEQ ID NO: 400914 - RNA, 24 nt, Artificial Sequence
  Synthetic
gcuauuuuuuuaaugucacaaauu

SEQ ID NO: 400915 - RNA, 18 nt, Artificial Sequence
  Synthetic
aauggagcgagacaaauu

SEQ ID NO: 400916 - RNA, 19 nt, Artificial Sequence
  Synthetic
uaauggagcgagacaaauu

SEQ ID NO: 400917 - RNA, 20 nt, Artificial Sequence
  Synthetic
uuaauggagcgagacaaauu

SEQ ID NO: 400918 - RNA, 21 nt, Artificial Sequence
  Synthetic
auuaauggagcgagacaaauu

SEQ ID NO: 400919 - RNA, 22 nt, Artificial Sequence
  Synthetic
aauuaauggagcgagacaaauu

SEQ ID NO: 400920 - RNA, 23 nt, Artificial Sequence
  Synthetic
caauuaauggagcgagacaaauu

SEQ ID NO: 400921 - RNA, 24 nt, Artificial Sequence
  Synthetic
ccaauuaauggagcgagacaaauu

SEQ ID NO: 400922 - RNA, 18 nt, Artificial Sequence
  Synthetic
accuaaaccuuacaaauu

SEQ ID NO: 400923 - RNA, 19 nt, Artificial Sequence
  Synthetic
uaccuaaaccuuacaaauu

SEQ ID NO: 400924 - RNA, 20 nt, Artificial Sequence
  Synthetic
uuaccuaaaccuuacaaauu

SEQ ID NO: 400925 - RNA, 21 nt, Artificial Sequence
  Synthetic
uuuaccuaaaccuuacaaauu

SEQ ID NO: 400926 - RNA, 22 nt, Artificial Sequence
  Synthetic
uuuuaccuaaaccuuacaaauu

SEQ ID NO: 400927 - RNA, 23 nt, Artificial Sequence
  Synthetic
guuuuaccuaaaccuuacaaauu

SEQ ID NO: 400928 - RNA, 24 nt, Artificial Sequence
  Synthetic
cguuuuaccuaaaccuuacaaauu

SEQ ID NO: 400929 - RNA, 18 nt, Artificial Sequence
  Synthetic
agcuacaguuuccaaauu

SEQ ID NO: 400930 - RNA, 19 nt, Artificial Sequence
  Synthetic
aagcuacaguuuccaaauu

SEQ ID NO: 400931 - RNA, 20 nt, Artificial Sequence
  Synthetic
gaagcuacaguuuccaaauu

SEQ ID NO: 400932 - RNA, 21 nt, Artificial Sequence
  Synthetic
ugaagcuacaguuuccaaauu

SEQ ID NO: 400933 - RNA, 22 nt, Artificial Sequence
  Synthetic
cugaagcuacaguuuccaaauu

SEQ ID NO: 400934 - RNA, 23 nt, Artificial Sequence
  Synthetic
ucugaagcuacaguuuccaaauu

SEQ ID NO: 400935 - RNA, 24 nt, Artificial Sequence
  Synthetic
aucugaagcuacaguuuccaaauu

SEQ ID NO: 400936 - RNA, 18 nt, Artificial Sequence
  Synthetic
aagcaacuucagcaaauu

SEQ ID NO: 400937 - RNA, 19 nt, Artificial Sequence
  Synthetic
caagcaacuucagcaaauu

SEQ ID NO: 400938 - RNA, 20 nt, Artificial Sequence
  Synthetic
ccaagcaacuucagcaaauu

SEQ ID NO: 400939 - RNA, 21 nt, Artificial Sequence
  Synthetic
uccaagcaacuucagcaaauu

SEQ ID NO: 400940 - RNA, 22 nt, Artificial Sequence
  Synthetic
cuccaagcaacuucagcaaauu

SEQ ID NO: 400941 - RNA, 23 nt, Artificial Sequence
  Synthetic
acuccaagcaacuucagcaaauu

SEQ ID NO: 400942 - RNA, 24 nt, Artificial Sequence
  Synthetic
gacuccaagcaacuucagcaaauu

SEQ ID NO: 400943 - RNA, 18 nt, Artificial Sequence
  Synthetic
ucaggcuuagagcaaauu

SEQ ID NO: 400944 - RNA, 19 nt, Artificial Sequence
  Synthetic
cucaggcuuagagcaaauu

SEQ ID NO: 400945 - RNA, 20 nt, Artificial Sequence
  Synthetic
ucucaggcuuagagcaaauu

SEQ ID NO: 400946 - RNA, 21 nt, Artificial Sequence
  Synthetic
cucucaggcuuagagcaaauu

SEQ ID NO: 400947 - RNA, 22 nt, Artificial Sequence
  Synthetic
ccucucaggcuuagagcaaauu

SEQ ID NO: 400948 - RNA, 23 nt, Artificial Sequence
  Synthetic
uccucucaggcuuagagcaaauu

SEQ ID NO: 400949 - RNA, 24 nt, Artificial Sequence
  Synthetic
cuccucucaggcuuagagcaaauu

SEQ ID NO: 400950 - RNA, 18 nt, Artificial Sequence
  Synthetic
gcagccaguaugcaaauu

SEQ ID NO: 400951 - RNA, 19 nt, Artificial Sequence
  Synthetic
ggcagccaguaugcaaauu

SEQ ID NO: 400952 - RNA, 20 nt, Artificial Sequence
  Synthetic
uggcagccaguaugcaaauu

SEQ ID NO: 400953 - RNA, 21 nt, Artificial Sequence
  Synthetic
guggcagccaguaugcaaauu

SEQ ID NO: 400954 - RNA, 22 nt, Artificial Sequence
  Synthetic
gguggcagccaguaugcaaauu

SEQ ID NO: 400955 - RNA, 23 nt, Artificial Sequence
  Synthetic
agguggcagccaguaugcaaauu

SEQ ID NO: 400956 - RNA, 24 nt, Artificial Sequence
  Synthetic
uagguggcagccaguaugcaaauu

SEQ ID NO: 400957 - RNA, 18 nt, Artificial Sequence
  Synthetic
uuaacauuucaucaaauu

SEQ ID NO: 400958 - RNA, 19 nt, Artificial Sequence
  Synthetic
uuuaacauuucaucaaauu

SEQ ID NO: 400959 - RNA, 20 nt, Artificial Sequence
  Synthetic
auuuaacauuucaucaaauu

SEQ ID NO: 400960 - RNA, 21 nt, Artificial Sequence
  Synthetic
cauuuaacauuucaucaaauu

SEQ ID NO: 400961 - RNA, 22 nt, Artificial Sequence
  Synthetic
gcauuuaacauuucaucaaauu

SEQ ID NO: 400962 - RNA, 23 nt, Artificial Sequence
  Synthetic
ugcauuuaacauuucaucaaauu

SEQ ID NO: 400963 - RNA, 24 nt, Artificial Sequence
  Synthetic
gugcauuuaacauuucaucaaauu

SEQ ID NO: 400964 - RNA, 18 nt, Artificial Sequence
  Synthetic
auugcuauaacucaaauu

SEQ ID NO: 400965 - RNA, 19 nt, Artificial Sequence
  Synthetic
aauugcuauaacucaaauu

SEQ ID NO: 400966 - RNA, 20 nt, Artificial Sequence
  Synthetic
aaauugcuauaacucaaauu

SEQ ID NO: 400967 - RNA, 21 nt, Artificial Sequence
  Synthetic
aaaauugcuauaacucaaauu

SEQ ID NO: 400968 - RNA, 22 nt, Artificial Sequence
  Synthetic
aaaaauugcuauaacucaaauu

SEQ ID NO: 400969 - RNA, 23 nt, Artificial Sequence
  Synthetic
aaaaaauugcuauaacucaaauu

SEQ ID NO: 400970 - RNA, 24 nt, Artificial Sequence
  Synthetic
uaaaaaauugcuauaacucaaauu

SEQ ID NO: 400971 - RNA, 18 nt, Artificial Sequence
  Synthetic
agaagauugacucaaauu

SEQ ID NO: 400972 - RNA, 19 nt, Artificial Sequence
  Synthetic
gagaagauugacucaaauu

SEQ ID NO: 400973 - RNA, 20 nt, Artificial Sequence
  Synthetic
ugagaagauugacucaaauu

SEQ ID NO: 400974 - RNA, 21 nt, Artificial Sequence
  Synthetic
uugagaagauugacucaaauu

SEQ ID NO: 400975 - RNA, 22 nt, Artificial Sequence
  Synthetic
uuugagaagauugacucaaauu

SEQ ID NO: 400976 - RNA, 23 nt, Artificial Sequence
  Synthetic
guuugagaagauugacucaaauu

SEQ ID NO: 400977 - RNA, 24 nt, Artificial Sequence
  Synthetic
gguuugagaagauugacucaaauu

SEQ ID NO: 400978 - RNA, 18 nt, Artificial Sequence
  Synthetic
caggccaacauucaaauu

SEQ ID NO: 400979 - RNA, 19 nt, Artificial Sequence
  Synthetic
acaggccaacauucaaauu

SEQ ID NO: 400980 - RNA, 20 nt, Artificial Sequence
  Synthetic
gacaggccaacauucaaauu

SEQ ID NO: 400981 - RNA, 21 nt, Artificial Sequence
  Synthetic
agacaggccaacauucaaauu

SEQ ID NO: 400982 - RNA, 22 nt, Artificial Sequence
  Synthetic
aagacaggccaacauucaaauu

SEQ ID NO: 400983 - RNA, 23 nt, Artificial Sequence
  Synthetic
caagacaggccaacauucaaauu

SEQ ID NO: 400984 - RNA, 24 nt, Artificial Sequence
  Synthetic
gcaagacaggccaacauucaaauu

SEQ ID NO: 400985 - RNA, 18 nt, Artificial Sequence
  Synthetic
aagacugucauucaaauu

SEQ ID NO: 400986 - RNA, 19 nt, Artificial Sequence
  Synthetic
gaagacugucauucaaauu

SEQ ID NO: 400987 - RNA, 20 nt, Artificial Sequence
  Synthetic
ggaagacugucauucaaauu

SEQ ID NO: 400988 - RNA, 21 nt, Artificial Sequence
  Synthetic
aggaagacugucauucaaauu

SEQ ID NO: 400989 - RNA, 22 nt, Artificial Sequence
  Synthetic
uaggaagacugucauucaaauu

SEQ ID NO: 400990 - RNA, 23 nt, Artificial Sequence
  Synthetic
uuaggaagacugucauucaaauu

SEQ ID NO: 400991 - RNA, 24 nt, Artificial Sequence
  Synthetic
guuaggaagacugucauucaaauu

SEQ ID NO: 400992 - RNA, 18 nt, Artificial Sequence
  Synthetic
augcuuuuucuucaaauu

SEQ ID NO: 400993 - RNA, 19 nt, Artificial Sequence
  Synthetic
gaugcuuuuucuucaaauu

SEQ ID NO: 400994 - RNA, 20 nt, Artificial Sequence
  Synthetic
agaugcuuuuucuucaaauu

SEQ ID NO: 400995 - RNA, 21 nt, Artificial Sequence
  Synthetic
aagaugcuuuuucuucaaauu

SEQ ID NO: 400996 - RNA, 22 nt, Artificial Sequence
  Synthetic
gaagaugcuuuuucuucaaauu

SEQ ID NO: 400997 - RNA, 23 nt, Artificial Sequence
  Synthetic
ugaagaugcuuuuucuucaaauu

SEQ ID NO: 400998 - RNA, 24 nt, Artificial Sequence
  Synthetic
augaagaugcuuuuucuucaaauu

SEQ ID NO: 400999 - RNA, 18 nt, Artificial Sequence
  Synthetic
uguagugccguucaaauu

SEQ ID NO: 401000 - RNA, 19 nt, Artificial Sequence
  Synthetic
cuguagugccguucaaauu

SEQ ID NO: 401001 - RNA, 20 nt, Artificial Sequence
  Synthetic
ucuguagugccguucaaauu

SEQ ID NO: 401002 - RNA, 21 nt, Artificial Sequence
  Synthetic
aucuguagugccguucaaauu

SEQ ID NO: 401003 - RNA, 22 nt, Artificial Sequence
  Synthetic
aaucuguagugccguucaaauu

SEQ ID NO: 401004 - RNA, 23 nt, Artificial Sequence
  Synthetic
gaaucuguagugccguucaaauu

SEQ ID NO: 401005 - RNA, 24 nt, Artificial Sequence
  Synthetic
ugaaucuguagugccguucaaauu

SEQ ID NO: 401006 - RNA, 18 nt, Artificial Sequence
  Synthetic
ugaguccauuuucaaauu

SEQ ID NO: 401007 - RNA, 19 nt, Artificial Sequence
  Synthetic
uugaguccauuuucaaauu

SEQ ID NO: 401008 - RNA, 20 nt, Artificial Sequence
  Synthetic
cuugaguccauuuucaaauu

SEQ ID NO: 401009 - RNA, 21 nt, Artificial Sequence
  Synthetic
ucuugaguccauuuucaaauu

SEQ ID NO: 401010 - RNA, 22 nt, Artificial Sequence
  Synthetic
gucuugaguccauuuucaaauu

SEQ ID NO: 401011 - RNA, 23 nt, Artificial Sequence
  Synthetic
agucuugaguccauuuucaaauu

SEQ ID NO: 401012 - RNA, 24 nt, Artificial Sequence
  Synthetic
aagucuugaguccauuuucaaauu

SEQ ID NO: 401013 - RNA, 18 nt, Artificial Sequence
  Synthetic
caugaccugaaagaaauu

SEQ ID NO: 401014 - RNA, 19 nt, Artificial Sequence
  Synthetic
ccaugaccugaaagaaauu

SEQ ID NO: 401015 - RNA, 20 nt, Artificial Sequence
  Synthetic
uccaugaccugaaagaaauu

SEQ ID NO: 401016 - RNA, 21 nt, Artificial Sequence
  Synthetic
auccaugaccugaaagaaauu

SEQ ID NO: 401017 - RNA, 22 nt, Artificial Sequence
  Synthetic
cauccaugaccugaaagaaauu

SEQ ID NO: 401018 - RNA, 23 nt, Artificial Sequence
  Synthetic
ucauccaugaccugaaagaaauu

SEQ ID NO: 401019 - RNA, 24 nt, Artificial Sequence
  Synthetic
uucauccaugaccugaaagaaauu

SEQ ID NO: 401020 - RNA, 18 nt, Artificial Sequence
  Synthetic
aauauuuuaacagaaauu

SEQ ID NO: 401021 - RNA, 19 nt, Artificial Sequence
  Synthetic
aaauauuuuaacagaaauu

SEQ ID NO: 401022 - RNA, 20 nt, Artificial Sequence
  Synthetic
caaauauuuuaacagaaauu

SEQ ID NO: 401023 - RNA, 21 nt, Artificial Sequence
  Synthetic
ucaaauauuuuaacagaaauu

SEQ ID NO: 401024 - RNA, 22 nt, Artificial Sequence
  Synthetic
gucaaauauuuuaacagaaauu

SEQ ID NO: 401025 - RNA, 23 nt, Artificial Sequence
  Synthetic
ugucaaauauuuuaacagaaauu

SEQ ID NO: 401026 - RNA, 24 nt, Artificial Sequence
  Synthetic
uugucaaauauuuuaacagaaauu

SEQ ID NO: 401027 - RNA, 18 nt, Artificial Sequence
  Synthetic
ucauuaagagcagaaauu

SEQ ID NO: 401028 - RNA, 19 nt, Artificial Sequence
  Synthetic
aucauuaagagcagaaauu

SEQ ID NO: 401029 - RNA, 20 nt, Artificial Sequence
  Synthetic
uaucauuaagagcagaaauu

SEQ ID NO: 401030 - RNA, 21 nt, Artificial Sequence
  Synthetic
auaucauuaagagcagaaauu

SEQ ID NO: 401031 - RNA, 22 nt, Artificial Sequence
  Synthetic
gauaucauuaagagcagaaauu

SEQ ID NO: 401032 - RNA, 23 nt, Artificial Sequence
  Synthetic
ggauaucauuaagagcagaaauu

SEQ ID NO: 401033 - RNA, 24 nt, Artificial Sequence
  Synthetic
gggauaucauuaagagcagaaauu

SEQ ID NO: 401034 - RNA, 18 nt, Artificial Sequence
  Synthetic
ugguaccaggcagaaauu

SEQ ID NO: 401035 - RNA, 19 nt, Artificial Sequence
  Synthetic
gugguaccaggcagaaauu

SEQ ID NO: 401036 - RNA, 20 nt, Artificial Sequence
  Synthetic
ugugguaccaggcagaaauu

SEQ ID NO: 401037 - RNA, 21 nt, Artificial Sequence
  Synthetic
gugugguaccaggcagaaauu

SEQ ID NO: 401038 - RNA, 22 nt, Artificial Sequence
  Synthetic
agugugguaccaggcagaaauu

SEQ ID NO: 401039 - RNA, 23 nt, Artificial Sequence
  Synthetic
gagugugguaccaggcagaaauu

SEQ ID NO: 401040 - RNA, 24 nt, Artificial Sequence
  Synthetic
ggagugugguaccaggcagaaauu

SEQ ID NO: 401041 - RNA, 18 nt, Artificial Sequence
  Synthetic
gaaugaguucgagaaauu

SEQ ID NO: 401042 - RNA, 19 nt, Artificial Sequence
  Synthetic
ugaaugaguucgagaaauu

SEQ ID NO: 401043 - RNA, 20 nt, Artificial Sequence
  Synthetic
gugaaugaguucgagaaauu

SEQ ID NO: 401044 - RNA, 21 nt, Artificial Sequence
  Synthetic
ggugaaugaguucgagaaauu

SEQ ID NO: 401045 - RNA, 22 nt, Artificial Sequence
  Synthetic
uggugaaugaguucgagaaauu

SEQ ID NO: 401046 - RNA, 23 nt, Artificial Sequence
  Synthetic
guggugaaugaguucgagaaauu

SEQ ID NO: 401047 - RNA, 24 nt, Artificial Sequence
  Synthetic
gguggugaaugaguucgagaaauu

SEQ ID NO: 401048 - RNA, 18 nt, Artificial Sequence
  Synthetic
guucccaacugagaaauu

SEQ ID NO: 401049 - RNA, 19 nt, Artificial Sequence
  Synthetic
uguucccaacugagaaauu

SEQ ID NO: 401050 - RNA, 20 nt, Artificial Sequence
  Synthetic
uuguucccaacugagaaauu

SEQ ID NO: 401051 - RNA, 21 nt, Artificial Sequence
  Synthetic
cuuguucccaacugagaaauu

SEQ ID NO: 401052 - RNA, 22 nt, Artificial Sequence
  Synthetic
ucuuguucccaacugagaaauu

SEQ ID NO: 401053 - RNA, 23 nt, Artificial Sequence
  Synthetic
uucuuguucccaacugagaaauu

SEQ ID NO: 401054 - RNA, 24 nt, Artificial Sequence
  Synthetic
uuucuuguucccaacugagaaauu

SEQ ID NO: 401055 - RNA, 18 nt, Artificial Sequence
  Synthetic
aucauaagaauagaaauu

SEQ ID NO: 401056 - RNA, 19 nt, Artificial Sequence
  Synthetic
aaucauaagaauagaaauu

SEQ ID NO: 401057 - RNA, 20 nt, Artificial Sequence
  Synthetic
aaaucauaagaauagaaauu

SEQ ID NO: 401058 - RNA, 21 nt, Artificial Sequence
  Synthetic
caaaucauaagaauagaaauu

SEQ ID NO: 401059 - RNA, 22 nt, Artificial Sequence
  Synthetic
acaaaucauaagaauagaaauu

SEQ ID NO: 401060 - RNA, 23 nt, Artificial Sequence
  Synthetic
cacaaaucauaagaauagaaauu

SEQ ID NO: 401061 - RNA, 24 nt, Artificial Sequence
  Synthetic
acacaaaucauaagaauagaaauu

SEQ ID NO: 401062 - RNA, 18 nt, Artificial Sequence
  Synthetic
augaggcugguagaaauu

SEQ ID NO: 401063 - RNA, 19 nt, Artificial Sequence
  Synthetic
caugaggcugguagaaauu

SEQ ID NO: 401064 - RNA, 20 nt, Artificial Sequence
  Synthetic
ucaugaggcugguagaaauu

SEQ ID NO: 401065 - RNA, 21 nt, Artificial Sequence
  Synthetic
aucaugaggcugguagaaauu

SEQ ID NO: 401066 - RNA, 22 nt, Artificial Sequence
  Synthetic
aaucaugaggcugguagaaauu

SEQ ID NO: 401067 - RNA, 23 nt, Artificial Sequence
  Synthetic
aaaucaugaggcugguagaaauu

SEQ ID NO: 401068 - RNA, 24 nt, Artificial Sequence
  Synthetic
caaaucaugaggcugguagaaauu

SEQ ID NO: 401069 - RNA, 18 nt, Artificial Sequence
  Synthetic
uaagaaacaaaggaaauu

SEQ ID NO: 401070 - RNA, 19 nt, Artificial Sequence
  Synthetic
auaagaaacaaaggaaauu

SEQ ID NO: 401071 - RNA, 20 nt, Artificial Sequence
  Synthetic
aauaagaaacaaaggaaauu

SEQ ID NO: 401072 - RNA, 21 nt, Artificial Sequence
  Synthetic
aaauaagaaacaaaggaaauu

SEQ ID NO: 401073 - RNA, 22 nt, Artificial Sequence
  Synthetic
uaaauaagaaacaaaggaaauu

SEQ ID NO: 401074 - RNA, 23 nt, Artificial Sequence
  Synthetic
uuaaauaagaaacaaaggaaauu

SEQ ID NO: 401075 - RNA, 24 nt, Artificial Sequence
  Synthetic
auuaaauaagaaacaaaggaaauu

SEQ ID NO: 401076 - RNA, 18 nt, Artificial Sequence
  Synthetic
auucaacagaaggaaauu

SEQ ID NO: 401077 - RNA, 19 nt, Artificial Sequence
  Synthetic
aauucaacagaaggaaauu

SEQ ID NO: 401078 - RNA, 20 nt, Artificial Sequence
  Synthetic
gaauucaacagaaggaaauu

SEQ ID NO: 401079 - RNA, 21 nt, Artificial Sequence
  Synthetic
ggaauucaacagaaggaaauu

SEQ ID NO: 401080 - RNA, 22 nt, Artificial Sequence
  Synthetic
uggaauucaacagaaggaaauu

SEQ ID NO: 401081 - RNA, 23 nt, Artificial Sequence
  Synthetic
uuggaauucaacagaaggaaauu

SEQ ID NO: 401082 - RNA, 24 nt, Artificial Sequence
  Synthetic
auuggaauucaacagaaggaaauu

SEQ ID NO: 401083 - RNA, 18 nt, Artificial Sequence
  Synthetic
aggggagcuaaggaaauu

SEQ ID NO: 401084 - RNA, 19 nt, Artificial Sequence
  Synthetic
uaggggagcuaaggaaauu

SEQ ID NO: 401085 - RNA, 20 nt, Artificial Sequence
  Synthetic
cuaggggagcuaaggaaauu

SEQ ID NO: 401086 - RNA, 21 nt, Artificial Sequence
  Synthetic
gcuaggggagcuaaggaaauu

SEQ ID NO: 401087 - RNA, 22 nt, Artificial Sequence
  Synthetic
agcuaggggagcuaaggaaauu

SEQ ID NO: 401088 - RNA, 23 nt, Artificial Sequence
  Synthetic
uagcuaggggagcuaaggaaauu

SEQ ID NO: 401089 - RNA, 24 nt, Artificial Sequence
  Synthetic
cuagcuaggggagcuaaggaaauu

SEQ ID NO: 401090 - RNA, 18 nt, Artificial Sequence
  Synthetic
uuuccaacacaugaaauu

SEQ ID NO: 401091 - RNA, 19 nt, Artificial Sequence
  Synthetic
guuuccaacacaugaaauu

SEQ ID NO: 401092 - RNA, 20 nt, Artificial Sequence
  Synthetic
aguuuccaacacaugaaauu

SEQ ID NO: 401093 - RNA, 21 nt, Artificial Sequence
  Synthetic
aaguuuccaacacaugaaauu

SEQ ID NO: 401094 - RNA, 22 nt, Artificial Sequence
  Synthetic
uaaguuuccaacacaugaaauu

SEQ ID NO: 401095 - RNA, 23 nt, Artificial Sequence
  Synthetic
uuaaguuuccaacacaugaaauu

SEQ ID NO: 401096 - RNA, 24 nt, Artificial Sequence
  Synthetic
auuaaguuuccaacacaugaaauu

SEQ ID NO: 401097 - RNA, 18 nt, Artificial Sequence
  Synthetic
aggcagaaagaugaaauu

SEQ ID NO: 401098 - RNA, 19 nt, Artificial Sequence
  Synthetic
aaggcagaaagaugaaauu

SEQ ID NO: 401099 - RNA, 20 nt, Artificial Sequence
  Synthetic
gaaggcagaaagaugaaauu

SEQ ID NO: 401100 - RNA, 21 nt, Artificial Sequence
  Synthetic
agaaggcagaaagaugaaauu

SEQ ID NO: 401101 - RNA, 22 nt, Artificial Sequence
  Synthetic
gagaaggcagaaagaugaaauu

SEQ ID NO: 401102 - RNA, 23 nt, Artificial Sequence
  Synthetic
ugagaaggcagaaagaugaaauu

SEQ ID NO: 401103 - RNA, 24 nt, Artificial Sequence
  Synthetic
uugagaaggcagaaagaugaaauu

SEQ ID NO: 401104 - RNA, 18 nt, Artificial Sequence
  Synthetic
uauucccaagcugaaauu

SEQ ID NO: 401105 - RNA, 19 nt, Artificial Sequence
  Synthetic
guauucccaagcugaaauu

SEQ ID NO: 401106 - RNA, 20 nt, Artificial Sequence
  Synthetic
aguauucccaagcugaaauu

SEQ ID NO: 401107 - RNA, 21 nt, Artificial Sequence
  Synthetic
aaguauucccaagcugaaauu

SEQ ID NO: 401108 - RNA, 22 nt, Artificial Sequence
  Synthetic
caaguauucccaagcugaaauu

SEQ ID NO: 401109 - RNA, 23 nt, Artificial Sequence
  Synthetic
gcaaguauucccaagcugaaauu

SEQ ID NO: 401110 - RNA, 24 nt, Artificial Sequence
  Synthetic
agcaaguauucccaagcugaaauu

SEQ ID NO: 401111 - RNA, 18 nt, Artificial Sequence
  Synthetic
cagauaagggcugaaauu

SEQ ID NO: 401112 - RNA, 19 nt, Artificial Sequence
  Synthetic
ucagauaagggcugaaauu

SEQ ID NO: 401113 - RNA, 20 nt, Artificial Sequence
  Synthetic
cucagauaagggcugaaauu

SEQ ID NO: 401114 - RNA, 21 nt, Artificial Sequence
  Synthetic
ccucagauaagggcugaaauu

SEQ ID NO: 401115 - RNA, 22 nt, Artificial Sequence
  Synthetic
accucagauaagggcugaaauu

SEQ ID NO: 401116 - RNA, 23 nt, Artificial Sequence
  Synthetic
uaccucagauaagggcugaaauu

SEQ ID NO: 401117 - RNA, 24 nt, Artificial Sequence
  Synthetic
auaccucagauaagggcugaaauu

SEQ ID NO: 401118 - RNA, 18 nt, Artificial Sequence
  Synthetic
guagcucaugcugaaauu

SEQ ID NO: 401119 - RNA, 19 nt, Artificial Sequence
  Synthetic
aguagcucaugcugaaauu

SEQ ID NO: 401120 - RNA, 20 nt, Artificial Sequence
  Synthetic
caguagcucaugcugaaauu

SEQ ID NO: 401121 - RNA, 21 nt, Artificial Sequence
  Synthetic
ucaguagcucaugcugaaauu

SEQ ID NO: 401122 - RNA, 22 nt, Artificial Sequence
  Synthetic
cucaguagcucaugcugaaauu

SEQ ID NO: 401123 - RNA, 23 nt, Artificial Sequence
  Synthetic
acucaguagcucaugcugaaauu

SEQ ID NO: 401124 - RNA, 24 nt, Artificial Sequence
  Synthetic
uacucaguagcucaugcugaaauu

SEQ ID NO: 401125 - RNA, 18 nt, Artificial Sequence
  Synthetic
ugagguaccucugaaauu

SEQ ID NO: 401126 - RNA, 19 nt, Artificial Sequence
  Synthetic
uugagguaccucugaaauu

SEQ ID NO: 401127 - RNA, 20 nt, Artificial Sequence
  Synthetic
auugagguaccucugaaauu

SEQ ID NO: 401128 - RNA, 21 nt, Artificial Sequence
  Synthetic
aauugagguaccucugaaauu

SEQ ID NO: 401129 - RNA, 22 nt, Artificial Sequence
  Synthetic
aaauugagguaccucugaaauu

SEQ ID NO: 401130 - RNA, 23 nt, Artificial Sequence
  Synthetic
uaaauugagguaccucugaaauu

SEQ ID NO: 401131 - RNA, 24 nt, Artificial Sequence
  Synthetic
uuaaauugagguaccucugaaauu

SEQ ID NO: 401132 - RNA, 18 nt, Artificial Sequence
  Synthetic
uaaucuaaaagugaaauu

SEQ ID NO: 401133 - RNA, 19 nt, Artificial Sequence
  Synthetic
auaaucuaaaagugaaauu

SEQ ID NO: 401134 - RNA, 20 nt, Artificial Sequence
  Synthetic
aauaaucuaaaagugaaauu

SEQ ID NO: 401135 - RNA, 21 nt, Artificial Sequence
  Synthetic
gaauaaucuaaaagugaaauu

SEQ ID NO: 401136 - RNA, 22 nt, Artificial Sequence
  Synthetic
ugaauaaucuaaaagugaaauu

SEQ ID NO: 401137 - RNA, 23 nt, Artificial Sequence
  Synthetic
augaauaaucuaaaagugaaauu

SEQ ID NO: 401138 - RNA, 24 nt, Artificial Sequence
  Synthetic
aaugaauaaucuaaaagugaaauu

SEQ ID NO: 401139 - RNA, 18 nt, Artificial Sequence
  Synthetic
ucaauaccucgugaaauu

SEQ ID NO: 401140 - RNA, 19 nt, Artificial Sequence
  Synthetic
uucaauaccucgugaaauu

SEQ ID NO: 401141 - RNA, 20 nt, Artificial Sequence
  Synthetic
auucaauaccucgugaaauu

SEQ ID NO: 401142 - RNA, 21 nt, Artificial Sequence
  Synthetic
uauucaauaccucgugaaauu

SEQ ID NO: 401143 - RNA, 22 nt, Artificial Sequence
  Synthetic
uuauucaauaccucgugaaauu

SEQ ID NO: 401144 - RNA, 23 nt, Artificial Sequence
  Synthetic
uuuauucaauaccucgugaaauu

SEQ ID NO: 401145 - RNA, 24 nt, Artificial Sequence
  Synthetic
uuuuauucaauaccucgugaaauu

SEQ ID NO: 401146 - RNA, 18 nt, Artificial Sequence
  Synthetic
cauaguuuaugugaaauu

SEQ ID NO: 401147 - RNA, 19 nt, Artificial Sequence
  Synthetic
ucauaguuuaugugaaauu

SEQ ID NO: 401148 - RNA, 20 nt, Artificial Sequence
  Synthetic
uucauaguuuaugugaaauu

SEQ ID NO: 401149 - RNA, 21 nt, Artificial Sequence
  Synthetic
auucauaguuuaugugaaauu

SEQ ID NO: 401150 - RNA, 22 nt, Artificial Sequence
  Synthetic
gauucauaguuuaugugaaauu

SEQ ID NO: 401151 - RNA, 23 nt, Artificial Sequence
  Synthetic
ggauucauaguuuaugugaaauu

SEQ ID NO: 401152 - RNA, 24 nt, Artificial Sequence
  Synthetic
uggauucauaguuuaugugaaauu

SEQ ID NO: 401153 - RNA, 18 nt, Artificial Sequence
  Synthetic
ucgucucugugugaaauu

SEQ ID NO: 401154 - RNA, 19 nt, Artificial Sequence
  Synthetic
uucgucucugugugaaauu

SEQ ID NO: 401155 - RNA, 20 nt, Artificial Sequence
  Synthetic
auucgucucugugugaaauu

SEQ ID NO: 401156 - RNA, 21 nt, Artificial Sequence
  Synthetic
cauucgucucugugugaaauu

SEQ ID NO: 401157 - RNA, 22 nt, Artificial Sequence
  Synthetic
gcauucgucucugugugaaauu

SEQ ID NO: 401158 - RNA, 23 nt, Artificial Sequence
  Synthetic
agcauucgucucugugugaaauu

SEQ ID NO: 401159 - RNA, 24 nt, Artificial Sequence
  Synthetic
uagcauucgucucugugugaaauu

SEQ ID NO: 401160 - RNA, 18 nt, Artificial Sequence
  Synthetic
ugauucuagauugaaauu

SEQ ID NO: 401161 - RNA, 19 nt, Artificial Sequence
  Synthetic
gugauucuagauugaaauu

SEQ ID NO: 401162 - RNA, 20 nt, Artificial Sequence
  Synthetic
ugugauucuagauugaaauu

SEQ ID NO: 401163 - RNA, 21 nt, Artificial Sequence
  Synthetic
gugugauucuagauugaaauu

SEQ ID NO: 401164 - RNA, 22 nt, Artificial Sequence
  Synthetic
ugugugauucuagauugaaauu

SEQ ID NO: 401165 - RNA, 23 nt, Artificial Sequence
  Synthetic
gugugugauucuagauugaaauu

SEQ ID NO: 401166 - RNA, 24 nt, Artificial Sequence
  Synthetic
agugugugauucuagauugaaauu

SEQ ID NO: 401167 - RNA, 18 nt, Artificial Sequence
  Synthetic
gaaucucugcuugaaauu

SEQ ID NO: 401168 - RNA, 19 nt, Artificial Sequence
  Synthetic
ugaaucucugcuugaaauu

SEQ ID NO: 401169 - RNA, 20 nt, Artificial Sequence
  Synthetic
uugaaucucugcuugaaauu

SEQ ID NO: 401170 - RNA, 21 nt, Artificial Sequence
  Synthetic
auugaaucucugcuugaaauu

SEQ ID NO: 401171 - RNA, 22 nt, Artificial Sequence
  Synthetic
uauugaaucucugcuugaaauu

SEQ ID NO: 401172 - RNA, 23 nt, Artificial Sequence
  Synthetic
guauugaaucucugcuugaaauu

SEQ ID NO: 401173 - RNA, 24 nt, Artificial Sequence
  Synthetic
uguauugaaucucugcuugaaauu

SEQ ID NO: 401174 - RNA, 18 nt, Artificial Sequence
  Synthetic
acaacagccuuugaaauu

SEQ ID NO: 401175 - RNA, 19 nt, Artificial Sequence
  Synthetic
gacaacagccuuugaaauu

SEQ ID NO: 401176 - RNA, 20 nt, Artificial Sequence
  Synthetic
ggacaacagccuuugaaauu

SEQ ID NO: 401177 - RNA, 21 nt, Artificial Sequence
  Synthetic
gggacaacagccuuugaaauu

SEQ ID NO: 401178 - RNA, 22 nt, Artificial Sequence
  Synthetic
agggacaacagccuuugaaauu

SEQ ID NO: 401179 - RNA, 23 nt, Artificial Sequence
  Synthetic
aagggacaacagccuuugaaauu

SEQ ID NO: 401180 - RNA, 24 nt, Artificial Sequence
  Synthetic
aaagggacaacagccuuugaaauu

SEQ ID NO: 401181 - RNA, 18 nt, Artificial Sequence
  Synthetic
ucaagauucuuugaaauu

SEQ ID NO: 401182 - RNA, 19 nt, Artificial Sequence
  Synthetic
uucaagauucuuugaaauu

SEQ ID NO: 401183 - RNA, 20 nt, Artificial Sequence
  Synthetic
uuucaagauucuuugaaauu

SEQ ID NO: 401184 - RNA, 21 nt, Artificial Sequence
  Synthetic
auuucaagauucuuugaaauu

SEQ ID NO: 401185 - RNA, 22 nt, Artificial Sequence
  Synthetic
uauuucaagauucuuugaaauu

SEQ ID NO: 401186 - RNA, 23 nt, Artificial Sequence
  Synthetic
uuauuucaagauucuuugaaauu

SEQ ID NO: 401187 - RNA, 24 nt, Artificial Sequence
  Synthetic
guuauuucaagauucuuugaaauu

SEQ ID NO: 401188 - RNA, 18 nt, Artificial Sequence
  Synthetic
gguaguugacaauaaauu

SEQ ID NO: 401189 - RNA, 19 nt, Artificial Sequence
  Synthetic
agguaguugacaauaaauu

SEQ ID NO: 401190 - RNA, 20 nt, Artificial Sequence
  Synthetic
aagguaguugacaauaaauu

SEQ ID NO: 401191 - RNA, 21 nt, Artificial Sequence
  Synthetic
gaagguaguugacaauaaauu

SEQ ID NO: 401192 - RNA, 22 nt, Artificial Sequence
  Synthetic
ggaagguaguugacaauaaauu

SEQ ID NO: 401193 - RNA, 23 nt, Artificial Sequence
  Synthetic
aggaagguaguugacaauaaauu

SEQ ID NO: 401194 - RNA, 24 nt, Artificial Sequence
  Synthetic
caggaagguaguugacaauaaauu

SEQ ID NO: 401195 - RNA, 18 nt, Artificial Sequence
  Synthetic
aaaaauccagcauaaauu

SEQ ID NO: 401196 - RNA, 19 nt, Artificial Sequence
  Synthetic
caaaaauccagcauaaauu

SEQ ID NO: 401197 - RNA, 20 nt, Artificial Sequence
  Synthetic
acaaaaauccagcauaaauu

SEQ ID NO: 401198 - RNA, 21 nt, Artificial Sequence
  Synthetic
aacaaaaauccagcauaaauu

SEQ ID NO: 401199 - RNA, 22 nt, Artificial Sequence
  Synthetic
uaacaaaaauccagcauaaauu

SEQ ID NO: 401200 - RNA, 23 nt, Artificial Sequence
  Synthetic
auaacaaaaauccagcauaaauu

SEQ ID NO: 401201 - RNA, 24 nt, Artificial Sequence
  Synthetic
uauaacaaaaauccagcauaaauu

SEQ ID NO: 401202 - RNA, 18 nt, Artificial Sequence
  Synthetic
auguaauuggcauaaauu

SEQ ID NO: 401203 - RNA, 19 nt, Artificial Sequence
  Synthetic
aauguaauuggcauaaauu

SEQ ID NO: 401204 - RNA, 20 nt, Artificial Sequence
  Synthetic
aaauguaauuggcauaaauu

SEQ ID NO: 401205 - RNA, 21 nt, Artificial Sequence
  Synthetic
uaaauguaauuggcauaaauu

SEQ ID NO: 401206 - RNA, 22 nt, Artificial Sequence
  Synthetic
cuaaauguaauuggcauaaauu

SEQ ID NO: 401207 - RNA, 23 nt, Artificial Sequence
  Synthetic
ucuaaauguaauuggcauaaauu

SEQ ID NO: 401208 - RNA, 24 nt, Artificial Sequence
  Synthetic
uucuaaauguaauuggcauaaauu

SEQ ID NO: 401209 - RNA, 18 nt, Artificial Sequence
  Synthetic
uaaaggaaaauauaaauu

SEQ ID NO: 401210 - RNA, 19 nt, Artificial Sequence
  Synthetic
guaaaggaaaauauaaauu

SEQ ID NO: 401211 - RNA, 20 nt, Artificial Sequence
  Synthetic
uguaaaggaaaauauaaauu

SEQ ID NO: 401212 - RNA, 21 nt, Artificial Sequence
  Synthetic
auguaaaggaaaauauaaauu

SEQ ID NO: 401213 - RNA, 22 nt, Artificial Sequence
  Synthetic
cauguaaaggaaaauauaaauu

SEQ ID NO: 401214 - RNA, 23 nt, Artificial Sequence
  Synthetic
gcauguaaaggaaaauauaaauu

SEQ ID NO: 401215 - RNA, 24 nt, Artificial Sequence
  Synthetic
ggcauguaaaggaaaauauaaauu

SEQ ID NO: 401216 - RNA, 18 nt, Artificial Sequence
  Synthetic
guacccaaacuauaaauu

SEQ ID NO: 401217 - RNA, 19 nt, Artificial Sequence
  Synthetic
uguacccaaacuauaaauu

SEQ ID NO: 401218 - RNA, 20 nt, Artificial Sequence
  Synthetic
auguacccaaacuauaaauu

SEQ ID NO: 401219 - RNA, 21 nt, Artificial Sequence
  Synthetic
cauguacccaaacuauaaauu

SEQ ID NO: 401220 - RNA, 22 nt, Artificial Sequence
  Synthetic
ucauguacccaaacuauaaauu

SEQ ID NO: 401221 - RNA, 23 nt, Artificial Sequence
  Synthetic
uucauguacccaaacuauaaauu

SEQ ID NO: 401222 - RNA, 24 nt, Artificial Sequence
  Synthetic
auucauguacccaaacuauaaauu

SEQ ID NO: 401223 - RNA, 18 nt, Artificial Sequence
  Synthetic
gacaccaucguauaaauu

SEQ ID NO: 401224 - RNA, 19 nt, Artificial Sequence
  Synthetic
ugacaccaucguauaaauu

SEQ ID NO: 401225 - RNA, 20 nt, Artificial Sequence
  Synthetic
gugacaccaucguauaaauu

SEQ ID NO: 401226 - RNA, 21 nt, Artificial Sequence
  Synthetic
agugacaccaucguauaaauu

SEQ ID NO: 401227 - RNA, 22 nt, Artificial Sequence
  Synthetic
aagugacaccaucguauaaauu

SEQ ID NO: 401228 - RNA, 23 nt, Artificial Sequence
  Synthetic
uaagugacaccaucguauaaauu

SEQ ID NO: 401229 - RNA, 24 nt, Artificial Sequence
  Synthetic
uuaagugacaccaucguauaaauu

SEQ ID NO: 401230 - RNA, 18 nt, Artificial Sequence
  Synthetic
gaugacaauguauaaauu

SEQ ID NO: 401231 - RNA, 19 nt, Artificial Sequence
  Synthetic
ugaugacaauguauaaauu

SEQ ID NO: 401232 - RNA, 20 nt, Artificial Sequence
  Synthetic
cugaugacaauguauaaauu

SEQ ID NO: 401233 - RNA, 21 nt, Artificial Sequence
  Synthetic
acugaugacaauguauaaauu

SEQ ID NO: 401234 - RNA, 22 nt, Artificial Sequence
  Synthetic
cacugaugacaauguauaaauu

SEQ ID NO: 401235 - RNA, 23 nt, Artificial Sequence
  Synthetic
acacugaugacaauguauaaauu

SEQ ID NO: 401236 - RNA, 24 nt, Artificial Sequence
  Synthetic
cacacugaugacaauguauaaauu

SEQ ID NO: 401237 - RNA, 18 nt, Artificial Sequence
  Synthetic
cagucuuaguuauaaauu

SEQ ID NO: 401238 - RNA, 19 nt, Artificial Sequence
  Synthetic
ccagucuuaguuauaaauu

SEQ ID NO: 401239 - RNA, 20 nt, Artificial Sequence
  Synthetic
uccagucuuaguuauaaauu

SEQ ID NO: 401240 - RNA, 21 nt, Artificial Sequence
  Synthetic
auccagucuuaguuauaaauu

SEQ ID NO: 401241 - RNA, 22 nt, Artificial Sequence
  Synthetic
gauccagucuuaguuauaaauu

SEQ ID NO: 401242 - RNA, 23 nt, Artificial Sequence
  Synthetic
agauccagucuuaguuauaaauu

SEQ ID NO: 401243 - RNA, 24 nt, Artificial Sequence
  Synthetic
aagauccagucuuaguuauaaauu

SEQ ID NO: 401244 - RNA, 18 nt, Artificial Sequence
  Synthetic
aaugcacauuuauaaauu

SEQ ID NO: 401245 - RNA, 19 nt, Artificial Sequence
  Synthetic
gaaugcacauuuauaaauu

SEQ ID NO: 401246 - RNA, 20 nt, Artificial Sequence
  Synthetic
ggaaugcacauuuauaaauu

SEQ ID NO: 401247 - RNA, 21 nt, Artificial Sequence
  Synthetic
gggaaugcacauuuauaaauu

SEQ ID NO: 401248 - RNA, 22 nt, Artificial Sequence
  Synthetic
ggggaaugcacauuuauaaauu

SEQ ID NO: 401249 - RNA, 23 nt, Artificial Sequence
  Synthetic
uggggaaugcacauuuauaaauu

SEQ ID NO: 401250 - RNA, 24 nt, Artificial Sequence
  Synthetic
cuggggaaugcacauuuauaaauu

SEQ ID NO: 401251 - RNA, 18 nt, Artificial Sequence
  Synthetic
uaagcggccaacuaaauu

SEQ ID NO: 401252 - RNA, 19 nt, Artificial Sequence
  Synthetic
uuaagcggccaacuaaauu

SEQ ID NO: 401253 - RNA, 20 nt, Artificial Sequence
  Synthetic
auuaagcggccaacuaaauu

SEQ ID NO: 401254 - RNA, 21 nt, Artificial Sequence
  Synthetic
aauuaagcggccaacuaaauu

SEQ ID NO: 401255 - RNA, 22 nt, Artificial Sequence
  Synthetic
aaauuaagcggccaacuaaauu

SEQ ID NO: 401256 - RNA, 23 nt, Artificial Sequence
  Synthetic
gaaauuaagcggccaacuaaauu

SEQ ID NO: 401257 - RNA, 24 nt, Artificial Sequence
  Synthetic
ggaaauuaagcggccaacuaaauu

SEQ ID NO: 401258 - RNA, 18 nt, Artificial Sequence
  Synthetic
acacuucuguacuaaauu

SEQ ID NO: 401259 - RNA, 19 nt, Artificial Sequence
  Synthetic
cacacuucuguacuaaauu

SEQ ID NO: 401260 - RNA, 20 nt, Artificial Sequence
  Synthetic
acacacuucuguacuaaauu

SEQ ID NO: 401261 - RNA, 21 nt, Artificial Sequence
  Synthetic
cacacacuucuguacuaaauu

SEQ ID NO: 401262 - RNA, 22 nt, Artificial Sequence
  Synthetic
acacacacuucuguacuaaauu

SEQ ID NO: 401263 - RNA, 23 nt, Artificial Sequence
  Synthetic
uacacacacuucuguacuaaauu

SEQ ID NO: 401264 - RNA, 24 nt, Artificial Sequence
  Synthetic
auacacacacuucuguacuaaauu

SEQ ID NO: 401265 - RNA, 18 nt, Artificial Sequence
  Synthetic
aaguggaauuccuaaauu

SEQ ID NO: 401266 - RNA, 19 nt, Artificial Sequence
  Synthetic
gaaguggaauuccuaaauu

SEQ ID NO: 401267 - RNA, 20 nt, Artificial Sequence
  Synthetic
ggaaguggaauuccuaaauu

SEQ ID NO: 401268 - RNA, 21 nt, Artificial Sequence
  Synthetic
gggaaguggaauuccuaaauu

SEQ ID NO: 401269 - RNA, 22 nt, Artificial Sequence
  Synthetic
ugggaaguggaauuccuaaauu

SEQ ID NO: 401270 - RNA, 23 nt, Artificial Sequence
  Synthetic
gugggaaguggaauuccuaaauu

SEQ ID NO: 401271 - RNA, 24 nt, Artificial Sequence
  Synthetic
agugggaaguggaauuccuaaauu

SEQ ID NO: 401272 - RNA, 18 nt, Artificial Sequence
  Synthetic
uuuuuaagcugcuaaauu

SEQ ID NO: 401273 - RNA, 19 nt, Artificial Sequence
  Synthetic
guuuuuaagcugcuaaauu

SEQ ID NO: 401274 - RNA, 20 nt, Artificial Sequence
  Synthetic
uguuuuuaagcugcuaaauu

SEQ ID NO: 401275 - RNA, 21 nt, Artificial Sequence
  Synthetic
uuguuuuuaagcugcuaaauu

SEQ ID NO: 401276 - RNA, 22 nt, Artificial Sequence
  Synthetic
uuuguuuuuaagcugcuaaauu

SEQ ID NO: 401277 - RNA, 23 nt, Artificial Sequence
  Synthetic
uuuuguuuuuaagcugcuaaauu

SEQ ID NO: 401278 - RNA, 24 nt, Artificial Sequence
  Synthetic
uuuuuguuuuuaagcugcuaaauu

SEQ ID NO: 401279 - RNA, 18 nt, Artificial Sequence
  Synthetic
gggaacauguaguaaauu

SEQ ID NO: 401280 - RNA, 19 nt, Artificial Sequence
  Synthetic
ugggaacauguaguaaauu

SEQ ID NO: 401281 - RNA, 20 nt, Artificial Sequence
  Synthetic
augggaacauguaguaaauu

SEQ ID NO: 401282 - RNA, 21 nt, Artificial Sequence
  Synthetic
aaugggaacauguaguaaauu

SEQ ID NO: 401283 - RNA, 22 nt, Artificial Sequence
  Synthetic
aaaugggaacauguaguaaauu

SEQ ID NO: 401284 - RNA, 23 nt, Artificial Sequence
  Synthetic
aaaaugggaacauguaguaaauu

SEQ ID NO: 401285 - RNA, 24 nt, Artificial Sequence
  Synthetic
aaaaaugggaacauguaguaaauu

SEQ ID NO: 401286 - RNA, 18 nt, Artificial Sequence
  Synthetic
caguaacagauguaaauu

SEQ ID NO: 401287 - RNA, 19 nt, Artificial Sequence
  Synthetic
ucaguaacagauguaaauu

SEQ ID NO: 401288 - RNA, 20 nt, Artificial Sequence
  Synthetic
aucaguaacagauguaaauu

SEQ ID NO: 401289 - RNA, 21 nt, Artificial Sequence
  Synthetic
aaucaguaacagauguaaauu

SEQ ID NO: 401290 - RNA, 22 nt, Artificial Sequence
  Synthetic
aaaucaguaacagauguaaauu

SEQ ID NO: 401291 - RNA, 23 nt, Artificial Sequence
  Synthetic
aaaaucaguaacagauguaaauu

SEQ ID NO: 401292 - RNA, 24 nt, Artificial Sequence
  Synthetic
aaaaaucaguaacagauguaaauu

SEQ ID NO: 401293 - RNA, 18 nt, Artificial Sequence
  Synthetic
auucucaaaguguaaauu

SEQ ID NO: 401294 - RNA, 19 nt, Artificial Sequence
  Synthetic
aauucucaaaguguaaauu

SEQ ID NO: 401295 - RNA, 20 nt, Artificial Sequence
  Synthetic
aaauucucaaaguguaaauu

SEQ ID NO: 401296 - RNA, 21 nt, Artificial Sequence
  Synthetic
aaaauucucaaaguguaaauu

SEQ ID NO: 401297 - RNA, 22 nt, Artificial Sequence
  Synthetic
gaaaauucucaaaguguaaauu

SEQ ID NO: 401298 - RNA, 23 nt, Artificial Sequence
  Synthetic
ggaaaauucucaaaguguaaauu

SEQ ID NO: 401299 - RNA, 24 nt, Artificial Sequence
  Synthetic
uggaaaauucucaaaguguaaauu

SEQ ID NO: 401300 - RNA, 18 nt, Artificial Sequence
  Synthetic
cuuguaucacauuaaauu

SEQ ID NO: 401301 - RNA, 19 nt, Artificial Sequence
  Synthetic
gcuuguaucacauuaaauu

SEQ ID NO: 401302 - RNA, 20 nt, Artificial Sequence
  Synthetic
ggcuuguaucacauuaaauu

SEQ ID NO: 401303 - RNA, 21 nt, Artificial Sequence
  Synthetic
uggcuuguaucacauuaaauu

SEQ ID NO: 401304 - RNA, 22 nt, Artificial Sequence
  Synthetic
cuggcuuguaucacauuaaauu

SEQ ID NO: 401305 - RNA, 23 nt, Artificial Sequence
  Synthetic
ccuggcuuguaucacauuaaauu

SEQ ID NO: 401306 - RNA, 24 nt, Artificial Sequence
  Synthetic
accuggcuuguaucacauuaaauu

SEQ ID NO: 401307 - RNA, 18 nt, Artificial Sequence
  Synthetic
auggagucacauuaaauu

SEQ ID NO: 401308 - RNA, 19 nt, Artificial Sequence
  Synthetic
uauggagucacauuaaauu

SEQ ID NO: 401309 - RNA, 20 nt, Artificial Sequence
  Synthetic
cuauggagucacauuaaauu

SEQ ID NO: 401310 - RNA, 21 nt, Artificial Sequence
  Synthetic
acuauggagucacauuaaauu

SEQ ID NO: 401311 - RNA, 22 nt, Artificial Sequence
  Synthetic
cacuauggagucacauuaaauu

SEQ ID NO: 401312 - RNA, 23 nt, Artificial Sequence
  Synthetic
ucacuauggagucacauuaaauu

SEQ ID NO: 401313 - RNA, 24 nt, Artificial Sequence
  Synthetic
aucacuauggagucacauuaaauu

SEQ ID NO: 401314 - RNA, 18 nt, Artificial Sequence
  Synthetic
aauguuucucauuaaauu

SEQ ID NO: 401315 - RNA, 19 nt, Artificial Sequence
  Synthetic
aaauguuucucauuaaauu

SEQ ID NO: 401316 - RNA, 20 nt, Artificial Sequence
  Synthetic
gaaauguuucucauuaaauu

SEQ ID NO: 401317 - RNA, 21 nt, Artificial Sequence
  Synthetic
ugaaauguuucucauuaaauu

SEQ ID NO: 401318 - RNA, 22 nt, Artificial Sequence
  Synthetic
uugaaauguuucucauuaaauu

SEQ ID NO: 401319 - RNA, 23 nt, Artificial Sequence
  Synthetic
uuugaaauguuucucauuaaauu

SEQ ID NO: 401320 - RNA, 24 nt, Artificial Sequence
  Synthetic
uuuugaaauguuucucauuaaauu

SEQ ID NO: 401321 - RNA, 18 nt, Artificial Sequence
  Synthetic
acugaugauaguuaaauu

SEQ ID NO: 401322 - RNA, 19 nt, Artificial Sequence
  Synthetic
cacugaugauaguuaaauu

SEQ ID NO: 401323 - RNA, 20 nt, Artificial Sequence
  Synthetic
gcacugaugauaguuaaauu

SEQ ID NO: 401324 - RNA, 21 nt, Artificial Sequence
  Synthetic
agcacugaugauaguuaaauu

SEQ ID NO: 401325 - RNA, 22 nt, Artificial Sequence
  Synthetic
gagcacugaugauaguuaaauu

SEQ ID NO: 401326 - RNA, 23 nt, Artificial Sequence
  Synthetic
agagcacugaugauaguuaaauu

SEQ ID NO: 401327 - RNA, 24 nt, Artificial Sequence
  Synthetic
aagagcacugaugauaguuaaauu

SEQ ID NO: 401328 - RNA, 18 nt, Artificial Sequence
  Synthetic
uuuucuagguguuaaauu

SEQ ID NO: 401329 - RNA, 19 nt, Artificial Sequence
  Synthetic
auuuucuagguguuaaauu

SEQ ID NO: 401330 - RNA, 20 nt, Artificial Sequence
  Synthetic
gauuuucuagguguuaaauu

SEQ ID NO: 401331 - RNA, 21 nt, Artificial Sequence
  Synthetic
ugauuuucuagguguuaaauu

SEQ ID NO: 401332 - RNA, 22 nt, Artificial Sequence
  Synthetic
cugauuuucuagguguuaaauu

SEQ ID NO: 401333 - RNA, 23 nt, Artificial Sequence
  Synthetic
gcugauuuucuagguguuaaauu

SEQ ID NO: 401334 - RNA, 24 nt, Artificial Sequence
  Synthetic
agcugauuuucuagguguuaaauu

SEQ ID NO: 401335 - RNA, 18 nt, Artificial Sequence
  Synthetic
gacuucaacauuuaaauu

SEQ ID NO: 401336 - RNA, 19 nt, Artificial Sequence
  Synthetic
ggacuucaacauuuaaauu

SEQ ID NO: 401337 - RNA, 20 nt, Artificial Sequence
  Synthetic
aggacuucaacauuuaaauu

SEQ ID NO: 401338 - RNA, 21 nt, Artificial Sequence
  Synthetic
uaggacuucaacauuuaaauu

SEQ ID NO: 401339 - RNA, 22 nt, Artificial Sequence
  Synthetic
uuaggacuucaacauuuaaauu

SEQ ID NO: 401340 - RNA, 23 nt, Artificial Sequence
  Synthetic
guuaggacuucaacauuuaaauu

SEQ ID NO: 401341 - RNA, 24 nt, Artificial Sequence
  Synthetic
gguuaggacuucaacauuuaaauu

SEQ ID NO: 401342 - RNA, 18 nt, Artificial Sequence
  Synthetic
aagguagucauuuaaauu

SEQ ID NO: 401343 - RNA, 19 nt, Artificial Sequence
  Synthetic
aaagguagucauuuaaauu

SEQ ID NO: 401344 - RNA, 20 nt, Artificial Sequence
  Synthetic
aaaagguagucauuuaaauu

SEQ ID NO: 401345 - RNA, 21 nt, Artificial Sequence
  Synthetic
caaaagguagucauuuaaauu

SEQ ID NO: 401346 - RNA, 22 nt, Artificial Sequence
  Synthetic
acaaaagguagucauuuaaauu

SEQ ID NO: 401347 - RNA, 23 nt, Artificial Sequence
  Synthetic
aacaaaagguagucauuuaaauu

SEQ ID NO: 401348 - RNA, 24 nt, Artificial Sequence
  Synthetic
aaacaaaagguagucauuuaaauu

SEQ ID NO: 401349 - RNA, 18 nt, Artificial Sequence
  Synthetic
agguuggacguuuaaauu

SEQ ID NO: 401350 - RNA, 19 nt, Artificial Sequence
  Synthetic
cagguuggacguuuaaauu

SEQ ID NO: 401351 - RNA, 20 nt, Artificial Sequence
  Synthetic
ccagguuggacguuuaaauu

SEQ ID NO: 401352 - RNA, 21 nt, Artificial Sequence
  Synthetic
uccagguuggacguuuaaauu

SEQ ID NO: 401353 - RNA, 22 nt, Artificial Sequence
  Synthetic
guccagguuggacguuuaaauu

SEQ ID NO: 401354 - RNA, 23 nt, Artificial Sequence
  Synthetic
gguccagguuggacguuuaaauu

SEQ ID NO: 401355 - RNA, 24 nt, Artificial Sequence
  Synthetic
agguccagguuggacguuuaaauu

SEQ ID NO: 401356 - RNA, 18 nt, Artificial Sequence
  Synthetic
auaauucccuuuuaaauu

SEQ ID NO: 401357 - RNA, 19 nt, Artificial Sequence
  Synthetic
aauaauucccuuuuaaauu

SEQ ID NO: 401358 - RNA, 20 nt, Artificial Sequence
  Synthetic
uaauaauucccuuuuaaauu

SEQ ID NO: 401359 - RNA, 21 nt, Artificial Sequence
  Synthetic
guaauaauucccuuuuaaauu

SEQ ID NO: 401360 - RNA, 22 nt, Artificial Sequence
  Synthetic
uguaauaauucccuuuuaaauu

SEQ ID NO: 401361 - RNA, 23 nt, Artificial Sequence
  Synthetic
auguaauaauucccuuuuaaauu

SEQ ID NO: 401362 - RNA, 24 nt, Artificial Sequence
  Synthetic
uauguaauaauucccuuuuaaauu

SEQ ID NO: 401363 - RNA, 18 nt, Artificial Sequence
  Synthetic
guauuucauuuuuaaauu

SEQ ID NO: 401364 - RNA, 19 nt, Artificial Sequence
  Synthetic
uguauuucauuuuuaaauu

SEQ ID NO: 401365 - RNA, 20 nt, Artificial Sequence
  Synthetic
auguauuucauuuuuaaauu

SEQ ID NO: 401366 - RNA, 21 nt, Artificial Sequence
  Synthetic
aauguauuucauuuuuaaauu

SEQ ID NO: 401367 - RNA, 22 nt, Artificial Sequence
  Synthetic
aaauguauuucauuuuuaaauu

SEQ ID NO: 401368 - RNA, 23 nt, Artificial Sequence
  Synthetic
uaaauguauuucauuuuuaaauu

SEQ ID NO: 401369 - RNA, 24 nt, Artificial Sequence
  Synthetic
auaaauguauuucauuuuuaaauu

SEQ ID NO: 401370 - RNA, 18 nt, Artificial Sequence
  Synthetic
aagauauauuuuuaaauu

SEQ ID NO: 401371 - RNA, 19 nt, Artificial Sequence
  Synthetic
caagauauauuuuuaaauu

SEQ ID NO: 401372 - RNA, 20 nt, Artificial Sequence
  Synthetic
acaagauauauuuuuaaauu

SEQ ID NO: 401373 - RNA, 21 nt, Artificial Sequence
  Synthetic
cacaagauauauuuuuaaauu

SEQ ID NO: 401374 - RNA, 22 nt, Artificial Sequence
  Synthetic
acacaagauauauuuuuaaauu

SEQ ID NO: 401375 - RNA, 23 nt, Artificial Sequence
  Synthetic
gacacaagauauauuuuuaaauu

SEQ ID NO: 401376 - RNA, 24 nt, Artificial Sequence
  Synthetic
ugacacaagauauauuuuuaaauu

SEQ ID NO: 401377 - RNA, 18 nt, Artificial Sequence
  Synthetic
uaaaucuaaaaaacaauu

SEQ ID NO: 401378 - RNA, 19 nt, Artificial Sequence
  Synthetic
guaaaucuaaaaaacaauu

SEQ ID NO: 401379 - RNA, 20 nt, Artificial Sequence
  Synthetic
cguaaaucuaaaaaacaauu

SEQ ID NO: 401380 - RNA, 21 nt, Artificial Sequence
  Synthetic
gcguaaaucuaaaaaacaauu

SEQ ID NO: 401381 - RNA, 22 nt, Artificial Sequence
  Synthetic
agcguaaaucuaaaaaacaauu

SEQ ID NO: 401382 - RNA, 23 nt, Artificial Sequence
  Synthetic
aagcguaaaucuaaaaaacaauu

SEQ ID NO: 401383 - RNA, 24 nt, Artificial Sequence
  Synthetic
aaagcguaaaucuaaaaaacaauu

SEQ ID NO: 401384 - RNA, 18 nt, Artificial Sequence
  Synthetic
caaauagccaaaacaauu

SEQ ID NO: 401385 - RNA, 19 nt, Artificial Sequence
  Synthetic
ccaaauagccaaaacaauu

SEQ ID NO: 401386 - RNA, 20 nt, Artificial Sequence
  Synthetic
accaaauagccaaaacaauu

SEQ ID NO: 401387 - RNA, 21 nt, Artificial Sequence
  Synthetic
uaccaaauagccaaaacaauu

SEQ ID NO: 401388 - RNA, 22 nt, Artificial Sequence
  Synthetic
guaccaaauagccaaaacaauu

SEQ ID NO: 401389 - RNA, 23 nt, Artificial Sequence
  Synthetic
uguaccaaauagccaaaacaauu

SEQ ID NO: 401390 - RNA, 24 nt, Artificial Sequence
  Synthetic
auguaccaaauagccaaaacaauu

SEQ ID NO: 401391 - RNA, 18 nt, Artificial Sequence
  Synthetic
ugagaaaggaaaacaauu

SEQ ID NO: 401392 - RNA, 19 nt, Artificial Sequence
  Synthetic
cugagaaaggaaaacaauu

SEQ ID NO: 401393 - RNA, 20 nt, Artificial Sequence
  Synthetic
acugagaaaggaaaacaauu

SEQ ID NO: 401394 - RNA, 21 nt, Artificial Sequence
  Synthetic
aacugagaaaggaaaacaauu

SEQ ID NO: 401395 - RNA, 22 nt, Artificial Sequence
  Synthetic
aaacugagaaaggaaaacaauu

SEQ ID NO: 401396 - RNA, 23 nt, Artificial Sequence
  Synthetic
caaacugagaaaggaaaacaauu

SEQ ID NO: 401397 - RNA, 24 nt, Artificial Sequence
  Synthetic
acaaacugagaaaggaaaacaauu

SEQ ID NO: 401398 - RNA, 18 nt, Artificial Sequence
  Synthetic
gcauuuuggaaaacaauu

SEQ ID NO: 401399 - RNA, 19 nt, Artificial Sequence
  Synthetic
agcauuuuggaaaacaauu

SEQ ID NO: 401400 - RNA, 20 nt, Artificial Sequence
  Synthetic
aagcauuuuggaaaacaauu

SEQ ID NO: 401401 - RNA, 21 nt, Artificial Sequence
  Synthetic
aaagcauuuuggaaaacaauu

SEQ ID NO: 401402 - RNA, 22 nt, Artificial Sequence
  Synthetic
aaaagcauuuuggaaaacaauu

SEQ ID NO: 401403 - RNA, 23 nt, Artificial Sequence
  Synthetic
aaaaagcauuuuggaaaacaauu

SEQ ID NO: 401404 - RNA, 24 nt, Artificial Sequence
  Synthetic
aaaaaagcauuuuggaaaacaauu

SEQ ID NO: 401405 - RNA, 18 nt, Artificial Sequence
  Synthetic
aaaacaaauaaaacaauu

SEQ ID NO: 401406 - RNA, 19 nt, Artificial Sequence
  Synthetic
aaaaacaaauaaaacaauu

SEQ ID NO: 401407 - RNA, 20 nt, Artificial Sequence
  Synthetic
aaaaaacaaauaaaacaauu

SEQ ID NO: 401408 - RNA, 21 nt, Artificial Sequence
  Synthetic
caaaaaacaaauaaaacaauu

SEQ ID NO: 401409 - RNA, 22 nt, Artificial Sequence
  Synthetic
ucaaaaaacaaauaaaacaauu

SEQ ID NO: 401410 - RNA, 23 nt, Artificial Sequence
  Synthetic
uucaaaaaacaaauaaaacaauu

SEQ ID NO: 401411 - RNA, 24 nt, Artificial Sequence
  Synthetic
uuucaaaaaacaaauaaaacaauu

SEQ ID NO: 401412 - RNA, 18 nt, Artificial Sequence
  Synthetic
gcaaagcaaaacacaauu

SEQ ID NO: 401413 - RNA, 19 nt, Artificial Sequence
  Synthetic
ugcaaagcaaaacacaauu

SEQ ID NO: 401414 - RNA, 20 nt, Artificial Sequence
  Synthetic
uugcaaagcaaaacacaauu

SEQ ID NO: 401415 - RNA, 21 nt, Artificial Sequence
  Synthetic
uuugcaaagcaaaacacaauu

SEQ ID NO: 401416 - RNA, 22 nt, Artificial Sequence
  Synthetic
auuugcaaagcaaaacacaauu

SEQ ID NO: 401417 - RNA, 23 nt, Artificial Sequence
  Synthetic
cauuugcaaagcaaaacacaauu

SEQ ID NO: 401418 - RNA, 24 nt, Artificial Sequence
  Synthetic
acauuugcaaagcaaaacacaauu

SEQ ID NO: 401419 - RNA, 18 nt, Artificial Sequence
  Synthetic
auaaauuugaacacaauu

SEQ ID NO: 401420 - RNA, 19 nt, Artificial Sequence
  Synthetic
uauaaauuugaacacaauu

SEQ ID NO: 401421 - RNA, 20 nt, Artificial Sequence
  Synthetic
auauaaauuugaacacaauu

SEQ ID NO: 401422 - RNA, 21 nt, Artificial Sequence
  Synthetic
cauauaaauuugaacacaauu

SEQ ID NO: 401423 - RNA, 22 nt, Artificial Sequence
  Synthetic
acauauaaauuugaacacaauu

SEQ ID NO: 401424 - RNA, 23 nt, Artificial Sequence
  Synthetic
aacauauaaauuugaacacaauu

SEQ ID NO: 401425 - RNA, 24 nt, Artificial Sequence
  Synthetic
gaacauauaaauuugaacacaauu

SEQ ID NO: 401426 - RNA, 18 nt, Artificial Sequence
  Synthetic
acagcuagcugcacaauu

SEQ ID NO: 401427 - RNA, 19 nt, Artificial Sequence
  Synthetic
gacagcuagcugcacaauu

SEQ ID NO: 401428 - RNA, 20 nt, Artificial Sequence
  Synthetic
ugacagcuagcugcacaauu

SEQ ID NO: 401429 - RNA, 21 nt, Artificial Sequence
  Synthetic
augacagcuagcugcacaauu

SEQ ID NO: 401430 - RNA, 22 nt, Artificial Sequence
  Synthetic
aaugacagcuagcugcacaauu

SEQ ID NO: 401431 - RNA, 23 nt, Artificial Sequence
  Synthetic
aaaugacagcuagcugcacaauu

SEQ ID NO: 401432 - RNA, 24 nt, Artificial Sequence
  Synthetic
gaaaugacagcuagcugcacaauu

SEQ ID NO: 401433 - RNA, 18 nt, Artificial Sequence
  Synthetic
aggauguuugucacaauu

SEQ ID NO: 401434 - RNA, 19 nt, Artificial Sequence
  Synthetic
gaggauguuugucacaauu

SEQ ID NO: 401435 - RNA, 20 nt, Artificial Sequence
  Synthetic
ggaggauguuugucacaauu

SEQ ID NO: 401436 - RNA, 21 nt, Artificial Sequence
  Synthetic
aggaggauguuugucacaauu

SEQ ID NO: 401437 - RNA, 22 nt, Artificial Sequence
  Synthetic
uaggaggauguuugucacaauu

SEQ ID NO: 401438 - RNA, 23 nt, Artificial Sequence
  Synthetic
cuaggaggauguuugucacaauu

SEQ ID NO: 401439 - RNA, 24 nt, Artificial Sequence
  Synthetic
ucuaggaggauguuugucacaauu

SEQ ID NO: 401440 - RNA, 18 nt, Artificial Sequence
  Synthetic
auucucauguggacaauu

SEQ ID NO: 401441 - RNA, 19 nt, Artificial Sequence
  Synthetic
uauucucauguggacaauu

SEQ ID NO: 401442 - RNA, 20 nt, Artificial Sequence
  Synthetic
auauucucauguggacaauu

SEQ ID NO: 401443 - RNA, 21 nt, Artificial Sequence
  Synthetic
uauauucucauguggacaauu

SEQ ID NO: 401444 - RNA, 22 nt, Artificial Sequence
  Synthetic
uuauauucucauguggacaauu

SEQ ID NO: 401445 - RNA, 23 nt, Artificial Sequence
  Synthetic
uuuauauucucauguggacaauu

SEQ ID NO: 401446 - RNA, 24 nt, Artificial Sequence
  Synthetic
auuuauauucucauguggacaauu

SEQ ID NO: 401447 - RNA, 18 nt, Artificial Sequence
  Synthetic
uuguucagcaugacaauu

SEQ ID NO: 401448 - RNA, 19 nt, Artificial Sequence
  Synthetic
cuuguucagcaugacaauu

SEQ ID NO: 401449 - RNA, 20 nt, Artificial Sequence
  Synthetic
ccuuguucagcaugacaauu

SEQ ID NO: 401450 - RNA, 21 nt, Artificial Sequence
  Synthetic
uccuuguucagcaugacaauu

SEQ ID NO: 401451 - RNA, 22 nt, Artificial Sequence
  Synthetic
auccuuguucagcaugacaauu

SEQ ID NO: 401452 - RNA, 23 nt, Artificial Sequence
  Synthetic
aauccuuguucagcaugacaauu

SEQ ID NO: 401453 - RNA, 24 nt, Artificial Sequence
  Synthetic
aaauccuuguucagcaugacaauu

SEQ ID NO: 401454 - RNA, 18 nt, Artificial Sequence
  Synthetic
aagaaaaucuugacaauu

SEQ ID NO: 401455 - RNA, 19 nt, Artificial Sequence
  Synthetic
aaagaaaaucuugacaauu

SEQ ID NO: 401456 - RNA, 20 nt, Artificial Sequence
  Synthetic
gaaagaaaaucuugacaauu

SEQ ID NO: 401457 - RNA, 21 nt, Artificial Sequence
  Synthetic
agaaagaaaaucuugacaauu

SEQ ID NO: 401458 - RNA, 22 nt, Artificial Sequence
  Synthetic
uagaaagaaaaucuugacaauu

SEQ ID NO: 401459 - RNA, 23 nt, Artificial Sequence
  Synthetic
auagaaagaaaaucuugacaauu

SEQ ID NO: 401460 - RNA, 24 nt, Artificial Sequence
  Synthetic
uauagaaagaaaaucuugacaauu

SEQ ID NO: 401461 - RNA, 18 nt, Artificial Sequence
  Synthetic
guucacauuuauacaauu

SEQ ID NO: 401462 - RNA, 19 nt, Artificial Sequence
  Synthetic
uguucacauuuauacaauu

SEQ ID NO: 401463 - RNA, 20 nt, Artificial Sequence
  Synthetic
auguucacauuuauacaauu

SEQ ID NO: 401464 - RNA, 21 nt, Artificial Sequence
  Synthetic
aauguucacauuuauacaauu

SEQ ID NO: 401465 - RNA, 22 nt, Artificial Sequence
  Synthetic
aaauguucacauuuauacaauu

SEQ ID NO: 401466 - RNA, 23 nt, Artificial Sequence
  Synthetic
aaaauguucacauuuauacaauu

SEQ ID NO: 401467 - RNA, 24 nt, Artificial Sequence
  Synthetic
uaaaauguucacauuuauacaauu

SEQ ID NO: 401468 - RNA, 18 nt, Artificial Sequence
  Synthetic
uucucuuuuacuacaauu

SEQ ID NO: 401469 - RNA, 19 nt, Artificial Sequence
  Synthetic
cuucucuuuuacuacaauu

SEQ ID NO: 401470 - RNA, 20 nt, Artificial Sequence
  Synthetic
ccuucucuuuuacuacaauu

SEQ ID NO: 401471 - RNA, 21 nt, Artificial Sequence
  Synthetic
cccuucucuuuuacuacaauu

SEQ ID NO: 401472 - RNA, 22 nt, Artificial Sequence
  Synthetic
acccuucucuuuuacuacaauu

SEQ ID NO: 401473 - RNA, 23 nt, Artificial Sequence
  Synthetic
aacccuucucuuuuacuacaauu

SEQ ID NO: 401474 - RNA, 24 nt, Artificial Sequence
  Synthetic
uaacccuucucuuuuacuacaauu

SEQ ID NO: 401475 - RNA, 18 nt, Artificial Sequence
  Synthetic
aaugacacugguacaauu

SEQ ID NO: 401476 - RNA, 19 nt, Artificial Sequence
  Synthetic
uaaugacacugguacaauu

SEQ ID NO: 401477 - RNA, 20 nt, Artificial Sequence
  Synthetic
uuaaugacacugguacaauu

SEQ ID NO: 401478 - RNA, 21 nt, Artificial Sequence
  Synthetic
uuuaaugacacugguacaauu

SEQ ID NO: 401479 - RNA, 22 nt, Artificial Sequence
  Synthetic
uuuuaaugacacugguacaauu

SEQ ID NO: 401480 - RNA, 23 nt, Artificial Sequence
  Synthetic
auuuuaaugacacugguacaauu

SEQ ID NO: 401481 - RNA, 24 nt, Artificial Sequence
  Synthetic
uauuuuaaugacacugguacaauu

SEQ ID NO: 401482 - RNA, 18 nt, Artificial Sequence
  Synthetic
guacguggaaaaccaauu

SEQ ID NO: 401483 - RNA, 19 nt, Artificial Sequence
  Synthetic
aguacguggaaaaccaauu

SEQ ID NO: 401484 - RNA, 20 nt, Artificial Sequence
  Synthetic
aaguacguggaaaaccaauu

SEQ ID NO: 401485 - RNA, 21 nt, Artificial Sequence
  Synthetic
gaaguacguggaaaaccaauu

SEQ ID NO: 401486 - RNA, 22 nt, Artificial Sequence
  Synthetic
ugaaguacguggaaaaccaauu

SEQ ID NO: 401487 - RNA, 23 nt, Artificial Sequence
  Synthetic
cugaaguacguggaaaaccaauu

SEQ ID NO: 401488 - RNA, 24 nt, Artificial Sequence
  Synthetic
ucugaaguacguggaaaaccaauu

SEQ ID NO: 401489 - RNA, 18 nt, Artificial Sequence
  Synthetic
agccuucuccaaccaauu

SEQ ID NO: 401490 - RNA, 19 nt, Artificial Sequence
  Synthetic
uagccuucuccaaccaauu

SEQ ID NO: 401491 - RNA, 20 nt, Artificial Sequence
  Synthetic
uuagccuucuccaaccaauu

SEQ ID NO: 401492 - RNA, 21 nt, Artificial Sequence
  Synthetic
uuuagccuucuccaaccaauu

SEQ ID NO: 401493 - RNA, 22 nt, Artificial Sequence
  Synthetic
uuuuagccuucuccaaccaauu

SEQ ID NO: 401494 - RNA, 23 nt, Artificial Sequence
  Synthetic
guuuuagccuucuccaaccaauu

SEQ ID NO: 401495 - RNA, 24 nt, Artificial Sequence
  Synthetic
uguuuuagccuucuccaaccaauu

SEQ ID NO: 401496 - RNA, 18 nt, Artificial Sequence
  Synthetic
guuuaagaaauaccaauu

SEQ ID NO: 401497 - RNA, 19 nt, Artificial Sequence
  Synthetic
uguuuaagaaauaccaauu

SEQ ID NO: 401498 - RNA, 20 nt, Artificial Sequence
  Synthetic
uuguuuaagaaauaccaauu

SEQ ID NO: 401499 - RNA, 21 nt, Artificial Sequence
  Synthetic
cuuguuuaagaaauaccaauu

SEQ ID NO: 401500 - RNA, 22 nt, Artificial Sequence
  Synthetic
acuuguuuaagaaauaccaauu

SEQ ID NO: 401501 - RNA, 23 nt, Artificial Sequence
  Synthetic
aacuuguuuaagaaauaccaauu

SEQ ID NO: 401502 - RNA, 24 nt, Artificial Sequence
  Synthetic
aaacuuguuuaagaaauaccaauu

SEQ ID NO: 401503 - RNA, 18 nt, Artificial Sequence
  Synthetic
ggaaaugcucacccaauu

SEQ ID NO: 401504 - RNA, 19 nt, Artificial Sequence
  Synthetic
aggaaaugcucacccaauu

SEQ ID NO: 401505 - RNA, 20 nt, Artificial Sequence
  Synthetic
caggaaaugcucacccaauu

SEQ ID NO: 401506 - RNA, 21 nt, Artificial Sequence
  Synthetic
gcaggaaaugcucacccaauu

SEQ ID NO: 401507 - RNA, 22 nt, Artificial Sequence
  Synthetic
ugcaggaaaugcucacccaauu

SEQ ID NO: 401508 - RNA, 23 nt, Artificial Sequence
  Synthetic
augcaggaaaugcucacccaauu

SEQ ID NO: 401509 - RNA, 24 nt, Artificial Sequence
  Synthetic
caugcaggaaaugcucacccaauu

SEQ ID NO: 401510 - RNA, 18 nt, Artificial Sequence
  Synthetic
uuuuuaaaggacccaauu

SEQ ID NO: 401511 - RNA, 19 nt, Artificial Sequence
  Synthetic
cuuuuuaaaggacccaauu

SEQ ID NO: 401512 - RNA, 20 nt, Artificial Sequence
  Synthetic
acuuuuuaaaggacccaauu

SEQ ID NO: 401513 - RNA, 21 nt, Artificial Sequence
  Synthetic
cacuuuuuaaaggacccaauu

SEQ ID NO: 401514 - RNA, 22 nt, Artificial Sequence
  Synthetic
gcacuuuuuaaaggacccaauu

SEQ ID NO: 401515 - RNA, 23 nt, Artificial Sequence
  Synthetic
agcacuuuuuaaaggacccaauu

SEQ ID NO: 401516 - RNA, 24 nt, Artificial Sequence
  Synthetic
aagcacuuuuuaaaggacccaauu

SEQ ID NO: 401517 - RNA, 18 nt, Artificial Sequence
  Synthetic
aauccauuugagccaauu

SEQ ID NO: 401518 - RNA, 19 nt, Artificial Sequence
  Synthetic
caauccauuugagccaauu

SEQ ID NO: 401519 - RNA, 20 nt, Artificial Sequence
  Synthetic
ucaauccauuugagccaauu

SEQ ID NO: 401520 - RNA, 21 nt, Artificial Sequence
  Synthetic
uucaauccauuugagccaauu

SEQ ID NO: 401521 - RNA, 22 nt, Artificial Sequence
  Synthetic
cuucaauccauuugagccaauu

SEQ ID NO: 401522 - RNA, 23 nt, Artificial Sequence
  Synthetic
ucuucaauccauuugagccaauu

SEQ ID NO: 401523 - RNA, 24 nt, Artificial Sequence
  Synthetic
cucuucaauccauuugagccaauu

SEQ ID NO: 401524 - RNA, 18 nt, Artificial Sequence
  Synthetic
cuugucauauugccaauu

SEQ ID NO: 401525 - RNA, 19 nt, Artificial Sequence
  Synthetic
ccuugucauauugccaauu

SEQ ID NO: 401526 - RNA, 20 nt, Artificial Sequence
  Synthetic
accuugucauauugccaauu

SEQ ID NO: 401527 - RNA, 21 nt, Artificial Sequence
  Synthetic
aaccuugucauauugccaauu

SEQ ID NO: 401528 - RNA, 22 nt, Artificial Sequence
  Synthetic
aaaccuugucauauugccaauu

SEQ ID NO: 401529 - RNA, 23 nt, Artificial Sequence
  Synthetic
aaaaccuugucauauugccaauu

SEQ ID NO: 401530 - RNA, 24 nt, Artificial Sequence
  Synthetic
uaaaaccuugucauauugccaauu

SEQ ID NO: 401531 - RNA, 18 nt, Artificial Sequence
  Synthetic
aaggacacuaauccaauu

SEQ ID NO: 401532 - RNA, 19 nt, Artificial Sequence
  Synthetic
aaaggacacuaauccaauu

SEQ ID NO: 401533 - RNA, 20 nt, Artificial Sequence
  Synthetic
aaaaggacacuaauccaauu

SEQ ID NO: 401534 - RNA, 21 nt, Artificial Sequence
  Synthetic
uaaaaggacacuaauccaauu

SEQ ID NO: 401535 - RNA, 22 nt, Artificial Sequence
  Synthetic
uuaaaaggacacuaauccaauu

SEQ ID NO: 401536 - RNA, 23 nt, Artificial Sequence
  Synthetic
cuuaaaaggacacuaauccaauu

SEQ ID NO: 401537 - RNA, 24 nt, Artificial Sequence
  Synthetic
ucuuaaaaggacacuaauccaauu

SEQ ID NO: 401538 - RNA, 18 nt, Artificial Sequence
  Synthetic
uucaagauauguccaauu

SEQ ID NO: 401539 - RNA, 19 nt, Artificial Sequence
  Synthetic
uuucaagauauguccaauu

SEQ ID NO: 401540 - RNA, 20 nt, Artificial Sequence
  Synthetic
uuuucaagauauguccaauu

SEQ ID NO: 401541 - RNA, 21 nt, Artificial Sequence
  Synthetic
auuuucaagauauguccaauu

SEQ ID NO: 401542 - RNA, 22 nt, Artificial Sequence
  Synthetic
uauuuucaagauauguccaauu

SEQ ID NO: 401543 - RNA, 23 nt, Artificial Sequence
  Synthetic
auauuuucaagauauguccaauu

SEQ ID NO: 401544 - RNA, 24 nt, Artificial Sequence
  Synthetic
aauauuuucaagauauguccaauu

SEQ ID NO: 401545 - RNA, 18 nt, Artificial Sequence
  Synthetic
acaauuuauuguccaauu

SEQ ID NO: 401546 - RNA, 19 nt, Artificial Sequence
  Synthetic
uacaauuuauuguccaauu

SEQ ID NO: 401547 - RNA, 20 nt, Artificial Sequence
  Synthetic
uuacaauuuauuguccaauu

SEQ ID NO: 401548 - RNA, 21 nt, Artificial Sequence
  Synthetic
auuacaauuuauuguccaauu

SEQ ID NO: 401549 - RNA, 22 nt, Artificial Sequence
  Synthetic
uauuacaauuuauuguccaauu

SEQ ID NO: 401550 - RNA, 23 nt, Artificial Sequence
  Synthetic
uuauuacaauuuauuguccaauu

SEQ ID NO: 401551 - RNA, 24 nt, Artificial Sequence
  Synthetic
auuauuacaauuuauuguccaauu

SEQ ID NO: 401552 - RNA, 18 nt, Artificial Sequence
  Synthetic
agagcagguacagcaauu

SEQ ID NO: 401553 - RNA, 19 nt, Artificial Sequence
  Synthetic
gagagcagguacagcaauu

SEQ ID NO: 401554 - RNA, 20 nt, Artificial Sequence
  Synthetic
ggagagcagguacagcaauu

SEQ ID NO: 401555 - RNA, 21 nt, Artificial Sequence
  Synthetic
aggagagcagguacagcaauu

SEQ ID NO: 401556 - RNA, 22 nt, Artificial Sequence
  Synthetic
gaggagagcagguacagcaauu

SEQ ID NO: 401557 - RNA, 23 nt, Artificial Sequence
  Synthetic
ugaggagagcagguacagcaauu

SEQ ID NO: 401558 - RNA, 24 nt, Artificial Sequence
  Synthetic
cugaggagagcagguacagcaauu

SEQ ID NO: 401559 - RNA, 18 nt, Artificial Sequence
  Synthetic
acuguaaucccagcaauu

SEQ ID NO: 401560 - RNA, 19 nt, Artificial Sequence
  Synthetic
gacuguaaucccagcaauu

SEQ ID NO: 401561 - RNA, 20 nt, Artificial Sequence
  Synthetic
cgacuguaaucccagcaauu

SEQ ID NO: 401562 - RNA, 21 nt, Artificial Sequence
  Synthetic
acgacuguaaucccagcaauu

SEQ ID NO: 401563 - RNA, 22 nt, Artificial Sequence
  Synthetic
cacgacuguaaucccagcaauu

SEQ ID NO: 401564 - RNA, 23 nt, Artificial Sequence
  Synthetic
ucacgacuguaaucccagcaauu

SEQ ID NO: 401565 - RNA, 24 nt, Artificial Sequence
  Synthetic
cucacgacuguaaucccagcaauu

SEQ ID NO: 401566 - RNA, 18 nt, Artificial Sequence
  Synthetic
gaaacaaacaaugcaauu

SEQ ID NO: 401567 - RNA, 19 nt, Artificial Sequence
  Synthetic
agaaacaaacaaugcaauu

SEQ ID NO: 401568 - RNA, 20 nt, Artificial Sequence
  Synthetic
aagaaacaaacaaugcaauu

SEQ ID NO: 401569 - RNA, 21 nt, Artificial Sequence
  Synthetic
caagaaacaaacaaugcaauu

SEQ ID NO: 401570 - RNA, 22 nt, Artificial Sequence
  Synthetic
acaagaaacaaacaaugcaauu

SEQ ID NO: 401571 - RNA, 23 nt, Artificial Sequence
  Synthetic
aacaagaaacaaacaaugcaauu

SEQ ID NO: 401572 - RNA, 24 nt, Artificial Sequence
  Synthetic
aaacaagaaacaaacaaugcaauu

SEQ ID NO: 401573 - RNA, 18 nt, Artificial Sequence
  Synthetic
gccaacaaagaugcaauu

SEQ ID NO: 401574 - RNA, 19 nt, Artificial Sequence
  Synthetic
ugccaacaaagaugcaauu

SEQ ID NO: 401575 - RNA, 20 nt, Artificial Sequence
  Synthetic
gugccaacaaagaugcaauu

SEQ ID NO: 401576 - RNA, 21 nt, Artificial Sequence
  Synthetic
ugugccaacaaagaugcaauu

SEQ ID NO: 401577 - RNA, 22 nt, Artificial Sequence
  Synthetic
gugugccaacaaagaugcaauu

SEQ ID NO: 401578 - RNA, 23 nt, Artificial Sequence
  Synthetic
ugugugccaacaaagaugcaauu

SEQ ID NO: 401579 - RNA, 24 nt, Artificial Sequence
  Synthetic
gugugugccaacaaagaugcaauu

SEQ ID NO: 401580 - RNA, 18 nt, Artificial Sequence
  Synthetic
gaugcuggggcugcaauu

SEQ ID NO: 401581 - RNA, 19 nt, Artificial Sequence
  Synthetic
agaugcuggggcugcaauu

SEQ ID NO: 401582 - RNA, 20 nt, Artificial Sequence
  Synthetic
uagaugcuggggcugcaauu

SEQ ID NO: 401583 - RNA, 21 nt, Artificial Sequence
  Synthetic
cuagaugcuggggcugcaauu

SEQ ID NO: 401584 - RNA, 22 nt, Artificial Sequence
  Synthetic
ucuagaugcuggggcugcaauu

SEQ ID NO: 401585 - RNA, 23 nt, Artificial Sequence
  Synthetic
uucuagaugcuggggcugcaauu

SEQ ID NO: 401586 - RNA, 24 nt, Artificial Sequence
  Synthetic
guucuagaugcuggggcugcaauu

SEQ ID NO: 401587 - RNA, 18 nt, Artificial Sequence
  Synthetic
auuacaggacgugcaauu

SEQ ID NO: 401588 - RNA, 19 nt, Artificial Sequence
  Synthetic
uauuacaggacgugcaauu

SEQ ID NO: 401589 - RNA, 20 nt, Artificial Sequence
  Synthetic
cuauuacaggacgugcaauu

SEQ ID NO: 401590 - RNA, 21 nt, Artificial Sequence
  Synthetic
ccuauuacaggacgugcaauu

SEQ ID NO: 401591 - RNA, 22 nt, Artificial Sequence
  Synthetic
accuauuacaggacgugcaauu

SEQ ID NO: 401592 - RNA, 23 nt, Artificial Sequence
  Synthetic
caccuauuacaggacgugcaauu

SEQ ID NO: 401593 - RNA, 24 nt, Artificial Sequence
  Synthetic
acaccuauuacaggacgugcaauu

SEQ ID NO: 401594 - RNA, 18 nt, Artificial Sequence
  Synthetic
ucauaauacauugcaauu

SEQ ID NO: 401595 - RNA, 19 nt, Artificial Sequence
  Synthetic
aucauaauacauugcaauu

SEQ ID NO: 401596 - RNA, 20 nt, Artificial Sequence
  Synthetic
aaucauaauacauugcaauu

SEQ ID NO: 401597 - RNA, 21 nt, Artificial Sequence
  Synthetic
aaaucauaauacauugcaauu

SEQ ID NO: 401598 - RNA, 22 nt, Artificial Sequence
  Synthetic
caaaucauaauacauugcaauu

SEQ ID NO: 401599 - RNA, 23 nt, Artificial Sequence
  Synthetic
ccaaaucauaauacauugcaauu

SEQ ID NO: 401600 - RNA, 24 nt, Artificial Sequence
  Synthetic
accaaaucauaauacauugcaauu

SEQ ID NO: 401601 - RNA, 18 nt, Artificial Sequence
  Synthetic
aagcaccauaaaucaauu

SEQ ID NO: 401602 - RNA, 19 nt, Artificial Sequence
  Synthetic
aaagcaccauaaaucaauu

SEQ ID NO: 401603 - RNA, 20 nt, Artificial Sequence
  Synthetic
gaaagcaccauaaaucaauu

SEQ ID NO: 401604 - RNA, 21 nt, Artificial Sequence
  Synthetic
agaaagcaccauaaaucaauu

SEQ ID NO: 401605 - RNA, 22 nt, Artificial Sequence
  Synthetic
aagaaagcaccauaaaucaauu

SEQ ID NO: 401606 - RNA, 23 nt, Artificial Sequence
  Synthetic
gaagaaagcaccauaaaucaauu

SEQ ID NO: 401607 - RNA, 24 nt, Artificial Sequence
  Synthetic
ugaagaaagcaccauaaaucaauu

SEQ ID NO: 401608 - RNA, 18 nt, Artificial Sequence
  Synthetic
uacauuuuuaaaucaauu

SEQ ID NO: 401609 - RNA, 19 nt, Artificial Sequence
  Synthetic
auacauuuuuaaaucaauu

SEQ ID NO: 401610 - RNA, 20 nt, Artificial Sequence
  Synthetic
aauacauuuuuaaaucaauu

SEQ ID NO: 401611 - RNA, 21 nt, Artificial Sequence
  Synthetic
aaauacauuuuuaaaucaauu

SEQ ID NO: 401612 - RNA, 22 nt, Artificial Sequence
  Synthetic
gaaauacauuuuuaaaucaauu

SEQ ID NO: 401613 - RNA, 23 nt, Artificial Sequence
  Synthetic
agaaauacauuuuuaaaucaauu

SEQ ID NO: 401614 - RNA, 24 nt, Artificial Sequence
  Synthetic
aagaaauacauuuuuaaaucaauu

SEQ ID NO: 401615 - RNA, 18 nt, Artificial Sequence
  Synthetic
ggucugauccaaucaauu

SEQ ID NO: 401616 - RNA, 19 nt, Artificial Sequence
  Synthetic
gggucugauccaaucaauu

SEQ ID NO: 401617 - RNA, 20 nt, Artificial Sequence
  Synthetic
ugggucugauccaaucaauu

SEQ ID NO: 401618 - RNA, 21 nt, Artificial Sequence
  Synthetic
gugggucugauccaaucaauu

SEQ ID NO: 401619 - RNA, 22 nt, Artificial Sequence
  Synthetic
ggugggucugauccaaucaauu

SEQ ID NO: 401620 - RNA, 23 nt, Artificial Sequence
  Synthetic
gggugggucugauccaaucaauu

SEQ ID NO: 401621 - RNA, 24 nt, Artificial Sequence
  Synthetic
ugggugggucugauccaaucaauu

SEQ ID NO: 401622 - RNA, 18 nt, Artificial Sequence
  Synthetic
uugucuguauaaucaauu

SEQ ID NO: 401623 - RNA, 19 nt, Artificial Sequence
  Synthetic
uuugucuguauaaucaauu

SEQ ID NO: 401624 - RNA, 20 nt, Artificial Sequence
  Synthetic
uuuugucuguauaaucaauu

SEQ ID NO: 401625 - RNA, 21 nt, Artificial Sequence
  Synthetic
auuuugucuguauaaucaauu

SEQ ID NO: 401626 - RNA, 22 nt, Artificial Sequence
  Synthetic
uauuuugucuguauaaucaauu

SEQ ID NO: 401627 - RNA, 23 nt, Artificial Sequence
  Synthetic
auauuuugucuguauaaucaauu

SEQ ID NO: 401628 - RNA, 24 nt, Artificial Sequence
  Synthetic
aauauuuugucuguauaaucaauu

SEQ ID NO: 401629 - RNA, 18 nt, Artificial Sequence
  Synthetic
aauggauaccuaucaauu

SEQ ID NO: 401630 - RNA, 19 nt, Artificial Sequence
  Synthetic
uaauggauaccuaucaauu

SEQ ID NO: 401631 - RNA, 20 nt, Artificial Sequence
  Synthetic
cuaauggauaccuaucaauu

SEQ ID NO: 401632 - RNA, 21 nt, Artificial Sequence
  Synthetic
ucuaauggauaccuaucaauu

SEQ ID NO: 401633 - RNA, 22 nt, Artificial Sequence
  Synthetic
gucuaauggauaccuaucaauu

SEQ ID NO: 401634 - RNA, 23 nt, Artificial Sequence
  Synthetic
ugucuaauggauaccuaucaauu

SEQ ID NO: 401635 - RNA, 24 nt, Artificial Sequence
  Synthetic
cugucuaauggauaccuaucaauu

SEQ ID NO: 401636 - RNA, 18 nt, Artificial Sequence
  Synthetic
uguucccccuacucaauu

SEQ ID NO: 401637 - RNA, 19 nt, Artificial Sequence
  Synthetic
uuguucccccuacucaauu

SEQ ID NO: 401638 - RNA, 20 nt, Artificial Sequence
  Synthetic
guuguucccccuacucaauu

SEQ ID NO: 401639 - RNA, 21 nt, Artificial Sequence
  Synthetic
uguuguucccccuacucaauu

SEQ ID NO: 401640 - RNA, 22 nt, Artificial Sequence
  Synthetic
auguuguucccccuacucaauu

SEQ ID NO: 401641 - RNA, 23 nt, Artificial Sequence
  Synthetic
cauguuguucccccuacucaauu

SEQ ID NO: 401642 - RNA, 24 nt, Artificial Sequence
  Synthetic
ucauguuguucccccuacucaauu

SEQ ID NO: 401643 - RNA, 18 nt, Artificial Sequence
  Synthetic
uauuaagaaacgucaauu

SEQ ID NO: 401644 - RNA, 19 nt, Artificial Sequence
  Synthetic
auauuaagaaacgucaauu

SEQ ID NO: 401645 - RNA, 20 nt, Artificial Sequence
  Synthetic
aauauuaagaaacgucaauu

SEQ ID NO: 401646 - RNA, 21 nt, Artificial Sequence
  Synthetic
uaauauuaagaaacgucaauu

SEQ ID NO: 401647 - RNA, 22 nt, Artificial Sequence
  Synthetic
auaauauuaagaaacgucaauu

SEQ ID NO: 401648 - RNA, 23 nt, Artificial Sequence
  Synthetic
cauaauauuaagaaacgucaauu

SEQ ID NO: 401649 - RNA, 24 nt, Artificial Sequence
  Synthetic
acauaauauuaagaaacgucaauu

SEQ ID NO: 401650 - RNA, 18 nt, Artificial Sequence
  Synthetic
ccaaguauguggucaauu

SEQ ID NO: 401651 - RNA, 19 nt, Artificial Sequence
  Synthetic
uccaaguauguggucaauu

SEQ ID NO: 401652 - RNA, 20 nt, Artificial Sequence
  Synthetic
uuccaaguauguggucaauu

SEQ ID NO: 401653 - RNA, 21 nt, Artificial Sequence
  Synthetic
cuuccaaguauguggucaauu

SEQ ID NO: 401654 - RNA, 22 nt, Artificial Sequence
  Synthetic
acuuccaaguauguggucaauu

SEQ ID NO: 401655 - RNA, 23 nt, Artificial Sequence
  Synthetic
uacuuccaaguauguggucaauu

SEQ ID NO: 401656 - RNA, 24 nt, Artificial Sequence
  Synthetic
uuacuuccaaguauguggucaauu

SEQ ID NO: 401657 - RNA, 18 nt, Artificial Sequence
  Synthetic
gcccagaugaugucaauu

SEQ ID NO: 401658 - RNA, 19 nt, Artificial Sequence
  Synthetic
ggcccagaugaugucaauu

SEQ ID NO: 401659 - RNA, 20 nt, Artificial Sequence
  Synthetic
cggcccagaugaugucaauu

SEQ ID NO: 401660 - RNA, 21 nt, Artificial Sequence
  Synthetic
ccggcccagaugaugucaauu

SEQ ID NO: 401661 - RNA, 22 nt, Artificial Sequence
  Synthetic
cccggcccagaugaugucaauu

SEQ ID NO: 401662 - RNA, 23 nt, Artificial Sequence
  Synthetic
gcccggcccagaugaugucaauu

SEQ ID NO: 401663 - RNA, 24 nt, Artificial Sequence
  Synthetic
cgcccggcccagaugaugucaauu

SEQ ID NO: 401664 - RNA, 18 nt, Artificial Sequence
  Synthetic
aucauaucacauucaauu

SEQ ID NO: 401665 - RNA, 19 nt, Artificial Sequence
  Synthetic
aaucauaucacauucaauu

SEQ ID NO: 401666 - RNA, 20 nt, Artificial Sequence
  Synthetic
aaaucauaucacauucaauu

SEQ ID NO: 401667 - RNA, 21 nt, Artificial Sequence
  Synthetic
aaaaucauaucacauucaauu

SEQ ID NO: 401668 - RNA, 22 nt, Artificial Sequence
  Synthetic
aaaaaucauaucacauucaauu

SEQ ID NO: 401669 - RNA, 23 nt, Artificial Sequence
  Synthetic
uaaaaaucauaucacauucaauu

SEQ ID NO: 401670 - RNA, 24 nt, Artificial Sequence
  Synthetic
auaaaaaucauaucacauucaauu

SEQ ID NO: 401671 - RNA, 18 nt, Artificial Sequence
  Synthetic
aauaaaggguauucaauu

SEQ ID NO: 401672 - RNA, 19 nt, Artificial Sequence
  Synthetic
aaauaaaggguauucaauu

SEQ ID NO: 401673 - RNA, 20 nt, Artificial Sequence
  Synthetic
gaaauaaaggguauucaauu

SEQ ID NO: 401674 - RNA, 18 nt, Artificial Sequence
  Synthetic
auuuaauuuuauucaauu

SEQ ID NO: 401675 - RNA, 19 nt, Artificial Sequence
  Synthetic
cauuuaauuuuauucaauu

SEQ ID NO: 401676 - RNA, 20 nt, Artificial Sequence
  Synthetic
ucauuuaauuuuauucaauu

SEQ ID NO: 401677 - RNA, 21 nt, Artificial Sequence
  Synthetic
uucauuuaauuuuauucaauu

SEQ ID NO: 401678 - RNA, 22 nt, Artificial Sequence
  Synthetic
uuucauuuaauuuuauucaauu

SEQ ID NO: 401679 - RNA, 23 nt, Artificial Sequence
  Synthetic
uuuucauuuaauuuuauucaauu

SEQ ID NO: 401680 - RNA, 24 nt, Artificial Sequence
  Synthetic
auuuucauuuaauuuuauucaauu

SEQ ID NO: 401681 - RNA, 18 nt, Artificial Sequence
  Synthetic
caucuucucucuucaauu

SEQ ID NO: 401682 - RNA, 19 nt, Artificial Sequence
  Synthetic
ucaucuucucucuucaauu

SEQ ID NO: 401683 - RNA, 20 nt, Artificial Sequence
  Synthetic
gucaucuucucucuucaauu

SEQ ID NO: 401684 - RNA, 21 nt, Artificial Sequence
  Synthetic
ugucaucuucucucuucaauu

SEQ ID NO: 401685 - RNA, 22 nt, Artificial Sequence
  Synthetic
cugucaucuucucucuucaauu

SEQ ID NO: 401686 - RNA, 23 nt, Artificial Sequence
  Synthetic
acugucaucuucucucuucaauu

SEQ ID NO: 401687 - RNA, 24 nt, Artificial Sequence
  Synthetic
aacugucaucuucucucuucaauu

SEQ ID NO: 401688 - RNA, 18 nt, Artificial Sequence
  Synthetic
ugaaacacuucuucaauu

SEQ ID NO: 401689 - RNA, 19 nt, Artificial Sequence
  Synthetic
cugaaacacuucuucaauu

SEQ ID NO: 401690 - RNA, 20 nt, Artificial Sequence
  Synthetic
acugaaacacuucuucaauu

SEQ ID NO: 401691 - RNA, 21 nt, Artificial Sequence
  Synthetic
aacugaaacacuucuucaauu

SEQ ID NO: 401692 - RNA, 22 nt, Artificial Sequence
  Synthetic
aaacugaaacacuucuucaauu

SEQ ID NO: 401693 - RNA, 23 nt, Artificial Sequence
  Synthetic
caaacugaaacacuucuucaauu

SEQ ID NO: 401694 - RNA, 24 nt, Artificial Sequence
  Synthetic
acaaacugaaacacuucuucaauu

SEQ ID NO: 401695 - RNA, 18 nt, Artificial Sequence
  Synthetic
cagccguuuucuucaauu

SEQ ID NO: 401696 - RNA, 19 nt, Artificial Sequence
  Synthetic
acagccguuuucuucaauu

SEQ ID NO: 401697 - RNA, 20 nt, Artificial Sequence
  Synthetic
aacagccguuuucuucaauu

SEQ ID NO: 401698 - RNA, 21 nt, Artificial Sequence
  Synthetic
aaacagccguuuucuucaauu

SEQ ID NO: 401699 - RNA, 22 nt, Artificial Sequence
  Synthetic
aaaacagccguuuucuucaauu

SEQ ID NO: 401700 - RNA, 23 nt, Artificial Sequence
  Synthetic
caaaacagccguuuucuucaauu

SEQ ID NO: 401701 - RNA, 24 nt, Artificial Sequence
  Synthetic
ccaaaacagccguuuucuucaauu

SEQ ID NO: 401702 - RNA, 18 nt, Artificial Sequence
  Synthetic
aaauggcaggguucaauu

SEQ ID NO: 401703 - RNA, 19 nt, Artificial Sequence
  Synthetic
caaauggcaggguucaauu

SEQ ID NO: 401704 - RNA, 20 nt, Artificial Sequence
  Synthetic
gcaaauggcaggguucaauu

SEQ ID NO: 401705 - RNA, 21 nt, Artificial Sequence
  Synthetic
agcaaauggcaggguucaauu

SEQ ID NO: 401706 - RNA, 22 nt, Artificial Sequence
  Synthetic
cagcaaauggcaggguucaauu

SEQ ID NO: 401707 - RNA, 23 nt, Artificial Sequence
  Synthetic
acagcaaauggcaggguucaauu

SEQ ID NO: 401708 - RNA, 24 nt, Artificial Sequence
  Synthetic
uacagcaaauggcaggguucaauu

SEQ ID NO: 401709 - RNA, 18 nt, Artificial Sequence
  Synthetic
aguagcuaaaaaagaauu

SEQ ID NO: 401710 - RNA, 19 nt, Artificial Sequence
  Synthetic
uaguagcuaaaaaagaauu

SEQ ID NO: 401711 - RNA, 20 nt, Artificial Sequence
  Synthetic
guaguagcuaaaaaagaauu

SEQ ID NO: 401712 - RNA, 21 nt, Artificial Sequence
  Synthetic
gguaguagcuaaaaaagaauu

SEQ ID NO: 401713 - RNA, 22 nt, Artificial Sequence
  Synthetic
ugguaguagcuaaaaaagaauu

SEQ ID NO: 401714 - RNA, 23 nt, Artificial Sequence
  Synthetic
gugguaguagcuaaaaaagaauu

SEQ ID NO: 401715 - RNA, 24 nt, Artificial Sequence
  Synthetic
ugugguaguagcuaaaaaagaauu

SEQ ID NO: 401716 - RNA, 18 nt, Artificial Sequence
  Synthetic
aaugggacaaaaagaauu

SEQ ID NO: 401717 - RNA, 19 nt, Artificial Sequence
  Synthetic
caaugggacaaaaagaauu

SEQ ID NO: 401718 - RNA, 20 nt, Artificial Sequence
  Synthetic
ucaaugggacaaaaagaauu

SEQ ID NO: 401719 - RNA, 21 nt, Artificial Sequence
  Synthetic
uucaaugggacaaaaagaauu

SEQ ID NO: 401720 - RNA, 22 nt, Artificial Sequence
  Synthetic
auucaaugggacaaaaagaauu

SEQ ID NO: 401721 - RNA, 23 nt, Artificial Sequence
  Synthetic
aauucaaugggacaaaaagaauu

SEQ ID NO: 401722 - RNA, 24 nt, Artificial Sequence
  Synthetic
caauucaaugggacaaaaagaauu

SEQ ID NO: 401723 - RNA, 18 nt, Artificial Sequence
  Synthetic
aaguagccacaaagaauu

SEQ ID NO: 401724 - RNA, 19 nt, Artificial Sequence
  Synthetic
aaaguagccacaaagaauu

SEQ ID NO: 401725 - RNA, 20 nt, Artificial Sequence
  Synthetic
aaaaguagccacaaagaauu

SEQ ID NO: 401726 - RNA, 21 nt, Artificial Sequence
  Synthetic
gaaaaguagccacaaagaauu

SEQ ID NO: 401727 - RNA, 22 nt, Artificial Sequence
  Synthetic
ggaaaaguagccacaaagaauu

SEQ ID NO: 401728 - RNA, 23 nt, Artificial Sequence
  Synthetic
aggaaaaguagccacaaagaauu

SEQ ID NO: 401729 - RNA, 24 nt, Artificial Sequence
  Synthetic
aaggaaaaguagccacaaagaauu

SEQ ID NO: 401730 - RNA, 18 nt, Artificial Sequence
  Synthetic
aggaauggaccaagaauu

SEQ ID NO: 401731 - RNA, 19 nt, Artificial Sequence
  Synthetic
uaggaauggaccaagaauu

SEQ ID NO: 401732 - RNA, 20 nt, Artificial Sequence
  Synthetic
cuaggaauggaccaagaauu

SEQ ID NO: 401733 - RNA, 21 nt, Artificial Sequence
  Synthetic
ucuaggaauggaccaagaauu

SEQ ID NO: 401734 - RNA, 22 nt, Artificial Sequence
  Synthetic
uucuaggaauggaccaagaauu

SEQ ID NO: 401735 - RNA, 23 nt, Artificial Sequence
  Synthetic
uuucuaggaauggaccaagaauu

SEQ ID NO: 401736 - RNA, 24 nt, Artificial Sequence
  Synthetic
auuucuaggaauggaccaagaauu

SEQ ID NO: 401737 - RNA, 18 nt, Artificial Sequence
  Synthetic
uauagaauaccaagaauu

SEQ ID NO: 401738 - RNA, 19 nt, Artificial Sequence
  Synthetic
auauagaauaccaagaauu

SEQ ID NO: 401739 - RNA, 20 nt, Artificial Sequence
  Synthetic
aauauagaauaccaagaauu

SEQ ID NO: 401740 - RNA, 21 nt, Artificial Sequence
  Synthetic
caauauagaauaccaagaauu

SEQ ID NO: 401741 - RNA, 22 nt, Artificial Sequence
  Synthetic
ccaauauagaauaccaagaauu

SEQ ID NO: 401742 - RNA, 23 nt, Artificial Sequence
  Synthetic
uccaauauagaauaccaagaauu

SEQ ID NO: 401743 - RNA, 24 nt, Artificial Sequence
  Synthetic
auccaauauagaauaccaagaauu

SEQ ID NO: 401744 - RNA, 18 nt, Artificial Sequence
  Synthetic
guuaaauuuucaagaauu

SEQ ID NO: 401745 - RNA, 19 nt, Artificial Sequence
  Synthetic
uguuaaauuuucaagaauu

SEQ ID NO: 401746 - RNA, 20 nt, Artificial Sequence
  Synthetic
uuguuaaauuuucaagaauu

SEQ ID NO: 401747 - RNA, 21 nt, Artificial Sequence
  Synthetic
cuuguuaaauuuucaagaauu

SEQ ID NO: 401748 - RNA, 22 nt, Artificial Sequence
  Synthetic
acuuguuaaauuuucaagaauu

SEQ ID NO: 401749 - RNA, 23 nt, Artificial Sequence
  Synthetic
uacuuguuaaauuuucaagaauu

SEQ ID NO: 401750 - RNA, 24 nt, Artificial Sequence
  Synthetic
auacuuguuaaauuuucaagaauu

SEQ ID NO: 401751 - RNA, 18 nt, Artificial Sequence
  Synthetic
cacauggaaagaagaauu

SEQ ID NO: 401752 - RNA, 19 nt, Artificial Sequence
  Synthetic
gcacauggaaagaagaauu

SEQ ID NO: 401753 - RNA, 20 nt, Artificial Sequence
  Synthetic
agcacauggaaagaagaauu

SEQ ID NO: 401754 - RNA, 21 nt, Artificial Sequence
  Synthetic
uagcacauggaaagaagaauu

SEQ ID NO: 401755 - RNA, 22 nt, Artificial Sequence
  Synthetic
cuagcacauggaaagaagaauu

SEQ ID NO: 401756 - RNA, 23 nt, Artificial Sequence
  Synthetic
acuagcacauggaaagaagaauu

SEQ ID NO: 401757 - RNA, 24 nt, Artificial Sequence
  Synthetic
aacuagcacauggaaagaagaauu

SEQ ID NO: 401758 - RNA, 18 nt, Artificial Sequence
  Synthetic
uaacuagccagaagaauu

SEQ ID NO: 401759 - RNA, 19 nt, Artificial Sequence
  Synthetic
guaacuagccagaagaauu

SEQ ID NO: 401760 - RNA, 20 nt, Artificial Sequence
  Synthetic
aguaacuagccagaagaauu

SEQ ID NO: 401761 - RNA, 21 nt, Artificial Sequence
  Synthetic
gaguaacuagccagaagaauu

SEQ ID NO: 401762 - RNA, 22 nt, Artificial Sequence
  Synthetic
agaguaacuagccagaagaauu

SEQ ID NO: 401763 - RNA, 23 nt, Artificial Sequence
  Synthetic
aagaguaacuagccagaagaauu

SEQ ID NO: 401764 - RNA, 24 nt, Artificial Sequence
  Synthetic
aaagaguaacuagccagaagaauu

SEQ ID NO: 401765 - RNA, 18 nt, Artificial Sequence
  Synthetic
ggacaucauugaagaauu

SEQ ID NO: 401766 - RNA, 19 nt, Artificial Sequence
  Synthetic
aggacaucauugaagaauu

SEQ ID NO: 401767 - RNA, 20 nt, Artificial Sequence
  Synthetic
caggacaucauugaagaauu

SEQ ID NO: 401768 - RNA, 21 nt, Artificial Sequence
  Synthetic
acaggacaucauugaagaauu

SEQ ID NO: 401769 - RNA, 22 nt, Artificial Sequence
  Synthetic
gacaggacaucauugaagaauu

SEQ ID NO: 401770 - RNA, 23 nt, Artificial Sequence
  Synthetic
ugacaggacaucauugaagaauu

SEQ ID NO: 401771 - RNA, 24 nt, Artificial Sequence
  Synthetic
uugacaggacaucauugaagaauu

SEQ ID NO: 401772 - RNA, 18 nt, Artificial Sequence
  Synthetic
agaagguuuuuaagaauu

SEQ ID NO: 401773 - RNA, 19 nt, Artificial Sequence
  Synthetic
cagaagguuuuuaagaauu

SEQ ID NO: 401774 - RNA, 20 nt, Artificial Sequence
  Synthetic
gcagaagguuuuuaagaauu

SEQ ID NO: 401775 - RNA, 21 nt, Artificial Sequence
  Synthetic
agcagaagguuuuuaagaauu

SEQ ID NO: 401776 - RNA, 22 nt, Artificial Sequence
  Synthetic
aagcagaagguuuuuaagaauu

SEQ ID NO: 401777 - RNA, 23 nt, Artificial Sequence
  Synthetic
aaagcagaagguuuuuaagaauu

SEQ ID NO: 401778 - RNA, 24 nt, Artificial Sequence
  Synthetic
gaaagcagaagguuuuuaagaauu

SEQ ID NO: 401779 - RNA, 18 nt, Artificial Sequence
  Synthetic
ugauccagagacagaauu

SEQ ID NO: 401780 - RNA, 19 nt, Artificial Sequence
  Synthetic
uugauccagagacagaauu

SEQ ID NO: 401781 - RNA, 20 nt, Artificial Sequence
  Synthetic
auugauccagagacagaauu

SEQ ID NO: 401782 - RNA, 21 nt, Artificial Sequence
  Synthetic
gauugauccagagacagaauu

SEQ ID NO: 401783 - RNA, 22 nt, Artificial Sequence
  Synthetic
agauugauccagagacagaauu

SEQ ID NO: 401784 - RNA, 23 nt, Artificial Sequence
  Synthetic
cagauugauccagagacagaauu

SEQ ID NO: 401785 - RNA, 24 nt, Artificial Sequence
  Synthetic
ucagauugauccagagacagaauu

SEQ ID NO: 401786 - RNA, 18 nt, Artificial Sequence
  Synthetic
auuggguauuacagaauu

SEQ ID NO: 401787 - RNA, 19 nt, Artificial Sequence
  Synthetic
cauuggguauuacagaauu

SEQ ID NO: 401788 - RNA, 20 nt, Artificial Sequence
  Synthetic
acauuggguauuacagaauu

SEQ ID NO: 401789 - RNA, 21 nt, Artificial Sequence
  Synthetic
gacauuggguauuacagaauu

SEQ ID NO: 401790 - RNA, 22 nt, Artificial Sequence
  Synthetic
agacauuggguauuacagaauu

SEQ ID NO: 401791 - RNA, 23 nt, Artificial Sequence
  Synthetic
gagacauuggguauuacagaauu

SEQ ID NO: 401792 - RNA, 24 nt, Artificial Sequence
  Synthetic
ggagacauuggguauuacagaauu

SEQ ID NO: 401793 - RNA, 18 nt, Artificial Sequence
  Synthetic
agaaggaacaucagaauu

SEQ ID NO: 401794 - RNA, 19 nt, Artificial Sequence
  Synthetic
aagaaggaacaucagaauu

SEQ ID NO: 401795 - RNA, 20 nt, Artificial Sequence
  Synthetic
uaagaaggaacaucagaauu

SEQ ID NO: 401796 - RNA, 21 nt, Artificial Sequence
  Synthetic
auaagaaggaacaucagaauu

SEQ ID NO: 401797 - RNA, 22 nt, Artificial Sequence
  Synthetic
cauaagaaggaacaucagaauu

SEQ ID NO: 401798 - RNA, 23 nt, Artificial Sequence
  Synthetic
gcauaagaaggaacaucagaauu

SEQ ID NO: 401799 - RNA, 24 nt, Artificial Sequence
  Synthetic
ggcauaagaaggaacaucagaauu

SEQ ID NO: 401800 - RNA, 18 nt, Artificial Sequence
  Synthetic
uauguacaauucagaauu

SEQ ID NO: 401801 - RNA, 19 nt, Artificial Sequence
  Synthetic
cuauguacaauucagaauu

SEQ ID NO: 401802 - RNA, 20 nt, Artificial Sequence
  Synthetic
gcuauguacaauucagaauu

SEQ ID NO: 401803 - RNA, 21 nt, Artificial Sequence
  Synthetic
agcuauguacaauucagaauu

SEQ ID NO: 401804 - RNA, 22 nt, Artificial Sequence
  Synthetic
aagcuauguacaauucagaauu

SEQ ID NO: 401805 - RNA, 23 nt, Artificial Sequence
  Synthetic
aaagcuauguacaauucagaauu

SEQ ID NO: 401806 - RNA, 24 nt, Artificial Sequence
  Synthetic
gaaagcuauguacaauucagaauu

SEQ ID NO: 401807 - RNA, 18 nt, Artificial Sequence
  Synthetic
guauaugaaaagagaauu

SEQ ID NO: 401808 - RNA, 19 nt, Artificial Sequence
  Synthetic
gguauaugaaaagagaauu

SEQ ID NO: 401809 - RNA, 20 nt, Artificial Sequence
  Synthetic
ugguauaugaaaagagaauu

SEQ ID NO: 401810 - RNA, 21 nt, Artificial Sequence
  Synthetic
gugguauaugaaaagagaauu

SEQ ID NO: 401811 - RNA, 22 nt, Artificial Sequence
  Synthetic
agugguauaugaaaagagaauu

SEQ ID NO: 401812 - RNA, 23 nt, Artificial Sequence
  Synthetic
gagugguauaugaaaagagaauu

SEQ ID NO: 401813 - RNA, 24 nt, Artificial Sequence
  Synthetic
ugagugguauaugaaaagagaauu

SEQ ID NO: 401814 - RNA, 18 nt, Artificial Sequence
  Synthetic
aagagagguaagagaauu

SEQ ID NO: 401815 - RNA, 19 nt, Artificial Sequence
  Synthetic
uaagagagguaagagaauu

SEQ ID NO: 401816 - RNA, 20 nt, Artificial Sequence
  Synthetic
uuaagagagguaagagaauu

SEQ ID NO: 401817 - RNA, 21 nt, Artificial Sequence
  Synthetic
uuuaagagagguaagagaauu

SEQ ID NO: 401818 - RNA, 22 nt, Artificial Sequence
  Synthetic
uuuuaagagagguaagagaauu

SEQ ID NO: 401819 - RNA, 23 nt, Artificial Sequence
  Synthetic
uuuuuaagagagguaagagaauu

SEQ ID NO: 401820 - RNA, 24 nt, Artificial Sequence
  Synthetic
auuuuuaagagagguaagagaauu

SEQ ID NO: 401821 - RNA, 18 nt, Artificial Sequence
  Synthetic
auacacacagagagaauu

SEQ ID NO: 401822 - RNA, 19 nt, Artificial Sequence
  Synthetic
gauacacacagagagaauu

SEQ ID NO: 401823 - RNA, 20 nt, Artificial Sequence
  Synthetic
agauacacacagagagaauu

SEQ ID NO: 401824 - RNA, 21 nt, Artificial Sequence
  Synthetic
cagauacacacagagagaauu

SEQ ID NO: 401825 - RNA, 22 nt, Artificial Sequence
  Synthetic
acagauacacacagagagaauu

SEQ ID NO: 401826 - RNA, 23 nt, Artificial Sequence
  Synthetic
cacagauacacacagagagaauu

SEQ ID NO: 401827 - RNA, 24 nt, Artificial Sequence
  Synthetic
acacagauacacacagagagaauu

SEQ ID NO: 401828 - RNA, 18 nt, Artificial Sequence
  Synthetic
guguuuaaauagagaauu

SEQ ID NO: 401829 - RNA, 19 nt, Artificial Sequence
  Synthetic
uguguuuaaauagagaauu

SEQ ID NO: 401830 - RNA, 20 nt, Artificial Sequence
  Synthetic
uuguguuuaaauagagaauu

SEQ ID NO: 401831 - RNA, 21 nt, Artificial Sequence
  Synthetic
auuguguuuaaauagagaauu

SEQ ID NO: 401832 - RNA, 22 nt, Artificial Sequence
  Synthetic
cauuguguuuaaauagagaauu

SEQ ID NO: 401833 - RNA, 23 nt, Artificial Sequence
  Synthetic
ccauuguguuuaaauagagaauu

SEQ ID NO: 401834 - RNA, 24 nt, Artificial Sequence
  Synthetic
gccauuguguuuaaauagagaauu

SEQ ID NO: 401835 - RNA, 18 nt, Artificial Sequence
  Synthetic
caacauccuuggagaauu

SEQ ID NO: 401836 - RNA, 19 nt, Artificial Sequence
  Synthetic
gcaacauccuuggagaauu

SEQ ID NO: 401837 - RNA, 20 nt, Artificial Sequence
  Synthetic
ugcaacauccuuggagaauu

SEQ ID NO: 401838 - RNA, 21 nt, Artificial Sequence
  Synthetic
gugcaacauccuuggagaauu

SEQ ID NO: 401839 - RNA, 22 nt, Artificial Sequence
  Synthetic
agugcaacauccuuggagaauu

SEQ ID NO: 401840 - RNA, 23 nt, Artificial Sequence
  Synthetic
cagugcaacauccuuggagaauu

SEQ ID NO: 401841 - RNA, 24 nt, Artificial Sequence
  Synthetic
ccagugcaacauccuuggagaauu

SEQ ID NO: 401842 - RNA, 18 nt, Artificial Sequence
  Synthetic
uuuugacuuaugagaauu

SEQ ID NO: 401843 - RNA, 19 nt, Artificial Sequence
  Synthetic
cuuuugacuuaugagaauu

SEQ ID NO: 401844 - RNA, 20 nt, Artificial Sequence
  Synthetic
ccuuuugacuuaugagaauu

SEQ ID NO: 401845 - RNA, 21 nt, Artificial Sequence
  Synthetic
accuuuugacuuaugagaauu

SEQ ID NO: 401846 - RNA, 22 nt, Artificial Sequence
  Synthetic
uaccuuuugacuuaugagaauu

SEQ ID NO: 401847 - RNA, 23 nt, Artificial Sequence
  Synthetic
guaccuuuugacuuaugagaauu

SEQ ID NO: 401848 - RNA, 24 nt, Artificial Sequence
  Synthetic
uguaccuuuugacuuaugagaauu

SEQ ID NO: 401849 - RNA, 18 nt, Artificial Sequence
  Synthetic
caggcaugauugagaauu

SEQ ID NO: 401850 - RNA, 19 nt, Artificial Sequence
  Synthetic
ucaggcaugauugagaauu

SEQ ID NO: 401851 - RNA, 20 nt, Artificial Sequence
  Synthetic
uucaggcaugauugagaauu

SEQ ID NO: 401852 - RNA, 21 nt, Artificial Sequence
  Synthetic
guucaggcaugauugagaauu

SEQ ID NO: 401853 - RNA, 22 nt, Artificial Sequence
  Synthetic
cguucaggcaugauugagaauu

SEQ ID NO: 401854 - RNA, 23 nt, Artificial Sequence
  Synthetic
acguucaggcaugauugagaauu

SEQ ID NO: 401855 - RNA, 24 nt, Artificial Sequence
  Synthetic
uacguucaggcaugauugagaauu

SEQ ID NO: 401856 - RNA, 18 nt, Artificial Sequence
  Synthetic
aagaaugauuugagaauu

SEQ ID NO: 401857 - RNA, 19 nt, Artificial Sequence
  Synthetic
caagaaugauuugagaauu

SEQ ID NO: 401858 - RNA, 20 nt, Artificial Sequence
  Synthetic
gcaagaaugauuugagaauu

SEQ ID NO: 401859 - RNA, 21 nt, Artificial Sequence
  Synthetic
ugcaagaaugauuugagaauu

SEQ ID NO: 401860 - RNA, 22 nt, Artificial Sequence
  Synthetic
augcaagaaugauuugagaauu

SEQ ID NO: 401861 - RNA, 23 nt, Artificial Sequence
  Synthetic
aaugcaagaaugauuugagaauu

SEQ ID NO: 401862 - RNA, 24 nt, Artificial Sequence
  Synthetic
aaaugcaagaaugauuugagaauu

SEQ ID NO: 401863 - RNA, 18 nt, Artificial Sequence
  Synthetic
gauaaggugaauagaauu

SEQ ID NO: 401864 - RNA, 19 nt, Artificial Sequence
  Synthetic
ggauaaggugaauagaauu

SEQ ID NO: 401865 - RNA, 20 nt, Artificial Sequence
  Synthetic
uggauaaggugaauagaauu

SEQ ID NO: 401866 - RNA, 21 nt, Artificial Sequence
  Synthetic
guggauaaggugaauagaauu

SEQ ID NO: 401867 - RNA, 22 nt, Artificial Sequence
  Synthetic
gguggauaaggugaauagaauu

SEQ ID NO: 401868 - RNA, 23 nt, Artificial Sequence
  Synthetic
agguggauaaggugaauagaauu

SEQ ID NO: 401869 - RNA, 24 nt, Artificial Sequence
  Synthetic
aagguggauaaggugaauagaauu

SEQ ID NO: 401870 - RNA, 18 nt, Artificial Sequence
  Synthetic
aauuacgguaauagaauu

SEQ ID NO: 401871 - RNA, 19 nt, Artificial Sequence
  Synthetic
caauuacgguaauagaauu

SEQ ID NO: 401872 - RNA, 20 nt, Artificial Sequence
  Synthetic
ucaauuacgguaauagaauu

SEQ ID NO: 401873 - RNA, 21 nt, Artificial Sequence
  Synthetic
cucaauuacgguaauagaauu

SEQ ID NO: 401874 - RNA, 22 nt, Artificial Sequence
  Synthetic
acucaauuacgguaauagaauu

SEQ ID NO: 401875 - RNA, 23 nt, Artificial Sequence
  Synthetic
aacucaauuacgguaauagaauu

SEQ ID NO: 401876 - RNA, 24 nt, Artificial Sequence
  Synthetic
aaacucaauuacgguaauagaauu

SEQ ID NO: 401877 - RNA, 18 nt, Artificial Sequence
  Synthetic
guucaaagugauagaauu

SEQ ID NO: 401878 - RNA, 19 nt, Artificial Sequence
  Synthetic
uguucaaagugauagaauu

SEQ ID NO: 401879 - RNA, 20 nt, Artificial Sequence
  Synthetic
uuguucaaagugauagaauu

SEQ ID NO: 401880 - RNA, 21 nt, Artificial Sequence
  Synthetic
auuguucaaagugauagaauu

SEQ ID NO: 401881 - RNA, 22 nt, Artificial Sequence
  Synthetic
uauuguucaaagugauagaauu

SEQ ID NO: 401882 - RNA, 23 nt, Artificial Sequence
  Synthetic
uuauuguucaaagugauagaauu

SEQ ID NO: 401883 - RNA, 24 nt, Artificial Sequence
  Synthetic
auuauuguucaaagugauagaauu

SEQ ID NO: 401884 - RNA, 18 nt, Artificial Sequence
  Synthetic
aucuuuucuuauagaauu

SEQ ID NO: 401885 - RNA, 19 nt, Artificial Sequence
  Synthetic
uaucuuuucuuauagaauu

SEQ ID NO: 401886 - RNA, 20 nt, Artificial Sequence
  Synthetic
uuaucuuuucuuauagaauu

SEQ ID NO: 401887 - RNA, 21 nt, Artificial Sequence
  Synthetic
cuuaucuuuucuuauagaauu

SEQ ID NO: 401888 - RNA, 22 nt, Artificial Sequence
  Synthetic
acuuaucuuuucuuauagaauu

SEQ ID NO: 401889 - RNA, 23 nt, Artificial Sequence
  Synthetic
aacuuaucuuuucuuauagaauu

SEQ ID NO: 401890 - RNA, 24 nt, Artificial Sequence
  Synthetic
aaacuuaucuuuucuuauagaauu

SEQ ID NO: 401891 - RNA, 18 nt, Artificial Sequence
  Synthetic
caaccucugccuagaauu

SEQ ID NO: 401892 - RNA, 19 nt, Artificial Sequence
  Synthetic
gcaaccucugccuagaauu

SEQ ID NO: 401893 - RNA, 20 nt, Artificial Sequence
  Synthetic
ugcaaccucugccuagaauu

SEQ ID NO: 401894 - RNA, 21 nt, Artificial Sequence
  Synthetic
uugcaaccucugccuagaauu

SEQ ID NO: 401895 - RNA, 22 nt, Artificial Sequence
  Synthetic
uuugcaaccucugccuagaauu

SEQ ID NO: 401896 - RNA, 23 nt, Artificial Sequence
  Synthetic
guuugcaaccucugccuagaauu

SEQ ID NO: 401897 - RNA, 24 nt, Artificial Sequence
  Synthetic
gguuugcaaccucugccuagaauu

SEQ ID NO: 401898 - RNA, 18 nt, Artificial Sequence
  Synthetic
uuuggcuaagcuagaauu

SEQ ID NO: 401899 - RNA, 19 nt, Artificial Sequence
  Synthetic
auuuggcuaagcuagaauu

SEQ ID NO: 401900 - RNA, 20 nt, Artificial Sequence
  Synthetic
gauuuggcuaagcuagaauu

SEQ ID NO: 401901 - RNA, 21 nt, Artificial Sequence
  Synthetic
ugauuuggcuaagcuagaauu

SEQ ID NO: 401902 - RNA, 22 nt, Artificial Sequence
  Synthetic
augauuuggcuaagcuagaauu

SEQ ID NO: 401903 - RNA, 23 nt, Artificial Sequence
  Synthetic
uaugauuuggcuaagcuagaauu

SEQ ID NO: 401904 - RNA, 24 nt, Artificial Sequence
  Synthetic
uuaugauuuggcuaagcuagaauu

SEQ ID NO: 401905 - RNA, 18 nt, Artificial Sequence
  Synthetic
acacaucaggcuagaauu

SEQ ID NO: 401906 - RNA, 19 nt, Artificial Sequence
  Synthetic
aacacaucaggcuagaauu

SEQ ID NO: 401907 - RNA, 20 nt, Artificial Sequence
  Synthetic
aaacacaucaggcuagaauu

SEQ ID NO: 401908 - RNA, 21 nt, Artificial Sequence
  Synthetic
aaaacacaucaggcuagaauu

SEQ ID NO: 401909 - RNA, 22 nt, Artificial Sequence
  Synthetic
aaaaacacaucaggcuagaauu

SEQ ID NO: 401910 - RNA, 23 nt, Artificial Sequence
  Synthetic
aaaaaacacaucaggcuagaauu

SEQ ID NO: 401911 - RNA, 24 nt, Artificial Sequence
  Synthetic
gaaaaaacacaucaggcuagaauu

SEQ ID NO: 401912 - RNA, 18 nt, Artificial Sequence
  Synthetic
uuucucauggcuagaauu

SEQ ID NO: 401913 - RNA, 19 nt, Artificial Sequence
  Synthetic
uuuucucauggcuagaauu

SEQ ID NO: 401914 - RNA, 20 nt, Artificial Sequence
  Synthetic
uuuuucucauggcuagaauu

SEQ ID NO: 401915 - RNA, 21 nt, Artificial Sequence
  Synthetic
auuuuucucauggcuagaauu

SEQ ID NO: 401916 - RNA, 22 nt, Artificial Sequence
  Synthetic
uauuuuucucauggcuagaauu

SEQ ID NO: 401917 - RNA, 23 nt, Artificial Sequence
  Synthetic
uuauuuuucucauggcuagaauu

SEQ ID NO: 401918 - RNA, 24 nt, Artificial Sequence
  Synthetic
auuauuuuucucauggcuagaauu

SEQ ID NO: 401919 - RNA, 18 nt, Artificial Sequence
  Synthetic
gagcuaaugucuagaauu

SEQ ID NO: 401920 - RNA, 19 nt, Artificial Sequence
  Synthetic
ggagcuaaugucuagaauu

SEQ ID NO: 401921 - RNA, 20 nt, Artificial Sequence
  Synthetic
aggagcuaaugucuagaauu

SEQ ID NO: 401922 - RNA, 21 nt, Artificial Sequence
  Synthetic
caggagcuaaugucuagaauu

SEQ ID NO: 401923 - RNA, 22 nt, Artificial Sequence
  Synthetic
acaggagcuaaugucuagaauu

SEQ ID NO: 401924 - RNA, 23 nt, Artificial Sequence
  Synthetic
aacaggagcuaaugucuagaauu

SEQ ID NO: 401925 - RNA, 24 nt, Artificial Sequence
  Synthetic
aaacaggagcuaaugucuagaauu

SEQ ID NO: 401926 - RNA, 18 nt, Artificial Sequence
  Synthetic
ucugagcuugguagaauu

SEQ ID NO: 401927 - RNA, 19 nt, Artificial Sequence
  Synthetic
uucugagcuugguagaauu

SEQ ID NO: 401928 - RNA, 20 nt, Artificial Sequence
  Synthetic
uuucugagcuugguagaauu

SEQ ID NO: 401929 - RNA, 21 nt, Artificial Sequence
  Synthetic
guuucugagcuugguagaauu

SEQ ID NO: 401930 - RNA, 22 nt, Artificial Sequence
  Synthetic
gguuucugagcuugguagaauu

SEQ ID NO: 401931 - RNA, 23 nt, Artificial Sequence
  Synthetic
ugguuucugagcuugguagaauu

SEQ ID NO: 401932 - RNA, 24 nt, Artificial Sequence
  Synthetic
uugguuucugagcuugguagaauu

SEQ ID NO: 401933 - RNA, 18 nt, Artificial Sequence
  Synthetic
cucaaugaaguuagaauu

SEQ ID NO: 401934 - RNA, 19 nt, Artificial Sequence
  Synthetic
gcucaaugaaguuagaauu

SEQ ID NO: 401935 - RNA, 20 nt, Artificial Sequence
  Synthetic
agcucaaugaaguuagaauu

SEQ ID NO: 401936 - RNA, 21 nt, Artificial Sequence
  Synthetic
uagcucaaugaaguuagaauu

SEQ ID NO: 401937 - RNA, 22 nt, Artificial Sequence
  Synthetic
auagcucaaugaaguuagaauu

SEQ ID NO: 401938 - RNA, 23 nt, Artificial Sequence
  Synthetic
cauagcucaaugaaguuagaauu

SEQ ID NO: 401939 - RNA, 24 nt, Artificial Sequence
  Synthetic
acauagcucaaugaaguuagaauu

SEQ ID NO: 401940 - RNA, 18 nt, Artificial Sequence
  Synthetic
gggaguuuuuuuagaauu

SEQ ID NO: 401941 - RNA, 19 nt, Artificial Sequence
  Synthetic
ugggaguuuuuuuagaauu

SEQ ID NO: 401942 - RNA, 20 nt, Artificial Sequence
  Synthetic
uugggaguuuuuuuagaauu

SEQ ID NO: 401943 - RNA, 21 nt, Artificial Sequence
  Synthetic
cuugggaguuuuuuuagaauu

SEQ ID NO: 401944 - RNA, 22 nt, Artificial Sequence
  Synthetic
ucuugggaguuuuuuuagaauu

SEQ ID NO: 401945 - RNA, 23 nt, Artificial Sequence
  Synthetic
cucuugggaguuuuuuuagaauu

SEQ ID NO: 401946 - RNA, 24 nt, Artificial Sequence
  Synthetic
ucucuugggaguuuuuuuagaauu

SEQ ID NO: 401947 - RNA, 18 nt, Artificial Sequence
  Synthetic
uaucuuuuuuuuagaauu

SEQ ID NO: 401948 - RNA, 19 nt, Artificial Sequence
  Synthetic
uuaucuuuuuuuuagaauu

SEQ ID NO: 401949 - RNA, 20 nt, Artificial Sequence
  Synthetic
uuuaucuuuuuuuuagaauu

SEQ ID NO: 401950 - RNA, 21 nt, Artificial Sequence
  Synthetic
uuuuaucuuuuuuuuagaauu

SEQ ID NO: 401951 - RNA, 22 nt, Artificial Sequence
  Synthetic
auuuuaucuuuuuuuuagaauu

SEQ ID NO: 401952 - RNA, 23 nt, Artificial Sequence
  Synthetic
uauuuuaucuuuuuuuuagaauu

SEQ ID NO: 401953 - RNA, 24 nt, Artificial Sequence
  Synthetic
uuauuuuaucuuuuuuuuagaauu

SEQ ID NO: 401954 - RNA, 18 nt, Artificial Sequence
  Synthetic
gaaugauaaaaacgaauu

SEQ ID NO: 401955 - RNA, 19 nt, Artificial Sequence
  Synthetic
ugaaugauaaaaacgaauu

SEQ ID NO: 401956 - RNA, 20 nt, Artificial Sequence
  Synthetic
augaaugauaaaaacgaauu

SEQ ID NO: 401957 - RNA, 21 nt, Artificial Sequence
  Synthetic
uaugaaugauaaaaacgaauu

SEQ ID NO: 401958 - RNA, 22 nt, Artificial Sequence
  Synthetic
guaugaaugauaaaaacgaauu

SEQ ID NO: 401959 - RNA, 23 nt, Artificial Sequence
  Synthetic
uguaugaaugauaaaaacgaauu

SEQ ID NO: 401960 - RNA, 24 nt, Artificial Sequence
  Synthetic
auguaugaaugauaaaaacgaauu

SEQ ID NO: 401961 - RNA, 18 nt, Artificial Sequence
  Synthetic
guucuauaguggcgaauu

SEQ ID NO: 401962 - RNA, 19 nt, Artificial Sequence
  Synthetic
aguucuauaguggcgaauu

SEQ ID NO: 401963 - RNA, 20 nt, Artificial Sequence
  Synthetic
gaguucuauaguggcgaauu

SEQ ID NO: 401964 - RNA, 21 nt, Artificial Sequence
  Synthetic
ugaguucuauaguggcgaauu

SEQ ID NO: 401965 - RNA, 22 nt, Artificial Sequence
  Synthetic
augaguucuauaguggcgaauu

SEQ ID NO: 401966 - RNA, 23 nt, Artificial Sequence
  Synthetic
gaugaguucuauaguggcgaauu

SEQ ID NO: 401967 - RNA, 24 nt, Artificial Sequence
  Synthetic
ggaugaguucuauaguggcgaauu

SEQ ID NO: 401968 - RNA, 18 nt, Artificial Sequence
  Synthetic
uauauacagaaaggaauu

SEQ ID NO: 401969 - RNA, 19 nt, Artificial Sequence
  Synthetic
auauauacagaaaggaauu

SEQ ID NO: 401970 - RNA, 20 nt, Artificial Sequence
  Synthetic
uauauauacagaaaggaauu

SEQ ID NO: 401971 - RNA, 21 nt, Artificial Sequence
  Synthetic
uuauauauacagaaaggaauu

SEQ ID NO: 401972 - RNA, 22 nt, Artificial Sequence
  Synthetic
uuuauauauacagaaaggaauu

SEQ ID NO: 401973 - RNA, 23 nt, Artificial Sequence
  Synthetic
auuuauauauacagaaaggaauu

SEQ ID NO: 401974 - RNA, 24 nt, Artificial Sequence
  Synthetic
uauuuauauauacagaaaggaauu

SEQ ID NO: 401975 - RNA, 18 nt, Artificial Sequence
  Synthetic
auucccuggcaaggaauu

SEQ ID NO: 401976 - RNA, 19 nt, Artificial Sequence
  Synthetic
uauucccuggcaaggaauu

SEQ ID NO: 401977 - RNA, 20 nt, Artificial Sequence
  Synthetic
uuauucccuggcaaggaauu

SEQ ID NO: 401978 - RNA, 21 nt, Artificial Sequence
  Synthetic
uuuauucccuggcaaggaauu

SEQ ID NO: 401979 - RNA, 22 nt, Artificial Sequence
  Synthetic
guuuauucccuggcaaggaauu

SEQ ID NO: 401980 - RNA, 23 nt, Artificial Sequence
  Synthetic
aguuuauucccuggcaaggaauu

SEQ ID NO: 401981 - RNA, 24 nt, Artificial Sequence
  Synthetic
caguuuauucccuggcaaggaauu

SEQ ID NO: 401982 - RNA, 18 nt, Artificial Sequence
  Synthetic
cuuuguuuugaaggaauu

SEQ ID NO: 401983 - RNA, 19 nt, Artificial Sequence
  Synthetic
ccuuuguuuugaaggaauu

SEQ ID NO: 401984 - RNA, 20 nt, Artificial Sequence
  Synthetic
uccuuuguuuugaaggaauu

SEQ ID NO: 401985 - RNA, 21 nt, Artificial Sequence
  Synthetic
guccuuuguuuugaaggaauu

SEQ ID NO: 401986 - RNA, 22 nt, Artificial Sequence
  Synthetic
uguccuuuguuuugaaggaauu

SEQ ID NO: 401987 - RNA, 23 nt, Artificial Sequence
  Synthetic
guguccuuuguuuugaaggaauu

SEQ ID NO: 401988 - RNA, 24 nt, Artificial Sequence
  Synthetic
uguguccuuuguuuugaaggaauu

SEQ ID NO: 401989 - RNA, 18 nt, Artificial Sequence
  Synthetic
uaugugugcucaggaauu

SEQ ID NO: 401990 - RNA, 19 nt, Artificial Sequence
  Synthetic
auaugugugcucaggaauu

SEQ ID NO: 401991 - RNA, 20 nt, Artificial Sequence
  Synthetic
aauaugugugcucaggaauu

SEQ ID NO: 401992 - RNA, 21 nt, Artificial Sequence
  Synthetic
uaauaugugugcucaggaauu

SEQ ID NO: 401993 - RNA, 22 nt, Artificial Sequence
  Synthetic
uuaauaugugugcucaggaauu

SEQ ID NO: 401994 - RNA, 23 nt, Artificial Sequence
  Synthetic
auuaauaugugugcucaggaauu

SEQ ID NO: 401995 - RNA, 24 nt, Artificial Sequence
  Synthetic
gauuaauaugugugcucaggaauu

SEQ ID NO: 401996 - RNA, 18 nt, Artificial Sequence
  Synthetic
caagacaccagaggaauu

SEQ ID NO: 401997 - RNA, 19 nt, Artificial Sequence
  Synthetic
ccaagacaccagaggaauu

SEQ ID NO: 401998 - RNA, 20 nt, Artificial Sequence
  Synthetic
cccaagacaccagaggaauu

SEQ ID NO: 401999 - RNA, 21 nt, Artificial Sequence
  Synthetic
ucccaagacaccagaggaauu

SEQ ID NO: 402000 - RNA, 22 nt, Artificial Sequence
  Synthetic
aucccaagacaccagaggaauu

SEQ ID NO: 402001 - RNA, 23 nt, Artificial Sequence
  Synthetic
aaucccaagacaccagaggaauu

SEQ ID NO: 402002 - RNA, 24 nt, Artificial Sequence
  Synthetic
aaaucccaagacaccagaggaauu

SEQ ID NO: 402003 - RNA, 18 nt, Artificial Sequence
  Synthetic
ugauucuaaggaggaauu

SEQ ID NO: 402004 - RNA, 19 nt, Artificial Sequence
  Synthetic
augauucuaaggaggaauu

SEQ ID NO: 402005 - RNA, 20 nt, Artificial Sequence
  Synthetic
caugauucuaaggaggaauu

SEQ ID NO: 402006 - RNA, 21 nt, Artificial Sequence
  Synthetic
gcaugauucuaaggaggaauu

SEQ ID NO: 402007 - RNA, 22 nt, Artificial Sequence
  Synthetic
ugcaugauucuaaggaggaauu

SEQ ID NO: 402008 - RNA, 23 nt, Artificial Sequence
  Synthetic
cugcaugauucuaaggaggaauu

SEQ ID NO: 402009 - RNA, 24 nt, Artificial Sequence
  Synthetic
gcugcaugauucuaaggaggaauu

SEQ ID NO: 402010 - RNA, 18 nt, Artificial Sequence
  Synthetic
gcucuuggauuaggaauu

SEQ ID NO: 402011 - RNA, 19 nt, Artificial Sequence
  Synthetic
ggcucuuggauuaggaauu

SEQ ID NO: 402012 - RNA, 20 nt, Artificial Sequence
  Synthetic
gggcucuuggauuaggaauu

SEQ ID NO: 402013 - RNA, 21 nt, Artificial Sequence
  Synthetic
agggcucuuggauuaggaauu

SEQ ID NO: 402014 - RNA, 22 nt, Artificial Sequence
  Synthetic
aagggcucuuggauuaggaauu

SEQ ID NO: 402015 - RNA, 23 nt, Artificial Sequence
  Synthetic
uaagggcucuuggauuaggaauu

SEQ ID NO: 402016 - RNA, 24 nt, Artificial Sequence
  Synthetic
auaagggcucuuggauuaggaauu

SEQ ID NO: 402017 - RNA, 18 nt, Artificial Sequence
  Synthetic
ccuaacugcgagggaauu

SEQ ID NO: 402018 - RNA, 19 nt, Artificial Sequence
  Synthetic
accuaacugcgagggaauu

SEQ ID NO: 402019 - RNA, 20 nt, Artificial Sequence
  Synthetic
caccuaacugcgagggaauu

SEQ ID NO: 402020 - RNA, 21 nt, Artificial Sequence
  Synthetic
acaccuaacugcgagggaauu

SEQ ID NO: 402021 - RNA, 22 nt, Artificial Sequence
  Synthetic
cacaccuaacugcgagggaauu

SEQ ID NO: 402022 - RNA, 23 nt, Artificial Sequence
  Synthetic
ucacaccuaacugcgagggaauu

SEQ ID NO: 402023 - RNA, 24 nt, Artificial Sequence
  Synthetic
gucacaccuaacugcgagggaauu

SEQ ID NO: 402024 - RNA, 18 nt, Artificial Sequence
  Synthetic
uguggugaguugggaauu

SEQ ID NO: 402025 - RNA, 19 nt, Artificial Sequence
  Synthetic
uuguggugaguugggaauu

SEQ ID NO: 402026 - RNA, 20 nt, Artificial Sequence
  Synthetic
auuguggugaguugggaauu

SEQ ID NO: 402027 - RNA, 21 nt, Artificial Sequence
  Synthetic
uauuguggugaguugggaauu

SEQ ID NO: 402028 - RNA, 22 nt, Artificial Sequence
  Synthetic
uuauuguggugaguugggaauu

SEQ ID NO: 402029 - RNA, 23 nt, Artificial Sequence
  Synthetic
cuuauuguggugaguugggaauu

SEQ ID NO: 402030 - RNA, 24 nt, Artificial Sequence
  Synthetic
ucuuauuguggugaguugggaauu

SEQ ID NO: 402031 - RNA, 18 nt, Artificial Sequence
  Synthetic
accauugucaauggaauu

SEQ ID NO: 402032 - RNA, 19 nt, Artificial Sequence
  Synthetic
caccauugucaauggaauu

SEQ ID NO: 402033 - RNA, 20 nt, Artificial Sequence
  Synthetic
acaccauugucaauggaauu

SEQ ID NO: 402034 - RNA, 21 nt, Artificial Sequence
  Synthetic
uacaccauugucaauggaauu

SEQ ID NO: 402035 - RNA, 22 nt, Artificial Sequence
  Synthetic
guacaccauugucaauggaauu

SEQ ID NO: 402036 - RNA, 23 nt, Artificial Sequence
  Synthetic
uguacaccauugucaauggaauu

SEQ ID NO: 402037 - RNA, 24 nt, Artificial Sequence
  Synthetic
guguacaccauugucaauggaauu

SEQ ID NO: 402038 - RNA, 18 nt, Artificial Sequence
  Synthetic
uagacuuagaauggaauu

SEQ ID NO: 402039 - RNA, 19 nt, Artificial Sequence
  Synthetic
guagacuuagaauggaauu

SEQ ID NO: 402040 - RNA, 20 nt, Artificial Sequence
  Synthetic
aguagacuuagaauggaauu

SEQ ID NO: 402041 - RNA, 21 nt, Artificial Sequence
  Synthetic
caguagacuuagaauggaauu

SEQ ID NO: 402042 - RNA, 22 nt, Artificial Sequence
  Synthetic
ucaguagacuuagaauggaauu

SEQ ID NO: 402043 - RNA, 23 nt, Artificial Sequence
  Synthetic
uucaguagacuuagaauggaauu

SEQ ID NO: 402044 - RNA, 24 nt, Artificial Sequence
  Synthetic
auucaguagacuuagaauggaauu

SEQ ID NO: 402045 - RNA, 18 nt, Artificial Sequence
  Synthetic
gccacugaguauggaauu

SEQ ID NO: 402046 - RNA, 19 nt, Artificial Sequence
  Synthetic
ugccacugaguauggaauu

SEQ ID NO: 402047 - RNA, 20 nt, Artificial Sequence
  Synthetic
augccacugaguauggaauu

SEQ ID NO: 402048 - RNA, 21 nt, Artificial Sequence
  Synthetic
aaugccacugaguauggaauu

SEQ ID NO: 402049 - RNA, 22 nt, Artificial Sequence
  Synthetic
uaaugccacugaguauggaauu

SEQ ID NO: 402050 - RNA, 23 nt, Artificial Sequence
  Synthetic
auaaugccacugaguauggaauu

SEQ ID NO: 402051 - RNA, 24 nt, Artificial Sequence
  Synthetic
cauaaugccacugaguauggaauu

SEQ ID NO: 402052 - RNA, 18 nt, Artificial Sequence
  Synthetic
agaacccuaaguggaauu

SEQ ID NO: 402053 - RNA, 19 nt, Artificial Sequence
  Synthetic
aagaacccuaaguggaauu

SEQ ID NO: 402054 - RNA, 20 nt, Artificial Sequence
  Synthetic
aaagaacccuaaguggaauu

SEQ ID NO: 402055 - RNA, 21 nt, Artificial Sequence
  Synthetic
aaaagaacccuaaguggaauu

SEQ ID NO: 402056 - RNA, 22 nt, Artificial Sequence
  Synthetic
gaaaagaacccuaaguggaauu

SEQ ID NO: 402057 - RNA, 23 nt, Artificial Sequence
  Synthetic
cgaaaagaacccuaaguggaauu

SEQ ID NO: 402058 - RNA, 24 nt, Artificial Sequence
  Synthetic
ucgaaaagaacccuaaguggaauu

SEQ ID NO: 402059 - RNA, 18 nt, Artificial Sequence
  Synthetic
gagcuuaccuguggaauu

SEQ ID NO: 402060 - RNA, 19 nt, Artificial Sequence
  Synthetic
ggagcuuaccuguggaauu

SEQ ID NO: 402061 - RNA, 20 nt, Artificial Sequence
  Synthetic
uggagcuuaccuguggaauu

SEQ ID NO: 402062 - RNA, 21 nt, Artificial Sequence
  Synthetic
cuggagcuuaccuguggaauu

SEQ ID NO: 402063 - RNA, 22 nt, Artificial Sequence
  Synthetic
ucuggagcuuaccuguggaauu

SEQ ID NO: 402064 - RNA, 23 nt, Artificial Sequence
  Synthetic
uucuggagcuuaccuguggaauu

SEQ ID NO: 402065 - RNA, 24 nt, Artificial Sequence
  Synthetic
guucuggagcuuaccuguggaauu

SEQ ID NO: 402066 - RNA, 18 nt, Artificial Sequence
  Synthetic
uuuaaaugguguggaauu

SEQ ID NO: 402067 - RNA, 19 nt, Artificial Sequence
  Synthetic
uuuuaaaugguguggaauu

SEQ ID NO: 402068 - RNA, 20 nt, Artificial Sequence
  Synthetic
auuuuaaaugguguggaauu

SEQ ID NO: 402069 - RNA, 21 nt, Artificial Sequence
  Synthetic
aauuuuaaaugguguggaauu

SEQ ID NO: 402070 - RNA, 22 nt, Artificial Sequence
  Synthetic
aaauuuuaaaugguguggaauu

SEQ ID NO: 402071 - RNA, 23 nt, Artificial Sequence
  Synthetic
uaaauuuuaaaugguguggaauu

SEQ ID NO: 402072 - RNA, 24 nt, Artificial Sequence
  Synthetic
auaaauuuuaaaugguguggaauu

SEQ ID NO: 402073 - RNA, 18 nt, Artificial Sequence
  Synthetic
agaauagauagaugaauu

SEQ ID NO: 402074 - RNA, 19 nt, Artificial Sequence
  Synthetic
cagaauagauagaugaauu

SEQ ID NO: 402075 - RNA, 20 nt, Artificial Sequence
  Synthetic
acagaauagauagaugaauu

SEQ ID NO: 402076 - RNA, 21 nt, Artificial Sequence
  Synthetic
gacagaauagauagaugaauu

SEQ ID NO: 402077 - RNA, 22 nt, Artificial Sequence
  Synthetic
agacagaauagauagaugaauu

SEQ ID NO: 402078 - RNA, 23 nt, Artificial Sequence
  Synthetic
uagacagaauagauagaugaauu

SEQ ID NO: 402079 - RNA, 24 nt, Artificial Sequence
  Synthetic
guagacagaauagauagaugaauu

SEQ ID NO: 402080 - RNA, 18 nt, Artificial Sequence
  Synthetic
aggugauuuguaugaauu

SEQ ID NO: 402081 - RNA, 19 nt, Artificial Sequence
  Synthetic
uaggugauuuguaugaauu

SEQ ID NO: 402082 - RNA, 20 nt, Artificial Sequence
  Synthetic
auaggugauuuguaugaauu

SEQ ID NO: 402083 - RNA, 21 nt, Artificial Sequence
  Synthetic
uauaggugauuuguaugaauu

SEQ ID NO: 402084 - RNA, 22 nt, Artificial Sequence
  Synthetic
cuauaggugauuuguaugaauu

SEQ ID NO: 402085 - RNA, 23 nt, Artificial Sequence
  Synthetic
acuauaggugauuuguaugaauu

SEQ ID NO: 402086 - RNA, 24 nt, Artificial Sequence
  Synthetic
cacuauaggugauuuguaugaauu

SEQ ID NO: 402087 - RNA, 18 nt, Artificial Sequence
  Synthetic
aaauaauaauccugaauu

SEQ ID NO: 402088 - RNA, 19 nt, Artificial Sequence
  Synthetic
aaaauaauaauccugaauu

SEQ ID NO: 402089 - RNA, 20 nt, Artificial Sequence
  Synthetic
aaaaauaauaauccugaauu

SEQ ID NO: 402090 - RNA, 21 nt, Artificial Sequence
  Synthetic
aaaaaauaauaauccugaauu

SEQ ID NO: 402091 - RNA, 22 nt, Artificial Sequence
  Synthetic
gaaaaaauaauaauccugaauu

SEQ ID NO: 402092 - RNA, 23 nt, Artificial Sequence
  Synthetic
ugaaaaaauaauaauccugaauu

SEQ ID NO: 402093 - RNA, 24 nt, Artificial Sequence
  Synthetic
uugaaaaaauaauaauccugaauu

SEQ ID NO: 402094 - RNA, 18 nt, Artificial Sequence
  Synthetic
acuauuggguccugaauu

SEQ ID NO: 402095 - RNA, 19 nt, Artificial Sequence
  Synthetic
uacuauuggguccugaauu

SEQ ID NO: 402096 - RNA, 20 nt, Artificial Sequence
  Synthetic
uuacuauuggguccugaauu

SEQ ID NO: 402097 - RNA, 21 nt, Artificial Sequence
  Synthetic
auuacuauuggguccugaauu

SEQ ID NO: 402098 - RNA, 22 nt, Artificial Sequence
  Synthetic
uauuacuauuggguccugaauu

SEQ ID NO: 402099 - RNA, 23 nt, Artificial Sequence
  Synthetic
auauuacuauuggguccugaauu

SEQ ID NO: 402100 - RNA, 24 nt, Artificial Sequence
  Synthetic
uauauuacuauuggguccugaauu

SEQ ID NO: 402101 - RNA, 18 nt, Artificial Sequence
  Synthetic
ccucuuuucugcugaauu

SEQ ID NO: 402102 - RNA, 19 nt, Artificial Sequence
  Synthetic
accucuuuucugcugaauu

SEQ ID NO: 402103 - RNA, 20 nt, Artificial Sequence
  Synthetic
gaccucuuuucugcugaauu

SEQ ID NO: 402104 - RNA, 21 nt, Artificial Sequence
  Synthetic
ugaccucuuuucugcugaauu

SEQ ID NO: 402105 - RNA, 22 nt, Artificial Sequence
  Synthetic
uugaccucuuuucugcugaauu

SEQ ID NO: 402106 - RNA, 23 nt, Artificial Sequence
  Synthetic
cuugaccucuuuucugcugaauu

SEQ ID NO: 402107 - RNA, 24 nt, Artificial Sequence
  Synthetic
acuugaccucuuuucugcugaauu

SEQ ID NO: 402108 - RNA, 18 nt, Artificial Sequence
  Synthetic
ucuuuacauuucugaauu

SEQ ID NO: 402109 - RNA, 19 nt, Artificial Sequence
  Synthetic
uucuuuacauuucugaauu

SEQ ID NO: 402110 - RNA, 20 nt, Artificial Sequence
  Synthetic
uuucuuuacauuucugaauu

SEQ ID NO: 402111 - RNA, 21 nt, Artificial Sequence
  Synthetic
auuucuuuacauuucugaauu

SEQ ID NO: 402112 - RNA, 22 nt, Artificial Sequence
  Synthetic
uauuucuuuacauuucugaauu

SEQ ID NO: 402113 - RNA, 23 nt, Artificial Sequence
  Synthetic
guauuucuuuacauuucugaauu

SEQ ID NO: 402114 - RNA, 24 nt, Artificial Sequence
  Synthetic
gguauuucuuuacauuucugaauu

SEQ ID NO: 402115 - RNA, 18 nt, Artificial Sequence
  Synthetic
auagcacugaagugaauu

SEQ ID NO: 402116 - RNA, 19 nt, Artificial Sequence
  Synthetic
aauagcacugaagugaauu

SEQ ID NO: 402117 - RNA, 20 nt, Artificial Sequence
  Synthetic
aaauagcacugaagugaauu

SEQ ID NO: 402118 - RNA, 21 nt, Artificial Sequence
  Synthetic
aaaauagcacugaagugaauu

SEQ ID NO: 402119 - RNA, 22 nt, Artificial Sequence
  Synthetic
aaaaauagcacugaagugaauu

SEQ ID NO: 402120 - RNA, 23 nt, Artificial Sequence
  Synthetic
uaaaaauagcacugaagugaauu

SEQ ID NO: 402121 - RNA, 24 nt, Artificial Sequence
  Synthetic
uuaaaaauagcacugaagugaauu

SEQ ID NO: 402122 - RNA, 18 nt, Artificial Sequence
  Synthetic
aaccaguaguagugaauu

SEQ ID NO: 402123 - RNA, 19 nt, Artificial Sequence
  Synthetic
caaccaguaguagugaauu

SEQ ID NO: 402124 - RNA, 20 nt, Artificial Sequence
  Synthetic
acaaccaguaguagugaauu

SEQ ID NO: 402125 - RNA, 21 nt, Artificial Sequence
  Synthetic
cacaaccaguaguagugaauu

SEQ ID NO: 402126 - RNA, 22 nt, Artificial Sequence
  Synthetic
acacaaccaguaguagugaauu

SEQ ID NO: 402127 - RNA, 23 nt, Artificial Sequence
  Synthetic
cacacaaccaguaguagugaauu

SEQ ID NO: 402128 - RNA, 24 nt, Artificial Sequence
  Synthetic
ucacacaaccaguaguagugaauu

SEQ ID NO: 402129 - RNA, 18 nt, Artificial Sequence
  Synthetic
ugauaauuuacuugaauu

SEQ ID NO: 402130 - RNA, 19 nt, Artificial Sequence
  Synthetic
augauaauuuacuugaauu

SEQ ID NO: 402131 - RNA, 20 nt, Artificial Sequence
  Synthetic
aaugauaauuuacuugaauu

SEQ ID NO: 402132 - RNA, 21 nt, Artificial Sequence
  Synthetic
aaaugauaauuuacuugaauu

SEQ ID NO: 402133 - RNA, 22 nt, Artificial Sequence
  Synthetic
aaaaugauaauuuacuugaauu

SEQ ID NO: 402134 - RNA, 23 nt, Artificial Sequence
  Synthetic
caaaaugauaauuuacuugaauu

SEQ ID NO: 402135 - RNA, 24 nt, Artificial Sequence
  Synthetic
gcaaaaugauaauuuacuugaauu

SEQ ID NO: 402136 - RNA, 18 nt, Artificial Sequence
  Synthetic
aaaccuagaguuugaauu

SEQ ID NO: 402137 - RNA, 19 nt, Artificial Sequence
  Synthetic
uaaaccuagaguuugaauu

SEQ ID NO: 402138 - RNA, 20 nt, Artificial Sequence
  Synthetic
guaaaccuagaguuugaauu

SEQ ID NO: 402139 - RNA, 21 nt, Artificial Sequence
  Synthetic
gguaaaccuagaguuugaauu

SEQ ID NO: 402140 - RNA, 22 nt, Artificial Sequence
  Synthetic
ugguaaaccuagaguuugaauu

SEQ ID NO: 402141 - RNA, 23 nt, Artificial Sequence
  Synthetic
uugguaaaccuagaguuugaauu

SEQ ID NO: 402142 - RNA, 24 nt, Artificial Sequence
  Synthetic
cuugguaaaccuagaguuugaauu

SEQ ID NO: 402143 - RNA, 18 nt, Artificial Sequence
  Synthetic
cacaaucaauuuugaauu

SEQ ID NO: 402144 - RNA, 19 nt, Artificial Sequence
  Synthetic
gcacaaucaauuuugaauu

SEQ ID NO: 402145 - RNA, 20 nt, Artificial Sequence
  Synthetic
agcacaaucaauuuugaauu

SEQ ID NO: 402146 - RNA, 21 nt, Artificial Sequence
  Synthetic
gagcacaaucaauuuugaauu

SEQ ID NO: 402147 - RNA, 22 nt, Artificial Sequence
  Synthetic
agagcacaaucaauuuugaauu

SEQ ID NO: 402148 - RNA, 23 nt, Artificial Sequence
  Synthetic
gagagcacaaucaauuuugaauu

SEQ ID NO: 402149 - RNA, 24 nt, Artificial Sequence
  Synthetic
agagagcacaaucaauuuugaauu

SEQ ID NO: 402150 - RNA, 18 nt, Artificial Sequence
  Synthetic
aaagaaagcuuuugaauu

SEQ ID NO: 402151 - RNA, 19 nt, Artificial Sequence
  Synthetic
uaaagaaagcuuuugaauu

SEQ ID NO: 402152 - RNA, 20 nt, Artificial Sequence
  Synthetic
guaaagaaagcuuuugaauu

SEQ ID NO: 402153 - RNA, 21 nt, Artificial Sequence
  Synthetic
uguaaagaaagcuuuugaauu

SEQ ID NO: 402154 - RNA, 22 nt, Artificial Sequence
  Synthetic
uuguaaagaaagcuuuugaauu

SEQ ID NO: 402155 - RNA, 23 nt, Artificial Sequence
  Synthetic
auuguaaagaaagcuuuugaauu

SEQ ID NO: 402156 - RNA, 24 nt, Artificial Sequence
  Synthetic
uauuguaaagaaagcuuuugaauu

SEQ ID NO: 402157 - RNA, 18 nt, Artificial Sequence
  Synthetic
ucucucacuuuuugaauu

SEQ ID NO: 402158 - RNA, 19 nt, Artificial Sequence
  Synthetic
cucucucacuuuuugaauu

SEQ ID NO: 402159 - RNA, 20 nt, Artificial Sequence
  Synthetic
ucucucucacuuuuugaauu

SEQ ID NO: 402160 - RNA, 21 nt, Artificial Sequence
  Synthetic
uucucucucacuuuuugaauu

SEQ ID NO: 402161 - RNA, 22 nt, Artificial Sequence
  Synthetic
uuucucucucacuuuuugaauu

SEQ ID NO: 402162 - RNA, 23 nt, Artificial Sequence
  Synthetic
uuuucucucucacuuuuugaauu

SEQ ID NO: 402163 - RNA, 24 nt, Artificial Sequence
  Synthetic
uuuuucucucucacuuuuugaauu

SEQ ID NO: 402164 - RNA, 18 nt, Artificial Sequence
  Synthetic
uguaaguacaaaauaauu

SEQ ID NO: 402165 - RNA, 19 nt, Artificial Sequence
  Synthetic
cuguaaguacaaaauaauu

SEQ ID NO: 402166 - RNA, 20 nt, Artificial Sequence
  Synthetic
gcuguaaguacaaaauaauu

SEQ ID NO: 402167 - RNA, 21 nt, Artificial Sequence
  Synthetic
agcuguaaguacaaaauaauu

SEQ ID NO: 402168 - RNA, 22 nt, Artificial Sequence
  Synthetic
uagcuguaaguacaaaauaauu

SEQ ID NO: 402169 - RNA, 23 nt, Artificial Sequence
  Synthetic
cuagcuguaaguacaaaauaauu

SEQ ID NO: 402170 - RNA, 24 nt, Artificial Sequence
  Synthetic
gcuagcuguaaguacaaaauaauu

SEQ ID NO: 402171 - RNA, 18 nt, Artificial Sequence
  Synthetic
uuaauuacuaaaauaauu

SEQ ID NO: 402172 - RNA, 19 nt, Artificial Sequence
  Synthetic
uuuaauuacuaaaauaauu

SEQ ID NO: 402173 - RNA, 20 nt, Artificial Sequence
  Synthetic
uuuuaauuacuaaaauaauu

SEQ ID NO: 402174 - RNA, 21 nt, Artificial Sequence
  Synthetic
auuuuaauuacuaaaauaauu

SEQ ID NO: 402175 - RNA, 22 nt, Artificial Sequence
  Synthetic
uauuuuaauuacuaaaauaauu

SEQ ID NO: 402176 - RNA, 23 nt, Artificial Sequence
  Synthetic
cuauuuuaauuacuaaaauaauu

SEQ ID NO: 402177 - RNA, 24 nt, Artificial Sequence
  Synthetic
acuauuuuaauuacuaaaauaauu

SEQ ID NO: 402178 - RNA, 18 nt, Artificial Sequence
  Synthetic
ccaagcagagaaauaauu

SEQ ID NO: 402179 - RNA, 19 nt, Artificial Sequence
  Synthetic
uccaagcagagaaauaauu

SEQ ID NO: 402180 - RNA, 20 nt, Artificial Sequence
  Synthetic
auccaagcagagaaauaauu

SEQ ID NO: 402181 - RNA, 21 nt, Artificial Sequence
  Synthetic
cauccaagcagagaaauaauu

SEQ ID NO: 402182 - RNA, 22 nt, Artificial Sequence
  Synthetic
ucauccaagcagagaaauaauu

SEQ ID NO: 402183 - RNA, 23 nt, Artificial Sequence
  Synthetic
cucauccaagcagagaaauaauu

SEQ ID NO: 402184 - RNA, 24 nt, Artificial Sequence
  Synthetic
ccucauccaagcagagaaauaauu

SEQ ID NO: 402185 - RNA, 18 nt, Artificial Sequence
  Synthetic
accaauauagaaauaauu

SEQ ID NO: 402186 - RNA, 19 nt, Artificial Sequence
  Synthetic
caccaauauagaaauaauu

SEQ ID NO: 402187 - RNA, 20 nt, Artificial Sequence
  Synthetic
ucaccaauauagaaauaauu

SEQ ID NO: 402188 - RNA, 21 nt, Artificial Sequence
  Synthetic
aucaccaauauagaaauaauu

SEQ ID NO: 402189 - RNA, 22 nt, Artificial Sequence
  Synthetic
uaucaccaauauagaaauaauu

SEQ ID NO: 402190 - RNA, 23 nt, Artificial Sequence
  Synthetic
cuaucaccaauauagaaauaauu

SEQ ID NO: 402191 - RNA, 24 nt, Artificial Sequence
  Synthetic
acuaucaccaauauagaaauaauu

SEQ ID NO: 402192 - RNA, 18 nt, Artificial Sequence
  Synthetic
ugucacuuuccaauaauu

SEQ ID NO: 402193 - RNA, 19 nt, Artificial Sequence
  Synthetic
cugucacuuuccaauaauu

SEQ ID NO: 402194 - RNA, 20 nt, Artificial Sequence
  Synthetic
ucugucacuuuccaauaauu

SEQ ID NO: 402195 - RNA, 21 nt, Artificial Sequence
  Synthetic
uucugucacuuuccaauaauu

SEQ ID NO: 402196 - RNA, 22 nt, Artificial Sequence
  Synthetic
auucugucacuuuccaauaauu

SEQ ID NO: 402197 - RNA, 23 nt, Artificial Sequence
  Synthetic
cauucugucacuuuccaauaauu

SEQ ID NO: 402198 - RNA, 24 nt, Artificial Sequence
  Synthetic
acauucugucacuuuccaauaauu

SEQ ID NO: 402199 - RNA, 18 nt, Artificial Sequence
  Synthetic
uauugccuuagaauaauu

SEQ ID NO: 402200 - RNA, 19 nt, Artificial Sequence
  Synthetic
uuauugccuuagaauaauu

SEQ ID NO: 402201 - RNA, 20 nt, Artificial Sequence
  Synthetic
guuauugccuuagaauaauu

SEQ ID NO: 402202 - RNA, 21 nt, Artificial Sequence
  Synthetic
uguuauugccuuagaauaauu

SEQ ID NO: 402203 - RNA, 22 nt, Artificial Sequence
  Synthetic
auguuauugccuuagaauaauu

SEQ ID NO: 402204 - RNA, 23 nt, Artificial Sequence
  Synthetic
gauguuauugccuuagaauaauu

SEQ ID NO: 402205 - RNA, 24 nt, Artificial Sequence
  Synthetic
agauguuauugccuuagaauaauu

SEQ ID NO: 402206 - RNA, 18 nt, Artificial Sequence
  Synthetic
auauucacaugaauaauu

SEQ ID NO: 402207 - RNA, 19 nt, Artificial Sequence
  Synthetic
gauauucacaugaauaauu

SEQ ID NO: 402208 - RNA, 20 nt, Artificial Sequence
  Synthetic
agauauucacaugaauaauu

SEQ ID NO: 402209 - RNA, 21 nt, Artificial Sequence
  Synthetic
uagauauucacaugaauaauu

SEQ ID NO: 402210 - RNA, 22 nt, Artificial Sequence
  Synthetic
uuagauauucacaugaauaauu

SEQ ID NO: 402211 - RNA, 23 nt, Artificial Sequence
  Synthetic
uuuagauauucacaugaauaauu

SEQ ID NO: 402212 - RNA, 24 nt, Artificial Sequence
  Synthetic
uuuuagauauucacaugaauaauu

SEQ ID NO: 402213 - RNA, 18 nt, Artificial Sequence
  Synthetic
ucuaaucauauaauaauu

SEQ ID NO: 402214 - RNA, 19 nt, Artificial Sequence
  Synthetic
cucuaaucauauaauaauu

SEQ ID NO: 402215 - RNA, 20 nt, Artificial Sequence
  Synthetic
ucucuaaucauauaauaauu

SEQ ID NO: 402216 - RNA, 21 nt, Artificial Sequence
  Synthetic
uucucuaaucauauaauaauu

SEQ ID NO: 402217 - RNA, 22 nt, Artificial Sequence
  Synthetic
uuucucuaaucauauaauaauu

SEQ ID NO: 402218 - RNA, 23 nt, Artificial Sequence
  Synthetic
auuucucuaaucauauaauaauu

SEQ ID NO: 402219 - RNA, 24 nt, Artificial Sequence
  Synthetic
cauuucucuaaucauauaauaauu

SEQ ID NO: 402220 - RNA, 18 nt, Artificial Sequence
  Synthetic
uugcucucacuaauaauu

SEQ ID NO: 402221 - RNA, 19 nt, Artificial Sequence
  Synthetic
auugcucucacuaauaauu

SEQ ID NO: 402222 - RNA, 20 nt, Artificial Sequence
  Synthetic
gauugcucucacuaauaauu

SEQ ID NO: 402223 - RNA, 21 nt, Artificial Sequence
  Synthetic
ugauugcucucacuaauaauu

SEQ ID NO: 402224 - RNA, 22 nt, Artificial Sequence
  Synthetic
cugauugcucucacuaauaauu

SEQ ID NO: 402225 - RNA, 23 nt, Artificial Sequence
  Synthetic
acugauugcucucacuaauaauu

SEQ ID NO: 402226 - RNA, 24 nt, Artificial Sequence
  Synthetic
uacugauugcucucacuaauaauu

SEQ ID NO: 402227 - RNA, 18 nt, Artificial Sequence
  Synthetic
cuguuguaucuaauaauu

SEQ ID NO: 402228 - RNA, 19 nt, Artificial Sequence
  Synthetic
ucuguuguaucuaauaauu

SEQ ID NO: 402229 - RNA, 20 nt, Artificial Sequence
  Synthetic
uucuguuguaucuaauaauu

SEQ ID NO: 402230 - RNA, 21 nt, Artificial Sequence
  Synthetic
cuucuguuguaucuaauaauu

SEQ ID NO: 402231 - RNA, 22 nt, Artificial Sequence
  Synthetic
ucuucuguuguaucuaauaauu

SEQ ID NO: 402232 - RNA, 23 nt, Artificial Sequence
  Synthetic
aucuucuguuguaucuaauaauu

SEQ ID NO: 402233 - RNA, 24 nt, Artificial Sequence
  Synthetic
uaucuucuguuguaucuaauaauu

SEQ ID NO: 402234 - RNA, 18 nt, Artificial Sequence
  Synthetic
uuggaaacuguaauaauu

SEQ ID NO: 402235 - RNA, 19 nt, Artificial Sequence
  Synthetic
uuuggaaacuguaauaauu

SEQ ID NO: 402236 - RNA, 20 nt, Artificial Sequence
  Synthetic
auuuggaaacuguaauaauu

SEQ ID NO: 402237 - RNA, 21 nt, Artificial Sequence
  Synthetic
cauuuggaaacuguaauaauu

SEQ ID NO: 402238 - RNA, 22 nt, Artificial Sequence
  Synthetic
gcauuuggaaacuguaauaauu

SEQ ID NO: 402239 - RNA, 23 nt, Artificial Sequence
  Synthetic
ugcauuuggaaacuguaauaauu

SEQ ID NO: 402240 - RNA, 24 nt, Artificial Sequence
  Synthetic
gugcauuuggaaacuguaauaauu

SEQ ID NO: 402241 - RNA, 18 nt, Artificial Sequence
  Synthetic
auuaaagaaaacauaauu

SEQ ID NO: 402242 - RNA, 19 nt, Artificial Sequence
  Synthetic
aauuaaagaaaacauaauu

SEQ ID NO: 402243 - RNA, 20 nt, Artificial Sequence
  Synthetic
uaauuaaagaaaacauaauu

SEQ ID NO: 402244 - RNA, 21 nt, Artificial Sequence
  Synthetic
auaauuaaagaaaacauaauu

SEQ ID NO: 402245 - RNA, 22 nt, Artificial Sequence
  Synthetic
aauaauuaaagaaaacauaauu

SEQ ID NO: 402246 - RNA, 23 nt, Artificial Sequence
  Synthetic
caauaauuaaagaaaacauaauu

SEQ ID NO: 402247 - RNA, 24 nt, Artificial Sequence
  Synthetic
ucaauaauuaaagaaaacauaauu

SEQ ID NO: 402248 - RNA, 18 nt, Artificial Sequence
  Synthetic
uaaaguaugaacauaauu

SEQ ID NO: 402249 - RNA, 19 nt, Artificial Sequence
  Synthetic
uuaaaguaugaacauaauu

SEQ ID NO: 402250 - RNA, 20 nt, Artificial Sequence
  Synthetic
uuuaaaguaugaacauaauu

SEQ ID NO: 402251 - RNA, 21 nt, Artificial Sequence
  Synthetic
uuuuaaaguaugaacauaauu

SEQ ID NO: 402252 - RNA, 22 nt, Artificial Sequence
  Synthetic
cuuuuaaaguaugaacauaauu

SEQ ID NO: 402253 - RNA, 23 nt, Artificial Sequence
  Synthetic
acuuuuaaaguaugaacauaauu

SEQ ID NO: 402254 - RNA, 24 nt, Artificial Sequence
  Synthetic
cacuuuuaaaguaugaacauaauu

SEQ ID NO: 402255 - RNA, 18 nt, Artificial Sequence
  Synthetic
aagugauguaccauaauu

SEQ ID NO: 402256 - RNA, 19 nt, Artificial Sequence
  Synthetic
aaagugauguaccauaauu

SEQ ID NO: 402257 - RNA, 20 nt, Artificial Sequence
  Synthetic
uaaagugauguaccauaauu

SEQ ID NO: 402258 - RNA, 21 nt, Artificial Sequence
  Synthetic
uuaaagugauguaccauaauu

SEQ ID NO: 402259 - RNA, 22 nt, Artificial Sequence
  Synthetic
auuaaagugauguaccauaauu

SEQ ID NO: 402260 - RNA, 23 nt, Artificial Sequence
  Synthetic
uauuaaagugauguaccauaauu

SEQ ID NO: 402261 - RNA, 24 nt, Artificial Sequence
  Synthetic
uuauuaaagugauguaccauaauu

SEQ ID NO: 402262 - RNA, 18 nt, Artificial Sequence
  Synthetic
uagaaagguaucauaauu

SEQ ID NO: 402263 - RNA, 19 nt, Artificial Sequence
  Synthetic
auagaaagguaucauaauu

SEQ ID NO: 402264 - RNA, 20 nt, Artificial Sequence
  Synthetic
cauagaaagguaucauaauu

SEQ ID NO: 402265 - RNA, 21 nt, Artificial Sequence
  Synthetic
gcauagaaagguaucauaauu

SEQ ID NO: 402266 - RNA, 22 nt, Artificial Sequence
  Synthetic
ugcauagaaagguaucauaauu

SEQ ID NO: 402267 - RNA, 23 nt, Artificial Sequence
  Synthetic
cugcauagaaagguaucauaauu

SEQ ID NO: 402268 - RNA, 24 nt, Artificial Sequence
  Synthetic
ucugcauagaaagguaucauaauu

SEQ ID NO: 402269 - RNA, 18 nt, Artificial Sequence
  Synthetic
uggaaguaacucauaauu

SEQ ID NO: 402270 - RNA, 19 nt, Artificial Sequence
  Synthetic
auggaaguaacucauaauu

SEQ ID NO: 402271 - RNA, 20 nt, Artificial Sequence
  Synthetic
aauggaaguaacucauaauu

SEQ ID NO: 402272 - RNA, 21 nt, Artificial Sequence
  Synthetic
gaauggaaguaacucauaauu

SEQ ID NO: 402273 - RNA, 22 nt, Artificial Sequence
  Synthetic
agaauggaaguaacucauaauu

SEQ ID NO: 402274 - RNA, 23 nt, Artificial Sequence
  Synthetic
uagaauggaaguaacucauaauu

SEQ ID NO: 402275 - RNA, 24 nt, Artificial Sequence
  Synthetic
auagaauggaaguaacucauaauu

SEQ ID NO: 402276 - RNA, 18 nt, Artificial Sequence
  Synthetic
uuacgauuucucauaauu

SEQ ID NO: 402277 - RNA, 19 nt, Artificial Sequence
  Synthetic
uuuacgauuucucauaauu

SEQ ID NO: 402278 - RNA, 20 nt, Artificial Sequence
  Synthetic
uuuuacgauuucucauaauu

SEQ ID NO: 402279 - RNA, 21 nt, Artificial Sequence
  Synthetic
guuuuacgauuucucauaauu

SEQ ID NO: 402280 - RNA, 22 nt, Artificial Sequence
  Synthetic
aguuuuacgauuucucauaauu

SEQ ID NO: 402281 - RNA, 23 nt, Artificial Sequence
  Synthetic
uaguuuuacgauuucucauaauu

SEQ ID NO: 402282 - RNA, 24 nt, Artificial Sequence
  Synthetic
auaguuuuacgauuucucauaauu

SEQ ID NO: 402283 - RNA, 18 nt, Artificial Sequence
  Synthetic
agguugugagucauaauu

SEQ ID NO: 402284 - RNA, 19 nt, Artificial Sequence
  Synthetic
aagguugugagucauaauu

SEQ ID NO: 402285 - RNA, 20 nt, Artificial Sequence
  Synthetic
uaagguugugagucauaauu

SEQ ID NO: 402286 - RNA, 21 nt, Artificial Sequence
  Synthetic
auaagguugugagucauaauu

SEQ ID NO: 402287 - RNA, 22 nt, Artificial Sequence
  Synthetic
aauaagguugugagucauaauu

SEQ ID NO: 402288 - RNA, 23 nt, Artificial Sequence
  Synthetic
aaauaagguugugagucauaauu

SEQ ID NO: 402289 - RNA, 24 nt, Artificial Sequence
  Synthetic
caaauaagguugugagucauaauu

SEQ ID NO: 402290 - RNA, 18 nt, Artificial Sequence
  Synthetic
aucaauguggucauaauu

SEQ ID NO: 402291 - RNA, 19 nt, Artificial Sequence
  Synthetic
aaucaauguggucauaauu

SEQ ID NO: 402292 - RNA, 20 nt, Artificial Sequence
  Synthetic
aaaucaauguggucauaauu

SEQ ID NO: 402293 - RNA, 21 nt, Artificial Sequence
  Synthetic
caaaucaauguggucauaauu

SEQ ID NO: 402294 - RNA, 22 nt, Artificial Sequence
  Synthetic
ucaaaucaauguggucauaauu

SEQ ID NO: 402295 - RNA, 23 nt, Artificial Sequence
  Synthetic
uucaaaucaauguggucauaauu

SEQ ID NO: 402296 - RNA, 24 nt, Artificial Sequence
  Synthetic
cuucaaaucaauguggucauaauu

SEQ ID NO: 402297 - RNA, 18 nt, Artificial Sequence
  Synthetic
aaguuacacaagauaauu

SEQ ID NO: 402298 - RNA, 19 nt, Artificial Sequence
  Synthetic
gaaguuacacaagauaauu

SEQ ID NO: 402299 - RNA, 20 nt, Artificial Sequence
  Synthetic
ugaaguuacacaagauaauu

SEQ ID NO: 402300 - RNA, 21 nt, Artificial Sequence
  Synthetic
cugaaguuacacaagauaauu

SEQ ID NO: 402301 - RNA, 22 nt, Artificial Sequence
  Synthetic
ccugaaguuacacaagauaauu

SEQ ID NO: 402302 - RNA, 23 nt, Artificial Sequence
  Synthetic
uccugaaguuacacaagauaauu

SEQ ID NO: 402303 - RNA, 24 nt, Artificial Sequence
  Synthetic
auccugaaguuacacaagauaauu

SEQ ID NO: 402304 - RNA, 18 nt, Artificial Sequence
  Synthetic
uaagauguucagauaauu

SEQ ID NO: 402305 - RNA, 19 nt, Artificial Sequence
  Synthetic
uuaagauguucagauaauu

SEQ ID NO: 402306 - RNA, 20 nt, Artificial Sequence
  Synthetic
cuuaagauguucagauaauu

SEQ ID NO: 402307 - RNA, 21 nt, Artificial Sequence
  Synthetic
acuuaagauguucagauaauu

SEQ ID NO: 402308 - RNA, 22 nt, Artificial Sequence
  Synthetic
aacuuaagauguucagauaauu

SEQ ID NO: 402309 - RNA, 23 nt, Artificial Sequence
  Synthetic
aaacuuaagauguucagauaauu

SEQ ID NO: 402310 - RNA, 24 nt, Artificial Sequence
  Synthetic
caaacuuaagauguucagauaauu

SEQ ID NO: 402311 - RNA, 18 nt, Artificial Sequence
  Synthetic
caagcaaaagggauaauu

SEQ ID NO: 402312 - RNA, 19 nt, Artificial Sequence
  Synthetic
gcaagcaaaagggauaauu

SEQ ID NO: 402313 - RNA, 20 nt, Artificial Sequence
  Synthetic
agcaagcaaaagggauaauu

SEQ ID NO: 402314 - RNA, 21 nt, Artificial Sequence
  Synthetic
uagcaagcaaaagggauaauu

SEQ ID NO: 402315 - RNA, 22 nt, Artificial Sequence
  Synthetic
auagcaagcaaaagggauaauu

SEQ ID NO: 402316 - RNA, 23 nt, Artificial Sequence
  Synthetic
cauagcaagcaaaagggauaauu

SEQ ID NO: 402317 - RNA, 24 nt, Artificial Sequence
  Synthetic
ucauagcaagcaaaagggauaauu

SEQ ID NO: 402318 - RNA, 18 nt, Artificial Sequence
  Synthetic
ccccucacugggauaauu

SEQ ID NO: 402319 - RNA, 19 nt, Artificial Sequence
  Synthetic
uccccucacugggauaauu

SEQ ID NO: 402320 - RNA, 20 nt, Artificial Sequence
  Synthetic
cuccccucacugggauaauu

SEQ ID NO: 402321 - RNA, 21 nt, Artificial Sequence
  Synthetic
ucuccccucacugggauaauu

SEQ ID NO: 402322 - RNA, 22 nt, Artificial Sequence
  Synthetic
cucuccccucacugggauaauu

SEQ ID NO: 402323 - RNA, 23 nt, Artificial Sequence
  Synthetic
ucucuccccucacugggauaauu

SEQ ID NO: 402324 - RNA, 24 nt, Artificial Sequence
  Synthetic
uucucuccccucacugggauaauu

SEQ ID NO: 402325 - RNA, 18 nt, Artificial Sequence
  Synthetic
aaaagaaagcugauaauu

SEQ ID NO: 402326 - RNA, 19 nt, Artificial Sequence
  Synthetic
aaaaagaaagcugauaauu

SEQ ID NO: 402327 - RNA, 20 nt, Artificial Sequence
  Synthetic
uaaaaagaaagcugauaauu

SEQ ID NO: 402328 - RNA, 21 nt, Artificial Sequence
  Synthetic
guaaaaagaaagcugauaauu

SEQ ID NO: 402329 - RNA, 22 nt, Artificial Sequence
  Synthetic
aguaaaaagaaagcugauaauu

SEQ ID NO: 402330 - RNA, 23 nt, Artificial Sequence
  Synthetic
uaguaaaaagaaagcugauaauu

SEQ ID NO: 402331 - RNA, 24 nt, Artificial Sequence
  Synthetic
auaguaaaaagaaagcugauaauu

SEQ ID NO: 402332 - RNA, 18 nt, Artificial Sequence
  Synthetic
aucaucagagauauaauu

SEQ ID NO: 402333 - RNA, 19 nt, Artificial Sequence
  Synthetic
aaucaucagagauauaauu

SEQ ID NO: 402334 - RNA, 20 nt, Artificial Sequence
  Synthetic
gaaucaucagagauauaauu

SEQ ID NO: 402335 - RNA, 21 nt, Artificial Sequence
  Synthetic
ggaaucaucagagauauaauu

SEQ ID NO: 402336 - RNA, 22 nt, Artificial Sequence
  Synthetic
uggaaucaucagagauauaauu

SEQ ID NO: 402337 - RNA, 23 nt, Artificial Sequence
  Synthetic
uuggaaucaucagagauauaauu

SEQ ID NO: 402338 - RNA, 24 nt, Artificial Sequence
  Synthetic
uuuggaaucaucagagauauaauu

SEQ ID NO: 402339 - RNA, 18 nt, Artificial Sequence
  Synthetic
acaauaaccuauauaauu

SEQ ID NO: 402340 - RNA, 19 nt, Artificial Sequence
  Synthetic
uacaauaaccuauauaauu

SEQ ID NO: 402341 - RNA, 20 nt, Artificial Sequence
  Synthetic
auacaauaaccuauauaauu

SEQ ID NO: 402342 - RNA, 21 nt, Artificial Sequence
  Synthetic
aauacaauaaccuauauaauu

SEQ ID NO: 402343 - RNA, 22 nt, Artificial Sequence
  Synthetic
uaauacaauaaccuauauaauu

SEQ ID NO: 402344 - RNA, 23 nt, Artificial Sequence
  Synthetic
cuaauacaauaaccuauauaauu

SEQ ID NO: 402345 - RNA, 24 nt, Artificial Sequence
  Synthetic
acuaauacaauaaccuauauaauu

SEQ ID NO: 402346 - RNA, 18 nt, Artificial Sequence
  Synthetic
auuuacgccccuauaauu

SEQ ID NO: 402347 - RNA, 19 nt, Artificial Sequence
  Synthetic
uauuuacgccccuauaauu

SEQ ID NO: 402348 - RNA, 20 nt, Artificial Sequence
  Synthetic
cuauuuacgccccuauaauu

SEQ ID NO: 402349 - RNA, 21 nt, Artificial Sequence
  Synthetic
ccuauuuacgccccuauaauu

SEQ ID NO: 402350 - RNA, 22 nt, Artificial Sequence
  Synthetic
gccuauuuacgccccuauaauu

SEQ ID NO: 402351 - RNA, 23 nt, Artificial Sequence
  Synthetic
ugccuauuuacgccccuauaauu

SEQ ID NO: 402352 - RNA, 24 nt, Artificial Sequence
  Synthetic
uugccuauuuacgccccuauaauu

SEQ ID NO: 402353 - RNA, 18 nt, Artificial Sequence
  Synthetic
ccaaaaacaucuauaauu

SEQ ID NO: 402354 - RNA, 19 nt, Artificial Sequence
  Synthetic
accaaaaacaucuauaauu

SEQ ID NO: 402355 - RNA, 20 nt, Artificial Sequence
  Synthetic
uaccaaaaacaucuauaauu

SEQ ID NO: 402356 - RNA, 21 nt, Artificial Sequence
  Synthetic
cuaccaaaaacaucuauaauu

SEQ ID NO: 402357 - RNA, 22 nt, Artificial Sequence
  Synthetic
ucuaccaaaaacaucuauaauu

SEQ ID NO: 402358 - RNA, 23 nt, Artificial Sequence
  Synthetic
uucuaccaaaaacaucuauaauu

SEQ ID NO: 402359 - RNA, 24 nt, Artificial Sequence
  Synthetic
uuucuaccaaaaacaucuauaauu

SEQ ID NO: 402360 - RNA, 18 nt, Artificial Sequence
  Synthetic
guguuauuuucuauaauu

SEQ ID NO: 402361 - RNA, 19 nt, Artificial Sequence
  Synthetic
aguguuauuuucuauaauu

SEQ ID NO: 402362 - RNA, 20 nt, Artificial Sequence
  Synthetic
caguguuauuuucuauaauu

SEQ ID NO: 402363 - RNA, 21 nt, Artificial Sequence
  Synthetic
acaguguuauuuucuauaauu

SEQ ID NO: 402364 - RNA, 22 nt, Artificial Sequence
  Synthetic
aacaguguuauuuucuauaauu

SEQ ID NO: 402365 - RNA, 23 nt, Artificial Sequence
  Synthetic
uaacaguguuauuuucuauaauu

SEQ ID NO: 402366 - RNA, 24 nt, Artificial Sequence
  Synthetic
guaacaguguuauuuucuauaauu

SEQ ID NO: 402367 - RNA, 18 nt, Artificial Sequence
  Synthetic
cuuuauugaaguauaauu

SEQ ID NO: 402368 - RNA, 19 nt, Artificial Sequence
  Synthetic
gcuuuauugaaguauaauu

SEQ ID NO: 402369 - RNA, 20 nt, Artificial Sequence
  Synthetic
agcuuuauugaaguauaauu

SEQ ID NO: 402370 - RNA, 21 nt, Artificial Sequence
  Synthetic
uagcuuuauugaaguauaauu

SEQ ID NO: 402371 - RNA, 22 nt, Artificial Sequence
  Synthetic
cuagcuuuauugaaguauaauu

SEQ ID NO: 402372 - RNA, 23 nt, Artificial Sequence
  Synthetic
ccuagcuuuauugaaguauaauu

SEQ ID NO: 402373 - RNA, 24 nt, Artificial Sequence
  Synthetic
accuagcuuuauugaaguauaauu

SEQ ID NO: 402374 - RNA, 18 nt, Artificial Sequence
  Synthetic
ugggccauauguauaauu

SEQ ID NO: 402375 - RNA, 19 nt, Artificial Sequence
  Synthetic
gugggccauauguauaauu

SEQ ID NO: 402376 - RNA, 20 nt, Artificial Sequence
  Synthetic
ugugggccauauguauaauu

SEQ ID NO: 402377 - RNA, 21 nt, Artificial Sequence
  Synthetic
augugggccauauguauaauu

SEQ ID NO: 402378 - RNA, 22 nt, Artificial Sequence
  Synthetic
gaugugggccauauguauaauu

SEQ ID NO: 402379 - RNA, 23 nt, Artificial Sequence
  Synthetic
ggaugugggccauauguauaauu

SEQ ID NO: 402380 - RNA, 24 nt, Artificial Sequence
  Synthetic
aggaugugggccauauguauaauu

SEQ ID NO: 402381 - RNA, 18 nt, Artificial Sequence
  Synthetic
aacccccagcuuauaauu

SEQ ID NO: 402382 - RNA, 19 nt, Artificial Sequence
  Synthetic
aaacccccagcuuauaauu

SEQ ID NO: 402383 - RNA, 20 nt, Artificial Sequence
  Synthetic
caaacccccagcuuauaauu

SEQ ID NO: 402384 - RNA, 21 nt, Artificial Sequence
  Synthetic
ucaaacccccagcuuauaauu

SEQ ID NO: 402385 - RNA, 22 nt, Artificial Sequence
  Synthetic
cucaaacccccagcuuauaauu

SEQ ID NO: 402386 - RNA, 23 nt, Artificial Sequence
  Synthetic
ucucaaacccccagcuuauaauu

SEQ ID NO: 402387 - RNA, 24 nt, Artificial Sequence
  Synthetic
uucucaaacccccagcuuauaauu

SEQ ID NO: 402388 - RNA, 18 nt, Artificial Sequence
  Synthetic
ccucuuaauaaacuaauu

SEQ ID NO: 402389 - RNA, 19 nt, Artificial Sequence
  Synthetic
cccucuuaauaaacuaauu

SEQ ID NO: 402390 - RNA, 20 nt, Artificial Sequence
  Synthetic
acccucuuaauaaacuaauu

SEQ ID NO: 402391 - RNA, 21 nt, Artificial Sequence
  Synthetic
gacccucuuaauaaacuaauu

SEQ ID NO: 402392 - RNA, 22 nt, Artificial Sequence
  Synthetic
ggacccucuuaauaaacuaauu

SEQ ID NO: 402393 - RNA, 23 nt, Artificial Sequence
  Synthetic
gggacccucuuaauaaacuaauu

SEQ ID NO: 402394 - RNA, 24 nt, Artificial Sequence
  Synthetic
agggacccucuuaauaaacuaauu

SEQ ID NO: 402395 - RNA, 18 nt, Artificial Sequence
  Synthetic
uaauugguauuacuaauu

SEQ ID NO: 402396 - RNA, 19 nt, Artificial Sequence
  Synthetic
uuaauugguauuacuaauu

SEQ ID NO: 402397 - RNA, 20 nt, Artificial Sequence
  Synthetic
uuuaauugguauuacuaauu

SEQ ID NO: 402398 - RNA, 21 nt, Artificial Sequence
  Synthetic
auuuaauugguauuacuaauu

SEQ ID NO: 402399 - RNA, 22 nt, Artificial Sequence
  Synthetic
uauuuaauugguauuacuaauu

SEQ ID NO: 402400 - RNA, 23 nt, Artificial Sequence
  Synthetic
uuauuuaauugguauuacuaauu

SEQ ID NO: 402401 - RNA, 24 nt, Artificial Sequence
  Synthetic
auuauuuaauugguauuacuaauu

SEQ ID NO: 402402 - RNA, 18 nt, Artificial Sequence
  Synthetic
gcugaauuuucccuaauu

SEQ ID NO: 402403 - RNA, 19 nt, Artificial Sequence
  Synthetic
ugcugaauuuucccuaauu

SEQ ID NO: 402404 - RNA, 20 nt, Artificial Sequence
  Synthetic
augcugaauuuucccuaauu

SEQ ID NO: 402405 - RNA, 21 nt, Artificial Sequence
  Synthetic
gaugcugaauuuucccuaauu

SEQ ID NO: 402406 - RNA, 22 nt, Artificial Sequence
  Synthetic
ggaugcugaauuuucccuaauu

SEQ ID NO: 402407 - RNA, 23 nt, Artificial Sequence
  Synthetic
uggaugcugaauuuucccuaauu

SEQ ID NO: 402408 - RNA, 24 nt, Artificial Sequence
  Synthetic
cuggaugcugaauuuucccuaauu

SEQ ID NO: 402409 - RNA, 18 nt, Artificial Sequence
  Synthetic
ugcaauuuucagcuaauu

SEQ ID NO: 402410 - RNA, 19 nt, Artificial Sequence
  Synthetic
cugcaauuuucagcuaauu

SEQ ID NO: 402411 - RNA, 20 nt, Artificial Sequence
  Synthetic
gcugcaauuuucagcuaauu

SEQ ID NO: 402412 - RNA, 21 nt, Artificial Sequence
  Synthetic
ggcugcaauuuucagcuaauu

SEQ ID NO: 402413 - RNA, 22 nt, Artificial Sequence
  Synthetic
gggcugcaauuuucagcuaauu

SEQ ID NO: 402414 - RNA, 23 nt, Artificial Sequence
  Synthetic
ugggcugcaauuuucagcuaauu

SEQ ID NO: 402415 - RNA, 24 nt, Artificial Sequence
  Synthetic
cugggcugcaauuuucagcuaauu

SEQ ID NO: 402416 - RNA, 18 nt, Artificial Sequence
  Synthetic
cacccaugauugcuaauu

SEQ ID NO: 402417 - RNA, 19 nt, Artificial Sequence
  Synthetic
ccacccaugauugcuaauu

SEQ ID NO: 402418 - RNA, 20 nt, Artificial Sequence
  Synthetic
uccacccaugauugcuaauu

SEQ ID NO: 402419 - RNA, 21 nt, Artificial Sequence
  Synthetic
uuccacccaugauugcuaauu

SEQ ID NO: 402420 - RNA, 22 nt, Artificial Sequence
  Synthetic
uuuccacccaugauugcuaauu

SEQ ID NO: 402421 - RNA, 23 nt, Artificial Sequence
  Synthetic
guuuccacccaugauugcuaauu

SEQ ID NO: 402422 - RNA, 24 nt, Artificial Sequence
  Synthetic
uguuuccacccaugauugcuaauu

SEQ ID NO: 402423 - RNA, 18 nt, Artificial Sequence
  Synthetic
uugcaccucauucuaauu

SEQ ID NO: 402424 - RNA, 19 nt, Artificial Sequence
  Synthetic
cuugcaccucauucuaauu

SEQ ID NO: 402425 - RNA, 20 nt, Artificial Sequence
  Synthetic
acuugcaccucauucuaauu

SEQ ID NO: 402426 - RNA, 21 nt, Artificial Sequence
  Synthetic
aacuugcaccucauucuaauu

SEQ ID NO: 402427 - RNA, 22 nt, Artificial Sequence
  Synthetic
caacuugcaccucauucuaauu

SEQ ID NO: 402428 - RNA, 23 nt, Artificial Sequence
  Synthetic
gcaacuugcaccucauucuaauu

SEQ ID NO: 402429 - RNA, 24 nt, Artificial Sequence
  Synthetic
ugcaacuugcaccucauucuaauu

SEQ ID NO: 402430 - RNA, 18 nt, Artificial Sequence
  Synthetic
acccuuaagcuucuaauu

SEQ ID NO: 402431 - RNA, 19 nt, Artificial Sequence
  Synthetic
uacccuuaagcuucuaauu

SEQ ID NO: 402432 - RNA, 20 nt, Artificial Sequence
  Synthetic
uuacccuuaagcuucuaauu

SEQ ID NO: 402433 - RNA, 21 nt, Artificial Sequence
  Synthetic
uuuacccuuaagcuucuaauu

SEQ ID NO: 402434 - RNA, 22 nt, Artificial Sequence
  Synthetic
uuuuacccuuaagcuucuaauu

SEQ ID NO: 402435 - RNA, 23 nt, Artificial Sequence
  Synthetic
guuuuacccuuaagcuucuaauu

SEQ ID NO: 402436 - RNA, 24 nt, Artificial Sequence
  Synthetic
cguuuuacccuuaagcuucuaauu

SEQ ID NO: 402437 - RNA, 18 nt, Artificial Sequence
  Synthetic
uuccauccucuucuaauu

SEQ ID NO: 402438 - RNA, 19 nt, Artificial Sequence
  Synthetic
cuuccauccucuucuaauu

SEQ ID NO: 402439 - RNA, 20 nt, Artificial Sequence
  Synthetic
acuuccauccucuucuaauu

SEQ ID NO: 402440 - RNA, 21 nt, Artificial Sequence
  Synthetic
cacuuccauccucuucuaauu

SEQ ID NO: 402441 - RNA, 22 nt, Artificial Sequence
  Synthetic
ccacuuccauccucuucuaauu

SEQ ID NO: 402442 - RNA, 23 nt, Artificial Sequence
  Synthetic
uccacuuccauccucuucuaauu

SEQ ID NO: 402443 - RNA, 24 nt, Artificial Sequence
  Synthetic
guccacuuccauccucuucuaauu

SEQ ID NO: 402444 - RNA, 18 nt, Artificial Sequence
  Synthetic
auauauguuuuucuaauu

SEQ ID NO: 402445 - RNA, 19 nt, Artificial Sequence
  Synthetic
gauauauguuuuucuaauu

SEQ ID NO: 402446 - RNA, 20 nt, Artificial Sequence
  Synthetic
ggauauauguuuuucuaauu

SEQ ID NO: 402447 - RNA, 21 nt, Artificial Sequence
  Synthetic
uggauauauguuuuucuaauu

SEQ ID NO: 402448 - RNA, 22 nt, Artificial Sequence
  Synthetic
cuggauauauguuuuucuaauu

SEQ ID NO: 402449 - RNA, 23 nt, Artificial Sequence
  Synthetic
ccuggauauauguuuuucuaauu

SEQ ID NO: 402450 - RNA, 24 nt, Artificial Sequence
  Synthetic
accuggauauauguuuuucuaauu

SEQ ID NO: 402451 - RNA, 18 nt, Artificial Sequence
  Synthetic
cugucuacugaaguaauu

SEQ ID NO: 402452 - RNA, 19 nt, Artificial Sequence
  Synthetic
acugucuacugaaguaauu

SEQ ID NO: 402453 - RNA, 20 nt, Artificial Sequence
  Synthetic
gacugucuacugaaguaauu

SEQ ID NO: 402454 - RNA, 21 nt, Artificial Sequence
  Synthetic
ugacugucuacugaaguaauu

SEQ ID NO: 402455 - RNA, 22 nt, Artificial Sequence
  Synthetic
cugacugucuacugaaguaauu

SEQ ID NO: 402456 - RNA, 23 nt, Artificial Sequence
  Synthetic
acugacugucuacugaaguaauu

SEQ ID NO: 402457 - RNA, 24 nt, Artificial Sequence
  Synthetic
gacugacugucuacugaaguaauu

SEQ ID NO: 402458 - RNA, 18 nt, Artificial Sequence
  Synthetic
auucuaagugaaguaauu

SEQ ID NO: 402459 - RNA, 19 nt, Artificial Sequence
  Synthetic
uauucuaagugaaguaauu

SEQ ID NO: 402460 - RNA, 20 nt, Artificial Sequence
  Synthetic
uuauucuaagugaaguaauu

SEQ ID NO: 402461 - RNA, 21 nt, Artificial Sequence
  Synthetic
auuauucuaagugaaguaauu

SEQ ID NO: 402462 - RNA, 22 nt, Artificial Sequence
  Synthetic
cauuauucuaagugaaguaauu

SEQ ID NO: 402463 - RNA, 23 nt, Artificial Sequence
  Synthetic
ccauuauucuaagugaaguaauu

SEQ ID NO: 402464 - RNA, 24 nt, Artificial Sequence
  Synthetic
gccauuauucuaagugaaguaauu

SEQ ID NO: 402465 - RNA, 18 nt, Artificial Sequence
  Synthetic
aguuauuauacaguaauu

SEQ ID NO: 402466 - RNA, 19 nt, Artificial Sequence
  Synthetic
uaguuauuauacaguaauu

SEQ ID NO: 402467 - RNA, 20 nt, Artificial Sequence
  Synthetic
auaguuauuauacaguaauu

SEQ ID NO: 402468 - RNA, 21 nt, Artificial Sequence
  Synthetic
cauaguuauuauacaguaauu

SEQ ID NO: 402469 - RNA, 22 nt, Artificial Sequence
  Synthetic
gcauaguuauuauacaguaauu

SEQ ID NO: 402470 - RNA, 23 nt, Artificial Sequence
  Synthetic
agcauaguuauuauacaguaauu

SEQ ID NO: 402471 - RNA, 24 nt, Artificial Sequence
  Synthetic
uagcauaguuauuauacaguaauu

SEQ ID NO: 402472 - RNA, 18 nt, Artificial Sequence
  Synthetic
ggagaggagagaguaauu

SEQ ID NO: 402473 - RNA, 19 nt, Artificial Sequence
  Synthetic
uggagaggagagaguaauu

SEQ ID NO: 402474 - RNA, 20 nt, Artificial Sequence
  Synthetic
guggagaggagagaguaauu

SEQ ID NO: 402475 - RNA, 21 nt, Artificial Sequence
  Synthetic
aguggagaggagagaguaauu

SEQ ID NO: 402476 - RNA, 22 nt, Artificial Sequence
  Synthetic
aaguggagaggagagaguaauu

SEQ ID NO: 402477 - RNA, 23 nt, Artificial Sequence
  Synthetic
aaaguggagaggagagaguaauu

SEQ ID NO: 402478 - RNA, 24 nt, Artificial Sequence
  Synthetic
gaaaguggagaggagagaguaauu

SEQ ID NO: 402479 - RNA, 18 nt, Artificial Sequence
  Synthetic
uuuuggcaccgaguaauu

SEQ ID NO: 402480 - RNA, 19 nt, Artificial Sequence
  Synthetic
uuuuuggcaccgaguaauu

SEQ ID NO: 402481 - RNA, 20 nt, Artificial Sequence
  Synthetic
uuuuuuggcaccgaguaauu

SEQ ID NO: 402482 - RNA, 21 nt, Artificial Sequence
  Synthetic
auuuuuuggcaccgaguaauu

SEQ ID NO: 402483 - RNA, 22 nt, Artificial Sequence
  Synthetic
uauuuuuuggcaccgaguaauu

SEQ ID NO: 402484 - RNA, 23 nt, Artificial Sequence
  Synthetic
guauuuuuuggcaccgaguaauu

SEQ ID NO: 402485 - RNA, 24 nt, Artificial Sequence
  Synthetic
aguauuuuuuggcaccgaguaauu

SEQ ID NO: 402486 - RNA, 18 nt, Artificial Sequence
  Synthetic
gguuucuauggaguaauu

SEQ ID NO: 402487 - RNA, 19 nt, Artificial Sequence
  Synthetic
ugguuucuauggaguaauu

SEQ ID NO: 402488 - RNA, 20 nt, Artificial Sequence
  Synthetic
augguuucuauggaguaauu

SEQ ID NO: 402489 - RNA, 21 nt, Artificial Sequence
  Synthetic
uaugguuucuauggaguaauu

SEQ ID NO: 402490 - RNA, 22 nt, Artificial Sequence
  Synthetic
auaugguuucuauggaguaauu

SEQ ID NO: 402491 - RNA, 23 nt, Artificial Sequence
  Synthetic
uauaugguuucuauggaguaauu

SEQ ID NO: 402492 - RNA, 24 nt, Artificial Sequence
  Synthetic
auauaugguuucuauggaguaauu

SEQ ID NO: 402493 - RNA, 18 nt, Artificial Sequence
  Synthetic
ucugcauuuuuaguaauu

SEQ ID NO: 402494 - RNA, 19 nt, Artificial Sequence
  Synthetic
aucugcauuuuuaguaauu

SEQ ID NO: 402495 - RNA, 20 nt, Artificial Sequence
  Synthetic
aaucugcauuuuuaguaauu

SEQ ID NO: 402496 - RNA, 21 nt, Artificial Sequence
  Synthetic
aaaucugcauuuuuaguaauu

SEQ ID NO: 402497 - RNA, 22 nt, Artificial Sequence
  Synthetic
aaaaucugcauuuuuaguaauu

SEQ ID NO: 402498 - RNA, 23 nt, Artificial Sequence
  Synthetic
gaaaaucugcauuuuuaguaauu

SEQ ID NO: 402499 - RNA, 24 nt, Artificial Sequence
  Synthetic
ggaaaaucugcauuuuuaguaauu

SEQ ID NO: 402500 - RNA, 18 nt, Artificial Sequence
  Synthetic
gguaucuauaagguaauu

SEQ ID NO: 402501 - RNA, 19 nt, Artificial Sequence
  Synthetic
agguaucuauaagguaauu

SEQ ID NO: 402502 - RNA, 20 nt, Artificial Sequence
  Synthetic
aagguaucuauaagguaauu

SEQ ID NO: 402503 - RNA, 21 nt, Artificial Sequence
  Synthetic
uaagguaucuauaagguaauu

SEQ ID NO: 402504 - RNA, 22 nt, Artificial Sequence
  Synthetic
cuaagguaucuauaagguaauu

SEQ ID NO: 402505 - RNA, 23 nt, Artificial Sequence
  Synthetic
acuaagguaucuauaagguaauu

SEQ ID NO: 402506 - RNA, 24 nt, Artificial Sequence
  Synthetic
aacuaagguaucuauaagguaauu

SEQ ID NO: 402507 - RNA, 18 nt, Artificial Sequence
  Synthetic
aagcagggaaggguaauu

SEQ ID NO: 402508 - RNA, 19 nt, Artificial Sequence
  Synthetic
aaagcagggaaggguaauu

SEQ ID NO: 402509 - RNA, 20 nt, Artificial Sequence
  Synthetic
gaaagcagggaaggguaauu

SEQ ID NO: 402510 - RNA, 21 nt, Artificial Sequence
  Synthetic
ugaaagcagggaaggguaauu

SEQ ID NO: 402511 - RNA, 22 nt, Artificial Sequence
  Synthetic
augaaagcagggaaggguaauu

SEQ ID NO: 402512 - RNA, 23 nt, Artificial Sequence
  Synthetic
aaugaaagcagggaaggguaauu

SEQ ID NO: 402513 - RNA, 24 nt, Artificial Sequence
  Synthetic
gaaugaaagcagggaaggguaauu

SEQ ID NO: 402514 - RNA, 18 nt, Artificial Sequence
  Synthetic
agggauuuggcuguaauu

SEQ ID NO: 402515 - RNA, 19 nt, Artificial Sequence
  Synthetic
uagggauuuggcuguaauu

SEQ ID NO: 402516 - RNA, 20 nt, Artificial Sequence
  Synthetic
cuagggauuuggcuguaauu

SEQ ID NO: 402517 - RNA, 21 nt, Artificial Sequence
  Synthetic
gcuagggauuuggcuguaauu

SEQ ID NO: 402518 - RNA, 22 nt, Artificial Sequence
  Synthetic
agcuagggauuuggcuguaauu

SEQ ID NO: 402519 - RNA, 23 nt, Artificial Sequence
  Synthetic
cagcuagggauuuggcuguaauu

SEQ ID NO: 402520 - RNA, 24 nt, Artificial Sequence
  Synthetic
acagcuagggauuuggcuguaauu

SEQ ID NO: 402521 - RNA, 18 nt, Artificial Sequence
  Synthetic
auuuaauagucuguaauu

SEQ ID NO: 402522 - RNA, 19 nt, Artificial Sequence
  Synthetic
uauuuaauagucuguaauu

SEQ ID NO: 402523 - RNA, 20 nt, Artificial Sequence
  Synthetic
uuauuuaauagucuguaauu

SEQ ID NO: 402524 - RNA, 21 nt, Artificial Sequence
  Synthetic
uuuauuuaauagucuguaauu

SEQ ID NO: 402525 - RNA, 22 nt, Artificial Sequence
  Synthetic
cuuuauuuaauagucuguaauu

SEQ ID NO: 402526 - RNA, 23 nt, Artificial Sequence
  Synthetic
ucuuuauuuaauagucuguaauu

SEQ ID NO: 402527 - RNA, 24 nt, Artificial Sequence
  Synthetic
aucuuuauuuaauagucuguaauu

SEQ ID NO: 402528 - RNA, 18 nt, Artificial Sequence
  Synthetic
caagucucaaguguaauu

SEQ ID NO: 402529 - RNA, 19 nt, Artificial Sequence
  Synthetic
gcaagucucaaguguaauu

SEQ ID NO: 402530 - RNA, 20 nt, Artificial Sequence
  Synthetic
agcaagucucaaguguaauu

SEQ ID NO: 402531 - RNA, 21 nt, Artificial Sequence
  Synthetic
gagcaagucucaaguguaauu

SEQ ID NO: 402532 - RNA, 22 nt, Artificial Sequence
  Synthetic
agagcaagucucaaguguaauu

SEQ ID NO: 402533 - RNA, 23 nt, Artificial Sequence
  Synthetic
gagagcaagucucaaguguaauu

SEQ ID NO: 402534 - RNA, 24 nt, Artificial Sequence
  Synthetic
agagagcaagucucaaguguaauu

SEQ ID NO: 402535 - RNA, 18 nt, Artificial Sequence
  Synthetic
ccaauuaagaaauuaauu

SEQ ID NO: 402536 - RNA, 19 nt, Artificial Sequence
  Synthetic
accaauuaagaaauuaauu

SEQ ID NO: 402537 - RNA, 20 nt, Artificial Sequence
  Synthetic
uaccaauuaagaaauuaauu

SEQ ID NO: 402538 - RNA, 21 nt, Artificial Sequence
  Synthetic
auaccaauuaagaaauuaauu

SEQ ID NO: 402539 - RNA, 22 nt, Artificial Sequence
  Synthetic
aauaccaauuaagaaauuaauu

SEQ ID NO: 402540 - RNA, 23 nt, Artificial Sequence
  Synthetic
aaauaccaauuaagaaauuaauu

SEQ ID NO: 402541 - RNA, 24 nt, Artificial Sequence
  Synthetic
gaaauaccaauuaagaaauuaauu

SEQ ID NO: 402542 - RNA, 18 nt, Artificial Sequence
  Synthetic
cauuuaaaauaauuaauu

SEQ ID NO: 402543 - RNA, 19 nt, Artificial Sequence
  Synthetic
acauuuaaaauaauuaauu

SEQ ID NO: 402544 - RNA, 20 nt, Artificial Sequence
  Synthetic
uacauuuaaaauaauuaauu

SEQ ID NO: 402545 - RNA, 21 nt, Artificial Sequence
  Synthetic
uuacauuuaaaauaauuaauu

SEQ ID NO: 402546 - RNA, 22 nt, Artificial Sequence
  Synthetic
auuacauuuaaaauaauuaauu

SEQ ID NO: 402547 - RNA, 23 nt, Artificial Sequence
  Synthetic
aauuacauuuaaaauaauuaauu

SEQ ID NO: 402548 - RNA, 24 nt, Artificial Sequence
  Synthetic
caauuacauuuaaaauaauuaauu

SEQ ID NO: 402549 - RNA, 18 nt, Artificial Sequence
  Synthetic
gagcacccaggauuaauu

SEQ ID NO: 402550 - RNA, 19 nt, Artificial Sequence
  Synthetic
ugagcacccaggauuaauu

SEQ ID NO: 402551 - RNA, 20 nt, Artificial Sequence
  Synthetic
cugagcacccaggauuaauu

SEQ ID NO: 402552 - RNA, 21 nt, Artificial Sequence
  Synthetic
ucugagcacccaggauuaauu

SEQ ID NO: 402553 - RNA, 22 nt, Artificial Sequence
  Synthetic
uucugagcacccaggauuaauu

SEQ ID NO: 402554 - RNA, 23 nt, Artificial Sequence
  Synthetic
guucugagcacccaggauuaauu

SEQ ID NO: 402555 - RNA, 24 nt, Artificial Sequence
  Synthetic
aguucugagcacccaggauuaauu

SEQ ID NO: 402556 - RNA, 18 nt, Artificial Sequence
  Synthetic
uuggcgcacggauuaauu

SEQ ID NO: 402557 - RNA, 19 nt, Artificial Sequence
  Synthetic
uuuggcgcacggauuaauu

SEQ ID NO: 402558 - RNA, 20 nt, Artificial Sequence
  Synthetic
uuuuggcgcacggauuaauu

SEQ ID NO: 402559 - RNA, 21 nt, Artificial Sequence
  Synthetic
auuuuggcgcacggauuaauu

SEQ ID NO: 402560 - RNA, 22 nt, Artificial Sequence
  Synthetic
aauuuuggcgcacggauuaauu

SEQ ID NO: 402561 - RNA, 23 nt, Artificial Sequence
  Synthetic
aaauuuuggcgcacggauuaauu

SEQ ID NO: 402562 - RNA, 24 nt, Artificial Sequence
  Synthetic
aaaauuuuggcgcacggauuaauu

SEQ ID NO: 402563 - RNA, 18 nt, Artificial Sequence
  Synthetic
caagaggcgugauuaauu

SEQ ID NO: 402564 - RNA, 19 nt, Artificial Sequence
  Synthetic
ccaagaggcgugauuaauu

SEQ ID NO: 402565 - RNA, 20 nt, Artificial Sequence
  Synthetic
uccaagaggcgugauuaauu

SEQ ID NO: 402566 - RNA, 21 nt, Artificial Sequence
  Synthetic
auccaagaggcgugauuaauu

SEQ ID NO: 402567 - RNA, 22 nt, Artificial Sequence
  Synthetic
aauccaagaggcgugauuaauu

SEQ ID NO: 402568 - RNA, 23 nt, Artificial Sequence
  Synthetic
gaauccaagaggcgugauuaauu

SEQ ID NO: 402569 - RNA, 24 nt, Artificial Sequence
  Synthetic
ugaauccaagaggcgugauuaauu

SEQ ID NO: 402570 - RNA, 18 nt, Artificial Sequence
  Synthetic
ucuuagcaacuauuaauu

SEQ ID NO: 402571 - RNA, 19 nt, Artificial Sequence
  Synthetic
uucuuagcaacuauuaauu

SEQ ID NO: 402572 - RNA, 20 nt, Artificial Sequence
  Synthetic
uuucuuagcaacuauuaauu

SEQ ID NO: 402573 - RNA, 21 nt, Artificial Sequence
  Synthetic
uuuucuuagcaacuauuaauu

SEQ ID NO: 402574 - RNA, 22 nt, Artificial Sequence
  Synthetic
auuuucuuagcaacuauuaauu

SEQ ID NO: 402575 - RNA, 23 nt, Artificial Sequence
  Synthetic
cauuuucuuagcaacuauuaauu

SEQ ID NO: 402576 - RNA, 24 nt, Artificial Sequence
  Synthetic
gcauuuucuuagcaacuauuaauu

SEQ ID NO: 402577 - RNA, 18 nt, Artificial Sequence
  Synthetic
auaaaauauguauuaauu

SEQ ID NO: 402578 - RNA, 19 nt, Artificial Sequence
  Synthetic
aauaaaauauguauuaauu

SEQ ID NO: 402579 - RNA, 20 nt, Artificial Sequence
  Synthetic
aaauaaaauauguauuaauu

SEQ ID NO: 402580 - RNA, 21 nt, Artificial Sequence
  Synthetic
aaaauaaaauauguauuaauu

SEQ ID NO: 402581 - RNA, 22 nt, Artificial Sequence
  Synthetic
caaaauaaaauauguauuaauu

SEQ ID NO: 402582 - RNA, 23 nt, Artificial Sequence
  Synthetic
acaaaauaaaauauguauuaauu

SEQ ID NO: 402583 - RNA, 24 nt, Artificial Sequence
  Synthetic
gacaaaauaaaauauguauuaauu

SEQ ID NO: 402584 - RNA, 18 nt, Artificial Sequence
  Synthetic
cauaguagauuauuaauu

SEQ ID NO: 402585 - RNA, 19 nt, Artificial Sequence
  Synthetic
acauaguagauuauuaauu

SEQ ID NO: 402586 - RNA, 20 nt, Artificial Sequence
  Synthetic
cacauaguagauuauuaauu

SEQ ID NO: 402587 - RNA, 21 nt, Artificial Sequence
  Synthetic
gcacauaguagauuauuaauu

SEQ ID NO: 402588 - RNA, 22 nt, Artificial Sequence
  Synthetic
ggcacauaguagauuauuaauu

SEQ ID NO: 402589 - RNA, 23 nt, Artificial Sequence
  Synthetic
uggcacauaguagauuauuaauu

SEQ ID NO: 402590 - RNA, 24 nt, Artificial Sequence
  Synthetic
uuggcacauaguagauuauuaauu

SEQ ID NO: 402591 - RNA, 18 nt, Artificial Sequence
  Synthetic
uuagcuguugacuuaauu

SEQ ID NO: 402592 - RNA, 19 nt, Artificial Sequence
  Synthetic
uuuagcuguugacuuaauu

SEQ ID NO: 402593 - RNA, 20 nt, Artificial Sequence
  Synthetic
auuuagcuguugacuuaauu

SEQ ID NO: 402594 - RNA, 21 nt, Artificial Sequence
  Synthetic
uauuuagcuguugacuuaauu

SEQ ID NO: 402595 - RNA, 22 nt, Artificial Sequence
  Synthetic
auauuuagcuguugacuuaauu

SEQ ID NO: 402596 - RNA, 23 nt, Artificial Sequence
  Synthetic
aauauuuagcuguugacuuaauu

SEQ ID NO: 402597 - RNA, 24 nt, Artificial Sequence
  Synthetic
aaauauuuagcuguugacuuaauu

SEQ ID NO: 402598 - RNA, 18 nt, Artificial Sequence
  Synthetic
gacuagcagcucuuaauu

SEQ ID NO: 402599 - RNA, 19 nt, Artificial Sequence
  Synthetic
ugacuagcagcucuuaauu

SEQ ID NO: 402600 - RNA, 20 nt, Artificial Sequence
  Synthetic
augacuagcagcucuuaauu

SEQ ID NO: 402601 - RNA, 21 nt, Artificial Sequence
  Synthetic
caugacuagcagcucuuaauu

SEQ ID NO: 402602 - RNA, 22 nt, Artificial Sequence
  Synthetic
ccaugacuagcagcucuuaauu

SEQ ID NO: 402603 - RNA, 23 nt, Artificial Sequence
  Synthetic
uccaugacuagcagcucuuaauu

SEQ ID NO: 402604 - RNA, 24 nt, Artificial Sequence
  Synthetic
uuccaugacuagcagcucuuaauu

SEQ ID NO: 402605 - RNA, 18 nt, Artificial Sequence
  Synthetic
uacccacuaaaguuaauu

SEQ ID NO: 402606 - RNA, 19 nt, Artificial Sequence
  Synthetic
cuacccacuaaaguuaauu

SEQ ID NO: 402607 - RNA, 20 nt, Artificial Sequence
  Synthetic
ucuacccacuaaaguuaauu

SEQ ID NO: 402608 - RNA, 21 nt, Artificial Sequence
  Synthetic
uucuacccacuaaaguuaauu

SEQ ID NO: 402609 - RNA, 22 nt, Artificial Sequence
  Synthetic
auucuacccacuaaaguuaauu

SEQ ID NO: 402610 - RNA, 23 nt, Artificial Sequence
  Synthetic
aauucuacccacuaaaguuaauu

SEQ ID NO: 402611 - RNA, 24 nt, Artificial Sequence
  Synthetic
aaauucuacccacuaaaguuaauu

SEQ ID NO: 402612 - RNA, 18 nt, Artificial Sequence
  Synthetic
gcaucaagagaguuaauu

SEQ ID NO: 402613 - RNA, 19 nt, Artificial Sequence
  Synthetic
ugcaucaagagaguuaauu

SEQ ID NO: 402614 - RNA, 20 nt, Artificial Sequence
  Synthetic
cugcaucaagagaguuaauu

SEQ ID NO: 402615 - RNA, 21 nt, Artificial Sequence
  Synthetic
ucugcaucaagagaguuaauu

SEQ ID NO: 402616 - RNA, 22 nt, Artificial Sequence
  Synthetic
aucugcaucaagagaguuaauu

SEQ ID NO: 402617 - RNA, 23 nt, Artificial Sequence
  Synthetic
uaucugcaucaagagaguuaauu

SEQ ID NO: 402618 - RNA, 24 nt, Artificial Sequence
  Synthetic
uuaucugcaucaagagaguuaauu

SEQ ID NO: 402619 - RNA, 18 nt, Artificial Sequence
  Synthetic
aaauuugaaauguuaauu

SEQ ID NO: 402620 - RNA, 19 nt, Artificial Sequence
  Synthetic
aaaauuugaaauguuaauu

SEQ ID NO: 402621 - RNA, 20 nt, Artificial Sequence
  Synthetic
aaaaauuugaaauguuaauu

SEQ ID NO: 402622 - RNA, 21 nt, Artificial Sequence
  Synthetic
gaaaaauuugaaauguuaauu

SEQ ID NO: 402623 - RNA, 22 nt, Artificial Sequence
  Synthetic
agaaaaauuugaaauguuaauu

SEQ ID NO: 402624 - RNA, 23 nt, Artificial Sequence
  Synthetic
gagaaaaauuugaaauguuaauu

SEQ ID NO: 402625 - RNA, 24 nt, Artificial Sequence
  Synthetic
ggagaaaaauuugaaauguuaauu

SEQ ID NO: 402626 - RNA, 18 nt, Artificial Sequence
  Synthetic
auagaaaaacuguuaauu

SEQ ID NO: 402627 - RNA, 19 nt, Artificial Sequence
  Synthetic
gauagaaaaacuguuaauu

SEQ ID NO: 402628 - RNA, 20 nt, Artificial Sequence
  Synthetic
agauagaaaaacuguuaauu

SEQ ID NO: 402629 - RNA, 21 nt, Artificial Sequence
  Synthetic
uagauagaaaaacuguuaauu

SEQ ID NO: 402630 - RNA, 22 nt, Artificial Sequence
  Synthetic
uuagauagaaaaacuguuaauu

SEQ ID NO: 402631 - RNA, 23 nt, Artificial Sequence
  Synthetic
auuagauagaaaaacuguuaauu

SEQ ID NO: 402632 - RNA, 24 nt, Artificial Sequence
  Synthetic
gauuagauagaaaaacuguuaauu

SEQ ID NO: 402633 - RNA, 18 nt, Artificial Sequence
  Synthetic
auuuuggauguguuaauu

SEQ ID NO: 402634 - RNA, 19 nt, Artificial Sequence
  Synthetic
uauuuuggauguguuaauu

SEQ ID NO: 402635 - RNA, 20 nt, Artificial Sequence
  Synthetic
guauuuuggauguguuaauu

SEQ ID NO: 402636 - RNA, 21 nt, Artificial Sequence
  Synthetic
cguauuuuggauguguuaauu

SEQ ID NO: 402637 - RNA, 22 nt, Artificial Sequence
  Synthetic
acguauuuuggauguguuaauu

SEQ ID NO: 402638 - RNA, 23 nt, Artificial Sequence
  Synthetic
aacguauuuuggauguguuaauu

SEQ ID NO: 402639 - RNA, 24 nt, Artificial Sequence
  Synthetic
aaacguauuuuggauguguuaauu

SEQ ID NO: 402640 - RNA, 18 nt, Artificial Sequence
  Synthetic
aagaucuguuuguuaauu

SEQ ID NO: 402641 - RNA, 19 nt, Artificial Sequence
  Synthetic
gaagaucuguuuguuaauu

SEQ ID NO: 402642 - RNA, 20 nt, Artificial Sequence
  Synthetic
ggaagaucuguuuguuaauu

SEQ ID NO: 402643 - RNA, 21 nt, Artificial Sequence
  Synthetic
gggaagaucuguuuguuaauu

SEQ ID NO: 402644 - RNA, 22 nt, Artificial Sequence
  Synthetic
ggggaagaucuguuuguuaauu

SEQ ID NO: 402645 - RNA, 23 nt, Artificial Sequence
  Synthetic
cggggaagaucuguuuguuaauu

SEQ ID NO: 402646 - RNA, 24 nt, Artificial Sequence
  Synthetic
ucggggaagaucuguuuguuaauu

SEQ ID NO: 402647 - RNA, 18 nt, Artificial Sequence
  Synthetic
agaauaaauuauuuaauu

SEQ ID NO: 402648 - RNA, 19 nt, Artificial Sequence
  Synthetic
cagaauaaauuauuuaauu

SEQ ID NO: 402649 - RNA, 20 nt, Artificial Sequence
  Synthetic
ucagaauaaauuauuuaauu

SEQ ID NO: 402650 - RNA, 21 nt, Artificial Sequence
  Synthetic
aucagaauaaauuauuuaauu

SEQ ID NO: 402651 - RNA, 22 nt, Artificial Sequence
  Synthetic
aaucagaauaaauuauuuaauu

SEQ ID NO: 402652 - RNA, 23 nt, Artificial Sequence
  Synthetic
aaaucagaauaaauuauuuaauu

SEQ ID NO: 402653 - RNA, 24 nt, Artificial Sequence
  Synthetic
caaaucagaauaaauuauuuaauu

SEQ ID NO: 402654 - RNA, 18 nt, Artificial Sequence
  Synthetic
uuguggucagguuuaauu

SEQ ID NO: 402655 - RNA, 19 nt, Artificial Sequence
  Synthetic
auuguggucagguuuaauu

SEQ ID NO: 402656 - RNA, 20 nt, Artificial Sequence
  Synthetic
cauuguggucagguuuaauu

SEQ ID NO: 402657 - RNA, 21 nt, Artificial Sequence
  Synthetic
ucauuguggucagguuuaauu

SEQ ID NO: 402658 - RNA, 22 nt, Artificial Sequence
  Synthetic
uucauuguggucagguuuaauu

SEQ ID NO: 402659 - RNA, 23 nt, Artificial Sequence
  Synthetic
guucauuguggucagguuuaauu

SEQ ID NO: 402660 - RNA, 24 nt, Artificial Sequence
  Synthetic
uguucauuguggucagguuuaauu

SEQ ID NO: 402661 - RNA, 18 nt, Artificial Sequence
  Synthetic
uucacagucauuuuaauu

SEQ ID NO: 402662 - RNA, 19 nt, Artificial Sequence
  Synthetic
uuucacagucauuuuaauu

SEQ ID NO: 402663 - RNA, 20 nt, Artificial Sequence
  Synthetic
uuuucacagucauuuuaauu

SEQ ID NO: 402664 - RNA, 21 nt, Artificial Sequence
  Synthetic
auuuucacagucauuuuaauu

SEQ ID NO: 402665 - RNA, 22 nt, Artificial Sequence
  Synthetic
cauuuucacagucauuuuaauu

SEQ ID NO: 402666 - RNA, 23 nt, Artificial Sequence
  Synthetic
ucauuuucacagucauuuuaauu

SEQ ID NO: 402667 - RNA, 24 nt, Artificial Sequence
  Synthetic
cucauuuucacagucauuuuaauu

SEQ ID NO: 402668 - RNA, 18 nt, Artificial Sequence
  Synthetic
ucuaagauuauuuuaauu

SEQ ID NO: 402669 - RNA, 19 nt, Artificial Sequence
  Synthetic
uucuaagauuauuuuaauu

SEQ ID NO: 402670 - RNA, 20 nt, Artificial Sequence
  Synthetic
uuucuaagauuauuuuaauu

SEQ ID NO: 402671 - RNA, 21 nt, Artificial Sequence
  Synthetic
uuuucuaagauuauuuuaauu

SEQ ID NO: 402672 - RNA, 22 nt, Artificial Sequence
  Synthetic
auuuucuaagauuauuuuaauu

SEQ ID NO: 402673 - RNA, 23 nt, Artificial Sequence
  Synthetic
aauuuucuaagauuauuuuaauu

SEQ ID NO: 402674 - RNA, 24 nt, Artificial Sequence
  Synthetic
gaauuuucuaagauuauuuuaauu

SEQ ID NO: 402675 - RNA, 18 nt, Artificial Sequence
  Synthetic
uaaaaaaaacuuuuaauu

SEQ ID NO: 402676 - RNA, 19 nt, Artificial Sequence
  Synthetic
uuaaaaaaaacuuuuaauu

SEQ ID NO: 402677 - RNA, 20 nt, Artificial Sequence
  Synthetic
uuuaaaaaaaacuuuuaauu

SEQ ID NO: 402678 - RNA, 21 nt, Artificial Sequence
  Synthetic
uuuuaaaaaaaacuuuuaauu

SEQ ID NO: 402679 - RNA, 22 nt, Artificial Sequence
  Synthetic
auuuuaaaaaaaacuuuuaauu

SEQ ID NO: 402680 - RNA, 23 nt, Artificial Sequence
  Synthetic
uauuuuaaaaaaaacuuuuaauu

SEQ ID NO: 402681 - RNA, 24 nt, Artificial Sequence
  Synthetic
uuauuuuaaaaaaaacuuuuaauu

SEQ ID NO: 402682 - RNA, 18 nt, Artificial Sequence
  Synthetic
uucagaggacuuuuaauu

SEQ ID NO: 402683 - RNA, 19 nt, Artificial Sequence
  Synthetic
auucagaggacuuuuaauu

SEQ ID NO: 402684 - RNA, 20 nt, Artificial Sequence
  Synthetic
aauucagaggacuuuuaauu

SEQ ID NO: 402685 - RNA, 21 nt, Artificial Sequence
  Synthetic
uaauucagaggacuuuuaauu

SEQ ID NO: 402686 - RNA, 22 nt, Artificial Sequence
  Synthetic
auaauucagaggacuuuuaauu

SEQ ID NO: 402687 - RNA, 23 nt, Artificial Sequence
  Synthetic
cauaauucagaggacuuuuaauu

SEQ ID NO: 402688 - RNA, 24 nt, Artificial Sequence
  Synthetic
acauaauucagaggacuuuuaauu

SEQ ID NO: 402689 - RNA, 18 nt, Artificial Sequence
  Synthetic
aguggcaaugaaaacauu

SEQ ID NO: 402690 - RNA, 19 nt, Artificial Sequence
  Synthetic
caguggcaaugaaaacauu

SEQ ID NO: 402691 - RNA, 20 nt, Artificial Sequence
  Synthetic
gcaguggcaaugaaaacauu

SEQ ID NO: 402692 - RNA, 21 nt, Artificial Sequence
  Synthetic
ggcaguggcaaugaaaacauu

SEQ ID NO: 402693 - RNA, 22 nt, Artificial Sequence
  Synthetic
gggcaguggcaaugaaaacauu

SEQ ID NO: 402694 - RNA, 23 nt, Artificial Sequence
  Synthetic
ggggcaguggcaaugaaaacauu

SEQ ID NO: 402695 - RNA, 24 nt, Artificial Sequence
  Synthetic
uggggcaguggcaaugaaaacauu

SEQ ID NO: 402696 - RNA, 18 nt, Artificial Sequence
  Synthetic
uuaggaugaucaaacauu

SEQ ID NO: 402697 - RNA, 19 nt, Artificial Sequence
  Synthetic
guuaggaugaucaaacauu

SEQ ID NO: 402698 - RNA, 20 nt, Artificial Sequence
  Synthetic
aguuaggaugaucaaacauu

SEQ ID NO: 402699 - RNA, 21 nt, Artificial Sequence
  Synthetic
uaguuaggaugaucaaacauu

SEQ ID NO: 402700 - RNA, 22 nt, Artificial Sequence
  Synthetic
guaguuaggaugaucaaacauu

SEQ ID NO: 402701 - RNA, 23 nt, Artificial Sequence
  Synthetic
uguaguuaggaugaucaaacauu

SEQ ID NO: 402702 - RNA, 24 nt, Artificial Sequence
  Synthetic
auguaguuaggaugaucaaacauu

SEQ ID NO: 402703 - RNA, 18 nt, Artificial Sequence
  Synthetic
uauuuauucagaaacauu

SEQ ID NO: 402704 - RNA, 19 nt, Artificial Sequence
  Synthetic
uuauuuauucagaaacauu

SEQ ID NO: 402705 - RNA, 20 nt, Artificial Sequence
  Synthetic
uuuauuuauucagaaacauu

SEQ ID NO: 402706 - RNA, 21 nt, Artificial Sequence
  Synthetic
guuuauuuauucagaaacauu

SEQ ID NO: 402707 - RNA, 22 nt, Artificial Sequence
  Synthetic
aguuuauuuauucagaaacauu

SEQ ID NO: 402708 - RNA, 23 nt, Artificial Sequence
  Synthetic
caguuuauuuauucagaaacauu

SEQ ID NO: 402709 - RNA, 24 nt, Artificial Sequence
  Synthetic
gcaguuuauuuauucagaaacauu

SEQ ID NO: 402710 - RNA, 18 nt, Artificial Sequence
  Synthetic
aaauaauguagaaacauu

SEQ ID NO: 402711 - RNA, 19 nt, Artificial Sequence
  Synthetic
aaaauaauguagaaacauu

SEQ ID NO: 402712 - RNA, 20 nt, Artificial Sequence
  Synthetic
aaaaauaauguagaaacauu

SEQ ID NO: 402713 - RNA, 21 nt, Artificial Sequence
  Synthetic
uaaaaauaauguagaaacauu

SEQ ID NO: 402714 - RNA, 22 nt, Artificial Sequence
  Synthetic
uuaaaaauaauguagaaacauu

SEQ ID NO: 402715 - RNA, 23 nt, Artificial Sequence
  Synthetic
uuuaaaaauaauguagaaacauu

SEQ ID NO: 402716 - RNA, 24 nt, Artificial Sequence
  Synthetic
uuuuaaaaauaauguagaaacauu

SEQ ID NO: 402717 - RNA, 18 nt, Artificial Sequence
  Synthetic
uucuccugaggaaacauu

SEQ ID NO: 402718 - RNA, 19 nt, Artificial Sequence
  Synthetic
auucuccugaggaaacauu

SEQ ID NO: 402719 - RNA, 20 nt, Artificial Sequence
  Synthetic
aauucuccugaggaaacauu

SEQ ID NO: 402720 - RNA, 21 nt, Artificial Sequence
  Synthetic
aaauucuccugaggaaacauu

SEQ ID NO: 402721 - RNA, 22 nt, Artificial Sequence
  Synthetic
uaaauucuccugaggaaacauu

SEQ ID NO: 402722 - RNA, 23 nt, Artificial Sequence
  Synthetic
cuaaauucuccugaggaaacauu

SEQ ID NO: 402723 - RNA, 24 nt, Artificial Sequence
  Synthetic
acuaaauucuccugaggaaacauu

SEQ ID NO: 402724 - RNA, 18 nt, Artificial Sequence
  Synthetic
uccugugauggaaacauu

SEQ ID NO: 402725 - RNA, 19 nt, Artificial Sequence
  Synthetic
uuccugugauggaaacauu

SEQ ID NO: 402726 - RNA, 20 nt, Artificial Sequence
  Synthetic
uuuccugugauggaaacauu

SEQ ID NO: 402727 - RNA, 21 nt, Artificial Sequence
  Synthetic
auuuccugugauggaaacauu

SEQ ID NO: 402728 - RNA, 22 nt, Artificial Sequence
  Synthetic
uauuuccugugauggaaacauu

SEQ ID NO: 402729 - RNA, 23 nt, Artificial Sequence
  Synthetic
guauuuccugugauggaaacauu

SEQ ID NO: 402730 - RNA, 24 nt, Artificial Sequence
  Synthetic
aguauuuccugugauggaaacauu

SEQ ID NO: 402731 - RNA, 18 nt, Artificial Sequence
  Synthetic
uauugugaaauaaacauu

SEQ ID NO: 402732 - RNA, 19 nt, Artificial Sequence
  Synthetic
auauugugaaauaaacauu

SEQ ID NO: 402733 - RNA, 20 nt, Artificial Sequence
  Synthetic
cauauugugaaauaaacauu

SEQ ID NO: 402734 - RNA, 21 nt, Artificial Sequence
  Synthetic
acauauugugaaauaaacauu

SEQ ID NO: 402735 - RNA, 22 nt, Artificial Sequence
  Synthetic
cacauauugugaaauaaacauu

SEQ ID NO: 402736 - RNA, 23 nt, Artificial Sequence
  Synthetic
ucacauauugugaaauaaacauu

SEQ ID NO: 402737 - RNA, 24 nt, Artificial Sequence
  Synthetic
aucacauauugugaaauaaacauu

SEQ ID NO: 402738 - RNA, 18 nt, Artificial Sequence
  Synthetic
cuuguaaacauaaacauu

SEQ ID NO: 402739 - RNA, 19 nt, Artificial Sequence
  Synthetic
acuuguaaacauaaacauu

SEQ ID NO: 402740 - RNA, 20 nt, Artificial Sequence
  Synthetic
aacuuguaaacauaaacauu

SEQ ID NO: 402741 - RNA, 21 nt, Artificial Sequence
  Synthetic
caacuuguaaacauaaacauu

SEQ ID NO: 402742 - RNA, 22 nt, Artificial Sequence
  Synthetic
gcaacuuguaaacauaaacauu

SEQ ID NO: 402743 - RNA, 23 nt, Artificial Sequence
  Synthetic
ggcaacuuguaaacauaaacauu

SEQ ID NO: 402744 - RNA, 24 nt, Artificial Sequence
  Synthetic
gggcaacuuguaaacauaaacauu

SEQ ID NO: 402745 - RNA, 18 nt, Artificial Sequence
  Synthetic
uaaaacuuaguaaacauu

SEQ ID NO: 402746 - RNA, 19 nt, Artificial Sequence
  Synthetic
guaaaacuuaguaaacauu

SEQ ID NO: 402747 - RNA, 20 nt, Artificial Sequence
  Synthetic
aguaaaacuuaguaaacauu

SEQ ID NO: 402748 - RNA, 21 nt, Artificial Sequence
  Synthetic
aaguaaaacuuaguaaacauu

SEQ ID NO: 402749 - RNA, 22 nt, Artificial Sequence
  Synthetic
aaaguaaaacuuaguaaacauu

SEQ ID NO: 402750 - RNA, 23 nt, Artificial Sequence
  Synthetic
uaaaguaaaacuuaguaaacauu

SEQ ID NO: 402751 - RNA, 24 nt, Artificial Sequence
  Synthetic
auaaaguaaaacuuaguaaacauu

SEQ ID NO: 402752 - RNA, 18 nt, Artificial Sequence
  Synthetic
ucaccaccuguaaacauu

SEQ ID NO: 402753 - RNA, 19 nt, Artificial Sequence
  Synthetic
cucaccaccuguaaacauu

SEQ ID NO: 402754 - RNA, 20 nt, Artificial Sequence
  Synthetic
ccucaccaccuguaaacauu

SEQ ID NO: 402755 - RNA, 21 nt, Artificial Sequence
  Synthetic
uccucaccaccuguaaacauu

SEQ ID NO: 402756 - RNA, 22 nt, Artificial Sequence
  Synthetic
guccucaccaccuguaaacauu

SEQ ID NO: 402757 - RNA, 23 nt, Artificial Sequence
  Synthetic
aguccucaccaccuguaaacauu

SEQ ID NO: 402758 - RNA, 24 nt, Artificial Sequence
  Synthetic
aaguccucaccaccuguaaacauu

SEQ ID NO: 402759 - RNA, 18 nt, Artificial Sequence
  Synthetic
acaauuuagaacaacauu

SEQ ID NO: 402760 - RNA, 19 nt, Artificial Sequence
  Synthetic
cacaauuuagaacaacauu

SEQ ID NO: 402761 - RNA, 20 nt, Artificial Sequence
  Synthetic
acacaauuuagaacaacauu

SEQ ID NO: 402762 - RNA, 21 nt, Artificial Sequence
  Synthetic
aacacaauuuagaacaacauu

SEQ ID NO: 402763 - RNA, 22 nt, Artificial Sequence
  Synthetic
gaacacaauuuagaacaacauu

SEQ ID NO: 402764 - RNA, 23 nt, Artificial Sequence
  Synthetic
ugaacacaauuuagaacaacauu

SEQ ID NO: 402765 - RNA, 24 nt, Artificial Sequence
  Synthetic
uugaacacaauuuagaacaacauu

SEQ ID NO: 402766 - RNA, 18 nt, Artificial Sequence
  Synthetic
gcuuagucuaucaacauu

SEQ ID NO: 402767 - RNA, 19 nt, Artificial Sequence
  Synthetic
ugcuuagucuaucaacauu

SEQ ID NO: 402768 - RNA, 20 nt, Artificial Sequence
  Synthetic
cugcuuagucuaucaacauu

SEQ ID NO: 402769 - RNA, 21 nt, Artificial Sequence
  Synthetic
gcugcuuagucuaucaacauu

SEQ ID NO: 402770 - RNA, 22 nt, Artificial Sequence
  Synthetic
agcugcuuagucuaucaacauu

SEQ ID NO: 402771 - RNA, 23 nt, Artificial Sequence
  Synthetic
aagcugcuuagucuaucaacauu

SEQ ID NO: 402772 - RNA, 24 nt, Artificial Sequence
  Synthetic
aaagcugcuuagucuaucaacauu

SEQ ID NO: 402773 - RNA, 18 nt, Artificial Sequence
  Synthetic
uuuauuuuucucaacauu

SEQ ID NO: 402774 - RNA, 19 nt, Artificial Sequence
  Synthetic
uuuuauuuuucucaacauu

SEQ ID NO: 402775 - RNA, 20 nt, Artificial Sequence
  Synthetic
uuuuuauuuuucucaacauu

SEQ ID NO: 402776 - RNA, 21 nt, Artificial Sequence
  Synthetic
auuuuuauuuuucucaacauu

SEQ ID NO: 402777 - RNA, 22 nt, Artificial Sequence
  Synthetic
uauuuuuauuuuucucaacauu

SEQ ID NO: 402778 - RNA, 23 nt, Artificial Sequence
  Synthetic
auauuuuuauuuuucucaacauu

SEQ ID NO: 402779 - RNA, 24 nt, Artificial Sequence
  Synthetic
gauauuuuuauuuuucucaacauu

SEQ ID NO: 402780 - RNA, 18 nt, Artificial Sequence
  Synthetic
accaaaaguuucaacauu

SEQ ID NO: 402781 - RNA, 19 nt, Artificial Sequence
  Synthetic
gaccaaaaguuucaacauu

SEQ ID NO: 402782 - RNA, 20 nt, Artificial Sequence
  Synthetic
agaccaaaaguuucaacauu

SEQ ID NO: 402783 - RNA, 21 nt, Artificial Sequence
  Synthetic
cagaccaaaaguuucaacauu

SEQ ID NO: 402784 - RNA, 22 nt, Artificial Sequence
  Synthetic
gcagaccaaaaguuucaacauu

SEQ ID NO: 402785 - RNA, 23 nt, Artificial Sequence
  Synthetic
ugcagaccaaaaguuucaacauu

SEQ ID NO: 402786 - RNA, 24 nt, Artificial Sequence
  Synthetic
cugcagaccaaaaguuucaacauu

SEQ ID NO: 402787 - RNA, 18 nt, Artificial Sequence
  Synthetic
uacugucaaaagaacauu

SEQ ID NO: 402788 - RNA, 19 nt, Artificial Sequence
  Synthetic
uuacugucaaaagaacauu

SEQ ID NO: 402789 - RNA, 20 nt, Artificial Sequence
  Synthetic
uuuacugucaaaagaacauu

SEQ ID NO: 402790 - RNA, 21 nt, Artificial Sequence
  Synthetic
cuuuacugucaaaagaacauu

SEQ ID NO: 402791 - RNA, 22 nt, Artificial Sequence
  Synthetic
ucuuuacugucaaaagaacauu

SEQ ID NO: 402792 - RNA, 23 nt, Artificial Sequence
  Synthetic
aucuuuacugucaaaagaacauu

SEQ ID NO: 402793 - RNA, 24 nt, Artificial Sequence
  Synthetic
aaucuuuacugucaaaagaacauu

SEQ ID NO: 402794 - RNA, 18 nt, Artificial Sequence
  Synthetic
aucuauuucaggaacauu

SEQ ID NO: 402795 - RNA, 19 nt, Artificial Sequence
  Synthetic
gaucuauuucaggaacauu

SEQ ID NO: 402796 - RNA, 20 nt, Artificial Sequence
  Synthetic
agaucuauuucaggaacauu

SEQ ID NO: 402797 - RNA, 21 nt, Artificial Sequence
  Synthetic
gagaucuauuucaggaacauu

SEQ ID NO: 402798 - RNA, 22 nt, Artificial Sequence
  Synthetic
ugagaucuauuucaggaacauu

SEQ ID NO: 402799 - RNA, 23 nt, Artificial Sequence
  Synthetic
uugagaucuauuucaggaacauu

SEQ ID NO: 402800 - RNA, 24 nt, Artificial Sequence
  Synthetic
uuugagaucuauuucaggaacauu

SEQ ID NO: 402801 - RNA, 18 nt, Artificial Sequence
  Synthetic
aucaguuauuggaacauu

SEQ ID NO: 402802 - RNA, 19 nt, Artificial Sequence
  Synthetic
aaucaguuauuggaacauu

SEQ ID NO: 402803 - RNA, 20 nt, Artificial Sequence
  Synthetic
caaucaguuauuggaacauu

SEQ ID NO: 402804 - RNA, 21 nt, Artificial Sequence
  Synthetic
gcaaucaguuauuggaacauu

SEQ ID NO: 402805 - RNA, 22 nt, Artificial Sequence
  Synthetic
agcaaucaguuauuggaacauu

SEQ ID NO: 402806 - RNA, 23 nt, Artificial Sequence
  Synthetic
uagcaaucaguuauuggaacauu

SEQ ID NO: 402807 - RNA, 24 nt, Artificial Sequence
  Synthetic
uuagcaaucaguuauuggaacauu

SEQ ID NO: 402808 - RNA, 18 nt, Artificial Sequence
  Synthetic
uauaaaagaaugaacauu

SEQ ID NO: 402809 - RNA, 19 nt, Artificial Sequence
  Synthetic
uuauaaaagaaugaacauu

SEQ ID NO: 402810 - RNA, 20 nt, Artificial Sequence
  Synthetic
uuuauaaaagaaugaacauu

SEQ ID NO: 402811 - RNA, 21 nt, Artificial Sequence
  Synthetic
uuuuauaaaagaaugaacauu

SEQ ID NO: 402812 - RNA, 22 nt, Artificial Sequence
  Synthetic
cuuuuauaaaagaaugaacauu

SEQ ID NO: 402813 - RNA, 23 nt, Artificial Sequence
  Synthetic
acuuuuauaaaagaaugaacauu

SEQ ID NO: 402814 - RNA, 24 nt, Artificial Sequence
  Synthetic
aacuuuuauaaaagaaugaacauu

SEQ ID NO: 402815 - RNA, 18 nt, Artificial Sequence
  Synthetic
caugguuugaugaacauu

SEQ ID NO: 402816 - RNA, 19 nt, Artificial Sequence
  Synthetic
gcaugguuugaugaacauu

SEQ ID NO: 402817 - RNA, 20 nt, Artificial Sequence
  Synthetic
agcaugguuugaugaacauu

SEQ ID NO: 402818 - RNA, 21 nt, Artificial Sequence
  Synthetic
cagcaugguuugaugaacauu

SEQ ID NO: 402819 - RNA, 22 nt, Artificial Sequence
  Synthetic
acagcaugguuugaugaacauu

SEQ ID NO: 402820 - RNA, 23 nt, Artificial Sequence
  Synthetic
uacagcaugguuugaugaacauu

SEQ ID NO: 402821 - RNA, 24 nt, Artificial Sequence
  Synthetic
uuacagcaugguuugaugaacauu

SEQ ID NO: 402822 - RNA, 18 nt, Artificial Sequence
  Synthetic
uauacaauugugaacauu

SEQ ID NO: 402823 - RNA, 19 nt, Artificial Sequence
  Synthetic
uuauacaauugugaacauu

SEQ ID NO: 402824 - RNA, 20 nt, Artificial Sequence
  Synthetic
uuuauacaauugugaacauu

SEQ ID NO: 402825 - RNA, 21 nt, Artificial Sequence
  Synthetic
auuuauacaauugugaacauu

SEQ ID NO: 402826 - RNA, 22 nt, Artificial Sequence
  Synthetic
cauuuauacaauugugaacauu

SEQ ID NO: 402827 - RNA, 23 nt, Artificial Sequence
  Synthetic
acauuuauacaauugugaacauu

SEQ ID NO: 402828 - RNA, 24 nt, Artificial Sequence
  Synthetic
cacauuuauacaauugugaacauu

SEQ ID NO: 402829 - RNA, 18 nt, Artificial Sequence
  Synthetic
uguuuucccuugaacauu

SEQ ID NO: 402830 - RNA, 19 nt, Artificial Sequence
  Synthetic
uuguuuucccuugaacauu

SEQ ID NO: 402831 - RNA, 20 nt, Artificial Sequence
  Synthetic
cuuguuuucccuugaacauu

SEQ ID NO: 402832 - RNA, 21 nt, Artificial Sequence
  Synthetic
ucuuguuuucccuugaacauu

SEQ ID NO: 402833 - RNA, 22 nt, Artificial Sequence
  Synthetic
cucuuguuuucccuugaacauu

SEQ ID NO: 402834 - RNA, 23 nt, Artificial Sequence
  Synthetic
acucuuguuuucccuugaacauu

SEQ ID NO: 402835 - RNA, 24 nt, Artificial Sequence
  Synthetic
aacucuuguuuucccuugaacauu

SEQ ID NO: 402836 - RNA, 18 nt, Artificial Sequence
  Synthetic
agcuuuuauuauaacauu

SEQ ID NO: 402837 - RNA, 19 nt, Artificial Sequence
  Synthetic
cagcuuuuauuauaacauu

SEQ ID NO: 402838 - RNA, 20 nt, Artificial Sequence
  Synthetic
ucagcuuuuauuauaacauu

SEQ ID NO: 402839 - RNA, 21 nt, Artificial Sequence
  Synthetic
uucagcuuuuauuauaacauu

SEQ ID NO: 402840 - RNA, 22 nt, Artificial Sequence
  Synthetic
auucagcuuuuauuauaacauu

SEQ ID NO: 402841 - RNA, 23 nt, Artificial Sequence
  Synthetic
cauucagcuuuuauuauaacauu

SEQ ID NO: 402842 - RNA, 24 nt, Artificial Sequence
  Synthetic
ucauucagcuuuuauuauaacauu

SEQ ID NO: 402843 - RNA, 18 nt, Artificial Sequence
  Synthetic
gauucccccacuaacauu

SEQ ID NO: 402844 - RNA, 19 nt, Artificial Sequence
  Synthetic
ggauucccccacuaacauu

SEQ ID NO: 402845 - RNA, 20 nt, Artificial Sequence
  Synthetic
cggauucccccacuaacauu

SEQ ID NO: 402846 - RNA, 21 nt, Artificial Sequence
  Synthetic
acggauucccccacuaacauu

SEQ ID NO: 402847 - RNA, 22 nt, Artificial Sequence
  Synthetic
aacggauucccccacuaacauu

SEQ ID NO: 402848 - RNA, 23 nt, Artificial Sequence
  Synthetic
uaacggauucccccacuaacauu

SEQ ID NO: 402849 - RNA, 24 nt, Artificial Sequence
  Synthetic
guaacggauucccccacuaacauu

SEQ ID NO: 402850 - RNA, 18 nt, Artificial Sequence
  Synthetic
acuaaggacucuaacauu

SEQ ID NO: 402851 - RNA, 19 nt, Artificial Sequence
  Synthetic
gacuaaggacucuaacauu

SEQ ID NO: 402852 - RNA, 20 nt, Artificial Sequence
  Synthetic
ugacuaaggacucuaacauu

SEQ ID NO: 402853 - RNA, 21 nt, Artificial Sequence
  Synthetic
gugacuaaggacucuaacauu

SEQ ID NO: 402854 - RNA, 22 nt, Artificial Sequence
  Synthetic
cgugacuaaggacucuaacauu

SEQ ID NO: 402855 - RNA, 23 nt, Artificial Sequence
  Synthetic
acgugacuaaggacucuaacauu

SEQ ID NO: 402856 - RNA, 24 nt, Artificial Sequence
  Synthetic
aacgugacuaaggacucuaacauu

SEQ ID NO: 402857 - RNA, 18 nt, Artificial Sequence
  Synthetic
ucaagaaaaaguaacauu

SEQ ID NO: 402858 - RNA, 19 nt, Artificial Sequence
  Synthetic
uucaagaaaaaguaacauu

SEQ ID NO: 402859 - RNA, 20 nt, Artificial Sequence
  Synthetic
uuucaagaaaaaguaacauu

SEQ ID NO: 402860 - RNA, 21 nt, Artificial Sequence
  Synthetic
uuuucaagaaaaaguaacauu

SEQ ID NO: 402861 - RNA, 22 nt, Artificial Sequence
  Synthetic
guuuucaagaaaaaguaacauu

SEQ ID NO: 402862 - RNA, 23 nt, Artificial Sequence
  Synthetic
gguuuucaagaaaaaguaacauu

SEQ ID NO: 402863 - RNA, 24 nt, Artificial Sequence
  Synthetic
agguuuucaagaaaaaguaacauu

SEQ ID NO: 402864 - RNA, 18 nt, Artificial Sequence
  Synthetic
acaaaacuauguaacauu

SEQ ID NO: 402865 - RNA, 19 nt, Artificial Sequence
  Synthetic
aacaaaacuauguaacauu

SEQ ID NO: 402866 - RNA, 20 nt, Artificial Sequence
  Synthetic
uaacaaaacuauguaacauu

SEQ ID NO: 402867 - RNA, 21 nt, Artificial Sequence
  Synthetic
cuaacaaaacuauguaacauu

SEQ ID NO: 402868 - RNA, 22 nt, Artificial Sequence
  Synthetic
ucuaacaaaacuauguaacauu

SEQ ID NO: 402869 - RNA, 23 nt, Artificial Sequence
  Synthetic
cucuaacaaaacuauguaacauu

SEQ ID NO: 402870 - RNA, 24 nt, Artificial Sequence
  Synthetic
ucucuaacaaaacuauguaacauu

SEQ ID NO: 402871 - RNA, 18 nt, Artificial Sequence
  Synthetic
acauuugaaauuaacauu

SEQ ID NO: 402872 - RNA, 19 nt, Artificial Sequence
  Synthetic
uacauuugaaauuaacauu

SEQ ID NO: 402873 - RNA, 20 nt, Artificial Sequence
  Synthetic
auacauuugaaauuaacauu

SEQ ID NO: 402874 - RNA, 21 nt, Artificial Sequence
  Synthetic
uauacauuugaaauuaacauu

SEQ ID NO: 402875 - RNA, 22 nt, Artificial Sequence
  Synthetic
auauacauuugaaauuaacauu

SEQ ID NO: 402876 - RNA, 23 nt, Artificial Sequence
  Synthetic
cauauacauuugaaauuaacauu

SEQ ID NO: 402877 - RNA, 24 nt, Artificial Sequence
  Synthetic
acauauacauuugaaauuaacauu

SEQ ID NO: 402878 - RNA, 18 nt, Artificial Sequence
  Synthetic
auauuuuauuuuaacauu

SEQ ID NO: 402879 - RNA, 19 nt, Artificial Sequence
  Synthetic
uauauuuuauuuuaacauu

SEQ ID NO: 402880 - RNA, 20 nt, Artificial Sequence
  Synthetic
auauauuuuauuuuaacauu

SEQ ID NO: 402881 - RNA, 21 nt, Artificial Sequence
  Synthetic
gauauauuuuauuuuaacauu

SEQ ID NO: 402882 - RNA, 22 nt, Artificial Sequence
  Synthetic
ggauauauuuuauuuuaacauu

SEQ ID NO: 402883 - RNA, 23 nt, Artificial Sequence
  Synthetic
aggauauauuuuauuuuaacauu

SEQ ID NO: 402884 - RNA, 24 nt, Artificial Sequence
  Synthetic
gaggauauauuuuauuuuaacauu

SEQ ID NO: 402885 - RNA, 18 nt, Artificial Sequence
  Synthetic
aagggacucaaacacauu

SEQ ID NO: 402886 - RNA, 19 nt, Artificial Sequence
  Synthetic
uaagggacucaaacacauu

SEQ ID NO: 402887 - RNA, 20 nt, Artificial Sequence
  Synthetic
auaagggacucaaacacauu

SEQ ID NO: 402888 - RNA, 21 nt, Artificial Sequence
  Synthetic
aauaagggacucaaacacauu

SEQ ID NO: 402889 - RNA, 22 nt, Artificial Sequence
  Synthetic
aaauaagggacucaaacacauu

SEQ ID NO: 402890 - RNA, 23 nt, Artificial Sequence
  Synthetic
aaaauaagggacucaaacacauu

SEQ ID NO: 402891 - RNA, 24 nt, Artificial Sequence
  Synthetic
aaaaauaagggacucaaacacauu

SEQ ID NO: 402892 - RNA, 18 nt, Artificial Sequence
  Synthetic
cgugugauuacacacauu

SEQ ID NO: 402893 - RNA, 19 nt, Artificial Sequence
  Synthetic
ccgugugauuacacacauu

SEQ ID NO: 402894 - RNA, 20 nt, Artificial Sequence
  Synthetic
uccgugugauuacacacauu

SEQ ID NO: 402895 - RNA, 21 nt, Artificial Sequence
  Synthetic
cuccgugugauuacacacauu

SEQ ID NO: 402896 - RNA, 22 nt, Artificial Sequence
  Synthetic
ucuccgugugauuacacacauu

SEQ ID NO: 402897 - RNA, 23 nt, Artificial Sequence
  Synthetic
aucuccgugugauuacacacauu

SEQ ID NO: 402898 - RNA, 24 nt, Artificial Sequence
  Synthetic
gaucuccgugugauuacacacauu

SEQ ID NO: 402899 - RNA, 18 nt, Artificial Sequence
  Synthetic
uaaaauauugcacacauu

SEQ ID NO: 402900 - RNA, 19 nt, Artificial Sequence
  Synthetic
cuaaaauauugcacacauu

SEQ ID NO: 402901 - RNA, 20 nt, Artificial Sequence
  Synthetic
ccuaaaauauugcacacauu

SEQ ID NO: 402902 - RNA, 21 nt, Artificial Sequence
  Synthetic
uccuaaaauauugcacacauu

SEQ ID NO: 402903 - RNA, 22 nt, Artificial Sequence
  Synthetic
cuccuaaaauauugcacacauu

SEQ ID NO: 402904 - RNA, 23 nt, Artificial Sequence
  Synthetic
acuccuaaaauauugcacacauu

SEQ ID NO: 402905 - RNA, 24 nt, Artificial Sequence
  Synthetic
gacuccuaaaauauugcacacauu

SEQ ID NO: 402906 - RNA, 18 nt, Artificial Sequence
  Synthetic
cucucaauuugacacauu

SEQ ID NO: 402907 - RNA, 19 nt, Artificial Sequence
  Synthetic
ucucucaauuugacacauu

SEQ ID NO: 402908 - RNA, 20 nt, Artificial Sequence
  Synthetic
uucucucaauuugacacauu

SEQ ID NO: 402909 - RNA, 21 nt, Artificial Sequence
  Synthetic
uuucucucaauuugacacauu

SEQ ID NO: 402910 - RNA, 22 nt, Artificial Sequence
  Synthetic
uuuucucucaauuugacacauu

SEQ ID NO: 402911 - RNA, 23 nt, Artificial Sequence
  Synthetic
auuuucucucaauuugacacauu

SEQ ID NO: 402912 - RNA, 24 nt, Artificial Sequence
  Synthetic
uauuuucucucaauuugacacauu

SEQ ID NO: 402913 - RNA, 18 nt, Artificial Sequence
  Synthetic
cagccugcgguacacauu

SEQ ID NO: 402914 - RNA, 19 nt, Artificial Sequence
  Synthetic
acagccugcgguacacauu

SEQ ID NO: 402915 - RNA, 20 nt, Artificial Sequence
  Synthetic
aacagccugcgguacacauu

SEQ ID NO: 402916 - RNA, 21 nt, Artificial Sequence
  Synthetic
gaacagccugcgguacacauu

SEQ ID NO: 402917 - RNA, 22 nt, Artificial Sequence
  Synthetic
agaacagccugcgguacacauu

SEQ ID NO: 402918 - RNA, 23 nt, Artificial Sequence
  Synthetic
gagaacagccugcgguacacauu

SEQ ID NO: 402919 - RNA, 24 nt, Artificial Sequence
  Synthetic
cgagaacagccugcgguacacauu

SEQ ID NO: 402920 - RNA, 18 nt, Artificial Sequence
  Synthetic
uguucagcaaaccacauu

SEQ ID NO: 402921 - RNA, 19 nt, Artificial Sequence
  Synthetic
cuguucagcaaaccacauu

SEQ ID NO: 402922 - RNA, 20 nt, Artificial Sequence
  Synthetic
acuguucagcaaaccacauu

SEQ ID NO: 402923 - RNA, 21 nt, Artificial Sequence
  Synthetic
uacuguucagcaaaccacauu

SEQ ID NO: 402924 - RNA, 22 nt, Artificial Sequence
  Synthetic
cuacuguucagcaaaccacauu

SEQ ID NO: 402925 - RNA, 23 nt, Artificial Sequence
  Synthetic
acuacuguucagcaaaccacauu

SEQ ID NO: 402926 - RNA, 24 nt, Artificial Sequence
  Synthetic
cacuacuguucagcaaaccacauu

SEQ ID NO: 402927 - RNA, 18 nt, Artificial Sequence
  Synthetic
aagagcugaacccacauu

SEQ ID NO: 402928 - RNA, 19 nt, Artificial Sequence
  Synthetic
aaagagcugaacccacauu

SEQ ID NO: 402929 - RNA, 20 nt, Artificial Sequence
  Synthetic
aaaagagcugaacccacauu

SEQ ID NO: 402930 - RNA, 21 nt, Artificial Sequence
  Synthetic
gaaaagagcugaacccacauu

SEQ ID NO: 402931 - RNA, 22 nt, Artificial Sequence
  Synthetic
ugaaaagagcugaacccacauu

SEQ ID NO: 402932 - RNA, 23 nt, Artificial Sequence
  Synthetic
uugaaaagagcugaacccacauu

SEQ ID NO: 402933 - RNA, 24 nt, Artificial Sequence
  Synthetic
auugaaaagagcugaacccacauu

SEQ ID NO: 402934 - RNA, 18 nt, Artificial Sequence
  Synthetic
agaaggcccacccacauu

SEQ ID NO: 402935 - RNA, 19 nt, Artificial Sequence
  Synthetic
gagaaggcccacccacauu

SEQ ID NO: 402936 - RNA, 20 nt, Artificial Sequence
  Synthetic
ggagaaggcccacccacauu

SEQ ID NO: 402937 - RNA, 21 nt, Artificial Sequence
  Synthetic
uggagaaggcccacccacauu

SEQ ID NO: 402938 - RNA, 22 nt, Artificial Sequence
  Synthetic
uuggagaaggcccacccacauu

SEQ ID NO: 402939 - RNA, 23 nt, Artificial Sequence
  Synthetic
auuggagaaggcccacccacauu

SEQ ID NO: 402940 - RNA, 24 nt, Artificial Sequence
  Synthetic
gauuggagaaggcccacccacauu

SEQ ID NO: 402941 - RNA, 18 nt, Artificial Sequence
  Synthetic
cugcaaucccagcacauu

SEQ ID NO: 402942 - RNA, 19 nt, Artificial Sequence
  Synthetic
ccugcaaucccagcacauu

SEQ ID NO: 402943 - RNA, 20 nt, Artificial Sequence
  Synthetic
gccugcaaucccagcacauu

SEQ ID NO: 402944 - RNA, 21 nt, Artificial Sequence
  Synthetic
ugccugcaaucccagcacauu

SEQ ID NO: 402945 - RNA, 22 nt, Artificial Sequence
  Synthetic
augccugcaaucccagcacauu

SEQ ID NO: 402946 - RNA, 23 nt, Artificial Sequence
  Synthetic
caugccugcaaucccagcacauu

SEQ ID NO: 402947 - RNA, 24 nt, Artificial Sequence
  Synthetic
ucaugccugcaaucccagcacauu

SEQ ID NO: 402948 - RNA, 18 nt, Artificial Sequence
  Synthetic
uccaaauagggucacauu

SEQ ID NO: 402949 - RNA, 19 nt, Artificial Sequence
  Synthetic
cuccaaauagggucacauu

SEQ ID NO: 402950 - RNA, 20 nt, Artificial Sequence
  Synthetic
ucuccaaauagggucacauu

SEQ ID NO: 402951 - RNA, 21 nt, Artificial Sequence
  Synthetic
aucuccaaauagggucacauu

SEQ ID NO: 402952 - RNA, 22 nt, Artificial Sequence
  Synthetic
uaucuccaaauagggucacauu

SEQ ID NO: 402953 - RNA, 23 nt, Artificial Sequence
  Synthetic
cuaucuccaaauagggucacauu

SEQ ID NO: 402954 - RNA, 24 nt, Artificial Sequence
  Synthetic
ccuaucuccaaauagggucacauu

SEQ ID NO: 402955 - RNA, 18 nt, Artificial Sequence
  Synthetic
auugcuuugugucacauu

SEQ ID NO: 402956 - RNA, 19 nt, Artificial Sequence
  Synthetic
aauugcuuugugucacauu

SEQ ID NO: 402957 - RNA, 20 nt, Artificial Sequence
  Synthetic
aaauugcuuugugucacauu

SEQ ID NO: 402958 - RNA, 21 nt, Artificial Sequence
  Synthetic
caaauugcuuugugucacauu

SEQ ID NO: 402959 - RNA, 22 nt, Artificial Sequence
  Synthetic
ucaaauugcuuugugucacauu

SEQ ID NO: 402960 - RNA, 23 nt, Artificial Sequence
  Synthetic
aucaaauugcuuugugucacauu

SEQ ID NO: 402961 - RNA, 24 nt, Artificial Sequence
  Synthetic
uaucaaauugcuuugugucacauu

SEQ ID NO: 402962 - RNA, 18 nt, Artificial Sequence
  Synthetic
auucuugguugucacauu

SEQ ID NO: 402963 - RNA, 19 nt, Artificial Sequence
  Synthetic
aauucuugguugucacauu

SEQ ID NO: 402964 - RNA, 20 nt, Artificial Sequence
  Synthetic
aaauucuugguugucacauu

SEQ ID NO: 402965 - RNA, 21 nt, Artificial Sequence
  Synthetic
gaaauucuugguugucacauu

SEQ ID NO: 402966 - RNA, 22 nt, Artificial Sequence
  Synthetic
agaaauucuugguugucacauu

SEQ ID NO: 402967 - RNA, 23 nt, Artificial Sequence
  Synthetic
aagaaauucuugguugucacauu

SEQ ID NO: 402968 - RNA, 24 nt, Artificial Sequence
  Synthetic
caagaaauucuugguugucacauu

SEQ ID NO: 402969 - RNA, 18 nt, Artificial Sequence
  Synthetic
aauuuagucauucacauu

SEQ ID NO: 402970 - RNA, 19 nt, Artificial Sequence
  Synthetic
caauuuagucauucacauu

SEQ ID NO: 402971 - RNA, 20 nt, Artificial Sequence
  Synthetic
acaauuuagucauucacauu

SEQ ID NO: 402972 - RNA, 21 nt, Artificial Sequence
  Synthetic
uacaauuuagucauucacauu

SEQ ID NO: 402973 - RNA, 22 nt, Artificial Sequence
  Synthetic
auacaauuuagucauucacauu

SEQ ID NO: 402974 - RNA, 23 nt, Artificial Sequence
  Synthetic
uauacaauuuagucauucacauu

SEQ ID NO: 402975 - RNA, 24 nt, Artificial Sequence
  Synthetic
auauacaauuuagucauucacauu

SEQ ID NO: 402976 - RNA, 18 nt, Artificial Sequence
  Synthetic
uucacacuauuucacauu

SEQ ID NO: 402977 - RNA, 19 nt, Artificial Sequence
  Synthetic
auucacacuauuucacauu

SEQ ID NO: 402978 - RNA, 20 nt, Artificial Sequence
  Synthetic
uauucacacuauuucacauu

SEQ ID NO: 402979 - RNA, 21 nt, Artificial Sequence
  Synthetic
uuauucacacuauuucacauu

SEQ ID NO: 402980 - RNA, 22 nt, Artificial Sequence
  Synthetic
auuauucacacuauuucacauu

SEQ ID NO: 402981 - RNA, 23 nt, Artificial Sequence
  Synthetic
uauuauucacacuauuucacauu

SEQ ID NO: 402982 - RNA, 24 nt, Artificial Sequence
  Synthetic
auauuauucacacuauuucacauu

SEQ ID NO: 402983 - RNA, 18 nt, Artificial Sequence
  Synthetic
ccccaaguauuucacauu

SEQ ID NO: 402984 - RNA, 19 nt, Artificial Sequence
  Synthetic
uccccaaguauuucacauu

SEQ ID NO: 402985 - RNA, 20 nt, Artificial Sequence
  Synthetic
cuccccaaguauuucacauu

SEQ ID NO: 402986 - RNA, 21 nt, Artificial Sequence
  Synthetic
acuccccaaguauuucacauu

SEQ ID NO: 402987 - RNA, 22 nt, Artificial Sequence
  Synthetic
uacuccccaaguauuucacauu

SEQ ID NO: 402988 - RNA, 23 nt, Artificial Sequence
  Synthetic
cuacuccccaaguauuucacauu

SEQ ID NO: 402989 - RNA, 24 nt, Artificial Sequence
  Synthetic
acuacuccccaaguauuucacauu

SEQ ID NO: 402990 - RNA, 18 nt, Artificial Sequence
  Synthetic
gagaguaauaaagacauu

SEQ ID NO: 402991 - RNA, 19 nt, Artificial Sequence
  Synthetic
agagaguaauaaagacauu

SEQ ID NO: 402992 - RNA, 20 nt, Artificial Sequence
  Synthetic
uagagaguaauaaagacauu

SEQ ID NO: 402993 - RNA, 21 nt, Artificial Sequence
  Synthetic
uuagagaguaauaaagacauu

SEQ ID NO: 402994 - RNA, 22 nt, Artificial Sequence
  Synthetic
guuagagaguaauaaagacauu

SEQ ID NO: 402995 - RNA, 23 nt, Artificial Sequence
  Synthetic
aguuagagaguaauaaagacauu

SEQ ID NO: 402996 - RNA, 24 nt, Artificial Sequence
  Synthetic
aaguuagagaguaauaaagacauu

SEQ ID NO: 402997 - RNA, 18 nt, Artificial Sequence
  Synthetic
gaagucuuugaagacauu

SEQ ID NO: 402998 - RNA, 19 nt, Artificial Sequence
  Synthetic
agaagucuuugaagacauu

SEQ ID NO: 402999 - RNA, 20 nt, Artificial Sequence
  Synthetic
gagaagucuuugaagacauu

SEQ ID NO: 403000 - RNA, 21 nt, Artificial Sequence
  Synthetic
ugagaagucuuugaagacauu

SEQ ID NO: 403001 - RNA, 22 nt, Artificial Sequence
  Synthetic
gugagaagucuuugaagacauu

SEQ ID NO: 403002 - RNA, 23 nt, Artificial Sequence
  Synthetic
ggugagaagucuuugaagacauu

SEQ ID NO: 403003 - RNA, 24 nt, Artificial Sequence
  Synthetic
gggugagaagucuuugaagacauu

SEQ ID NO: 403004 - RNA, 18 nt, Artificial Sequence
  Synthetic
cauagcauuagagacauu

SEQ ID NO: 403005 - RNA, 19 nt, Artificial Sequence
  Synthetic
ucauagcauuagagacauu

SEQ ID NO: 403006 - RNA, 20 nt, Artificial Sequence
  Synthetic
cucauagcauuagagacauu

SEQ ID NO: 403007 - RNA, 21 nt, Artificial Sequence
  Synthetic
ccucauagcauuagagacauu

SEQ ID NO: 403008 - RNA, 22 nt, Artificial Sequence
  Synthetic
cccucauagcauuagagacauu

SEQ ID NO: 403009 - RNA, 23 nt, Artificial Sequence
  Synthetic
acccucauagcauuagagacauu

SEQ ID NO: 403010 - RNA, 24 nt, Artificial Sequence
  Synthetic
uacccucauagcauuagagacauu

SEQ ID NO: 403011 - RNA, 18 nt, Artificial Sequence
  Synthetic
cacacaaagggagacauu

SEQ ID NO: 403012 - RNA, 19 nt, Artificial Sequence
  Synthetic
gcacacaaagggagacauu

SEQ ID NO: 403013 - RNA, 20 nt, Artificial Sequence
  Synthetic
ugcacacaaagggagacauu

SEQ ID NO: 403014 - RNA, 21 nt, Artificial Sequence
  Synthetic
uugcacacaaagggagacauu

SEQ ID NO: 403015 - RNA, 22 nt, Artificial Sequence
  Synthetic
auugcacacaaagggagacauu

SEQ ID NO: 403016 - RNA, 23 nt, Artificial Sequence
  Synthetic
gauugcacacaaagggagacauu

SEQ ID NO: 403017 - RNA, 24 nt, Artificial Sequence
  Synthetic
ggauugcacacaaagggagacauu

SEQ ID NO: 403018 - RNA, 18 nt, Artificial Sequence
  Synthetic
auuucacauugagacauu

SEQ ID NO: 403019 - RNA, 19 nt, Artificial Sequence
  Synthetic
cauuucacauugagacauu

SEQ ID NO: 403020 - RNA, 20 nt, Artificial Sequence
  Synthetic
gcauuucacauugagacauu

SEQ ID NO: 403021 - RNA, 21 nt, Artificial Sequence
  Synthetic
agcauuucacauugagacauu

SEQ ID NO: 403022 - RNA, 22 nt, Artificial Sequence
  Synthetic
cagcauuucacauugagacauu

SEQ ID NO: 403023 - RNA, 23 nt, Artificial Sequence
  Synthetic
ccagcauuucacauugagacauu

SEQ ID NO: 403024 - RNA, 24 nt, Artificial Sequence
  Synthetic
cccagcauuucacauugagacauu

SEQ ID NO: 403025 - RNA, 18 nt, Artificial Sequence
  Synthetic
gugaaaacaauagacauu

SEQ ID NO: 403026 - RNA, 19 nt, Artificial Sequence
  Synthetic
ggugaaaacaauagacauu

SEQ ID NO: 403027 - RNA, 20 nt, Artificial Sequence
  Synthetic
aggugaaaacaauagacauu

SEQ ID NO: 403028 - RNA, 21 nt, Artificial Sequence
  Synthetic
aaggugaaaacaauagacauu

SEQ ID NO: 403029 - RNA, 22 nt, Artificial Sequence
  Synthetic
aaaggugaaaacaauagacauu

SEQ ID NO: 403030 - RNA, 23 nt, Artificial Sequence
  Synthetic
uaaaggugaaaacaauagacauu

SEQ ID NO: 403031 - RNA, 24 nt, Artificial Sequence
  Synthetic
auaaaggugaaaacaauagacauu

SEQ ID NO: 403032 - RNA, 18 nt, Artificial Sequence
  Synthetic
cuuauauaucaggacauu

SEQ ID NO: 403033 - RNA, 19 nt, Artificial Sequence
  Synthetic
ccuuauauaucaggacauu

SEQ ID NO: 403034 - RNA, 20 nt, Artificial Sequence
  Synthetic
cccuuauauaucaggacauu

SEQ ID NO: 403035 - RNA, 21 nt, Artificial Sequence
  Synthetic
ucccuuauauaucaggacauu

SEQ ID NO: 403036 - RNA, 22 nt, Artificial Sequence
  Synthetic
cucccuuauauaucaggacauu

SEQ ID NO: 403037 - RNA, 23 nt, Artificial Sequence
  Synthetic
gcucccuuauauaucaggacauu

SEQ ID NO: 403038 - RNA, 24 nt, Artificial Sequence
  Synthetic
ugcucccuuauauaucaggacauu

SEQ ID NO: 403039 - RNA, 18 nt, Artificial Sequence
  Synthetic
agacagaggcaugacauu

SEQ ID NO: 403040 - RNA, 19 nt, Artificial Sequence
  Synthetic
uagacagaggcaugacauu

SEQ ID NO: 403041 - RNA, 20 nt, Artificial Sequence
  Synthetic
guagacagaggcaugacauu

SEQ ID NO: 403042 - RNA, 21 nt, Artificial Sequence
  Synthetic
aguagacagaggcaugacauu

SEQ ID NO: 403043 - RNA, 22 nt, Artificial Sequence
  Synthetic
aaguagacagaggcaugacauu

SEQ ID NO: 403044 - RNA, 23 nt, Artificial Sequence
  Synthetic
aaaguagacagaggcaugacauu

SEQ ID NO: 403045 - RNA, 24 nt, Artificial Sequence
  Synthetic
gaaaguagacagaggcaugacauu

SEQ ID NO: 403046 - RNA, 18 nt, Artificial Sequence
  Synthetic
ggugggaggcaugacauu

SEQ ID NO: 403047 - RNA, 19 nt, Artificial Sequence
  Synthetic
gggugggaggcaugacauu

SEQ ID NO: 403048 - RNA, 20 nt, Artificial Sequence
  Synthetic
ggggugggaggcaugacauu

SEQ ID NO: 403049 - RNA, 21 nt, Artificial Sequence
  Synthetic
uggggugggaggcaugacauu

SEQ ID NO: 403050 - RNA, 22 nt, Artificial Sequence
  Synthetic
guggggugggaggcaugacauu

SEQ ID NO: 403051 - RNA, 23 nt, Artificial Sequence
  Synthetic
uguggggugggaggcaugacauu

SEQ ID NO: 403052 - RNA, 24 nt, Artificial Sequence
  Synthetic
guguggggugggaggcaugacauu

SEQ ID NO: 403053 - RNA, 18 nt, Artificial Sequence
  Synthetic
auguuuuucuaugacauu

SEQ ID NO: 403054 - RNA, 19 nt, Artificial Sequence
  Synthetic
aauguuuuucuaugacauu

SEQ ID NO: 403055 - RNA, 20 nt, Artificial Sequence
  Synthetic
gaauguuuuucuaugacauu

SEQ ID NO: 403056 - RNA, 21 nt, Artificial Sequence
  Synthetic
agaauguuuuucuaugacauu

SEQ ID NO: 403057 - RNA, 22 nt, Artificial Sequence
  Synthetic
aagaauguuuuucuaugacauu

SEQ ID NO: 403058 - RNA, 23 nt, Artificial Sequence
  Synthetic
gaagaauguuuuucuaugacauu

SEQ ID NO: 403059 - RNA, 24 nt, Artificial Sequence
  Synthetic
agaagaauguuuuucuaugacauu

SEQ ID NO: 403060 - RNA, 18 nt, Artificial Sequence
  Synthetic
ccuugcuggucugacauu

SEQ ID NO: 403061 - RNA, 19 nt, Artificial Sequence
  Synthetic
uccuugcuggucugacauu

SEQ ID NO: 403062 - RNA, 20 nt, Artificial Sequence
  Synthetic
guccuugcuggucugacauu

SEQ ID NO: 403063 - RNA, 21 nt, Artificial Sequence
  Synthetic
uguccuugcuggucugacauu

SEQ ID NO: 403064 - RNA, 22 nt, Artificial Sequence
  Synthetic
auguccuugcuggucugacauu

SEQ ID NO: 403065 - RNA, 23 nt, Artificial Sequence
  Synthetic
uauguccuugcuggucugacauu

SEQ ID NO: 403066 - RNA, 24 nt, Artificial Sequence
  Synthetic
uuauguccuugcuggucugacauu

SEQ ID NO: 403067 - RNA, 18 nt, Artificial Sequence
  Synthetic
auguuagaauuugacauu

SEQ ID NO: 403068 - RNA, 19 nt, Artificial Sequence
  Synthetic
uauguuagaauuugacauu

SEQ ID NO: 403069 - RNA, 20 nt, Artificial Sequence
  Synthetic
cuauguuagaauuugacauu

SEQ ID NO: 403070 - RNA, 21 nt, Artificial Sequence
  Synthetic
gcuauguuagaauuugacauu

SEQ ID NO: 403071 - RNA, 22 nt, Artificial Sequence
  Synthetic
cgcuauguuagaauuugacauu

SEQ ID NO: 403072 - RNA, 23 nt, Artificial Sequence
  Synthetic
acgcuauguuagaauuugacauu

SEQ ID NO: 403073 - RNA, 24 nt, Artificial Sequence
  Synthetic
aacgcuauguuagaauuugacauu

SEQ ID NO: 403074 - RNA, 18 nt, Artificial Sequence
  Synthetic
agacagagggaauacauu

SEQ ID NO: 403075 - RNA, 19 nt, Artificial Sequence
  Synthetic
uagacagagggaauacauu

SEQ ID NO: 403076 - RNA, 20 nt, Artificial Sequence
  Synthetic
cuagacagagggaauacauu

SEQ ID NO: 403077 - RNA, 21 nt, Artificial Sequence
  Synthetic
acuagacagagggaauacauu

SEQ ID NO: 403078 - RNA, 22 nt, Artificial Sequence
  Synthetic
aacuagacagagggaauacauu

SEQ ID NO: 403079 - RNA, 23 nt, Artificial Sequence
  Synthetic
caacuagacagagggaauacauu

SEQ ID NO: 403080 - RNA, 24 nt, Artificial Sequence
  Synthetic
ucaacuagacagagggaauacauu

SEQ ID NO: 403081 - RNA, 18 nt, Artificial Sequence
  Synthetic
cacaacccugaauacauu

SEQ ID NO: 403082 - RNA, 19 nt, Artificial Sequence
  Synthetic
gcacaacccugaauacauu

SEQ ID NO: 403083 - RNA, 20 nt, Artificial Sequence
  Synthetic
ugcacaacccugaauacauu

SEQ ID NO: 403084 - RNA, 21 nt, Artificial Sequence
  Synthetic
uugcacaacccugaauacauu

SEQ ID NO: 403085 - RNA, 22 nt, Artificial Sequence
  Synthetic
guugcacaacccugaauacauu

SEQ ID NO: 403086 - RNA, 23 nt, Artificial Sequence
  Synthetic
gguugcacaacccugaauacauu

SEQ ID NO: 403087 - RNA, 24 nt, Artificial Sequence
  Synthetic
ugguugcacaacccugaauacauu

SEQ ID NO: 403088 - RNA, 18 nt, Artificial Sequence
  Synthetic
auagcuuuguaauacauu

SEQ ID NO: 403089 - RNA, 19 nt, Artificial Sequence
  Synthetic
uauagcuuuguaauacauu

SEQ ID NO: 403090 - RNA, 20 nt, Artificial Sequence
  Synthetic
uuauagcuuuguaauacauu

SEQ ID NO: 403091 - RNA, 21 nt, Artificial Sequence
  Synthetic
auuauagcuuuguaauacauu

SEQ ID NO: 403092 - RNA, 22 nt, Artificial Sequence
  Synthetic
uauuauagcuuuguaauacauu

SEQ ID NO: 403093 - RNA, 23 nt, Artificial Sequence
  Synthetic
uuauuauagcuuuguaauacauu

SEQ ID NO: 403094 - RNA, 24 nt, Artificial Sequence
  Synthetic
auuauuauagcuuuguaauacauu

SEQ ID NO: 403095 - RNA, 18 nt, Artificial Sequence
  Synthetic
uugauauacccauacauu

SEQ ID NO: 403096 - RNA, 19 nt, Artificial Sequence
  Synthetic
uuugauauacccauacauu

SEQ ID NO: 403097 - RNA, 20 nt, Artificial Sequence
  Synthetic
uuuugauauacccauacauu

SEQ ID NO: 403098 - RNA, 21 nt, Artificial Sequence
  Synthetic
guuuugauauacccauacauu

SEQ ID NO: 403099 - RNA, 22 nt, Artificial Sequence
  Synthetic
uguuuugauauacccauacauu

SEQ ID NO: 403100 - RNA, 23 nt, Artificial Sequence
  Synthetic
auguuuugauauacccauacauu

SEQ ID NO: 403101 - RNA, 24 nt, Artificial Sequence
  Synthetic
gauguuuugauauacccauacauu

SEQ ID NO: 403102 - RNA, 18 nt, Artificial Sequence
  Synthetic
guuaguuguucauacauu

SEQ ID NO: 403103 - RNA, 19 nt, Artificial Sequence
  Synthetic
aguuaguuguucauacauu

SEQ ID NO: 403104 - RNA, 20 nt, Artificial Sequence
  Synthetic
uaguuaguuguucauacauu

SEQ ID NO: 403105 - RNA, 21 nt, Artificial Sequence
  Synthetic
uuaguuaguuguucauacauu

SEQ ID NO: 403106 - RNA, 22 nt, Artificial Sequence
  Synthetic
guuaguuaguuguucauacauu

SEQ ID NO: 403107 - RNA, 23 nt, Artificial Sequence
  Synthetic
aguuaguuaguuguucauacauu

SEQ ID NO: 403108 - RNA, 24 nt, Artificial Sequence
  Synthetic
aaguuaguuaguuguucauacauu

SEQ ID NO: 403109 - RNA, 18 nt, Artificial Sequence
  Synthetic
cugguucagagauacauu

SEQ ID NO: 403110 - RNA, 19 nt, Artificial Sequence
  Synthetic
gcugguucagagauacauu

SEQ ID NO: 403111 - RNA, 20 nt, Artificial Sequence
  Synthetic
ugcugguucagagauacauu

SEQ ID NO: 403112 - RNA, 21 nt, Artificial Sequence
  Synthetic
cugcugguucagagauacauu

SEQ ID NO: 403113 - RNA, 22 nt, Artificial Sequence
  Synthetic
gcugcugguucagagauacauu

SEQ ID NO: 403114 - RNA, 23 nt, Artificial Sequence
  Synthetic
ugcugcugguucagagauacauu

SEQ ID NO: 403115 - RNA, 24 nt, Artificial Sequence
  Synthetic
augcugcugguucagagauacauu

SEQ ID NO: 403116 - RNA, 18 nt, Artificial Sequence
  Synthetic
aaaacuauaugauacauu

SEQ ID NO: 403117 - RNA, 19 nt, Artificial Sequence
  Synthetic
uaaaacuauaugauacauu

SEQ ID NO: 403118 - RNA, 20 nt, Artificial Sequence
  Synthetic
uuaaaacuauaugauacauu

SEQ ID NO: 403119 - RNA, 21 nt, Artificial Sequence
  Synthetic
uuuaaaacuauaugauacauu

SEQ ID NO: 403120 - RNA, 22 nt, Artificial Sequence
  Synthetic
auuuaaaacuauaugauacauu

SEQ ID NO: 403121 - RNA, 23 nt, Artificial Sequence
  Synthetic
aauuuaaaacuauaugauacauu

SEQ ID NO: 403122 - RNA, 24 nt, Artificial Sequence
  Synthetic
aaauuuaaaacuauaugauacauu

SEQ ID NO: 403123 - RNA, 18 nt, Artificial Sequence
  Synthetic
uccagcuccugauacauu

SEQ ID NO: 403124 - RNA, 19 nt, Artificial Sequence
  Synthetic
guccagcuccugauacauu

SEQ ID NO: 403125 - RNA, 20 nt, Artificial Sequence
  Synthetic
gguccagcuccugauacauu

SEQ ID NO: 403126 - RNA, 21 nt, Artificial Sequence
  Synthetic
ggguccagcuccugauacauu

SEQ ID NO: 403127 - RNA, 22 nt, Artificial Sequence
  Synthetic
aggguccagcuccugauacauu

SEQ ID NO: 403128 - RNA, 23 nt, Artificial Sequence
  Synthetic
gaggguccagcuccugauacauu

SEQ ID NO: 403129 - RNA, 24 nt, Artificial Sequence
  Synthetic
ggaggguccagcuccugauacauu

SEQ ID NO: 403130 - RNA, 18 nt, Artificial Sequence
  Synthetic
caacaacagauauacauu

SEQ ID NO: 403131 - RNA, 19 nt, Artificial Sequence
  Synthetic
ucaacaacagauauacauu

SEQ ID NO: 403132 - RNA, 20 nt, Artificial Sequence
  Synthetic
cucaacaacagauauacauu

SEQ ID NO: 403133 - RNA, 21 nt, Artificial Sequence
  Synthetic
gcucaacaacagauauacauu

SEQ ID NO: 403134 - RNA, 22 nt, Artificial Sequence
  Synthetic
ugcucaacaacagauauacauu

SEQ ID NO: 403135 - RNA, 23 nt, Artificial Sequence
  Synthetic
uugcucaacaacagauauacauu

SEQ ID NO: 403136 - RNA, 24 nt, Artificial Sequence
  Synthetic
auugcucaacaacagauauacauu

SEQ ID NO: 403137 - RNA, 18 nt, Artificial Sequence
  Synthetic
aauccauauauauacauu

SEQ ID NO: 403138 - RNA, 19 nt, Artificial Sequence
  Synthetic
caauccauauauauacauu

SEQ ID NO: 403139 - RNA, 20 nt, Artificial Sequence
  Synthetic
ucaauccauauauauacauu

SEQ ID NO: 403140 - RNA, 21 nt, Artificial Sequence
  Synthetic
uucaauccauauauauacauu

SEQ ID NO: 403141 - RNA, 22 nt, Artificial Sequence
  Synthetic
uuucaauccauauauauacauu

SEQ ID NO: 403142 - RNA, 23 nt, Artificial Sequence
  Synthetic
guuucaauccauauauauacauu

SEQ ID NO: 403143 - RNA, 24 nt, Artificial Sequence
  Synthetic
uguuucaauccauauauauacauu

SEQ ID NO: 403144 - RNA, 18 nt, Artificial Sequence
  Synthetic
aggcauaaacacuacauu

SEQ ID NO: 403145 - RNA, 19 nt, Artificial Sequence
  Synthetic
aaggcauaaacacuacauu

SEQ ID NO: 403146 - RNA, 20 nt, Artificial Sequence
  Synthetic
aaaggcauaaacacuacauu

SEQ ID NO: 403147 - RNA, 21 nt, Artificial Sequence
  Synthetic
caaaggcauaaacacuacauu

SEQ ID NO: 403148 - RNA, 22 nt, Artificial Sequence
  Synthetic
ucaaaggcauaaacacuacauu

SEQ ID NO: 403149 - RNA, 23 nt, Artificial Sequence
  Synthetic
aucaaaggcauaaacacuacauu

SEQ ID NO: 403150 - RNA, 24 nt, Artificial Sequence
  Synthetic
gaucaaaggcauaaacacuacauu

SEQ ID NO: 403151 - RNA, 18 nt, Artificial Sequence
  Synthetic
uacacaaaucacuacauu

SEQ ID NO: 403152 - RNA, 19 nt, Artificial Sequence
  Synthetic
auacacaaaucacuacauu

SEQ ID NO: 403153 - RNA, 20 nt, Artificial Sequence
  Synthetic
uauacacaaaucacuacauu

SEQ ID NO: 403154 - RNA, 21 nt, Artificial Sequence
  Synthetic
uuauacacaaaucacuacauu

SEQ ID NO: 403155 - RNA, 22 nt, Artificial Sequence
  Synthetic
uuuauacacaaaucacuacauu

SEQ ID NO: 403156 - RNA, 23 nt, Artificial Sequence
  Synthetic
auuuauacacaaaucacuacauu

SEQ ID NO: 403157 - RNA, 24 nt, Artificial Sequence
  Synthetic
uauuuauacacaaaucacuacauu

SEQ ID NO: 403158 - RNA, 18 nt, Artificial Sequence
  Synthetic
aaaagcuguaccuacauu

SEQ ID NO: 403159 - RNA, 19 nt, Artificial Sequence
  Synthetic
gaaaagcuguaccuacauu

SEQ ID NO: 403160 - RNA, 20 nt, Artificial Sequence
  Synthetic
agaaaagcuguaccuacauu

SEQ ID NO: 403161 - RNA, 21 nt, Artificial Sequence
  Synthetic
aagaaaagcuguaccuacauu

SEQ ID NO: 403162 - RNA, 22 nt, Artificial Sequence
  Synthetic
aaagaaaagcuguaccuacauu

SEQ ID NO: 403163 - RNA, 23 nt, Artificial Sequence
  Synthetic
gaaagaaaagcuguaccuacauu

SEQ ID NO: 403164 - RNA, 24 nt, Artificial Sequence
  Synthetic
ugaaagaaaagcuguaccuacauu

SEQ ID NO: 403165 - RNA, 18 nt, Artificial Sequence
  Synthetic
cuuaucucaagguacauu

SEQ ID NO: 403166 - RNA, 19 nt, Artificial Sequence
  Synthetic
ucuuaucucaagguacauu

SEQ ID NO: 403167 - RNA, 20 nt, Artificial Sequence
  Synthetic
cucuuaucucaagguacauu

SEQ ID NO: 403168 - RNA, 21 nt, Artificial Sequence
  Synthetic
ucucuuaucucaagguacauu

SEQ ID NO: 403169 - RNA, 22 nt, Artificial Sequence
  Synthetic
aucucuuaucucaagguacauu

SEQ ID NO: 403170 - RNA, 23 nt, Artificial Sequence
  Synthetic
caucucuuaucucaagguacauu

SEQ ID NO: 403171 - RNA, 24 nt, Artificial Sequence
  Synthetic
gcaucucuuaucucaagguacauu

SEQ ID NO: 403172 - RNA, 18 nt, Artificial Sequence
  Synthetic
aaacuucuaauguacauu

SEQ ID NO: 403173 - RNA, 19 nt, Artificial Sequence
  Synthetic
uaaacuucuaauguacauu

SEQ ID NO: 403174 - RNA, 20 nt, Artificial Sequence
  Synthetic
uuaaacuucuaauguacauu

SEQ ID NO: 403175 - RNA, 21 nt, Artificial Sequence
  Synthetic
uuuaaacuucuaauguacauu

SEQ ID NO: 403176 - RNA, 22 nt, Artificial Sequence
  Synthetic
uuuuaaacuucuaauguacauu

SEQ ID NO: 403177 - RNA, 23 nt, Artificial Sequence
  Synthetic
guuuuaaacuucuaauguacauu

SEQ ID NO: 403178 - RNA, 24 nt, Artificial Sequence
  Synthetic
aguuuuaaacuucuaauguacauu

SEQ ID NO: 403179 - RNA, 18 nt, Artificial Sequence
  Synthetic
aaaaacauuaauuacauu

SEQ ID NO: 403180 - RNA, 19 nt, Artificial Sequence
  Synthetic
uaaaaacauuaauuacauu

SEQ ID NO: 403181 - RNA, 20 nt, Artificial Sequence
  Synthetic
cuaaaaacauuaauuacauu

SEQ ID NO: 403182 - RNA, 21 nt, Artificial Sequence
  Synthetic
gcuaaaaacauuaauuacauu

SEQ ID NO: 403183 - RNA, 22 nt, Artificial Sequence
  Synthetic
ggcuaaaaacauuaauuacauu

SEQ ID NO: 403184 - RNA, 23 nt, Artificial Sequence
  Synthetic
aggcuaaaaacauuaauuacauu

SEQ ID NO: 403185 - RNA, 24 nt, Artificial Sequence
  Synthetic
aaggcuaaaaacauuaauuacauu

SEQ ID NO: 403186 - RNA, 18 nt, Artificial Sequence
  Synthetic
cuuuauggaucuuacauu

SEQ ID NO: 403187 - RNA, 19 nt, Artificial Sequence
  Synthetic
ucuuuauggaucuuacauu

SEQ ID NO: 403188 - RNA, 20 nt, Artificial Sequence
  Synthetic
gucuuuauggaucuuacauu

SEQ ID NO: 403189 - RNA, 21 nt, Artificial Sequence
  Synthetic
ugucuuuauggaucuuacauu

SEQ ID NO: 403190 - RNA, 22 nt, Artificial Sequence
  Synthetic
uugucuuuauggaucuuacauu

SEQ ID NO: 403191 - RNA, 23 nt, Artificial Sequence
  Synthetic
cuugucuuuauggaucuuacauu

SEQ ID NO: 403192 - RNA, 24 nt, Artificial Sequence
  Synthetic
acuugucuuuauggaucuuacauu

SEQ ID NO: 403193 - RNA, 18 nt, Artificial Sequence
  Synthetic
uaccagaacauuuacauu

SEQ ID NO: 403194 - RNA, 19 nt, Artificial Sequence
  Synthetic
uuaccagaacauuuacauu

SEQ ID NO: 403195 - RNA, 20 nt, Artificial Sequence
  Synthetic
uuuaccagaacauuuacauu

SEQ ID NO: 403196 - RNA, 21 nt, Artificial Sequence
  Synthetic
cuuuaccagaacauuuacauu

SEQ ID NO: 403197 - RNA, 22 nt, Artificial Sequence
  Synthetic
ccuuuaccagaacauuuacauu

SEQ ID NO: 403198 - RNA, 23 nt, Artificial Sequence
  Synthetic
uccuuuaccagaacauuuacauu

SEQ ID NO: 403199 - RNA, 24 nt, Artificial Sequence
  Synthetic
uuccuuuaccagaacauuuacauu

SEQ ID NO: 403200 - RNA, 18 nt, Artificial Sequence
  Synthetic
auuauuauacuuuacauu

SEQ ID NO: 403201 - RNA, 19 nt, Artificial Sequence
  Synthetic
uauuauuauacuuuacauu

SEQ ID NO: 403202 - RNA, 20 nt, Artificial Sequence
  Synthetic
uuauuauuauacuuuacauu

SEQ ID NO: 403203 - RNA, 21 nt, Artificial Sequence
  Synthetic
uuuauuauuauacuuuacauu

SEQ ID NO: 403204 - RNA, 22 nt, Artificial Sequence
  Synthetic
uuuuauuauuauacuuuacauu

SEQ ID NO: 403205 - RNA, 23 nt, Artificial Sequence
  Synthetic
uuuuuauuauuauacuuuacauu

SEQ ID NO: 403206 - RNA, 24 nt, Artificial Sequence
  Synthetic
uuuuuuauuauuauacuuuacauu

SEQ ID NO: 403207 - RNA, 18 nt, Artificial Sequence
  Synthetic
uugauauauguuuacauu

SEQ ID NO: 403208 - RNA, 19 nt, Artificial Sequence
  Synthetic
uuugauauauguuuacauu

SEQ ID NO: 403209 - RNA, 20 nt, Artificial Sequence
  Synthetic
uuuugauauauguuuacauu

SEQ ID NO: 403210 - RNA, 21 nt, Artificial Sequence
  Synthetic
guuuugauauauguuuacauu

SEQ ID NO: 403211 - RNA, 22 nt, Artificial Sequence
  Synthetic
uguuuugauauauguuuacauu

SEQ ID NO: 403212 - RNA, 23 nt, Artificial Sequence
  Synthetic
auguuuugauauauguuuacauu

SEQ ID NO: 403213 - RNA, 24 nt, Artificial Sequence
  Synthetic
gauguuuugauauauguuuacauu

SEQ ID NO: 403214 - RNA, 18 nt, Artificial Sequence
  Synthetic
agguuuguuuuuuacauu

SEQ ID NO: 403215 - RNA, 19 nt, Artificial Sequence
  Synthetic
aagguuuguuuuuuacauu

SEQ ID NO: 403216 - RNA, 20 nt, Artificial Sequence
  Synthetic
aaagguuuguuuuuuacauu

SEQ ID NO: 403217 - RNA, 21 nt, Artificial Sequence
  Synthetic
aaaagguuuguuuuuuacauu

SEQ ID NO: 403218 - RNA, 22 nt, Artificial Sequence
  Synthetic
gaaaagguuuguuuuuuacauu

SEQ ID NO: 403219 - RNA, 23 nt, Artificial Sequence
  Synthetic
ugaaaagguuuguuuuuuacauu

SEQ ID NO: 403220 - RNA, 24 nt, Artificial Sequence
  Synthetic
uugaaaagguuuguuuuuuacauu

SEQ ID NO: 403221 - RNA, 18 nt, Artificial Sequence
  Synthetic
uauauuaguacaaccauu

SEQ ID NO: 403222 - RNA, 19 nt, Artificial Sequence
  Synthetic
guauauuaguacaaccauu

SEQ ID NO: 403223 - RNA, 20 nt, Artificial Sequence
  Synthetic
uguauauuaguacaaccauu

SEQ ID NO: 403224 - RNA, 21 nt, Artificial Sequence
  Synthetic
auguauauuaguacaaccauu

SEQ ID NO: 403225 - RNA, 22 nt, Artificial Sequence
  Synthetic
aauguauauuaguacaaccauu

SEQ ID NO: 403226 - RNA, 23 nt, Artificial Sequence
  Synthetic
gaauguauauuaguacaaccauu

SEQ ID NO: 403227 - RNA, 24 nt, Artificial Sequence
  Synthetic
ggaauguauauuaguacaaccauu

SEQ ID NO: 403228 - RNA, 18 nt, Artificial Sequence
  Synthetic
ugaauuacuucaaccauu

SEQ ID NO: 403229 - RNA, 19 nt, Artificial Sequence
  Synthetic
gugaauuacuucaaccauu

SEQ ID NO: 403230 - RNA, 20 nt, Artificial Sequence
  Synthetic
ugugaauuacuucaaccauu

SEQ ID NO: 403231 - RNA, 21 nt, Artificial Sequence
  Synthetic
gugugaauuacuucaaccauu

SEQ ID NO: 403232 - RNA, 22 nt, Artificial Sequence
  Synthetic
agugugaauuacuucaaccauu

SEQ ID NO: 403233 - RNA, 23 nt, Artificial Sequence
  Synthetic
gagugugaauuacuucaaccauu

SEQ ID NO: 403234 - RNA, 24 nt, Artificial Sequence
  Synthetic
ggagugugaauuacuucaaccauu

SEQ ID NO: 403235 - RNA, 18 nt, Artificial Sequence
  Synthetic
uaaacuaguucaaccauu

SEQ ID NO: 403236 - RNA, 19 nt, Artificial Sequence
  Synthetic
guaaacuaguucaaccauu

SEQ ID NO: 403237 - RNA, 20 nt, Artificial Sequence
  Synthetic
uguaaacuaguucaaccauu

SEQ ID NO: 403238 - RNA, 24 nt, Artificial Sequence
  Synthetic
ggacuguaaacuaguucaaccauu

SEQ ID NO: 403239 - RNA, 18 nt, Artificial Sequence
  Synthetic
uaaauuaguucaaccauu

SEQ ID NO: 403240 - RNA, 19 nt, Artificial Sequence
  Synthetic
guaaauuaguucaaccauu

SEQ ID NO: 403241 - RNA, 20 nt, Artificial Sequence
  Synthetic
uguaaauuaguucaaccauu

SEQ ID NO: 403242 - RNA, 21 nt, Artificial Sequence
  Synthetic
guguaaauuaguucaaccauu

SEQ ID NO: 403243 - RNA, 22 nt, Artificial Sequence
  Synthetic
aguguaaauuaguucaaccauu

SEQ ID NO: 403244 - RNA, 23 nt, Artificial Sequence
  Synthetic
gaguguaaauuaguucaaccauu

SEQ ID NO: 403245 - RNA, 24 nt, Artificial Sequence
  Synthetic
ggaguguaaauuaguucaaccauu

SEQ ID NO: 403246 - RNA, 18 nt, Artificial Sequence
  Synthetic
uguaaguacagaaccauu

SEQ ID NO: 403247 - RNA, 19 nt, Artificial Sequence
  Synthetic
guguaaguacagaaccauu

SEQ ID NO: 403248 - RNA, 20 nt, Artificial Sequence
  Synthetic
gguguaaguacagaaccauu

SEQ ID NO: 403249 - RNA, 21 nt, Artificial Sequence
  Synthetic
ggguguaaguacagaaccauu

SEQ ID NO: 403250 - RNA, 22 nt, Artificial Sequence
  Synthetic
aggguguaaguacagaaccauu

SEQ ID NO: 403251 - RNA, 23 nt, Artificial Sequence
  Synthetic
aaggguguaaguacagaaccauu

SEQ ID NO: 403252 - RNA, 24 nt, Artificial Sequence
  Synthetic
aaaggguguaaguacagaaccauu

SEQ ID NO: 403253 - RNA, 18 nt, Artificial Sequence
  Synthetic
aguaaaugcagaaccauu

SEQ ID NO: 403254 - RNA, 19 nt, Artificial Sequence
  Synthetic
aaguaaaugcagaaccauu

SEQ ID NO: 403255 - RNA, 20 nt, Artificial Sequence
  Synthetic
uaaguaaaugcagaaccauu

SEQ ID NO: 403256 - RNA, 21 nt, Artificial Sequence
  Synthetic
cuaaguaaaugcagaaccauu

SEQ ID NO: 403257 - RNA, 22 nt, Artificial Sequence
  Synthetic
gcuaaguaaaugcagaaccauu

SEQ ID NO: 403258 - RNA, 23 nt, Artificial Sequence
  Synthetic
ugcuaaguaaaugcagaaccauu

SEQ ID NO: 403259 - RNA, 24 nt, Artificial Sequence
  Synthetic
augcuaaguaaaugcagaaccauu

SEQ ID NO: 403260 - RNA, 18 nt, Artificial Sequence
  Synthetic
uguucauuuagaaccauu

SEQ ID NO: 403261 - RNA, 19 nt, Artificial Sequence
  Synthetic
guguucauuuagaaccauu

SEQ ID NO: 403262 - RNA, 20 nt, Artificial Sequence
  Synthetic
uguguucauuuagaaccauu

SEQ ID NO: 403263 - RNA, 21 nt, Artificial Sequence
  Synthetic
uuguguucauuuagaaccauu

SEQ ID NO: 403264 - RNA, 22 nt, Artificial Sequence
  Synthetic
auuguguucauuuagaaccauu

SEQ ID NO: 403265 - RNA, 23 nt, Artificial Sequence
  Synthetic
uauuguguucauuuagaaccauu

SEQ ID NO: 403266 - RNA, 24 nt, Artificial Sequence
  Synthetic
guauuguguucauuuagaaccauu

SEQ ID NO: 403267 - RNA, 18 nt, Artificial Sequence
  Synthetic
aaauuuaucaccaccauu

SEQ ID NO: 403268 - RNA, 19 nt, Artificial Sequence
  Synthetic
caaauuuaucaccaccauu

SEQ ID NO: 403269 - RNA, 20 nt, Artificial Sequence
  Synthetic
ccaaauuuaucaccaccauu

SEQ ID NO: 403270 - RNA, 21 nt, Artificial Sequence
  Synthetic
uccaaauuuaucaccaccauu

SEQ ID NO: 403271 - RNA, 22 nt, Artificial Sequence
  Synthetic
uuccaaauuuaucaccaccauu

SEQ ID NO: 403272 - RNA, 23 nt, Artificial Sequence
  Synthetic
uuuccaaauuuaucaccaccauu

SEQ ID NO: 403273 - RNA, 24 nt, Artificial Sequence
  Synthetic
uuuuccaaauuuaucaccaccauu

SEQ ID NO: 403274 - RNA, 18 nt, Artificial Sequence
  Synthetic
agaaguagugagaccauu

SEQ ID NO: 403275 - RNA, 19 nt, Artificial Sequence
  Synthetic
cagaaguagugagaccauu

SEQ ID NO: 403276 - RNA, 20 nt, Artificial Sequence
  Synthetic
acagaaguagugagaccauu

SEQ ID NO: 403277 - RNA, 21 nt, Artificial Sequence
  Synthetic
aacagaaguagugagaccauu

SEQ ID NO: 403278 - RNA, 22 nt, Artificial Sequence
  Synthetic
aaacagaaguagugagaccauu

SEQ ID NO: 403279 - RNA, 23 nt, Artificial Sequence
  Synthetic
uaaacagaaguagugagaccauu

SEQ ID NO: 403280 - RNA, 24 nt, Artificial Sequence
  Synthetic
cuaaacagaaguagugagaccauu

SEQ ID NO: 403281 - RNA, 18 nt, Artificial Sequence
  Synthetic
gauuagauauagaccauu

SEQ ID NO: 403282 - RNA, 19 nt, Artificial Sequence
  Synthetic
ugauuagauauagaccauu

SEQ ID NO: 403283 - RNA, 20 nt, Artificial Sequence
  Synthetic
cugauuagauauagaccauu

SEQ ID NO: 403284 - RNA, 21 nt, Artificial Sequence
  Synthetic
ccugauuagauauagaccauu

SEQ ID NO: 403285 - RNA, 22 nt, Artificial Sequence
  Synthetic
accugauuagauauagaccauu

SEQ ID NO: 403286 - RNA, 23 nt, Artificial Sequence
  Synthetic
uaccugauuagauauagaccauu

SEQ ID NO: 403287 - RNA, 24 nt, Artificial Sequence
  Synthetic
guaccugauuagauauagaccauu

SEQ ID NO: 403288 - RNA, 18 nt, Artificial Sequence
  Synthetic
uugugugauuugaccauu

SEQ ID NO: 403289 - RNA, 19 nt, Artificial Sequence
  Synthetic
auugugugauuugaccauu

SEQ ID NO: 403290 - RNA, 20 nt, Artificial Sequence
  Synthetic
cauugugugauuugaccauu

SEQ ID NO: 403291 - RNA, 21 nt, Artificial Sequence
  Synthetic
ccauugugugauuugaccauu

SEQ ID NO: 403292 - RNA, 22 nt, Artificial Sequence
  Synthetic
gccauugugugauuugaccauu

SEQ ID NO: 403293 - RNA, 23 nt, Artificial Sequence
  Synthetic
agccauugugugauuugaccauu

SEQ ID NO: 403294 - RNA, 24 nt, Artificial Sequence
  Synthetic
cagccauugugugauuugaccauu

SEQ ID NO: 403295 - RNA, 18 nt, Artificial Sequence
  Synthetic
aaucugggaaauaccauu

SEQ ID NO: 403296 - RNA, 19 nt, Artificial Sequence
  Synthetic
aaaucugggaaauaccauu

SEQ ID NO: 403297 - RNA, 20 nt, Artificial Sequence
  Synthetic
aaaaucugggaaauaccauu

SEQ ID NO: 403298 - RNA, 21 nt, Artificial Sequence
  Synthetic
uaaaaucugggaaauaccauu

SEQ ID NO: 403299 - RNA, 22 nt, Artificial Sequence
  Synthetic
auaaaaucugggaaauaccauu

SEQ ID NO: 403300 - RNA, 23 nt, Artificial Sequence
  Synthetic
aauaaaaucugggaaauaccauu

SEQ ID NO: 403301 - RNA, 24 nt, Artificial Sequence
  Synthetic
gaauaaaaucugggaaauaccauu

SEQ ID NO: 403302 - RNA, 18 nt, Artificial Sequence
  Synthetic
acccccaccacuaccauu

SEQ ID NO: 403303 - RNA, 19 nt, Artificial Sequence
  Synthetic
aacccccaccacuaccauu

SEQ ID NO: 403304 - RNA, 20 nt, Artificial Sequence
  Synthetic
uaacccccaccacuaccauu

SEQ ID NO: 403305 - RNA, 21 nt, Artificial Sequence
  Synthetic
guaacccccaccacuaccauu

SEQ ID NO: 403306 - RNA, 22 nt, Artificial Sequence
  Synthetic
cguaacccccaccacuaccauu

SEQ ID NO: 403307 - RNA, 23 nt, Artificial Sequence
  Synthetic
ccguaacccccaccacuaccauu

SEQ ID NO: 403308 - RNA, 24 nt, Artificial Sequence
  Synthetic
uccguaacccccaccacuaccauu

SEQ ID NO: 403309 - RNA, 18 nt, Artificial Sequence
  Synthetic
guugaucgcucuaccauu

SEQ ID NO: 403310 - RNA, 19 nt, Artificial Sequence
  Synthetic
uguugaucgcucuaccauu

SEQ ID NO: 403311 - RNA, 20 nt, Artificial Sequence
  Synthetic
cuguugaucgcucuaccauu

SEQ ID NO: 403312 - RNA, 21 nt, Artificial Sequence
  Synthetic
gcuguugaucgcucuaccauu

SEQ ID NO: 403313 - RNA, 22 nt, Artificial Sequence
  Synthetic
agcuguugaucgcucuaccauu

SEQ ID NO: 403314 - RNA, 23 nt, Artificial Sequence
  Synthetic
aagcuguugaucgcucuaccauu

SEQ ID NO: 403315 - RNA, 24 nt, Artificial Sequence
  Synthetic
caagcuguugaucgcucuaccauu

SEQ ID NO: 403316 - RNA, 18 nt, Artificial Sequence
  Synthetic
ucuugaggcauuaccauu

SEQ ID NO: 403317 - RNA, 19 nt, Artificial Sequence
  Synthetic
cucuugaggcauuaccauu

SEQ ID NO: 403318 - RNA, 20 nt, Artificial Sequence
  Synthetic
ucucuugaggcauuaccauu

SEQ ID NO: 403319 - RNA, 21 nt, Artificial Sequence
  Synthetic
uucucuugaggcauuaccauu

SEQ ID NO: 403320 - RNA, 22 nt, Artificial Sequence
  Synthetic
auucucuugaggcauuaccauu

SEQ ID NO: 403321 - RNA, 23 nt, Artificial Sequence
  Synthetic
uauucucuugaggcauuaccauu

SEQ ID NO: 403322 - RNA, 24 nt, Artificial Sequence
  Synthetic
uuauucucuugaggcauuaccauu

SEQ ID NO: 403323 - RNA, 18 nt, Artificial Sequence
  Synthetic
aaccuaggcauuaccauu

SEQ ID NO: 403324 - RNA, 19 nt, Artificial Sequence
  Synthetic
aaaccuaggcauuaccauu

SEQ ID NO: 403325 - RNA, 20 nt, Artificial Sequence
  Synthetic
aaaaccuaggcauuaccauu

SEQ ID NO: 403326 - RNA, 21 nt, Artificial Sequence
  Synthetic
gaaaaccuaggcauuaccauu

SEQ ID NO: 403327 - RNA, 22 nt, Artificial Sequence
  Synthetic
agaaaaccuaggcauuaccauu

SEQ ID NO: 403328 - RNA, 23 nt, Artificial Sequence
  Synthetic
aagaaaaccuaggcauuaccauu

SEQ ID NO: 403329 - RNA, 24 nt, Artificial Sequence
  Synthetic
gaagaaaaccuaggcauuaccauu

SEQ ID NO: 403330 - RNA, 18 nt, Artificial Sequence
  Synthetic
aaaacauuguaacccauu

SEQ ID NO: 403331 - RNA, 19 nt, Artificial Sequence
  Synthetic
uaaaacauuguaacccauu

SEQ ID NO: 403332 - RNA, 20 nt, Artificial Sequence
  Synthetic
uuaaaacauuguaacccauu

SEQ ID NO: 403333 - RNA, 21 nt, Artificial Sequence
  Synthetic
cuuaaaacauuguaacccauu

SEQ ID NO: 403334 - RNA, 22 nt, Artificial Sequence
  Synthetic
ucuuaaaacauuguaacccauu

SEQ ID NO: 403335 - RNA, 23 nt, Artificial Sequence
  Synthetic
cucuuaaaacauuguaacccauu

SEQ ID NO: 403336 - RNA, 24 nt, Artificial Sequence
  Synthetic
acucuuaaaacauuguaacccauu

SEQ ID NO: 403337 - RNA, 18 nt, Artificial Sequence
  Synthetic
ucucgcucuuuccccauu

SEQ ID NO: 403338 - RNA, 19 nt, Artificial Sequence
  Synthetic
cucucgcucuuuccccauu

SEQ ID NO: 403339 - RNA, 20 nt, Artificial Sequence
  Synthetic
ucucucgcucuuuccccauu

SEQ ID NO: 403340 - RNA, 21 nt, Artificial Sequence
  Synthetic
cucucucgcucuuuccccauu

SEQ ID NO: 403341 - RNA, 22 nt, Artificial Sequence
  Synthetic
ucucucucgcucuuuccccauu

SEQ ID NO: 403342 - RNA, 23 nt, Artificial Sequence
  Synthetic
uucucucucgcucuuuccccauu

SEQ ID NO: 403343 - RNA, 24 nt, Artificial Sequence
  Synthetic
uuucucucucgcucuuuccccauu

SEQ ID NO: 403344 - RNA, 18 nt, Artificial Sequence
  Synthetic
ggagggagagggcccauu

SEQ ID NO: 403345 - RNA, 19 nt, Artificial Sequence
  Synthetic
gggagggagagggcccauu

SEQ ID NO: 403346 - RNA, 20 nt, Artificial Sequence
  Synthetic
ggggagggagagggcccauu

SEQ ID NO: 403347 - RNA, 21 nt, Artificial Sequence
  Synthetic
aggggagggagagggcccauu

SEQ ID NO: 403348 - RNA, 22 nt, Artificial Sequence
  Synthetic
uaggggagggagagggcccauu

SEQ ID NO: 403349 - RNA, 23 nt, Artificial Sequence
  Synthetic
uuaggggagggagagggcccauu

SEQ ID NO: 403350 - RNA, 24 nt, Artificial Sequence
  Synthetic
uuuaggggagggagagggcccauu

SEQ ID NO: 403351 - RNA, 18 nt, Artificial Sequence
  Synthetic
uggccaauuucucccauu

SEQ ID NO: 403352 - RNA, 19 nt, Artificial Sequence
  Synthetic
uuggccaauuucucccauu

SEQ ID NO: 403353 - RNA, 20 nt, Artificial Sequence
  Synthetic
uuuggccaauuucucccauu

SEQ ID NO: 403354 - RNA, 21 nt, Artificial Sequence
  Synthetic
uuuuggccaauuucucccauu

SEQ ID NO: 403355 - RNA, 22 nt, Artificial Sequence
  Synthetic
auuuuggccaauuucucccauu

SEQ ID NO: 403356 - RNA, 23 nt, Artificial Sequence
  Synthetic
uauuuuggccaauuucucccauu

SEQ ID NO: 403357 - RNA, 24 nt, Artificial Sequence
  Synthetic
uuauuuuggccaauuucucccauu

SEQ ID NO: 403358 - RNA, 18 nt, Artificial Sequence
  Synthetic
cagaaauuaagucccauu

SEQ ID NO: 403359 - RNA, 19 nt, Artificial Sequence
  Synthetic
gcagaaauuaagucccauu

SEQ ID NO: 403360 - RNA, 20 nt, Artificial Sequence
  Synthetic
ggcagaaauuaagucccauu

SEQ ID NO: 403361 - RNA, 21 nt, Artificial Sequence
  Synthetic
aggcagaaauuaagucccauu

SEQ ID NO: 403362 - RNA, 22 nt, Artificial Sequence
  Synthetic
uaggcagaaauuaagucccauu

SEQ ID NO: 403363 - RNA, 23 nt, Artificial Sequence
  Synthetic
cuaggcagaaauuaagucccauu

SEQ ID NO: 403364 - RNA, 24 nt, Artificial Sequence
  Synthetic
ucuaggcagaaauuaagucccauu

SEQ ID NO: 403365 - RNA, 18 nt, Artificial Sequence
  Synthetic
ucuuuuucaggucccauu

SEQ ID NO: 403366 - RNA, 19 nt, Artificial Sequence
  Synthetic
uucuuuuucaggucccauu

SEQ ID NO: 403367 - RNA, 20 nt, Artificial Sequence
  Synthetic
guucuuuuucaggucccauu

SEQ ID NO: 403368 - RNA, 21 nt, Artificial Sequence
  Synthetic
uguucuuuuucaggucccauu

SEQ ID NO: 403369 - RNA, 22 nt, Artificial Sequence
  Synthetic
cuguucuuuuucaggucccauu

SEQ ID NO: 403370 - RNA, 23 nt, Artificial Sequence
  Synthetic
gcuguucuuuuucaggucccauu

SEQ ID NO: 403371 - RNA, 24 nt, Artificial Sequence
  Synthetic
ugcuguucuuuuucaggucccauu

SEQ ID NO: 403372 - RNA, 18 nt, Artificial Sequence
  Synthetic
aguaugucuaaagccauu

SEQ ID NO: 403373 - RNA, 19 nt, Artificial Sequence
  Synthetic
gaguaugucuaaagccauu

SEQ ID NO: 403374 - RNA, 20 nt, Artificial Sequence
  Synthetic
agaguaugucuaaagccauu

SEQ ID NO: 403375 - RNA, 21 nt, Artificial Sequence
  Synthetic
cagaguaugucuaaagccauu

SEQ ID NO: 403376 - RNA, 22 nt, Artificial Sequence
  Synthetic
ccagaguaugucuaaagccauu

SEQ ID NO: 403377 - RNA, 23 nt, Artificial Sequence
  Synthetic
uccagaguaugucuaaagccauu

SEQ ID NO: 403378 - RNA, 24 nt, Artificial Sequence
  Synthetic
guccagaguaugucuaaagccauu

SEQ ID NO: 403379 - RNA, 18 nt, Artificial Sequence
  Synthetic
gagcacacugaggccauu

SEQ ID NO: 403380 - RNA, 19 nt, Artificial Sequence
  Synthetic
agagcacacugaggccauu

SEQ ID NO: 403381 - RNA, 20 nt, Artificial Sequence
  Synthetic
gagagcacacugaggccauu

SEQ ID NO: 403382 - RNA, 21 nt, Artificial Sequence
  Synthetic
agagagcacacugaggccauu

SEQ ID NO: 403383 - RNA, 22 nt, Artificial Sequence
  Synthetic
aagagagcacacugaggccauu

SEQ ID NO: 403384 - RNA, 23 nt, Artificial Sequence
  Synthetic
aaagagagcacacugaggccauu

SEQ ID NO: 403385 - RNA, 24 nt, Artificial Sequence
  Synthetic
uaaagagagcacacugaggccauu

SEQ ID NO: 403386 - RNA, 18 nt, Artificial Sequence
  Synthetic
caguauaauguggccauu

SEQ ID NO: 403387 - RNA, 19 nt, Artificial Sequence
  Synthetic
gcaguauaauguggccauu

SEQ ID NO: 403388 - RNA, 20 nt, Artificial Sequence
  Synthetic
ugcaguauaauguggccauu

SEQ ID NO: 403389 - RNA, 21 nt, Artificial Sequence
  Synthetic
augcaguauaauguggccauu

SEQ ID NO: 403390 - RNA, 22 nt, Artificial Sequence
  Synthetic
aaugcaguauaauguggccauu

SEQ ID NO: 403391 - RNA, 23 nt, Artificial Sequence
  Synthetic
aaaugcaguauaauguggccauu

SEQ ID NO: 403392 - RNA, 24 nt, Artificial Sequence
  Synthetic
gaaaugcaguauaauguggccauu

SEQ ID NO: 403393 - RNA, 18 nt, Artificial Sequence
  Synthetic
augagagaugaugccauu

SEQ ID NO: 403394 - RNA, 19 nt, Artificial Sequence
  Synthetic
uaugagagaugaugccauu

SEQ ID NO: 403395 - RNA, 20 nt, Artificial Sequence
  Synthetic
cuaugagagaugaugccauu

SEQ ID NO: 403396 - RNA, 21 nt, Artificial Sequence
  Synthetic
ccuaugagagaugaugccauu

SEQ ID NO: 403397 - RNA, 22 nt, Artificial Sequence
  Synthetic
uccuaugagagaugaugccauu

SEQ ID NO: 403398 - RNA, 23 nt, Artificial Sequence
  Synthetic
auccuaugagagaugaugccauu

SEQ ID NO: 403399 - RNA, 24 nt, Artificial Sequence
  Synthetic
aauccuaugagagaugaugccauu

SEQ ID NO: 403400 - RNA, 18 nt, Artificial Sequence
  Synthetic
aaauagaaauaugccauu

SEQ ID NO: 403401 - RNA, 19 nt, Artificial Sequence
  Synthetic
gaaauagaaauaugccauu

SEQ ID NO: 403402 - RNA, 20 nt, Artificial Sequence
  Synthetic
agaaauagaaauaugccauu

SEQ ID NO: 403403 - RNA, 21 nt, Artificial Sequence
  Synthetic
uagaaauagaaauaugccauu

SEQ ID NO: 403404 - RNA, 22 nt, Artificial Sequence
  Synthetic
auagaaauagaaauaugccauu

SEQ ID NO: 403405 - RNA, 23 nt, Artificial Sequence
  Synthetic
cauagaaauagaaauaugccauu

SEQ ID NO: 403406 - RNA, 24 nt, Artificial Sequence
  Synthetic
acauagaaauagaaauaugccauu

SEQ ID NO: 403407 - RNA, 18 nt, Artificial Sequence
  Synthetic
aauccaucuacugccauu

SEQ ID NO: 403408 - RNA, 19 nt, Artificial Sequence
  Synthetic
aaauccaucuacugccauu

SEQ ID NO: 403409 - RNA, 20 nt, Artificial Sequence
  Synthetic
gaaauccaucuacugccauu

SEQ ID NO: 403410 - RNA, 21 nt, Artificial Sequence
  Synthetic
agaaauccaucuacugccauu

SEQ ID NO: 403411 - RNA, 22 nt, Artificial Sequence
  Synthetic
uagaaauccaucuacugccauu

SEQ ID NO: 403412 - RNA, 23 nt, Artificial Sequence
  Synthetic
uuagaaauccaucuacugccauu

SEQ ID NO: 403413 - RNA, 24 nt, Artificial Sequence
  Synthetic
cuuagaaauccaucuacugccauu

SEQ ID NO: 403414 - RNA, 18 nt, Artificial Sequence
  Synthetic
agauaucuacuugccauu

SEQ ID NO: 403415 - RNA, 19 nt, Artificial Sequence
  Synthetic
cagauaucuacuugccauu

SEQ ID NO: 403416 - RNA, 20 nt, Artificial Sequence
  Synthetic
ccagauaucuacuugccauu

SEQ ID NO: 403417 - RNA, 21 nt, Artificial Sequence
  Synthetic
uccagauaucuacuugccauu

SEQ ID NO: 403418 - RNA, 22 nt, Artificial Sequence
  Synthetic
uuccagauaucuacuugccauu

SEQ ID NO: 403419 - RNA, 23 nt, Artificial Sequence
  Synthetic
auuccagauaucuacuugccauu

SEQ ID NO: 403420 - RNA, 24 nt, Artificial Sequence
  Synthetic
gauuccagauaucuacuugccauu

SEQ ID NO: 403421 - RNA, 18 nt, Artificial Sequence
  Synthetic
gcuucuuuacaauccauu

SEQ ID NO: 403422 - RNA, 19 nt, Artificial Sequence
  Synthetic
ugcuucuuuacaauccauu

SEQ ID NO: 403423 - RNA, 20 nt, Artificial Sequence
  Synthetic
cugcuucuuuacaauccauu

SEQ ID NO: 403424 - RNA, 21 nt, Artificial Sequence
  Synthetic
ucugcuucuuuacaauccauu

SEQ ID NO: 403425 - RNA, 22 nt, Artificial Sequence
  Synthetic
cucugcuucuuuacaauccauu

SEQ ID NO: 403426 - RNA, 23 nt, Artificial Sequence
  Synthetic
ccucugcuucuuuacaauccauu

SEQ ID NO: 403427 - RNA, 24 nt, Artificial Sequence
  Synthetic
gccucugcuucuuuacaauccauu

SEQ ID NO: 403428 - RNA, 18 nt, Artificial Sequence
  Synthetic
agcaagcauucauccauu

SEQ ID NO: 403429 - RNA, 19 nt, Artificial Sequence
  Synthetic
gagcaagcauucauccauu

SEQ ID NO: 403430 - RNA, 20 nt, Artificial Sequence
  Synthetic
ggagcaagcauucauccauu

SEQ ID NO: 403431 - RNA, 21 nt, Artificial Sequence
  Synthetic
aggagcaagcauucauccauu

SEQ ID NO: 403432 - RNA, 22 nt, Artificial Sequence
  Synthetic
caggagcaagcauucauccauu

SEQ ID NO: 403433 - RNA, 23 nt, Artificial Sequence
  Synthetic
ucaggagcaagcauucauccauu

SEQ ID NO: 403434 - RNA, 24 nt, Artificial Sequence
  Synthetic
uucaggagcaagcauucauccauu

SEQ ID NO: 403435 - RNA, 18 nt, Artificial Sequence
  Synthetic
uaaacauaauuauccauu

SEQ ID NO: 403436 - RNA, 19 nt, Artificial Sequence
  Synthetic
uuaaacauaauuauccauu

SEQ ID NO: 403437 - RNA, 20 nt, Artificial Sequence
  Synthetic
cuuaaacauaauuauccauu

SEQ ID NO: 403438 - RNA, 21 nt, Artificial Sequence
  Synthetic
ucuuaaacauaauuauccauu

SEQ ID NO: 403439 - RNA, 22 nt, Artificial Sequence
  Synthetic
aucuuaaacauaauuauccauu

SEQ ID NO: 403440 - RNA, 23 nt, Artificial Sequence
  Synthetic
caucuuaaacauaauuauccauu

SEQ ID NO: 403441 - RNA, 24 nt, Artificial Sequence
  Synthetic
ccaucuuaaacauaauuauccauu

SEQ ID NO: 403442 - RNA, 18 nt, Artificial Sequence
  Synthetic
caucucagaaccuccauu

SEQ ID NO: 403443 - RNA, 19 nt, Artificial Sequence
  Synthetic
ucaucucagaaccuccauu

SEQ ID NO: 403444 - RNA, 20 nt, Artificial Sequence
  Synthetic
uucaucucagaaccuccauu

SEQ ID NO: 403445 - RNA, 21 nt, Artificial Sequence
  Synthetic
cuucaucucagaaccuccauu

SEQ ID NO: 403446 - RNA, 22 nt, Artificial Sequence
  Synthetic
gcuucaucucagaaccuccauu

SEQ ID NO: 403447 - RNA, 23 nt, Artificial Sequence
  Synthetic
agcuucaucucagaaccuccauu

SEQ ID NO: 403448 - RNA, 24 nt, Artificial Sequence
  Synthetic
aagcuucaucucagaaccuccauu

SEQ ID NO: 403449 - RNA, 18 nt, Artificial Sequence
  Synthetic
uccuaaaaauccuccauu

SEQ ID NO: 403450 - RNA, 19 nt, Artificial Sequence
  Synthetic
cuccuaaaaauccuccauu

SEQ ID NO: 403451 - RNA, 20 nt, Artificial Sequence
  Synthetic
gcuccuaaaaauccuccauu

SEQ ID NO: 403452 - RNA, 21 nt, Artificial Sequence
  Synthetic
agcuccuaaaaauccuccauu

SEQ ID NO: 403453 - RNA, 22 nt, Artificial Sequence
  Synthetic
aagcuccuaaaaauccuccauu

SEQ ID NO: 403454 - RNA, 23 nt, Artificial Sequence
  Synthetic
gaagcuccuaaaaauccuccauu

SEQ ID NO: 403455 - RNA, 24 nt, Artificial Sequence
  Synthetic
ugaagcuccuaaaaauccuccauu

SEQ ID NO: 403456 - RNA, 18 nt, Artificial Sequence
  Synthetic
cugaaaucuagcuccauu

SEQ ID NO: 403457 - RNA, 19 nt, Artificial Sequence
  Synthetic
gcugaaaucuagcuccauu

SEQ ID NO: 403458 - RNA, 20 nt, Artificial Sequence
  Synthetic
ggcugaaaucuagcuccauu

SEQ ID NO: 403459 - RNA, 21 nt, Artificial Sequence
  Synthetic
uggcugaaaucuagcuccauu

SEQ ID NO: 403460 - RNA, 22 nt, Artificial Sequence
  Synthetic
auggcugaaaucuagcuccauu

SEQ ID NO: 403461 - RNA, 23 nt, Artificial Sequence
  Synthetic
aauggcugaaaucuagcuccauu

SEQ ID NO: 403462 - RNA, 24 nt, Artificial Sequence
  Synthetic
uaauggcugaaaucuagcuccauu

SEQ ID NO: 403463 - RNA, 18 nt, Artificial Sequence
  Synthetic
ggaauagagaauuccauu

SEQ ID NO: 403464 - RNA, 19 nt, Artificial Sequence
  Synthetic
gggaauagagaauuccauu

SEQ ID NO: 403465 - RNA, 20 nt, Artificial Sequence
  Synthetic
ugggaauagagaauuccauu

SEQ ID NO: 403466 - RNA, 21 nt, Artificial Sequence
  Synthetic
cugggaauagagaauuccauu

SEQ ID NO: 403467 - RNA, 22 nt, Artificial Sequence
  Synthetic
ucugggaauagagaauuccauu

SEQ ID NO: 403468 - RNA, 23 nt, Artificial Sequence
  Synthetic
uucugggaauagagaauuccauu

SEQ ID NO: 403469 - RNA, 24 nt, Artificial Sequence
  Synthetic
guucugggaauagagaauuccauu

SEQ ID NO: 403470 - RNA, 18 nt, Artificial Sequence
  Synthetic
uggaauaaaacuuccauu

SEQ ID NO: 403471 - RNA, 19 nt, Artificial Sequence
  Synthetic
auggaauaaaacuuccauu

SEQ ID NO: 403472 - RNA, 20 nt, Artificial Sequence
  Synthetic
aauggaauaaaacuuccauu

SEQ ID NO: 403473 - RNA, 21 nt, Artificial Sequence
  Synthetic
caauggaauaaaacuuccauu

SEQ ID NO: 403474 - RNA, 22 nt, Artificial Sequence
  Synthetic
acaauggaauaaaacuuccauu

SEQ ID NO: 403475 - RNA, 23 nt, Artificial Sequence
  Synthetic
aacaauggaauaaaacuuccauu

SEQ ID NO: 403476 - RNA, 24 nt, Artificial Sequence
  Synthetic
caacaauggaauaaaacuuccauu

SEQ ID NO: 403477 - RNA, 18 nt, Artificial Sequence
  Synthetic
uggugagcugcuuccauu

SEQ ID NO: 403478 - RNA, 19 nt, Artificial Sequence
  Synthetic
auggugagcugcuuccauu

SEQ ID NO: 403479 - RNA, 20 nt, Artificial Sequence
  Synthetic
aauggugagcugcuuccauu

SEQ ID NO: 403480 - RNA, 21 nt, Artificial Sequence
  Synthetic
aaauggugagcugcuuccauu

SEQ ID NO: 403481 - RNA, 22 nt, Artificial Sequence
  Synthetic
aaaauggugagcugcuuccauu

SEQ ID NO: 403482 - RNA, 23 nt, Artificial Sequence
  Synthetic
gaaaauggugagcugcuuccauu

SEQ ID NO: 403483 - RNA, 24 nt, Artificial Sequence
  Synthetic
agaaaauggugagcugcuuccauu

SEQ ID NO: 403484 - RNA, 18 nt, Artificial Sequence
  Synthetic
gcuacuuaauuuuccauu

SEQ ID NO: 403485 - RNA, 19 nt, Artificial Sequence
  Synthetic
ugcuacuuaauuuuccauu

SEQ ID NO: 403486 - RNA, 20 nt, Artificial Sequence
  Synthetic
uugcuacuuaauuuuccauu

SEQ ID NO: 403487 - RNA, 21 nt, Artificial Sequence
  Synthetic
uuugcuacuuaauuuuccauu

SEQ ID NO: 403488 - RNA, 22 nt, Artificial Sequence
  Synthetic
cuuugcuacuuaauuuuccauu

SEQ ID NO: 403489 - RNA, 23 nt, Artificial Sequence
  Synthetic
ccuuugcuacuuaauuuuccauu

SEQ ID NO: 403490 - RNA, 24 nt, Artificial Sequence
  Synthetic
gccuuugcuacuuaauuuuccauu

SEQ ID NO: 403491 - RNA, 18 nt, Artificial Sequence
  Synthetic
auagcaugauuuuccauu

SEQ ID NO: 403492 - RNA, 19 nt, Artificial Sequence
  Synthetic
aauagcaugauuuuccauu

SEQ ID NO: 403493 - RNA, 20 nt, Artificial Sequence
  Synthetic
aaauagcaugauuuuccauu

SEQ ID NO: 403494 - RNA, 21 nt, Artificial Sequence
  Synthetic
aaaauagcaugauuuuccauu

SEQ ID NO: 403495 - RNA, 22 nt, Artificial Sequence
  Synthetic
aaaaauagcaugauuuuccauu

SEQ ID NO: 403496 - RNA, 23 nt, Artificial Sequence
  Synthetic
aaaaaauagcaugauuuuccauu

SEQ ID NO: 403497 - RNA, 24 nt, Artificial Sequence
  Synthetic
aaaaaaauagcaugauuuuccauu

SEQ ID NO: 403498 - RNA, 18 nt, Artificial Sequence
  Synthetic
acuuuauuauuuuccauu

SEQ ID NO: 403499 - RNA, 19 nt, Artificial Sequence
  Synthetic
uacuuuauuauuuuccauu

SEQ ID NO: 403500 - RNA, 20 nt, Artificial Sequence
  Synthetic
uuacuuuauuauuuuccauu

SEQ ID NO: 403501 - RNA, 21 nt, Artificial Sequence
  Synthetic
guuacuuuauuauuuuccauu

SEQ ID NO: 403502 - RNA, 22 nt, Artificial Sequence
  Synthetic
aguuacuuuauuauuuuccauu

SEQ ID NO: 403503 - RNA, 23 nt, Artificial Sequence
  Synthetic
uaguuacuuuauuauuuuccauu

SEQ ID NO: 403504 - RNA, 24 nt, Artificial Sequence
  Synthetic
uuaguuacuuuauuauuuuccauu

SEQ ID NO: 403505 - RNA, 18 nt, Artificial Sequence
  Synthetic
cauaaagaaaaaagcauu

SEQ ID NO: 403506 - RNA, 19 nt, Artificial Sequence
  Synthetic
acauaaagaaaaaagcauu

SEQ ID NO: 403507 - RNA, 20 nt, Artificial Sequence
  Synthetic
cacauaaagaaaaaagcauu

SEQ ID NO: 403508 - RNA, 21 nt, Artificial Sequence
  Synthetic
gcacauaaagaaaaaagcauu

SEQ ID NO: 403509 - RNA, 22 nt, Artificial Sequence
  Synthetic
ugcacauaaagaaaaaagcauu

SEQ ID NO: 403510 - RNA, 23 nt, Artificial Sequence
  Synthetic
gugcacauaaagaaaaaagcauu

SEQ ID NO: 403511 - RNA, 24 nt, Artificial Sequence
  Synthetic
ggugcacauaaagaaaaaagcauu

SEQ ID NO: 403512 - RNA, 18 nt, Artificial Sequence
  Synthetic
acaaaaugacaaagcauu

SEQ ID NO: 403513 - RNA, 19 nt, Artificial Sequence
  Synthetic
aacaaaaugacaaagcauu

SEQ ID NO: 403514 - RNA, 20 nt, Artificial Sequence
  Synthetic
uaacaaaaugacaaagcauu

SEQ ID NO: 403515 - RNA, 21 nt, Artificial Sequence
  Synthetic
cuaacaaaaugacaaagcauu

SEQ ID NO: 403516 - RNA, 22 nt, Artificial Sequence
  Synthetic
acuaacaaaaugacaaagcauu

SEQ ID NO: 403517 - RNA, 23 nt, Artificial Sequence
  Synthetic
uacuaacaaaaugacaaagcauu

SEQ ID NO: 403518 - RNA, 24 nt, Artificial Sequence
  Synthetic
auacuaacaaaaugacaaagcauu

SEQ ID NO: 403519 - RNA, 18 nt, Artificial Sequence
  Synthetic
auguaggggcaaagcauu

SEQ ID NO: 403520 - RNA, 19 nt, Artificial Sequence
  Synthetic
gauguaggggcaaagcauu

SEQ ID NO: 403521 - RNA, 20 nt, Artificial Sequence
  Synthetic
ugauguaggggcaaagcauu

SEQ ID NO: 403522 - RNA, 21 nt, Artificial Sequence
  Synthetic
augauguaggggcaaagcauu

SEQ ID NO: 403523 - RNA, 22 nt, Artificial Sequence
  Synthetic
aaugauguaggggcaaagcauu

SEQ ID NO: 403524 - RNA, 23 nt, Artificial Sequence
  Synthetic
uaaugauguaggggcaaagcauu

SEQ ID NO: 403525 - RNA, 24 nt, Artificial Sequence
  Synthetic
guaaugauguaggggcaaagcauu

SEQ ID NO: 403526 - RNA, 18 nt, Artificial Sequence
  Synthetic
gaaggguaauaaagcauu

SEQ ID NO: 403527 - RNA, 19 nt, Artificial Sequence
  Synthetic
agaaggguaauaaagcauu

SEQ ID NO: 403528 - RNA, 20 nt, Artificial Sequence
  Synthetic
gagaaggguaauaaagcauu

SEQ ID NO: 403529 - RNA, 21 nt, Artificial Sequence
  Synthetic
ggagaaggguaauaaagcauu

SEQ ID NO: 403530 - RNA, 22 nt, Artificial Sequence
  Synthetic
gggagaaggguaauaaagcauu

SEQ ID NO: 403531 - RNA, 23 nt, Artificial Sequence
  Synthetic
ugggagaaggguaauaaagcauu

SEQ ID NO: 403532 - RNA, 24 nt, Artificial Sequence
  Synthetic
uugggagaaggguaauaaagcauu

SEQ ID NO: 403533 - RNA, 18 nt, Artificial Sequence
  Synthetic
uacuguuaaugaagcauu

SEQ ID NO: 403534 - RNA, 19 nt, Artificial Sequence
  Synthetic
auacuguuaaugaagcauu

SEQ ID NO: 403535 - RNA, 20 nt, Artificial Sequence
  Synthetic
uauacuguuaaugaagcauu

SEQ ID NO: 403536 - RNA, 21 nt, Artificial Sequence
  Synthetic
uuauacuguuaaugaagcauu

SEQ ID NO: 403537 - RNA, 22 nt, Artificial Sequence
  Synthetic
auuauacuguuaaugaagcauu

SEQ ID NO: 403538 - RNA, 23 nt, Artificial Sequence
  Synthetic
uauuauacuguuaaugaagcauu

SEQ ID NO: 403539 - RNA, 24 nt, Artificial Sequence
  Synthetic
guauuauacuguuaaugaagcauu

SEQ ID NO: 403540 - RNA, 18 nt, Artificial Sequence
  Synthetic
uaauccaucugaagcauu

SEQ ID NO: 403541 - RNA, 19 nt, Artificial Sequence
  Synthetic
uuaauccaucugaagcauu

SEQ ID NO: 403542 - RNA, 20 nt, Artificial Sequence
  Synthetic
cuuaauccaucugaagcauu

SEQ ID NO: 403543 - RNA, 21 nt, Artificial Sequence
  Synthetic
gcuuaauccaucugaagcauu

SEQ ID NO: 403544 - RNA, 22 nt, Artificial Sequence
  Synthetic
ugcuuaauccaucugaagcauu

SEQ ID NO: 403545 - RNA, 23 nt, Artificial Sequence
  Synthetic
gugcuuaauccaucugaagcauu

SEQ ID NO: 403546 - RNA, 24 nt, Artificial Sequence
  Synthetic
ggugcuuaauccaucugaagcauu

SEQ ID NO: 403547 - RNA, 18 nt, Artificial Sequence
  Synthetic
cccacauggugaagcauu

SEQ ID NO: 403548 - RNA, 19 nt, Artificial Sequence
  Synthetic
gcccacauggugaagcauu

SEQ ID NO: 403549 - RNA, 20 nt, Artificial Sequence
  Synthetic
agcccacauggugaagcauu

SEQ ID NO: 403550 - RNA, 21 nt, Artificial Sequence
  Synthetic
aagcccacauggugaagcauu

SEQ ID NO: 403551 - RNA, 22 nt, Artificial Sequence
  Synthetic
aaagcccacauggugaagcauu

SEQ ID NO: 403552 - RNA, 23 nt, Artificial Sequence
  Synthetic
aaaagcccacauggugaagcauu

SEQ ID NO: 403553 - RNA, 24 nt, Artificial Sequence
  Synthetic
aaaaagcccacauggugaagcauu

SEQ ID NO: 403554 - RNA, 18 nt, Artificial Sequence
  Synthetic
aacaaaaaaauaagcauu

SEQ ID NO: 403555 - RNA, 19 nt, Artificial Sequence
  Synthetic
caacaaaaaaauaagcauu

SEQ ID NO: 403556 - RNA, 20 nt, Artificial Sequence
  Synthetic
ucaacaaaaaaauaagcauu

SEQ ID NO: 403557 - RNA, 21 nt, Artificial Sequence
  Synthetic
gucaacaaaaaaauaagcauu

SEQ ID NO: 403558 - RNA, 22 nt, Artificial Sequence
  Synthetic
agucaacaaaaaaauaagcauu

SEQ ID NO: 403559 - RNA, 23 nt, Artificial Sequence
  Synthetic
aagucaacaaaaaaauaagcauu

SEQ ID NO: 403560 - RNA, 24 nt, Artificial Sequence
  Synthetic
aaagucaacaaaaaaauaagcauu

SEQ ID NO: 403561 - RNA, 18 nt, Artificial Sequence
  Synthetic
auaauuuugguaagcauu

SEQ ID NO: 403562 - RNA, 19 nt, Artificial Sequence
  Synthetic
aauaauuuugguaagcauu

SEQ ID NO: 403563 - RNA, 20 nt, Artificial Sequence
  Synthetic
uaauaauuuugguaagcauu

SEQ ID NO: 403564 - RNA, 21 nt, Artificial Sequence
  Synthetic
uuaauaauuuugguaagcauu

SEQ ID NO: 403565 - RNA, 22 nt, Artificial Sequence
  Synthetic
auuaauaauuuugguaagcauu

SEQ ID NO: 403566 - RNA, 23 nt, Artificial Sequence
  Synthetic
cauuaauaauuuugguaagcauu

SEQ ID NO: 403567 - RNA, 24 nt, Artificial Sequence
  Synthetic
acauuaauaauuuugguaagcauu

SEQ ID NO: 403568 - RNA, 18 nt, Artificial Sequence
  Synthetic
guuugugaguccagcauu

SEQ ID NO: 403569 - RNA, 19 nt, Artificial Sequence
  Synthetic
gguuugugaguccagcauu

SEQ ID NO: 403570 - RNA, 20 nt, Artificial Sequence
  Synthetic
ggguuugugaguccagcauu

SEQ ID NO: 403571 - RNA, 21 nt, Artificial Sequence
  Synthetic
cggguuugugaguccagcauu

SEQ ID NO: 403572 - RNA, 22 nt, Artificial Sequence
  Synthetic
acggguuugugaguccagcauu

SEQ ID NO: 403573 - RNA, 23 nt, Artificial Sequence
  Synthetic
gacggguuugugaguccagcauu

SEQ ID NO: 403574 - RNA, 24 nt, Artificial Sequence
  Synthetic
ugacggguuugugaguccagcauu

SEQ ID NO: 403575 - RNA, 18 nt, Artificial Sequence
  Synthetic
ggacagcacaagagcauu

SEQ ID NO: 403576 - RNA, 19 nt, Artificial Sequence
  Synthetic
aggacagcacaagagcauu

SEQ ID NO: 403577 - RNA, 20 nt, Artificial Sequence
  Synthetic
aaggacagcacaagagcauu

SEQ ID NO: 403578 - RNA, 21 nt, Artificial Sequence
  Synthetic
uaaggacagcacaagagcauu

SEQ ID NO: 403579 - RNA, 22 nt, Artificial Sequence
  Synthetic
guaaggacagcacaagagcauu

SEQ ID NO: 403580 - RNA, 23 nt, Artificial Sequence
  Synthetic
gguaaggacagcacaagagcauu

SEQ ID NO: 403581 - RNA, 24 nt, Artificial Sequence
  Synthetic
ggguaaggacagcacaagagcauu

SEQ ID NO: 403582 - RNA, 18 nt, Artificial Sequence
  Synthetic
gaggggagggagagcauu

SEQ ID NO: 403583 - RNA, 19 nt, Artificial Sequence
  Synthetic
cgaggggagggagagcauu

SEQ ID NO: 403584 - RNA, 20 nt, Artificial Sequence
  Synthetic
gcgaggggagggagagcauu

SEQ ID NO: 403585 - RNA, 21 nt, Artificial Sequence
  Synthetic
ggcgaggggagggagagcauu

SEQ ID NO: 403586 - RNA, 22 nt, Artificial Sequence
  Synthetic
gggcgaggggagggagagcauu

SEQ ID NO: 403587 - RNA, 23 nt, Artificial Sequence
  Synthetic
ggggcgaggggagggagagcauu

SEQ ID NO: 403588 - RNA, 24 nt, Artificial Sequence
  Synthetic
uggggcgaggggagggagagcauu

SEQ ID NO: 403589 - RNA, 18 nt, Artificial Sequence
  Synthetic
caaaauuauaauagcauu

SEQ ID NO: 403590 - RNA, 19 nt, Artificial Sequence
  Synthetic
acaaaauuauaauagcauu

SEQ ID NO: 403591 - RNA, 20 nt, Artificial Sequence
  Synthetic
gacaaaauuauaauagcauu

SEQ ID NO: 403592 - RNA, 21 nt, Artificial Sequence
  Synthetic
agacaaaauuauaauagcauu

SEQ ID NO: 403593 - RNA, 22 nt, Artificial Sequence
  Synthetic
aagacaaaauuauaauagcauu

SEQ ID NO: 403594 - RNA, 23 nt, Artificial Sequence
  Synthetic
uaagacaaaauuauaauagcauu

SEQ ID NO: 403595 - RNA, 24 nt, Artificial Sequence
  Synthetic
cuaagacaaaauuauaauagcauu

SEQ ID NO: 403596 - RNA, 18 nt, Artificial Sequence
  Synthetic
ggggggagggauagcauu

SEQ ID NO: 403597 - RNA, 19 nt, Artificial Sequence
  Synthetic
aggggggagggauagcauu

SEQ ID NO: 403598 - RNA, 20 nt, Artificial Sequence
  Synthetic
aaggggggagggauagcauu

SEQ ID NO: 403599 - RNA, 21 nt, Artificial Sequence
  Synthetic
gaaggggggagggauagcauu

SEQ ID NO: 403600 - RNA, 22 nt, Artificial Sequence
  Synthetic
ggaaggggggagggauagcauu

SEQ ID NO: 403601 - RNA, 23 nt, Artificial Sequence
  Synthetic
gggaaggggggagggauagcauu

SEQ ID NO: 403602 - RNA, 24 nt, Artificial Sequence
  Synthetic
ggggaaggggggagggauagcauu

SEQ ID NO: 403603 - RNA, 18 nt, Artificial Sequence
  Synthetic
ggguggagggauagcauu

SEQ ID NO: 403604 - RNA, 19 nt, Artificial Sequence
  Synthetic
aggguggagggauagcauu

SEQ ID NO: 403605 - RNA, 20 nt, Artificial Sequence
  Synthetic
gaggguggagggauagcauu

SEQ ID NO: 403606 - RNA, 21 nt, Artificial Sequence
  Synthetic
ggaggguggagggauagcauu

SEQ ID NO: 403607 - RNA, 22 nt, Artificial Sequence
  Synthetic
gggaggguggagggauagcauu

SEQ ID NO: 403608 - RNA, 23 nt, Artificial Sequence
  Synthetic
ggggaggguggagggauagcauu

SEQ ID NO: 403609 - RNA, 24 nt, Artificial Sequence
  Synthetic
gggggaggguggagggauagcauu

SEQ ID NO: 403610 - RNA, 18 nt, Artificial Sequence
  Synthetic
auuucuauggcuagcauu

SEQ ID NO: 403611 - RNA, 19 nt, Artificial Sequence
  Synthetic
cauuucuauggcuagcauu

SEQ ID NO: 403612 - RNA, 20 nt, Artificial Sequence
  Synthetic
gcauuucuauggcuagcauu

SEQ ID NO: 403613 - RNA, 21 nt, Artificial Sequence
  Synthetic
ugcauuucuauggcuagcauu

SEQ ID NO: 403614 - RNA, 22 nt, Artificial Sequence
  Synthetic
augcauuucuauggcuagcauu

SEQ ID NO: 403615 - RNA, 23 nt, Artificial Sequence
  Synthetic
caugcauuucuauggcuagcauu

SEQ ID NO: 403616 - RNA, 24 nt, Artificial Sequence
  Synthetic
ucaugcauuucuauggcuagcauu

SEQ ID NO: 403617 - RNA, 18 nt, Artificial Sequence
  Synthetic
guauguuagucuagcauu

SEQ ID NO: 403618 - RNA, 19 nt, Artificial Sequence
  Synthetic
uguauguuagucuagcauu

SEQ ID NO: 403619 - RNA, 20 nt, Artificial Sequence
  Synthetic
uuguauguuagucuagcauu

SEQ ID NO: 403620 - RNA, 21 nt, Artificial Sequence
  Synthetic
auuguauguuagucuagcauu

SEQ ID NO: 403621 - RNA, 22 nt, Artificial Sequence
  Synthetic
aauuguauguuagucuagcauu

SEQ ID NO: 403622 - RNA, 23 nt, Artificial Sequence
  Synthetic
aaauuguauguuagucuagcauu

SEQ ID NO: 403623 - RNA, 24 nt, Artificial Sequence
  Synthetic
aaaauuguauguuagucuagcauu

SEQ ID NO: 403624 - RNA, 18 nt, Artificial Sequence
  Synthetic
auucauagaaguagcauu

SEQ ID NO: 403625 - RNA, 19 nt, Artificial Sequence
  Synthetic
aauucauagaaguagcauu

SEQ ID NO: 403626 - RNA, 20 nt, Artificial Sequence
  Synthetic
aaauucauagaaguagcauu

SEQ ID NO: 403627 - RNA, 21 nt, Artificial Sequence
  Synthetic
aaaauucauagaaguagcauu

SEQ ID NO: 403628 - RNA, 22 nt, Artificial Sequence
  Synthetic
gaaaauucauagaaguagcauu

SEQ ID NO: 403629 - RNA, 23 nt, Artificial Sequence
  Synthetic
ggaaaauucauagaaguagcauu

SEQ ID NO: 403630 - RNA, 24 nt, Artificial Sequence
  Synthetic
aggaaaauucauagaaguagcauu

SEQ ID NO: 403631 - RNA, 18 nt, Artificial Sequence
  Synthetic
ucacaucauuguagcauu

SEQ ID NO: 403632 - RNA, 19 nt, Artificial Sequence
  Synthetic
cucacaucauuguagcauu

SEQ ID NO: 403633 - RNA, 20 nt, Artificial Sequence
  Synthetic
ccucacaucauuguagcauu

SEQ ID NO: 403634 - RNA, 21 nt, Artificial Sequence
  Synthetic
cccucacaucauuguagcauu

SEQ ID NO: 403635 - RNA, 22 nt, Artificial Sequence
  Synthetic
ccccucacaucauuguagcauu

SEQ ID NO: 403636 - RNA, 23 nt, Artificial Sequence
  Synthetic
gccccucacaucauuguagcauu

SEQ ID NO: 403637 - RNA, 24 nt, Artificial Sequence
  Synthetic
ugccccucacaucauuguagcauu

SEQ ID NO: 403638 - RNA, 18 nt, Artificial Sequence
  Synthetic
aaacuugagcuuagcauu

SEQ ID NO: 403639 - RNA, 19 nt, Artificial Sequence
  Synthetic
uaaacuugagcuuagcauu

SEQ ID NO: 403640 - RNA, 20 nt, Artificial Sequence
  Synthetic
uuaaacuugagcuuagcauu

SEQ ID NO: 403641 - RNA, 21 nt, Artificial Sequence
  Synthetic
uuuaaacuugagcuuagcauu

SEQ ID NO: 403642 - RNA, 22 nt, Artificial Sequence
  Synthetic
uuuuaaacuugagcuuagcauu

SEQ ID NO: 403643 - RNA, 23 nt, Artificial Sequence
  Synthetic
guuuuaaacuugagcuuagcauu

SEQ ID NO: 403644 - RNA, 24 nt, Artificial Sequence
  Synthetic
uguuuuaaacuugagcuuagcauu

SEQ ID NO: 403645 - RNA, 18 nt, Artificial Sequence
  Synthetic
acuuuaaguuuuagcauu

SEQ ID NO: 403646 - RNA, 19 nt, Artificial Sequence
  Synthetic
uacuuuaaguuuuagcauu

SEQ ID NO: 403647 - RNA, 20 nt, Artificial Sequence
  Synthetic
auacuuuaaguuuuagcauu

SEQ ID NO: 403648 - RNA, 21 nt, Artificial Sequence
  Synthetic
uauacuuuaaguuuuagcauu

SEQ ID NO: 403649 - RNA, 22 nt, Artificial Sequence
  Synthetic
uuauacuuuaaguuuuagcauu

SEQ ID NO: 403650 - RNA, 23 nt, Artificial Sequence
  Synthetic
auuauacuuuaaguuuuagcauu

SEQ ID NO: 403651 - RNA, 24 nt, Artificial Sequence
  Synthetic
uauuauacuuuaaguuuuagcauu

SEQ ID NO: 403652 - RNA, 18 nt, Artificial Sequence
  Synthetic
ggggaaaggagacgcauu

SEQ ID NO: 403653 - RNA, 19 nt, Artificial Sequence
  Synthetic
gggggaaaggagacgcauu

SEQ ID NO: 403654 - RNA, 20 nt, Artificial Sequence
  Synthetic
agggggaaaggagacgcauu

SEQ ID NO: 403655 - RNA, 21 nt, Artificial Sequence
  Synthetic
uagggggaaaggagacgcauu

SEQ ID NO: 403656 - RNA, 22 nt, Artificial Sequence
  Synthetic
guagggggaaaggagacgcauu

SEQ ID NO: 403657 - RNA, 23 nt, Artificial Sequence
  Synthetic
gguagggggaaaggagacgcauu

SEQ ID NO: 403658 - RNA, 24 nt, Artificial Sequence
  Synthetic
ggguagggggaaaggagacgcauu

SEQ ID NO: 403659 - RNA, 18 nt, Artificial Sequence
  Synthetic
uuacagucauuccgcauu

SEQ ID NO: 403660 - RNA, 19 nt, Artificial Sequence
  Synthetic
guuacagucauuccgcauu

SEQ ID NO: 403661 - RNA, 20 nt, Artificial Sequence
  Synthetic
uguuacagucauuccgcauu

SEQ ID NO: 403662 - RNA, 21 nt, Artificial Sequence
  Synthetic
auguuacagucauuccgcauu

SEQ ID NO: 403663 - RNA, 22 nt, Artificial Sequence
  Synthetic
gauguuacagucauuccgcauu

SEQ ID NO: 403664 - RNA, 23 nt, Artificial Sequence
  Synthetic
ugauguuacagucauuccgcauu

SEQ ID NO: 403665 - RNA, 24 nt, Artificial Sequence
  Synthetic
cugauguuacagucauuccgcauu

SEQ ID NO: 403666 - RNA, 18 nt, Artificial Sequence
  Synthetic
cuguaaaauuaaggcauu

SEQ ID NO: 403667 - RNA, 19 nt, Artificial Sequence
  Synthetic
acuguaaaauuaaggcauu

SEQ ID NO: 403668 - RNA, 20 nt, Artificial Sequence
  Synthetic
cacuguaaaauuaaggcauu

SEQ ID NO: 403669 - RNA, 21 nt, Artificial Sequence
  Synthetic
ccacuguaaaauuaaggcauu

SEQ ID NO: 403670 - RNA, 22 nt, Artificial Sequence
  Synthetic
accacuguaaaauuaaggcauu

SEQ ID NO: 403671 - RNA, 23 nt, Artificial Sequence
  Synthetic
aaccacuguaaaauuaaggcauu

SEQ ID NO: 403672 - RNA, 24 nt, Artificial Sequence
  Synthetic
uaaccacuguaaaauuaaggcauu

SEQ ID NO: 403673 - RNA, 18 nt, Artificial Sequence
  Synthetic
aaaaacuaaacaggcauu

SEQ ID NO: 403674 - RNA, 19 nt, Artificial Sequence
  Synthetic
uaaaaacuaaacaggcauu

SEQ ID NO: 403675 - RNA, 20 nt, Artificial Sequence
  Synthetic
uuaaaaacuaaacaggcauu

SEQ ID NO: 403676 - RNA, 21 nt, Artificial Sequence
  Synthetic
uuuaaaaacuaaacaggcauu

SEQ ID NO: 403677 - RNA, 22 nt, Artificial Sequence
  Synthetic
cuuuaaaaacuaaacaggcauu

SEQ ID NO: 403678 - RNA, 23 nt, Artificial Sequence
  Synthetic
ucuuuaaaaacuaaacaggcauu

SEQ ID NO: 403679 - RNA, 24 nt, Artificial Sequence
  Synthetic
aucuuuaaaaacuaaacaggcauu

SEQ ID NO: 403680 - RNA, 18 nt, Artificial Sequence
  Synthetic
ggggggagggauggcauu

SEQ ID NO: 403681 - RNA, 19 nt, Artificial Sequence
  Synthetic
aggggggagggauggcauu

SEQ ID NO: 403682 - RNA, 20 nt, Artificial Sequence
  Synthetic
gaggggggagggauggcauu

SEQ ID NO: 403683 - RNA, 21 nt, Artificial Sequence
  Synthetic
ggaggggggagggauggcauu

SEQ ID NO: 403684 - RNA, 22 nt, Artificial Sequence
  Synthetic
gggaggggggagggauggcauu

SEQ ID NO: 403685 - RNA, 23 nt, Artificial Sequence
  Synthetic
ggggaggggggagggauggcauu

SEQ ID NO: 403686 - RNA, 24 nt, Artificial Sequence
  Synthetic
gggggaggggggagggauggcauu

SEQ ID NO: 403687 - RNA, 18 nt, Artificial Sequence
  Synthetic
uccagcaaguauggcauu

SEQ ID NO: 403688 - RNA, 19 nt, Artificial Sequence
  Synthetic
uuccagcaaguauggcauu

SEQ ID NO: 403689 - RNA, 20 nt, Artificial Sequence
  Synthetic
uuuccagcaaguauggcauu

SEQ ID NO: 403690 - RNA, 21 nt, Artificial Sequence
  Synthetic
auuuccagcaaguauggcauu

SEQ ID NO: 403691 - RNA, 22 nt, Artificial Sequence
  Synthetic
uauuuccagcaaguauggcauu

SEQ ID NO: 403692 - RNA, 23 nt, Artificial Sequence
  Synthetic
cuauuuccagcaaguauggcauu

SEQ ID NO: 403693 - RNA, 24 nt, Artificial Sequence
  Synthetic
ucuauuuccagcaaguauggcauu

SEQ ID NO: 403694 - RNA, 18 nt, Artificial Sequence
  Synthetic
aauccaaaugcuggcauu

SEQ ID NO: 403695 - RNA, 19 nt, Artificial Sequence
  Synthetic
aaauccaaaugcuggcauu

SEQ ID NO: 403696 - RNA, 20 nt, Artificial Sequence
  Synthetic
gaaauccaaaugcuggcauu

SEQ ID NO: 403697 - RNA, 21 nt, Artificial Sequence
  Synthetic
ugaaauccaaaugcuggcauu

SEQ ID NO: 403698 - RNA, 22 nt, Artificial Sequence
  Synthetic
augaaauccaaaugcuggcauu

SEQ ID NO: 403699 - RNA, 23 nt, Artificial Sequence
  Synthetic
aaugaaauccaaaugcuggcauu

SEQ ID NO: 403700 - RNA, 24 nt, Artificial Sequence
  Synthetic
uaaugaaauccaaaugcuggcauu

SEQ ID NO: 403701 - RNA, 18 nt, Artificial Sequence
  Synthetic
aaaccagagcuuggcauu

SEQ ID NO: 403702 - RNA, 19 nt, Artificial Sequence
  Synthetic
gaaaccagagcuuggcauu

SEQ ID NO: 403703 - RNA, 20 nt, Artificial Sequence
  Synthetic
ugaaaccagagcuuggcauu

SEQ ID NO: 403704 - RNA, 21 nt, Artificial Sequence
  Synthetic
uugaaaccagagcuuggcauu

SEQ ID NO: 403705 - RNA, 22 nt, Artificial Sequence
  Synthetic
auugaaaccagagcuuggcauu

SEQ ID NO: 403706 - RNA, 23 nt, Artificial Sequence
  Synthetic
gauugaaaccagagcuuggcauu

SEQ ID NO: 403707 - RNA, 24 nt, Artificial Sequence
  Synthetic
ugauugaaaccagagcuuggcauu

SEQ ID NO: 403708 - RNA, 18 nt, Artificial Sequence
  Synthetic
uggggguuuguuggcauu

SEQ ID NO: 403709 - RNA, 19 nt, Artificial Sequence
  Synthetic
uuggggguuuguuggcauu

SEQ ID NO: 403710 - RNA, 20 nt, Artificial Sequence
  Synthetic
cuuggggguuuguuggcauu

SEQ ID NO: 403711 - RNA, 21 nt, Artificial Sequence
  Synthetic
acuuggggguuuguuggcauu

SEQ ID NO: 403712 - RNA, 22 nt, Artificial Sequence
  Synthetic
aacuuggggguuuguuggcauu

SEQ ID NO: 403713 - RNA, 23 nt, Artificial Sequence
  Synthetic
uaacuuggggguuuguuggcauu

SEQ ID NO: 403714 - RNA, 24 nt, Artificial Sequence
  Synthetic
auaacuuggggguuuguuggcauu

SEQ ID NO: 403715 - RNA, 18 nt, Artificial Sequence
  Synthetic
ugacaggacaaaugcauu

SEQ ID NO: 403716 - RNA, 19 nt, Artificial Sequence
  Synthetic
gugacaggacaaaugcauu

SEQ ID NO: 403717 - RNA, 20 nt, Artificial Sequence
  Synthetic
agugacaggacaaaugcauu

SEQ ID NO: 403718 - RNA, 21 nt, Artificial Sequence
  Synthetic
aagugacaggacaaaugcauu

SEQ ID NO: 403719 - RNA, 22 nt, Artificial Sequence
  Synthetic
aaagugacaggacaaaugcauu

SEQ ID NO: 403720 - RNA, 23 nt, Artificial Sequence
  Synthetic
aaaagugacaggacaaaugcauu

SEQ ID NO: 403721 - RNA, 24 nt, Artificial Sequence
  Synthetic
uaaaagugacaggacaaaugcauu

SEQ ID NO: 403722 - RNA, 18 nt, Artificial Sequence
  Synthetic
uauaauuuuucaugcauu

SEQ ID NO: 403723 - RNA, 19 nt, Artificial Sequence
  Synthetic
uuauaauuuuucaugcauu

SEQ ID NO: 403724 - RNA, 20 nt, Artificial Sequence
  Synthetic
uuuauaauuuuucaugcauu

SEQ ID NO: 403725 - RNA, 21 nt, Artificial Sequence
  Synthetic
cuuuauaauuuuucaugcauu

SEQ ID NO: 403726 - RNA, 22 nt, Artificial Sequence
  Synthetic
acuuuauaauuuuucaugcauu

SEQ ID NO: 403727 - RNA, 23 nt, Artificial Sequence
  Synthetic
cacuuuauaauuuuucaugcauu

SEQ ID NO: 403728 - RNA, 24 nt, Artificial Sequence
  Synthetic
ucacuuuauaauuuuucaugcauu

SEQ ID NO: 403729 - RNA, 18 nt, Artificial Sequence
  Synthetic
guccaacagugaugcauu

SEQ ID NO: 403730 - RNA, 19 nt, Artificial Sequence
  Synthetic
uguccaacagugaugcauu

SEQ ID NO: 403731 - RNA, 20 nt, Artificial Sequence
  Synthetic
uuguccaacagugaugcauu

SEQ ID NO: 403732 - RNA, 21 nt, Artificial Sequence
  Synthetic
uuuguccaacagugaugcauu

SEQ ID NO: 403733 - RNA, 22 nt, Artificial Sequence
  Synthetic
auuuguccaacagugaugcauu

SEQ ID NO: 403734 - RNA, 23 nt, Artificial Sequence
  Synthetic
cauuuguccaacagugaugcauu

SEQ ID NO: 403735 - RNA, 24 nt, Artificial Sequence
  Synthetic
ucauuuguccaacagugaugcauu

SEQ ID NO: 403736 - RNA, 18 nt, Artificial Sequence
  Synthetic
auacaacaaauaugcauu

SEQ ID NO: 403737 - RNA, 19 nt, Artificial Sequence
  Synthetic
uauacaacaaauaugcauu

SEQ ID NO: 403738 - RNA, 20 nt, Artificial Sequence
  Synthetic
guauacaacaaauaugcauu

SEQ ID NO: 403739 - RNA, 21 nt, Artificial Sequence
  Synthetic
aguauacaacaaauaugcauu

SEQ ID NO: 403740 - RNA, 22 nt, Artificial Sequence
  Synthetic
gaguauacaacaaauaugcauu

SEQ ID NO: 403741 - RNA, 23 nt, Artificial Sequence
  Synthetic
agaguauacaacaaauaugcauu

SEQ ID NO: 403742 - RNA, 24 nt, Artificial Sequence
  Synthetic
aagaguauacaacaaauaugcauu

SEQ ID NO: 403743 - RNA, 18 nt, Artificial Sequence
  Synthetic
auucuacuaauaugcauu

SEQ ID NO: 403744 - RNA, 19 nt, Artificial Sequence
  Synthetic
uauucuacuaauaugcauu

SEQ ID NO: 403745 - RNA, 20 nt, Artificial Sequence
  Synthetic
uuauucuacuaauaugcauu

SEQ ID NO: 403746 - RNA, 21 nt, Artificial Sequence
  Synthetic
auuauucuacuaauaugcauu

SEQ ID NO: 403747 - RNA, 22 nt, Artificial Sequence
  Synthetic
aauuauucuacuaauaugcauu

SEQ ID NO: 403748 - RNA, 23 nt, Artificial Sequence
  Synthetic
caauuauucuacuaauaugcauu

SEQ ID NO: 403749 - RNA, 24 nt, Artificial Sequence
  Synthetic
gcaauuauucuacuaauaugcauu

SEQ ID NO: 403750 - RNA, 18 nt, Artificial Sequence
  Synthetic
uauacgaaaggcugcauu

SEQ ID NO: 403751 - RNA, 19 nt, Artificial Sequence
  Synthetic
uuauacgaaaggcugcauu

SEQ ID NO: 403752 - RNA, 20 nt, Artificial Sequence
  Synthetic
guuauacgaaaggcugcauu

SEQ ID NO: 403753 - RNA, 21 nt, Artificial Sequence
  Synthetic
aguuauacgaaaggcugcauu

SEQ ID NO: 403754 - RNA, 22 nt, Artificial Sequence
  Synthetic
uaguuauacgaaaggcugcauu

SEQ ID NO: 403755 - RNA, 23 nt, Artificial Sequence
  Synthetic
cuaguuauacgaaaggcugcauu

SEQ ID NO: 403756 - RNA, 24 nt, Artificial Sequence
  Synthetic
ccuaguuauacgaaaggcugcauu

SEQ ID NO: 403757 - RNA, 18 nt, Artificial Sequence
  Synthetic
uuuugggggaggugcauu

SEQ ID NO: 403758 - RNA, 19 nt, Artificial Sequence
  Synthetic
uuuuugggggaggugcauu

SEQ ID NO: 403759 - RNA, 20 nt, Artificial Sequence
  Synthetic
uuuuuugggggaggugcauu

SEQ ID NO: 403760 - RNA, 21 nt, Artificial Sequence
  Synthetic
guuuuuugggggaggugcauu

SEQ ID NO: 403761 - RNA, 22 nt, Artificial Sequence
  Synthetic
uguuuuuugggggaggugcauu

SEQ ID NO: 403762 - RNA, 23 nt, Artificial Sequence
  Synthetic
uuguuuuuugggggaggugcauu

SEQ ID NO: 403763 - RNA, 24 nt, Artificial Sequence
  Synthetic
uuuguuuuuugggggaggugcauu

SEQ ID NO: 403764 - RNA, 18 nt, Artificial Sequence
  Synthetic
uuggauggagugugcauu

SEQ ID NO: 403765 - RNA, 19 nt, Artificial Sequence
  Synthetic
cuuggauggagugugcauu

SEQ ID NO: 403766 - RNA, 20 nt, Artificial Sequence
  Synthetic
ucuuggauggagugugcauu

SEQ ID NO: 403767 - RNA, 21 nt, Artificial Sequence
  Synthetic
uucuuggauggagugugcauu

SEQ ID NO: 403768 - RNA, 22 nt, Artificial Sequence
  Synthetic
guucuuggauggagugugcauu

SEQ ID NO: 403769 - RNA, 23 nt, Artificial Sequence
  Synthetic
uguucuuggauggagugugcauu

SEQ ID NO: 403770 - RNA, 24 nt, Artificial Sequence
  Synthetic
uuguucuuggauggagugugcauu

SEQ ID NO: 403771 - RNA, 18 nt, Artificial Sequence
  Synthetic
aguguaauauugugcauu

SEQ ID NO: 403772 - RNA, 19 nt, Artificial Sequence
  Synthetic
caguguaauauugugcauu

SEQ ID NO: 403773 - RNA, 20 nt, Artificial Sequence
  Synthetic
ucaguguaauauugugcauu

SEQ ID NO: 403774 - RNA, 21 nt, Artificial Sequence
  Synthetic
gucaguguaauauugugcauu

SEQ ID NO: 403775 - RNA, 22 nt, Artificial Sequence
  Synthetic
ggucaguguaauauugugcauu

SEQ ID NO: 403776 - RNA, 23 nt, Artificial Sequence
  Synthetic
aggucaguguaauauugugcauu

SEQ ID NO: 403777 - RNA, 24 nt, Artificial Sequence
  Synthetic
uaggucaguguaauauugugcauu

SEQ ID NO: 403778 - RNA, 18 nt, Artificial Sequence
  Synthetic
aaucgaagugauugcauu

SEQ ID NO: 403779 - RNA, 19 nt, Artificial Sequence
  Synthetic
uaaucgaagugauugcauu

SEQ ID NO: 403780 - RNA, 20 nt, Artificial Sequence
  Synthetic
guaaucgaagugauugcauu

SEQ ID NO: 403781 - RNA, 21 nt, Artificial Sequence
  Synthetic
cguaaucgaagugauugcauu

SEQ ID NO: 403782 - RNA, 22 nt, Artificial Sequence
  Synthetic
acguaaucgaagugauugcauu

SEQ ID NO: 403783 - RNA, 23 nt, Artificial Sequence
  Synthetic
aacguaaucgaagugauugcauu

SEQ ID NO: 403784 - RNA, 24 nt, Artificial Sequence
  Synthetic
aaacguaaucgaagugauugcauu

SEQ ID NO: 403785 - RNA, 18 nt, Artificial Sequence
  Synthetic
uggaaugaggcuugcauu

SEQ ID NO: 403786 - RNA, 19 nt, Artificial Sequence
  Synthetic
auggaaugaggcuugcauu

SEQ ID NO: 403787 - RNA, 20 nt, Artificial Sequence
  Synthetic
aauggaaugaggcuugcauu

SEQ ID NO: 403788 - RNA, 21 nt, Artificial Sequence
  Synthetic
uaauggaaugaggcuugcauu

SEQ ID NO: 403789 - RNA, 22 nt, Artificial Sequence
  Synthetic
auaauggaaugaggcuugcauu

SEQ ID NO: 403790 - RNA, 23 nt, Artificial Sequence
  Synthetic
gauaauggaaugaggcuugcauu

SEQ ID NO: 403791 - RNA, 24 nt, Artificial Sequence
  Synthetic
agauaauggaaugaggcuugcauu

SEQ ID NO: 403792 - RNA, 18 nt, Artificial Sequence
  Synthetic
agcuacuugcuuugcauu

SEQ ID NO: 403793 - RNA, 19 nt, Artificial Sequence
  Synthetic
gagcuacuugcuuugcauu

SEQ ID NO: 403794 - RNA, 20 nt, Artificial Sequence
  Synthetic
cgagcuacuugcuuugcauu

SEQ ID NO: 403795 - RNA, 21 nt, Artificial Sequence
  Synthetic
gcgagcuacuugcuuugcauu

SEQ ID NO: 403796 - RNA, 22 nt, Artificial Sequence
  Synthetic
agcgagcuacuugcuuugcauu

SEQ ID NO: 403797 - RNA, 23 nt, Artificial Sequence
  Synthetic
cagcgagcuacuugcuuugcauu

SEQ ID NO: 403798 - RNA, 24 nt, Artificial Sequence
  Synthetic
acagcgagcuacuugcuuugcauu

SEQ ID NO: 403799 - RNA, 18 nt, Artificial Sequence
  Synthetic
uuugcaaaaaaaaucauu

SEQ ID NO: 403800 - RNA, 19 nt, Artificial Sequence
  Synthetic
uuuugcaaaaaaaaucauu

SEQ ID NO: 403801 - RNA, 20 nt, Artificial Sequence
  Synthetic
auuuugcaaaaaaaaucauu

SEQ ID NO: 403802 - RNA, 21 nt, Artificial Sequence
  Synthetic
aauuuugcaaaaaaaaucauu

SEQ ID NO: 403803 - RNA, 22 nt, Artificial Sequence
  Synthetic
aaauuuugcaaaaaaaaucauu

SEQ ID NO: 403804 - RNA, 23 nt, Artificial Sequence
  Synthetic
aaaauuuugcaaaaaaaaucauu

SEQ ID NO: 403805 - RNA, 24 nt, Artificial Sequence
  Synthetic
uaaaauuuugcaaaaaaaaucauu

SEQ ID NO: 403806 - RNA, 18 nt, Artificial Sequence
  Synthetic
auuauguggaaaaucauu

SEQ ID NO: 403807 - RNA, 19 nt, Artificial Sequence
  Synthetic
gauuauguggaaaaucauu

SEQ ID NO: 403808 - RNA, 20 nt, Artificial Sequence
  Synthetic
agauuauguggaaaaucauu

SEQ ID NO: 403809 - RNA, 21 nt, Artificial Sequence
  Synthetic
cagauuauguggaaaaucauu

SEQ ID NO: 403810 - RNA, 22 nt, Artificial Sequence
  Synthetic
acagauuauguggaaaaucauu

SEQ ID NO: 403811 - RNA, 23 nt, Artificial Sequence
  Synthetic
cacagauuauguggaaaaucauu

SEQ ID NO: 403812 - RNA, 24 nt, Artificial Sequence
  Synthetic
gcacagauuauguggaaaaucauu

SEQ ID NO: 403813 - RNA, 18 nt, Artificial Sequence
  Synthetic
gguaauauuacaaucauu

SEQ ID NO: 403814 - RNA, 19 nt, Artificial Sequence
  Synthetic
ugguaauauuacaaucauu

SEQ ID NO: 403815 - RNA, 20 nt, Artificial Sequence
  Synthetic
uugguaauauuacaaucauu

SEQ ID NO: 403816 - RNA, 21 nt, Artificial Sequence
  Synthetic
guugguaauauuacaaucauu

SEQ ID NO: 403817 - RNA, 22 nt, Artificial Sequence
  Synthetic
uguugguaauauuacaaucauu

SEQ ID NO: 403818 - RNA, 23 nt, Artificial Sequence
  Synthetic
auguugguaauauuacaaucauu

SEQ ID NO: 403819 - RNA, 24 nt, Artificial Sequence
  Synthetic
uauguugguaauauuacaaucauu

SEQ ID NO: 403820 - RNA, 18 nt, Artificial Sequence
  Synthetic
ugcauuggaagaaucauu

SEQ ID NO: 403821 - RNA, 19 nt, Artificial Sequence
  Synthetic
uugcauuggaagaaucauu

SEQ ID NO: 403822 - RNA, 20 nt, Artificial Sequence
  Synthetic
uuugcauuggaagaaucauu

SEQ ID NO: 403823 - RNA, 21 nt, Artificial Sequence
  Synthetic
uuuugcauuggaagaaucauu

SEQ ID NO: 403824 - RNA, 22 nt, Artificial Sequence
  Synthetic
uuuuugcauuggaagaaucauu

SEQ ID NO: 403825 - RNA, 23 nt, Artificial Sequence
  Synthetic
cuuuuugcauuggaagaaucauu

SEQ ID NO: 403826 - RNA, 24 nt, Artificial Sequence
  Synthetic
ccuuuuugcauuggaagaaucauu

SEQ ID NO: 403827 - RNA, 18 nt, Artificial Sequence
  Synthetic
ucaacaucacuaaucauu

SEQ ID NO: 403828 - RNA, 19 nt, Artificial Sequence
  Synthetic
cucaacaucacuaaucauu

SEQ ID NO: 403829 - RNA, 20 nt, Artificial Sequence
  Synthetic
gcucaacaucacuaaucauu

SEQ ID NO: 403830 - RNA, 21 nt, Artificial Sequence
  Synthetic
ugcucaacaucacuaaucauu

SEQ ID NO: 403831 - RNA, 22 nt, Artificial Sequence
  Synthetic
augcucaacaucacuaaucauu

SEQ ID NO: 403832 - RNA, 23 nt, Artificial Sequence
  Synthetic
aaugcucaacaucacuaaucauu

SEQ ID NO: 403833 - RNA, 24 nt, Artificial Sequence
  Synthetic
aaaugcucaacaucacuaaucauu

SEQ ID NO: 403834 - RNA, 18 nt, Artificial Sequence
  Synthetic
aagcuggaaaccaucauu

SEQ ID NO: 403835 - RNA, 19 nt, Artificial Sequence
  Synthetic
gaagcuggaaaccaucauu

SEQ ID NO: 403836 - RNA, 20 nt, Artificial Sequence
  Synthetic
ugaagcuggaaaccaucauu

SEQ ID NO: 403837 - RNA, 21 nt, Artificial Sequence
  Synthetic
augaagcuggaaaccaucauu

SEQ ID NO: 403838 - RNA, 22 nt, Artificial Sequence
  Synthetic
gaugaagcuggaaaccaucauu

SEQ ID NO: 403839 - RNA, 23 nt, Artificial Sequence
  Synthetic
ggaugaagcuggaaaccaucauu

SEQ ID NO: 403840 - RNA, 24 nt, Artificial Sequence
  Synthetic
uggaugaagcuggaaaccaucauu

SEQ ID NO: 403841 - RNA, 18 nt, Artificial Sequence
  Synthetic
aaacugcgcaccaucauu

SEQ ID NO: 403842 - RNA, 19 nt, Artificial Sequence
  Synthetic
aaaacugcgcaccaucauu

SEQ ID NO: 403843 - RNA, 20 nt, Artificial Sequence
  Synthetic
caaaacugcgcaccaucauu

SEQ ID NO: 403844 - RNA, 21 nt, Artificial Sequence
  Synthetic
acaaaacugcgcaccaucauu

SEQ ID NO: 403845 - RNA, 22 nt, Artificial Sequence
  Synthetic
aacaaaacugcgcaccaucauu

SEQ ID NO: 403846 - RNA, 23 nt, Artificial Sequence
  Synthetic
aaacaaaacugcgcaccaucauu

SEQ ID NO: 403847 - RNA, 24 nt, Artificial Sequence
  Synthetic
aaaacaaaacugcgcaccaucauu

SEQ ID NO: 403848 - RNA, 18 nt, Artificial Sequence
  Synthetic
gcuccuuguuccaucauu

SEQ ID NO: 403849 - RNA, 19 nt, Artificial Sequence
  Synthetic
ugcuccuuguuccaucauu

SEQ ID NO: 403850 - RNA, 20 nt, Artificial Sequence
  Synthetic
uugcuccuuguuccaucauu

SEQ ID NO: 403851 - RNA, 21 nt, Artificial Sequence
  Synthetic
uuugcuccuuguuccaucauu

SEQ ID NO: 403852 - RNA, 22 nt, Artificial Sequence
  Synthetic
guuugcuccuuguuccaucauu

SEQ ID NO: 403853 - RNA, 23 nt, Artificial Sequence
  Synthetic
uguuugcuccuuguuccaucauu

SEQ ID NO: 403854 - RNA, 24 nt, Artificial Sequence
  Synthetic
uuguuugcuccuuguuccaucauu

SEQ ID NO: 403855 - RNA, 18 nt, Artificial Sequence
  Synthetic
ugagcucauaagaucauu

SEQ ID NO: 403856 - RNA, 19 nt, Artificial Sequence
  Synthetic
augagcucauaagaucauu

SEQ ID NO: 403857 - RNA, 20 nt, Artificial Sequence
  Synthetic
aaugagcucauaagaucauu

SEQ ID NO: 403858 - RNA, 21 nt, Artificial Sequence
  Synthetic
uaaugagcucauaagaucauu

SEQ ID NO: 403859 - RNA, 22 nt, Artificial Sequence
  Synthetic
cuaaugagcucauaagaucauu

SEQ ID NO: 403860 - RNA, 23 nt, Artificial Sequence
  Synthetic
acuaaugagcucauaagaucauu

SEQ ID NO: 403861 - RNA, 24 nt, Artificial Sequence
  Synthetic
uacuaaugagcucauaagaucauu

SEQ ID NO: 403862 - RNA, 18 nt, Artificial Sequence
  Synthetic
ucuaccacccugaucauu

SEQ ID NO: 403863 - RNA, 19 nt, Artificial Sequence
  Synthetic
uucuaccacccugaucauu

SEQ ID NO: 403864 - RNA, 20 nt, Artificial Sequence
  Synthetic
auucuaccacccugaucauu

SEQ ID NO: 403865 - RNA, 21 nt, Artificial Sequence
  Synthetic
aauucuaccacccugaucauu

SEQ ID NO: 403866 - RNA, 22 nt, Artificial Sequence
  Synthetic
gaauucuaccacccugaucauu

SEQ ID NO: 403867 - RNA, 23 nt, Artificial Sequence
  Synthetic
ugaauucuaccacccugaucauu

SEQ ID NO: 403868 - RNA, 24 nt, Artificial Sequence
  Synthetic
cugaauucuaccacccugaucauu

SEQ ID NO: 403869 - RNA, 18 nt, Artificial Sequence
  Synthetic
uuauuaugcuugaucauu

SEQ ID NO: 403870 - RNA, 19 nt, Artificial Sequence
  Synthetic
uuuauuaugcuugaucauu

SEQ ID NO: 403871 - RNA, 20 nt, Artificial Sequence
  Synthetic
uuuuauuaugcuugaucauu

SEQ ID NO: 403872 - RNA, 21 nt, Artificial Sequence
  Synthetic
auuuuauuaugcuugaucauu

SEQ ID NO: 403873 - RNA, 22 nt, Artificial Sequence
  Synthetic
uauuuuauuaugcuugaucauu

SEQ ID NO: 403874 - RNA, 23 nt, Artificial Sequence
  Synthetic
guauuuuauuaugcuugaucauu

SEQ ID NO: 403875 - RNA, 24 nt, Artificial Sequence
  Synthetic
uguauuuuauuaugcuugaucauu

SEQ ID NO: 403876 - RNA, 18 nt, Artificial Sequence
  Synthetic
ugaguuaguuugaucauu

SEQ ID NO: 403877 - RNA, 19 nt, Artificial Sequence
  Synthetic
uugaguuaguuugaucauu

SEQ ID NO: 403878 - RNA, 20 nt, Artificial Sequence
  Synthetic
guugaguuaguuugaucauu

SEQ ID NO: 403879 - RNA, 21 nt, Artificial Sequence
  Synthetic
uguugaguuaguuugaucauu

SEQ ID NO: 403880 - RNA, 22 nt, Artificial Sequence
  Synthetic
guguugaguuaguuugaucauu

SEQ ID NO: 403881 - RNA, 23 nt, Artificial Sequence
  Synthetic
cguguugaguuaguuugaucauu

SEQ ID NO: 403882 - RNA, 24 nt, Artificial Sequence
  Synthetic
gcguguugaguuaguuugaucauu

SEQ ID NO: 403883 - RNA, 18 nt, Artificial Sequence
  Synthetic
uaauacuuuaauaucauu

SEQ ID NO: 403884 - RNA, 19 nt, Artificial Sequence
  Synthetic
uuaauacuuuaauaucauu

SEQ ID NO: 403885 - RNA, 20 nt, Artificial Sequence
  Synthetic
auuaauacuuuaauaucauu

SEQ ID NO: 403886 - RNA, 21 nt, Artificial Sequence
  Synthetic
aauuaauacuuuaauaucauu

SEQ ID NO: 403887 - RNA, 22 nt, Artificial Sequence
  Synthetic
uaauuaauacuuuaauaucauu

SEQ ID NO: 403888 - RNA, 23 nt, Artificial Sequence
  Synthetic
cuaauuaauacuuuaauaucauu

SEQ ID NO: 403889 - RNA, 24 nt, Artificial Sequence
  Synthetic
acuaauuaauacuuuaauaucauu

SEQ ID NO: 403890 - RNA, 18 nt, Artificial Sequence
  Synthetic
cuuuuugcucauaucauu

SEQ ID NO: 403891 - RNA, 19 nt, Artificial Sequence
  Synthetic
ccuuuuugcucauaucauu

SEQ ID NO: 403892 - RNA, 20 nt, Artificial Sequence
  Synthetic
uccuuuuugcucauaucauu

SEQ ID NO: 403893 - RNA, 21 nt, Artificial Sequence
  Synthetic
uuccuuuuugcucauaucauu

SEQ ID NO: 403894 - RNA, 22 nt, Artificial Sequence
  Synthetic
uuuccuuuuugcucauaucauu

SEQ ID NO: 403895 - RNA, 23 nt, Artificial Sequence
  Synthetic
auuuccuuuuugcucauaucauu

SEQ ID NO: 403896 - RNA, 24 nt, Artificial Sequence
  Synthetic
cauuuccuuuuugcucauaucauu

SEQ ID NO: 403897 - RNA, 18 nt, Artificial Sequence
  Synthetic
ucuccuugggauaucauu

SEQ ID NO: 403898 - RNA, 19 nt, Artificial Sequence
  Synthetic
gucuccuugggauaucauu

SEQ ID NO: 403899 - RNA, 20 nt, Artificial Sequence
  Synthetic
agucuccuugggauaucauu

SEQ ID NO: 403900 - RNA, 21 nt, Artificial Sequence
  Synthetic
uagucuccuugggauaucauu

SEQ ID NO: 403901 - RNA, 22 nt, Artificial Sequence
  Synthetic
cuagucuccuugggauaucauu

SEQ ID NO: 403902 - RNA, 23 nt, Artificial Sequence
  Synthetic
ucuagucuccuugggauaucauu

SEQ ID NO: 403903 - RNA, 24 nt, Artificial Sequence
  Synthetic
uucuagucuccuugggauaucauu

SEQ ID NO: 403904 - RNA, 18 nt, Artificial Sequence
  Synthetic
cacaaauucacuaucauu

SEQ ID NO: 403905 - RNA, 19 nt, Artificial Sequence
  Synthetic
acacaaauucacuaucauu

SEQ ID NO: 403906 - RNA, 20 nt, Artificial Sequence
  Synthetic
gacacaaauucacuaucauu

SEQ ID NO: 403907 - RNA, 21 nt, Artificial Sequence
  Synthetic
ggacacaaauucacuaucauu

SEQ ID NO: 403908 - RNA, 22 nt, Artificial Sequence
  Synthetic
aggacacaaauucacuaucauu

SEQ ID NO: 403909 - RNA, 23 nt, Artificial Sequence
  Synthetic
uaggacacaaauucacuaucauu

SEQ ID NO: 403910 - RNA, 24 nt, Artificial Sequence
  Synthetic
auaggacacaaauucacuaucauu

SEQ ID NO: 403911 - RNA, 18 nt, Artificial Sequence
  Synthetic
auuuaaaaugcuaucauu

SEQ ID NO: 403912 - RNA, 19 nt, Artificial Sequence
  Synthetic
uauuuaaaaugcuaucauu

SEQ ID NO: 403913 - RNA, 20 nt, Artificial Sequence
  Synthetic
guauuuaaaaugcuaucauu

SEQ ID NO: 403914 - RNA, 21 nt, Artificial Sequence
  Synthetic
gguauuuaaaaugcuaucauu

SEQ ID NO: 403915 - RNA, 22 nt, Artificial Sequence
  Synthetic
ggguauuuaaaaugcuaucauu

SEQ ID NO: 403916 - RNA, 23 nt, Artificial Sequence
  Synthetic
uggguauuuaaaaugcuaucauu

SEQ ID NO: 403917 - RNA, 24 nt, Artificial Sequence
  Synthetic
auggguauuuaaaaugcuaucauu

SEQ ID NO: 403918 - RNA, 18 nt, Artificial Sequence
  Synthetic
ugugcuucugcuaucauu

SEQ ID NO: 403919 - RNA, 19 nt, Artificial Sequence
  Synthetic
uugugcuucugcuaucauu

SEQ ID NO: 403920 - RNA, 20 nt, Artificial Sequence
  Synthetic
uuugugcuucugcuaucauu

SEQ ID NO: 403921 - RNA, 21 nt, Artificial Sequence
  Synthetic
guuugugcuucugcuaucauu

SEQ ID NO: 403922 - RNA, 22 nt, Artificial Sequence
  Synthetic
uguuugugcuucugcuaucauu

SEQ ID NO: 403923 - RNA, 23 nt, Artificial Sequence
  Synthetic
cuguuugugcuucugcuaucauu

SEQ ID NO: 403924 - RNA, 24 nt, Artificial Sequence
  Synthetic
ccuguuugugcuucugcuaucauu

SEQ ID NO: 403925 - RNA, 18 nt, Artificial Sequence
  Synthetic
auauuuaggaguaucauu

SEQ ID NO: 403926 - RNA, 19 nt, Artificial Sequence
  Synthetic
cauauuuaggaguaucauu

SEQ ID NO: 403927 - RNA, 20 nt, Artificial Sequence
  Synthetic
acauauuuaggaguaucauu

SEQ ID NO: 403928 - RNA, 21 nt, Artificial Sequence
  Synthetic
uacauauuuaggaguaucauu

SEQ ID NO: 403929 - RNA, 22 nt, Artificial Sequence
  Synthetic
auacauauuuaggaguaucauu

SEQ ID NO: 403930 - RNA, 23 nt, Artificial Sequence
  Synthetic
aauacauauuuaggaguaucauu

SEQ ID NO: 403931 - RNA, 24 nt, Artificial Sequence
  Synthetic
aaauacauauuuaggaguaucauu

SEQ ID NO: 403932 - RNA, 18 nt, Artificial Sequence
  Synthetic
ggugaaaauaguaucauu

SEQ ID NO: 403933 - RNA, 19 nt, Artificial Sequence
  Synthetic
gggugaaaauaguaucauu

SEQ ID NO: 403934 - RNA, 20 nt, Artificial Sequence
  Synthetic
ugggugaaaauaguaucauu

SEQ ID NO: 403935 - RNA, 21 nt, Artificial Sequence
  Synthetic
uugggugaaaauaguaucauu

SEQ ID NO: 403936 - RNA, 22 nt, Artificial Sequence
  Synthetic
auugggugaaaauaguaucauu

SEQ ID NO: 403937 - RNA, 23 nt, Artificial Sequence
  Synthetic
uauugggugaaaauaguaucauu

SEQ ID NO: 403938 - RNA, 24 nt, Artificial Sequence
  Synthetic
uuauugggugaaaauaguaucauu

SEQ ID NO: 403939 - RNA, 18 nt, Artificial Sequence
  Synthetic
gaccacaaggguaucauu

SEQ ID NO: 403940 - RNA, 19 nt, Artificial Sequence
  Synthetic
agaccacaaggguaucauu

SEQ ID NO: 403941 - RNA, 20 nt, Artificial Sequence
  Synthetic
cagaccacaaggguaucauu

SEQ ID NO: 403942 - RNA, 21 nt, Artificial Sequence
  Synthetic
ucagaccacaaggguaucauu

SEQ ID NO: 403943 - RNA, 22 nt, Artificial Sequence
  Synthetic
uucagaccacaaggguaucauu

SEQ ID NO: 403944 - RNA, 23 nt, Artificial Sequence
  Synthetic
uuucagaccacaaggguaucauu

SEQ ID NO: 403945 - RNA, 24 nt, Artificial Sequence
  Synthetic
auuucagaccacaaggguaucauu

SEQ ID NO: 403946 - RNA, 18 nt, Artificial Sequence
  Synthetic
auuuacuaacuuaucauu

SEQ ID NO: 403947 - RNA, 19 nt, Artificial Sequence
  Synthetic
cauuuacuaacuuaucauu

SEQ ID NO: 403948 - RNA, 20 nt, Artificial Sequence
  Synthetic
acauuuacuaacuuaucauu

SEQ ID NO: 403949 - RNA, 21 nt, Artificial Sequence
  Synthetic
aacauuuacuaacuuaucauu

SEQ ID NO: 403950 - RNA, 22 nt, Artificial Sequence
  Synthetic
caacauuuacuaacuuaucauu

SEQ ID NO: 403951 - RNA, 23 nt, Artificial Sequence
  Synthetic
ccaacauuuacuaacuuaucauu

SEQ ID NO: 403952 - RNA, 24 nt, Artificial Sequence
  Synthetic
accaacauuuacuaacuuaucauu

SEQ ID NO: 403953 - RNA, 18 nt, Artificial Sequence
  Synthetic
uuuuaaucucuuaucauu

SEQ ID NO: 403954 - RNA, 19 nt, Artificial Sequence
  Synthetic
auuuuaaucucuuaucauu

SEQ ID NO: 403955 - RNA, 20 nt, Artificial Sequence
  Synthetic
gauuuuaaucucuuaucauu

SEQ ID NO: 403956 - RNA, 21 nt, Artificial Sequence
  Synthetic
cgauuuuaaucucuuaucauu

SEQ ID NO: 403957 - RNA, 22 nt, Artificial Sequence
  Synthetic
ucgauuuuaaucucuuaucauu

SEQ ID NO: 403958 - RNA, 23 nt, Artificial Sequence
  Synthetic
uucgauuuuaaucucuuaucauu

SEQ ID NO: 403959 - RNA, 24 nt, Artificial Sequence
  Synthetic
guucgauuuuaaucucuuaucauu

SEQ ID NO: 403960 - RNA, 18 nt, Artificial Sequence
  Synthetic
uacagaagaguuaucauu

SEQ ID NO: 403961 - RNA, 19 nt, Artificial Sequence
  Synthetic
guacagaagaguuaucauu

SEQ ID NO: 403962 - RNA, 20 nt, Artificial Sequence
  Synthetic
cguacagaagaguuaucauu

SEQ ID NO: 403963 - RNA, 21 nt, Artificial Sequence
  Synthetic
gcguacagaagaguuaucauu

SEQ ID NO: 403964 - RNA, 22 nt, Artificial Sequence
  Synthetic
ugcguacagaagaguuaucauu

SEQ ID NO: 403965 - RNA, 23 nt, Artificial Sequence
  Synthetic
augcguacagaagaguuaucauu

SEQ ID NO: 403966 - RNA, 24 nt, Artificial Sequence
  Synthetic
caugcguacagaagaguuaucauu

SEQ ID NO: 403967 - RNA, 18 nt, Artificial Sequence
  Synthetic
ugaagagauguuaucauu

SEQ ID NO: 403968 - RNA, 19 nt, Artificial Sequence
  Synthetic
uugaagagauguuaucauu

SEQ ID NO: 403969 - RNA, 20 nt, Artificial Sequence
  Synthetic
uuugaagagauguuaucauu

SEQ ID NO: 403970 - RNA, 21 nt, Artificial Sequence
  Synthetic
auuugaagagauguuaucauu

SEQ ID NO: 403971 - RNA, 22 nt, Artificial Sequence
  Synthetic
cauuugaagagauguuaucauu

SEQ ID NO: 403972 - RNA, 23 nt, Artificial Sequence
  Synthetic
ucauuugaagagauguuaucauu

SEQ ID NO: 403973 - RNA, 24 nt, Artificial Sequence
  Synthetic
cucauuugaagagauguuaucauu

SEQ ID NO: 403974 - RNA, 18 nt, Artificial Sequence
  Synthetic
uuucuaaguaaacucauu

SEQ ID NO: 403975 - RNA, 19 nt, Artificial Sequence
  Synthetic
uuuucuaaguaaacucauu

SEQ ID NO: 403976 - RNA, 20 nt, Artificial Sequence
  Synthetic
guuuucuaaguaaacucauu

SEQ ID NO: 403977 - RNA, 21 nt, Artificial Sequence
  Synthetic
aguuuucuaaguaaacucauu

SEQ ID NO: 403978 - RNA, 22 nt, Artificial Sequence
  Synthetic
gaguuuucuaaguaaacucauu

SEQ ID NO: 403979 - RNA, 23 nt, Artificial Sequence
  Synthetic
ggaguuuucuaaguaaacucauu

SEQ ID NO: 403980 - RNA, 24 nt, Artificial Sequence
  Synthetic
gggaguuuucuaaguaaacucauu

SEQ ID NO: 403981 - RNA, 18 nt, Artificial Sequence
  Synthetic
ggaaggucccaacucauu

SEQ ID NO: 403982 - RNA, 19 nt, Artificial Sequence
  Synthetic
aggaaggucccaacucauu

SEQ ID NO: 403983 - RNA, 20 nt, Artificial Sequence
  Synthetic
caggaaggucccaacucauu

SEQ ID NO: 403984 - RNA, 21 nt, Artificial Sequence
  Synthetic
ucaggaaggucccaacucauu

SEQ ID NO: 403985 - RNA, 22 nt, Artificial Sequence
  Synthetic
uucaggaaggucccaacucauu

SEQ ID NO: 403986 - RNA, 23 nt, Artificial Sequence
  Synthetic
cuucaggaaggucccaacucauu

SEQ ID NO: 403987 - RNA, 24 nt, Artificial Sequence
  Synthetic
ucuucaggaaggucccaacucauu

SEQ ID NO: 403988 - RNA, 18 nt, Artificial Sequence
  Synthetic
uaauaaaagcaacucauu

SEQ ID NO: 403989 - RNA, 19 nt, Artificial Sequence
  Synthetic
guaauaaaagcaacucauu

SEQ ID NO: 403990 - RNA, 20 nt, Artificial Sequence
  Synthetic
uguaauaaaagcaacucauu

SEQ ID NO: 403991 - RNA, 21 nt, Artificial Sequence
  Synthetic
uuguaauaaaagcaacucauu

SEQ ID NO: 403992 - RNA, 22 nt, Artificial Sequence
  Synthetic
cuuguaauaaaagcaacucauu

SEQ ID NO: 403993 - RNA, 23 nt, Artificial Sequence
  Synthetic
ucuuguaauaaaagcaacucauu

SEQ ID NO: 403994 - RNA, 24 nt, Artificial Sequence
  Synthetic
aucuuguaauaaaagcaacucauu

SEQ ID NO: 403995 - RNA, 18 nt, Artificial Sequence
  Synthetic
uaaaauaacacacucauu

SEQ ID NO: 403996 - RNA, 19 nt, Artificial Sequence
  Synthetic
auaaaauaacacacucauu

SEQ ID NO: 403997 - RNA, 20 nt, Artificial Sequence
  Synthetic
uauaaaauaacacacucauu

SEQ ID NO: 403998 - RNA, 21 nt, Artificial Sequence
  Synthetic
uuauaaaauaacacacucauu

SEQ ID NO: 403999 - RNA, 22 nt, Artificial Sequence
  Synthetic
uuuauaaaauaacacacucauu

SEQ ID NO: 404000 - RNA, 23 nt, Artificial Sequence
  Synthetic
uuuuauaaaauaacacacucauu

SEQ ID NO: 404001 - RNA, 24 nt, Artificial Sequence
  Synthetic
auuuuauaaaauaacacacucauu

SEQ ID NO: 404002 - RNA, 18 nt, Artificial Sequence
  Synthetic
uuuuugcagacacucauu

SEQ ID NO: 404003 - RNA, 19 nt, Artificial Sequence
  Synthetic
uuuuuugcagacacucauu

SEQ ID NO: 404004 - RNA, 20 nt, Artificial Sequence
  Synthetic
auuuuuugcagacacucauu

SEQ ID NO: 404005 - RNA, 21 nt, Artificial Sequence
  Synthetic
cauuuuuugcagacacucauu

SEQ ID NO: 404006 - RNA, 22 nt, Artificial Sequence
  Synthetic
acauuuuuugcagacacucauu

SEQ ID NO: 404007 - RNA, 23 nt, Artificial Sequence
  Synthetic
aacauuuuuugcagacacucauu

SEQ ID NO: 404008 - RNA, 24 nt, Artificial Sequence
  Synthetic
uaacauuuuuugcagacacucauu

SEQ ID NO: 404009 - RNA, 18 nt, Artificial Sequence
  Synthetic
uauagaaaagcacucauu

SEQ ID NO: 404010 - RNA, 19 nt, Artificial Sequence
  Synthetic
auauagaaaagcacucauu

SEQ ID NO: 404011 - RNA, 20 nt, Artificial Sequence
  Synthetic
cauauagaaaagcacucauu

SEQ ID NO: 404012 - RNA, 21 nt, Artificial Sequence
  Synthetic
acauauagaaaagcacucauu

SEQ ID NO: 404013 - RNA, 22 nt, Artificial Sequence
  Synthetic
uacauauagaaaagcacucauu

SEQ ID NO: 404014 - RNA, 23 nt, Artificial Sequence
  Synthetic
guacauauagaaaagcacucauu

SEQ ID NO: 404015 - RNA, 24 nt, Artificial Sequence
  Synthetic
uguacauauagaaaagcacucauu

SEQ ID NO: 404016 - RNA, 18 nt, Artificial Sequence
  Synthetic
agacucaaaugacucauu

SEQ ID NO: 404017 - RNA, 19 nt, Artificial Sequence
  Synthetic
uagacucaaaugacucauu

SEQ ID NO: 404018 - RNA, 20 nt, Artificial Sequence
  Synthetic
auagacucaaaugacucauu

SEQ ID NO: 404019 - RNA, 21 nt, Artificial Sequence
  Synthetic
uauagacucaaaugacucauu

SEQ ID NO: 404020 - RNA, 22 nt, Artificial Sequence
  Synthetic
uuauagacucaaaugacucauu

SEQ ID NO: 404021 - RNA, 23 nt, Artificial Sequence
  Synthetic
auuauagacucaaaugacucauu

SEQ ID NO: 404022 - RNA, 24 nt, Artificial Sequence
  Synthetic
cauuauagacucaaaugacucauu

SEQ ID NO: 404023 - RNA, 18 nt, Artificial Sequence
  Synthetic
auugaacaaauacucauu

SEQ ID NO: 404024 - RNA, 19 nt, Artificial Sequence
  Synthetic
gauugaacaaauacucauu

SEQ ID NO: 404025 - RNA, 20 nt, Artificial Sequence
  Synthetic
ggauugaacaaauacucauu

SEQ ID NO: 404026 - RNA, 21 nt, Artificial Sequence
  Synthetic
uggauugaacaaauacucauu

SEQ ID NO: 404027 - RNA, 22 nt, Artificial Sequence
  Synthetic
auggauugaacaaauacucauu

SEQ ID NO: 404028 - RNA, 23 nt, Artificial Sequence
  Synthetic
uauggauugaacaaauacucauu

SEQ ID NO: 404029 - RNA, 24 nt, Artificial Sequence
  Synthetic
guauggauugaacaaauacucauu

SEQ ID NO: 404030 - RNA, 18 nt, Artificial Sequence
  Synthetic
uucugcugcucccucauu

SEQ ID NO: 404031 - RNA, 19 nt, Artificial Sequence
  Synthetic
auucugcugcucccucauu

SEQ ID NO: 404032 - RNA, 20 nt, Artificial Sequence
  Synthetic
gauucugcugcucccucauu

SEQ ID NO: 404033 - RNA, 21 nt, Artificial Sequence
  Synthetic
ugauucugcugcucccucauu

SEQ ID NO: 404034 - RNA, 22 nt, Artificial Sequence
  Synthetic
gugauucugcugcucccucauu

SEQ ID NO: 404035 - RNA, 23 nt, Artificial Sequence
  Synthetic
agugauucugcugcucccucauu

SEQ ID NO: 404036 - RNA, 24 nt, Artificial Sequence
  Synthetic
aagugauucugcugcucccucauu

SEQ ID NO: 404037 - RNA, 18 nt, Artificial Sequence
  Synthetic
cauaggacuagccucauu

SEQ ID NO: 404038 - RNA, 19 nt, Artificial Sequence
  Synthetic
ccauaggacuagccucauu

SEQ ID NO: 404039 - RNA, 20 nt, Artificial Sequence
  Synthetic
uccauaggacuagccucauu

SEQ ID NO: 404040 - RNA, 21 nt, Artificial Sequence
  Synthetic
guccauaggacuagccucauu

SEQ ID NO: 404041 - RNA, 22 nt, Artificial Sequence
  Synthetic
uguccauaggacuagccucauu

SEQ ID NO: 404042 - RNA, 23 nt, Artificial Sequence
  Synthetic
guguccauaggacuagccucauu

SEQ ID NO: 404043 - RNA, 24 nt, Artificial Sequence
  Synthetic
uguguccauaggacuagccucauu

SEQ ID NO: 404044 - RNA, 18 nt, Artificial Sequence
  Synthetic
ucucucuuuauccucauu

SEQ ID NO: 404045 - RNA, 19 nt, Artificial Sequence
  Synthetic
aucucucuuuauccucauu

SEQ ID NO: 404046 - RNA, 20 nt, Artificial Sequence
  Synthetic
gaucucucuuuauccucauu

SEQ ID NO: 404047 - RNA, 21 nt, Artificial Sequence
  Synthetic
ugaucucucuuuauccucauu

SEQ ID NO: 404048 - RNA, 22 nt, Artificial Sequence
  Synthetic
uugaucucucuuuauccucauu

SEQ ID NO: 404049 - RNA, 23 nt, Artificial Sequence
  Synthetic
uuugaucucucuuuauccucauu

SEQ ID NO: 404050 - RNA, 24 nt, Artificial Sequence
  Synthetic
cuuugaucucucuuuauccucauu

SEQ ID NO: 404051 - RNA, 18 nt, Artificial Sequence
  Synthetic
cagagauuuuagcucauu

SEQ ID NO: 404052 - RNA, 19 nt, Artificial Sequence
  Synthetic
ccagagauuuuagcucauu

SEQ ID NO: 404053 - RNA, 20 nt, Artificial Sequence
  Synthetic
gccagagauuuuagcucauu

SEQ ID NO: 404054 - RNA, 21 nt, Artificial Sequence
  Synthetic
ggccagagauuuuagcucauu

SEQ ID NO: 404055 - RNA, 22 nt, Artificial Sequence
  Synthetic
gggccagagauuuuagcucauu

SEQ ID NO: 404056 - RNA, 23 nt, Artificial Sequence
  Synthetic
agggccagagauuuuagcucauu

SEQ ID NO: 404057 - RNA, 24 nt, Artificial Sequence
  Synthetic
cagggccagagauuuuagcucauu

SEQ ID NO: 404058 - RNA, 18 nt, Artificial Sequence
  Synthetic
uauuaauaccaucucauu

SEQ ID NO: 404059 - RNA, 19 nt, Artificial Sequence
  Synthetic
auauuaauaccaucucauu

SEQ ID NO: 404060 - RNA, 20 nt, Artificial Sequence
  Synthetic
aauauuaauaccaucucauu

SEQ ID NO: 404061 - RNA, 21 nt, Artificial Sequence
  Synthetic
caauauuaauaccaucucauu

SEQ ID NO: 404062 - RNA, 22 nt, Artificial Sequence
  Synthetic
gcaauauuaauaccaucucauu

SEQ ID NO: 404063 - RNA, 23 nt, Artificial Sequence
  Synthetic
ggcaauauuaauaccaucucauu

SEQ ID NO: 404064 - RNA, 24 nt, Artificial Sequence
  Synthetic
uggcaauauuaauaccaucucauu

SEQ ID NO: 404065 - RNA, 18 nt, Artificial Sequence
  Synthetic
ugcuauccaucucucauu

SEQ ID NO: 404066 - RNA, 19 nt, Artificial Sequence
  Synthetic
cugcuauccaucucucauu

SEQ ID NO: 404067 - RNA, 20 nt, Artificial Sequence
  Synthetic
gcugcuauccaucucucauu

SEQ ID NO: 404068 - RNA, 21 nt, Artificial Sequence
  Synthetic
ggcugcuauccaucucucauu

SEQ ID NO: 404069 - RNA, 22 nt, Artificial Sequence
  Synthetic
aggcugcuauccaucucucauu

SEQ ID NO: 404070 - RNA, 23 nt, Artificial Sequence
  Synthetic
gaggcugcuauccaucucucauu

SEQ ID NO: 404071 - RNA, 24 nt, Artificial Sequence
  Synthetic
ggaggcugcuauccaucucucauu

SEQ ID NO: 404072 - RNA, 18 nt, Artificial Sequence
  Synthetic
gacuacacaugucucauu

SEQ ID NO: 404073 - RNA, 19 nt, Artificial Sequence
  Synthetic
agacuacacaugucucauu

SEQ ID NO: 404074 - RNA, 20 nt, Artificial Sequence
  Synthetic
aagacuacacaugucucauu

SEQ ID NO: 404075 - RNA, 21 nt, Artificial Sequence
  Synthetic
uaagacuacacaugucucauu

SEQ ID NO: 404076 - RNA, 22 nt, Artificial Sequence
  Synthetic
guaagacuacacaugucucauu

SEQ ID NO: 404077 - RNA, 23 nt, Artificial Sequence
  Synthetic
gguaagacuacacaugucucauu

SEQ ID NO: 404078 - RNA, 24 nt, Artificial Sequence
  Synthetic
agguaagacuacacaugucucauu

SEQ ID NO: 404079 - RNA, 18 nt, Artificial Sequence
  Synthetic
ugaucuaugugucucauu

SEQ ID NO: 404080 - RNA, 19 nt, Artificial Sequence
  Synthetic
cugaucuaugugucucauu

SEQ ID NO: 404081 - RNA, 20 nt, Artificial Sequence
  Synthetic
ucugaucuaugugucucauu

SEQ ID NO: 404082 - RNA, 21 nt, Artificial Sequence
  Synthetic
gucugaucuaugugucucauu

SEQ ID NO: 404083 - RNA, 22 nt, Artificial Sequence
  Synthetic
ugucugaucuaugugucucauu

SEQ ID NO: 404084 - RNA, 23 nt, Artificial Sequence
  Synthetic
augucugaucuaugugucucauu

SEQ ID NO: 404085 - RNA, 24 nt, Artificial Sequence
  Synthetic
caugucugaucuaugugucucauu

SEQ ID NO: 404086 - RNA, 18 nt, Artificial Sequence
  Synthetic
agagagggacuucucauu

SEQ ID NO: 404087 - RNA, 19 nt, Artificial Sequence
  Synthetic
gagagagggacuucucauu

SEQ ID NO: 404088 - RNA, 20 nt, Artificial Sequence
  Synthetic
ggagagagggacuucucauu

SEQ ID NO: 404089 - RNA, 21 nt, Artificial Sequence
  Synthetic
uggagagagggacuucucauu

SEQ ID NO: 404090 - RNA, 22 nt, Artificial Sequence
  Synthetic
uuggagagagggacuucucauu

SEQ ID NO: 404091 - RNA, 23 nt, Artificial Sequence
  Synthetic
cuuggagagagggacuucucauu

SEQ ID NO: 404092 - RNA, 24 nt, Artificial Sequence
  Synthetic
acuuggagagagggacuucucauu

SEQ ID NO: 404093 - RNA, 18 nt, Artificial Sequence
  Synthetic
auucuuguccuucucauu

SEQ ID NO: 404094 - RNA, 19 nt, Artificial Sequence
  Synthetic
gauucuuguccuucucauu

SEQ ID NO: 404095 - RNA, 20 nt, Artificial Sequence
  Synthetic
ggauucuuguccuucucauu

SEQ ID NO: 404096 - RNA, 21 nt, Artificial Sequence
  Synthetic
uggauucuuguccuucucauu

SEQ ID NO: 404097 - RNA, 22 nt, Artificial Sequence
  Synthetic
cuggauucuuguccuucucauu

SEQ ID NO: 404098 - RNA, 23 nt, Artificial Sequence
  Synthetic
acuggauucuuguccuucucauu

SEQ ID NO: 404099 - RNA, 24 nt, Artificial Sequence
  Synthetic
gacuggauucuuguccuucucauu

SEQ ID NO: 404100 - RNA, 18 nt, Artificial Sequence
  Synthetic
ggagaucaggaagucauu

SEQ ID NO: 404101 - RNA, 19 nt, Artificial Sequence
  Synthetic
aggagaucaggaagucauu

SEQ ID NO: 404102 - RNA, 20 nt, Artificial Sequence
  Synthetic
caggagaucaggaagucauu

SEQ ID NO: 404103 - RNA, 21 nt, Artificial Sequence
  Synthetic
ccaggagaucaggaagucauu

SEQ ID NO: 404104 - RNA, 22 nt, Artificial Sequence
  Synthetic
accaggagaucaggaagucauu

SEQ ID NO: 404105 - RNA, 23 nt, Artificial Sequence
  Synthetic
uaccaggagaucaggaagucauu

SEQ ID NO: 404106 - RNA, 24 nt, Artificial Sequence
  Synthetic
auaccaggagaucaggaagucauu

SEQ ID NO: 404107 - RNA, 18 nt, Artificial Sequence
  Synthetic
gcccucuaugaagucauu

SEQ ID NO: 404108 - RNA, 19 nt, Artificial Sequence
  Synthetic
agcccucuaugaagucauu

SEQ ID NO: 404109 - RNA, 20 nt, Artificial Sequence
  Synthetic
cagcccucuaugaagucauu

SEQ ID NO: 404110 - RNA, 21 nt, Artificial Sequence
  Synthetic
gcagcccucuaugaagucauu

SEQ ID NO: 404111 - RNA, 22 nt, Artificial Sequence
  Synthetic
agcagcccucuaugaagucauu

SEQ ID NO: 404112 - RNA, 23 nt, Artificial Sequence
  Synthetic
aagcagcccucuaugaagucauu

SEQ ID NO: 404113 - RNA, 24 nt, Artificial Sequence
  Synthetic
uaagcagcccucuaugaagucauu

SEQ ID NO: 404114 - RNA, 18 nt, Artificial Sequence
  Synthetic
auauuuucauaagucauu

SEQ ID NO: 404115 - RNA, 19 nt, Artificial Sequence
  Synthetic
aauauuuucauaagucauu

SEQ ID NO: 404116 - RNA, 20 nt, Artificial Sequence
  Synthetic
aaauauuuucauaagucauu

SEQ ID NO: 404117 - RNA, 21 nt, Artificial Sequence
  Synthetic
aaaauauuuucauaagucauu

SEQ ID NO: 404118 - RNA, 22 nt, Artificial Sequence
  Synthetic
uaaaauauuuucauaagucauu

SEQ ID NO: 404119 - RNA, 23 nt, Artificial Sequence
  Synthetic
uuaaaauauuuucauaagucauu

SEQ ID NO: 404120 - RNA, 24 nt, Artificial Sequence
  Synthetic
uuuaaaauauuuucauaagucauu

SEQ ID NO: 404121 - RNA, 18 nt, Artificial Sequence
  Synthetic
guaaauguaagagucauu

SEQ ID NO: 404122 - RNA, 19 nt, Artificial Sequence
  Synthetic
uguaaauguaagagucauu

SEQ ID NO: 404123 - RNA, 20 nt, Artificial Sequence
  Synthetic
auguaaauguaagagucauu

SEQ ID NO: 404124 - RNA, 21 nt, Artificial Sequence
  Synthetic
aauguaaauguaagagucauu

SEQ ID NO: 404125 - RNA, 22 nt, Artificial Sequence
  Synthetic
uaauguaaauguaagagucauu

SEQ ID NO: 404126 - RNA, 23 nt, Artificial Sequence
  Synthetic
uuaauguaaauguaagagucauu

SEQ ID NO: 404127 - RNA, 24 nt, Artificial Sequence
  Synthetic
auuaauguaaauguaagagucauu

SEQ ID NO: 404128 - RNA, 18 nt, Artificial Sequence
  Synthetic
auguacccaguagucauu

SEQ ID NO: 404129 - RNA, 19 nt, Artificial Sequence
  Synthetic
uauguacccaguagucauu

SEQ ID NO: 404130 - RNA, 20 nt, Artificial Sequence
  Synthetic
uuauguacccaguagucauu

SEQ ID NO: 404131 - RNA, 21 nt, Artificial Sequence
  Synthetic
guuauguacccaguagucauu

SEQ ID NO: 404132 - RNA, 22 nt, Artificial Sequence
  Synthetic
cguuauguacccaguagucauu

SEQ ID NO: 404133 - RNA, 23 nt, Artificial Sequence
  Synthetic
ucguuauguacccaguagucauu

SEQ ID NO: 404134 - RNA, 24 nt, Artificial Sequence
  Synthetic
uucguuauguacccaguagucauu

SEQ ID NO: 404135 - RNA, 18 nt, Artificial Sequence
  Synthetic
aaaagagggguagucauu

SEQ ID NO: 404136 - RNA, 19 nt, Artificial Sequence
  Synthetic
caaaagagggguagucauu

SEQ ID NO: 404137 - RNA, 20 nt, Artificial Sequence
  Synthetic
ccaaaagagggguagucauu

SEQ ID NO: 404138 - RNA, 21 nt, Artificial Sequence
  Synthetic
accaaaagagggguagucauu

SEQ ID NO: 404139 - RNA, 22 nt, Artificial Sequence
  Synthetic
caccaaaagagggguagucauu

SEQ ID NO: 404140 - RNA, 23 nt, Artificial Sequence
  Synthetic
ucaccaaaagagggguagucauu

SEQ ID NO: 404141 - RNA, 24 nt, Artificial Sequence
  Synthetic
cucaccaaaagagggguagucauu

SEQ ID NO: 404142 - RNA, 18 nt, Artificial Sequence
  Synthetic
uacauuuccaaggucauu

SEQ ID NO: 404143 - RNA, 19 nt, Artificial Sequence
  Synthetic
uuacauuuccaaggucauu

SEQ ID NO: 404144 - RNA, 20 nt, Artificial Sequence
  Synthetic
guuacauuuccaaggucauu

SEQ ID NO: 404145 - RNA, 21 nt, Artificial Sequence
  Synthetic
aguuacauuuccaaggucauu

SEQ ID NO: 404146 - RNA, 22 nt, Artificial Sequence
  Synthetic
caguuacauuuccaaggucauu

SEQ ID NO: 404147 - RNA, 23 nt, Artificial Sequence
  Synthetic
gcaguuacauuuccaaggucauu

SEQ ID NO: 404148 - RNA, 24 nt, Artificial Sequence
  Synthetic
agcaguuacauuuccaaggucauu

SEQ ID NO: 404149 - RNA, 18 nt, Artificial Sequence
  Synthetic
augcauguuugggucauu

SEQ ID NO: 404150 - RNA, 19 nt, Artificial Sequence
  Synthetic
aaugcauguuugggucauu

SEQ ID NO: 404151 - RNA, 20 nt, Artificial Sequence
  Synthetic
aaaugcauguuugggucauu

SEQ ID NO: 404152 - RNA, 21 nt, Artificial Sequence
  Synthetic
aaaaugcauguuugggucauu

SEQ ID NO: 404153 - RNA, 22 nt, Artificial Sequence
  Synthetic
gaaaaugcauguuugggucauu

SEQ ID NO: 404154 - RNA, 23 nt, Artificial Sequence
  Synthetic
ugaaaaugcauguuugggucauu

SEQ ID NO: 404155 - RNA, 24 nt, Artificial Sequence
  Synthetic
gugaaaaugcauguuugggucauu

SEQ ID NO: 404156 - RNA, 18 nt, Artificial Sequence
  Synthetic
aauuaagaugaugucauu

SEQ ID NO: 404157 - RNA, 19 nt, Artificial Sequence
  Synthetic
caauuaagaugaugucauu

SEQ ID NO: 404158 - RNA, 20 nt, Artificial Sequence
  Synthetic
acaauuaagaugaugucauu

SEQ ID NO: 404159 - RNA, 21 nt, Artificial Sequence
  Synthetic
uacaauuaagaugaugucauu

SEQ ID NO: 404160 - RNA, 22 nt, Artificial Sequence
  Synthetic
auacaauuaagaugaugucauu

SEQ ID NO: 404161 - RNA, 23 nt, Artificial Sequence
  Synthetic
uauacaauuaagaugaugucauu

SEQ ID NO: 404162 - RNA, 24 nt, Artificial Sequence
  Synthetic
auauacaauuaagaugaugucauu

SEQ ID NO: 404163 - RNA, 18 nt, Artificial Sequence
  Synthetic
auucauggugaugucauu

SEQ ID NO: 404164 - RNA, 19 nt, Artificial Sequence
  Synthetic
aauucauggugaugucauu

SEQ ID NO: 404165 - RNA, 20 nt, Artificial Sequence
  Synthetic
aaauucauggugaugucauu

SEQ ID NO: 404166 - RNA, 21 nt, Artificial Sequence
  Synthetic
uaaauucauggugaugucauu

SEQ ID NO: 404167 - RNA, 22 nt, Artificial Sequence
  Synthetic
cuaaauucauggugaugucauu

SEQ ID NO: 404168 - RNA, 23 nt, Artificial Sequence
  Synthetic
ccuaaauucauggugaugucauu

SEQ ID NO: 404169 - RNA, 24 nt, Artificial Sequence
  Synthetic
cccuaaauucauggugaugucauu

SEQ ID NO: 404170 - RNA, 18 nt, Artificial Sequence
  Synthetic
ugauaguaaucugucauu

SEQ ID NO: 404171 - RNA, 19 nt, Artificial Sequence
  Synthetic
uugauaguaaucugucauu

SEQ ID NO: 404172 - RNA, 20 nt, Artificial Sequence
  Synthetic
auugauaguaaucugucauu

SEQ ID NO: 404173 - RNA, 21 nt, Artificial Sequence
  Synthetic
cauugauaguaaucugucauu

SEQ ID NO: 404174 - RNA, 22 nt, Artificial Sequence
  Synthetic
acauugauaguaaucugucauu

SEQ ID NO: 404175 - RNA, 23 nt, Artificial Sequence
  Synthetic
cacauugauaguaaucugucauu

SEQ ID NO: 404176 - RNA, 24 nt, Artificial Sequence
  Synthetic
ucacauugauaguaaucugucauu

SEQ ID NO: 404177 - RNA, 18 nt, Artificial Sequence
  Synthetic
uagcuuugguaauucauu

SEQ ID NO: 404178 - RNA, 19 nt, Artificial Sequence
  Synthetic
guagcuuugguaauucauu

SEQ ID NO: 404179 - RNA, 20 nt, Artificial Sequence
  Synthetic
gguagcuuugguaauucauu

SEQ ID NO: 404180 - RNA, 21 nt, Artificial Sequence
  Synthetic
agguagcuuugguaauucauu

SEQ ID NO: 404181 - RNA, 22 nt, Artificial Sequence
  Synthetic
gagguagcuuugguaauucauu

SEQ ID NO: 404182 - RNA, 23 nt, Artificial Sequence
  Synthetic
ugagguagcuuugguaauucauu

SEQ ID NO: 404183 - RNA, 24 nt, Artificial Sequence
  Synthetic
cugagguagcuuugguaauucauu

SEQ ID NO: 404184 - RNA, 18 nt, Artificial Sequence
  Synthetic
auuuaaaauugauucauu

SEQ ID NO: 404185 - RNA, 19 nt, Artificial Sequence
  Synthetic
uauuuaaaauugauucauu

SEQ ID NO: 404186 - RNA, 20 nt, Artificial Sequence
  Synthetic
auauuuaaaauugauucauu

SEQ ID NO: 404187 - RNA, 21 nt, Artificial Sequence
  Synthetic
uauauuuaaaauugauucauu

SEQ ID NO: 404188 - RNA, 22 nt, Artificial Sequence
  Synthetic
auauauuuaaaauugauucauu

SEQ ID NO: 404189 - RNA, 23 nt, Artificial Sequence
  Synthetic
uauauauuuaaaauugauucauu

SEQ ID NO: 404190 - RNA, 24 nt, Artificial Sequence
  Synthetic
auauauauuuaaaauugauucauu

SEQ ID NO: 404191 - RNA, 18 nt, Artificial Sequence
  Synthetic
cauaguuuuauauucauu

SEQ ID NO: 404192 - RNA, 19 nt, Artificial Sequence
  Synthetic
gcauaguuuuauauucauu

SEQ ID NO: 404193 - RNA, 20 nt, Artificial Sequence
  Synthetic
ugcauaguuuuauauucauu

SEQ ID NO: 404194 - RNA, 21 nt, Artificial Sequence
  Synthetic
gugcauaguuuuauauucauu

SEQ ID NO: 404195 - RNA, 22 nt, Artificial Sequence
  Synthetic
ugugcauaguuuuauauucauu

SEQ ID NO: 404196 - RNA, 23 nt, Artificial Sequence
  Synthetic
cugugcauaguuuuauauucauu

SEQ ID NO: 404197 - RNA, 24 nt, Artificial Sequence
  Synthetic
acugugcauaguuuuauauucauu

SEQ ID NO: 404198 - RNA, 18 nt, Artificial Sequence
  Synthetic
uauaggcccuuauucauu

SEQ ID NO: 404199 - RNA, 19 nt, Artificial Sequence
  Synthetic
auauaggcccuuauucauu

SEQ ID NO: 404200 - RNA, 20 nt, Artificial Sequence
  Synthetic
uauauaggcccuuauucauu

SEQ ID NO: 404201 - RNA, 21 nt, Artificial Sequence
  Synthetic
cuauauaggcccuuauucauu

SEQ ID NO: 404202 - RNA, 22 nt, Artificial Sequence
  Synthetic
gcuauauaggcccuuauucauu

SEQ ID NO: 404203 - RNA, 23 nt, Artificial Sequence
  Synthetic
ugcuauauaggcccuuauucauu

SEQ ID NO: 404204 - RNA, 24 nt, Artificial Sequence
  Synthetic
gugcuauauaggcccuuauucauu

SEQ ID NO: 404205 - RNA, 18 nt, Artificial Sequence
  Synthetic
uacagauauuacuucauu

SEQ ID NO: 404206 - RNA, 19 nt, Artificial Sequence
  Synthetic
cuacagauauuacuucauu

SEQ ID NO: 404207 - RNA, 20 nt, Artificial Sequence
  Synthetic
ccuacagauauuacuucauu

SEQ ID NO: 404208 - RNA, 21 nt, Artificial Sequence
  Synthetic
accuacagauauuacuucauu

SEQ ID NO: 404209 - RNA, 22 nt, Artificial Sequence
  Synthetic
gaccuacagauauuacuucauu

SEQ ID NO: 404210 - RNA, 23 nt, Artificial Sequence
  Synthetic
ugaccuacagauauuacuucauu

SEQ ID NO: 404211 - RNA, 24 nt, Artificial Sequence
  Synthetic
augaccuacagauauuacuucauu

SEQ ID NO: 404212 - RNA, 18 nt, Artificial Sequence
  Synthetic
ugcauuccuuccuucauu

SEQ ID NO: 404213 - RNA, 19 nt, Artificial Sequence
  Synthetic
augcauuccuuccuucauu

SEQ ID NO: 404214 - RNA, 20 nt, Artificial Sequence
  Synthetic
caugcauuccuuccuucauu

SEQ ID NO: 404215 - RNA, 21 nt, Artificial Sequence
  Synthetic
acaugcauuccuuccuucauu

SEQ ID NO: 404216 - RNA, 22 nt, Artificial Sequence
  Synthetic
aacaugcauuccuuccuucauu

SEQ ID NO: 404217 - RNA, 23 nt, Artificial Sequence
  Synthetic
aaacaugcauuccuuccuucauu

SEQ ID NO: 404218 - RNA, 24 nt, Artificial Sequence
  Synthetic
aaaacaugcauuccuuccuucauu

SEQ ID NO: 404219 - RNA, 18 nt, Artificial Sequence
  Synthetic
aucaugguauucuucauu

SEQ ID NO: 404220 - RNA, 19 nt, Artificial Sequence
  Synthetic
uaucaugguauucuucauu

SEQ ID NO: 404221 - RNA, 20 nt, Artificial Sequence
  Synthetic
guaucaugguauucuucauu

SEQ ID NO: 404222 - RNA, 21 nt, Artificial Sequence
  Synthetic
gguaucaugguauucuucauu

SEQ ID NO: 404223 - RNA, 22 nt, Artificial Sequence
  Synthetic
ggguaucaugguauucuucauu

SEQ ID NO: 404224 - RNA, 23 nt, Artificial Sequence
  Synthetic
aggguaucaugguauucuucauu

SEQ ID NO: 404225 - RNA, 24 nt, Artificial Sequence
  Synthetic
uaggguaucaugguauucuucauu

SEQ ID NO: 404226 - RNA, 18 nt, Artificial Sequence
  Synthetic
uaucuauuucaguucauu

SEQ ID NO: 404227 - RNA, 19 nt, Artificial Sequence
  Synthetic
auaucuauuucaguucauu

SEQ ID NO: 404228 - RNA, 20 nt, Artificial Sequence
  Synthetic
aauaucuauuucaguucauu

SEQ ID NO: 404229 - RNA, 21 nt, Artificial Sequence
  Synthetic
uaauaucuauuucaguucauu

SEQ ID NO: 404230 - RNA, 22 nt, Artificial Sequence
  Synthetic
uuaauaucuauuucaguucauu

SEQ ID NO: 404231 - RNA, 23 nt, Artificial Sequence
  Synthetic
cuuaauaucuauuucaguucauu

SEQ ID NO: 404232 - RNA, 24 nt, Artificial Sequence
  Synthetic
acuuaauaucuauuucaguucauu

SEQ ID NO: 404233 - RNA, 18 nt, Artificial Sequence
  Synthetic
cuacuuaauagguucauu

SEQ ID NO: 404234 - RNA, 19 nt, Artificial Sequence
  Synthetic
ucuacuuaauagguucauu

SEQ ID NO: 404235 - RNA, 20 nt, Artificial Sequence
  Synthetic
aucuacuuaauagguucauu

SEQ ID NO: 404236 - RNA, 21 nt, Artificial Sequence
  Synthetic
caucuacuuaauagguucauu

SEQ ID NO: 404237 - RNA, 22 nt, Artificial Sequence
  Synthetic
acaucuacuuaauagguucauu

SEQ ID NO: 404238 - RNA, 23 nt, Artificial Sequence
  Synthetic
gacaucuacuuaauagguucauu

SEQ ID NO: 404239 - RNA, 24 nt, Artificial Sequence
  Synthetic
ggacaucuacuuaauagguucauu

SEQ ID NO: 404240 - RNA, 18 nt, Artificial Sequence
  Synthetic
gaguguauuguguucauu

SEQ ID NO: 404241 - RNA, 19 nt, Artificial Sequence
  Synthetic
ggaguguauuguguucauu

SEQ ID NO: 404242 - RNA, 20 nt, Artificial Sequence
  Synthetic
aggaguguauuguguucauu

SEQ ID NO: 404243 - RNA, 21 nt, Artificial Sequence
  Synthetic
uaggaguguauuguguucauu

SEQ ID NO: 404244 - RNA, 22 nt, Artificial Sequence
  Synthetic
auaggaguguauuguguucauu

SEQ ID NO: 404245 - RNA, 23 nt, Artificial Sequence
  Synthetic
aauaggaguguauuguguucauu

SEQ ID NO: 404246 - RNA, 24 nt, Artificial Sequence
  Synthetic
gaauaggaguguauuguguucauu

SEQ ID NO: 404247 - RNA, 18 nt, Artificial Sequence
  Synthetic
uacucuuaaaauuucauu

SEQ ID NO: 404248 - RNA, 19 nt, Artificial Sequence
  Synthetic
uuacucuuaaaauuucauu

SEQ ID NO: 404249 - RNA, 20 nt, Artificial Sequence
  Synthetic
uuuacucuuaaaauuucauu

SEQ ID NO: 404250 - RNA, 21 nt, Artificial Sequence
  Synthetic
cuuuacucuuaaaauuucauu

SEQ ID NO: 404251 - RNA, 22 nt, Artificial Sequence
  Synthetic
acuuuacucuuaaaauuucauu

SEQ ID NO: 404252 - RNA, 23 nt, Artificial Sequence
  Synthetic
uacuuuacucuuaaaauuucauu

SEQ ID NO: 404253 - RNA, 24 nt, Artificial Sequence
  Synthetic
auacuuuacucuuaaaauuucauu

SEQ ID NO: 404254 - RNA, 18 nt, Artificial Sequence
  Synthetic
gcuuccuuuaauuucauu

SEQ ID NO: 404255 - RNA, 19 nt, Artificial Sequence
  Synthetic
ugcuuccuuuaauuucauu

SEQ ID NO: 404256 - RNA, 20 nt, Artificial Sequence
  Synthetic
gugcuuccuuuaauuucauu

SEQ ID NO: 404257 - RNA, 21 nt, Artificial Sequence
  Synthetic
cgugcuuccuuuaauuucauu

SEQ ID NO: 404258 - RNA, 22 nt, Artificial Sequence
  Synthetic
acgugcuuccuuuaauuucauu

SEQ ID NO: 404259 - RNA, 23 nt, Artificial Sequence
  Synthetic
uacgugcuuccuuuaauuucauu

SEQ ID NO: 404260 - RNA, 24 nt, Artificial Sequence
  Synthetic
auacgugcuuccuuuaauuucauu

SEQ ID NO: 404261 - RNA, 18 nt, Artificial Sequence
  Synthetic
gcuuacuuauauuucauu

SEQ ID NO: 404262 - RNA, 19 nt, Artificial Sequence
  Synthetic
agcuuacuuauauuucauu

SEQ ID NO: 404263 - RNA, 20 nt, Artificial Sequence
  Synthetic
aagcuuacuuauauuucauu

SEQ ID NO: 404264 - RNA, 21 nt, Artificial Sequence
  Synthetic
aaagcuuacuuauauuucauu

SEQ ID NO: 404265 - RNA, 22 nt, Artificial Sequence
  Synthetic
caaagcuuacuuauauuucauu

SEQ ID NO: 404266 - RNA, 23 nt, Artificial Sequence
  Synthetic
ccaaagcuuacuuauauuucauu

SEQ ID NO: 404267 - RNA, 24 nt, Artificial Sequence
  Synthetic
uccaaagcuuacuuauauuucauu

SEQ ID NO: 404268 - RNA, 18 nt, Artificial Sequence
  Synthetic
uuuagauauccuuucauu

SEQ ID NO: 404269 - RNA, 19 nt, Artificial Sequence
  Synthetic
auuuagauauccuuucauu

SEQ ID NO: 404270 - RNA, 20 nt, Artificial Sequence
  Synthetic
uauuuagauauccuuucauu

SEQ ID NO: 404271 - RNA, 21 nt, Artificial Sequence
  Synthetic
uuauuuagauauccuuucauu

SEQ ID NO: 404272 - RNA, 22 nt, Artificial Sequence
  Synthetic
cuuauuuagauauccuuucauu

SEQ ID NO: 404273 - RNA, 23 nt, Artificial Sequence
  Synthetic
acuuauuuagauauccuuucauu

SEQ ID NO: 404274 - RNA, 24 nt, Artificial Sequence
  Synthetic
aacuuauuuagauauccuuucauu

SEQ ID NO: 404275 - RNA, 18 nt, Artificial Sequence
  Synthetic
auccauugaaguuucauu

SEQ ID NO: 404276 - RNA, 19 nt, Artificial Sequence
  Synthetic
cauccauugaaguuucauu

SEQ ID NO: 404277 - RNA, 20 nt, Artificial Sequence
  Synthetic
ucauccauugaaguuucauu

SEQ ID NO: 404278 - RNA, 21 nt, Artificial Sequence
  Synthetic
uucauccauugaaguuucauu

SEQ ID NO: 404279 - RNA, 22 nt, Artificial Sequence
  Synthetic
cuucauccauugaaguuucauu

SEQ ID NO: 404280 - RNA, 23 nt, Artificial Sequence
  Synthetic
ucuucauccauugaaguuucauu

SEQ ID NO: 404281 - RNA, 24 nt, Artificial Sequence
  Synthetic
cucuucauccauugaaguuucauu

SEQ ID NO: 404282 - RNA, 18 nt, Artificial Sequence
  Synthetic
auugguauggguuucauu

SEQ ID NO: 404283 - RNA, 19 nt, Artificial Sequence
  Synthetic
aauugguauggguuucauu

SEQ ID NO: 404284 - RNA, 20 nt, Artificial Sequence
  Synthetic
uaauugguauggguuucauu

SEQ ID NO: 404285 - RNA, 21 nt, Artificial Sequence
  Synthetic
uuaauugguauggguuucauu

SEQ ID NO: 404286 - RNA, 22 nt, Artificial Sequence
  Synthetic
guuaauugguauggguuucauu

SEQ ID NO: 404287 - RNA, 23 nt, Artificial Sequence
  Synthetic
uguuaauugguauggguuucauu

SEQ ID NO: 404288 - RNA, 24 nt, Artificial Sequence
  Synthetic
cuguuaauugguauggguuucauu

SEQ ID NO: 404289 - RNA, 18 nt, Artificial Sequence
  Synthetic
uuugaguaugguuucauu

SEQ ID NO: 404290 - RNA, 19 nt, Artificial Sequence
  Synthetic
uuuugaguaugguuucauu

SEQ ID NO: 404291 - RNA, 20 nt, Artificial Sequence
  Synthetic
cuuuugaguaugguuucauu

SEQ ID NO: 404292 - RNA, 21 nt, Artificial Sequence
  Synthetic
acuuuugaguaugguuucauu

SEQ ID NO: 404293 - RNA, 22 nt, Artificial Sequence
  Synthetic
cacuuuugaguaugguuucauu

SEQ ID NO: 404294 - RNA, 23 nt, Artificial Sequence
  Synthetic
ccacuuuugaguaugguuucauu

SEQ ID NO: 404295 - RNA, 24 nt, Artificial Sequence
  Synthetic
uccacuuuugaguaugguuucauu

SEQ ID NO: 404296 - RNA, 18 nt, Artificial Sequence
  Synthetic
auaucagaacuuuucauu

SEQ ID NO: 404297 - RNA, 19 nt, Artificial Sequence
  Synthetic
aauaucagaacuuuucauu

SEQ ID NO: 404298 - RNA, 20 nt, Artificial Sequence
  Synthetic
aaauaucagaacuuuucauu

SEQ ID NO: 404299 - RNA, 21 nt, Artificial Sequence
  Synthetic
gaaauaucagaacuuuucauu

SEQ ID NO: 404300 - RNA, 22 nt, Artificial Sequence
  Synthetic
ugaaauaucagaacuuuucauu

SEQ ID NO: 404301 - RNA, 23 nt, Artificial Sequence
  Synthetic
cugaaauaucagaacuuuucauu

SEQ ID NO: 404302 - RNA, 24 nt, Artificial Sequence
  Synthetic
ucugaaauaucagaacuuuucauu

SEQ ID NO: 404303 - RNA, 18 nt, Artificial Sequence
  Synthetic
uaagcauuccuuuucauu

SEQ ID NO: 404304 - RNA, 19 nt, Artificial Sequence
  Synthetic
uuaagcauuccuuuucauu

SEQ ID NO: 404305 - RNA, 20 nt, Artificial Sequence
  Synthetic
auuaagcauuccuuuucauu

SEQ ID NO: 404306 - RNA, 21 nt, Artificial Sequence
  Synthetic
aauuaagcauuccuuuucauu

SEQ ID NO: 404307 - RNA, 22 nt, Artificial Sequence
  Synthetic
aaauuaagcauuccuuuucauu

SEQ ID NO: 404308 - RNA, 23 nt, Artificial Sequence
  Synthetic
gaaauuaagcauuccuuuucauu

SEQ ID NO: 404309 - RNA, 24 nt, Artificial Sequence
  Synthetic
ugaaauuaagcauuccuuuucauu

SEQ ID NO: 404310 - RNA, 18 nt, Artificial Sequence
  Synthetic
ucugggcuucuuuucauu

SEQ ID NO: 404311 - RNA, 19 nt, Artificial Sequence
  Synthetic
uucugggcuucuuuucauu

SEQ ID NO: 404312 - RNA, 20 nt, Artificial Sequence
  Synthetic
cuucugggcuucuuuucauu

SEQ ID NO: 404313 - RNA, 21 nt, Artificial Sequence
  Synthetic
acuucugggcuucuuuucauu

SEQ ID NO: 404314 - RNA, 22 nt, Artificial Sequence
  Synthetic
cacuucugggcuucuuuucauu

SEQ ID NO: 404315 - RNA, 23 nt, Artificial Sequence
  Synthetic
ucacuucugggcuucuuuucauu

SEQ ID NO: 404316 - RNA, 24 nt, Artificial Sequence
  Synthetic
uucacuucugggcuucuuuucauu

SEQ ID NO: 404317 - RNA, 18 nt, Artificial Sequence
  Synthetic
agaauucaauuuuucauu

SEQ ID NO: 404318 - RNA, 19 nt, Artificial Sequence
  Synthetic
cagaauucaauuuuucauu

SEQ ID NO: 404319 - RNA, 20 nt, Artificial Sequence
  Synthetic
ucagaauucaauuuuucauu

SEQ ID NO: 404320 - RNA, 21 nt, Artificial Sequence
  Synthetic
gucagaauucaauuuuucauu

SEQ ID NO: 404321 - RNA, 22 nt, Artificial Sequence
  Synthetic
agucagaauucaauuuuucauu

SEQ ID NO: 404322 - RNA, 23 nt, Artificial Sequence
  Synthetic
cagucagaauucaauuuuucauu

SEQ ID NO: 404323 - RNA, 24 nt, Artificial Sequence
  Synthetic
gcagucagaauucaauuuuucauu

SEQ ID NO: 404324 - RNA, 18 nt, Artificial Sequence
  Synthetic
aagaauuuaaaaaagauu

SEQ ID NO: 404325 - RNA, 19 nt, Artificial Sequence
  Synthetic
caagaauuuaaaaaagauu

SEQ ID NO: 404326 - RNA, 20 nt, Artificial Sequence
  Synthetic
gcaagaauuuaaaaaagauu

SEQ ID NO: 404327 - RNA, 21 nt, Artificial Sequence
  Synthetic
ugcaagaauuuaaaaaagauu

SEQ ID NO: 404328 - RNA, 22 nt, Artificial Sequence
  Synthetic
augcaagaauuuaaaaaagauu

SEQ ID NO: 404329 - RNA, 23 nt, Artificial Sequence
  Synthetic
gaugcaagaauuuaaaaaagauu

SEQ ID NO: 404330 - RNA, 24 nt, Artificial Sequence
  Synthetic
ugaugcaagaauuuaaaaaagauu

SEQ ID NO: 404331 - RNA, 18 nt, Artificial Sequence
  Synthetic
ugacauuugcaaaagauu

SEQ ID NO: 404332 - RNA, 19 nt, Artificial Sequence
  Synthetic
gugacauuugcaaaagauu

SEQ ID NO: 404333 - RNA, 20 nt, Artificial Sequence
  Synthetic
ggugacauuugcaaaagauu

SEQ ID NO: 404334 - RNA, 21 nt, Artificial Sequence
  Synthetic
aggugacauuugcaaaagauu

SEQ ID NO: 404335 - RNA, 22 nt, Artificial Sequence
  Synthetic
aaggugacauuugcaaaagauu

SEQ ID NO: 404336 - RNA, 23 nt, Artificial Sequence
  Synthetic
gaaggugacauuugcaaaagauu

SEQ ID NO: 404337 - RNA, 24 nt, Artificial Sequence
  Synthetic
agaaggugacauuugcaaaagauu

SEQ ID NO: 404338 - RNA, 18 nt, Artificial Sequence
  Synthetic
ugcacauccacaaagauu

SEQ ID NO: 404339 - RNA, 19 nt, Artificial Sequence
  Synthetic
augcacauccacaaagauu

SEQ ID NO: 404340 - RNA, 20 nt, Artificial Sequence
  Synthetic
uaugcacauccacaaagauu

SEQ ID NO: 404341 - RNA, 21 nt, Artificial Sequence
  Synthetic
uuaugcacauccacaaagauu

SEQ ID NO: 404342 - RNA, 22 nt, Artificial Sequence
  Synthetic
auuaugcacauccacaaagauu

SEQ ID NO: 404343 - RNA, 23 nt, Artificial Sequence
  Synthetic
aauuaugcacauccacaaagauu

SEQ ID NO: 404344 - RNA, 24 nt, Artificial Sequence
  Synthetic
caauuaugcacauccacaaagauu

SEQ ID NO: 404345 - RNA, 18 nt, Artificial Sequence
  Synthetic
caugaauagagaaagauu

SEQ ID NO: 404346 - RNA, 19 nt, Artificial Sequence
  Synthetic
gcaugaauagagaaagauu

SEQ ID NO: 404347 - RNA, 20 nt, Artificial Sequence
  Synthetic
agcaugaauagagaaagauu

SEQ ID NO: 404348 - RNA, 21 nt, Artificial Sequence
  Synthetic
aagcaugaauagagaaagauu

SEQ ID NO: 404349 - RNA, 22 nt, Artificial Sequence
  Synthetic
aaagcaugaauagagaaagauu

SEQ ID NO: 404350 - RNA, 23 nt, Artificial Sequence
  Synthetic
caaagcaugaauagagaaagauu

SEQ ID NO: 404351 - RNA, 24 nt, Artificial Sequence
  Synthetic
acaaagcaugaauagagaaagauu

SEQ ID NO: 404352 - RNA, 18 nt, Artificial Sequence
  Synthetic
uggaaaaguagaaagauu

SEQ ID NO: 404353 - RNA, 19 nt, Artificial Sequence
  Synthetic
uuggaaaaguagaaagauu

SEQ ID NO: 404354 - RNA, 20 nt, Artificial Sequence
  Synthetic
uuuggaaaaguagaaagauu

SEQ ID NO: 404355 - RNA, 21 nt, Artificial Sequence
  Synthetic
auuuggaaaaguagaaagauu

SEQ ID NO: 404356 - RNA, 22 nt, Artificial Sequence
  Synthetic
aauuuggaaaaguagaaagauu

SEQ ID NO: 404357 - RNA, 23 nt, Artificial Sequence
  Synthetic
caauuuggaaaaguagaaagauu

SEQ ID NO: 404358 - RNA, 24 nt, Artificial Sequence
  Synthetic
acaauuuggaaaaguagaaagauu

SEQ ID NO: 404359 - RNA, 18 nt, Artificial Sequence
  Synthetic
acauaaaacugaaagauu

SEQ ID NO: 404360 - RNA, 19 nt, Artificial Sequence
  Synthetic
cacauaaaacugaaagauu

SEQ ID NO: 404361 - RNA, 20 nt, Artificial Sequence
  Synthetic
ucacauaaaacugaaagauu

SEQ ID NO: 404362 - RNA, 21 nt, Artificial Sequence
  Synthetic
aucacauaaaacugaaagauu

SEQ ID NO: 404363 - RNA, 22 nt, Artificial Sequence
  Synthetic
gaucacauaaaacugaaagauu

SEQ ID NO: 404364 - RNA, 23 nt, Artificial Sequence
  Synthetic
ugaucacauaaaacugaaagauu

SEQ ID NO: 404365 - RNA, 24 nt, Artificial Sequence
  Synthetic
augaucacauaaaacugaaagauu

SEQ ID NO: 404366 - RNA, 18 nt, Artificial Sequence
  Synthetic
uucagagguugaaagauu

SEQ ID NO: 404367 - RNA, 19 nt, Artificial Sequence
  Synthetic
uuucagagguugaaagauu

SEQ ID NO: 404368 - RNA, 20 nt, Artificial Sequence
  Synthetic
guuucagagguugaaagauu

SEQ ID NO: 404369 - RNA, 21 nt, Artificial Sequence
  Synthetic
uguuucagagguugaaagauu

SEQ ID NO: 404370 - RNA, 22 nt, Artificial Sequence
  Synthetic
guguuucagagguugaaagauu

SEQ ID NO: 404371 - RNA, 23 nt, Artificial Sequence
  Synthetic
aguguuucagagguugaaagauu

SEQ ID NO: 404372 - RNA, 24 nt, Artificial Sequence
  Synthetic
gaguguuucagagguugaaagauu

SEQ ID NO: 404373 - RNA, 18 nt, Artificial Sequence
  Synthetic
uaagcugaaauaaagauu

SEQ ID NO: 404374 - RNA, 19 nt, Artificial Sequence
  Synthetic
uuaagcugaaauaaagauu

SEQ ID NO: 404375 - RNA, 20 nt, Artificial Sequence
  Synthetic
auuaagcugaaauaaagauu

SEQ ID NO: 404376 - RNA, 21 nt, Artificial Sequence
  Synthetic
uauuaagcugaaauaaagauu

SEQ ID NO: 404377 - RNA, 22 nt, Artificial Sequence
  Synthetic
auauuaagcugaaauaaagauu

SEQ ID NO: 404378 - RNA, 23 nt, Artificial Sequence
  Synthetic
aauauuaagcugaaauaaagauu

SEQ ID NO: 404379 - RNA, 24 nt, Artificial Sequence
  Synthetic
gaauauuaagcugaaauaaagauu

SEQ ID NO: 404380 - RNA, 18 nt, Artificial Sequence
  Synthetic
ucauaaugauuaaagauu

SEQ ID NO: 404381 - RNA, 19 nt, Artificial Sequence
  Synthetic
uucauaaugauuaaagauu

SEQ ID NO: 404382 - RNA, 20 nt, Artificial Sequence
  Synthetic
uuucauaaugauuaaagauu

SEQ ID NO: 404383 - RNA, 21 nt, Artificial Sequence
  Synthetic
uuuucauaaugauuaaagauu

SEQ ID NO: 404384 - RNA, 22 nt, Artificial Sequence
  Synthetic
uuuuucauaaugauuaaagauu

SEQ ID NO: 404385 - RNA, 23 nt, Artificial Sequence
  Synthetic
guuuuucauaaugauuaaagauu

SEQ ID NO: 404386 - RNA, 24 nt, Artificial Sequence
  Synthetic
uguuuuucauaaugauuaaagauu

SEQ ID NO: 404387 - RNA, 18 nt, Artificial Sequence
  Synthetic
agauaauuuuuaaagauu

SEQ ID NO: 404388 - RNA, 19 nt, Artificial Sequence
  Synthetic
uagauaauuuuuaaagauu

SEQ ID NO: 404389 - RNA, 20 nt, Artificial Sequence
  Synthetic
auagauaauuuuuaaagauu

SEQ ID NO: 404390 - RNA, 21 nt, Artificial Sequence
  Synthetic
uauagauaauuuuuaaagauu

SEQ ID NO: 404391 - RNA, 22 nt, Artificial Sequence
  Synthetic
auauagauaauuuuuaaagauu

SEQ ID NO: 404392 - RNA, 23 nt, Artificial Sequence
  Synthetic
cauauagauaauuuuuaaagauu

SEQ ID NO: 404393 - RNA, 24 nt, Artificial Sequence
  Synthetic
acauauagauaauuuuuaaagauu

SEQ ID NO: 404394 - RNA, 18 nt, Artificial Sequence
  Synthetic
ucagagagaaacaagauu

SEQ ID NO: 404395 - RNA, 19 nt, Artificial Sequence
  Synthetic
uucagagagaaacaagauu

SEQ ID NO: 404396 - RNA, 20 nt, Artificial Sequence
  Synthetic
cuucagagagaaacaagauu

SEQ ID NO: 404397 - RNA, 21 nt, Artificial Sequence
  Synthetic
ccuucagagagaaacaagauu

SEQ ID NO: 404398 - RNA, 22 nt, Artificial Sequence
  Synthetic
accuucagagagaaacaagauu

SEQ ID NO: 404399 - RNA, 23 nt, Artificial Sequence
  Synthetic
uaccuucagagagaaacaagauu

SEQ ID NO: 404400 - RNA, 24 nt, Artificial Sequence
  Synthetic
uuaccuucagagagaaacaagauu

SEQ ID NO: 404401 - RNA, 18 nt, Artificial Sequence
  Synthetic
gaaagacaaggcaagauu

SEQ ID NO: 404402 - RNA, 19 nt, Artificial Sequence
  Synthetic
ugaaagacaaggcaagauu

SEQ ID NO: 404403 - RNA, 20 nt, Artificial Sequence
  Synthetic
augaaagacaaggcaagauu

SEQ ID NO: 404404 - RNA, 21 nt, Artificial Sequence
  Synthetic
gaugaaagacaaggcaagauu

SEQ ID NO: 404405 - RNA, 22 nt, Artificial Sequence
  Synthetic
agaugaaagacaaggcaagauu

SEQ ID NO: 404406 - RNA, 23 nt, Artificial Sequence
  Synthetic
aagaugaaagacaaggcaagauu

SEQ ID NO: 404407 - RNA, 24 nt, Artificial Sequence
  Synthetic
caagaugaaagacaaggcaagauu

SEQ ID NO: 404408 - RNA, 18 nt, Artificial Sequence
  Synthetic
uguauuaaaaagaagauu

SEQ ID NO: 404409 - RNA, 19 nt, Artificial Sequence
  Synthetic
auguauuaaaaagaagauu

SEQ ID NO: 404410 - RNA, 20 nt, Artificial Sequence
  Synthetic
gauguauuaaaaagaagauu

SEQ ID NO: 404411 - RNA, 21 nt, Artificial Sequence
  Synthetic
agauguauuaaaaagaagauu

SEQ ID NO: 404412 - RNA, 22 nt, Artificial Sequence
  Synthetic
aagauguauuaaaaagaagauu

SEQ ID NO: 404413 - RNA, 23 nt, Artificial Sequence
  Synthetic
uaagauguauuaaaaagaagauu

SEQ ID NO: 404414 - RNA, 24 nt, Artificial Sequence
  Synthetic
uuaagauguauuaaaaagaagauu

SEQ ID NO: 404415 - RNA, 18 nt, Artificial Sequence
  Synthetic
aagagccaccagaagauu

SEQ ID NO: 404416 - RNA, 19 nt, Artificial Sequence
  Synthetic
gaagagccaccagaagauu

SEQ ID NO: 404417 - RNA, 20 nt, Artificial Sequence
  Synthetic
ugaagagccaccagaagauu

SEQ ID NO: 404418 - RNA, 21 nt, Artificial Sequence
  Synthetic
augaagagccaccagaagauu

SEQ ID NO: 404419 - RNA, 22 nt, Artificial Sequence
  Synthetic
gaugaagagccaccagaagauu

SEQ ID NO: 404420 - RNA, 23 nt, Artificial Sequence
  Synthetic
ugaugaagagccaccagaagauu

SEQ ID NO: 404421 - RNA, 24 nt, Artificial Sequence
  Synthetic
gugaugaagagccaccagaagauu

SEQ ID NO: 404422 - RNA, 18 nt, Artificial Sequence
  Synthetic
caugaccuccagaagauu

SEQ ID NO: 404423 - RNA, 19 nt, Artificial Sequence
  Synthetic
ucaugaccuccagaagauu

SEQ ID NO: 404424 - RNA, 20 nt, Artificial Sequence
  Synthetic
uucaugaccuccagaagauu

SEQ ID NO: 404425 - RNA, 21 nt, Artificial Sequence
  Synthetic
auucaugaccuccagaagauu

SEQ ID NO: 404426 - RNA, 22 nt, Artificial Sequence
  Synthetic
cauucaugaccuccagaagauu

SEQ ID NO: 404427 - RNA, 23 nt, Artificial Sequence
  Synthetic
gcauucaugaccuccagaagauu

SEQ ID NO: 404428 - RNA, 24 nt, Artificial Sequence
  Synthetic
ggcauucaugaccuccagaagauu

SEQ ID NO: 404429 - RNA, 18 nt, Artificial Sequence
  Synthetic
uguuuuuaauggaagauu

SEQ ID NO: 404430 - RNA, 19 nt, Artificial Sequence
  Synthetic
uuguuuuuaauggaagauu

SEQ ID NO: 404431 - RNA, 20 nt, Artificial Sequence
  Synthetic
cuuguuuuuaauggaagauu

SEQ ID NO: 404432 - RNA, 21 nt, Artificial Sequence
  Synthetic
ucuuguuuuuaauggaagauu

SEQ ID NO: 404433 - RNA, 22 nt, Artificial Sequence
  Synthetic
gucuuguuuuuaauggaagauu

SEQ ID NO: 404434 - RNA, 23 nt, Artificial Sequence
  Synthetic
agucuuguuuuuaauggaagauu

SEQ ID NO: 404435 - RNA, 24 nt, Artificial Sequence
  Synthetic
aagucuuguuuuuaauggaagauu

SEQ ID NO: 404436 - RNA, 18 nt, Artificial Sequence
  Synthetic
aaaaaauaaaauaagauu

SEQ ID NO: 404437 - RNA, 19 nt, Artificial Sequence
  Synthetic
uaaaaaauaaaauaagauu

SEQ ID NO: 404438 - RNA, 20 nt, Artificial Sequence
  Synthetic
guaaaaaauaaaauaagauu

SEQ ID NO: 404439 - RNA, 21 nt, Artificial Sequence
  Synthetic
aguaaaaaauaaaauaagauu

SEQ ID NO: 404440 - RNA, 22 nt, Artificial Sequence
  Synthetic
aaguaaaaaauaaaauaagauu

SEQ ID NO: 404441 - RNA, 23 nt, Artificial Sequence
  Synthetic
caaguaaaaaauaaaauaagauu

SEQ ID NO: 404442 - RNA, 24 nt, Artificial Sequence
  Synthetic
acaaguaaaaaauaaaauaagauu

SEQ ID NO: 404443 - RNA, 18 nt, Artificial Sequence
  Synthetic
cuggggccaaaacagauu

SEQ ID NO: 404444 - RNA, 19 nt, Artificial Sequence
  Synthetic
acuggggccaaaacagauu

SEQ ID NO: 404445 - RNA, 20 nt, Artificial Sequence
  Synthetic
cacuggggccaaaacagauu

SEQ ID NO: 404446 - RNA, 21 nt, Artificial Sequence
  Synthetic
ccacuggggccaaaacagauu

SEQ ID NO: 404447 - RNA, 22 nt, Artificial Sequence
  Synthetic
accacuggggccaaaacagauu

SEQ ID NO: 404448 - RNA, 23 nt, Artificial Sequence
  Synthetic
caccacuggggccaaaacagauu

SEQ ID NO: 404449 - RNA, 24 nt, Artificial Sequence
  Synthetic
ucaccacuggggccaaaacagauu

SEQ ID NO: 404450 - RNA, 18 nt, Artificial Sequence
  Synthetic
auugugaagaaacagauu

SEQ ID NO: 404451 - RNA, 19 nt, Artificial Sequence
  Synthetic
uauugugaagaaacagauu

SEQ ID NO: 404452 - RNA, 20 nt, Artificial Sequence
  Synthetic
uuauugugaagaaacagauu

SEQ ID NO: 404453 - RNA, 21 nt, Artificial Sequence
  Synthetic
guuauugugaagaaacagauu

SEQ ID NO: 404454 - RNA, 22 nt, Artificial Sequence
  Synthetic
aguuauugugaagaaacagauu

SEQ ID NO: 404455 - RNA, 23 nt, Artificial Sequence
  Synthetic
gaguuauugugaagaaacagauu

SEQ ID NO: 404456 - RNA, 24 nt, Artificial Sequence
  Synthetic
ggaguuauugugaagaaacagauu

SEQ ID NO: 404457 - RNA, 18 nt, Artificial Sequence
  Synthetic
uaaguaacuaaacagauu

SEQ ID NO: 404458 - RNA, 19 nt, Artificial Sequence
  Synthetic
uuaaguaacuaaacagauu

SEQ ID NO: 404459 - RNA, 20 nt, Artificial Sequence
  Synthetic
uuuaaguaacuaaacagauu

SEQ ID NO: 404460 - RNA, 21 nt, Artificial Sequence
  Synthetic
uuuuaaguaacuaaacagauu

SEQ ID NO: 404461 - RNA, 22 nt, Artificial Sequence
  Synthetic
auuuuaaguaacuaaacagauu

SEQ ID NO: 404462 - RNA, 23 nt, Artificial Sequence
  Synthetic
cauuuuaaguaacuaaacagauu

SEQ ID NO: 404463 - RNA, 24 nt, Artificial Sequence
  Synthetic
acauuuuaaguaacuaaacagauu

SEQ ID NO: 404464 - RNA, 18 nt, Artificial Sequence
  Synthetic
caguauacacaacagauu

SEQ ID NO: 404465 - RNA, 19 nt, Artificial Sequence
  Synthetic
acaguauacacaacagauu

SEQ ID NO: 404466 - RNA, 20 nt, Artificial Sequence
  Synthetic
cacaguauacacaacagauu

SEQ ID NO: 404467 - RNA, 21 nt, Artificial Sequence
  Synthetic
acacaguauacacaacagauu

SEQ ID NO: 404468 - RNA, 22 nt, Artificial Sequence
  Synthetic
cacacaguauacacaacagauu

SEQ ID NO: 404469 - RNA, 23 nt, Artificial Sequence
  Synthetic
acacacaguauacacaacagauu

SEQ ID NO: 404470 - RNA, 24 nt, Artificial Sequence
  Synthetic
cacacacaguauacacaacagauu

SEQ ID NO: 404471 - RNA, 18 nt, Artificial Sequence
  Synthetic
acacuuaccucacagauu

SEQ ID NO: 404472 - RNA, 19 nt, Artificial Sequence
  Synthetic
aacacuuaccucacagauu

SEQ ID NO: 404473 - RNA, 20 nt, Artificial Sequence
  Synthetic
aaacacuuaccucacagauu

SEQ ID NO: 404474 - RNA, 21 nt, Artificial Sequence
  Synthetic
uaaacacuuaccucacagauu

SEQ ID NO: 404475 - RNA, 22 nt, Artificial Sequence
  Synthetic
auaaacacuuaccucacagauu

SEQ ID NO: 404476 - RNA, 23 nt, Artificial Sequence
  Synthetic
cauaaacacuuaccucacagauu

SEQ ID NO: 404477 - RNA, 24 nt, Artificial Sequence
  Synthetic
acauaaacacuuaccucacagauu

SEQ ID NO: 404478 - RNA, 18 nt, Artificial Sequence
  Synthetic
aacuaaaagucacagauu

SEQ ID NO: 404479 - RNA, 19 nt, Artificial Sequence
  Synthetic
aaacuaaaagucacagauu

SEQ ID NO: 404480 - RNA, 20 nt, Artificial Sequence
  Synthetic
caaacuaaaagucacagauu

SEQ ID NO: 404481 - RNA, 21 nt, Artificial Sequence
  Synthetic
ccaaacuaaaagucacagauu

SEQ ID NO: 404482 - RNA, 22 nt, Artificial Sequence
  Synthetic
accaaacuaaaagucacagauu

SEQ ID NO: 404483 - RNA, 23 nt, Artificial Sequence
  Synthetic
aaccaaacuaaaagucacagauu

SEQ ID NO: 404484 - RNA, 24 nt, Artificial Sequence
  Synthetic
aaaccaaacuaaaagucacagauu

SEQ ID NO: 404485 - RNA, 18 nt, Artificial Sequence
  Synthetic
aaaacugaagaccagauu

SEQ ID NO: 404486 - RNA, 19 nt, Artificial Sequence
  Synthetic
aaaaacugaagaccagauu

SEQ ID NO: 404487 - RNA, 20 nt, Artificial Sequence
  Synthetic
uaaaaacugaagaccagauu

SEQ ID NO: 404488 - RNA, 21 nt, Artificial Sequence
  Synthetic
uuaaaaacugaagaccagauu

SEQ ID NO: 404489 - RNA, 22 nt, Artificial Sequence
  Synthetic
uuuaaaaacugaagaccagauu

SEQ ID NO: 404490 - RNA, 23 nt, Artificial Sequence
  Synthetic
uuuuaaaaacugaagaccagauu

SEQ ID NO: 404491 - RNA, 24 nt, Artificial Sequence
  Synthetic
auuuuaaaaacugaagaccagauu

SEQ ID NO: 404492 - RNA, 18 nt, Artificial Sequence
  Synthetic
ugaagagccguccagauu

SEQ ID NO: 404493 - RNA, 19 nt, Artificial Sequence
  Synthetic
augaagagccguccagauu

SEQ ID NO: 404494 - RNA, 20 nt, Artificial Sequence
  Synthetic
caugaagagccguccagauu

SEQ ID NO: 404495 - RNA, 21 nt, Artificial Sequence
  Synthetic
ccaugaagagccguccagauu

SEQ ID NO: 404496 - RNA, 22 nt, Artificial Sequence
  Synthetic
gccaugaagagccguccagauu

SEQ ID NO: 404497 - RNA, 23 nt, Artificial Sequence
  Synthetic
ugccaugaagagccguccagauu

SEQ ID NO: 404498 - RNA, 24 nt, Artificial Sequence
  Synthetic
cugccaugaagagccguccagauu

SEQ ID NO: 404499 - RNA, 18 nt, Artificial Sequence
  Synthetic
guugugaguguccagauu

SEQ ID NO: 404500 - RNA, 19 nt, Artificial Sequence
  Synthetic
aguugugaguguccagauu

SEQ ID NO: 404501 - RNA, 20 nt, Artificial Sequence
  Synthetic
gaguugugaguguccagauu

SEQ ID NO: 404502 - RNA, 21 nt, Artificial Sequence
  Synthetic
ggaguugugaguguccagauu

SEQ ID NO: 404503 - RNA, 22 nt, Artificial Sequence
  Synthetic
gggaguugugaguguccagauu

SEQ ID NO: 404504 - RNA, 23 nt, Artificial Sequence
  Synthetic
ugggaguugugaguguccagauu

SEQ ID NO: 404505 - RNA, 24 nt, Artificial Sequence
  Synthetic
augggaguugugaguguccagauu

SEQ ID NO: 404506 - RNA, 18 nt, Artificial Sequence
  Synthetic
ucucccagaaagcagauu

SEQ ID NO: 404507 - RNA, 19 nt, Artificial Sequence
  Synthetic
uucucccagaaagcagauu

SEQ ID NO: 404508 - RNA, 20 nt, Artificial Sequence
  Synthetic
guucucccagaaagcagauu

SEQ ID NO: 404509 - RNA, 21 nt, Artificial Sequence
  Synthetic
aguucucccagaaagcagauu

SEQ ID NO: 404510 - RNA, 22 nt, Artificial Sequence
  Synthetic
aaguucucccagaaagcagauu

SEQ ID NO: 404511 - RNA, 23 nt, Artificial Sequence
  Synthetic
caaguucucccagaaagcagauu

SEQ ID NO: 404512 - RNA, 24 nt, Artificial Sequence
  Synthetic
ucaaguucucccagaaagcagauu

SEQ ID NO: 404513 - RNA, 18 nt, Artificial Sequence
  Synthetic
aauaagaaagagcagauu

SEQ ID NO: 404514 - RNA, 19 nt, Artificial Sequence
  Synthetic
gaauaagaaagagcagauu

SEQ ID NO: 404515 - RNA, 20 nt, Artificial Sequence
  Synthetic
ugaauaagaaagagcagauu

SEQ ID NO: 404516 - RNA, 21 nt, Artificial Sequence
  Synthetic
gugaauaagaaagagcagauu

SEQ ID NO: 404517 - RNA, 22 nt, Artificial Sequence
  Synthetic
ugugaauaagaaagagcagauu

SEQ ID NO: 404518 - RNA, 23 nt, Artificial Sequence
  Synthetic
uugugaauaagaaagagcagauu

SEQ ID NO: 404519 - RNA, 24 nt, Artificial Sequence
  Synthetic
auugugaauaagaaagagcagauu

SEQ ID NO: 404520 - RNA, 18 nt, Artificial Sequence
  Synthetic
ugguagggguagcagauu

SEQ ID NO: 404521 - RNA, 19 nt, Artificial Sequence
  Synthetic
cugguagggguagcagauu

SEQ ID NO: 404522 - RNA, 20 nt, Artificial Sequence
  Synthetic
ucugguagggguagcagauu

SEQ ID NO: 404523 - RNA, 21 nt, Artificial Sequence
  Synthetic
aucugguagggguagcagauu

SEQ ID NO: 404524 - RNA, 22 nt, Artificial Sequence
  Synthetic
caucugguagggguagcagauu

SEQ ID NO: 404525 - RNA, 23 nt, Artificial Sequence
  Synthetic
acaucugguagggguagcagauu

SEQ ID NO: 404526 - RNA, 24 nt, Artificial Sequence
  Synthetic
aacaucugguagggguagcagauu

SEQ ID NO: 404527 - RNA, 18 nt, Artificial Sequence
  Synthetic
ggcugagacgggcagauu

SEQ ID NO: 404528 - RNA, 19 nt, Artificial Sequence
  Synthetic
aggcugagacgggcagauu

SEQ ID NO: 404529 - RNA, 20 nt, Artificial Sequence
  Synthetic
gaggcugagacgggcagauu

SEQ ID NO: 404530 - RNA, 21 nt, Artificial Sequence
  Synthetic
ggaggcugagacgggcagauu

SEQ ID NO: 404531 - RNA, 22 nt, Artificial Sequence
  Synthetic
gggaggcugagacgggcagauu

SEQ ID NO: 404532 - RNA, 23 nt, Artificial Sequence
  Synthetic
ugggaggcugagacgggcagauu

SEQ ID NO: 404533 - RNA, 24 nt, Artificial Sequence
  Synthetic
uugggaggcugagacgggcagauu

SEQ ID NO: 404534 - RNA, 18 nt, Artificial Sequence
  Synthetic
gaaaagaaggggcagauu

SEQ ID NO: 404535 - RNA, 19 nt, Artificial Sequence
  Synthetic
agaaaagaaggggcagauu

SEQ ID NO: 404536 - RNA, 20 nt, Artificial Sequence
  Synthetic
cagaaaagaaggggcagauu

SEQ ID NO: 404537 - RNA, 21 nt, Artificial Sequence
  Synthetic
acagaaaagaaggggcagauu

SEQ ID NO: 404538 - RNA, 22 nt, Artificial Sequence
  Synthetic
aacagaaaagaaggggcagauu

SEQ ID NO: 404539 - RNA, 23 nt, Artificial Sequence
  Synthetic
gaacagaaaagaaggggcagauu

SEQ ID NO: 404540 - RNA, 24 nt, Artificial Sequence
  Synthetic
agaacagaaaagaaggggcagauu

SEQ ID NO: 404541 - RNA, 18 nt, Artificial Sequence
  Synthetic
uuauaaaaccaucagauu

SEQ ID NO: 404542 - RNA, 19 nt, Artificial Sequence
  Synthetic
cuuauaaaaccaucagauu

SEQ ID NO: 404543 - RNA, 20 nt, Artificial Sequence
  Synthetic
ccuuauaaaaccaucagauu

SEQ ID NO: 404544 - RNA, 21 nt, Artificial Sequence
  Synthetic
cccuuauaaaaccaucagauu

SEQ ID NO: 404545 - RNA, 22 nt, Artificial Sequence
  Synthetic
acccuuauaaaaccaucagauu

SEQ ID NO: 404546 - RNA, 23 nt, Artificial Sequence
  Synthetic
gacccuuauaaaaccaucagauu

SEQ ID NO: 404547 - RNA, 24 nt, Artificial Sequence
  Synthetic
agacccuuauaaaaccaucagauu

SEQ ID NO: 404548 - RNA, 18 nt, Artificial Sequence
  Synthetic
cugaauugcucucagauu

SEQ ID NO: 404549 - RNA, 19 nt, Artificial Sequence
  Synthetic
ucugaauugcucucagauu

SEQ ID NO: 404550 - RNA, 20 nt, Artificial Sequence
  Synthetic
uucugaauugcucucagauu

SEQ ID NO: 404551 - RNA, 21 nt, Artificial Sequence
  Synthetic
uuucugaauugcucucagauu

SEQ ID NO: 404552 - RNA, 22 nt, Artificial Sequence
  Synthetic
auuucugaauugcucucagauu

SEQ ID NO: 404553 - RNA, 23 nt, Artificial Sequence
  Synthetic
cauuucugaauugcucucagauu

SEQ ID NO: 404554 - RNA, 24 nt, Artificial Sequence
  Synthetic
gcauuucugaauugcucucagauu

SEQ ID NO: 404555 - RNA, 18 nt, Artificial Sequence
  Synthetic
aagagacauucucagauu

SEQ ID NO: 404556 - RNA, 19 nt, Artificial Sequence
  Synthetic
aaagagacauucucagauu

SEQ ID NO: 404557 - RNA, 20 nt, Artificial Sequence
  Synthetic
gaaagagacauucucagauu

SEQ ID NO: 404558 - RNA, 21 nt, Artificial Sequence
  Synthetic
ggaaagagacauucucagauu

SEQ ID NO: 404559 - RNA, 22 nt, Artificial Sequence
  Synthetic
gggaaagagacauucucagauu

SEQ ID NO: 404560 - RNA, 23 nt, Artificial Sequence
  Synthetic
agggaaagagacauucucagauu

SEQ ID NO: 404561 - RNA, 24 nt, Artificial Sequence
  Synthetic
aagggaaagagacauucucagauu

SEQ ID NO: 404562 - RNA, 18 nt, Artificial Sequence
  Synthetic
gugagagaaugucagauu

SEQ ID NO: 404563 - RNA, 19 nt, Artificial Sequence
  Synthetic
agugagagaaugucagauu

SEQ ID NO: 404564 - RNA, 20 nt, Artificial Sequence
  Synthetic
uagugagagaaugucagauu

SEQ ID NO: 404565 - RNA, 21 nt, Artificial Sequence
  Synthetic
guagugagagaaugucagauu

SEQ ID NO: 404566 - RNA, 22 nt, Artificial Sequence
  Synthetic
gguagugagagaaugucagauu

SEQ ID NO: 404567 - RNA, 23 nt, Artificial Sequence
  Synthetic
cgguagugagagaaugucagauu

SEQ ID NO: 404568 - RNA, 24 nt, Artificial Sequence
  Synthetic
ucgguagugagagaaugucagauu

SEQ ID NO: 404569 - RNA, 18 nt, Artificial Sequence
  Synthetic
aaucagggcauucagauu

SEQ ID NO: 404570 - RNA, 19 nt, Artificial Sequence
  Synthetic
uaaucagggcauucagauu

SEQ ID NO: 404571 - RNA, 20 nt, Artificial Sequence
  Synthetic
auaaucagggcauucagauu

SEQ ID NO: 404572 - RNA, 21 nt, Artificial Sequence
  Synthetic
cauaaucagggcauucagauu

SEQ ID NO: 404573 - RNA, 22 nt, Artificial Sequence
  Synthetic
acauaaucagggcauucagauu

SEQ ID NO: 404574 - RNA, 23 nt, Artificial Sequence
  Synthetic
gacauaaucagggcauucagauu

SEQ ID NO: 404575 - RNA, 24 nt, Artificial Sequence
  Synthetic
cgacauaaucagggcauucagauu

SEQ ID NO: 404576 - RNA, 18 nt, Artificial Sequence
  Synthetic
cugagggcuaaagagauu

SEQ ID NO: 404577 - RNA, 19 nt, Artificial Sequence
  Synthetic
acugagggcuaaagagauu

SEQ ID NO: 404578 - RNA, 20 nt, Artificial Sequence
  Synthetic
aacugagggcuaaagagauu

SEQ ID NO: 404579 - RNA, 21 nt, Artificial Sequence
  Synthetic
aaacugagggcuaaagagauu

SEQ ID NO: 404580 - RNA, 22 nt, Artificial Sequence
  Synthetic
gaaacugagggcuaaagagauu

SEQ ID NO: 404581 - RNA, 23 nt, Artificial Sequence
  Synthetic
ggaaacugagggcuaaagagauu

SEQ ID NO: 404582 - RNA, 24 nt, Artificial Sequence
  Synthetic
aggaaacugagggcuaaagagauu

SEQ ID NO: 404583 - RNA, 18 nt, Artificial Sequence
  Synthetic
aauuuuuuuaaagagauu

SEQ ID NO: 404584 - RNA, 19 nt, Artificial Sequence
  Synthetic
aaauuuuuuuaaagagauu

SEQ ID NO: 404585 - RNA, 20 nt, Artificial Sequence
  Synthetic
caaauuuuuuuaaagagauu

SEQ ID NO: 404586 - RNA, 21 nt, Artificial Sequence
  Synthetic
ucaaauuuuuuuaaagagauu

SEQ ID NO: 404587 - RNA, 22 nt, Artificial Sequence
  Synthetic
gucaaauuuuuuuaaagagauu

SEQ ID NO: 404588 - RNA, 23 nt, Artificial Sequence
  Synthetic
agucaaauuuuuuuaaagagauu

SEQ ID NO: 404589 - RNA, 24 nt, Artificial Sequence
  Synthetic
cagucaaauuuuuuuaaagagauu

SEQ ID NO: 404590 - RNA, 18 nt, Artificial Sequence
  Synthetic
uugauaaacucagagauu

SEQ ID NO: 404591 - RNA, 19 nt, Artificial Sequence
  Synthetic
guugauaaacucagagauu

SEQ ID NO: 404592 - RNA, 20 nt, Artificial Sequence
  Synthetic
uguugauaaacucagagauu

SEQ ID NO: 404593 - RNA, 21 nt, Artificial Sequence
  Synthetic
auguugauaaacucagagauu

SEQ ID NO: 404594 - RNA, 22 nt, Artificial Sequence
  Synthetic
aauguugauaaacucagagauu

SEQ ID NO: 404595 - RNA, 23 nt, Artificial Sequence
  Synthetic
aaauguugauaaacucagagauu

SEQ ID NO: 404596 - RNA, 24 nt, Artificial Sequence
  Synthetic
aaaauguugauaaacucagagauu

SEQ ID NO: 404597 - RNA, 18 nt, Artificial Sequence
  Synthetic
cuauuucuuucagagauu

SEQ ID NO: 404598 - RNA, 19 nt, Artificial Sequence
  Synthetic
acuauuucuuucagagauu

SEQ ID NO: 404599 - RNA, 20 nt, Artificial Sequence
  Synthetic
uacuauuucuuucagagauu

SEQ ID NO: 404600 - RNA, 21 nt, Artificial Sequence
  Synthetic
uuacuauuucuuucagagauu

SEQ ID NO: 404601 - RNA, 22 nt, Artificial Sequence
  Synthetic
cuuacuauuucuuucagagauu

SEQ ID NO: 404602 - RNA, 23 nt, Artificial Sequence
  Synthetic
gcuuacuauuucuuucagagauu

SEQ ID NO: 404603 - RNA, 24 nt, Artificial Sequence
  Synthetic
agcuuacuauuucuuucagagauu

SEQ ID NO: 404604 - RNA, 18 nt, Artificial Sequence
  Synthetic
gagagagagagagagauu

SEQ ID NO: 404605 - RNA, 19 nt, Artificial Sequence
  Synthetic
agagagagagagagagauu

SEQ ID NO: 404606 - RNA, 20 nt, Artificial Sequence
  Synthetic
gagagagagagagagagauu

SEQ ID NO: 404607 - RNA, 21 nt, Artificial Sequence
  Synthetic
ugagagagagagagagagauu

SEQ ID NO: 404608 - RNA, 22 nt, Artificial Sequence
  Synthetic
cugagagagagagagagagauu

SEQ ID NO: 404609 - RNA, 23 nt, Artificial Sequence
  Synthetic
ucugagagagagagagagagauu

SEQ ID NO: 404610 - RNA, 24 nt, Artificial Sequence
  Synthetic
uucugagagagagagagagagauu

SEQ ID NO: 404611 - RNA, 18 nt, Artificial Sequence
  Synthetic
ugaauccuuggagagauu

SEQ ID NO: 404612 - RNA, 19 nt, Artificial Sequence
  Synthetic
uugaauccuuggagagauu

SEQ ID NO: 404613 - RNA, 20 nt, Artificial Sequence
  Synthetic
cuugaauccuuggagagauu

SEQ ID NO: 404614 - RNA, 21 nt, Artificial Sequence
  Synthetic
ucuugaauccuuggagagauu

SEQ ID NO: 404615 - RNA, 22 nt, Artificial Sequence
  Synthetic
uucuugaauccuuggagagauu

SEQ ID NO: 404616 - RNA, 23 nt, Artificial Sequence
  Synthetic
auucuugaauccuuggagagauu

SEQ ID NO: 404617 - RNA, 24 nt, Artificial Sequence
  Synthetic
gauucuugaauccuuggagagauu

SEQ ID NO: 404618 - RNA, 18 nt, Artificial Sequence
  Synthetic
cuggaaaugauagagauu

SEQ ID NO: 404619 - RNA, 19 nt, Artificial Sequence
  Synthetic
ucuggaaaugauagagauu

SEQ ID NO: 404620 - RNA, 20 nt, Artificial Sequence
  Synthetic
gucuggaaaugauagagauu

SEQ ID NO: 404621 - RNA, 21 nt, Artificial Sequence
  Synthetic
ugucuggaaaugauagagauu

SEQ ID NO: 404622 - RNA, 22 nt, Artificial Sequence
  Synthetic
augucuggaaaugauagagauu

SEQ ID NO: 404623 - RNA, 23 nt, Artificial Sequence
  Synthetic
gaugucuggaaaugauagagauu

SEQ ID NO: 404624 - RNA, 24 nt, Artificial Sequence
  Synthetic
ugaugucuggaaaugauagagauu

SEQ ID NO: 404625 - RNA, 18 nt, Artificial Sequence
  Synthetic
ugcuuuuacaaggagauu

SEQ ID NO: 404626 - RNA, 19 nt, Artificial Sequence
  Synthetic
cugcuuuuacaaggagauu

SEQ ID NO: 404627 - RNA, 20 nt, Artificial Sequence
  Synthetic
gcugcuuuuacaaggagauu

SEQ ID NO: 404628 - RNA, 21 nt, Artificial Sequence
  Synthetic
agcugcuuuuacaaggagauu

SEQ ID NO: 404629 - RNA, 22 nt, Artificial Sequence
  Synthetic
uagcugcuuuuacaaggagauu

SEQ ID NO: 404630 - RNA, 23 nt, Artificial Sequence
  Synthetic
guagcugcuuuuacaaggagauu

SEQ ID NO: 404631 - RNA, 24 nt, Artificial Sequence
  Synthetic
uguagcugcuuuuacaaggagauu

SEQ ID NO: 404632 - RNA, 18 nt, Artificial Sequence
  Synthetic
uaucagcuuaaggagauu

SEQ ID NO: 404633 - RNA, 19 nt, Artificial Sequence
  Synthetic
uuaucagcuuaaggagauu

SEQ ID NO: 404634 - RNA, 20 nt, Artificial Sequence
  Synthetic
cuuaucagcuuaaggagauu

SEQ ID NO: 404635 - RNA, 21 nt, Artificial Sequence
  Synthetic
gcuuaucagcuuaaggagauu

SEQ ID NO: 404636 - RNA, 22 nt, Artificial Sequence
  Synthetic
ugcuuaucagcuuaaggagauu

SEQ ID NO: 404637 - RNA, 23 nt, Artificial Sequence
  Synthetic
uugcuuaucagcuuaaggagauu

SEQ ID NO: 404638 - RNA, 24 nt, Artificial Sequence
  Synthetic
guugcuuaucagcuuaaggagauu

SEQ ID NO: 404639 - RNA, 18 nt, Artificial Sequence
  Synthetic
aagagcacaagggagauu

SEQ ID NO: 404640 - RNA, 19 nt, Artificial Sequence
  Synthetic
gaagagcacaagggagauu

SEQ ID NO: 404641 - RNA, 20 nt, Artificial Sequence
  Synthetic
agaagagcacaagggagauu

SEQ ID NO: 404642 - RNA, 21 nt, Artificial Sequence
  Synthetic
gagaagagcacaagggagauu

SEQ ID NO: 404643 - RNA, 22 nt, Artificial Sequence
  Synthetic
agagaagagcacaagggagauu

SEQ ID NO: 404644 - RNA, 23 nt, Artificial Sequence
  Synthetic
aagagaagagcacaagggagauu

SEQ ID NO: 404645 - RNA, 24 nt, Artificial Sequence
  Synthetic
gaagagaagagcacaagggagauu

SEQ ID NO: 404646 - RNA, 18 nt, Artificial Sequence
  Synthetic
gaggaguaaauggagauu

SEQ ID NO: 404647 - RNA, 19 nt, Artificial Sequence
  Synthetic
agaggaguaaauggagauu

SEQ ID NO: 404648 - RNA, 20 nt, Artificial Sequence
  Synthetic
cagaggaguaaauggagauu

SEQ ID NO: 404649 - RNA, 21 nt, Artificial Sequence
  Synthetic
acagaggaguaaauggagauu

SEQ ID NO: 404650 - RNA, 22 nt, Artificial Sequence
  Synthetic
uacagaggaguaaauggagauu

SEQ ID NO: 404651 - RNA, 23 nt, Artificial Sequence
  Synthetic
uuacagaggaguaaauggagauu

SEQ ID NO: 404652 - RNA, 24 nt, Artificial Sequence
  Synthetic
uuuacagaggaguaaauggagauu

SEQ ID NO: 404653 - RNA, 18 nt, Artificial Sequence
  Synthetic
uggucucagauggagauu

SEQ ID NO: 404654 - RNA, 19 nt, Artificial Sequence
  Synthetic
guggucucagauggagauu

SEQ ID NO: 404655 - RNA, 20 nt, Artificial Sequence
  Synthetic
gguggucucagauggagauu

SEQ ID NO: 404656 - RNA, 21 nt, Artificial Sequence
  Synthetic
agguggucucagauggagauu

SEQ ID NO: 404657 - RNA, 22 nt, Artificial Sequence
  Synthetic
gagguggucucagauggagauu

SEQ ID NO: 404658 - RNA, 23 nt, Artificial Sequence
  Synthetic
ugagguggucucagauggagauu

SEQ ID NO: 404659 - RNA, 24 nt, Artificial Sequence
  Synthetic
cugagguggucucagauggagauu

SEQ ID NO: 404660 - RNA, 18 nt, Artificial Sequence
  Synthetic
aaauuucaacaugagauu

SEQ ID NO: 404661 - RNA, 19 nt, Artificial Sequence
  Synthetic
caaauuucaacaugagauu

SEQ ID NO: 404662 - RNA, 20 nt, Artificial Sequence
  Synthetic
ucaaauuucaacaugagauu

SEQ ID NO: 404663 - RNA, 21 nt, Artificial Sequence
  Synthetic
aucaaauuucaacaugagauu

SEQ ID NO: 404664 - RNA, 22 nt, Artificial Sequence
  Synthetic
gaucaaauuucaacaugagauu

SEQ ID NO: 404665 - RNA, 23 nt, Artificial Sequence
  Synthetic
ggaucaaauuucaacaugagauu

SEQ ID NO: 404666 - RNA, 24 nt, Artificial Sequence
  Synthetic
aggaucaaauuucaacaugagauu

SEQ ID NO: 404667 - RNA, 18 nt, Artificial Sequence
  Synthetic
augugaugacaugagauu

SEQ ID NO: 404668 - RNA, 19 nt, Artificial Sequence
  Synthetic
aaugugaugacaugagauu

SEQ ID NO: 404669 - RNA, 20 nt, Artificial Sequence
  Synthetic
aaaugugaugacaugagauu

SEQ ID NO: 404670 - RNA, 21 nt, Artificial Sequence
  Synthetic
gaaaugugaugacaugagauu

SEQ ID NO: 404671 - RNA, 22 nt, Artificial Sequence
  Synthetic
ugaaaugugaugacaugagauu

SEQ ID NO: 404672 - RNA, 23 nt, Artificial Sequence
  Synthetic
uugaaaugugaugacaugagauu

SEQ ID NO: 404673 - RNA, 24 nt, Artificial Sequence
  Synthetic
uuugaaaugugaugacaugagauu

SEQ ID NO: 404674 - RNA, 18 nt, Artificial Sequence
  Synthetic
gaugaaucucaugagauu

SEQ ID NO: 404675 - RNA, 19 nt, Artificial Sequence
  Synthetic
ugaugaaucucaugagauu

SEQ ID NO: 404676 - RNA, 20 nt, Artificial Sequence
  Synthetic
augaugaaucucaugagauu

SEQ ID NO: 404677 - RNA, 21 nt, Artificial Sequence
  Synthetic
caugaugaaucucaugagauu

SEQ ID NO: 404678 - RNA, 22 nt, Artificial Sequence
  Synthetic
ccaugaugaaucucaugagauu

SEQ ID NO: 404679 - RNA, 23 nt, Artificial Sequence
  Synthetic
accaugaugaaucucaugagauu

SEQ ID NO: 404680 - RNA, 24 nt, Artificial Sequence
  Synthetic
aaccaugaugaaucucaugagauu

SEQ ID NO: 404681 - RNA, 18 nt, Artificial Sequence
  Synthetic
acaauuuaagaugagauu

SEQ ID NO: 404682 - RNA, 19 nt, Artificial Sequence
  Synthetic
uacaauuuaagaugagauu

SEQ ID NO: 404683 - RNA, 20 nt, Artificial Sequence
  Synthetic
uuacaauuuaagaugagauu

SEQ ID NO: 404684 - RNA, 21 nt, Artificial Sequence
  Synthetic
auuacaauuuaagaugagauu

SEQ ID NO: 404685 - RNA, 22 nt, Artificial Sequence
  Synthetic
gauuacaauuuaagaugagauu

SEQ ID NO: 404686 - RNA, 23 nt, Artificial Sequence
  Synthetic
ggauuacaauuuaagaugagauu

SEQ ID NO: 404687 - RNA, 24 nt, Artificial Sequence
  Synthetic
gggauuacaauuuaagaugagauu

SEQ ID NO: 404688 - RNA, 18 nt, Artificial Sequence
  Synthetic
gucaauagugcugagauu

SEQ ID NO: 404689 - RNA, 19 nt, Artificial Sequence
  Synthetic
ugucaauagugcugagauu

SEQ ID NO: 404690 - RNA, 20 nt, Artificial Sequence
  Synthetic
augucaauagugcugagauu

SEQ ID NO: 404691 - RNA, 21 nt, Artificial Sequence
  Synthetic
aaugucaauagugcugagauu

SEQ ID NO: 404692 - RNA, 22 nt, Artificial Sequence
  Synthetic
aaaugucaauagugcugagauu

SEQ ID NO: 404693 - RNA, 23 nt, Artificial Sequence
  Synthetic
aaaaugucaauagugcugagauu

SEQ ID NO: 404694 - RNA, 24 nt, Artificial Sequence
  Synthetic
aaaaaugucaauagugcugagauu

SEQ ID NO: 404695 - RNA, 18 nt, Artificial Sequence
  Synthetic
aacugagacagugagauu

SEQ ID NO: 404696 - RNA, 19 nt, Artificial Sequence
  Synthetic
gaacugagacagugagauu

SEQ ID NO: 404697 - RNA, 20 nt, Artificial Sequence
  Synthetic
agaacugagacagugagauu

SEQ ID NO: 404698 - RNA, 21 nt, Artificial Sequence
  Synthetic
aagaacugagacagugagauu

SEQ ID NO: 404699 - RNA, 22 nt, Artificial Sequence
  Synthetic
caagaacugagacagugagauu

SEQ ID NO: 404700 - RNA, 23 nt, Artificial Sequence
  Synthetic
ccaagaacugagacagugagauu

SEQ ID NO: 404701 - RNA, 24 nt, Artificial Sequence
  Synthetic
cccaagaacugagacagugagauu

SEQ ID NO: 404702 - RNA, 18 nt, Artificial Sequence
  Synthetic
aucaacaugagugagauu

SEQ ID NO: 404703 - RNA, 19 nt, Artificial Sequence
  Synthetic
caucaacaugagugagauu

SEQ ID NO: 404704 - RNA, 20 nt, Artificial Sequence
  Synthetic
acaucaacaugagugagauu

SEQ ID NO: 404705 - RNA, 21 nt, Artificial Sequence
  Synthetic
aacaucaacaugagugagauu

SEQ ID NO: 404706 - RNA, 22 nt, Artificial Sequence
  Synthetic
aaacaucaacaugagugagauu

SEQ ID NO: 404707 - RNA, 23 nt, Artificial Sequence
  Synthetic
aaaacaucaacaugagugagauu

SEQ ID NO: 404708 - RNA, 24 nt, Artificial Sequence
  Synthetic
uaaaacaucaacaugagugagauu

SEQ ID NO: 404709 - RNA, 18 nt, Artificial Sequence
  Synthetic
uucuucaauuuugagauu

SEQ ID NO: 404710 - RNA, 19 nt, Artificial Sequence
  Synthetic
cuucuucaauuuugagauu

SEQ ID NO: 404711 - RNA, 20 nt, Artificial Sequence
  Synthetic
acuucuucaauuuugagauu

SEQ ID NO: 404712 - RNA, 21 nt, Artificial Sequence
  Synthetic
cacuucuucaauuuugagauu

SEQ ID NO: 404713 - RNA, 22 nt, Artificial Sequence
  Synthetic
acacuucuucaauuuugagauu

SEQ ID NO: 404714 - RNA, 23 nt, Artificial Sequence
  Synthetic
aacacuucuucaauuuugagauu

SEQ ID NO: 404715 - RNA, 24 nt, Artificial Sequence
  Synthetic
aaacacuucuucaauuuugagauu

SEQ ID NO: 404716 - RNA, 18 nt, Artificial Sequence
  Synthetic
guuaccagauaauagauu

SEQ ID NO: 404717 - RNA, 19 nt, Artificial Sequence
  Synthetic
aguuaccagauaauagauu

SEQ ID NO: 404718 - RNA, 20 nt, Artificial Sequence
  Synthetic
aaguuaccagauaauagauu

SEQ ID NO: 404719 - RNA, 21 nt, Artificial Sequence
  Synthetic
gaaguuaccagauaauagauu

SEQ ID NO: 404720 - RNA, 22 nt, Artificial Sequence
  Synthetic
agaaguuaccagauaauagauu

SEQ ID NO: 404721 - RNA, 23 nt, Artificial Sequence
  Synthetic
cagaaguuaccagauaauagauu

SEQ ID NO: 404722 - RNA, 24 nt, Artificial Sequence
  Synthetic
gcagaaguuaccagauaauagauu

SEQ ID NO: 404723 - RNA, 18 nt, Artificial Sequence
  Synthetic
cguacacacacauagauu

SEQ ID NO: 404724 - RNA, 19 nt, Artificial Sequence
  Synthetic
acguacacacacauagauu

SEQ ID NO: 404725 - RNA, 20 nt, Artificial Sequence
  Synthetic
aacguacacacacauagauu

SEQ ID NO: 404726 - RNA, 21 nt, Artificial Sequence
  Synthetic
caacguacacacacauagauu

SEQ ID NO: 404727 - RNA, 22 nt, Artificial Sequence
  Synthetic
ucaacguacacacacauagauu

SEQ ID NO: 404728 - RNA, 23 nt, Artificial Sequence
  Synthetic
uucaacguacacacacauagauu

SEQ ID NO: 404729 - RNA, 24 nt, Artificial Sequence
  Synthetic
auucaacguacacacacauagauu

SEQ ID NO: 404730 - RNA, 18 nt, Artificial Sequence
  Synthetic
ugucagaucccauagauu

SEQ ID NO: 404731 - RNA, 19 nt, Artificial Sequence
  Synthetic
gugucagaucccauagauu

SEQ ID NO: 404732 - RNA, 20 nt, Artificial Sequence
  Synthetic
agugucagaucccauagauu

SEQ ID NO: 404733 - RNA, 21 nt, Artificial Sequence
  Synthetic
uagugucagaucccauagauu

SEQ ID NO: 404734 - RNA, 22 nt, Artificial Sequence
  Synthetic
auagugucagaucccauagauu

SEQ ID NO: 404735 - RNA, 23 nt, Artificial Sequence
  Synthetic
gauagugucagaucccauagauu

SEQ ID NO: 404736 - RNA, 24 nt, Artificial Sequence
  Synthetic
agauagugucagaucccauagauu

SEQ ID NO: 404737 - RNA, 18 nt, Artificial Sequence
  Synthetic
agguuuauggcauagauu

SEQ ID NO: 404738 - RNA, 19 nt, Artificial Sequence
  Synthetic
uagguuuauggcauagauu

SEQ ID NO: 404739 - RNA, 20 nt, Artificial Sequence
  Synthetic
auagguuuauggcauagauu

SEQ ID NO: 404740 - RNA, 21 nt, Artificial Sequence
  Synthetic
cauagguuuauggcauagauu

SEQ ID NO: 404741 - RNA, 22 nt, Artificial Sequence
  Synthetic
gcauagguuuauggcauagauu

SEQ ID NO: 404742 - RNA, 23 nt, Artificial Sequence
  Synthetic
ugcauagguuuauggcauagauu

SEQ ID NO: 404743 - RNA, 24 nt, Artificial Sequence
  Synthetic
augcauagguuuauggcauagauu

SEQ ID NO: 404744 - RNA, 18 nt, Artificial Sequence
  Synthetic
gcuucuuguguauagauu

SEQ ID NO: 404745 - RNA, 19 nt, Artificial Sequence
  Synthetic
agcuucuuguguauagauu

SEQ ID NO: 404746 - RNA, 20 nt, Artificial Sequence
  Synthetic
aagcuucuuguguauagauu

SEQ ID NO: 404747 - RNA, 21 nt, Artificial Sequence
  Synthetic
aaagcuucuuguguauagauu

SEQ ID NO: 404748 - RNA, 22 nt, Artificial Sequence
  Synthetic
gaaagcuucuuguguauagauu

SEQ ID NO: 404749 - RNA, 23 nt, Artificial Sequence
  Synthetic
ugaaagcuucuuguguauagauu

SEQ ID NO: 404750 - RNA, 24 nt, Artificial Sequence
  Synthetic
augaaagcuucuuguguauagauu

SEQ ID NO: 404751 - RNA, 18 nt, Artificial Sequence
  Synthetic
gcacagaauaacuagauu

SEQ ID NO: 404752 - RNA, 19 nt, Artificial Sequence
  Synthetic
ugcacagaauaacuagauu

SEQ ID NO: 404753 - RNA, 20 nt, Artificial Sequence
  Synthetic
uugcacagaauaacuagauu

SEQ ID NO: 404754 - RNA, 21 nt, Artificial Sequence
  Synthetic
uuugcacagaauaacuagauu

SEQ ID NO: 404755 - RNA, 22 nt, Artificial Sequence
  Synthetic
uuuugcacagaauaacuagauu

SEQ ID NO: 404756 - RNA, 23 nt, Artificial Sequence
  Synthetic
uuuuugcacagaauaacuagauu

SEQ ID NO: 404757 - RNA, 24 nt, Artificial Sequence
  Synthetic
guuuuugcacagaauaacuagauu

SEQ ID NO: 404758 - RNA, 18 nt, Artificial Sequence
  Synthetic
aaaacgcccuacuagauu

SEQ ID NO: 404759 - RNA, 19 nt, Artificial Sequence
  Synthetic
aaaaacgcccuacuagauu

SEQ ID NO: 404760 - RNA, 20 nt, Artificial Sequence
  Synthetic
aaaaaacgcccuacuagauu

SEQ ID NO: 404761 - RNA, 21 nt, Artificial Sequence
  Synthetic
aaaaaaacgcccuacuagauu

SEQ ID NO: 404762 - RNA, 22 nt, Artificial Sequence
  Synthetic
caaaaaaacgcccuacuagauu

SEQ ID NO: 404763 - RNA, 23 nt, Artificial Sequence
  Synthetic
ccaaaaaaacgcccuacuagauu

SEQ ID NO: 404764 - RNA, 24 nt, Artificial Sequence
  Synthetic
accaaaaaaacgcccuacuagauu

SEQ ID NO: 404765 - RNA, 18 nt, Artificial Sequence
  Synthetic
ggccugccuuacuagauu

SEQ ID NO: 404766 - RNA, 19 nt, Artificial Sequence
  Synthetic
uggccugccuuacuagauu

SEQ ID NO: 404767 - RNA, 20 nt, Artificial Sequence
  Synthetic
uuggccugccuuacuagauu

SEQ ID NO: 404768 - RNA, 21 nt, Artificial Sequence
  Synthetic
guuggccugccuuacuagauu

SEQ ID NO: 404769 - RNA, 22 nt, Artificial Sequence
  Synthetic
cguuggccugccuuacuagauu

SEQ ID NO: 404770 - RNA, 23 nt, Artificial Sequence
  Synthetic
acguuggccugccuuacuagauu

SEQ ID NO: 404771 - RNA, 24 nt, Artificial Sequence
  Synthetic
aacguuggccugccuuacuagauu

SEQ ID NO: 404772 - RNA, 18 nt, Artificial Sequence
  Synthetic
ccuuaacauaccuagauu

SEQ ID NO: 404773 - RNA, 19 nt, Artificial Sequence
  Synthetic
cccuuaacauaccuagauu

SEQ ID NO: 404774 - RNA, 20 nt, Artificial Sequence
  Synthetic
ucccuuaacauaccuagauu

SEQ ID NO: 404775 - RNA, 21 nt, Artificial Sequence
  Synthetic
aucccuuaacauaccuagauu

SEQ ID NO: 404776 - RNA, 22 nt, Artificial Sequence
  Synthetic
caucccuuaacauaccuagauu

SEQ ID NO: 404777 - RNA, 23 nt, Artificial Sequence
  Synthetic
ccaucccuuaacauaccuagauu

SEQ ID NO: 404778 - RNA, 24 nt, Artificial Sequence
  Synthetic
accaucccuuaacauaccuagauu

SEQ ID NO: 404779 - RNA, 18 nt, Artificial Sequence
  Synthetic
uccugugcuuucuagauu

SEQ ID NO: 404780 - RNA, 19 nt, Artificial Sequence
  Synthetic
cuccugugcuuucuagauu

SEQ ID NO: 404781 - RNA, 20 nt, Artificial Sequence
  Synthetic
ccuccugugcuuucuagauu

SEQ ID NO: 404782 - RNA, 21 nt, Artificial Sequence
  Synthetic
gccuccugugcuuucuagauu

SEQ ID NO: 404783 - RNA, 22 nt, Artificial Sequence
  Synthetic
ugccuccugugcuuucuagauu

SEQ ID NO: 404784 - RNA, 23 nt, Artificial Sequence
  Synthetic
uugccuccugugcuuucuagauu

SEQ ID NO: 404785 - RNA, 24 nt, Artificial Sequence
  Synthetic
uuugccuccugugcuuucuagauu

SEQ ID NO: 404786 - RNA, 18 nt, Artificial Sequence
  Synthetic
ucuuuggaaacguagauu

SEQ ID NO: 404787 - RNA, 19 nt, Artificial Sequence
  Synthetic
cucuuuggaaacguagauu

SEQ ID NO: 404788 - RNA, 20 nt, Artificial Sequence
  Synthetic
ucucuuuggaaacguagauu

SEQ ID NO: 404789 - RNA, 21 nt, Artificial Sequence
  Synthetic
uucucuuuggaaacguagauu

SEQ ID NO: 404790 - RNA, 22 nt, Artificial Sequence
  Synthetic
uuucucuuuggaaacguagauu

SEQ ID NO: 404791 - RNA, 23 nt, Artificial Sequence
  Synthetic
cuuucucuuuggaaacguagauu

SEQ ID NO: 404792 - RNA, 24 nt, Artificial Sequence
  Synthetic
acuuucucuuuggaaacguagauu

SEQ ID NO: 404793 - RNA, 18 nt, Artificial Sequence
  Synthetic
uuaauacaaagguagauu

SEQ ID NO: 404794 - RNA, 19 nt, Artificial Sequence
  Synthetic
auuaauacaaagguagauu

SEQ ID NO: 404795 - RNA, 20 nt, Artificial Sequence
  Synthetic
aauuaauacaaagguagauu

SEQ ID NO: 404796 - RNA, 21 nt, Artificial Sequence
  Synthetic
caauuaauacaaagguagauu

SEQ ID NO: 404797 - RNA, 22 nt, Artificial Sequence
  Synthetic
ucaauuaauacaaagguagauu

SEQ ID NO: 404798 - RNA, 23 nt, Artificial Sequence
  Synthetic
aucaauuaauacaaagguagauu

SEQ ID NO: 404799 - RNA, 24 nt, Artificial Sequence
  Synthetic
aaucaauuaauacaaagguagauu

SEQ ID NO: 404800 - RNA, 18 nt, Artificial Sequence
  Synthetic
auuuuuaaagauuagauu

SEQ ID NO: 404801 - RNA, 19 nt, Artificial Sequence
  Synthetic
cauuuuuaaagauuagauu

SEQ ID NO: 404802 - RNA, 20 nt, Artificial Sequence
  Synthetic
gcauuuuuaaagauuagauu

SEQ ID NO: 404803 - RNA, 21 nt, Artificial Sequence
  Synthetic
ggcauuuuuaaagauuagauu

SEQ ID NO: 404804 - RNA, 22 nt, Artificial Sequence
  Synthetic
aggcauuuuuaaagauuagauu

SEQ ID NO: 404805 - RNA, 23 nt, Artificial Sequence
  Synthetic
caggcauuuuuaaagauuagauu

SEQ ID NO: 404806 - RNA, 24 nt, Artificial Sequence
  Synthetic
ccaggcauuuuuaaagauuagauu

SEQ ID NO: 404807 - RNA, 18 nt, Artificial Sequence
  Synthetic
uucugaagaguuuagauu

SEQ ID NO: 404808 - RNA, 19 nt, Artificial Sequence
  Synthetic
auucugaagaguuuagauu

SEQ ID NO: 404809 - RNA, 20 nt, Artificial Sequence
  Synthetic
aauucugaagaguuuagauu

SEQ ID NO: 404810 - RNA, 21 nt, Artificial Sequence
  Synthetic
caauucugaagaguuuagauu

SEQ ID NO: 404811 - RNA, 22 nt, Artificial Sequence
  Synthetic
ccaauucugaagaguuuagauu

SEQ ID NO: 404812 - RNA, 23 nt, Artificial Sequence
  Synthetic
cccaauucugaagaguuuagauu

SEQ ID NO: 404813 - RNA, 24 nt, Artificial Sequence
  Synthetic
acccaauucugaagaguuuagauu

SEQ ID NO: 404814 - RNA, 18 nt, Artificial Sequence
  Synthetic
ucccuguuaguuuagauu

SEQ ID NO: 404815 - RNA, 19 nt, Artificial Sequence
  Synthetic
aucccuguuaguuuagauu

SEQ ID NO: 404816 - RNA, 20 nt, Artificial Sequence
  Synthetic
uaucccuguuaguuuagauu

SEQ ID NO: 404817 - RNA, 21 nt, Artificial Sequence
  Synthetic
guaucccuguuaguuuagauu

SEQ ID NO: 404818 - RNA, 22 nt, Artificial Sequence
  Synthetic
uguaucccuguuaguuuagauu

SEQ ID NO: 404819 - RNA, 23 nt, Artificial Sequence
  Synthetic
cuguaucccuguuaguuuagauu

SEQ ID NO: 404820 - RNA, 24 nt, Artificial Sequence
  Synthetic
ucuguaucccuguuaguuuagauu

SEQ ID NO: 404821 - RNA, 18 nt, Artificial Sequence
  Synthetic
caacuuugauuuuagauu

SEQ ID NO: 404822 - RNA, 19 nt, Artificial Sequence
  Synthetic
ucaacuuugauuuuagauu

SEQ ID NO: 404823 - RNA, 20 nt, Artificial Sequence
  Synthetic
uucaacuuugauuuuagauu

SEQ ID NO: 404824 - RNA, 21 nt, Artificial Sequence
  Synthetic
uuucaacuuugauuuuagauu

SEQ ID NO: 404825 - RNA, 22 nt, Artificial Sequence
  Synthetic
uuuucaacuuugauuuuagauu

SEQ ID NO: 404826 - RNA, 23 nt, Artificial Sequence
  Synthetic
uuuuucaacuuugauuuuagauu

SEQ ID NO: 404827 - RNA, 24 nt, Artificial Sequence
  Synthetic
uuuuuucaacuuugauuuuagauu

SEQ ID NO: 404828 - RNA, 18 nt, Artificial Sequence
  Synthetic
ucaaguguauuuuagauu

SEQ ID NO: 404829 - RNA, 19 nt, Artificial Sequence
  Synthetic
uucaaguguauuuuagauu

SEQ ID NO: 404830 - RNA, 20 nt, Artificial Sequence
  Synthetic
uuucaaguguauuuuagauu

SEQ ID NO: 404831 - RNA, 21 nt, Artificial Sequence
  Synthetic
auuucaaguguauuuuagauu

SEQ ID NO: 404832 - RNA, 22 nt, Artificial Sequence
  Synthetic
aauuucaaguguauuuuagauu

SEQ ID NO: 404833 - RNA, 23 nt, Artificial Sequence
  Synthetic
uaauuucaaguguauuuuagauu

SEQ ID NO: 404834 - RNA, 24 nt, Artificial Sequence
  Synthetic
auaauuucaaguguauuuuagauu

SEQ ID NO: 404835 - RNA, 18 nt, Artificial Sequence
  Synthetic
uuuggagaguuuuagauu

SEQ ID NO: 404836 - RNA, 19 nt, Artificial Sequence
  Synthetic
cuuuggagaguuuuagauu

SEQ ID NO: 404837 - RNA, 20 nt, Artificial Sequence
  Synthetic
acuuuggagaguuuuagauu

SEQ ID NO: 404838 - RNA, 21 nt, Artificial Sequence
  Synthetic
cacuuuggagaguuuuagauu

SEQ ID NO: 404839 - RNA, 22 nt, Artificial Sequence
  Synthetic
acacuuuggagaguuuuagauu

SEQ ID NO: 404840 - RNA, 23 nt, Artificial Sequence
  Synthetic
uacacuuuggagaguuuuagauu

SEQ ID NO: 404841 - RNA, 24 nt, Artificial Sequence
  Synthetic
cuacacuuuggagaguuuuagauu

SEQ ID NO: 404842 - RNA, 18 nt, Artificial Sequence
  Synthetic
uuuguaaagaugacgauu

SEQ ID NO: 404843 - RNA, 19 nt, Artificial Sequence
  Synthetic
auuuguaaagaugacgauu

SEQ ID NO: 404844 - RNA, 20 nt, Artificial Sequence
  Synthetic
uauuuguaaagaugacgauu

SEQ ID NO: 404845 - RNA, 21 nt, Artificial Sequence
  Synthetic
cuauuuguaaagaugacgauu

SEQ ID NO: 404846 - RNA, 22 nt, Artificial Sequence
  Synthetic
acuauuuguaaagaugacgauu

SEQ ID NO: 404847 - RNA, 23 nt, Artificial Sequence
  Synthetic
gacuauuuguaaagaugacgauu

SEQ ID NO: 404848 - RNA, 24 nt, Artificial Sequence
  Synthetic
agacuauuuguaaagaugacgauu

SEQ ID NO: 404849 - RNA, 18 nt, Artificial Sequence
  Synthetic
aguacuucugguacgauu

SEQ ID NO: 404850 - RNA, 19 nt, Artificial Sequence
  Synthetic
uaguacuucugguacgauu

SEQ ID NO: 404851 - RNA, 20 nt, Artificial Sequence
  Synthetic
cuaguacuucugguacgauu

SEQ ID NO: 404852 - RNA, 21 nt, Artificial Sequence
  Synthetic
gcuaguacuucugguacgauu

SEQ ID NO: 404853 - RNA, 22 nt, Artificial Sequence
  Synthetic
ggcuaguacuucugguacgauu

SEQ ID NO: 404854 - RNA, 23 nt, Artificial Sequence
  Synthetic
uggcuaguacuucugguacgauu

SEQ ID NO: 404855 - RNA, 24 nt, Artificial Sequence
  Synthetic
cuggcuaguacuucugguacgauu

SEQ ID NO: 404856 - RNA, 18 nt, Artificial Sequence
  Synthetic
uguuuuagaaaaccgauu

SEQ ID NO: 404857 - RNA, 19 nt, Artificial Sequence
  Synthetic
guguuuuagaaaaccgauu

SEQ ID NO: 404858 - RNA, 20 nt, Artificial Sequence
  Synthetic
uguguuuuagaaaaccgauu

SEQ ID NO: 404859 - RNA, 21 nt, Artificial Sequence
  Synthetic
uuguguuuuagaaaaccgauu

SEQ ID NO: 404860 - RNA, 22 nt, Artificial Sequence
  Synthetic
uuuguguuuuagaaaaccgauu

SEQ ID NO: 404861 - RNA, 23 nt, Artificial Sequence
  Synthetic
uuuuguguuuuagaaaaccgauu

SEQ ID NO: 404862 - RNA, 24 nt, Artificial Sequence
  Synthetic
uuuuuguguuuuagaaaaccgauu

SEQ ID NO: 404863 - RNA, 18 nt, Artificial Sequence
  Synthetic
aauuccaauacuccgauu

SEQ ID NO: 404864 - RNA, 19 nt, Artificial Sequence
  Synthetic
aaauuccaauacuccgauu

SEQ ID NO: 404865 - RNA, 20 nt, Artificial Sequence
  Synthetic
gaaauuccaauacuccgauu

SEQ ID NO: 404866 - RNA, 21 nt, Artificial Sequence
  Synthetic
agaaauuccaauacuccgauu

SEQ ID NO: 404867 - RNA, 22 nt, Artificial Sequence
  Synthetic
uagaaauuccaauacuccgauu

SEQ ID NO: 404868 - RNA, 23 nt, Artificial Sequence
  Synthetic
auagaaauuccaauacuccgauu

SEQ ID NO: 404869 - RNA, 24 nt, Artificial Sequence
  Synthetic
aauagaaauuccaauacuccgauu

SEQ ID NO: 404870 - RNA, 18 nt, Artificial Sequence
  Synthetic
auuguuuggugagcgauu

SEQ ID NO: 404871 - RNA, 19 nt, Artificial Sequence
  Synthetic
cauuguuuggugagcgauu

SEQ ID NO: 404872 - RNA, 20 nt, Artificial Sequence
  Synthetic
ccauuguuuggugagcgauu

SEQ ID NO: 404873 - RNA, 21 nt, Artificial Sequence
  Synthetic
cccauuguuuggugagcgauu

SEQ ID NO: 404874 - RNA, 22 nt, Artificial Sequence
  Synthetic
gcccauuguuuggugagcgauu

SEQ ID NO: 404875 - RNA, 23 nt, Artificial Sequence
  Synthetic
ggcccauuguuuggugagcgauu

SEQ ID NO: 404876 - RNA, 24 nt, Artificial Sequence
  Synthetic
uggcccauuguuuggugagcgauu

SEQ ID NO: 404877 - RNA, 18 nt, Artificial Sequence
  Synthetic
agauagaauggggcgauu

SEQ ID NO: 404878 - RNA, 19 nt, Artificial Sequence
  Synthetic
uagauagaauggggcgauu

SEQ ID NO: 404879 - RNA, 20 nt, Artificial Sequence
  Synthetic
auagauagaauggggcgauu

SEQ ID NO: 404880 - RNA, 21 nt, Artificial Sequence
  Synthetic
uauagauagaauggggcgauu

SEQ ID NO: 404881 - RNA, 22 nt, Artificial Sequence
  Synthetic
cuauagauagaauggggcgauu

SEQ ID NO: 404882 - RNA, 23 nt, Artificial Sequence
  Synthetic
acuauagauagaauggggcgauu

SEQ ID NO: 404883 - RNA, 24 nt, Artificial Sequence
  Synthetic
gacuauagauagaauggggcgauu

SEQ ID NO: 404884 - RNA, 18 nt, Artificial Sequence
  Synthetic
aguauaguggaaaggauu

SEQ ID NO: 404885 - RNA, 19 nt, Artificial Sequence
  Synthetic
uaguauaguggaaaggauu

SEQ ID NO: 404886 - RNA, 20 nt, Artificial Sequence
  Synthetic
guaguauaguggaaaggauu

SEQ ID NO: 404887 - RNA, 21 nt, Artificial Sequence
  Synthetic
uguaguauaguggaaaggauu

SEQ ID NO: 404888 - RNA, 22 nt, Artificial Sequence
  Synthetic
uuguaguauaguggaaaggauu

SEQ ID NO: 404889 - RNA, 23 nt, Artificial Sequence
  Synthetic
auuguaguauaguggaaaggauu

SEQ ID NO: 404890 - RNA, 24 nt, Artificial Sequence
  Synthetic
aauuguaguauaguggaaaggauu

SEQ ID NO: 404891 - RNA, 18 nt, Artificial Sequence
  Synthetic
ccuguaaucccaaggauu

SEQ ID NO: 404892 - RNA, 19 nt, Artificial Sequence
  Synthetic
gccuguaaucccaaggauu

SEQ ID NO: 404893 - RNA, 20 nt, Artificial Sequence
  Synthetic
ugccuguaaucccaaggauu

SEQ ID NO: 404894 - RNA, 21 nt, Artificial Sequence
  Synthetic
augccuguaaucccaaggauu

SEQ ID NO: 404895 - RNA, 22 nt, Artificial Sequence
  Synthetic
caugccuguaaucccaaggauu

SEQ ID NO: 404896 - RNA, 23 nt, Artificial Sequence
  Synthetic
ucaugccuguaaucccaaggauu

SEQ ID NO: 404897 - RNA, 24 nt, Artificial Sequence
  Synthetic
cucaugccuguaaucccaaggauu

SEQ ID NO: 404898 - RNA, 18 nt, Artificial Sequence
  Synthetic
uaugggaugagaaggauu

SEQ ID NO: 404899 - RNA, 19 nt, Artificial Sequence
  Synthetic
cuaugggaugagaaggauu

SEQ ID NO: 404900 - RNA, 20 nt, Artificial Sequence
  Synthetic
ucuaugggaugagaaggauu

SEQ ID NO: 404901 - RNA, 21 nt, Artificial Sequence
  Synthetic
aucuaugggaugagaaggauu

SEQ ID NO: 404902 - RNA, 22 nt, Artificial Sequence
  Synthetic
aaucuaugggaugagaaggauu

SEQ ID NO: 404903 - RNA, 23 nt, Artificial Sequence
  Synthetic
gaaucuaugggaugagaaggauu

SEQ ID NO: 404904 - RNA, 24 nt, Artificial Sequence
  Synthetic
ggaaucuaugggaugagaaggauu

SEQ ID NO: 404905 - RNA, 18 nt, Artificial Sequence
  Synthetic
cccaaaacaugaaggauu

SEQ ID NO: 404906 - RNA, 19 nt, Artificial Sequence
  Synthetic
acccaaaacaugaaggauu

SEQ ID NO: 404907 - RNA, 20 nt, Artificial Sequence
  Synthetic
uacccaaaacaugaaggauu

SEQ ID NO: 404908 - RNA, 21 nt, Artificial Sequence
  Synthetic
uuacccaaaacaugaaggauu

SEQ ID NO: 404909 - RNA, 22 nt, Artificial Sequence
  Synthetic
auuacccaaaacaugaaggauu

SEQ ID NO: 404910 - RNA, 23 nt, Artificial Sequence
  Synthetic
uauuacccaaaacaugaaggauu

SEQ ID NO: 404911 - RNA, 24 nt, Artificial Sequence
  Synthetic
uuauuacccaaaacaugaaggauu

SEQ ID NO: 404912 - RNA, 18 nt, Artificial Sequence
  Synthetic
aagcauaacugaaggauu

SEQ ID NO: 404913 - RNA, 19 nt, Artificial Sequence
  Synthetic
gaagcauaacugaaggauu

SEQ ID NO: 404914 - RNA, 20 nt, Artificial Sequence
  Synthetic
ugaagcauaacugaaggauu

SEQ ID NO: 404915 - RNA, 21 nt, Artificial Sequence
  Synthetic
gugaagcauaacugaaggauu

SEQ ID NO: 404916 - RNA, 22 nt, Artificial Sequence
  Synthetic
ggugaagcauaacugaaggauu

SEQ ID NO: 404917 - RNA, 23 nt, Artificial Sequence
  Synthetic
cggugaagcauaacugaaggauu

SEQ ID NO: 404918 - RNA, 24 nt, Artificial Sequence
  Synthetic
ucggugaagcauaacugaaggauu

SEQ ID NO: 404919 - RNA, 18 nt, Artificial Sequence
  Synthetic
aguaaaggcagcaggauu

SEQ ID NO: 404920 - RNA, 19 nt, Artificial Sequence
  Synthetic
gaguaaaggcagcaggauu

SEQ ID NO: 404921 - RNA, 20 nt, Artificial Sequence
  Synthetic
ggaguaaaggcagcaggauu

SEQ ID NO: 404922 - RNA, 21 nt, Artificial Sequence
  Synthetic
gggaguaaaggcagcaggauu

SEQ ID NO: 404923 - RNA, 22 nt, Artificial Sequence
  Synthetic
agggaguaaaggcagcaggauu

SEQ ID NO: 404924 - RNA, 23 nt, Artificial Sequence
  Synthetic
gagggaguaaaggcagcaggauu

SEQ ID NO: 404925 - RNA, 24 nt, Artificial Sequence
  Synthetic
ggagggaguaaaggcagcaggauu

SEQ ID NO: 404926 - RNA, 18 nt, Artificial Sequence
  Synthetic
aaaaaagauggcaggauu

SEQ ID NO: 404927 - RNA, 19 nt, Artificial Sequence
  Synthetic
aaaaaaagauggcaggauu

SEQ ID NO: 404928 - RNA, 20 nt, Artificial Sequence
  Synthetic
caaaaaaagauggcaggauu

SEQ ID NO: 404929 - RNA, 21 nt, Artificial Sequence
  Synthetic
gcaaaaaaagauggcaggauu

SEQ ID NO: 404930 - RNA, 22 nt, Artificial Sequence
  Synthetic
agcaaaaaaagauggcaggauu

SEQ ID NO: 404931 - RNA, 23 nt, Artificial Sequence
  Synthetic
aagcaaaaaaagauggcaggauu

SEQ ID NO: 404932 - RNA, 24 nt, Artificial Sequence
  Synthetic
aaagcaaaaaaagauggcaggauu

SEQ ID NO: 404933 - RNA, 18 nt, Artificial Sequence
  Synthetic
aggcaacaaugcaggauu

SEQ ID NO: 404934 - RNA, 19 nt, Artificial Sequence
  Synthetic
caggcaacaaugcaggauu

SEQ ID NO: 404935 - RNA, 20 nt, Artificial Sequence
  Synthetic
acaggcaacaaugcaggauu

SEQ ID NO: 404936 - RNA, 21 nt, Artificial Sequence
  Synthetic
uacaggcaacaaugcaggauu

SEQ ID NO: 404937 - RNA, 22 nt, Artificial Sequence
  Synthetic
uuacaggcaacaaugcaggauu

SEQ ID NO: 404938 - RNA, 23 nt, Artificial Sequence
  Synthetic
cuuacaggcaacaaugcaggauu

SEQ ID NO: 404939 - RNA, 24 nt, Artificial Sequence
  Synthetic
ucuuacaggcaacaaugcaggauu

SEQ ID NO: 404940 - RNA, 18 nt, Artificial Sequence
  Synthetic
ugaguggguaucaggauu

SEQ ID NO: 404941 - RNA, 19 nt, Artificial Sequence
  Synthetic
gugaguggguaucaggauu

SEQ ID NO: 404942 - RNA, 20 nt, Artificial Sequence
  Synthetic
ggugaguggguaucaggauu

SEQ ID NO: 404943 - RNA, 21 nt, Artificial Sequence
  Synthetic
gggugaguggguaucaggauu

SEQ ID NO: 404944 - RNA, 22 nt, Artificial Sequence
  Synthetic
ggggugaguggguaucaggauu

SEQ ID NO: 404945 - RNA, 23 nt, Artificial Sequence
  Synthetic
gggggugaguggguaucaggauu

SEQ ID NO: 404946 - RNA, 24 nt, Artificial Sequence
  Synthetic
ugggggugaguggguaucaggauu

SEQ ID NO: 404947 - RNA, 18 nt, Artificial Sequence
  Synthetic
aaauuagaacucaggauu

SEQ ID NO: 404948 - RNA, 19 nt, Artificial Sequence
  Synthetic
caaauuagaacucaggauu

SEQ ID NO: 404949 - RNA, 20 nt, Artificial Sequence
  Synthetic
ucaaauuagaacucaggauu

SEQ ID NO: 404950 - RNA, 21 nt, Artificial Sequence
  Synthetic
aucaaauuagaacucaggauu

SEQ ID NO: 404951 - RNA, 22 nt, Artificial Sequence
  Synthetic
aaucaaauuagaacucaggauu

SEQ ID NO: 404952 - RNA, 23 nt, Artificial Sequence
  Synthetic
caaucaaauuagaacucaggauu

SEQ ID NO: 404953 - RNA, 24 nt, Artificial Sequence
  Synthetic
acaaucaaauuagaacucaggauu

SEQ ID NO: 404954 - RNA, 18 nt, Artificial Sequence
  Synthetic
ucaccugaggucaggauu

SEQ ID NO: 404955 - RNA, 19 nt, Artificial Sequence
  Synthetic
aucaccugaggucaggauu

SEQ ID NO: 404956 - RNA, 20 nt, Artificial Sequence
  Synthetic
gaucaccugaggucaggauu

SEQ ID NO: 404957 - RNA, 21 nt, Artificial Sequence
  Synthetic
ggaucaccugaggucaggauu

SEQ ID NO: 404958 - RNA, 22 nt, Artificial Sequence
  Synthetic
uggaucaccugaggucaggauu

SEQ ID NO: 404959 - RNA, 23 nt, Artificial Sequence
  Synthetic
guggaucaccugaggucaggauu

SEQ ID NO: 404960 - RNA, 24 nt, Artificial Sequence
  Synthetic
gguggaucaccugaggucaggauu

SEQ ID NO: 404961 - RNA, 18 nt, Artificial Sequence
  Synthetic
auagcagugaagaggauu

SEQ ID NO: 404962 - RNA, 19 nt, Artificial Sequence
  Synthetic
cauagcagugaagaggauu

SEQ ID NO: 404963 - RNA, 20 nt, Artificial Sequence
  Synthetic
gcauagcagugaagaggauu

SEQ ID NO: 404964 - RNA, 21 nt, Artificial Sequence
  Synthetic
ugcauagcagugaagaggauu

SEQ ID NO: 404965 - RNA, 22 nt, Artificial Sequence
  Synthetic
uugcauagcagugaagaggauu

SEQ ID NO: 404966 - RNA, 23 nt, Artificial Sequence
  Synthetic
cuugcauagcagugaagaggauu

SEQ ID NO: 404967 - RNA, 24 nt, Artificial Sequence
  Synthetic
ccuugcauagcagugaagaggauu

SEQ ID NO: 404968 - RNA, 18 nt, Artificial Sequence
  Synthetic
gaaucucccccgaggauu

SEQ ID NO: 404969 - RNA, 19 nt, Artificial Sequence
  Synthetic
agaaucucccccgaggauu

SEQ ID NO: 404970 - RNA, 20 nt, Artificial Sequence
  Synthetic
gagaaucucccccgaggauu

SEQ ID NO: 404971 - RNA, 21 nt, Artificial Sequence
  Synthetic
agagaaucucccccgaggauu

SEQ ID NO: 404972 - RNA, 22 nt, Artificial Sequence
  Synthetic
gagagaaucucccccgaggauu

SEQ ID NO: 404973 - RNA, 23 nt, Artificial Sequence
  Synthetic
agagagaaucucccccgaggauu

SEQ ID NO: 404974 - RNA, 24 nt, Artificial Sequence
  Synthetic
gagagagaaucucccccgaggauu

SEQ ID NO: 404975 - RNA, 18 nt, Artificial Sequence
  Synthetic
uauucugaccugaggauu

SEQ ID NO: 404976 - RNA, 19 nt, Artificial Sequence
  Synthetic
guauucugaccugaggauu

SEQ ID NO: 404977 - RNA, 20 nt, Artificial Sequence
  Synthetic
uguauucugaccugaggauu

SEQ ID NO: 404978 - RNA, 21 nt, Artificial Sequence
  Synthetic
auguauucugaccugaggauu

SEQ ID NO: 404979 - RNA, 22 nt, Artificial Sequence
  Synthetic
uauguauucugaccugaggauu

SEQ ID NO: 404980 - RNA, 23 nt, Artificial Sequence
  Synthetic
auauguauucugaccugaggauu

SEQ ID NO: 404981 - RNA, 24 nt, Artificial Sequence
  Synthetic
uauauguauucugaccugaggauu

SEQ ID NO: 404982 - RNA, 18 nt, Artificial Sequence
  Synthetic
aucaguaauuuuaggauu

SEQ ID NO: 404983 - RNA, 19 nt, Artificial Sequence
  Synthetic
aaucaguaauuuuaggauu

SEQ ID NO: 404984 - RNA, 20 nt, Artificial Sequence
  Synthetic
aaaucaguaauuuuaggauu

SEQ ID NO: 404985 - RNA, 21 nt, Artificial Sequence
  Synthetic
aaaaucaguaauuuuaggauu

SEQ ID NO: 404986 - RNA, 22 nt, Artificial Sequence
  Synthetic
caaaaucaguaauuuuaggauu

SEQ ID NO: 404987 - RNA, 23 nt, Artificial Sequence
  Synthetic
ucaaaaucaguaauuuuaggauu

SEQ ID NO: 404988 - RNA, 24 nt, Artificial Sequence
  Synthetic
aucaaaaucaguaauuuuaggauu

SEQ ID NO: 404989 - RNA, 18 nt, Artificial Sequence
  Synthetic
cuuuucuguuuuaggauu

SEQ ID NO: 404990 - RNA, 19 nt, Artificial Sequence
  Synthetic
acuuuucuguuuuaggauu

SEQ ID NO: 404991 - RNA, 20 nt, Artificial Sequence
  Synthetic
uacuuuucuguuuuaggauu

SEQ ID NO: 404992 - RNA, 21 nt, Artificial Sequence
  Synthetic
uuacuuuucuguuuuaggauu

SEQ ID NO: 404993 - RNA, 22 nt, Artificial Sequence
  Synthetic
auuacuuuucuguuuuaggauu

SEQ ID NO: 404994 - RNA, 23 nt, Artificial Sequence
  Synthetic
cauuacuuuucuguuuuaggauu

SEQ ID NO: 404995 - RNA, 24 nt, Artificial Sequence
  Synthetic
ucauuacuuuucuguuuuaggauu

SEQ ID NO: 404996 - RNA, 18 nt, Artificial Sequence
  Synthetic
ucaaugauagaccggauu

SEQ ID NO: 404997 - RNA, 19 nt, Artificial Sequence
  Synthetic
aucaaugauagaccggauu

SEQ ID NO: 404998 - RNA, 20 nt, Artificial Sequence
  Synthetic
caucaaugauagaccggauu

SEQ ID NO: 404999 - RNA, 21 nt, Artificial Sequence
  Synthetic
ccaucaaugauagaccggauu

SEQ ID NO: 405000 - RNA, 22 nt, Artificial Sequence
  Synthetic
uccaucaaugauagaccggauu

SEQ ID NO: 405001 - RNA, 23 nt, Artificial Sequence
  Synthetic
guccaucaaugauagaccggauu

SEQ ID NO: 405002 - RNA, 24 nt, Artificial Sequence
  Synthetic
uguccaucaaugauagaccggauu

SEQ ID NO: 405003 - RNA, 18 nt, Artificial Sequence
  Synthetic
uuaucuguucaagggauu

SEQ ID NO: 405004 - RNA, 19 nt, Artificial Sequence
  Synthetic
uuuaucuguucaagggauu

SEQ ID NO: 405005 - RNA, 20 nt, Artificial Sequence
  Synthetic
uuuuaucuguucaagggauu

SEQ ID NO: 405006 - RNA, 21 nt, Artificial Sequence
  Synthetic
auuuuaucuguucaagggauu

SEQ ID NO: 405007 - RNA, 22 nt, Artificial Sequence
  Synthetic
aauuuuaucuguucaagggauu

SEQ ID NO: 405008 - RNA, 23 nt, Artificial Sequence
  Synthetic
uaauuuuaucuguucaagggauu

SEQ ID NO: 405009 - RNA, 24 nt, Artificial Sequence
  Synthetic
auaauuuuaucuguucaagggauu

SEQ ID NO: 405010 - RNA, 18 nt, Artificial Sequence
  Synthetic
ggcccauauucagggauu

SEQ ID NO: 405011 - RNA, 19 nt, Artificial Sequence
  Synthetic
aggcccauauucagggauu

SEQ ID NO: 405012 - RNA, 20 nt, Artificial Sequence
  Synthetic
caggcccauauucagggauu

SEQ ID NO: 405013 - RNA, 21 nt, Artificial Sequence
  Synthetic
gcaggcccauauucagggauu

SEQ ID NO: 405014 - RNA, 22 nt, Artificial Sequence
  Synthetic
ggcaggcccauauucagggauu

SEQ ID NO: 405015 - RNA, 23 nt, Artificial Sequence
  Synthetic
aggcaggcccauauucagggauu

SEQ ID NO: 405016 - RNA, 24 nt, Artificial Sequence
  Synthetic
aaggcaggcccauauucagggauu

SEQ ID NO: 405017 - RNA, 18 nt, Artificial Sequence
  Synthetic
uugaaaaaaauagggauu

SEQ ID NO: 405018 - RNA, 19 nt, Artificial Sequence
  Synthetic
guugaaaaaaauagggauu

SEQ ID NO: 405019 - RNA, 20 nt, Artificial Sequence
  Synthetic
aguugaaaaaaauagggauu

SEQ ID NO: 405020 - RNA, 21 nt, Artificial Sequence
  Synthetic
aaguugaaaaaaauagggauu

SEQ ID NO: 405021 - RNA, 22 nt, Artificial Sequence
  Synthetic
caaguugaaaaaaauagggauu

SEQ ID NO: 405022 - RNA, 23 nt, Artificial Sequence
  Synthetic
ucaaguugaaaaaaauagggauu

SEQ ID NO: 405023 - RNA, 24 nt, Artificial Sequence
  Synthetic
uucaaguugaaaaaaauagggauu

SEQ ID NO: 405024 - RNA, 18 nt, Artificial Sequence
  Synthetic
agugguuucgccgggauu

SEQ ID NO: 405025 - RNA, 19 nt, Artificial Sequence
  Synthetic
uagugguuucgccgggauu

SEQ ID NO: 405026 - RNA, 20 nt, Artificial Sequence
  Synthetic
guagugguuucgccgggauu

SEQ ID NO: 405027 - RNA, 21 nt, Artificial Sequence
  Synthetic
uguagugguuucgccgggauu

SEQ ID NO: 405028 - RNA, 22 nt, Artificial Sequence
  Synthetic
auguagugguuucgccgggauu

SEQ ID NO: 405029 - RNA, 23 nt, Artificial Sequence
  Synthetic
aauguagugguuucgccgggauu

SEQ ID NO: 405030 - RNA, 24 nt, Artificial Sequence
  Synthetic
aaauguagugguuucgccgggauu

SEQ ID NO: 405031 - RNA, 18 nt, Artificial Sequence
  Synthetic
cacaccaguugggggauu

SEQ ID NO: 405032 - RNA, 19 nt, Artificial Sequence
  Synthetic
acacaccaguugggggauu

SEQ ID NO: 405033 - RNA, 20 nt, Artificial Sequence
  Synthetic
cacacaccaguugggggauu

SEQ ID NO: 405034 - RNA, 21 nt, Artificial Sequence
  Synthetic
ucacacaccaguugggggauu

SEQ ID NO: 405035 - RNA, 22 nt, Artificial Sequence
  Synthetic
aucacacaccaguugggggauu

SEQ ID NO: 405036 - RNA, 23 nt, Artificial Sequence
  Synthetic
caucacacaccaguugggggauu

SEQ ID NO: 405037 - RNA, 24 nt, Artificial Sequence
  Synthetic
acaucacacaccaguugggggauu

SEQ ID NO: 405038 - RNA, 18 nt, Artificial Sequence
  Synthetic
ccaugacacauggggauu

SEQ ID NO: 405039 - RNA, 19 nt, Artificial Sequence
  Synthetic
cccaugacacauggggauu

SEQ ID NO: 405040 - RNA, 20 nt, Artificial Sequence
  Synthetic
ucccaugacacauggggauu

SEQ ID NO: 405041 - RNA, 21 nt, Artificial Sequence
  Synthetic
cucccaugacacauggggauu

SEQ ID NO: 405042 - RNA, 22 nt, Artificial Sequence
  Synthetic
acucccaugacacauggggauu

SEQ ID NO: 405043 - RNA, 23 nt, Artificial Sequence
  Synthetic
cacucccaugacacauggggauu

SEQ ID NO: 405044 - RNA, 24 nt, Artificial Sequence
  Synthetic
ucacucccaugacacauggggauu

SEQ ID NO: 405045 - RNA, 18 nt, Artificial Sequence
  Synthetic
cuuugacaccuggggauu

SEQ ID NO: 405046 - RNA, 19 nt, Artificial Sequence
  Synthetic
ccuuugacaccuggggauu

SEQ ID NO: 405047 - RNA, 20 nt, Artificial Sequence
  Synthetic
uccuuugacaccuggggauu

SEQ ID NO: 405048 - RNA, 21 nt, Artificial Sequence
  Synthetic
cuccuuugacaccuggggauu

SEQ ID NO: 405049 - RNA, 22 nt, Artificial Sequence
  Synthetic
ucuccuuugacaccuggggauu

SEQ ID NO: 405050 - RNA, 23 nt, Artificial Sequence
  Synthetic
cucuccuuugacaccuggggauu

SEQ ID NO: 405051 - RNA, 24 nt, Artificial Sequence
  Synthetic
ccucuccuuugacaccuggggauu

SEQ ID NO: 405052 - RNA, 18 nt, Artificial Sequence
  Synthetic
ccaugacaucuggggauu

SEQ ID NO: 405053 - RNA, 19 nt, Artificial Sequence
  Synthetic
cccaugacaucuggggauu

SEQ ID NO: 405054 - RNA, 20 nt, Artificial Sequence
  Synthetic
ucccaugacaucuggggauu

SEQ ID NO: 405055 - RNA, 21 nt, Artificial Sequence
  Synthetic
cucccaugacaucuggggauu

SEQ ID NO: 405056 - RNA, 22 nt, Artificial Sequence
  Synthetic
ccucccaugacaucuggggauu

SEQ ID NO: 405057 - RNA, 23 nt, Artificial Sequence
  Synthetic
cccucccaugacaucuggggauu

SEQ ID NO: 405058 - RNA, 24 nt, Artificial Sequence
  Synthetic
ucccucccaugacaucuggggauu

SEQ ID NO: 405059 - RNA, 18 nt, Artificial Sequence
  Synthetic
ccuugacacguggggauu

SEQ ID NO: 405060 - RNA, 19 nt, Artificial Sequence
  Synthetic
cccuugacacguggggauu

SEQ ID NO: 405061 - RNA, 20 nt, Artificial Sequence
  Synthetic
ucccuugacacguggggauu

SEQ ID NO: 405062 - RNA, 21 nt, Artificial Sequence
  Synthetic
cucccuugacacguggggauu

SEQ ID NO: 405063 - RNA, 22 nt, Artificial Sequence
  Synthetic
ucucccuugacacguggggauu

SEQ ID NO: 405064 - RNA, 23 nt, Artificial Sequence
  Synthetic
cucucccuugacacguggggauu

SEQ ID NO: 405065 - RNA, 24 nt, Artificial Sequence
  Synthetic
ucucucccuugacacguggggauu

SEQ ID NO: 405066 - RNA, 18 nt, Artificial Sequence
  Synthetic
caggucaaguuggggauu

SEQ ID NO: 405067 - RNA, 19 nt, Artificial Sequence
  Synthetic
acaggucaaguuggggauu

SEQ ID NO: 405068 - RNA, 20 nt, Artificial Sequence
  Synthetic
gacaggucaaguuggggauu

SEQ ID NO: 405069 - RNA, 21 nt, Artificial Sequence
  Synthetic
agacaggucaaguuggggauu

SEQ ID NO: 405070 - RNA, 22 nt, Artificial Sequence
  Synthetic
uagacaggucaaguuggggauu

SEQ ID NO: 405071 - RNA, 23 nt, Artificial Sequence
  Synthetic
uuagacaggucaaguuggggauu

SEQ ID NO: 405072 - RNA, 24 nt, Artificial Sequence
  Synthetic
guuagacaggucaaguuggggauu

SEQ ID NO: 405073 - RNA, 18 nt, Artificial Sequence
  Synthetic
gguagauggcaugggauu

SEQ ID NO: 405074 - RNA, 19 nt, Artificial Sequence
  Synthetic
ggguagauggcaugggauu

SEQ ID NO: 405075 - RNA, 20 nt, Artificial Sequence
  Synthetic
gggguagauggcaugggauu

SEQ ID NO: 405076 - RNA, 21 nt, Artificial Sequence
  Synthetic
agggguagauggcaugggauu

SEQ ID NO: 405077 - RNA, 22 nt, Artificial Sequence
  Synthetic
aagggguagauggcaugggauu

SEQ ID NO: 405078 - RNA, 23 nt, Artificial Sequence
  Synthetic
gaagggguagauggcaugggauu

SEQ ID NO: 405079 - RNA, 24 nt, Artificial Sequence
  Synthetic
agaagggguagauggcaugggauu

SEQ ID NO: 405080 - RNA, 18 nt, Artificial Sequence
  Synthetic
agagcagaagaugggauu

SEQ ID NO: 405081 - RNA, 19 nt, Artificial Sequence
  Synthetic
cagagcagaagaugggauu

SEQ ID NO: 405082 - RNA, 20 nt, Artificial Sequence
  Synthetic
acagagcagaagaugggauu

SEQ ID NO: 405083 - RNA, 21 nt, Artificial Sequence
  Synthetic
uacagagcagaagaugggauu

SEQ ID NO: 405084 - RNA, 22 nt, Artificial Sequence
  Synthetic
guacagagcagaagaugggauu

SEQ ID NO: 405085 - RNA, 23 nt, Artificial Sequence
  Synthetic
gguacagagcagaagaugggauu

SEQ ID NO: 405086 - RNA, 24 nt, Artificial Sequence
  Synthetic
agguacagagcagaagaugggauu

SEQ ID NO: 405087 - RNA, 18 nt, Artificial Sequence
  Synthetic
ggaugaaaguaugggauu

SEQ ID NO: 405088 - RNA, 19 nt, Artificial Sequence
  Synthetic
uggaugaaaguaugggauu

SEQ ID NO: 405089 - RNA, 20 nt, Artificial Sequence
  Synthetic
uuggaugaaaguaugggauu

SEQ ID NO: 405090 - RNA, 21 nt, Artificial Sequence
  Synthetic
guuggaugaaaguaugggauu

SEQ ID NO: 405091 - RNA, 22 nt, Artificial Sequence
  Synthetic
aguuggaugaaaguaugggauu

SEQ ID NO: 405092 - RNA, 23 nt, Artificial Sequence
  Synthetic
caguuggaugaaaguaugggauu

SEQ ID NO: 405093 - RNA, 24 nt, Artificial Sequence
  Synthetic
gcaguuggaugaaaguaugggauu

SEQ ID NO: 405094 - RNA, 18 nt, Artificial Sequence
  Synthetic
auuucacauuaugggauu

SEQ ID NO: 405095 - RNA, 19 nt, Artificial Sequence
  Synthetic
uauuucacauuaugggauu

SEQ ID NO: 405096 - RNA, 20 nt, Artificial Sequence
  Synthetic
cuauuucacauuaugggauu

SEQ ID NO: 405097 - RNA, 21 nt, Artificial Sequence
  Synthetic
acuauuucacauuaugggauu

SEQ ID NO: 405098 - RNA, 22 nt, Artificial Sequence
  Synthetic
cacuauuucacauuaugggauu

SEQ ID NO: 405099 - RNA, 23 nt, Artificial Sequence
  Synthetic
acacuauuucacauuaugggauu

SEQ ID NO: 405100 - RNA, 24 nt, Artificial Sequence
  Synthetic
cacacuauuucacauuaugggauu

SEQ ID NO: 405101 - RNA, 18 nt, Artificial Sequence
  Synthetic
cugaggugaacugggauu

SEQ ID NO: 405102 - RNA, 19 nt, Artificial Sequence
  Synthetic
ccugaggugaacugggauu

SEQ ID NO: 405103 - RNA, 20 nt, Artificial Sequence
  Synthetic
cccugaggugaacugggauu

SEQ ID NO: 405104 - RNA, 21 nt, Artificial Sequence
  Synthetic
ucccugaggugaacugggauu

SEQ ID NO: 405105 - RNA, 22 nt, Artificial Sequence
  Synthetic
gucccugaggugaacugggauu

SEQ ID NO: 405106 - RNA, 23 nt, Artificial Sequence
  Synthetic
agucccugaggugaacugggauu

SEQ ID NO: 405107 - RNA, 24 nt, Artificial Sequence
  Synthetic
cagucccugaggugaacugggauu

SEQ ID NO: 405108 - RNA, 18 nt, Artificial Sequence
  Synthetic
uccugaguagcugggauu

SEQ ID NO: 405109 - RNA, 19 nt, Artificial Sequence
  Synthetic
cuccugaguagcugggauu

SEQ ID NO: 405110 - RNA, 20 nt, Artificial Sequence
  Synthetic
ccuccugaguagcugggauu

SEQ ID NO: 405111 - RNA, 21 nt, Artificial Sequence
  Synthetic
gccuccugaguagcugggauu

SEQ ID NO: 405112 - RNA, 22 nt, Artificial Sequence
  Synthetic
agccuccugaguagcugggauu

SEQ ID NO: 405113 - RNA, 23 nt, Artificial Sequence
  Synthetic
cagccuccugaguagcugggauu

SEQ ID NO: 405114 - RNA, 24 nt, Artificial Sequence
  Synthetic
ucagccuccugaguagcugggauu

SEQ ID NO: 405115 - RNA, 18 nt, Artificial Sequence
  Synthetic
ucccaaagugcugggauu

SEQ ID NO: 405116 - RNA, 19 nt, Artificial Sequence
  Synthetic
cucccaaagugcugggauu

SEQ ID NO: 405117 - RNA, 20 nt, Artificial Sequence
  Synthetic
ccucccaaagugcugggauu

SEQ ID NO: 405118 - RNA, 21 nt, Artificial Sequence
  Synthetic
gccucccaaagugcugggauu

SEQ ID NO: 405119 - RNA, 22 nt, Artificial Sequence
  Synthetic
ggccucccaaagugcugggauu

SEQ ID NO: 405120 - RNA, 23 nt, Artificial Sequence
  Synthetic
cggccucccaaagugcugggauu

SEQ ID NO: 405121 - RNA, 24 nt, Artificial Sequence
  Synthetic
acggccucccaaagugcugggauu

SEQ ID NO: 405122 - RNA, 18 nt, Artificial Sequence
  Synthetic
augcucuguagugggauu

SEQ ID NO: 405123 - RNA, 19 nt, Artificial Sequence
  Synthetic
aaugcucuguagugggauu

SEQ ID NO: 405124 - RNA, 20 nt, Artificial Sequence
  Synthetic
aaaugcucuguagugggauu

SEQ ID NO: 405125 - RNA, 21 nt, Artificial Sequence
  Synthetic
uaaaugcucuguagugggauu

SEQ ID NO: 405126 - RNA, 22 nt, Artificial Sequence
  Synthetic
guaaaugcucuguagugggauu

SEQ ID NO: 405127 - RNA, 23 nt, Artificial Sequence
  Synthetic
aguaaaugcucuguagugggauu

SEQ ID NO: 405128 - RNA, 24 nt, Artificial Sequence
  Synthetic
caguaaaugcucuguagugggauu

SEQ ID NO: 405129 - RNA, 18 nt, Artificial Sequence
  Synthetic
aaucacucauuugggauu

SEQ ID NO: 405130 - RNA, 19 nt, Artificial Sequence
  Synthetic
aaaucacucauuugggauu

SEQ ID NO: 405131 - RNA, 20 nt, Artificial Sequence
  Synthetic
aaaaucacucauuugggauu

SEQ ID NO: 405132 - RNA, 21 nt, Artificial Sequence
  Synthetic
aaaaaucacucauuugggauu

SEQ ID NO: 405133 - RNA, 22 nt, Artificial Sequence
  Synthetic
uaaaaaucacucauuugggauu

SEQ ID NO: 405134 - RNA, 23 nt, Artificial Sequence
  Synthetic
auaaaaaucacucauuugggauu

SEQ ID NO: 405135 - RNA, 24 nt, Artificial Sequence
  Synthetic
aauaaaaaucacucauuugggauu

SEQ ID NO: 405136 - RNA, 18 nt, Artificial Sequence
  Synthetic
uucuagcuuuuugggauu

SEQ ID NO: 405137 - RNA, 19 nt, Artificial Sequence
  Synthetic
auucuagcuuuuugggauu

SEQ ID NO: 405138 - RNA, 20 nt, Artificial Sequence
  Synthetic
cauucuagcuuuuugggauu

SEQ ID NO: 405139 - RNA, 21 nt, Artificial Sequence
  Synthetic
gcauucuagcuuuuugggauu

SEQ ID NO: 405140 - RNA, 22 nt, Artificial Sequence
  Synthetic
ugcauucuagcuuuuugggauu

SEQ ID NO: 405141 - RNA, 23 nt, Artificial Sequence
  Synthetic
cugcauucuagcuuuuugggauu

SEQ ID NO: 405142 - RNA, 24 nt, Artificial Sequence
  Synthetic
ucugcauucuagcuuuuugggauu

SEQ ID NO: 405143 - RNA, 18 nt, Artificial Sequence
  Synthetic
gaaaaagaaaaauggauu

SEQ ID NO: 405144 - RNA, 19 nt, Artificial Sequence
  Synthetic
agaaaaagaaaaauggauu

SEQ ID NO: 405145 - RNA, 20 nt, Artificial Sequence
  Synthetic
aagaaaaagaaaaauggauu

SEQ ID NO: 405146 - RNA, 21 nt, Artificial Sequence
  Synthetic
caagaaaaagaaaaauggauu

SEQ ID NO: 405147 - RNA, 22 nt, Artificial Sequence
  Synthetic
ucaagaaaaagaaaaauggauu

SEQ ID NO: 405148 - RNA, 23 nt, Artificial Sequence
  Synthetic
uucaagaaaaagaaaaauggauu

SEQ ID NO: 405149 - RNA, 24 nt, Artificial Sequence
  Synthetic
guucaagaaaaagaaaaauggauu

SEQ ID NO: 405150 - RNA, 18 nt, Artificial Sequence
  Synthetic
acaugauuggaauggauu

SEQ ID NO: 405151 - RNA, 19 nt, Artificial Sequence
  Synthetic
uacaugauuggaauggauu

SEQ ID NO: 405152 - RNA, 20 nt, Artificial Sequence
  Synthetic
auacaugauuggaauggauu

SEQ ID NO: 405153 - RNA, 21 nt, Artificial Sequence
  Synthetic
cauacaugauuggaauggauu

SEQ ID NO: 405154 - RNA, 22 nt, Artificial Sequence
  Synthetic
acauacaugauuggaauggauu

SEQ ID NO: 405155 - RNA, 23 nt, Artificial Sequence
  Synthetic
uacauacaugauuggaauggauu

SEQ ID NO: 405156 - RNA, 24 nt, Artificial Sequence
  Synthetic
auacauacaugauuggaauggauu

SEQ ID NO: 405157 - RNA, 18 nt, Artificial Sequence
  Synthetic
uaaaauauauaauggauu

SEQ ID NO: 405158 - RNA, 19 nt, Artificial Sequence
  Synthetic
uuaaaauauauaauggauu

SEQ ID NO: 405159 - RNA, 20 nt, Artificial Sequence
  Synthetic
uuuaaaauauauaauggauu

SEQ ID NO: 405160 - RNA, 21 nt, Artificial Sequence
  Synthetic
uuuuaaaauauauaauggauu

SEQ ID NO: 405161 - RNA, 22 nt, Artificial Sequence
  Synthetic
guuuuaaaauauauaauggauu

SEQ ID NO: 405162 - RNA, 23 nt, Artificial Sequence
  Synthetic
aguuuuaaaauauauaauggauu

SEQ ID NO: 405163 - RNA, 24 nt, Artificial Sequence
  Synthetic
aaguuuuaaaauauauaauggauu

SEQ ID NO: 405164 - RNA, 18 nt, Artificial Sequence
  Synthetic
gaacaaaugggauggauu

SEQ ID NO: 405165 - RNA, 19 nt, Artificial Sequence
  Synthetic
agaacaaaugggauggauu

SEQ ID NO: 405166 - RNA, 20 nt, Artificial Sequence
  Synthetic
gagaacaaaugggauggauu

SEQ ID NO: 405167 - RNA, 21 nt, Artificial Sequence
  Synthetic
ugagaacaaaugggauggauu

SEQ ID NO: 405168 - RNA, 22 nt, Artificial Sequence
  Synthetic
augagaacaaaugggauggauu

SEQ ID NO: 405169 - RNA, 23 nt, Artificial Sequence
  Synthetic
uaugagaacaaaugggauggauu

SEQ ID NO: 405170 - RNA, 24 nt, Artificial Sequence
  Synthetic
uuaugagaacaaaugggauggauu

SEQ ID NO: 405171 - RNA, 18 nt, Artificial Sequence
  Synthetic
agcauuguuggauggauu

SEQ ID NO: 405172 - RNA, 19 nt, Artificial Sequence
  Synthetic
uagcauuguuggauggauu

SEQ ID NO: 405173 - RNA, 20 nt, Artificial Sequence
  Synthetic
guagcauuguuggauggauu

SEQ ID NO: 405174 - RNA, 21 nt, Artificial Sequence
  Synthetic
cguagcauuguuggauggauu

SEQ ID NO: 405175 - RNA, 22 nt, Artificial Sequence
  Synthetic
ucguagcauuguuggauggauu

SEQ ID NO: 405176 - RNA, 23 nt, Artificial Sequence
  Synthetic
gucguagcauuguuggauggauu

SEQ ID NO: 405177 - RNA, 24 nt, Artificial Sequence
  Synthetic
ugucguagcauuguuggauggauu

SEQ ID NO: 405178 - RNA, 18 nt, Artificial Sequence
  Synthetic
acaaugauagacuggauu

SEQ ID NO: 405179 - RNA, 19 nt, Artificial Sequence
  Synthetic
gacaaugauagacuggauu

SEQ ID NO: 405180 - RNA, 20 nt, Artificial Sequence
  Synthetic
cgacaaugauagacuggauu

SEQ ID NO: 405181 - RNA, 21 nt, Artificial Sequence
  Synthetic
ccgacaaugauagacuggauu

SEQ ID NO: 405182 - RNA, 22 nt, Artificial Sequence
  Synthetic
uccgacaaugauagacuggauu

SEQ ID NO: 405183 - RNA, 23 nt, Artificial Sequence
  Synthetic
guccgacaaugauagacuggauu

SEQ ID NO: 405184 - RNA, 24 nt, Artificial Sequence
  Synthetic
uguccgacaaugauagacuggauu

SEQ ID NO: 405185 - RNA, 18 nt, Artificial Sequence
  Synthetic
acagugauagacuggauu

SEQ ID NO: 405186 - RNA, 19 nt, Artificial Sequence
  Synthetic
aacagugauagacuggauu

SEQ ID NO: 405187 - RNA, 20 nt, Artificial Sequence
  Synthetic
caacagugauagacuggauu

SEQ ID NO: 405188 - RNA, 21 nt, Artificial Sequence
  Synthetic
ccaacagugauagacuggauu

SEQ ID NO: 405189 - RNA, 22 nt, Artificial Sequence
  Synthetic
uccaacagugauagacuggauu

SEQ ID NO: 405190 - RNA, 23 nt, Artificial Sequence
  Synthetic
guccaacagugauagacuggauu

SEQ ID NO: 405191 - RNA, 24 nt, Artificial Sequence
  Synthetic
uguccaacagugauagacuggauu

SEQ ID NO: 405192 - RNA, 18 nt, Artificial Sequence
  Synthetic
ugaaacugaaccuggauu

SEQ ID NO: 405193 - RNA, 19 nt, Artificial Sequence
  Synthetic
gugaaacugaaccuggauu

SEQ ID NO: 405194 - RNA, 20 nt, Artificial Sequence
  Synthetic
cgugaaacugaaccuggauu

SEQ ID NO: 405195 - RNA, 21 nt, Artificial Sequence
  Synthetic
acgugaaacugaaccuggauu

SEQ ID NO: 405196 - RNA, 22 nt, Artificial Sequence
  Synthetic
uacgugaaacugaaccuggauu

SEQ ID NO: 405197 - RNA, 23 nt, Artificial Sequence
  Synthetic
uuacgugaaacugaaccuggauu

SEQ ID NO: 405198 - RNA, 24 nt, Artificial Sequence
  Synthetic
cuuacgugaaacugaaccuggauu

SEQ ID NO: 405199 - RNA, 18 nt, Artificial Sequence
  Synthetic
gaagaacuauaguggauu

SEQ ID NO: 405200 - RNA, 19 nt, Artificial Sequence
  Synthetic
agaagaacuauaguggauu

SEQ ID NO: 405201 - RNA, 20 nt, Artificial Sequence
  Synthetic
aagaagaacuauaguggauu

SEQ ID NO: 405202 - RNA, 21 nt, Artificial Sequence
  Synthetic
aaagaagaacuauaguggauu

SEQ ID NO: 405203 - RNA, 22 nt, Artificial Sequence
  Synthetic
gaaagaagaacuauaguggauu

SEQ ID NO: 405204 - RNA, 23 nt, Artificial Sequence
  Synthetic
agaaagaagaacuauaguggauu

SEQ ID NO: 405205 - RNA, 24 nt, Artificial Sequence
  Synthetic
aagaaagaagaacuauaguggauu

SEQ ID NO: 405206 - RNA, 18 nt, Artificial Sequence
  Synthetic
aauuacaaaauguggauu

SEQ ID NO: 405207 - RNA, 19 nt, Artificial Sequence
  Synthetic
aaauuacaaaauguggauu

SEQ ID NO: 405208 - RNA, 20 nt, Artificial Sequence
  Synthetic
gaaauuacaaaauguggauu

SEQ ID NO: 405209 - RNA, 21 nt, Artificial Sequence
  Synthetic
ugaaauuacaaaauguggauu

SEQ ID NO: 405210 - RNA, 22 nt, Artificial Sequence
  Synthetic
uugaaauuacaaaauguggauu

SEQ ID NO: 405211 - RNA, 23 nt, Artificial Sequence
  Synthetic
auugaaauuacaaaauguggauu

SEQ ID NO: 405212 - RNA, 24 nt, Artificial Sequence
  Synthetic
cauugaaauuacaaaauguggauu

SEQ ID NO: 405213 - RNA, 18 nt, Artificial Sequence
  Synthetic
uaccagaggcuguggauu

SEQ ID NO: 405214 - RNA, 19 nt, Artificial Sequence
  Synthetic
uuaccagaggcuguggauu

SEQ ID NO: 405215 - RNA, 20 nt, Artificial Sequence
  Synthetic
guuaccagaggcuguggauu

SEQ ID NO: 405216 - RNA, 21 nt, Artificial Sequence
  Synthetic
gguuaccagaggcuguggauu

SEQ ID NO: 405217 - RNA, 22 nt, Artificial Sequence
  Synthetic
ugguuaccagaggcuguggauu

SEQ ID NO: 405218 - RNA, 23 nt, Artificial Sequence
  Synthetic
gugguuaccagaggcuguggauu

SEQ ID NO: 405219 - RNA, 24 nt, Artificial Sequence
  Synthetic
ggugguuaccagaggcuguggauu

SEQ ID NO: 405220 - RNA, 18 nt, Artificial Sequence
  Synthetic
gcugccauauuguggauu

SEQ ID NO: 405221 - RNA, 19 nt, Artificial Sequence
  Synthetic
agcugccauauuguggauu

SEQ ID NO: 405222 - RNA, 20 nt, Artificial Sequence
  Synthetic
aagcugccauauuguggauu

SEQ ID NO: 405223 - RNA, 21 nt, Artificial Sequence
  Synthetic
caagcugccauauuguggauu

SEQ ID NO: 405224 - RNA, 22 nt, Artificial Sequence
  Synthetic
ccaagcugccauauuguggauu

SEQ ID NO: 405225 - RNA, 23 nt, Artificial Sequence
  Synthetic
accaagcugccauauuguggauu

SEQ ID NO: 405226 - RNA, 24 nt, Artificial Sequence
  Synthetic
uaccaagcugccauauuguggauu

SEQ ID NO: 405227 - RNA, 18 nt, Artificial Sequence
  Synthetic
ccauuucucccuuggauu

SEQ ID NO: 405228 - RNA, 19 nt, Artificial Sequence
  Synthetic
cccauuucucccuuggauu

SEQ ID NO: 405229 - RNA, 20 nt, Artificial Sequence
  Synthetic
ucccauuucucccuuggauu

SEQ ID NO: 405230 - RNA, 21 nt, Artificial Sequence
  Synthetic
uucccauuucucccuuggauu

SEQ ID NO: 405231 - RNA, 22 nt, Artificial Sequence
  Synthetic
cuucccauuucucccuuggauu

SEQ ID NO: 405232 - RNA, 23 nt, Artificial Sequence
  Synthetic
ucuucccauuucucccuuggauu

SEQ ID NO: 405233 - RNA, 24 nt, Artificial Sequence
  Synthetic
gucuucccauuucucccuuggauu

SEQ ID NO: 405234 - RNA, 18 nt, Artificial Sequence
  Synthetic
uauuguuuuauuuggauu

SEQ ID NO: 405235 - RNA, 19 nt, Artificial Sequence
  Synthetic
cuauuguuuuauuuggauu

SEQ ID NO: 405236 - RNA, 20 nt, Artificial Sequence
  Synthetic
ucuauuguuuuauuuggauu

SEQ ID NO: 405237 - RNA, 21 nt, Artificial Sequence
  Synthetic
uucuauuguuuuauuuggauu

SEQ ID NO: 405238 - RNA, 22 nt, Artificial Sequence
  Synthetic
auucuauuguuuuauuuggauu

SEQ ID NO: 405239 - RNA, 23 nt, Artificial Sequence
  Synthetic
uauucuauuguuuuauuuggauu

SEQ ID NO: 405240 - RNA, 24 nt, Artificial Sequence
  Synthetic
guauucuauuguuuuauuuggauu

SEQ ID NO: 405241 - RNA, 18 nt, Artificial Sequence
  Synthetic
gacaccagucuuuggauu

SEQ ID NO: 405242 - RNA, 19 nt, Artificial Sequence
  Synthetic
ggacaccagucuuuggauu

SEQ ID NO: 405243 - RNA, 20 nt, Artificial Sequence
  Synthetic
aggacaccagucuuuggauu

SEQ ID NO: 405244 - RNA, 21 nt, Artificial Sequence
  Synthetic
aaggacaccagucuuuggauu

SEQ ID NO: 405245 - RNA, 22 nt, Artificial Sequence
  Synthetic
aaaggacaccagucuuuggauu

SEQ ID NO: 405246 - RNA, 23 nt, Artificial Sequence
  Synthetic
aaaaggacaccagucuuuggauu

SEQ ID NO: 405247 - RNA, 24 nt, Artificial Sequence
  Synthetic
caaaaggacaccagucuuuggauu

SEQ ID NO: 405248 - RNA, 18 nt, Artificial Sequence
  Synthetic
auuuaaauccaaaugauu

SEQ ID NO: 405249 - RNA, 19 nt, Artificial Sequence
  Synthetic
aauuuaaauccaaaugauu

SEQ ID NO: 405250 - RNA, 20 nt, Artificial Sequence
  Synthetic
gaauuuaaauccaaaugauu

SEQ ID NO: 405251 - RNA, 21 nt, Artificial Sequence
  Synthetic
ugaauuuaaauccaaaugauu

SEQ ID NO: 405252 - RNA, 22 nt, Artificial Sequence
  Synthetic
uugaauuuaaauccaaaugauu

SEQ ID NO: 405253 - RNA, 23 nt, Artificial Sequence
  Synthetic
auugaauuuaaauccaaaugauu

SEQ ID NO: 405254 - RNA, 24 nt, Artificial Sequence
  Synthetic
aauugaauuuaaauccaaaugauu

SEQ ID NO: 405255 - RNA, 18 nt, Artificial Sequence
  Synthetic
aauuauucucaaaugauu

SEQ ID NO: 405256 - RNA, 19 nt, Artificial Sequence
  Synthetic
aaauuauucucaaaugauu

SEQ ID NO: 405257 - RNA, 20 nt, Artificial Sequence
  Synthetic
caaauuauucucaaaugauu

SEQ ID NO: 405258 - RNA, 21 nt, Artificial Sequence
  Synthetic
gcaaauuauucucaaaugauu

SEQ ID NO: 405259 - RNA, 22 nt, Artificial Sequence
  Synthetic
ugcaaauuauucucaaaugauu

SEQ ID NO: 405260 - RNA, 23 nt, Artificial Sequence
  Synthetic
cugcaaauuauucucaaaugauu

SEQ ID NO: 405261 - RNA, 24 nt, Artificial Sequence
  Synthetic
ucugcaaauuauucucaaaugauu

SEQ ID NO: 405262 - RNA, 18 nt, Artificial Sequence
  Synthetic
uguuuaauggaaaugauu

SEQ ID NO: 405263 - RNA, 19 nt, Artificial Sequence
  Synthetic
uuguuuaauggaaaugauu

SEQ ID NO: 405264 - RNA, 20 nt, Artificial Sequence
  Synthetic
uuuguuuaauggaaaugauu

SEQ ID NO: 405265 - RNA, 21 nt, Artificial Sequence
  Synthetic
uuuuguuuaauggaaaugauu

SEQ ID NO: 405266 - RNA, 22 nt, Artificial Sequence
  Synthetic
uuuuuguuuaauggaaaugauu

SEQ ID NO: 405267 - RNA, 23 nt, Artificial Sequence
  Synthetic
guuuuuguuuaauggaaaugauu

SEQ ID NO: 405268 - RNA, 24 nt, Artificial Sequence
  Synthetic
uguuuuuguuuaauggaaaugauu

SEQ ID NO: 405269 - RNA, 18 nt, Artificial Sequence
  Synthetic
ugacuucauagaaugauu

SEQ ID NO: 405270 - RNA, 19 nt, Artificial Sequence
  Synthetic
cugacuucauagaaugauu

SEQ ID NO: 405271 - RNA, 20 nt, Artificial Sequence
  Synthetic
acugacuucauagaaugauu

SEQ ID NO: 405272 - RNA, 21 nt, Artificial Sequence
  Synthetic
uacugacuucauagaaugauu

SEQ ID NO: 405273 - RNA, 22 nt, Artificial Sequence
  Synthetic
auacugacuucauagaaugauu

SEQ ID NO: 405274 - RNA, 23 nt, Artificial Sequence
  Synthetic
gauacugacuucauagaaugauu

SEQ ID NO: 405275 - RNA, 24 nt, Artificial Sequence
  Synthetic
ugauacugacuucauagaaugauu

SEQ ID NO: 405276 - RNA, 18 nt, Artificial Sequence
  Synthetic
uuauauuugugaaugauu

SEQ ID NO: 405277 - RNA, 19 nt, Artificial Sequence
  Synthetic
uuuauauuugugaaugauu

SEQ ID NO: 405278 - RNA, 20 nt, Artificial Sequence
  Synthetic
uuuuauauuugugaaugauu

SEQ ID NO: 405279 - RNA, 21 nt, Artificial Sequence
  Synthetic
cuuuuauauuugugaaugauu

SEQ ID NO: 405280 - RNA, 22 nt, Artificial Sequence
  Synthetic
ucuuuuauauuugugaaugauu

SEQ ID NO: 405281 - RNA, 23 nt, Artificial Sequence
  Synthetic
aucuuuuauauuugugaaugauu

SEQ ID NO: 405282 - RNA, 24 nt, Artificial Sequence
  Synthetic
uaucuuuuauauuugugaaugauu

SEQ ID NO: 405283 - RNA, 18 nt, Artificial Sequence
  Synthetic
guggaaucuauaaugauu

SEQ ID NO: 405284 - RNA, 19 nt, Artificial Sequence
  Synthetic
uguggaaucuauaaugauu

SEQ ID NO: 405285 - RNA, 20 nt, Artificial Sequence
  Synthetic
auguggaaucuauaaugauu

SEQ ID NO: 405286 - RNA, 21 nt, Artificial Sequence
  Synthetic
aauguggaaucuauaaugauu

SEQ ID NO: 405287 - RNA, 22 nt, Artificial Sequence
  Synthetic
aaauguggaaucuauaaugauu

SEQ ID NO: 405288 - RNA, 23 nt, Artificial Sequence
  Synthetic
uaaauguggaaucuauaaugauu

SEQ ID NO: 405289 - RNA, 24 nt, Artificial Sequence
  Synthetic
uuaaauguggaaucuauaaugauu

SEQ ID NO: 405290 - RNA, 18 nt, Artificial Sequence
  Synthetic
ucaccucccaccaugauu

SEQ ID NO: 405291 - RNA, 19 nt, Artificial Sequence
  Synthetic
uucaccucccaccaugauu

SEQ ID NO: 405292 - RNA, 20 nt, Artificial Sequence
  Synthetic
uuucaccucccaccaugauu

SEQ ID NO: 405293 - RNA, 21 nt, Artificial Sequence
  Synthetic
cuuucaccucccaccaugauu

SEQ ID NO: 405294 - RNA, 22 nt, Artificial Sequence
  Synthetic
ccuuucaccucccaccaugauu

SEQ ID NO: 405295 - RNA, 23 nt, Artificial Sequence
  Synthetic
gccuuucaccucccaccaugauu

SEQ ID NO: 405296 - RNA, 24 nt, Artificial Sequence
  Synthetic
ugccuuucaccucccaccaugauu

SEQ ID NO: 405297 - RNA, 18 nt, Artificial Sequence
  Synthetic
uugccuucugccaugauu

SEQ ID NO: 405298 - RNA, 19 nt, Artificial Sequence
  Synthetic
uuugccuucugccaugauu

SEQ ID NO: 405299 - RNA, 20 nt, Artificial Sequence
  Synthetic
cuuugccuucugccaugauu

SEQ ID NO: 405300 - RNA, 21 nt, Artificial Sequence
  Synthetic
ccuuugccuucugccaugauu

SEQ ID NO: 405301 - RNA, 22 nt, Artificial Sequence
  Synthetic
uccuuugccuucugccaugauu

SEQ ID NO: 405302 - RNA, 23 nt, Artificial Sequence
  Synthetic
cuccuuugccuucugccaugauu

SEQ ID NO: 405303 - RNA, 24 nt, Artificial Sequence
  Synthetic
ucuccuuugccuucugccaugauu

SEQ ID NO: 405304 - RNA, 18 nt, Artificial Sequence
  Synthetic
ugaagaaaauucaugauu

SEQ ID NO: 405305 - RNA, 19 nt, Artificial Sequence
  Synthetic
augaagaaaauucaugauu

SEQ ID NO: 405306 - RNA, 20 nt, Artificial Sequence
  Synthetic
caugaagaaaauucaugauu

SEQ ID NO: 405307 - RNA, 21 nt, Artificial Sequence
  Synthetic
ccaugaagaaaauucaugauu

SEQ ID NO: 405308 - RNA, 22 nt, Artificial Sequence
  Synthetic
gccaugaagaaaauucaugauu

SEQ ID NO: 405309 - RNA, 23 nt, Artificial Sequence
  Synthetic
ugccaugaagaaaauucaugauu

SEQ ID NO: 405310 - RNA, 24 nt, Artificial Sequence
  Synthetic
augccaugaagaaaauucaugauu

SEQ ID NO: 405311 - RNA, 18 nt, Artificial Sequence
  Synthetic
caguaauuagggaugauu

SEQ ID NO: 405312 - RNA, 19 nt, Artificial Sequence
  Synthetic
gcaguaauuagggaugauu

SEQ ID NO: 405313 - RNA, 20 nt, Artificial Sequence
  Synthetic
ggcaguaauuagggaugauu

SEQ ID NO: 405314 - RNA, 21 nt, Artificial Sequence
  Synthetic
aggcaguaauuagggaugauu

SEQ ID NO: 405315 - RNA, 22 nt, Artificial Sequence
  Synthetic
uaggcaguaauuagggaugauu

SEQ ID NO: 405316 - RNA, 23 nt, Artificial Sequence
  Synthetic
auaggcaguaauuagggaugauu

SEQ ID NO: 405317 - RNA, 24 nt, Artificial Sequence
  Synthetic
uauaggcaguaauuagggaugauu

SEQ ID NO: 405318 - RNA, 18 nt, Artificial Sequence
  Synthetic
aacauuuuuuugaugauu

SEQ ID NO: 405319 - RNA, 19 nt, Artificial Sequence
  Synthetic
caacauuuuuuugaugauu

SEQ ID NO: 405320 - RNA, 20 nt, Artificial Sequence
  Synthetic
acaacauuuuuuugaugauu

SEQ ID NO: 405321 - RNA, 21 nt, Artificial Sequence
  Synthetic
aacaacauuuuuuugaugauu

SEQ ID NO: 405322 - RNA, 22 nt, Artificial Sequence
  Synthetic
aaacaacauuuuuuugaugauu

SEQ ID NO: 405323 - RNA, 23 nt, Artificial Sequence
  Synthetic
caaacaacauuuuuuugaugauu

SEQ ID NO: 405324 - RNA, 24 nt, Artificial Sequence
  Synthetic
ucaaacaacauuuuuuugaugauu

SEQ ID NO: 405325 - RNA, 18 nt, Artificial Sequence
  Synthetic
ccauuaacucauaugauu

SEQ ID NO: 405326 - RNA, 19 nt, Artificial Sequence
  Synthetic
gccauuaacucauaugauu

SEQ ID NO: 405327 - RNA, 20 nt, Artificial Sequence
  Synthetic
agccauuaacucauaugauu

SEQ ID NO: 405328 - RNA, 21 nt, Artificial Sequence
  Synthetic
aagccauuaacucauaugauu

SEQ ID NO: 405329 - RNA, 22 nt, Artificial Sequence
  Synthetic
uaagccauuaacucauaugauu

SEQ ID NO: 405330 - RNA, 23 nt, Artificial Sequence
  Synthetic
uuaagccauuaacucauaugauu

SEQ ID NO: 405331 - RNA, 24 nt, Artificial Sequence
  Synthetic
uuuaagccauuaacucauaugauu

SEQ ID NO: 405332 - RNA, 18 nt, Artificial Sequence
  Synthetic
ugugacccuacuaugauu

SEQ ID NO: 405333 - RNA, 19 nt, Artificial Sequence
  Synthetic
gugugacccuacuaugauu

SEQ ID NO: 405334 - RNA, 20 nt, Artificial Sequence
  Synthetic
agugugacccuacuaugauu

SEQ ID NO: 405335 - RNA, 21 nt, Artificial Sequence
  Synthetic
uagugugacccuacuaugauu

SEQ ID NO: 405336 - RNA, 22 nt, Artificial Sequence
  Synthetic
uuagugugacccuacuaugauu

SEQ ID NO: 405337 - RNA, 23 nt, Artificial Sequence
  Synthetic
auuagugugacccuacuaugauu

SEQ ID NO: 405338 - RNA, 24 nt, Artificial Sequence
  Synthetic
gauuagugugacccuacuaugauu

SEQ ID NO: 405339 - RNA, 18 nt, Artificial Sequence
  Synthetic
uagcaagguacuaugauu

SEQ ID NO: 405340 - RNA, 19 nt, Artificial Sequence
  Synthetic
guagcaagguacuaugauu

SEQ ID NO: 405341 - RNA, 20 nt, Artificial Sequence
  Synthetic
aguagcaagguacuaugauu

SEQ ID NO: 405342 - RNA, 21 nt, Artificial Sequence
  Synthetic
aaguagcaagguacuaugauu

SEQ ID NO: 405343 - RNA, 22 nt, Artificial Sequence
  Synthetic
gaaguagcaagguacuaugauu

SEQ ID NO: 405344 - RNA, 23 nt, Artificial Sequence
  Synthetic
agaaguagcaagguacuaugauu

SEQ ID NO: 405345 - RNA, 24 nt, Artificial Sequence
  Synthetic
gagaaguagcaagguacuaugauu

SEQ ID NO: 405346 - RNA, 18 nt, Artificial Sequence
  Synthetic
acgcaaaucucuaugauu

SEQ ID NO: 405347 - RNA, 19 nt, Artificial Sequence
  Synthetic
gacgcaaaucucuaugauu

SEQ ID NO: 405348 - RNA, 20 nt, Artificial Sequence
  Synthetic
agacgcaaaucucuaugauu

SEQ ID NO: 405349 - RNA, 21 nt, Artificial Sequence
  Synthetic
cagacgcaaaucucuaugauu

SEQ ID NO: 405350 - RNA, 22 nt, Artificial Sequence
  Synthetic
acagacgcaaaucucuaugauu

SEQ ID NO: 405351 - RNA, 23 nt, Artificial Sequence
  Synthetic
uacagacgcaaaucucuaugauu

SEQ ID NO: 405352 - RNA, 24 nt, Artificial Sequence
  Synthetic
uuacagacgcaaaucucuaugauu

SEQ ID NO: 405353 - RNA, 18 nt, Artificial Sequence
  Synthetic
acuaauauuuuuaugauu

SEQ ID NO: 405354 - RNA, 19 nt, Artificial Sequence
  Synthetic
aacuaauauuuuuaugauu

SEQ ID NO: 405355 - RNA, 20 nt, Artificial Sequence
  Synthetic
aaacuaauauuuuuaugauu

SEQ ID NO: 405356 - RNA, 21 nt, Artificial Sequence
  Synthetic
uaaacuaauauuuuuaugauu

SEQ ID NO: 405357 - RNA, 22 nt, Artificial Sequence
  Synthetic
uuaaacuaauauuuuuaugauu

SEQ ID NO: 405358 - RNA, 23 nt, Artificial Sequence
  Synthetic
uuuaaacuaauauuuuuaugauu

SEQ ID NO: 405359 - RNA, 24 nt, Artificial Sequence
  Synthetic
uuuuaaacuaauauuuuuaugauu

SEQ ID NO: 405360 - RNA, 18 nt, Artificial Sequence
  Synthetic
aaaucuucccaacugauu

SEQ ID NO: 405361 - RNA, 19 nt, Artificial Sequence
  Synthetic
caaaucuucccaacugauu

SEQ ID NO: 405362 - RNA, 20 nt, Artificial Sequence
  Synthetic
ccaaaucuucccaacugauu

SEQ ID NO: 405363 - RNA, 21 nt, Artificial Sequence
  Synthetic
cccaaaucuucccaacugauu

SEQ ID NO: 405364 - RNA, 22 nt, Artificial Sequence
  Synthetic
acccaaaucuucccaacugauu

SEQ ID NO: 405365 - RNA, 23 nt, Artificial Sequence
  Synthetic
gacccaaaucuucccaacugauu

SEQ ID NO: 405366 - RNA, 24 nt, Artificial Sequence
  Synthetic
agacccaaaucuucccaacugauu

SEQ ID NO: 405367 - RNA, 18 nt, Artificial Sequence
  Synthetic
gcuuugagaacacugauu

SEQ ID NO: 405368 - RNA, 19 nt, Artificial Sequence
  Synthetic
ggcuuugagaacacugauu

SEQ ID NO: 405369 - RNA, 20 nt, Artificial Sequence
  Synthetic
aggcuuugagaacacugauu

SEQ ID NO: 405370 - RNA, 21 nt, Artificial Sequence
  Synthetic
caggcuuugagaacacugauu

SEQ ID NO: 405371 - RNA, 22 nt, Artificial Sequence
  Synthetic
ccaggcuuugagaacacugauu

SEQ ID NO: 405372 - RNA, 23 nt, Artificial Sequence
  Synthetic
accaggcuuugagaacacugauu

SEQ ID NO: 405373 - RNA, 24 nt, Artificial Sequence
  Synthetic
gaccaggcuuugagaacacugauu

SEQ ID NO: 405374 - RNA, 18 nt, Artificial Sequence
  Synthetic
uaucuauagggacugauu

SEQ ID NO: 405375 - RNA, 19 nt, Artificial Sequence
  Synthetic
cuaucuauagggacugauu

SEQ ID NO: 405376 - RNA, 20 nt, Artificial Sequence
  Synthetic
ccuaucuauagggacugauu

SEQ ID NO: 405377 - RNA, 21 nt, Artificial Sequence
  Synthetic
uccuaucuauagggacugauu

SEQ ID NO: 405378 - RNA, 22 nt, Artificial Sequence
  Synthetic
uuccuaucuauagggacugauu

SEQ ID NO: 405379 - RNA, 23 nt, Artificial Sequence
  Synthetic
auuccuaucuauagggacugauu

SEQ ID NO: 405380 - RNA, 24 nt, Artificial Sequence
  Synthetic
aauuccuaucuauagggacugauu

SEQ ID NO: 405381 - RNA, 18 nt, Artificial Sequence
  Synthetic
uugaggucugcccugauu

SEQ ID NO: 405382 - RNA, 19 nt, Artificial Sequence
  Synthetic
auugaggucugcccugauu

SEQ ID NO: 405383 - RNA, 20 nt, Artificial Sequence
  Synthetic
uauugaggucugcccugauu

SEQ ID NO: 405384 - RNA, 21 nt, Artificial Sequence
  Synthetic
auauugaggucugcccugauu

SEQ ID NO: 405385 - RNA, 22 nt, Artificial Sequence
  Synthetic
aauauugaggucugcccugauu

SEQ ID NO: 405386 - RNA, 23 nt, Artificial Sequence
  Synthetic
gaauauugaggucugcccugauu

SEQ ID NO: 405387 - RNA, 24 nt, Artificial Sequence
  Synthetic
ugaauauugaggucugcccugauu

SEQ ID NO: 405388 - RNA, 18 nt, Artificial Sequence
  Synthetic
cagucugcacagcugauu

SEQ ID NO: 405389 - RNA, 19 nt, Artificial Sequence
  Synthetic
ucagucugcacagcugauu

SEQ ID NO: 405390 - RNA, 20 nt, Artificial Sequence
  Synthetic
cucagucugcacagcugauu

SEQ ID NO: 405391 - RNA, 21 nt, Artificial Sequence
  Synthetic
gcucagucugcacagcugauu

SEQ ID NO: 405392 - RNA, 22 nt, Artificial Sequence
  Synthetic
ugcucagucugcacagcugauu

SEQ ID NO: 405393 - RNA, 23 nt, Artificial Sequence
  Synthetic
augcucagucugcacagcugauu

SEQ ID NO: 405394 - RNA, 24 nt, Artificial Sequence
  Synthetic
aaugcucagucugcacagcugauu

SEQ ID NO: 405395 - RNA, 18 nt, Artificial Sequence
  Synthetic
acaguuggugugcugauu

SEQ ID NO: 405396 - RNA, 19 nt, Artificial Sequence
  Synthetic
cacaguuggugugcugauu

SEQ ID NO: 405397 - RNA, 20 nt, Artificial Sequence
  Synthetic
ucacaguuggugugcugauu

SEQ ID NO: 405398 - RNA, 21 nt, Artificial Sequence
  Synthetic
uucacaguuggugugcugauu

SEQ ID NO: 405399 - RNA, 22 nt, Artificial Sequence
  Synthetic
guucacaguuggugugcugauu

SEQ ID NO: 405400 - RNA, 23 nt, Artificial Sequence
  Synthetic
aguucacaguuggugugcugauu

SEQ ID NO: 405401 - RNA, 24 nt, Artificial Sequence
  Synthetic
gaguucacaguuggugugcugauu

SEQ ID NO: 405402 - RNA, 18 nt, Artificial Sequence
  Synthetic
auacuauuguugcugauu

SEQ ID NO: 405403 - RNA, 19 nt, Artificial Sequence
  Synthetic
gauacuauuguugcugauu

SEQ ID NO: 405404 - RNA, 20 nt, Artificial Sequence
  Synthetic
ggauacuauuguugcugauu

SEQ ID NO: 405405 - RNA, 21 nt, Artificial Sequence
  Synthetic
gggauacuauuguugcugauu

SEQ ID NO: 405406 - RNA, 22 nt, Artificial Sequence
  Synthetic
ggggauacuauuguugcugauu

SEQ ID NO: 405407 - RNA, 23 nt, Artificial Sequence
  Synthetic
aggggauacuauuguugcugauu

SEQ ID NO: 405408 - RNA, 24 nt, Artificial Sequence
  Synthetic
caggggauacuauuguugcugauu

SEQ ID NO: 405409 - RNA, 18 nt, Artificial Sequence
  Synthetic
cuguuucccucucugauu

SEQ ID NO: 405410 - RNA, 19 nt, Artificial Sequence
  Synthetic
ccuguuucccucucugauu

SEQ ID NO: 405411 - RNA, 20 nt, Artificial Sequence
  Synthetic
uccuguuucccucucugauu

SEQ ID NO: 405412 - RNA, 21 nt, Artificial Sequence
  Synthetic
uuccuguuucccucucugauu

SEQ ID NO: 405413 - RNA, 22 nt, Artificial Sequence
  Synthetic
uuuccuguuucccucucugauu

SEQ ID NO: 405414 - RNA, 23 nt, Artificial Sequence
  Synthetic
cuuuccuguuucccucucugauu

SEQ ID NO: 405415 - RNA, 24 nt, Artificial Sequence
  Synthetic
ucuuuccuguuucccucucugauu

SEQ ID NO: 405416 - RNA, 18 nt, Artificial Sequence
  Synthetic
caggcuuccucucugauu

SEQ ID NO: 405417 - RNA, 19 nt, Artificial Sequence
  Synthetic
gcaggcuuccucucugauu

SEQ ID NO: 405418 - RNA, 20 nt, Artificial Sequence
  Synthetic
ggcaggcuuccucucugauu

SEQ ID NO: 405419 - RNA, 21 nt, Artificial Sequence
  Synthetic
aggcaggcuuccucucugauu

SEQ ID NO: 405420 - RNA, 22 nt, Artificial Sequence
  Synthetic
uaggcaggcuuccucucugauu

SEQ ID NO: 405421 - RNA, 23 nt, Artificial Sequence
  Synthetic
guaggcaggcuuccucucugauu

SEQ ID NO: 405422 - RNA, 24 nt, Artificial Sequence
  Synthetic
uguaggcaggcuuccucucugauu

SEQ ID NO: 405423 - RNA, 18 nt, Artificial Sequence
  Synthetic
uuuaccuucucucugauu

SEQ ID NO: 405424 - RNA, 19 nt, Artificial Sequence
  Synthetic
cuuuaccuucucucugauu

SEQ ID NO: 405425 - RNA, 20 nt, Artificial Sequence
  Synthetic
ucuuuaccuucucucugauu

SEQ ID NO: 405426 - RNA, 21 nt, Artificial Sequence
  Synthetic
uucuuuaccuucucucugauu

SEQ ID NO: 405427 - RNA, 22 nt, Artificial Sequence
  Synthetic
cuucuuuaccuucucucugauu

SEQ ID NO: 405428 - RNA, 23 nt, Artificial Sequence
  Synthetic
ucuucuuuaccuucucucugauu

SEQ ID NO: 405429 - RNA, 24 nt, Artificial Sequence
  Synthetic
cucuucuuuaccuucucucugauu

SEQ ID NO: 405430 - RNA, 18 nt, Artificial Sequence
  Synthetic
acacccugcuuucugauu

SEQ ID NO: 405431 - RNA, 19 nt, Artificial Sequence
  Synthetic
uacacccugcuuucugauu

SEQ ID NO: 405432 - RNA, 20 nt, Artificial Sequence
  Synthetic
cuacacccugcuuucugauu

SEQ ID NO: 405433 - RNA, 21 nt, Artificial Sequence
  Synthetic
ucuacacccugcuuucugauu

SEQ ID NO: 405434 - RNA, 22 nt, Artificial Sequence
  Synthetic
uucuacacccugcuuucugauu

SEQ ID NO: 405435 - RNA, 23 nt, Artificial Sequence
  Synthetic
auucuacacccugcuuucugauu

SEQ ID NO: 405436 - RNA, 24 nt, Artificial Sequence
  Synthetic
uauucuacacccugcuuucugauu

SEQ ID NO: 405437 - RNA, 18 nt, Artificial Sequence
  Synthetic
agucaugggaaagugauu

SEQ ID NO: 405438 - RNA, 19 nt, Artificial Sequence
  Synthetic
aagucaugggaaagugauu

SEQ ID NO: 405439 - RNA, 20 nt, Artificial Sequence
  Synthetic
gaagucaugggaaagugauu

SEQ ID NO: 405440 - RNA, 21 nt, Artificial Sequence
  Synthetic
ugaagucaugggaaagugauu

SEQ ID NO: 405441 - RNA, 22 nt, Artificial Sequence
  Synthetic
cugaagucaugggaaagugauu

SEQ ID NO: 405442 - RNA, 23 nt, Artificial Sequence
  Synthetic
ucugaagucaugggaaagugauu

SEQ ID NO: 405443 - RNA, 24 nt, Artificial Sequence
  Synthetic
gucugaagucaugggaaagugauu

SEQ ID NO: 405444 - RNA, 18 nt, Artificial Sequence
  Synthetic
agauguguaucagugauu

SEQ ID NO: 405445 - RNA, 19 nt, Artificial Sequence
  Synthetic
cagauguguaucagugauu

SEQ ID NO: 405446 - RNA, 20 nt, Artificial Sequence
  Synthetic
acagauguguaucagugauu

SEQ ID NO: 405447 - RNA, 21 nt, Artificial Sequence
  Synthetic
aacagauguguaucagugauu

SEQ ID NO: 405448 - RNA, 22 nt, Artificial Sequence
  Synthetic
gaacagauguguaucagugauu

SEQ ID NO: 405449 - RNA, 23 nt, Artificial Sequence
  Synthetic
ggaacagauguguaucagugauu

SEQ ID NO: 405450 - RNA, 24 nt, Artificial Sequence
  Synthetic
aggaacagauguguaucagugauu

SEQ ID NO: 405451 - RNA, 18 nt, Artificial Sequence
  Synthetic
accacugagagagugauu

SEQ ID NO: 405452 - RNA, 19 nt, Artificial Sequence
  Synthetic
caccacugagagagugauu

SEQ ID NO: 405453 - RNA, 20 nt, Artificial Sequence
  Synthetic
acaccacugagagagugauu

SEQ ID NO: 405454 - RNA, 21 nt, Artificial Sequence
  Synthetic
cacaccacugagagagugauu

SEQ ID NO: 405455 - RNA, 22 nt, Artificial Sequence
  Synthetic
gcacaccacugagagagugauu

SEQ ID NO: 405456 - RNA, 23 nt, Artificial Sequence
  Synthetic
ugcacaccacugagagagugauu

SEQ ID NO: 405457 - RNA, 24 nt, Artificial Sequence
  Synthetic
uugcacaccacugagagagugauu

SEQ ID NO: 405458 - RNA, 18 nt, Artificial Sequence
  Synthetic
ucucugccacgagugauu

SEQ ID NO: 405459 - RNA, 19 nt, Artificial Sequence
  Synthetic
aucucugccacgagugauu

SEQ ID NO: 405460 - RNA, 20 nt, Artificial Sequence
  Synthetic
gaucucugccacgagugauu

SEQ ID NO: 405461 - RNA, 21 nt, Artificial Sequence
  Synthetic
ugaucucugccacgagugauu

SEQ ID NO: 405462 - RNA, 22 nt, Artificial Sequence
  Synthetic
augaucucugccacgagugauu

SEQ ID NO: 405463 - RNA, 23 nt, Artificial Sequence
  Synthetic
aaugaucucugccacgagugauu

SEQ ID NO: 405464 - RNA, 24 nt, Artificial Sequence
  Synthetic
caaugaucucugccacgagugauu

SEQ ID NO: 405465 - RNA, 18 nt, Artificial Sequence
  Synthetic
ccaauaugaugagugauu

SEQ ID NO: 405466 - RNA, 19 nt, Artificial Sequence
  Synthetic
accaauaugaugagugauu

SEQ ID NO: 405467 - RNA, 20 nt, Artificial Sequence
  Synthetic
uaccaauaugaugagugauu

SEQ ID NO: 405468 - RNA, 21 nt, Artificial Sequence
  Synthetic
uuaccaauaugaugagugauu

SEQ ID NO: 405469 - RNA, 22 nt, Artificial Sequence
  Synthetic
auuaccaauaugaugagugauu

SEQ ID NO: 405470 - RNA, 23 nt, Artificial Sequence
  Synthetic
aauuaccaauaugaugagugauu

SEQ ID NO: 405471 - RNA, 24 nt, Artificial Sequence
  Synthetic
caauuaccaauaugaugagugauu

SEQ ID NO: 405472 - RNA, 18 nt, Artificial Sequence
  Synthetic
aaagugguguuagugauu

SEQ ID NO: 405473 - RNA, 19 nt, Artificial Sequence
  Synthetic
gaaagugguguuagugauu

SEQ ID NO: 405474 - RNA, 20 nt, Artificial Sequence
  Synthetic
ggaaagugguguuagugauu

SEQ ID NO: 405475 - RNA, 21 nt, Artificial Sequence
  Synthetic
uggaaagugguguuagugauu

SEQ ID NO: 405476 - RNA, 22 nt, Artificial Sequence
  Synthetic
uuggaaagugguguuagugauu

SEQ ID NO: 405477 - RNA, 23 nt, Artificial Sequence
  Synthetic
auuggaaagugguguuagugauu

SEQ ID NO: 405478 - RNA, 24 nt, Artificial Sequence
  Synthetic
cauuggaaagugguguuagugauu

SEQ ID NO: 405479 - RNA, 18 nt, Artificial Sequence
  Synthetic
ugaguuuaaaucgugauu

SEQ ID NO: 405480 - RNA, 19 nt, Artificial Sequence
  Synthetic
cugaguuuaaaucgugauu

SEQ ID NO: 405481 - RNA, 20 nt, Artificial Sequence
  Synthetic
ccugaguuuaaaucgugauu

SEQ ID NO: 405482 - RNA, 21 nt, Artificial Sequence
  Synthetic
gccugaguuuaaaucgugauu

SEQ ID NO: 405483 - RNA, 22 nt, Artificial Sequence
  Synthetic
ugccugaguuuaaaucgugauu

SEQ ID NO: 405484 - RNA, 23 nt, Artificial Sequence
  Synthetic
cugccugaguuuaaaucgugauu

SEQ ID NO: 405485 - RNA, 24 nt, Artificial Sequence
  Synthetic
acugccugaguuuaaaucgugauu

SEQ ID NO: 405486 - RNA, 18 nt, Artificial Sequence
  Synthetic
cucacuuggaaggugauu

SEQ ID NO: 405487 - RNA, 19 nt, Artificial Sequence
  Synthetic
ccucacuuggaaggugauu

SEQ ID NO: 405488 - RNA, 20 nt, Artificial Sequence
  Synthetic
accucacuuggaaggugauu

SEQ ID NO: 405489 - RNA, 21 nt, Artificial Sequence
  Synthetic
uaccucacuuggaaggugauu

SEQ ID NO: 405490 - RNA, 22 nt, Artificial Sequence
  Synthetic
auaccucacuuggaaggugauu

SEQ ID NO: 405491 - RNA, 23 nt, Artificial Sequence
  Synthetic
aauaccucacuuggaaggugauu

SEQ ID NO: 405492 - RNA, 24 nt, Artificial Sequence
  Synthetic
caauaccucacuuggaaggugauu

SEQ ID NO: 405493 - RNA, 18 nt, Artificial Sequence
  Synthetic
uaugcugguagggugauu

SEQ ID NO: 405494 - RNA, 19 nt, Artificial Sequence
  Synthetic
uuaugcugguagggugauu

SEQ ID NO: 405495 - RNA, 20 nt, Artificial Sequence
  Synthetic
cuuaugcugguagggugauu

SEQ ID NO: 405496 - RNA, 21 nt, Artificial Sequence
  Synthetic
acuuaugcugguagggugauu

SEQ ID NO: 405497 - RNA, 22 nt, Artificial Sequence
  Synthetic
uacuuaugcugguagggugauu

SEQ ID NO: 405498 - RNA, 23 nt, Artificial Sequence
  Synthetic
guacuuaugcugguagggugauu

SEQ ID NO: 405499 - RNA, 24 nt, Artificial Sequence
  Synthetic
aguacuuaugcugguagggugauu

SEQ ID NO: 405500 - RNA, 18 nt, Artificial Sequence
  Synthetic
guccagugcugggugauu

SEQ ID NO: 405501 - RNA, 19 nt, Artificial Sequence
  Synthetic
cguccagugcugggugauu

SEQ ID NO: 405502 - RNA, 20 nt, Artificial Sequence
  Synthetic
acguccagugcugggugauu

SEQ ID NO: 405503 - RNA, 21 nt, Artificial Sequence
  Synthetic
cacguccagugcugggugauu

SEQ ID NO: 405504 - RNA, 22 nt, Artificial Sequence
  Synthetic
gcacguccagugcugggugauu

SEQ ID NO: 405505 - RNA, 23 nt, Artificial Sequence
  Synthetic
ugcacguccagugcugggugauu

SEQ ID NO: 405506 - RNA, 24 nt, Artificial Sequence
  Synthetic
cugcacguccagugcugggugauu

SEQ ID NO: 405507 - RNA, 18 nt, Artificial Sequence
  Synthetic
uuuaucaguugggugauu

SEQ ID NO: 405508 - RNA, 19 nt, Artificial Sequence
  Synthetic
guuuaucaguugggugauu

SEQ ID NO: 405509 - RNA, 20 nt, Artificial Sequence
  Synthetic
uguuuaucaguugggugauu

SEQ ID NO: 405510 - RNA, 21 nt, Artificial Sequence
  Synthetic
uuguuuaucaguugggugauu

SEQ ID NO: 405511 - RNA, 22 nt, Artificial Sequence
  Synthetic
uuuguuuaucaguugggugauu

SEQ ID NO: 405512 - RNA, 23 nt, Artificial Sequence
  Synthetic
auuuguuuaucaguugggugauu

SEQ ID NO: 405513 - RNA, 24 nt, Artificial Sequence
  Synthetic
aauuuguuuaucaguugggugauu

SEQ ID NO: 405514 - RNA, 18 nt, Artificial Sequence
  Synthetic
guuaacaccauggugauu

SEQ ID NO: 405515 - RNA, 19 nt, Artificial Sequence
  Synthetic
uguuaacaccauggugauu

SEQ ID NO: 405516 - RNA, 20 nt, Artificial Sequence
  Synthetic
guguuaacaccauggugauu

SEQ ID NO: 405517 - RNA, 21 nt, Artificial Sequence
  Synthetic
aguguuaacaccauggugauu

SEQ ID NO: 405518 - RNA, 22 nt, Artificial Sequence
  Synthetic
aaguguuaacaccauggugauu

SEQ ID NO: 405519 - RNA, 23 nt, Artificial Sequence
  Synthetic
gaaguguuaacaccauggugauu

SEQ ID NO: 405520 - RNA, 24 nt, Artificial Sequence
  Synthetic
ugaaguguuaacaccauggugauu

SEQ ID NO: 405521 - RNA, 18 nt, Artificial Sequence
  Synthetic
uauaaaaucuuggugauu

SEQ ID NO: 405522 - RNA, 19 nt, Artificial Sequence
  Synthetic
uuauaaaaucuuggugauu

SEQ ID NO: 405523 - RNA, 20 nt, Artificial Sequence
  Synthetic
guuauaaaaucuuggugauu

SEQ ID NO: 405524 - RNA, 21 nt, Artificial Sequence
  Synthetic
aguuauaaaaucuuggugauu

SEQ ID NO: 405525 - RNA, 22 nt, Artificial Sequence
  Synthetic
aaguuauaaaaucuuggugauu

SEQ ID NO: 405526 - RNA, 23 nt, Artificial Sequence
  Synthetic
caaguuauaaaaucuuggugauu

SEQ ID NO: 405527 - RNA, 24 nt, Artificial Sequence
  Synthetic
ccaaguuauaaaaucuuggugauu

SEQ ID NO: 405528 - RNA, 18 nt, Artificial Sequence
  Synthetic
gugauaagucaugugauu

SEQ ID NO: 405529 - RNA, 19 nt, Artificial Sequence
  Synthetic
agugauaagucaugugauu

SEQ ID NO: 405530 - RNA, 20 nt, Artificial Sequence
  Synthetic
cagugauaagucaugugauu

SEQ ID NO: 405531 - RNA, 21 nt, Artificial Sequence
  Synthetic
ucagugauaagucaugugauu

SEQ ID NO: 405532 - RNA, 22 nt, Artificial Sequence
  Synthetic
cucagugauaagucaugugauu

SEQ ID NO: 405533 - RNA, 23 nt, Artificial Sequence
  Synthetic
ucucagugauaagucaugugauu

SEQ ID NO: 405534 - RNA, 24 nt, Artificial Sequence
  Synthetic
uucucagugauaagucaugugauu

SEQ ID NO: 405535 - RNA, 18 nt, Artificial Sequence
  Synthetic
auaugacuucaugugauu

SEQ ID NO: 405536 - RNA, 19 nt, Artificial Sequence
  Synthetic
aauaugacuucaugugauu

SEQ ID NO: 405537 - RNA, 20 nt, Artificial Sequence
  Synthetic
gaauaugacuucaugugauu

SEQ ID NO: 405538 - RNA, 21 nt, Artificial Sequence
  Synthetic
agaauaugacuucaugugauu

SEQ ID NO: 405539 - RNA, 22 nt, Artificial Sequence
  Synthetic
aagaauaugacuucaugugauu

SEQ ID NO: 405540 - RNA, 23 nt, Artificial Sequence
  Synthetic
caagaauaugacuucaugugauu

SEQ ID NO: 405541 - RNA, 24 nt, Artificial Sequence
  Synthetic
ccaagaauaugacuucaugugauu

SEQ ID NO: 405542 - RNA, 18 nt, Artificial Sequence
  Synthetic
uauguuccaaaauugauu

SEQ ID NO: 405543 - RNA, 19 nt, Artificial Sequence
  Synthetic
uuauguuccaaaauugauu

SEQ ID NO: 405544 - RNA, 20 nt, Artificial Sequence
  Synthetic
uuuauguuccaaaauugauu

SEQ ID NO: 405545 - RNA, 21 nt, Artificial Sequence
  Synthetic
uuuuauguuccaaaauugauu

SEQ ID NO: 405546 - RNA, 22 nt, Artificial Sequence
  Synthetic
guuuuauguuccaaaauugauu

SEQ ID NO: 405547 - RNA, 23 nt, Artificial Sequence
  Synthetic
aguuuuauguuccaaaauugauu

SEQ ID NO: 405548 - RNA, 24 nt, Artificial Sequence
  Synthetic
aaguuuuauguuccaaaauugauu

SEQ ID NO: 405549 - RNA, 18 nt, Artificial Sequence
  Synthetic
cuagucucuuaauugauu

SEQ ID NO: 405550 - RNA, 19 nt, Artificial Sequence
  Synthetic
gcuagucucuuaauugauu

SEQ ID NO: 405551 - RNA, 20 nt, Artificial Sequence
  Synthetic
agcuagucucuuaauugauu

SEQ ID NO: 405552 - RNA, 21 nt, Artificial Sequence
  Synthetic
gagcuagucucuuaauugauu

SEQ ID NO: 405553 - RNA, 22 nt, Artificial Sequence
  Synthetic
agagcuagucucuuaauugauu

SEQ ID NO: 405554 - RNA, 23 nt, Artificial Sequence
  Synthetic
cagagcuagucucuuaauugauu

SEQ ID NO: 405555 - RNA, 24 nt, Artificial Sequence
  Synthetic
acagagcuagucucuuaauugauu

SEQ ID NO: 405556 - RNA, 18 nt, Artificial Sequence
  Synthetic
uuaaggaguucauugauu

SEQ ID NO: 405557 - RNA, 19 nt, Artificial Sequence
  Synthetic
uuuaaggaguucauugauu

SEQ ID NO: 405558 - RNA, 20 nt, Artificial Sequence
  Synthetic
guuuaaggaguucauugauu

SEQ ID NO: 405559 - RNA, 21 nt, Artificial Sequence
  Synthetic
gguuuaaggaguucauugauu

SEQ ID NO: 405560 - RNA, 22 nt, Artificial Sequence
  Synthetic
agguuuaaggaguucauugauu

SEQ ID NO: 405561 - RNA, 23 nt, Artificial Sequence
  Synthetic
cagguuuaaggaguucauugauu

SEQ ID NO: 405562 - RNA, 24 nt, Artificial Sequence
  Synthetic
gcagguuuaaggaguucauugauu

SEQ ID NO: 405563 - RNA, 18 nt, Artificial Sequence
  Synthetic
cauguuuucagauugauu

SEQ ID NO: 405564 - RNA, 19 nt, Artificial Sequence
  Synthetic
gcauguuuucagauugauu

SEQ ID NO: 405565 - RNA, 20 nt, Artificial Sequence
  Synthetic
agcauguuuucagauugauu

SEQ ID NO: 405566 - RNA, 21 nt, Artificial Sequence
  Synthetic
cagcauguuuucagauugauu

SEQ ID NO: 405567 - RNA, 22 nt, Artificial Sequence
  Synthetic
ucagcauguuuucagauugauu

SEQ ID NO: 405568 - RNA, 23 nt, Artificial Sequence
  Synthetic
uucagcauguuuucagauugauu

SEQ ID NO: 405569 - RNA, 24 nt, Artificial Sequence
  Synthetic
uuucagcauguuuucagauugauu

SEQ ID NO: 405570 - RNA, 18 nt, Artificial Sequence
  Synthetic
gaugcauagugauugauu

SEQ ID NO: 405571 - RNA, 19 nt, Artificial Sequence
  Synthetic
ugaugcauagugauugauu

SEQ ID NO: 405572 - RNA, 20 nt, Artificial Sequence
  Synthetic
uugaugcauagugauugauu

SEQ ID NO: 405573 - RNA, 21 nt, Artificial Sequence
  Synthetic
uuugaugcauagugauugauu

SEQ ID NO: 405574 - RNA, 22 nt, Artificial Sequence
  Synthetic
uuuugaugcauagugauugauu

SEQ ID NO: 405575 - RNA, 23 nt, Artificial Sequence
  Synthetic
auuuugaugcauagugauugauu

SEQ ID NO: 405576 - RNA, 24 nt, Artificial Sequence
  Synthetic
uauuuugaugcauagugauugauu

SEQ ID NO: 405577 - RNA, 18 nt, Artificial Sequence
  Synthetic
aaucugacuaacuugauu

SEQ ID NO: 405578 - RNA, 19 nt, Artificial Sequence
  Synthetic
uaaucugacuaacuugauu

SEQ ID NO: 405579 - RNA, 20 nt, Artificial Sequence
  Synthetic
auaaucugacuaacuugauu

SEQ ID NO: 405580 - RNA, 21 nt, Artificial Sequence
  Synthetic
aauaaucugacuaacuugauu

SEQ ID NO: 405581 - RNA, 22 nt, Artificial Sequence
  Synthetic
gaauaaucugacuaacuugauu

SEQ ID NO: 405582 - RNA, 23 nt, Artificial Sequence
  Synthetic
agaauaaucugacuaacuugauu

SEQ ID NO: 405583 - RNA, 24 nt, Artificial Sequence
  Synthetic
gagaauaaucugacuaacuugauu

SEQ ID NO: 405584 - RNA, 18 nt, Artificial Sequence
  Synthetic
uacuugguuaccuugauu

SEQ ID NO: 405585 - RNA, 19 nt, Artificial Sequence
  Synthetic
auacuugguuaccuugauu

SEQ ID NO: 405586 - RNA, 20 nt, Artificial Sequence
  Synthetic
uauacuugguuaccuugauu

SEQ ID NO: 405587 - RNA, 21 nt, Artificial Sequence
  Synthetic
auauacuugguuaccuugauu

SEQ ID NO: 405588 - RNA, 22 nt, Artificial Sequence
  Synthetic
cauauacuugguuaccuugauu

SEQ ID NO: 405589 - RNA, 23 nt, Artificial Sequence
  Synthetic
gcauauacuugguuaccuugauu

SEQ ID NO: 405590 - RNA, 24 nt, Artificial Sequence
  Synthetic
ugcauauacuugguuaccuugauu

SEQ ID NO: 405591 - RNA, 18 nt, Artificial Sequence
  Synthetic
auuaguuuucccuugauu

SEQ ID NO: 405592 - RNA, 19 nt, Artificial Sequence
  Synthetic
uauuaguuuucccuugauu

SEQ ID NO: 405593 - RNA, 20 nt, Artificial Sequence
  Synthetic
guauuaguuuucccuugauu

SEQ ID NO: 405594 - RNA, 21 nt, Artificial Sequence
  Synthetic
aguauuaguuuucccuugauu

SEQ ID NO: 405595 - RNA, 22 nt, Artificial Sequence
  Synthetic
aaguauuaguuuucccuugauu

SEQ ID NO: 405596 - RNA, 23 nt, Artificial Sequence
  Synthetic
aaaguauuaguuuucccuugauu

SEQ ID NO: 405597 - RNA, 24 nt, Artificial Sequence
  Synthetic
aaaaguauuaguuuucccuugauu

SEQ ID NO: 405598 - RNA, 18 nt, Artificial Sequence
  Synthetic
gauagacgaggcuugauu

SEQ ID NO: 405599 - RNA, 19 nt, Artificial Sequence
  Synthetic
agauagacgaggcuugauu

SEQ ID NO: 405600 - RNA, 20 nt, Artificial Sequence
  Synthetic
aagauagacgaggcuugauu

SEQ ID NO: 405601 - RNA, 21 nt, Artificial Sequence
  Synthetic
aaagauagacgaggcuugauu

SEQ ID NO: 405602 - RNA, 22 nt, Artificial Sequence
  Synthetic
gaaagauagacgaggcuugauu

SEQ ID NO: 405603 - RNA, 23 nt, Artificial Sequence
  Synthetic
ugaaagauagacgaggcuugauu

SEQ ID NO: 405604 - RNA, 24 nt, Artificial Sequence
  Synthetic
uugaaagauagacgaggcuugauu

SEQ ID NO: 405605 - RNA, 18 nt, Artificial Sequence
  Synthetic
uaugucucagucuugauu

SEQ ID NO: 405606 - RNA, 19 nt, Artificial Sequence
  Synthetic
uuaugucucagucuugauu

SEQ ID NO: 405607 - RNA, 20 nt, Artificial Sequence
  Synthetic
auuaugucucagucuugauu

SEQ ID NO: 405608 - RNA, 21 nt, Artificial Sequence
  Synthetic
aauuaugucucagucuugauu

SEQ ID NO: 405609 - RNA, 22 nt, Artificial Sequence
  Synthetic
caauuaugucucagucuugauu

SEQ ID NO: 405610 - RNA, 23 nt, Artificial Sequence
  Synthetic
acaauuaugucucagucuugauu

SEQ ID NO: 405611 - RNA, 24 nt, Artificial Sequence
  Synthetic
cacaauuaugucucagucuugauu

SEQ ID NO: 405612 - RNA, 18 nt, Artificial Sequence
  Synthetic
caggauaaggaguugauu

SEQ ID NO: 405613 - RNA, 19 nt, Artificial Sequence
  Synthetic
ucaggauaaggaguugauu

SEQ ID NO: 405614 - RNA, 20 nt, Artificial Sequence
  Synthetic
cucaggauaaggaguugauu

SEQ ID NO: 405615 - RNA, 21 nt, Artificial Sequence
  Synthetic
acucaggauaaggaguugauu

SEQ ID NO: 405616 - RNA, 22 nt, Artificial Sequence
  Synthetic
aacucaggauaaggaguugauu

SEQ ID NO: 405617 - RNA, 23 nt, Artificial Sequence
  Synthetic
aaacucaggauaaggaguugauu

SEQ ID NO: 405618 - RNA, 24 nt, Artificial Sequence
  Synthetic
caaacucaggauaaggaguugauu

SEQ ID NO: 405619 - RNA, 18 nt, Artificial Sequence
  Synthetic
aaaugaccauaguugauu

SEQ ID NO: 405620 - RNA, 19 nt, Artificial Sequence
  Synthetic
aaaaugaccauaguugauu

SEQ ID NO: 405621 - RNA, 20 nt, Artificial Sequence
  Synthetic
aaaaaugaccauaguugauu

SEQ ID NO: 405622 - RNA, 21 nt, Artificial Sequence
  Synthetic
aaaaaaugaccauaguugauu

SEQ ID NO: 405623 - RNA, 22 nt, Artificial Sequence
  Synthetic
aaaaaaaugaccauaguugauu

SEQ ID NO: 405624 - RNA, 23 nt, Artificial Sequence
  Synthetic
gaaaaaaaugaccauaguugauu

SEQ ID NO: 405625 - RNA, 24 nt, Artificial Sequence
  Synthetic
agaaaaaaaugaccauaguugauu

SEQ ID NO: 405626 - RNA, 18 nt, Artificial Sequence
  Synthetic
gugauuucaguguugauu

SEQ ID NO: 405627 - RNA, 19 nt, Artificial Sequence
  Synthetic
agugauuucaguguugauu

SEQ ID NO: 405628 - RNA, 20 nt, Artificial Sequence
  Synthetic
aagugauuucaguguugauu

SEQ ID NO: 405629 - RNA, 21 nt, Artificial Sequence
  Synthetic
caagugauuucaguguugauu

SEQ ID NO: 405630 - RNA, 22 nt, Artificial Sequence
  Synthetic
gcaagugauuucaguguugauu

SEQ ID NO: 405631 - RNA, 23 nt, Artificial Sequence
  Synthetic
ugcaagugauuucaguguugauu

SEQ ID NO: 405632 - RNA, 24 nt, Artificial Sequence
  Synthetic
augcaagugauuucaguguugauu

SEQ ID NO: 405633 - RNA, 18 nt, Artificial Sequence
  Synthetic
uuuaucuguaauuugauu

SEQ ID NO: 405634 - RNA, 19 nt, Artificial Sequence
  Synthetic
auuuaucuguaauuugauu

SEQ ID NO: 405635 - RNA, 20 nt, Artificial Sequence
  Synthetic
uauuuaucuguaauuugauu

SEQ ID NO: 405636 - RNA, 21 nt, Artificial Sequence
  Synthetic
uuauuuaucuguaauuugauu

SEQ ID NO: 405637 - RNA, 22 nt, Artificial Sequence
  Synthetic
auuauuuaucuguaauuugauu

SEQ ID NO: 405638 - RNA, 23 nt, Artificial Sequence
  Synthetic
aauuauuuaucuguaauuugauu

SEQ ID NO: 405639 - RNA, 24 nt, Artificial Sequence
  Synthetic
aaauuauuuaucuguaauuugauu

SEQ ID NO: 405640 - RNA, 18 nt, Artificial Sequence
  Synthetic
augauuagagcuuugauu

SEQ ID NO: 405641 - RNA, 19 nt, Artificial Sequence
  Synthetic
caugauuagagcuuugauu

SEQ ID NO: 405642 - RNA, 20 nt, Artificial Sequence
  Synthetic
ucaugauuagagcuuugauu

SEQ ID NO: 405643 - RNA, 21 nt, Artificial Sequence
  Synthetic
gucaugauuagagcuuugauu

SEQ ID NO: 405644 - RNA, 22 nt, Artificial Sequence
  Synthetic
agucaugauuagagcuuugauu

SEQ ID NO: 405645 - RNA, 23 nt, Artificial Sequence
  Synthetic
gagucaugauuagagcuuugauu

SEQ ID NO: 405646 - RNA, 24 nt, Artificial Sequence
  Synthetic
agagucaugauuagagcuuugauu

SEQ ID NO: 405647 - RNA, 18 nt, Artificial Sequence
  Synthetic
ucaagaacguguuugauu

SEQ ID NO: 405648 - RNA, 19 nt, Artificial Sequence
  Synthetic
gucaagaacguguuugauu

SEQ ID NO: 405649 - RNA, 20 nt, Artificial Sequence
  Synthetic
agucaagaacguguuugauu

SEQ ID NO: 405650 - RNA, 21 nt, Artificial Sequence
  Synthetic
aagucaagaacguguuugauu

SEQ ID NO: 405651 - RNA, 22 nt, Artificial Sequence
  Synthetic
aaagucaagaacguguuugauu

SEQ ID NO: 405652 - RNA, 23 nt, Artificial Sequence
  Synthetic
caaagucaagaacguguuugauu

SEQ ID NO: 405653 - RNA, 24 nt, Artificial Sequence
  Synthetic
gcaaagucaagaacguguuugauu

SEQ ID NO: 405654 - RNA, 18 nt, Artificial Sequence
  Synthetic
cgcaaaagauuuuugauu

SEQ ID NO: 405655 - RNA, 19 nt, Artificial Sequence
  Synthetic
acgcaaaagauuuuugauu

SEQ ID NO: 405656 - RNA, 20 nt, Artificial Sequence
  Synthetic
uacgcaaaagauuuuugauu

SEQ ID NO: 405657 - RNA, 21 nt, Artificial Sequence
  Synthetic
cuacgcaaaagauuuuugauu

SEQ ID NO: 405658 - RNA, 22 nt, Artificial Sequence
  Synthetic
ucuacgcaaaagauuuuugauu

SEQ ID NO: 405659 - RNA, 23 nt, Artificial Sequence
  Synthetic
aucuacgcaaaagauuuuugauu

SEQ ID NO: 405660 - RNA, 24 nt, Artificial Sequence
  Synthetic
uaucuacgcaaaagauuuuugauu

SEQ ID NO: 405661 - RNA, 18 nt, Artificial Sequence
  Synthetic
aaagaaagaaaaaauauu

SEQ ID NO: 405662 - RNA, 19 nt, Artificial Sequence
  Synthetic
aaaagaaagaaaaaauauu

SEQ ID NO: 405663 - RNA, 20 nt, Artificial Sequence
  Synthetic
gaaaagaaagaaaaaauauu

SEQ ID NO: 405664 - RNA, 21 nt, Artificial Sequence
  Synthetic
agaaaagaaagaaaaaauauu

SEQ ID NO: 405665 - RNA, 22 nt, Artificial Sequence
  Synthetic
aagaaaagaaagaaaaaauauu

SEQ ID NO: 405666 - RNA, 23 nt, Artificial Sequence
  Synthetic
aaagaaaagaaagaaaaaauauu

SEQ ID NO: 405667 - RNA, 24 nt, Artificial Sequence
  Synthetic
caaagaaaagaaagaaaaaauauu

SEQ ID NO: 405668 - RNA, 18 nt, Artificial Sequence
  Synthetic
uuuuuauccaaaaauauu

SEQ ID NO: 405669 - RNA, 19 nt, Artificial Sequence
  Synthetic
auuuuuauccaaaaauauu

SEQ ID NO: 405670 - RNA, 20 nt, Artificial Sequence
  Synthetic
aauuuuuauccaaaaauauu

SEQ ID NO: 405671 - RNA, 21 nt, Artificial Sequence
  Synthetic
uaauuuuuauccaaaaauauu

SEQ ID NO: 405672 - RNA, 22 nt, Artificial Sequence
  Synthetic
guaauuuuuauccaaaaauauu

SEQ ID NO: 405673 - RNA, 23 nt, Artificial Sequence
  Synthetic
aguaauuuuuauccaaaaauauu

SEQ ID NO: 405674 - RNA, 24 nt, Artificial Sequence
  Synthetic
aaguaauuuuuauccaaaaauauu

SEQ ID NO: 405675 - RNA, 18 nt, Artificial Sequence
  Synthetic
ccaugcaucaaaaauauu

SEQ ID NO: 405676 - RNA, 19 nt, Artificial Sequence
  Synthetic
accaugcaucaaaaauauu

SEQ ID NO: 405677 - RNA, 20 nt, Artificial Sequence
  Synthetic
aaccaugcaucaaaaauauu

SEQ ID NO: 405678 - RNA, 21 nt, Artificial Sequence
  Synthetic
caaccaugcaucaaaaauauu

SEQ ID NO: 405679 - RNA, 22 nt, Artificial Sequence
  Synthetic
gcaaccaugcaucaaaaauauu

SEQ ID NO: 405680 - RNA, 23 nt, Artificial Sequence
  Synthetic
ugcaaccaugcaucaaaaauauu

SEQ ID NO: 405681 - RNA, 24 nt, Artificial Sequence
  Synthetic
augcaaccaugcaucaaaaauauu

SEQ ID NO: 405682 - RNA, 18 nt, Artificial Sequence
  Synthetic
aaaauauauaaaaauauu

SEQ ID NO: 405683 - RNA, 19 nt, Artificial Sequence
  Synthetic
uaaaauauauaaaaauauu

SEQ ID NO: 405684 - RNA, 20 nt, Artificial Sequence
  Synthetic
uuaaaauauauaaaaauauu

SEQ ID NO: 405685 - RNA, 21 nt, Artificial Sequence
  Synthetic
auuaaaauauauaaaaauauu

SEQ ID NO: 405686 - RNA, 22 nt, Artificial Sequence
  Synthetic
cauuaaaauauauaaaaauauu

SEQ ID NO: 405687 - RNA, 23 nt, Artificial Sequence
  Synthetic
gcauuaaaauauauaaaaauauu

SEQ ID NO: 405688 - RNA, 24 nt, Artificial Sequence
  Synthetic
agcauuaaaauauauaaaaauauu

SEQ ID NO: 405689 - RNA, 18 nt, Artificial Sequence
  Synthetic
acccauucacaaaauauu

SEQ ID NO: 405690 - RNA, 19 nt, Artificial Sequence
  Synthetic
uacccauucacaaaauauu

SEQ ID NO: 405691 - RNA, 20 nt, Artificial Sequence
  Synthetic
auacccauucacaaaauauu

SEQ ID NO: 405692 - RNA, 21 nt, Artificial Sequence
  Synthetic
aauacccauucacaaaauauu

SEQ ID NO: 405693 - RNA, 22 nt, Artificial Sequence
  Synthetic
caauacccauucacaaaauauu

SEQ ID NO: 405694 - RNA, 23 nt, Artificial Sequence
  Synthetic
ucaauacccauucacaaaauauu

SEQ ID NO: 405695 - RNA, 24 nt, Artificial Sequence
  Synthetic
uucaauacccauucacaaaauauu

SEQ ID NO: 405696 - RNA, 18 nt, Artificial Sequence
  Synthetic
ggaagauaucaaaauauu

SEQ ID NO: 405697 - RNA, 19 nt, Artificial Sequence
  Synthetic
uggaagauaucaaaauauu

SEQ ID NO: 405698 - RNA, 20 nt, Artificial Sequence
  Synthetic
uuggaagauaucaaaauauu

SEQ ID NO: 405699 - RNA, 21 nt, Artificial Sequence
  Synthetic
uuuggaagauaucaaaauauu

SEQ ID NO: 405700 - RNA, 22 nt, Artificial Sequence
  Synthetic
auuuggaagauaucaaaauauu

SEQ ID NO: 405701 - RNA, 23 nt, Artificial Sequence
  Synthetic
aauuuggaagauaucaaaauauu

SEQ ID NO: 405702 - RNA, 24 nt, Artificial Sequence
  Synthetic
aaauuuggaagauaucaaaauauu

SEQ ID NO: 405703 - RNA, 18 nt, Artificial Sequence
  Synthetic
uuuuuauaagaaaauauu

SEQ ID NO: 405704 - RNA, 19 nt, Artificial Sequence
  Synthetic
auuuuuauaagaaaauauu

SEQ ID NO: 405705 - RNA, 20 nt, Artificial Sequence
  Synthetic
uauuuuuauaagaaaauauu

SEQ ID NO: 405706 - RNA, 21 nt, Artificial Sequence
  Synthetic
cuauuuuuauaagaaaauauu

SEQ ID NO: 405707 - RNA, 22 nt, Artificial Sequence
  Synthetic
ucuauuuuuauaagaaaauauu

SEQ ID NO: 405708 - RNA, 23 nt, Artificial Sequence
  Synthetic
cucuauuuuuauaagaaaauauu

SEQ ID NO: 405709 - RNA, 24 nt, Artificial Sequence
  Synthetic
ucucuauuuuuauaagaaaauauu

SEQ ID NO: 405710 - RNA, 18 nt, Artificial Sequence
  Synthetic
cacgacugauaaaauauu

SEQ ID NO: 405711 - RNA, 19 nt, Artificial Sequence
  Synthetic
acacgacugauaaaauauu

SEQ ID NO: 405712 - RNA, 20 nt, Artificial Sequence
  Synthetic
uacacgacugauaaaauauu

SEQ ID NO: 405713 - RNA, 21 nt, Artificial Sequence
  Synthetic
uuacacgacugauaaaauauu

SEQ ID NO: 405714 - RNA, 22 nt, Artificial Sequence
  Synthetic
uuuacacgacugauaaaauauu

SEQ ID NO: 405715 - RNA, 23 nt, Artificial Sequence
  Synthetic
auuuacacgacugauaaaauauu

SEQ ID NO: 405716 - RNA, 24 nt, Artificial Sequence
  Synthetic
cauuuacacgacugauaaaauauu

SEQ ID NO: 405717 - RNA, 18 nt, Artificial Sequence
  Synthetic
aggaaauuauaaaauauu

SEQ ID NO: 405718 - RNA, 19 nt, Artificial Sequence
  Synthetic
uaggaaauuauaaaauauu

SEQ ID NO: 405719 - RNA, 20 nt, Artificial Sequence
  Synthetic
auaggaaauuauaaaauauu

SEQ ID NO: 405720 - RNA, 21 nt, Artificial Sequence
  Synthetic
cauaggaaauuauaaaauauu

SEQ ID NO: 405721 - RNA, 22 nt, Artificial Sequence
  Synthetic
acauaggaaauuauaaaauauu

SEQ ID NO: 405722 - RNA, 23 nt, Artificial Sequence
  Synthetic
cacauaggaaauuauaaaauauu

SEQ ID NO: 405723 - RNA, 24 nt, Artificial Sequence
  Synthetic
ucacauaggaaauuauaaaauauu

SEQ ID NO: 405724 - RNA, 18 nt, Artificial Sequence
  Synthetic
uucaguacuuaaaauauu

SEQ ID NO: 405725 - RNA, 19 nt, Artificial Sequence
  Synthetic
auucaguacuuaaaauauu

SEQ ID NO: 405726 - RNA, 20 nt, Artificial Sequence
  Synthetic
aauucaguacuuaaaauauu

SEQ ID NO: 405727 - RNA, 21 nt, Artificial Sequence
  Synthetic
uaauucaguacuuaaaauauu

SEQ ID NO: 405728 - RNA, 22 nt, Artificial Sequence
  Synthetic
auaauucaguacuuaaaauauu

SEQ ID NO: 405729 - RNA, 23 nt, Artificial Sequence
  Synthetic
aauaauucaguacuuaaaauauu

SEQ ID NO: 405730 - RNA, 24 nt, Artificial Sequence
  Synthetic
gaauaauucaguacuuaaaauauu

SEQ ID NO: 405731 - RNA, 18 nt, Artificial Sequence
  Synthetic
cuaacccuuuaaaauauu

SEQ ID NO: 405732 - RNA, 19 nt, Artificial Sequence
  Synthetic
acuaacccuuuaaaauauu

SEQ ID NO: 405733 - RNA, 20 nt, Artificial Sequence
  Synthetic
gacuaacccuuuaaaauauu

SEQ ID NO: 405734 - RNA, 21 nt, Artificial Sequence
  Synthetic
ugacuaacccuuuaaaauauu

SEQ ID NO: 405735 - RNA, 22 nt, Artificial Sequence
  Synthetic
augacuaacccuuuaaaauauu

SEQ ID NO: 405736 - RNA, 23 nt, Artificial Sequence
  Synthetic
aaugacuaacccuuuaaaauauu

SEQ ID NO: 405737 - RNA, 24 nt, Artificial Sequence
  Synthetic
uaaugacuaacccuuuaaaauauu

SEQ ID NO: 405738 - RNA, 18 nt, Artificial Sequence
  Synthetic
auccuauuuuaaaauauu

SEQ ID NO: 405739 - RNA, 19 nt, Artificial Sequence
  Synthetic
uauccuauuuuaaaauauu

SEQ ID NO: 405740 - RNA, 20 nt, Artificial Sequence
  Synthetic
auauccuauuuuaaaauauu

SEQ ID NO: 405741 - RNA, 21 nt, Artificial Sequence
  Synthetic
aauauccuauuuuaaaauauu

SEQ ID NO: 405742 - RNA, 22 nt, Artificial Sequence
  Synthetic
aaauauccuauuuuaaaauauu

SEQ ID NO: 405743 - RNA, 23 nt, Artificial Sequence
  Synthetic
caaauauccuauuuuaaaauauu

SEQ ID NO: 405744 - RNA, 24 nt, Artificial Sequence
  Synthetic
gcaaauauccuauuuuaaaauauu

SEQ ID NO: 405745 - RNA, 18 nt, Artificial Sequence
  Synthetic
uagaauuaaacaaauauu

SEQ ID NO: 405746 - RNA, 19 nt, Artificial Sequence
  Synthetic
auagaauuaaacaaauauu

SEQ ID NO: 405747 - RNA, 20 nt, Artificial Sequence
  Synthetic
aauagaauuaaacaaauauu

SEQ ID NO: 405748 - RNA, 21 nt, Artificial Sequence
  Synthetic
aaauagaauuaaacaaauauu

SEQ ID NO: 405749 - RNA, 22 nt, Artificial Sequence
  Synthetic
uaaauagaauuaaacaaauauu

SEQ ID NO: 405750 - RNA, 23 nt, Artificial Sequence
  Synthetic
auaaauagaauuaaacaaauauu

SEQ ID NO: 405751 - RNA, 24 nt, Artificial Sequence
  Synthetic
uauaaauagaauuaaacaaauauu

SEQ ID NO: 405752 - RNA, 18 nt, Artificial Sequence
  Synthetic
aguagcuuuacaaauauu

SEQ ID NO: 405753 - RNA, 19 nt, Artificial Sequence
  Synthetic
caguagcuuuacaaauauu

SEQ ID NO: 405754 - RNA, 20 nt, Artificial Sequence
  Synthetic
gcaguagcuuuacaaauauu

SEQ ID NO: 405755 - RNA, 21 nt, Artificial Sequence
  Synthetic
ugcaguagcuuuacaaauauu

SEQ ID NO: 405756 - RNA, 22 nt, Artificial Sequence
  Synthetic
uugcaguagcuuuacaaauauu

SEQ ID NO: 405757 - RNA, 23 nt, Artificial Sequence
  Synthetic
uuugcaguagcuuuacaaauauu

SEQ ID NO: 405758 - RNA, 24 nt, Artificial Sequence
  Synthetic
uuuugcaguagcuuuacaaauauu

SEQ ID NO: 405759 - RNA, 18 nt, Artificial Sequence
  Synthetic
agauaagaaagaaauauu

SEQ ID NO: 405760 - RNA, 19 nt, Artificial Sequence
  Synthetic
aagauaagaaagaaauauu

SEQ ID NO: 405761 - RNA, 20 nt, Artificial Sequence
  Synthetic
aaagauaagaaagaaauauu

SEQ ID NO: 405762 - RNA, 21 nt, Artificial Sequence
  Synthetic
aaaagauaagaaagaaauauu

SEQ ID NO: 405763 - RNA, 22 nt, Artificial Sequence
  Synthetic
uaaaagauaagaaagaaauauu

SEQ ID NO: 405764 - RNA, 23 nt, Artificial Sequence
  Synthetic
cuaaaagauaagaaagaaauauu

SEQ ID NO: 405765 - RNA, 24 nt, Artificial Sequence
  Synthetic
ucuaaaagauaagaaagaaauauu

SEQ ID NO: 405766 - RNA, 18 nt, Artificial Sequence
  Synthetic
acaaaaagcagaaauauu

SEQ ID NO: 405767 - RNA, 19 nt, Artificial Sequence
  Synthetic
aacaaaaagcagaaauauu

SEQ ID NO: 405768 - RNA, 20 nt, Artificial Sequence
  Synthetic
aaacaaaaagcagaaauauu

SEQ ID NO: 405769 - RNA, 21 nt, Artificial Sequence
  Synthetic
aaaacaaaaagcagaaauauu

SEQ ID NO: 405770 - RNA, 22 nt, Artificial Sequence
  Synthetic
aaaaacaaaaagcagaaauauu

SEQ ID NO: 405771 - RNA, 23 nt, Artificial Sequence
  Synthetic
uaaaaacaaaaagcagaaauauu

SEQ ID NO: 405772 - RNA, 24 nt, Artificial Sequence
  Synthetic
auaaaaacaaaaagcagaaauauu

SEQ ID NO: 405773 - RNA, 18 nt, Artificial Sequence
  Synthetic
gucugcccuggaaauauu

SEQ ID NO: 405774 - RNA, 19 nt, Artificial Sequence
  Synthetic
ggucugcccuggaaauauu

SEQ ID NO: 405775 - RNA, 20 nt, Artificial Sequence
  Synthetic
cggucugcccuggaaauauu

SEQ ID NO: 405776 - RNA, 21 nt, Artificial Sequence
  Synthetic
acggucugcccuggaaauauu

SEQ ID NO: 405777 - RNA, 22 nt, Artificial Sequence
  Synthetic
gacggucugcccuggaaauauu

SEQ ID NO: 405778 - RNA, 23 nt, Artificial Sequence
  Synthetic
ggacggucugcccuggaaauauu

SEQ ID NO: 405779 - RNA, 24 nt, Artificial Sequence
  Synthetic
aggacggucugcccuggaaauauu

SEQ ID NO: 405780 - RNA, 18 nt, Artificial Sequence
  Synthetic
ucagauucuggaaauauu

SEQ ID NO: 405781 - RNA, 19 nt, Artificial Sequence
  Synthetic
gucagauucuggaaauauu

SEQ ID NO: 405782 - RNA, 20 nt, Artificial Sequence
  Synthetic
ugucagauucuggaaauauu

SEQ ID NO: 405783 - RNA, 21 nt, Artificial Sequence
  Synthetic
augucagauucuggaaauauu

SEQ ID NO: 405784 - RNA, 22 nt, Artificial Sequence
  Synthetic
aaugucagauucuggaaauauu

SEQ ID NO: 405785 - RNA, 23 nt, Artificial Sequence
  Synthetic
gaaugucagauucuggaaauauu

SEQ ID NO: 405786 - RNA, 24 nt, Artificial Sequence
  Synthetic
agaaugucagauucuggaaauauu

SEQ ID NO: 405787 - RNA, 18 nt, Artificial Sequence
  Synthetic
gaaaaagcuugaaauauu

SEQ ID NO: 405788 - RNA, 19 nt, Artificial Sequence
  Synthetic
ugaaaaagcuugaaauauu

SEQ ID NO: 405789 - RNA, 20 nt, Artificial Sequence
  Synthetic
uugaaaaagcuugaaauauu

SEQ ID NO: 405790 - RNA, 21 nt, Artificial Sequence
  Synthetic
auugaaaaagcuugaaauauu

SEQ ID NO: 405791 - RNA, 22 nt, Artificial Sequence
  Synthetic
uauugaaaaagcuugaaauauu

SEQ ID NO: 405792 - RNA, 23 nt, Artificial Sequence
  Synthetic
auauugaaaaagcuugaaauauu

SEQ ID NO: 405793 - RNA, 24 nt, Artificial Sequence
  Synthetic
aauauugaaaaagcuugaaauauu

SEQ ID NO: 405794 - RNA, 18 nt, Artificial Sequence
  Synthetic
uugugaugaauaaauauu

SEQ ID NO: 405795 - RNA, 19 nt, Artificial Sequence
  Synthetic
uuugugaugaauaaauauu

SEQ ID NO: 405796 - RNA, 20 nt, Artificial Sequence
  Synthetic
uuuugugaugaauaaauauu

SEQ ID NO: 405797 - RNA, 21 nt, Artificial Sequence
  Synthetic
uuuuugugaugaauaaauauu

SEQ ID NO: 405798 - RNA, 22 nt, Artificial Sequence
  Synthetic
auuuuugugaugaauaaauauu

SEQ ID NO: 405799 - RNA, 23 nt, Artificial Sequence
  Synthetic
cauuuuugugaugaauaaauauu

SEQ ID NO: 405800 - RNA, 24 nt, Artificial Sequence
  Synthetic
acauuuuugugaugaauaaauauu

SEQ ID NO: 405801 - RNA, 18 nt, Artificial Sequence
  Synthetic
cguggucugauaaauauu

SEQ ID NO: 405802 - RNA, 19 nt, Artificial Sequence
  Synthetic
ucguggucugauaaauauu

SEQ ID NO: 405803 - RNA, 20 nt, Artificial Sequence
  Synthetic
gucguggucugauaaauauu

SEQ ID NO: 405804 - RNA, 21 nt, Artificial Sequence
  Synthetic
agucguggucugauaaauauu

SEQ ID NO: 405805 - RNA, 22 nt, Artificial Sequence
  Synthetic
gagucguggucugauaaauauu

SEQ ID NO: 405806 - RNA, 23 nt, Artificial Sequence
  Synthetic
agagucguggucugauaaauauu

SEQ ID NO: 405807 - RNA, 24 nt, Artificial Sequence
  Synthetic
aagagucguggucugauaaauauu

SEQ ID NO: 405808 - RNA, 18 nt, Artificial Sequence
  Synthetic
agcauacauauaaauauu

SEQ ID NO: 405809 - RNA, 19 nt, Artificial Sequence
  Synthetic
aagcauacauauaaauauu

SEQ ID NO: 405810 - RNA, 20 nt, Artificial Sequence
  Synthetic
aaagcauacauauaaauauu

SEQ ID NO: 405811 - RNA, 21 nt, Artificial Sequence
  Synthetic
uaaagcauacauauaaauauu

SEQ ID NO: 405812 - RNA, 22 nt, Artificial Sequence
  Synthetic
cuaaagcauacauauaaauauu

SEQ ID NO: 405813 - RNA, 23 nt, Artificial Sequence
  Synthetic
ccuaaagcauacauauaaauauu

SEQ ID NO: 405814 - RNA, 24 nt, Artificial Sequence
  Synthetic
uccuaaagcauacauauaaauauu

SEQ ID NO: 405815 - RNA, 18 nt, Artificial Sequence
  Synthetic
aaacucuagcuaaauauu

SEQ ID NO: 405816 - RNA, 19 nt, Artificial Sequence
  Synthetic
aaaacucuagcuaaauauu

SEQ ID NO: 405817 - RNA, 20 nt, Artificial Sequence
  Synthetic
caaaacucuagcuaaauauu

SEQ ID NO: 405818 - RNA, 21 nt, Artificial Sequence
  Synthetic
ccaaaacucuagcuaaauauu

SEQ ID NO: 405819 - RNA, 22 nt, Artificial Sequence
  Synthetic
uccaaaacucuagcuaaauauu

SEQ ID NO: 405820 - RNA, 23 nt, Artificial Sequence
  Synthetic
cuccaaaacucuagcuaaauauu

SEQ ID NO: 405821 - RNA, 24 nt, Artificial Sequence
  Synthetic
acuccaaaacucuagcuaaauauu

SEQ ID NO: 405822 - RNA, 18 nt, Artificial Sequence
  Synthetic
ucuuacucucuaaauauu

SEQ ID NO: 405823 - RNA, 19 nt, Artificial Sequence
  Synthetic
uucuuacucucuaaauauu

SEQ ID NO: 405824 - RNA, 20 nt, Artificial Sequence
  Synthetic
cuucuuacucucuaaauauu

SEQ ID NO: 405825 - RNA, 21 nt, Artificial Sequence
  Synthetic
ccuucuuacucucuaaauauu

SEQ ID NO: 405826 - RNA, 22 nt, Artificial Sequence
  Synthetic
uccuucuuacucucuaaauauu

SEQ ID NO: 405827 - RNA, 23 nt, Artificial Sequence
  Synthetic
guccuucuuacucucuaaauauu

SEQ ID NO: 405828 - RNA, 24 nt, Artificial Sequence
  Synthetic
uguccuucuuacucucuaaauauu

SEQ ID NO: 405829 - RNA, 18 nt, Artificial Sequence
  Synthetic
gugcagacuguaaauauu

SEQ ID NO: 405830 - RNA, 19 nt, Artificial Sequence
  Synthetic
ugugcagacuguaaauauu

SEQ ID NO: 405831 - RNA, 20 nt, Artificial Sequence
  Synthetic
augugcagacuguaaauauu

SEQ ID NO: 405832 - RNA, 21 nt, Artificial Sequence
  Synthetic
uaugugcagacuguaaauauu

SEQ ID NO: 405833 - RNA, 22 nt, Artificial Sequence
  Synthetic
guaugugcagacuguaaauauu

SEQ ID NO: 405834 - RNA, 23 nt, Artificial Sequence
  Synthetic
uguaugugcagacuguaaauauu

SEQ ID NO: 405835 - RNA, 24 nt, Artificial Sequence
  Synthetic
uuguaugugcagacuguaaauauu

SEQ ID NO: 405836 - RNA, 18 nt, Artificial Sequence
  Synthetic
guaggaagaaucaauauu

SEQ ID NO: 405837 - RNA, 19 nt, Artificial Sequence
  Synthetic
gguaggaagaaucaauauu

SEQ ID NO: 405838 - RNA, 20 nt, Artificial Sequence
  Synthetic
ggguaggaagaaucaauauu

SEQ ID NO: 405839 - RNA, 21 nt, Artificial Sequence
  Synthetic
uggguaggaagaaucaauauu

SEQ ID NO: 405840 - RNA, 22 nt, Artificial Sequence
  Synthetic
auggguaggaagaaucaauauu

SEQ ID NO: 405841 - RNA, 23 nt, Artificial Sequence
  Synthetic
cauggguaggaagaaucaauauu

SEQ ID NO: 405842 - RNA, 24 nt, Artificial Sequence
  Synthetic
ucauggguaggaagaaucaauauu

SEQ ID NO: 405843 - RNA, 18 nt, Artificial Sequence
  Synthetic
acaagaugacggaauauu

SEQ ID NO: 405844 - RNA, 19 nt, Artificial Sequence
  Synthetic
aacaagaugacggaauauu

SEQ ID NO: 405845 - RNA, 20 nt, Artificial Sequence
  Synthetic
gaacaagaugacggaauauu

SEQ ID NO: 405846 - RNA, 21 nt, Artificial Sequence
  Synthetic
ggaacaagaugacggaauauu

SEQ ID NO: 405847 - RNA, 22 nt, Artificial Sequence
  Synthetic
aggaacaagaugacggaauauu

SEQ ID NO: 405848 - RNA, 23 nt, Artificial Sequence
  Synthetic
uaggaacaagaugacggaauauu

SEQ ID NO: 405849 - RNA, 24 nt, Artificial Sequence
  Synthetic
guaggaacaagaugacggaauauu

SEQ ID NO: 405850 - RNA, 18 nt, Artificial Sequence
  Synthetic
uacuguuagcugaauauu

SEQ ID NO: 405851 - RNA, 19 nt, Artificial Sequence
  Synthetic
uuacuguuagcugaauauu

SEQ ID NO: 405852 - RNA, 20 nt, Artificial Sequence
  Synthetic
uuuacuguuagcugaauauu

SEQ ID NO: 405853 - RNA, 21 nt, Artificial Sequence
  Synthetic
cuuuacuguuagcugaauauu

SEQ ID NO: 405854 - RNA, 22 nt, Artificial Sequence
  Synthetic
acuuuacuguuagcugaauauu

SEQ ID NO: 405855 - RNA, 23 nt, Artificial Sequence
  Synthetic
gacuuuacuguuagcugaauauu

SEQ ID NO: 405856 - RNA, 24 nt, Artificial Sequence
  Synthetic
agacuuuacuguuagcugaauauu

SEQ ID NO: 405857 - RNA, 18 nt, Artificial Sequence
  Synthetic
aauaauuaacauaauauu

SEQ ID NO: 405858 - RNA, 19 nt, Artificial Sequence
  Synthetic
aaauaauuaacauaauauu

SEQ ID NO: 405859 - RNA, 20 nt, Artificial Sequence
  Synthetic
gaaauaauuaacauaauauu

SEQ ID NO: 405860 - RNA, 21 nt, Artificial Sequence
  Synthetic
agaaauaauuaacauaauauu

SEQ ID NO: 405861 - RNA, 22 nt, Artificial Sequence
  Synthetic
gagaaauaauuaacauaauauu

SEQ ID NO: 405862 - RNA, 23 nt, Artificial Sequence
  Synthetic
ggagaaauaauuaacauaauauu

SEQ ID NO: 405863 - RNA, 24 nt, Artificial Sequence
  Synthetic
aggagaaauaauuaacauaauauu

SEQ ID NO: 405864 - RNA, 18 nt, Artificial Sequence
  Synthetic
cuaugcuuccauaauauu

SEQ ID NO: 405865 - RNA, 19 nt, Artificial Sequence
  Synthetic
ucuaugcuuccauaauauu

SEQ ID NO: 405866 - RNA, 20 nt, Artificial Sequence
  Synthetic
gucuaugcuuccauaauauu

SEQ ID NO: 405867 - RNA, 21 nt, Artificial Sequence
  Synthetic
agucuaugcuuccauaauauu

SEQ ID NO: 405868 - RNA, 22 nt, Artificial Sequence
  Synthetic
uagucuaugcuuccauaauauu

SEQ ID NO: 405869 - RNA, 23 nt, Artificial Sequence
  Synthetic
uuagucuaugcuuccauaauauu

SEQ ID NO: 405870 - RNA, 24 nt, Artificial Sequence
  Synthetic
cuuagucuaugcuuccauaauauu

SEQ ID NO: 405871 - RNA, 18 nt, Artificial Sequence
  Synthetic
uacuuuuaaaguaauauu

SEQ ID NO: 405872 - RNA, 19 nt, Artificial Sequence
  Synthetic
uuacuuuuaaaguaauauu

SEQ ID NO: 405873 - RNA, 20 nt, Artificial Sequence
  Synthetic
cuuacuuuuaaaguaauauu

SEQ ID NO: 405874 - RNA, 21 nt, Artificial Sequence
  Synthetic
acuuacuuuuaaaguaauauu

SEQ ID NO: 405875 - RNA, 22 nt, Artificial Sequence
  Synthetic
cacuuacuuuuaaaguaauauu

SEQ ID NO: 405876 - RNA, 23 nt, Artificial Sequence
  Synthetic
ccacuuacuuuuaaaguaauauu

SEQ ID NO: 405877 - RNA, 24 nt, Artificial Sequence
  Synthetic
uccacuuacuuuuaaaguaauauu

SEQ ID NO: 405878 - RNA, 18 nt, Artificial Sequence
  Synthetic
aguaacuggcguaauauu

SEQ ID NO: 405879 - RNA, 19 nt, Artificial Sequence
  Synthetic
aaguaacuggcguaauauu

SEQ ID NO: 405880 - RNA, 20 nt, Artificial Sequence
  Synthetic
aaaguaacuggcguaauauu

SEQ ID NO: 405881 - RNA, 21 nt, Artificial Sequence
  Synthetic
aaaaguaacuggcguaauauu

SEQ ID NO: 405882 - RNA, 22 nt, Artificial Sequence
  Synthetic
aaaaaguaacuggcguaauauu

SEQ ID NO: 405883 - RNA, 23 nt, Artificial Sequence
  Synthetic
uaaaaaguaacuggcguaauauu

SEQ ID NO: 405884 - RNA, 24 nt, Artificial Sequence
  Synthetic
uuaaaaaguaacuggcguaauauu

SEQ ID NO: 405885 - RNA, 18 nt, Artificial Sequence
  Synthetic
ggaguagagauuaauauu

SEQ ID NO: 405886 - RNA, 19 nt, Artificial Sequence
  Synthetic
aggaguagagauuaauauu

SEQ ID NO: 405887 - RNA, 20 nt, Artificial Sequence
  Synthetic
uaggaguagagauuaauauu

SEQ ID NO: 405888 - RNA, 21 nt, Artificial Sequence
  Synthetic
auaggaguagagauuaauauu

SEQ ID NO: 405889 - RNA, 22 nt, Artificial Sequence
  Synthetic
aauaggaguagagauuaauauu

SEQ ID NO: 405890 - RNA, 23 nt, Artificial Sequence
  Synthetic
gaauaggaguagagauuaauauu

SEQ ID NO: 405891 - RNA, 24 nt, Artificial Sequence
  Synthetic
ggaauaggaguagagauuaauauu

SEQ ID NO: 405892 - RNA, 18 nt, Artificial Sequence
  Synthetic
uaaauagcucuuaauauu

SEQ ID NO: 405893 - RNA, 19 nt, Artificial Sequence
  Synthetic
auaaauagcucuuaauauu

SEQ ID NO: 405894 - RNA, 20 nt, Artificial Sequence
  Synthetic
cauaaauagcucuuaauauu

SEQ ID NO: 405895 - RNA, 21 nt, Artificial Sequence
  Synthetic
ucauaaauagcucuuaauauu

SEQ ID NO: 405896 - RNA, 22 nt, Artificial Sequence
  Synthetic
gucauaaauagcucuuaauauu

SEQ ID NO: 405897 - RNA, 23 nt, Artificial Sequence
  Synthetic
ugucauaaauagcucuuaauauu

SEQ ID NO: 405898 - RNA, 24 nt, Artificial Sequence
  Synthetic
uugucauaaauagcucuuaauauu

SEQ ID NO: 405899 - RNA, 18 nt, Artificial Sequence
  Synthetic
aauaugcccuuuaauauu

SEQ ID NO: 405900 - RNA, 19 nt, Artificial Sequence
  Synthetic
aaauaugcccuuuaauauu

SEQ ID NO: 405901 - RNA, 20 nt, Artificial Sequence
  Synthetic
uaaauaugcccuuuaauauu

SEQ ID NO: 405902 - RNA, 21 nt, Artificial Sequence
  Synthetic
guaaauaugcccuuuaauauu

SEQ ID NO: 405903 - RNA, 22 nt, Artificial Sequence
  Synthetic
aguaaauaugcccuuuaauauu

SEQ ID NO: 405904 - RNA, 23 nt, Artificial Sequence
  Synthetic
uaguaaauaugcccuuuaauauu

SEQ ID NO: 405905 - RNA, 24 nt, Artificial Sequence
  Synthetic
auaguaaauaugcccuuuaauauu

SEQ ID NO: 405906 - RNA, 18 nt, Artificial Sequence
  Synthetic
uagguggauuuuaauauu

SEQ ID NO: 405907 - RNA, 19 nt, Artificial Sequence
  Synthetic
auagguggauuuuaauauu

SEQ ID NO: 405908 - RNA, 20 nt, Artificial Sequence
  Synthetic
aauagguggauuuuaauauu

SEQ ID NO: 405909 - RNA, 21 nt, Artificial Sequence
  Synthetic
uaauagguggauuuuaauauu

SEQ ID NO: 405910 - RNA, 22 nt, Artificial Sequence
  Synthetic
auaauagguggauuuuaauauu

SEQ ID NO: 405911 - RNA, 23 nt, Artificial Sequence
  Synthetic
cauaauagguggauuuuaauauu

SEQ ID NO: 405912 - RNA, 24 nt, Artificial Sequence
  Synthetic
acauaauagguggauuuuaauauu

SEQ ID NO: 405913 - RNA, 18 nt, Artificial Sequence
  Synthetic
acuuucucaaaacauauu

SEQ ID NO: 405914 - RNA, 19 nt, Artificial Sequence
  Synthetic
cacuuucucaaaacauauu

SEQ ID NO: 405915 - RNA, 20 nt, Artificial Sequence
  Synthetic
acacuuucucaaaacauauu

SEQ ID NO: 405916 - RNA, 21 nt, Artificial Sequence
  Synthetic
aacacuuucucaaaacauauu

SEQ ID NO: 405917 - RNA, 22 nt, Artificial Sequence
  Synthetic
caacacuuucucaaaacauauu

SEQ ID NO: 405918 - RNA, 23 nt, Artificial Sequence
  Synthetic
acaacacuuucucaaaacauauu

SEQ ID NO: 405919 - RNA, 24 nt, Artificial Sequence
  Synthetic
cacaacacuuucucaaaacauauu

SEQ ID NO: 405920 - RNA, 18 nt, Artificial Sequence
  Synthetic
gggagaaagaaacauauu

SEQ ID NO: 405921 - RNA, 19 nt, Artificial Sequence
  Synthetic
ggggagaaagaaacauauu

SEQ ID NO: 405922 - RNA, 20 nt, Artificial Sequence
  Synthetic
aggggagaaagaaacauauu

SEQ ID NO: 405923 - RNA, 21 nt, Artificial Sequence
  Synthetic
aaggggagaaagaaacauauu

SEQ ID NO: 405924 - RNA, 22 nt, Artificial Sequence
  Synthetic
aaaggggagaaagaaacauauu

SEQ ID NO: 405925 - RNA, 23 nt, Artificial Sequence
  Synthetic
gaaaggggagaaagaaacauauu

SEQ ID NO: 405926 - RNA, 24 nt, Artificial Sequence
  Synthetic
ugaaaggggagaaagaaacauauu

SEQ ID NO: 405927 - RNA, 18 nt, Artificial Sequence
  Synthetic
cuaaugguagaacauauu

SEQ ID NO: 405928 - RNA, 19 nt, Artificial Sequence
  Synthetic
ucuaaugguagaacauauu

SEQ ID NO: 405929 - RNA, 20 nt, Artificial Sequence
  Synthetic
uucuaaugguagaacauauu

SEQ ID NO: 405930 - RNA, 21 nt, Artificial Sequence
  Synthetic
uuucuaaugguagaacauauu

SEQ ID NO: 405931 - RNA, 22 nt, Artificial Sequence
  Synthetic
auuucuaaugguagaacauauu

SEQ ID NO: 405932 - RNA, 23 nt, Artificial Sequence
  Synthetic
aauuucuaaugguagaacauauu

SEQ ID NO: 405933 - RNA, 24 nt, Artificial Sequence
  Synthetic
uaauuucuaaugguagaacauauu

SEQ ID NO: 405934 - RNA, 18 nt, Artificial Sequence
  Synthetic
cauuguauggaacauauu

SEQ ID NO: 405935 - RNA, 19 nt, Artificial Sequence
  Synthetic
ucauuguauggaacauauu

SEQ ID NO: 405936 - RNA, 20 nt, Artificial Sequence
  Synthetic
cucauuguauggaacauauu

SEQ ID NO: 405937 - RNA, 21 nt, Artificial Sequence
  Synthetic
ucucauuguauggaacauauu

SEQ ID NO: 405938 - RNA, 22 nt, Artificial Sequence
  Synthetic
cucucauuguauggaacauauu

SEQ ID NO: 405939 - RNA, 23 nt, Artificial Sequence
  Synthetic
acucucauuguauggaacauauu

SEQ ID NO: 405940 - RNA, 24 nt, Artificial Sequence
  Synthetic
gacucucauuguauggaacauauu

SEQ ID NO: 405941 - RNA, 18 nt, Artificial Sequence
  Synthetic
cuccaggaguaacauauu

SEQ ID NO: 405942 - RNA, 19 nt, Artificial Sequence
  Synthetic
gcuccaggaguaacauauu

SEQ ID NO: 405943 - RNA, 20 nt, Artificial Sequence
  Synthetic
ggcuccaggaguaacauauu

SEQ ID NO: 405944 - RNA, 21 nt, Artificial Sequence
  Synthetic
aggcuccaggaguaacauauu

SEQ ID NO: 405945 - RNA, 22 nt, Artificial Sequence
  Synthetic
aaggcuccaggaguaacauauu

SEQ ID NO: 405946 - RNA, 23 nt, Artificial Sequence
  Synthetic
gaaggcuccaggaguaacauauu

SEQ ID NO: 405947 - RNA, 24 nt, Artificial Sequence
  Synthetic
ggaaggcuccaggaguaacauauu

SEQ ID NO: 405948 - RNA, 18 nt, Artificial Sequence
  Synthetic
uauauaugcacacauauu

SEQ ID NO: 405949 - RNA, 19 nt, Artificial Sequence
  Synthetic
auauauaugcacacauauu

SEQ ID NO: 405950 - RNA, 20 nt, Artificial Sequence
  Synthetic
uauauauaugcacacauauu

SEQ ID NO: 405951 - RNA, 21 nt, Artificial Sequence
  Synthetic
auauauauaugcacacauauu

SEQ ID NO: 405952 - RNA, 22 nt, Artificial Sequence
  Synthetic
uauauauauaugcacacauauu

SEQ ID NO: 405953 - RNA, 23 nt, Artificial Sequence
  Synthetic
auauauauauaugcacacauauu

SEQ ID NO: 405954 - RNA, 24 nt, Artificial Sequence
  Synthetic
uauauauauauaugcacacauauu

SEQ ID NO: 405955 - RNA, 18 nt, Artificial Sequence
  Synthetic
ugugaaauaucacauauu

SEQ ID NO: 405956 - RNA, 19 nt, Artificial Sequence
  Synthetic
uugugaaauaucacauauu

SEQ ID NO: 405957 - RNA, 20 nt, Artificial Sequence
  Synthetic
auugugaaauaucacauauu

SEQ ID NO: 405958 - RNA, 21 nt, Artificial Sequence
  Synthetic
uauugugaaauaucacauauu

SEQ ID NO: 405959 - RNA, 22 nt, Artificial Sequence
  Synthetic
auauugugaaauaucacauauu

SEQ ID NO: 405960 - RNA, 23 nt, Artificial Sequence
  Synthetic
gauauugugaaauaucacauauu

SEQ ID NO: 405961 - RNA, 24 nt, Artificial Sequence
  Synthetic
ugauauugugaaauaucacauauu

SEQ ID NO: 405962 - RNA, 18 nt, Artificial Sequence
  Synthetic
auacuccacagacauauu

SEQ ID NO: 405963 - RNA, 19 nt, Artificial Sequence
  Synthetic
gauacuccacagacauauu

SEQ ID NO: 405964 - RNA, 20 nt, Artificial Sequence
  Synthetic
agauacuccacagacauauu

SEQ ID NO: 405965 - RNA, 21 nt, Artificial Sequence
  Synthetic
aagauacuccacagacauauu

SEQ ID NO: 405966 - RNA, 22 nt, Artificial Sequence
  Synthetic
caagauacuccacagacauauu

SEQ ID NO: 405967 - RNA, 23 nt, Artificial Sequence
  Synthetic
ccaagauacuccacagacauauu

SEQ ID NO: 405968 - RNA, 24 nt, Artificial Sequence
  Synthetic
uccaagauacuccacagacauauu

SEQ ID NO: 405969 - RNA, 18 nt, Artificial Sequence
  Synthetic
uagaaaaaaauacauauu

SEQ ID NO: 405970 - RNA, 19 nt, Artificial Sequence
  Synthetic
guagaaaaaaauacauauu

SEQ ID NO: 405971 - RNA, 20 nt, Artificial Sequence
  Synthetic
uguagaaaaaaauacauauu

SEQ ID NO: 405972 - RNA, 21 nt, Artificial Sequence
  Synthetic
cuguagaaaaaaauacauauu

SEQ ID NO: 405973 - RNA, 22 nt, Artificial Sequence
  Synthetic
ucuguagaaaaaaauacauauu

SEQ ID NO: 405974 - RNA, 23 nt, Artificial Sequence
  Synthetic
uucuguagaaaaaaauacauauu

SEQ ID NO: 405975 - RNA, 24 nt, Artificial Sequence
  Synthetic
auucuguagaaaaaaauacauauu

SEQ ID NO: 405976 - RNA, 18 nt, Artificial Sequence
  Synthetic
aaaggucaaauacauauu

SEQ ID NO: 405977 - RNA, 19 nt, Artificial Sequence
  Synthetic
aaaaggucaaauacauauu

SEQ ID NO: 405978 - RNA, 20 nt, Artificial Sequence
  Synthetic
uaaaaggucaaauacauauu

SEQ ID NO: 405979 - RNA, 21 nt, Artificial Sequence
  Synthetic
guaaaaggucaaauacauauu

SEQ ID NO: 405980 - RNA, 22 nt, Artificial Sequence
  Synthetic
uguaaaaggucaaauacauauu

SEQ ID NO: 405981 - RNA, 23 nt, Artificial Sequence
  Synthetic
cuguaaaaggucaaauacauauu

SEQ ID NO: 405982 - RNA, 24 nt, Artificial Sequence
  Synthetic
ccuguaaaaggucaaauacauauu

SEQ ID NO: 405983 - RNA, 18 nt, Artificial Sequence
  Synthetic
auuauccauuuacauauu

SEQ ID NO: 405984 - RNA, 19 nt, Artificial Sequence
  Synthetic
aauuauccauuuacauauu

SEQ ID NO: 405985 - RNA, 20 nt, Artificial Sequence
  Synthetic
aaauuauccauuuacauauu

SEQ ID NO: 405986 - RNA, 21 nt, Artificial Sequence
  Synthetic
gaaauuauccauuuacauauu

SEQ ID NO: 405987 - RNA, 22 nt, Artificial Sequence
  Synthetic
agaaauuauccauuuacauauu

SEQ ID NO: 405988 - RNA, 23 nt, Artificial Sequence
  Synthetic
gagaaauuauccauuuacauauu

SEQ ID NO: 405989 - RNA, 24 nt, Artificial Sequence
  Synthetic
ggagaaauuauccauuuacauauu

SEQ ID NO: 405990 - RNA, 18 nt, Artificial Sequence
  Synthetic
caucaacccaaccauauu

SEQ ID NO: 405991 - RNA, 19 nt, Artificial Sequence
  Synthetic
ucaucaacccaaccauauu

SEQ ID NO: 405992 - RNA, 20 nt, Artificial Sequence
  Synthetic
aucaucaacccaaccauauu

SEQ ID NO: 405993 - RNA, 21 nt, Artificial Sequence
  Synthetic
gaucaucaacccaaccauauu

SEQ ID NO: 405994 - RNA, 22 nt, Artificial Sequence
  Synthetic
ugaucaucaacccaaccauauu

SEQ ID NO: 405995 - RNA, 23 nt, Artificial Sequence
  Synthetic
gugaucaucaacccaaccauauu

SEQ ID NO: 405996 - RNA, 24 nt, Artificial Sequence
  Synthetic
ugugaucaucaacccaaccauauu

SEQ ID NO: 405997 - RNA, 18 nt, Artificial Sequence
  Synthetic
acaaggcaggcccauauu

SEQ ID NO: 405998 - RNA, 19 nt, Artificial Sequence
  Synthetic
cacaaggcaggcccauauu

SEQ ID NO: 405999 - RNA, 20 nt, Artificial Sequence
  Synthetic
ucacaaggcaggcccauauu

SEQ ID NO: 406000 - RNA, 21 nt, Artificial Sequence
  Synthetic
aucacaaggcaggcccauauu

SEQ ID NO: 406001 - RNA, 22 nt, Artificial Sequence
  Synthetic
aaucacaaggcaggcccauauu

SEQ ID NO: 406002 - RNA, 23 nt, Artificial Sequence
  Synthetic
aaaucacaaggcaggcccauauu

SEQ ID NO: 406003 - RNA, 24 nt, Artificial Sequence
  Synthetic
caaaucacaaggcaggcccauauu

SEQ ID NO: 406004 - RNA, 18 nt, Artificial Sequence
  Synthetic
acugauauaagccauauu

SEQ ID NO: 406005 - RNA, 19 nt, Artificial Sequence
  Synthetic
cacugauauaagccauauu

SEQ ID NO: 406006 - RNA, 20 nt, Artificial Sequence
  Synthetic
ucacugauauaagccauauu

SEQ ID NO: 406007 - RNA, 21 nt, Artificial Sequence
  Synthetic
uucacugauauaagccauauu

SEQ ID NO: 406008 - RNA, 22 nt, Artificial Sequence
  Synthetic
auucacugauauaagccauauu

SEQ ID NO: 406009 - RNA, 23 nt, Artificial Sequence
  Synthetic
cauucacugauauaagccauauu

SEQ ID NO: 406010 - RNA, 24 nt, Artificial Sequence
  Synthetic
acauucacugauauaagccauauu

SEQ ID NO: 406011 - RNA, 18 nt, Artificial Sequence
  Synthetic
cugcagggcagccauauu

SEQ ID NO: 406012 - RNA, 19 nt, Artificial Sequence
  Synthetic
acugcagggcagccauauu

SEQ ID NO: 406013 - RNA, 20 nt, Artificial Sequence
  Synthetic
cacugcagggcagccauauu

SEQ ID NO: 406014 - RNA, 21 nt, Artificial Sequence
  Synthetic
ucacugcagggcagccauauu

SEQ ID NO: 406015 - RNA, 22 nt, Artificial Sequence
  Synthetic
uucacugcagggcagccauauu

SEQ ID NO: 406016 - RNA, 23 nt, Artificial Sequence
  Synthetic
auucacugcagggcagccauauu

SEQ ID NO: 406017 - RNA, 24 nt, Artificial Sequence
  Synthetic
uauucacugcagggcagccauauu

SEQ ID NO: 406018 - RNA, 18 nt, Artificial Sequence
  Synthetic
augucaaagugccauauu

SEQ ID NO: 406019 - RNA, 19 nt, Artificial Sequence
  Synthetic
uaugucaaagugccauauu

SEQ ID NO: 406020 - RNA, 20 nt, Artificial Sequence
  Synthetic
uuaugucaaagugccauauu

SEQ ID NO: 406021 - RNA, 21 nt, Artificial Sequence
  Synthetic
uuuaugucaaagugccauauu

SEQ ID NO: 406022 - RNA, 22 nt, Artificial Sequence
  Synthetic
cuuuaugucaaagugccauauu

SEQ ID NO: 406023 - RNA, 23 nt, Artificial Sequence
  Synthetic
ucuuuaugucaaagugccauauu

SEQ ID NO: 406024 - RNA, 24 nt, Artificial Sequence
  Synthetic
aucuuuaugucaaagugccauauu

SEQ ID NO: 406025 - RNA, 18 nt, Artificial Sequence
  Synthetic
cccccugaaauccauauu

SEQ ID NO: 406026 - RNA, 19 nt, Artificial Sequence
  Synthetic
ccccccugaaauccauauu

SEQ ID NO: 406027 - RNA, 20 nt, Artificial Sequence
  Synthetic
cccccccugaaauccauauu

SEQ ID NO: 406028 - RNA, 21 nt, Artificial Sequence
  Synthetic
ucccccccugaaauccauauu

SEQ ID NO: 406029 - RNA, 22 nt, Artificial Sequence
  Synthetic
uucccccccugaaauccauauu

SEQ ID NO: 406030 - RNA, 23 nt, Artificial Sequence
  Synthetic
uuucccccccugaaauccauauu

SEQ ID NO: 406031 - RNA, 24 nt, Artificial Sequence
  Synthetic
cuuucccccccugaaauccauauu

SEQ ID NO: 406032 - RNA, 18 nt, Artificial Sequence
  Synthetic
acucaaguuuuccauauu

SEQ ID NO: 406033 - RNA, 19 nt, Artificial Sequence
  Synthetic
uacucaaguuuuccauauu

SEQ ID NO: 406034 - RNA, 20 nt, Artificial Sequence
  Synthetic
auacucaaguuuuccauauu

SEQ ID NO: 406035 - RNA, 21 nt, Artificial Sequence
  Synthetic
cauacucaaguuuuccauauu

SEQ ID NO: 406036 - RNA, 22 nt, Artificial Sequence
  Synthetic
ucauacucaaguuuuccauauu

SEQ ID NO: 406037 - RNA, 23 nt, Artificial Sequence
  Synthetic
uucauacucaaguuuuccauauu

SEQ ID NO: 406038 - RNA, 24 nt, Artificial Sequence
  Synthetic
auucauacucaaguuuuccauauu

SEQ ID NO: 406039 - RNA, 18 nt, Artificial Sequence
  Synthetic
auuccaaauaggcauauu

SEQ ID NO: 406040 - RNA, 19 nt, Artificial Sequence
  Synthetic
uauuccaaauaggcauauu

SEQ ID NO: 406041 - RNA, 20 nt, Artificial Sequence
  Synthetic
cuauuccaaauaggcauauu

SEQ ID NO: 406042 - RNA, 21 nt, Artificial Sequence
  Synthetic
ucuauuccaaauaggcauauu

SEQ ID NO: 406043 - RNA, 22 nt, Artificial Sequence
  Synthetic
gucuauuccaaauaggcauauu

SEQ ID NO: 406044 - RNA, 23 nt, Artificial Sequence
  Synthetic
ugucuauuccaaauaggcauauu

SEQ ID NO: 406045 - RNA, 24 nt, Artificial Sequence
  Synthetic
augucuauuccaaauaggcauauu

SEQ ID NO: 406046 - RNA, 18 nt, Artificial Sequence
  Synthetic
aaaagucaagggcauauu

SEQ ID NO: 406047 - RNA, 19 nt, Artificial Sequence
  Synthetic
caaaagucaagggcauauu

SEQ ID NO: 406048 - RNA, 20 nt, Artificial Sequence
  Synthetic
acaaaagucaagggcauauu

SEQ ID NO: 406049 - RNA, 21 nt, Artificial Sequence
  Synthetic
gacaaaagucaagggcauauu

SEQ ID NO: 406050 - RNA, 22 nt, Artificial Sequence
  Synthetic
ugacaaaagucaagggcauauu

SEQ ID NO: 406051 - RNA, 23 nt, Artificial Sequence
  Synthetic
gugacaaaagucaagggcauauu

SEQ ID NO: 406052 - RNA, 24 nt, Artificial Sequence
  Synthetic
agugacaaaagucaagggcauauu

SEQ ID NO: 406053 - RNA, 18 nt, Artificial Sequence
  Synthetic
uauaugugauggcauauu

SEQ ID NO: 406054 - RNA, 19 nt, Artificial Sequence
  Synthetic
auauaugugauggcauauu

SEQ ID NO: 406055 - RNA, 20 nt, Artificial Sequence
  Synthetic
uauauaugugauggcauauu

SEQ ID NO: 406056 - RNA, 21 nt, Artificial Sequence
  Synthetic
auauauaugugauggcauauu

SEQ ID NO: 406057 - RNA, 22 nt, Artificial Sequence
  Synthetic
uauauauaugugauggcauauu

SEQ ID NO: 406058 - RNA, 23 nt, Artificial Sequence
  Synthetic
auauauauaugugauggcauauu

SEQ ID NO: 406059 - RNA, 24 nt, Artificial Sequence
  Synthetic
uauauauauaugugauggcauauu

SEQ ID NO: 406060 - RNA, 18 nt, Artificial Sequence
  Synthetic
aagauucuguggcauauu

SEQ ID NO: 406061 - RNA, 19 nt, Artificial Sequence
  Synthetic
uaagauucuguggcauauu

SEQ ID NO: 406062 - RNA, 20 nt, Artificial Sequence
  Synthetic
uuaagauucuguggcauauu

SEQ ID NO: 406063 - RNA, 21 nt, Artificial Sequence
  Synthetic
auuaagauucuguggcauauu

SEQ ID NO: 406064 - RNA, 22 nt, Artificial Sequence
  Synthetic
aauuaagauucuguggcauauu

SEQ ID NO: 406065 - RNA, 23 nt, Artificial Sequence
  Synthetic
aaauuaagauucuguggcauauu

SEQ ID NO: 406066 - RNA, 24 nt, Artificial Sequence
  Synthetic
caaauuaagauucuguggcauauu

SEQ ID NO: 406067 - RNA, 18 nt, Artificial Sequence
  Synthetic
uuaagugcaaugcauauu

SEQ ID NO: 406068 - RNA, 19 nt, Artificial Sequence
  Synthetic
uuuaagugcaaugcauauu

SEQ ID NO: 406069 - RNA, 20 nt, Artificial Sequence
  Synthetic
uuuuaagugcaaugcauauu

SEQ ID NO: 406070 - RNA, 21 nt, Artificial Sequence
  Synthetic
auuuuaagugcaaugcauauu

SEQ ID NO: 406071 - RNA, 22 nt, Artificial Sequence
  Synthetic
aauuuuaagugcaaugcauauu

SEQ ID NO: 406072 - RNA, 23 nt, Artificial Sequence
  Synthetic
aaauuuuaagugcaaugcauauu

SEQ ID NO: 406073 - RNA, 24 nt, Artificial Sequence
  Synthetic
aaaauuuuaagugcaaugcauauu

SEQ ID NO: 406074 - RNA, 18 nt, Artificial Sequence
  Synthetic
uacggugcccugcauauu

SEQ ID NO: 406075 - RNA, 19 nt, Artificial Sequence
  Synthetic
guacggugcccugcauauu

SEQ ID NO: 406076 - RNA, 20 nt, Artificial Sequence
  Synthetic
aguacggugcccugcauauu

SEQ ID NO: 406077 - RNA, 21 nt, Artificial Sequence
  Synthetic
uaguacggugcccugcauauu

SEQ ID NO: 406078 - RNA, 22 nt, Artificial Sequence
  Synthetic
uuaguacggugcccugcauauu

SEQ ID NO: 406079 - RNA, 23 nt, Artificial Sequence
  Synthetic
cuuaguacggugcccugcauauu

SEQ ID NO: 406080 - RNA, 24 nt, Artificial Sequence
  Synthetic
acuuaguacggugcccugcauauu

SEQ ID NO: 406081 - RNA, 18 nt, Artificial Sequence
  Synthetic
gugaagguccaucauauu

SEQ ID NO: 406082 - RNA, 19 nt, Artificial Sequence
  Synthetic
ggugaagguccaucauauu

SEQ ID NO: 406083 - RNA, 20 nt, Artificial Sequence
  Synthetic
uggugaagguccaucauauu

SEQ ID NO: 406084 - RNA, 21 nt, Artificial Sequence
  Synthetic
uuggugaagguccaucauauu

SEQ ID NO: 406085 - RNA, 22 nt, Artificial Sequence
  Synthetic
uuuggugaagguccaucauauu

SEQ ID NO: 406086 - RNA, 23 nt, Artificial Sequence
  Synthetic
uuuuggugaagguccaucauauu

SEQ ID NO: 406087 - RNA, 24 nt, Artificial Sequence
  Synthetic
cuuuuggugaagguccaucauauu

SEQ ID NO: 406088 - RNA, 18 nt, Artificial Sequence
  Synthetic
auccuaugcagucauauu

SEQ ID NO: 406089 - RNA, 19 nt, Artificial Sequence
  Synthetic
uauccuaugcagucauauu

SEQ ID NO: 406090 - RNA, 20 nt, Artificial Sequence
  Synthetic
auauccuaugcagucauauu

SEQ ID NO: 406091 - RNA, 21 nt, Artificial Sequence
  Synthetic
gauauccuaugcagucauauu

SEQ ID NO: 406092 - RNA, 22 nt, Artificial Sequence
  Synthetic
ugauauccuaugcagucauauu

SEQ ID NO: 406093 - RNA, 23 nt, Artificial Sequence
  Synthetic
uugauauccuaugcagucauauu

SEQ ID NO: 406094 - RNA, 24 nt, Artificial Sequence
  Synthetic
uuugauauccuaugcagucauauu

SEQ ID NO: 406095 - RNA, 18 nt, Artificial Sequence
  Synthetic
auaagaaauagucauauu

SEQ ID NO: 406096 - RNA, 19 nt, Artificial Sequence
  Synthetic
gauaagaaauagucauauu

SEQ ID NO: 406097 - RNA, 20 nt, Artificial Sequence
  Synthetic
ugauaagaaauagucauauu

SEQ ID NO: 406098 - RNA, 21 nt, Artificial Sequence
  Synthetic
gugauaagaaauagucauauu

SEQ ID NO: 406099 - RNA, 22 nt, Artificial Sequence
  Synthetic
ggugauaagaaauagucauauu

SEQ ID NO: 406100 - RNA, 23 nt, Artificial Sequence
  Synthetic
gggugauaagaaauagucauauu

SEQ ID NO: 406101 - RNA, 24 nt, Artificial Sequence
  Synthetic
agggugauaagaaauagucauauu

SEQ ID NO: 406102 - RNA, 18 nt, Artificial Sequence
  Synthetic
auuaguggacuucauauu

SEQ ID NO: 406103 - RNA, 19 nt, Artificial Sequence
  Synthetic
aauuaguggacuucauauu

SEQ ID NO: 406104 - RNA, 20 nt, Artificial Sequence
  Synthetic
gaauuaguggacuucauauu

SEQ ID NO: 406105 - RNA, 21 nt, Artificial Sequence
  Synthetic
agaauuaguggacuucauauu

SEQ ID NO: 406106 - RNA, 22 nt, Artificial Sequence
  Synthetic
aagaauuaguggacuucauauu

SEQ ID NO: 406107 - RNA, 23 nt, Artificial Sequence
  Synthetic
aaagaauuaguggacuucauauu

SEQ ID NO: 406108 - RNA, 24 nt, Artificial Sequence
  Synthetic
uaaagaauuaguggacuucauauu

SEQ ID NO: 406109 - RNA, 18 nt, Artificial Sequence
  Synthetic
ccagggcaccuucauauu

SEQ ID NO: 406110 - RNA, 19 nt, Artificial Sequence
  Synthetic
gccagggcaccuucauauu

SEQ ID NO: 406111 - RNA, 20 nt, Artificial Sequence
  Synthetic
ggccagggcaccuucauauu

SEQ ID NO: 406112 - RNA, 21 nt, Artificial Sequence
  Synthetic
uggccagggcaccuucauauu

SEQ ID NO: 406113 - RNA, 22 nt, Artificial Sequence
  Synthetic
guggccagggcaccuucauauu

SEQ ID NO: 406114 - RNA, 23 nt, Artificial Sequence
  Synthetic
uguggccagggcaccuucauauu

SEQ ID NO: 406115 - RNA, 24 nt, Artificial Sequence
  Synthetic
uuguggccagggcaccuucauauu

SEQ ID NO: 406116 - RNA, 18 nt, Artificial Sequence
  Synthetic
uuuuucuacuuucauauu

SEQ ID NO: 406117 - RNA, 19 nt, Artificial Sequence
  Synthetic
cuuuuucuacuuucauauu

SEQ ID NO: 406118 - RNA, 20 nt, Artificial Sequence
  Synthetic
ccuuuuucuacuuucauauu

SEQ ID NO: 406119 - RNA, 21 nt, Artificial Sequence
  Synthetic
gccuuuuucuacuuucauauu

SEQ ID NO: 406120 - RNA, 22 nt, Artificial Sequence
  Synthetic
ugccuuuuucuacuuucauauu

SEQ ID NO: 406121 - RNA, 23 nt, Artificial Sequence
  Synthetic
cugccuuuuucuacuuucauauu

SEQ ID NO: 406122 - RNA, 24 nt, Artificial Sequence
  Synthetic
gcugccuuuuucuacuuucauauu

SEQ ID NO: 406123 - RNA, 18 nt, Artificial Sequence
  Synthetic
gauuagacacaagauauu

SEQ ID NO: 406124 - RNA, 19 nt, Artificial Sequence
  Synthetic
ugauuagacacaagauauu

SEQ ID NO: 406125 - RNA, 20 nt, Artificial Sequence
  Synthetic
augauuagacacaagauauu

SEQ ID NO: 406126 - RNA, 21 nt, Artificial Sequence
  Synthetic
caugauuagacacaagauauu

SEQ ID NO: 406127 - RNA, 22 nt, Artificial Sequence
  Synthetic
acaugauuagacacaagauauu

SEQ ID NO: 406128 - RNA, 23 nt, Artificial Sequence
  Synthetic
cacaugauuagacacaagauauu

SEQ ID NO: 406129 - RNA, 24 nt, Artificial Sequence
  Synthetic
ucacaugauuagacacaagauauu

SEQ ID NO: 406130 - RNA, 18 nt, Artificial Sequence
  Synthetic
cauaaauggauagauauu

SEQ ID NO: 406131 - RNA, 19 nt, Artificial Sequence
  Synthetic
acauaaauggauagauauu

SEQ ID NO: 406132 - RNA, 20 nt, Artificial Sequence
  Synthetic
uacauaaauggauagauauu

SEQ ID NO: 406133 - RNA, 21 nt, Artificial Sequence
  Synthetic
uuacauaaauggauagauauu

SEQ ID NO: 406134 - RNA, 22 nt, Artificial Sequence
  Synthetic
auuacauaaauggauagauauu

SEQ ID NO: 406135 - RNA, 23 nt, Artificial Sequence
  Synthetic
uauuacauaaauggauagauauu

SEQ ID NO: 406136 - RNA, 24 nt, Artificial Sequence
  Synthetic
auauuacauaaauggauagauauu

SEQ ID NO: 406137 - RNA, 18 nt, Artificial Sequence
  Synthetic
ggaauggcaguagauauu

SEQ ID NO: 406138 - RNA, 19 nt, Artificial Sequence
  Synthetic
uggaauggcaguagauauu

SEQ ID NO: 406139 - RNA, 20 nt, Artificial Sequence
  Synthetic
cuggaauggcaguagauauu

SEQ ID NO: 406140 - RNA, 21 nt, Artificial Sequence
  Synthetic
gcuggaauggcaguagauauu

SEQ ID NO: 406141 - RNA, 22 nt, Artificial Sequence
  Synthetic
agcuggaauggcaguagauauu

SEQ ID NO: 406142 - RNA, 23 nt, Artificial Sequence
  Synthetic
aagcuggaauggcaguagauauu

SEQ ID NO: 406143 - RNA, 24 nt, Artificial Sequence
  Synthetic
caagcuggaauggcaguagauauu

SEQ ID NO: 406144 - RNA, 18 nt, Artificial Sequence
  Synthetic
uacugcagauuagauauu

SEQ ID NO: 406145 - RNA, 19 nt, Artificial Sequence
  Synthetic
cuacugcagauuagauauu

SEQ ID NO: 406146 - RNA, 20 nt, Artificial Sequence
  Synthetic
ucuacugcagauuagauauu

SEQ ID NO: 406147 - RNA, 21 nt, Artificial Sequence
  Synthetic
aucuacugcagauuagauauu

SEQ ID NO: 406148 - RNA, 22 nt, Artificial Sequence
  Synthetic
uaucuacugcagauuagauauu

SEQ ID NO: 406149 - RNA, 23 nt, Artificial Sequence
  Synthetic
guaucuacugcagauuagauauu

SEQ ID NO: 406150 - RNA, 24 nt, Artificial Sequence
  Synthetic
aguaucuacugcagauuagauauu

SEQ ID NO: 406151 - RNA, 18 nt, Artificial Sequence
  Synthetic
agggcuucuuuagauauu

SEQ ID NO: 406152 - RNA, 19 nt, Artificial Sequence
  Synthetic
cagggcuucuuuagauauu

SEQ ID NO: 406153 - RNA, 20 nt, Artificial Sequence
  Synthetic
gcagggcuucuuuagauauu

SEQ ID NO: 406154 - RNA, 21 nt, Artificial Sequence
  Synthetic
ugcagggcuucuuuagauauu

SEQ ID NO: 406155 - RNA, 22 nt, Artificial Sequence
  Synthetic
uugcagggcuucuuuagauauu

SEQ ID NO: 406156 - RNA, 23 nt, Artificial Sequence
  Synthetic
cuugcagggcuucuuuagauauu

SEQ ID NO: 406157 - RNA, 24 nt, Artificial Sequence
  Synthetic
gcuugcagggcuucuuuagauauu

SEQ ID NO: 406158 - RNA, 18 nt, Artificial Sequence
  Synthetic
aguaauaauuucgauauu

SEQ ID NO: 406159 - RNA, 19 nt, Artificial Sequence
  Synthetic
aaguaauaauuucgauauu

SEQ ID NO: 406160 - RNA, 20 nt, Artificial Sequence
  Synthetic
gaaguaauaauuucgauauu

SEQ ID NO: 406161 - RNA, 21 nt, Artificial Sequence
  Synthetic
agaaguaauaauuucgauauu

SEQ ID NO: 406162 - RNA, 22 nt, Artificial Sequence
  Synthetic
uagaaguaauaauuucgauauu

SEQ ID NO: 406163 - RNA, 23 nt, Artificial Sequence
  Synthetic
guagaaguaauaauuucgauauu

SEQ ID NO: 406164 - RNA, 24 nt, Artificial Sequence
  Synthetic
aguagaaguaauaauuucgauauu

SEQ ID NO: 406165 - RNA, 18 nt, Artificial Sequence
  Synthetic
aaaauuaacaaggauauu

SEQ ID NO: 406166 - RNA, 19 nt, Artificial Sequence
  Synthetic
gaaaauuaacaaggauauu

SEQ ID NO: 406167 - RNA, 20 nt, Artificial Sequence
  Synthetic
agaaaauuaacaaggauauu

SEQ ID NO: 406168 - RNA, 21 nt, Artificial Sequence
  Synthetic
cagaaaauuaacaaggauauu

SEQ ID NO: 406169 - RNA, 22 nt, Artificial Sequence
  Synthetic
acagaaaauuaacaaggauauu

SEQ ID NO: 406170 - RNA, 23 nt, Artificial Sequence
  Synthetic
aacagaaaauuaacaaggauauu

SEQ ID NO: 406171 - RNA, 24 nt, Artificial Sequence
  Synthetic
aaacagaaaauuaacaaggauauu

SEQ ID NO: 406172 - RNA, 18 nt, Artificial Sequence
  Synthetic
gaaguaaaagaggauauu

SEQ ID NO: 406173 - RNA, 19 nt, Artificial Sequence
  Synthetic
agaaguaaaagaggauauu

SEQ ID NO: 406174 - RNA, 20 nt, Artificial Sequence
  Synthetic
aagaaguaaaagaggauauu

SEQ ID NO: 406175 - RNA, 21 nt, Artificial Sequence
  Synthetic
aaagaaguaaaagaggauauu

SEQ ID NO: 406176 - RNA, 22 nt, Artificial Sequence
  Synthetic
aaaagaaguaaaagaggauauu

SEQ ID NO: 406177 - RNA, 23 nt, Artificial Sequence
  Synthetic
aaaaagaaguaaaagaggauauu

SEQ ID NO: 406178 - RNA, 24 nt, Artificial Sequence
  Synthetic
uaaaaagaaguaaaagaggauauu

SEQ ID NO: 406179 - RNA, 18 nt, Artificial Sequence
  Synthetic
ggcuuuuuagaggauauu

SEQ ID NO: 406180 - RNA, 19 nt, Artificial Sequence
  Synthetic
aggcuuuuuagaggauauu

SEQ ID NO: 406181 - RNA, 20 nt, Artificial Sequence
  Synthetic
aaggcuuuuuagaggauauu

SEQ ID NO: 406182 - RNA, 21 nt, Artificial Sequence
  Synthetic
caaggcuuuuuagaggauauu

SEQ ID NO: 406183 - RNA, 22 nt, Artificial Sequence
  Synthetic
gcaaggcuuuuuagaggauauu

SEQ ID NO: 406184 - RNA, 23 nt, Artificial Sequence
  Synthetic
ggcaaggcuuuuuagaggauauu

SEQ ID NO: 406185 - RNA, 24 nt, Artificial Sequence
  Synthetic
aggcaaggcuuuuuagaggauauu

SEQ ID NO: 406186 - RNA, 18 nt, Artificial Sequence
  Synthetic
gugacaacauaggauauu

SEQ ID NO: 406187 - RNA, 19 nt, Artificial Sequence
  Synthetic
ugugacaacauaggauauu

SEQ ID NO: 406188 - RNA, 20 nt, Artificial Sequence
  Synthetic
uugugacaacauaggauauu

SEQ ID NO: 406189 - RNA, 21 nt, Artificial Sequence
  Synthetic
uuugugacaacauaggauauu

SEQ ID NO: 406190 - RNA, 22 nt, Artificial Sequence
  Synthetic
uuuugugacaacauaggauauu

SEQ ID NO: 406191 - RNA, 23 nt, Artificial Sequence
  Synthetic
cuuuugugacaacauaggauauu

SEQ ID NO: 406192 - RNA, 24 nt, Artificial Sequence
  Synthetic
ucuuuugugacaacauaggauauu

SEQ ID NO: 406193 - RNA, 18 nt, Artificial Sequence
  Synthetic
uucuggucaugggauauu

SEQ ID NO: 406194 - RNA, 19 nt, Artificial Sequence
  Synthetic
cuucuggucaugggauauu

SEQ ID NO: 406195 - RNA, 20 nt, Artificial Sequence
  Synthetic
ucuucuggucaugggauauu

SEQ ID NO: 406196 - RNA, 21 nt, Artificial Sequence
  Synthetic
cucuucuggucaugggauauu

SEQ ID NO: 406197 - RNA, 22 nt, Artificial Sequence
  Synthetic
acucuucuggucaugggauauu

SEQ ID NO: 406198 - RNA, 23 nt, Artificial Sequence
  Synthetic
uacucuucuggucaugggauauu

SEQ ID NO: 406199 - RNA, 24 nt, Artificial Sequence
  Synthetic
cuacucuucuggucaugggauauu

SEQ ID NO: 406200 - RNA, 18 nt, Artificial Sequence
  Synthetic
auuuuauagauggauauu

SEQ ID NO: 406201 - RNA, 19 nt, Artificial Sequence
  Synthetic
aauuuuauagauggauauu

SEQ ID NO: 406202 - RNA, 20 nt, Artificial Sequence
  Synthetic
gaauuuuauagauggauauu

SEQ ID NO: 406203 - RNA, 21 nt, Artificial Sequence
  Synthetic
agaauuuuauagauggauauu

SEQ ID NO: 406204 - RNA, 22 nt, Artificial Sequence
  Synthetic
cagaauuuuauagauggauauu

SEQ ID NO: 406205 - RNA, 23 nt, Artificial Sequence
  Synthetic
acagaauuuuauagauggauauu

SEQ ID NO: 406206 - RNA, 24 nt, Artificial Sequence
  Synthetic
aacagaauuuuauagauggauauu

SEQ ID NO: 406207 - RNA, 18 nt, Artificial Sequence
  Synthetic
auuccuucaguggauauu

SEQ ID NO: 406208 - RNA, 19 nt, Artificial Sequence
  Synthetic
gauuccuucaguggauauu

SEQ ID NO: 406209 - RNA, 20 nt, Artificial Sequence
  Synthetic
ggauuccuucaguggauauu

SEQ ID NO: 406210 - RNA, 21 nt, Artificial Sequence
  Synthetic
aggauuccuucaguggauauu

SEQ ID NO: 406211 - RNA, 22 nt, Artificial Sequence
  Synthetic
gaggauuccuucaguggauauu

SEQ ID NO: 406212 - RNA, 23 nt, Artificial Sequence
  Synthetic
ugaggauuccuucaguggauauu

SEQ ID NO: 406213 - RNA, 24 nt, Artificial Sequence
  Synthetic
cugaggauuccuucaguggauauu

SEQ ID NO: 406214 - RNA, 18 nt, Artificial Sequence
  Synthetic
gaauauggagcugauauu

SEQ ID NO: 406215 - RNA, 19 nt, Artificial Sequence
  Synthetic
ugaauauggagcugauauu

SEQ ID NO: 406216 - RNA, 20 nt, Artificial Sequence
  Synthetic
uugaauauggagcugauauu

SEQ ID NO: 406217 - RNA, 21 nt, Artificial Sequence
  Synthetic
cuugaauauggagcugauauu

SEQ ID NO: 406218 - RNA, 22 nt, Artificial Sequence
  Synthetic
acuugaauauggagcugauauu

SEQ ID NO: 406219 - RNA, 23 nt, Artificial Sequence
  Synthetic
aacuugaauauggagcugauauu

SEQ ID NO: 406220 - RNA, 24 nt, Artificial Sequence
  Synthetic
aaacuugaauauggagcugauauu

SEQ ID NO: 406221 - RNA, 18 nt, Artificial Sequence
  Synthetic
gguguacaaugugauauu

SEQ ID NO: 406222 - RNA, 19 nt, Artificial Sequence
  Synthetic
ugguguacaaugugauauu

SEQ ID NO: 406223 - RNA, 20 nt, Artificial Sequence
  Synthetic
augguguacaaugugauauu

SEQ ID NO: 406224 - RNA, 21 nt, Artificial Sequence
  Synthetic
caugguguacaaugugauauu

SEQ ID NO: 406225 - RNA, 22 nt, Artificial Sequence
  Synthetic
ucaugguguacaaugugauauu

SEQ ID NO: 406226 - RNA, 23 nt, Artificial Sequence
  Synthetic
gucaugguguacaaugugauauu

SEQ ID NO: 406227 - RNA, 24 nt, Artificial Sequence
  Synthetic
ugucaugguguacaaugugauauu

SEQ ID NO: 406228 - RNA, 18 nt, Artificial Sequence
  Synthetic
auacagauacuugauauu

SEQ ID NO: 406229 - RNA, 19 nt, Artificial Sequence
  Synthetic
uauacagauacuugauauu

SEQ ID NO: 406230 - RNA, 20 nt, Artificial Sequence
  Synthetic
auauacagauacuugauauu

SEQ ID NO: 406231 - RNA, 21 nt, Artificial Sequence
  Synthetic
uauauacagauacuugauauu

SEQ ID NO: 406232 - RNA, 22 nt, Artificial Sequence
  Synthetic
uuauauacagauacuugauauu

SEQ ID NO: 406233 - RNA, 23 nt, Artificial Sequence
  Synthetic
cuuauauacagauacuugauauu

SEQ ID NO: 406234 - RNA, 24 nt, Artificial Sequence
  Synthetic
acuuauauacagauacuugauauu

SEQ ID NO: 406235 - RNA, 18 nt, Artificial Sequence
  Synthetic
guuuuaacucuugauauu

SEQ ID NO: 406236 - RNA, 19 nt, Artificial Sequence
  Synthetic
aguuuuaacucuugauauu

SEQ ID NO: 406237 - RNA, 20 nt, Artificial Sequence
  Synthetic
caguuuuaacucuugauauu

SEQ ID NO: 406238 - RNA, 21 nt, Artificial Sequence
  Synthetic
ccaguuuuaacucuugauauu

SEQ ID NO: 406239 - RNA, 22 nt, Artificial Sequence
  Synthetic
gccaguuuuaacucuugauauu

SEQ ID NO: 406240 - RNA, 23 nt, Artificial Sequence
  Synthetic
ugccaguuuuaacucuugauauu

SEQ ID NO: 406241 - RNA, 24 nt, Artificial Sequence
  Synthetic
augccaguuuuaacucuugauauu

SEQ ID NO: 406242 - RNA, 18 nt, Artificial Sequence
  Synthetic
uguccuauagaauauauu

SEQ ID NO: 406243 - RNA, 19 nt, Artificial Sequence
  Synthetic
cuguccuauagaauauauu

SEQ ID NO: 406244 - RNA, 20 nt, Artificial Sequence
  Synthetic
ucuguccuauagaauauauu

SEQ ID NO: 406245 - RNA, 21 nt, Artificial Sequence
  Synthetic
uucuguccuauagaauauauu

SEQ ID NO: 406246 - RNA, 22 nt, Artificial Sequence
  Synthetic
guucuguccuauagaauauauu

SEQ ID NO: 406247 - RNA, 23 nt, Artificial Sequence
  Synthetic
gguucuguccuauagaauauauu

SEQ ID NO: 406248 - RNA, 24 nt, Artificial Sequence
  Synthetic
agguucuguccuauagaauauauu

SEQ ID NO: 406249 - RNA, 18 nt, Artificial Sequence
  Synthetic
uaaguguaguaauauauu

SEQ ID NO: 406250 - RNA, 19 nt, Artificial Sequence
  Synthetic
uuaaguguaguaauauauu

SEQ ID NO: 406251 - RNA, 20 nt, Artificial Sequence
  Synthetic
guuaaguguaguaauauauu

SEQ ID NO: 406252 - RNA, 21 nt, Artificial Sequence
  Synthetic
uguuaaguguaguaauauauu

SEQ ID NO: 406253 - RNA, 22 nt, Artificial Sequence
  Synthetic
cuguuaaguguaguaauauauu

SEQ ID NO: 406254 - RNA, 23 nt, Artificial Sequence
  Synthetic
ucuguuaaguguaguaauauauu

SEQ ID NO: 406255 - RNA, 24 nt, Artificial Sequence
  Synthetic
aucuguuaaguguaguaauauauu

SEQ ID NO: 406256 - RNA, 18 nt, Artificial Sequence
  Synthetic
auauaucugacauauauu

SEQ ID NO: 406257 - RNA, 19 nt, Artificial Sequence
  Synthetic
uauauaucugacauauauu

SEQ ID NO: 406258 - RNA, 20 nt, Artificial Sequence
  Synthetic
guauauaucugacauauauu

SEQ ID NO: 406259 - RNA, 21 nt, Artificial Sequence
  Synthetic
uguauauaucugacauauauu

SEQ ID NO: 406260 - RNA, 22 nt, Artificial Sequence
  Synthetic
cuguauauaucugacauauauu

SEQ ID NO: 406261 - RNA, 23 nt, Artificial Sequence
  Synthetic
ucuguauauaucugacauauauu

SEQ ID NO: 406262 - RNA, 24 nt, Artificial Sequence
  Synthetic
cucuguauauaucugacauauauu

SEQ ID NO: 406263 - RNA, 18 nt, Artificial Sequence
  Synthetic
cauagaaugccauauauu

SEQ ID NO: 406264 - RNA, 19 nt, Artificial Sequence
  Synthetic
ucauagaaugccauauauu

SEQ ID NO: 406265 - RNA, 20 nt, Artificial Sequence
  Synthetic
aucauagaaugccauauauu

SEQ ID NO: 406266 - RNA, 21 nt, Artificial Sequence
  Synthetic
gaucauagaaugccauauauu

SEQ ID NO: 406267 - RNA, 22 nt, Artificial Sequence
  Synthetic
ggaucauagaaugccauauauu

SEQ ID NO: 406268 - RNA, 23 nt, Artificial Sequence
  Synthetic
gggaucauagaaugccauauauu

SEQ ID NO: 406269 - RNA, 24 nt, Artificial Sequence
  Synthetic
ugggaucauagaaugccauauauu

SEQ ID NO: 406270 - RNA, 18 nt, Artificial Sequence
  Synthetic
uugaaggcaagauauauu

SEQ ID NO: 406271 - RNA, 19 nt, Artificial Sequence
  Synthetic
cuugaaggcaagauauauu

SEQ ID NO: 406272 - RNA, 20 nt, Artificial Sequence
  Synthetic
ccuugaaggcaagauauauu

SEQ ID NO: 406273 - RNA, 21 nt, Artificial Sequence
  Synthetic
gccuugaaggcaagauauauu

SEQ ID NO: 406274 - RNA, 22 nt, Artificial Sequence
  Synthetic
ugccuugaaggcaagauauauu

SEQ ID NO: 406275 - RNA, 23 nt, Artificial Sequence
  Synthetic
gugccuugaaggcaagauauauu

SEQ ID NO: 406276 - RNA, 24 nt, Artificial Sequence
  Synthetic
agugccuugaaggcaagauauauu

SEQ ID NO: 406277 - RNA, 18 nt, Artificial Sequence
  Synthetic
uuugaucgaagauauauu

SEQ ID NO: 406278 - RNA, 19 nt, Artificial Sequence
  Synthetic
auuugaucgaagauauauu

SEQ ID NO: 406279 - RNA, 20 nt, Artificial Sequence
  Synthetic
uauuugaucgaagauauauu

SEQ ID NO: 406280 - RNA, 21 nt, Artificial Sequence
  Synthetic
uuauuugaucgaagauauauu

SEQ ID NO: 406281 - RNA, 22 nt, Artificial Sequence
  Synthetic
auuauuugaucgaagauauauu

SEQ ID NO: 406282 - RNA, 23 nt, Artificial Sequence
  Synthetic
aauuauuugaucgaagauauauu

SEQ ID NO: 406283 - RNA, 24 nt, Artificial Sequence
  Synthetic
uaauuauuugaucgaagauauauu

SEQ ID NO: 406284 - RNA, 18 nt, Artificial Sequence
  Synthetic
ugugauugcugauauauu

SEQ ID NO: 406285 - RNA, 19 nt, Artificial Sequence
  Synthetic
augugauugcugauauauu

SEQ ID NO: 406286 - RNA, 20 nt, Artificial Sequence
  Synthetic
uaugugauugcugauauauu

SEQ ID NO: 406287 - RNA, 21 nt, Artificial Sequence
  Synthetic
uuaugugauugcugauauauu

SEQ ID NO: 406288 - RNA, 22 nt, Artificial Sequence
  Synthetic
auuaugugauugcugauauauu

SEQ ID NO: 406289 - RNA, 23 nt, Artificial Sequence
  Synthetic
aauuaugugauugcugauauauu

SEQ ID NO: 406290 - RNA, 24 nt, Artificial Sequence
  Synthetic
caauuaugugauugcugauauauu

SEQ ID NO: 406291 - RNA, 18 nt, Artificial Sequence
  Synthetic
uauauauucauauauauu

SEQ ID NO: 406292 - RNA, 19 nt, Artificial Sequence
  Synthetic
auauauauucauauauauu

SEQ ID NO: 406293 - RNA, 20 nt, Artificial Sequence
  Synthetic
aauauauauucauauauauu

SEQ ID NO: 406294 - RNA, 21 nt, Artificial Sequence
  Synthetic
aaauauauauucauauauauu

SEQ ID NO: 406295 - RNA, 22 nt, Artificial Sequence
  Synthetic
uaaauauauauucauauauauu

SEQ ID NO: 406296 - RNA, 23 nt, Artificial Sequence
  Synthetic
auaaauauauauucauauauauu

SEQ ID NO: 406297 - RNA, 24 nt, Artificial Sequence
  Synthetic
uauaaauauauauucauauauauu

SEQ ID NO: 406298 - RNA, 18 nt, Artificial Sequence
  Synthetic
cauaugcauauauauauu

SEQ ID NO: 406299 - RNA, 19 nt, Artificial Sequence
  Synthetic
acauaugcauauauauauu

SEQ ID NO: 406300 - RNA, 20 nt, Artificial Sequence
  Synthetic
uacauaugcauauauauauu

SEQ ID NO: 406301 - RNA, 21 nt, Artificial Sequence
  Synthetic
auacauaugcauauauauauu

SEQ ID NO: 406302 - RNA, 22 nt, Artificial Sequence
  Synthetic
uauacauaugcauauauauauu

SEQ ID NO: 406303 - RNA, 23 nt, Artificial Sequence
  Synthetic
auauacauaugcauauauauauu

SEQ ID NO: 406304 - RNA, 24 nt, Artificial Sequence
  Synthetic
uauauacauaugcauauauauauu

SEQ ID NO: 406305 - RNA, 18 nt, Artificial Sequence
  Synthetic
ggaaaaucauuauauauu

SEQ ID NO: 406306 - RNA, 19 nt, Artificial Sequence
  Synthetic
gggaaaaucauuauauauu

SEQ ID NO: 406307 - RNA, 20 nt, Artificial Sequence
  Synthetic
agggaaaaucauuauauauu

SEQ ID NO: 406308 - RNA, 21 nt, Artificial Sequence
  Synthetic
gagggaaaaucauuauauauu

SEQ ID NO: 406309 - RNA, 22 nt, Artificial Sequence
  Synthetic
ugagggaaaaucauuauauauu

SEQ ID NO: 406310 - RNA, 23 nt, Artificial Sequence
  Synthetic
augagggaaaaucauuauauauu

SEQ ID NO: 406311 - RNA, 24 nt, Artificial Sequence
  Synthetic
aaugagggaaaaucauuauauauu

SEQ ID NO: 406312 - RNA, 18 nt, Artificial Sequence
  Synthetic
uuagucgacaacuauauu

SEQ ID NO: 406313 - RNA, 19 nt, Artificial Sequence
  Synthetic
uuuagucgacaacuauauu

SEQ ID NO: 406314 - RNA, 20 nt, Artificial Sequence
  Synthetic
uuuuagucgacaacuauauu

SEQ ID NO: 406315 - RNA, 21 nt, Artificial Sequence
  Synthetic
uuuuuagucgacaacuauauu

SEQ ID NO: 406316 - RNA, 22 nt, Artificial Sequence
  Synthetic
guuuuuagucgacaacuauauu

SEQ ID NO: 406317 - RNA, 23 nt, Artificial Sequence
  Synthetic
cguuuuuagucgacaacuauauu

SEQ ID NO: 406318 - RNA, 24 nt, Artificial Sequence
  Synthetic
ucguuuuuagucgacaacuauauu

SEQ ID NO: 406319 - RNA, 18 nt, Artificial Sequence
  Synthetic
auuuuauaugacuauauu

SEQ ID NO: 406320 - RNA, 19 nt, Artificial Sequence
  Synthetic
gauuuuauaugacuauauu

SEQ ID NO: 406321 - RNA, 20 nt, Artificial Sequence
  Synthetic
ugauuuuauaugacuauauu

SEQ ID NO: 406322 - RNA, 21 nt, Artificial Sequence
  Synthetic
augauuuuauaugacuauauu

SEQ ID NO: 406323 - RNA, 22 nt, Artificial Sequence
  Synthetic
gaugauuuuauaugacuauauu

SEQ ID NO: 406324 - RNA, 23 nt, Artificial Sequence
  Synthetic
ugaugauuuuauaugacuauauu

SEQ ID NO: 406325 - RNA, 24 nt, Artificial Sequence
  Synthetic
augaugauuuuauaugacuauauu

SEQ ID NO: 406326 - RNA, 18 nt, Artificial Sequence
  Synthetic
auacaacucaccuauauu

SEQ ID NO: 406327 - RNA, 19 nt, Artificial Sequence
  Synthetic
cauacaacucaccuauauu

SEQ ID NO: 406328 - RNA, 20 nt, Artificial Sequence
  Synthetic
ccauacaacucaccuauauu

SEQ ID NO: 406329 - RNA, 21 nt, Artificial Sequence
  Synthetic
uccauacaacucaccuauauu

SEQ ID NO: 406330 - RNA, 22 nt, Artificial Sequence
  Synthetic
uuccauacaacucaccuauauu

SEQ ID NO: 406331 - RNA, 23 nt, Artificial Sequence
  Synthetic
guuccauacaacucaccuauauu

SEQ ID NO: 406332 - RNA, 24 nt, Artificial Sequence
  Synthetic
uguuccauacaacucaccuauauu

SEQ ID NO: 406333 - RNA, 18 nt, Artificial Sequence
  Synthetic
uaaaaggaaagcuauauu

SEQ ID NO: 406334 - RNA, 19 nt, Artificial Sequence
  Synthetic
uuaaaaggaaagcuauauu

SEQ ID NO: 406335 - RNA, 20 nt, Artificial Sequence
  Synthetic
uuuaaaaggaaagcuauauu

SEQ ID NO: 406336 - RNA, 21 nt, Artificial Sequence
  Synthetic
uuuuaaaaggaaagcuauauu

SEQ ID NO: 406337 - RNA, 22 nt, Artificial Sequence
  Synthetic
auuuuaaaaggaaagcuauauu

SEQ ID NO: 406338 - RNA, 23 nt, Artificial Sequence
  Synthetic
aauuuuaaaaggaaagcuauauu

SEQ ID NO: 406339 - RNA, 24 nt, Artificial Sequence
  Synthetic
aaauuuuaaaaggaaagcuauauu

SEQ ID NO: 406340 - RNA, 18 nt, Artificial Sequence
  Synthetic
ggauguuucuucuauauu

SEQ ID NO: 406341 - RNA, 19 nt, Artificial Sequence
  Synthetic
uggauguuucuucuauauu

SEQ ID NO: 406342 - RNA, 20 nt, Artificial Sequence
  Synthetic
uuggauguuucuucuauauu

SEQ ID NO: 406343 - RNA, 21 nt, Artificial Sequence
  Synthetic
uuuggauguuucuucuauauu

SEQ ID NO: 406344 - RNA, 22 nt, Artificial Sequence
  Synthetic
guuuggauguuucuucuauauu

SEQ ID NO: 406345 - RNA, 23 nt, Artificial Sequence
  Synthetic
uguuuggauguuucuucuauauu

SEQ ID NO: 406346 - RNA, 24 nt, Artificial Sequence
  Synthetic
guguuuggauguuucuucuauauu

SEQ ID NO: 406347 - RNA, 18 nt, Artificial Sequence
  Synthetic
cauaacaguuucuauauu

SEQ ID NO: 406348 - RNA, 19 nt, Artificial Sequence
  Synthetic
ccauaacaguuucuauauu

SEQ ID NO: 406349 - RNA, 20 nt, Artificial Sequence
  Synthetic
uccauaacaguuucuauauu

SEQ ID NO: 406350 - RNA, 21 nt, Artificial Sequence
  Synthetic
guccauaacaguuucuauauu

SEQ ID NO: 406351 - RNA, 22 nt, Artificial Sequence
  Synthetic
aguccauaacaguuucuauauu

SEQ ID NO: 406352 - RNA, 23 nt, Artificial Sequence
  Synthetic
caguccauaacaguuucuauauu

SEQ ID NO: 406353 - RNA, 24 nt, Artificial Sequence
  Synthetic
ucaguccauaacaguuucuauauu

SEQ ID NO: 406354 - RNA, 18 nt, Artificial Sequence
  Synthetic
aaauuacauguguauauu

SEQ ID NO: 406355 - RNA, 19 nt, Artificial Sequence
  Synthetic
caaauuacauguguauauu

SEQ ID NO: 406356 - RNA, 20 nt, Artificial Sequence
  Synthetic
ucaaauuacauguguauauu

SEQ ID NO: 406357 - RNA, 21 nt, Artificial Sequence
  Synthetic
uucaaauuacauguguauauu

SEQ ID NO: 406358 - RNA, 22 nt, Artificial Sequence
  Synthetic
uuucaaauuacauguguauauu

SEQ ID NO: 406359 - RNA, 23 nt, Artificial Sequence
  Synthetic
auuucaaauuacauguguauauu

SEQ ID NO: 406360 - RNA, 24 nt, Artificial Sequence
  Synthetic
aauuucaaauuacauguguauauu

SEQ ID NO: 406361 - RNA, 18 nt, Artificial Sequence
  Synthetic
cugacaugauuguauauu

SEQ ID NO: 406362 - RNA, 19 nt, Artificial Sequence
  Synthetic
gcugacaugauuguauauu

SEQ ID NO: 406363 - RNA, 20 nt, Artificial Sequence
  Synthetic
agcugacaugauuguauauu

SEQ ID NO: 406364 - RNA, 21 nt, Artificial Sequence
  Synthetic
cagcugacaugauuguauauu

SEQ ID NO: 406365 - RNA, 22 nt, Artificial Sequence
  Synthetic
gcagcugacaugauuguauauu

SEQ ID NO: 406366 - RNA, 23 nt, Artificial Sequence
  Synthetic
ugcagcugacaugauuguauauu

SEQ ID NO: 406367 - RNA, 24 nt, Artificial Sequence
  Synthetic
uugcagcugacaugauuguauauu

SEQ ID NO: 406368 - RNA, 18 nt, Artificial Sequence
  Synthetic
uaugauuccucuuauauu

SEQ ID NO: 406369 - RNA, 19 nt, Artificial Sequence
  Synthetic
auaugauuccucuuauauu

SEQ ID NO: 406370 - RNA, 20 nt, Artificial Sequence
  Synthetic
aauaugauuccucuuauauu

SEQ ID NO: 406371 - RNA, 21 nt, Artificial Sequence
  Synthetic
uaauaugauuccucuuauauu

SEQ ID NO: 406372 - RNA, 22 nt, Artificial Sequence
  Synthetic
auaauaugauuccucuuauauu

SEQ ID NO: 406373 - RNA, 23 nt, Artificial Sequence
  Synthetic
aauaauaugauuccucuuauauu

SEQ ID NO: 406374 - RNA, 24 nt, Artificial Sequence
  Synthetic
uaauaauaugauuccucuuauauu

SEQ ID NO: 406375 - RNA, 18 nt, Artificial Sequence
  Synthetic
ugggcccaaaguuauauu

SEQ ID NO: 406376 - RNA, 19 nt, Artificial Sequence
  Synthetic
augggcccaaaguuauauu

SEQ ID NO: 406377 - RNA, 20 nt, Artificial Sequence
  Synthetic
gaugggcccaaaguuauauu

SEQ ID NO: 406378 - RNA, 21 nt, Artificial Sequence
  Synthetic
ugaugggcccaaaguuauauu

SEQ ID NO: 406379 - RNA, 22 nt, Artificial Sequence
  Synthetic
augaugggcccaaaguuauauu

SEQ ID NO: 406380 - RNA, 23 nt, Artificial Sequence
  Synthetic
aaugaugggcccaaaguuauauu

SEQ ID NO: 406381 - RNA, 24 nt, Artificial Sequence
  Synthetic
uaaugaugggcccaaaguuauauu

SEQ ID NO: 406382 - RNA, 18 nt, Artificial Sequence
  Synthetic
uaacccugcauuuauauu

SEQ ID NO: 406383 - RNA, 19 nt, Artificial Sequence
  Synthetic
cuaacccugcauuuauauu

SEQ ID NO: 406384 - RNA, 20 nt, Artificial Sequence
  Synthetic
ucuaacccugcauuuauauu

SEQ ID NO: 406385 - RNA, 21 nt, Artificial Sequence
  Synthetic
gucuaacccugcauuuauauu

SEQ ID NO: 406386 - RNA, 22 nt, Artificial Sequence
  Synthetic
ugucuaacccugcauuuauauu

SEQ ID NO: 406387 - RNA, 23 nt, Artificial Sequence
  Synthetic
augucuaacccugcauuuauauu

SEQ ID NO: 406388 - RNA, 24 nt, Artificial Sequence
  Synthetic
aaugucuaacccugcauuuauauu

SEQ ID NO: 406389 - RNA, 18 nt, Artificial Sequence
  Synthetic
uuuucucucauuuauauu

SEQ ID NO: 406390 - RNA, 19 nt, Artificial Sequence
  Synthetic
auuuucucucauuuauauu

SEQ ID NO: 406391 - RNA, 20 nt, Artificial Sequence
  Synthetic
gauuuucucucauuuauauu

SEQ ID NO: 406392 - RNA, 21 nt, Artificial Sequence
  Synthetic
ggauuuucucucauuuauauu

SEQ ID NO: 406393 - RNA, 22 nt, Artificial Sequence
  Synthetic
aggauuuucucucauuuauauu

SEQ ID NO: 406394 - RNA, 23 nt, Artificial Sequence
  Synthetic
caggauuuucucucauuuauauu

SEQ ID NO: 406395 - RNA, 24 nt, Artificial Sequence
  Synthetic
acaggauuuucucucauuuauauu

SEQ ID NO: 406396 - RNA, 18 nt, Artificial Sequence
  Synthetic
uuuucauuuauuuauauu

SEQ ID NO: 406397 - RNA, 19 nt, Artificial Sequence
  Synthetic
auuuucauuuauuuauauu

SEQ ID NO: 406398 - RNA, 20 nt, Artificial Sequence
  Synthetic
gauuuucauuuauuuauauu

SEQ ID NO: 406399 - RNA, 21 nt, Artificial Sequence
  Synthetic
ugauuuucauuuauuuauauu

SEQ ID NO: 406400 - RNA, 22 nt, Artificial Sequence
  Synthetic
uugauuuucauuuauuuauauu

SEQ ID NO: 406401 - RNA, 23 nt, Artificial Sequence
  Synthetic
auugauuuucauuuauuuauauu

SEQ ID NO: 406402 - RNA, 24 nt, Artificial Sequence
  Synthetic
aauugauuuucauuuauuuauauu

SEQ ID NO: 406403 - RNA, 18 nt, Artificial Sequence
  Synthetic
ggauuugaacuuuauauu

SEQ ID NO: 406404 - RNA, 19 nt, Artificial Sequence
  Synthetic
uggauuugaacuuuauauu

SEQ ID NO: 406405 - RNA, 20 nt, Artificial Sequence
  Synthetic
cuggauuugaacuuuauauu

SEQ ID NO: 406406 - RNA, 21 nt, Artificial Sequence
  Synthetic
ccuggauuugaacuuuauauu

SEQ ID NO: 406407 - RNA, 22 nt, Artificial Sequence
  Synthetic
gccuggauuugaacuuuauauu

SEQ ID NO: 406408 - RNA, 23 nt, Artificial Sequence
  Synthetic
ugccuggauuugaacuuuauauu

SEQ ID NO: 406409 - RNA, 24 nt, Artificial Sequence
  Synthetic
uugccuggauuugaacuuuauauu

SEQ ID NO: 406410 - RNA, 18 nt, Artificial Sequence
  Synthetic
auuuuaauucuuuauauu

SEQ ID NO: 406411 - RNA, 19 nt, Artificial Sequence
  Synthetic
uauuuuaauucuuuauauu

SEQ ID NO: 406412 - RNA, 20 nt, Artificial Sequence
  Synthetic
uuauuuuaauucuuuauauu

SEQ ID NO: 406413 - RNA, 21 nt, Artificial Sequence
  Synthetic
auuauuuuaauucuuuauauu

SEQ ID NO: 406414 - RNA, 22 nt, Artificial Sequence
  Synthetic
uauuauuuuaauucuuuauauu

SEQ ID NO: 406415 - RNA, 23 nt, Artificial Sequence
  Synthetic
auauuauuuuaauucuuuauauu

SEQ ID NO: 406416 - RNA, 24 nt, Artificial Sequence
  Synthetic
gauauuauuuuaauucuuuauauu

SEQ ID NO: 406417 - RNA, 18 nt, Artificial Sequence
  Synthetic
auucugggcuuuuauauu

SEQ ID NO: 406418 - RNA, 19 nt, Artificial Sequence
  Synthetic
aauucugggcuuuuauauu

SEQ ID NO: 406419 - RNA, 20 nt, Artificial Sequence
  Synthetic
gaauucugggcuuuuauauu

SEQ ID NO: 406420 - RNA, 21 nt, Artificial Sequence
  Synthetic
ggaauucugggcuuuuauauu

SEQ ID NO: 406421 - RNA, 22 nt, Artificial Sequence
  Synthetic
uggaauucugggcuuuuauauu

SEQ ID NO: 406422 - RNA, 23 nt, Artificial Sequence
  Synthetic
auggaauucugggcuuuuauauu

SEQ ID NO: 406423 - RNA, 24 nt, Artificial Sequence
  Synthetic
aauggaauucugggcuuuuauauu

SEQ ID NO: 406424 - RNA, 18 nt, Artificial Sequence
  Synthetic
guaucaaauuuuuauauu

SEQ ID NO: 406425 - RNA, 19 nt, Artificial Sequence
  Synthetic
gguaucaaauuuuuauauu

SEQ ID NO: 406426 - RNA, 20 nt, Artificial Sequence
  Synthetic
agguaucaaauuuuuauauu

SEQ ID NO: 406427 - RNA, 21 nt, Artificial Sequence
  Synthetic
aagguaucaaauuuuuauauu

SEQ ID NO: 406428 - RNA, 22 nt, Artificial Sequence
  Synthetic
aaagguaucaaauuuuuauauu

SEQ ID NO: 406429 - RNA, 23 nt, Artificial Sequence
  Synthetic
uaaagguaucaaauuuuuauauu

SEQ ID NO: 406430 - RNA, 24 nt, Artificial Sequence
  Synthetic
uuaaagguaucaaauuuuuauauu

SEQ ID NO: 406431 - RNA, 18 nt, Artificial Sequence
  Synthetic
cuauuaugaaaaacuauu

SEQ ID NO: 406432 - RNA, 19 nt, Artificial Sequence
  Synthetic
acuauuaugaaaaacuauu

SEQ ID NO: 406433 - RNA, 20 nt, Artificial Sequence
  Synthetic
aacuauuaugaaaaacuauu

SEQ ID NO: 406434 - RNA, 21 nt, Artificial Sequence
  Synthetic
aaacuauuaugaaaaacuauu

SEQ ID NO: 406435 - RNA, 22 nt, Artificial Sequence
  Synthetic
uaaacuauuaugaaaaacuauu

SEQ ID NO: 406436 - RNA, 23 nt, Artificial Sequence
  Synthetic
uuaaacuauuaugaaaaacuauu

SEQ ID NO: 406437 - RNA, 24 nt, Artificial Sequence
  Synthetic
uuuaaacuauuaugaaaaacuauu

SEQ ID NO: 406438 - RNA, 18 nt, Artificial Sequence
  Synthetic
agaauucuggaaacuauu

SEQ ID NO: 406439 - RNA, 19 nt, Artificial Sequence
  Synthetic
uagaauucuggaaacuauu

SEQ ID NO: 406440 - RNA, 20 nt, Artificial Sequence
  Synthetic
cuagaauucuggaaacuauu

SEQ ID NO: 406441 - RNA, 21 nt, Artificial Sequence
  Synthetic
gcuagaauucuggaaacuauu

SEQ ID NO: 406442 - RNA, 22 nt, Artificial Sequence
  Synthetic
ggcuagaauucuggaaacuauu

SEQ ID NO: 406443 - RNA, 23 nt, Artificial Sequence
  Synthetic
uggcuagaauucuggaaacuauu

SEQ ID NO: 406444 - RNA, 24 nt, Artificial Sequence
  Synthetic
auggcuagaauucuggaaacuauu

SEQ ID NO: 406445 - RNA, 18 nt, Artificial Sequence
  Synthetic
ugauauuuuuaaacuauu

SEQ ID NO: 406446 - RNA, 19 nt, Artificial Sequence
  Synthetic
augauauuuuuaaacuauu

SEQ ID NO: 406447 - RNA, 20 nt, Artificial Sequence
  Synthetic
uaugauauuuuuaaacuauu

SEQ ID NO: 406448 - RNA, 21 nt, Artificial Sequence
  Synthetic
uuaugauauuuuuaaacuauu

SEQ ID NO: 406449 - RNA, 22 nt, Artificial Sequence
  Synthetic
auuaugauauuuuuaaacuauu

SEQ ID NO: 406450 - RNA, 23 nt, Artificial Sequence
  Synthetic
uauuaugauauuuuuaaacuauu

SEQ ID NO: 406451 - RNA, 24 nt, Artificial Sequence
  Synthetic
cuauuaugauauuuuuaaacuauu

SEQ ID NO: 406452 - RNA, 19 nt, Artificial Sequence
  Synthetic
uugauauuuuuaaacuauu

SEQ ID NO: 406453 - RNA, 20 nt, Artificial Sequence
  Synthetic
uuugauauuuuuaaacuauu

SEQ ID NO: 406454 - RNA, 21 nt, Artificial Sequence
  Synthetic
uuuugauauuuuuaaacuauu

SEQ ID NO: 406455 - RNA, 22 nt, Artificial Sequence
  Synthetic
uuuuugauauuuuuaaacuauu

SEQ ID NO: 406456 - RNA, 23 nt, Artificial Sequence
  Synthetic
uuuuuugauauuuuuaaacuauu

SEQ ID NO: 406457 - RNA, 24 nt, Artificial Sequence
  Synthetic
auuuuuugauauuuuuaaacuauu

SEQ ID NO: 406458 - RNA, 18 nt, Artificial Sequence
  Synthetic
cucuaccaaacaacuauu

SEQ ID NO: 406459 - RNA, 19 nt, Artificial Sequence
  Synthetic
ucucuaccaaacaacuauu

SEQ ID NO: 406460 - RNA, 20 nt, Artificial Sequence
  Synthetic
aucucuaccaaacaacuauu

SEQ ID NO: 406461 - RNA, 21 nt, Artificial Sequence
  Synthetic
caucucuaccaaacaacuauu

SEQ ID NO: 406462 - RNA, 22 nt, Artificial Sequence
  Synthetic
ucaucucuaccaaacaacuauu

SEQ ID NO: 406463 - RNA, 23 nt, Artificial Sequence
  Synthetic
gucaucucuaccaaacaacuauu

SEQ ID NO: 406464 - RNA, 24 nt, Artificial Sequence
  Synthetic
cgucaucucuaccaaacaacuauu

SEQ ID NO: 406465 - RNA, 18 nt, Artificial Sequence
  Synthetic
aucacaaaugcaacuauu

SEQ ID NO: 406466 - RNA, 19 nt, Artificial Sequence
  Synthetic
gaucacaaaugcaacuauu

SEQ ID NO: 406467 - RNA, 20 nt, Artificial Sequence
  Synthetic
cgaucacaaaugcaacuauu

SEQ ID NO: 406468 - RNA, 21 nt, Artificial Sequence
  Synthetic
acgaucacaaaugcaacuauu

SEQ ID NO: 406469 - RNA, 22 nt, Artificial Sequence
  Synthetic
uacgaucacaaaugcaacuauu

SEQ ID NO: 406470 - RNA, 23 nt, Artificial Sequence
  Synthetic
uuacgaucacaaaugcaacuauu

SEQ ID NO: 406471 - RNA, 24 nt, Artificial Sequence
  Synthetic
auuacgaucacaaaugcaacuauu

SEQ ID NO: 406472 - RNA, 18 nt, Artificial Sequence
  Synthetic
caauucauuucaacuauu

SEQ ID NO: 406473 - RNA, 19 nt, Artificial Sequence
  Synthetic
ucaauucauuucaacuauu

SEQ ID NO: 406474 - RNA, 20 nt, Artificial Sequence
  Synthetic
cucaauucauuucaacuauu

SEQ ID NO: 406475 - RNA, 21 nt, Artificial Sequence
  Synthetic
acucaauucauuucaacuauu

SEQ ID NO: 406476 - RNA, 22 nt, Artificial Sequence
  Synthetic
aacucaauucauuucaacuauu

SEQ ID NO: 406477 - RNA, 23 nt, Artificial Sequence
  Synthetic
aaacucaauucauuucaacuauu

SEQ ID NO: 406478 - RNA, 24 nt, Artificial Sequence
  Synthetic
caaacucaauucauuucaacuauu

SEQ ID NO: 406479 - RNA, 18 nt, Artificial Sequence
  Synthetic
acauuugauagaacuauu

SEQ ID NO: 406480 - RNA, 19 nt, Artificial Sequence
  Synthetic
uacauuugauagaacuauu

SEQ ID NO: 406481 - RNA, 20 nt, Artificial Sequence
  Synthetic
uuacauuugauagaacuauu

SEQ ID NO: 406482 - RNA, 21 nt, Artificial Sequence
  Synthetic
auuacauuugauagaacuauu

SEQ ID NO: 406483 - RNA, 22 nt, Artificial Sequence
  Synthetic
uauuacauuugauagaacuauu

SEQ ID NO: 406484 - RNA, 23 nt, Artificial Sequence
  Synthetic
uuauuacauuugauagaacuauu

SEQ ID NO: 406485 - RNA, 24 nt, Artificial Sequence
  Synthetic
auuauuacauuugauagaacuauu

SEQ ID NO: 406486 - RNA, 18 nt, Artificial Sequence
  Synthetic
auaagauaaggaacuauu

SEQ ID NO: 406487 - RNA, 19 nt, Artificial Sequence
  Synthetic
gauaagauaaggaacuauu

SEQ ID NO: 406488 - RNA, 20 nt, Artificial Sequence
  Synthetic
agauaagauaaggaacuauu

SEQ ID NO: 406489 - RNA, 21 nt, Artificial Sequence
  Synthetic
cagauaagauaaggaacuauu

SEQ ID NO: 406490 - RNA, 22 nt, Artificial Sequence
  Synthetic
ucagauaagauaaggaacuauu

SEQ ID NO: 406491 - RNA, 23 nt, Artificial Sequence
  Synthetic
uucagauaagauaaggaacuauu

SEQ ID NO: 406492 - RNA, 24 nt, Artificial Sequence
  Synthetic
uuucagauaagauaaggaacuauu

SEQ ID NO: 406493 - RNA, 18 nt, Artificial Sequence
  Synthetic
uaauuuuccugaacuauu

SEQ ID NO: 406494 - RNA, 19 nt, Artificial Sequence
  Synthetic
auaauuuuccugaacuauu

SEQ ID NO: 406495 - RNA, 20 nt, Artificial Sequence
  Synthetic
uauaauuuuccugaacuauu

SEQ ID NO: 406496 - RNA, 21 nt, Artificial Sequence
  Synthetic
auauaauuuuccugaacuauu

SEQ ID NO: 406497 - RNA, 22 nt, Artificial Sequence
  Synthetic
gauauaauuuuccugaacuauu

SEQ ID NO: 406498 - RNA, 23 nt, Artificial Sequence
  Synthetic
ugauauaauuuuccugaacuauu

SEQ ID NO: 406499 - RNA, 24 nt, Artificial Sequence
  Synthetic
cugauauaauuuuccugaacuauu

SEQ ID NO: 406500 - RNA, 18 nt, Artificial Sequence
  Synthetic
gaaaauaugcacacuauu

SEQ ID NO: 406501 - RNA, 19 nt, Artificial Sequence
  Synthetic
agaaaauaugcacacuauu

SEQ ID NO: 406502 - RNA, 20 nt, Artificial Sequence
  Synthetic
gagaaaauaugcacacuauu

SEQ ID NO: 406503 - RNA, 21 nt, Artificial Sequence
  Synthetic
ggagaaaauaugcacacuauu

SEQ ID NO: 406504 - RNA, 22 nt, Artificial Sequence
  Synthetic
gggagaaaauaugcacacuauu

SEQ ID NO: 406505 - RNA, 23 nt, Artificial Sequence
  Synthetic
ggggagaaaauaugcacacuauu

SEQ ID NO: 406506 - RNA, 24 nt, Artificial Sequence
  Synthetic
uggggagaaaauaugcacacuauu

SEQ ID NO: 406507 - RNA, 18 nt, Artificial Sequence
  Synthetic
auaucacuggccacuauu

SEQ ID NO: 406508 - RNA, 19 nt, Artificial Sequence
  Synthetic
aauaucacuggccacuauu

SEQ ID NO: 406509 - RNA, 20 nt, Artificial Sequence
  Synthetic
aaauaucacuggccacuauu

SEQ ID NO: 406510 - RNA, 21 nt, Artificial Sequence
  Synthetic
caaauaucacuggccacuauu

SEQ ID NO: 406511 - RNA, 22 nt, Artificial Sequence
  Synthetic
gcaaauaucacuggccacuauu

SEQ ID NO: 406512 - RNA, 23 nt, Artificial Sequence
  Synthetic
ugcaaauaucacuggccacuauu

SEQ ID NO: 406513 - RNA, 24 nt, Artificial Sequence
  Synthetic
augcaaauaucacuggccacuauu

SEQ ID NO: 406514 - RNA, 18 nt, Artificial Sequence
  Synthetic
uucucucauaucacuauu

SEQ ID NO: 406515 - RNA, 19 nt, Artificial Sequence
  Synthetic
auucucucauaucacuauu

SEQ ID NO: 406516 - RNA, 20 nt, Artificial Sequence
  Synthetic
aauucucucauaucacuauu

SEQ ID NO: 406517 - RNA, 21 nt, Artificial Sequence
  Synthetic
uaauucucucauaucacuauu

SEQ ID NO: 406518 - RNA, 22 nt, Artificial Sequence
  Synthetic
cuaauucucucauaucacuauu

SEQ ID NO: 406519 - RNA, 23 nt, Artificial Sequence
  Synthetic
ucuaauucucucauaucacuauu

SEQ ID NO: 406520 - RNA, 24 nt, Artificial Sequence
  Synthetic
uucuaauucucucauaucacuauu

SEQ ID NO: 406521 - RNA, 18 nt, Artificial Sequence
  Synthetic
aaauucucuuucacuauu

SEQ ID NO: 406522 - RNA, 19 nt, Artificial Sequence
  Synthetic
aaaauucucuuucacuauu

SEQ ID NO: 406523 - RNA, 20 nt, Artificial Sequence
  Synthetic
uaaaauucucuuucacuauu

SEQ ID NO: 406524 - RNA, 21 nt, Artificial Sequence
  Synthetic
uuaaaauucucuuucacuauu

SEQ ID NO: 406525 - RNA, 22 nt, Artificial Sequence
  Synthetic
uuuaaaauucucuuucacuauu

SEQ ID NO: 406526 - RNA, 23 nt, Artificial Sequence
  Synthetic
auuuaaaauucucuuucacuauu

SEQ ID NO: 406527 - RNA, 24 nt, Artificial Sequence
  Synthetic
aauuuaaaauucucuuucacuauu

SEQ ID NO: 406528 - RNA, 18 nt, Artificial Sequence
  Synthetic
gucagguugaagacuauu

SEQ ID NO: 406529 - RNA, 19 nt, Artificial Sequence
  Synthetic
agucagguugaagacuauu

SEQ ID NO: 406530 - RNA, 20 nt, Artificial Sequence
  Synthetic
gagucagguugaagacuauu

SEQ ID NO: 406531 - RNA, 21 nt, Artificial Sequence
  Synthetic
agagucagguugaagacuauu

SEQ ID NO: 406532 - RNA, 22 nt, Artificial Sequence
  Synthetic
uagagucagguugaagacuauu

SEQ ID NO: 406533 - RNA, 23 nt, Artificial Sequence
  Synthetic
cuagagucagguugaagacuauu

SEQ ID NO: 406534 - RNA, 24 nt, Artificial Sequence
  Synthetic
ucuagagucagguugaagacuauu

SEQ ID NO: 406535 - RNA, 18 nt, Artificial Sequence
  Synthetic
cugucucaaaugacuauu

SEQ ID NO: 406536 - RNA, 19 nt, Artificial Sequence
  Synthetic
gcugucucaaaugacuauu

SEQ ID NO: 406537 - RNA, 20 nt, Artificial Sequence
  Synthetic
agcugucucaaaugacuauu

SEQ ID NO: 406538 - RNA, 21 nt, Artificial Sequence
  Synthetic
uagcugucucaaaugacuauu

SEQ ID NO: 406539 - RNA, 22 nt, Artificial Sequence
  Synthetic
cuagcugucucaaaugacuauu

SEQ ID NO: 406540 - RNA, 23 nt, Artificial Sequence
  Synthetic
acuagcugucucaaaugacuauu

SEQ ID NO: 406541 - RNA, 24 nt, Artificial Sequence
  Synthetic
uacuagcugucucaaaugacuauu

SEQ ID NO: 406542 - RNA, 18 nt, Artificial Sequence
  Synthetic
cagggacaugugacuauu

SEQ ID NO: 406543 - RNA, 19 nt, Artificial Sequence
  Synthetic
ucagggacaugugacuauu

SEQ ID NO: 406544 - RNA, 20 nt, Artificial Sequence
  Synthetic
uucagggacaugugacuauu

SEQ ID NO: 406545 - RNA, 21 nt, Artificial Sequence
  Synthetic
uuucagggacaugugacuauu

SEQ ID NO: 406546 - RNA, 22 nt, Artificial Sequence
  Synthetic
guuucagggacaugugacuauu

SEQ ID NO: 406547 - RNA, 23 nt, Artificial Sequence
  Synthetic
gguuucagggacaugugacuauu

SEQ ID NO: 406548 - RNA, 24 nt, Artificial Sequence
  Synthetic
agguuucagggacaugugacuauu

SEQ ID NO: 406549 - RNA, 18 nt, Artificial Sequence
  Synthetic
uuagaacaaaauacuauu

SEQ ID NO: 406550 - RNA, 19 nt, Artificial Sequence
  Synthetic
auuagaacaaaauacuauu

SEQ ID NO: 406551 - RNA, 20 nt, Artificial Sequence
  Synthetic
uauuagaacaaaauacuauu

SEQ ID NO: 406552 - RNA, 21 nt, Artificial Sequence
  Synthetic
guauuagaacaaaauacuauu

SEQ ID NO: 406553 - RNA, 22 nt, Artificial Sequence
  Synthetic
uguauuagaacaaaauacuauu

SEQ ID NO: 406554 - RNA, 23 nt, Artificial Sequence
  Synthetic
uuguauuagaacaaaauacuauu

SEQ ID NO: 406555 - RNA, 24 nt, Artificial Sequence
  Synthetic
uuuguauuagaacaaaauacuauu

SEQ ID NO: 406556 - RNA, 18 nt, Artificial Sequence
  Synthetic
aaccuaggaaauacuauu

SEQ ID NO: 406557 - RNA, 19 nt, Artificial Sequence
  Synthetic
aaaccuaggaaauacuauu

SEQ ID NO: 406558 - RNA, 20 nt, Artificial Sequence
  Synthetic
aaaaccuaggaaauacuauu

SEQ ID NO: 406559 - RNA, 21 nt, Artificial Sequence
  Synthetic
gaaaaccuaggaaauacuauu

SEQ ID NO: 406560 - RNA, 22 nt, Artificial Sequence
  Synthetic
agaaaaccuaggaaauacuauu

SEQ ID NO: 406561 - RNA, 23 nt, Artificial Sequence
  Synthetic
aagaaaaccuaggaaauacuauu

SEQ ID NO: 406562 - RNA, 24 nt, Artificial Sequence
  Synthetic
gaagaaaaccuaggaaauacuauu

SEQ ID NO: 406563 - RNA, 18 nt, Artificial Sequence
  Synthetic
uccaaaagcucuacuauu

SEQ ID NO: 406564 - RNA, 19 nt, Artificial Sequence
  Synthetic
cuccaaaagcucuacuauu

SEQ ID NO: 406565 - RNA, 20 nt, Artificial Sequence
  Synthetic
gcuccaaaagcucuacuauu

SEQ ID NO: 406566 - RNA, 21 nt, Artificial Sequence
  Synthetic
ugcuccaaaagcucuacuauu

SEQ ID NO: 406567 - RNA, 22 nt, Artificial Sequence
  Synthetic
gugcuccaaaagcucuacuauu

SEQ ID NO: 406568 - RNA, 23 nt, Artificial Sequence
  Synthetic
ugugcuccaaaagcucuacuauu

SEQ ID NO: 406569 - RNA, 24 nt, Artificial Sequence
  Synthetic
gugugcuccaaaagcucuacuauu

SEQ ID NO: 406570 - RNA, 18 nt, Artificial Sequence
  Synthetic
uaaauagcucuuacuauu

SEQ ID NO: 406571 - RNA, 19 nt, Artificial Sequence
  Synthetic
auaaauagcucuuacuauu

SEQ ID NO: 406572 - RNA, 20 nt, Artificial Sequence
  Synthetic
cauaaauagcucuuacuauu

SEQ ID NO: 406573 - RNA, 21 nt, Artificial Sequence
  Synthetic
ucauaaauagcucuuacuauu

SEQ ID NO: 406574 - RNA, 22 nt, Artificial Sequence
  Synthetic
gucauaaauagcucuuacuauu

SEQ ID NO: 406575 - RNA, 23 nt, Artificial Sequence
  Synthetic
ugucauaaauagcucuuacuauu

SEQ ID NO: 406576 - RNA, 24 nt, Artificial Sequence
  Synthetic
uugucauaaauagcucuuacuauu

SEQ ID NO: 406577 - RNA, 18 nt, Artificial Sequence
  Synthetic
aaaauucccucaccuauu

SEQ ID NO: 406578 - RNA, 19 nt, Artificial Sequence
  Synthetic
uaaaauucccucaccuauu

SEQ ID NO: 406579 - RNA, 20 nt, Artificial Sequence
  Synthetic
uuaaaauucccucaccuauu

SEQ ID NO: 406580 - RNA, 21 nt, Artificial Sequence
  Synthetic
uuuaaaauucccucaccuauu

SEQ ID NO: 406581 - RNA, 22 nt, Artificial Sequence
  Synthetic
uuuuaaaauucccucaccuauu

SEQ ID NO: 406582 - RNA, 23 nt, Artificial Sequence
  Synthetic
cuuuuaaaauucccucaccuauu

SEQ ID NO: 406583 - RNA, 24 nt, Artificial Sequence
  Synthetic
ucuuuuaaaauucccucaccuauu

SEQ ID NO: 406584 - RNA, 18 nt, Artificial Sequence
  Synthetic
cauucacugagaccuauu

SEQ ID NO: 406585 - RNA, 19 nt, Artificial Sequence
  Synthetic
ucauucacugagaccuauu

SEQ ID NO: 406586 - RNA, 20 nt, Artificial Sequence
  Synthetic
uucauucacugagaccuauu

SEQ ID NO: 406587 - RNA, 21 nt, Artificial Sequence
  Synthetic
auucauucacugagaccuauu

SEQ ID NO: 406588 - RNA, 22 nt, Artificial Sequence
  Synthetic
aauucauucacugagaccuauu

SEQ ID NO: 406589 - RNA, 23 nt, Artificial Sequence
  Synthetic
uaauucauucacugagaccuauu

SEQ ID NO: 406590 - RNA, 24 nt, Artificial Sequence
  Synthetic
uuaauucauucacugagaccuauu

SEQ ID NO: 406591 - RNA, 18 nt, Artificial Sequence
  Synthetic
aggagcacaaacccuauu

SEQ ID NO: 406592 - RNA, 19 nt, Artificial Sequence
  Synthetic
uaggagcacaaacccuauu

SEQ ID NO: 406593 - RNA, 20 nt, Artificial Sequence
  Synthetic
auaggagcacaaacccuauu

SEQ ID NO: 406594 - RNA, 21 nt, Artificial Sequence
  Synthetic
cauaggagcacaaacccuauu

SEQ ID NO: 406595 - RNA, 22 nt, Artificial Sequence
  Synthetic
ccauaggagcacaaacccuauu

SEQ ID NO: 406596 - RNA, 23 nt, Artificial Sequence
  Synthetic
cccauaggagcacaaacccuauu

SEQ ID NO: 406597 - RNA, 24 nt, Artificial Sequence
  Synthetic
ucccauaggagcacaaacccuauu

SEQ ID NO: 406598 - RNA, 18 nt, Artificial Sequence
  Synthetic
aggaucacgaacccuauu

SEQ ID NO: 406599 - RNA, 19 nt, Artificial Sequence
  Synthetic
uaggaucacgaacccuauu

SEQ ID NO: 406600 - RNA, 20 nt, Artificial Sequence
  Synthetic
auaggaucacgaacccuauu

SEQ ID NO: 406601 - RNA, 21 nt, Artificial Sequence
  Synthetic
cauaggaucacgaacccuauu

SEQ ID NO: 406602 - RNA, 22 nt, Artificial Sequence
  Synthetic
ucauaggaucacgaacccuauu

SEQ ID NO: 406603 - RNA, 23 nt, Artificial Sequence
  Synthetic
cucauaggaucacgaacccuauu

SEQ ID NO: 406604 - RNA, 24 nt, Artificial Sequence
  Synthetic
ucucauaggaucacgaacccuauu

SEQ ID NO: 406605 - RNA, 18 nt, Artificial Sequence
  Synthetic
ugccccucuuccccuauu

SEQ ID NO: 406606 - RNA, 19 nt, Artificial Sequence
  Synthetic
uugccccucuuccccuauu

SEQ ID NO: 406607 - RNA, 20 nt, Artificial Sequence
  Synthetic
uuugccccucuuccccuauu

SEQ ID NO: 406608 - RNA, 21 nt, Artificial Sequence
  Synthetic
auuugccccucuuccccuauu

SEQ ID NO: 406609 - RNA, 22 nt, Artificial Sequence
  Synthetic
aauuugccccucuuccccuauu

SEQ ID NO: 406610 - RNA, 23 nt, Artificial Sequence
  Synthetic
gaauuugccccucuuccccuauu

SEQ ID NO: 406611 - RNA, 24 nt, Artificial Sequence
  Synthetic
ugaauuugccccucuuccccuauu

SEQ ID NO: 406612 - RNA, 18 nt, Artificial Sequence
  Synthetic
cuaaaucauacuccuauu

SEQ ID NO: 406613 - RNA, 19 nt, Artificial Sequence
  Synthetic
acuaaaucauacuccuauu

SEQ ID NO: 406614 - RNA, 20 nt, Artificial Sequence
  Synthetic
cacuaaaucauacuccuauu

SEQ ID NO: 406615 - RNA, 21 nt, Artificial Sequence
  Synthetic
gcacuaaaucauacuccuauu

SEQ ID NO: 406616 - RNA, 22 nt, Artificial Sequence
  Synthetic
ggcacuaaaucauacuccuauu

SEQ ID NO: 406617 - RNA, 23 nt, Artificial Sequence
  Synthetic
gggcacuaaaucauacuccuauu

SEQ ID NO: 406618 - RNA, 24 nt, Artificial Sequence
  Synthetic
agggcacuaaaucauacuccuauu

SEQ ID NO: 406619 - RNA, 18 nt, Artificial Sequence
  Synthetic
aucagcuuuucuccuauu

SEQ ID NO: 406620 - RNA, 19 nt, Artificial Sequence
  Synthetic
caucagcuuuucuccuauu

SEQ ID NO: 406621 - RNA, 20 nt, Artificial Sequence
  Synthetic
ucaucagcuuuucuccuauu

SEQ ID NO: 406622 - RNA, 21 nt, Artificial Sequence
  Synthetic
uucaucagcuuuucuccuauu

SEQ ID NO: 406623 - RNA, 22 nt, Artificial Sequence
  Synthetic
auucaucagcuuuucuccuauu

SEQ ID NO: 406624 - RNA, 23 nt, Artificial Sequence
  Synthetic
uauucaucagcuuuucuccuauu

SEQ ID NO: 406625 - RNA, 24 nt, Artificial Sequence
  Synthetic
uuauucaucagcuuuucuccuauu

SEQ ID NO: 406626 - RNA, 18 nt, Artificial Sequence
  Synthetic
ucccgaaauauuccuauu

SEQ ID NO: 406627 - RNA, 19 nt, Artificial Sequence
  Synthetic
cucccgaaauauuccuauu

SEQ ID NO: 406628 - RNA, 20 nt, Artificial Sequence
  Synthetic
acucccgaaauauuccuauu

SEQ ID NO: 406629 - RNA, 21 nt, Artificial Sequence
  Synthetic
uacucccgaaauauuccuauu

SEQ ID NO: 406630 - RNA, 22 nt, Artificial Sequence
  Synthetic
uuacucccgaaauauuccuauu

SEQ ID NO: 406631 - RNA, 23 nt, Artificial Sequence
  Synthetic
uuuacucccgaaauauuccuauu

SEQ ID NO: 406632 - RNA, 24 nt, Artificial Sequence
  Synthetic
auuuacucccgaaauauuccuauu

SEQ ID NO: 406633 - RNA, 18 nt, Artificial Sequence
  Synthetic
ucuguaaucccagcuauu

SEQ ID NO: 406634 - RNA, 19 nt, Artificial Sequence
  Synthetic
gucuguaaucccagcuauu

SEQ ID NO: 406635 - RNA, 20 nt, Artificial Sequence
  Synthetic
ugucuguaaucccagcuauu

SEQ ID NO: 406636 - RNA, 21 nt, Artificial Sequence
  Synthetic
gugucuguaaucccagcuauu

SEQ ID NO: 406637 - RNA, 22 nt, Artificial Sequence
  Synthetic
ugugucuguaaucccagcuauu

SEQ ID NO: 406638 - RNA, 23 nt, Artificial Sequence
  Synthetic
augugucuguaaucccagcuauu

SEQ ID NO: 406639 - RNA, 24 nt, Artificial Sequence
  Synthetic
caugugucuguaaucccagcuauu

SEQ ID NO: 406640 - RNA, 18 nt, Artificial Sequence
  Synthetic
ugcuugaaaucagcuauu

SEQ ID NO: 406641 - RNA, 19 nt, Artificial Sequence
  Synthetic
uugcuugaaaucagcuauu

SEQ ID NO: 406642 - RNA, 20 nt, Artificial Sequence
  Synthetic
guugcuugaaaucagcuauu

SEQ ID NO: 406643 - RNA, 21 nt, Artificial Sequence
  Synthetic
aguugcuugaaaucagcuauu

SEQ ID NO: 406644 - RNA, 22 nt, Artificial Sequence
  Synthetic
uaguugcuugaaaucagcuauu

SEQ ID NO: 406645 - RNA, 23 nt, Artificial Sequence
  Synthetic
uuaguugcuugaaaucagcuauu

SEQ ID NO: 406646 - RNA, 24 nt, Artificial Sequence
  Synthetic
guuaguugcuugaaaucagcuauu

SEQ ID NO: 406647 - RNA, 18 nt, Artificial Sequence
  Synthetic
cuuuuaagaagagcuauu

SEQ ID NO: 406648 - RNA, 19 nt, Artificial Sequence
  Synthetic
acuuuuaagaagagcuauu

SEQ ID NO: 406649 - RNA, 20 nt, Artificial Sequence
  Synthetic
gacuuuuaagaagagcuauu

SEQ ID NO: 406650 - RNA, 21 nt, Artificial Sequence
  Synthetic
ugacuuuuaagaagagcuauu

SEQ ID NO: 406651 - RNA, 22 nt, Artificial Sequence
  Synthetic
gugacuuuuaagaagagcuauu

SEQ ID NO: 406652 - RNA, 23 nt, Artificial Sequence
  Synthetic
ugugacuuuuaagaagagcuauu

SEQ ID NO: 406653 - RNA, 24 nt, Artificial Sequence
  Synthetic
augugacuuuuaagaagagcuauu

SEQ ID NO: 406654 - RNA, 18 nt, Artificial Sequence
  Synthetic
gaggccagaagagcuauu

SEQ ID NO: 406655 - RNA, 19 nt, Artificial Sequence
  Synthetic
agaggccagaagagcuauu

SEQ ID NO: 406656 - RNA, 20 nt, Artificial Sequence
  Synthetic
uagaggccagaagagcuauu

SEQ ID NO: 406657 - RNA, 21 nt, Artificial Sequence
  Synthetic
auagaggccagaagagcuauu

SEQ ID NO: 406658 - RNA, 22 nt, Artificial Sequence
  Synthetic
uauagaggccagaagagcuauu

SEQ ID NO: 406659 - RNA, 23 nt, Artificial Sequence
  Synthetic
auauagaggccagaagagcuauu

SEQ ID NO: 406660 - RNA, 24 nt, Artificial Sequence
  Synthetic
gauauagaggccagaagagcuauu

SEQ ID NO: 406661 - RNA, 18 nt, Artificial Sequence
  Synthetic
acagauacgugagcuauu

SEQ ID NO: 406662 - RNA, 19 nt, Artificial Sequence
  Synthetic
aacagauacgugagcuauu

SEQ ID NO: 406663 - RNA, 20 nt, Artificial Sequence
  Synthetic
aaacagauacgugagcuauu

SEQ ID NO: 406664 - RNA, 21 nt, Artificial Sequence
  Synthetic
aaaacagauacgugagcuauu

SEQ ID NO: 406665 - RNA, 22 nt, Artificial Sequence
  Synthetic
caaaacagauacgugagcuauu

SEQ ID NO: 406666 - RNA, 23 nt, Artificial Sequence
  Synthetic
acaaaacagauacgugagcuauu

SEQ ID NO: 406667 - RNA, 24 nt, Artificial Sequence
  Synthetic
aacaaaacagauacgugagcuauu

SEQ ID NO: 406668 - RNA, 18 nt, Artificial Sequence
  Synthetic
ggagacaguugagcuauu

SEQ ID NO: 406669 - RNA, 19 nt, Artificial Sequence
  Synthetic
gggagacaguugagcuauu

SEQ ID NO: 406670 - RNA, 20 nt, Artificial Sequence
  Synthetic
ggggagacaguugagcuauu

SEQ ID NO: 406671 - RNA, 21 nt, Artificial Sequence
  Synthetic
uggggagacaguugagcuauu

SEQ ID NO: 406672 - RNA, 22 nt, Artificial Sequence
  Synthetic
cuggggagacaguugagcuauu

SEQ ID NO: 406673 - RNA, 23 nt, Artificial Sequence
  Synthetic
ccuggggagacaguugagcuauu

SEQ ID NO: 406674 - RNA, 24 nt, Artificial Sequence
  Synthetic
accuggggagacaguugagcuauu

SEQ ID NO: 406675 - RNA, 18 nt, Artificial Sequence
  Synthetic
cugauguuuugagcuauu

SEQ ID NO: 406676 - RNA, 19 nt, Artificial Sequence
  Synthetic
acugauguuuugagcuauu

SEQ ID NO: 406677 - RNA, 20 nt, Artificial Sequence
  Synthetic
gacugauguuuugagcuauu

SEQ ID NO: 406678 - RNA, 21 nt, Artificial Sequence
  Synthetic
agacugauguuuugagcuauu

SEQ ID NO: 406679 - RNA, 22 nt, Artificial Sequence
  Synthetic
uagacugauguuuugagcuauu

SEQ ID NO: 406680 - RNA, 23 nt, Artificial Sequence
  Synthetic
uuagacugauguuuugagcuauu

SEQ ID NO: 406681 - RNA, 24 nt, Artificial Sequence
  Synthetic
cuuagacugauguuuugagcuauu

SEQ ID NO: 406682 - RNA, 18 nt, Artificial Sequence
  Synthetic
uauuuuauuauagcuauu

SEQ ID NO: 406683 - RNA, 19 nt, Artificial Sequence
  Synthetic
guauuuuauuauagcuauu

SEQ ID NO: 406684 - RNA, 20 nt, Artificial Sequence
  Synthetic
cguauuuuauuauagcuauu

SEQ ID NO: 406685 - RNA, 21 nt, Artificial Sequence
  Synthetic
acguauuuuauuauagcuauu

SEQ ID NO: 406686 - RNA, 22 nt, Artificial Sequence
  Synthetic
cacguauuuuauuauagcuauu

SEQ ID NO: 406687 - RNA, 23 nt, Artificial Sequence
  Synthetic
ucacguauuuuauuauagcuauu

SEQ ID NO: 406688 - RNA, 24 nt, Artificial Sequence
  Synthetic
uucacguauuuuauuauagcuauu

SEQ ID NO: 406689 - RNA, 18 nt, Artificial Sequence
  Synthetic
uccuccuuuuuagcuauu

SEQ ID NO: 406690 - RNA, 19 nt, Artificial Sequence
  Synthetic
auccuccuuuuuagcuauu

SEQ ID NO: 406691 - RNA, 20 nt, Artificial Sequence
  Synthetic
aauccuccuuuuuagcuauu

SEQ ID NO: 406692 - RNA, 21 nt, Artificial Sequence
  Synthetic
aaauccuccuuuuuagcuauu

SEQ ID NO: 406693 - RNA, 22 nt, Artificial Sequence
  Synthetic
aaaauccuccuuuuuagcuauu

SEQ ID NO: 406694 - RNA, 23 nt, Artificial Sequence
  Synthetic
uaaaauccuccuuuuuagcuauu

SEQ ID NO: 406695 - RNA, 24 nt, Artificial Sequence
  Synthetic
uuaaaauccuccuuuuuagcuauu

SEQ ID NO: 406696 - RNA, 18 nt, Artificial Sequence
  Synthetic
ucaaggguaaaggcuauu

SEQ ID NO: 406697 - RNA, 19 nt, Artificial Sequence
  Synthetic
uucaaggguaaaggcuauu

SEQ ID NO: 406698 - RNA, 20 nt, Artificial Sequence
  Synthetic
guucaaggguaaaggcuauu

SEQ ID NO: 406699 - RNA, 21 nt, Artificial Sequence
  Synthetic
aguucaaggguaaaggcuauu

SEQ ID NO: 406700 - RNA, 22 nt, Artificial Sequence
  Synthetic
aaguucaaggguaaaggcuauu

SEQ ID NO: 406701 - RNA, 23 nt, Artificial Sequence
  Synthetic
gaaguucaaggguaaaggcuauu

SEQ ID NO: 406702 - RNA, 24 nt, Artificial Sequence
  Synthetic
ugaaguucaaggguaaaggcuauu

SEQ ID NO: 406703 - RNA, 18 nt, Artificial Sequence
  Synthetic
aauaaugaagaggcuauu

SEQ ID NO: 406704 - RNA, 19 nt, Artificial Sequence
  Synthetic
gaauaaugaagaggcuauu

SEQ ID NO: 406705 - RNA, 20 nt, Artificial Sequence
  Synthetic
agaauaaugaagaggcuauu

SEQ ID NO: 406706 - RNA, 21 nt, Artificial Sequence
  Synthetic
uagaauaaugaagaggcuauu

SEQ ID NO: 406707 - RNA, 22 nt, Artificial Sequence
  Synthetic
auagaauaaugaagaggcuauu

SEQ ID NO: 406708 - RNA, 23 nt, Artificial Sequence
  Synthetic
aauagaauaaugaagaggcuauu

SEQ ID NO: 406709 - RNA, 24 nt, Artificial Sequence
  Synthetic
aaauagaauaaugaagaggcuauu

SEQ ID NO: 406710 - RNA, 18 nt, Artificial Sequence
  Synthetic
gucuauuauggggcuauu

SEQ ID NO: 406711 - RNA, 19 nt, Artificial Sequence
  Synthetic
ugucuauuauggggcuauu

SEQ ID NO: 406712 - RNA, 20 nt, Artificial Sequence
  Synthetic
gugucuauuauggggcuauu

SEQ ID NO: 406713 - RNA, 21 nt, Artificial Sequence
  Synthetic
ugugucuauuauggggcuauu

SEQ ID NO: 406714 - RNA, 22 nt, Artificial Sequence
  Synthetic
cugugucuauuauggggcuauu

SEQ ID NO: 406715 - RNA, 23 nt, Artificial Sequence
  Synthetic
gcugugucuauuauggggcuauu

SEQ ID NO: 406716 - RNA, 24 nt, Artificial Sequence
  Synthetic
ggcugugucuauuauggggcuauu

SEQ ID NO: 406717 - RNA, 18 nt, Artificial Sequence
  Synthetic
gagaaugucuuugcuauu

SEQ ID NO: 406718 - RNA, 19 nt, Artificial Sequence
  Synthetic
agagaaugucuuugcuauu

SEQ ID NO: 406719 - RNA, 20 nt, Artificial Sequence
  Synthetic
aagagaaugucuuugcuauu

SEQ ID NO: 406720 - RNA, 21 nt, Artificial Sequence
  Synthetic
uaagagaaugucuuugcuauu

SEQ ID NO: 406721 - RNA, 22 nt, Artificial Sequence
  Synthetic
uuaagagaaugucuuugcuauu

SEQ ID NO: 406722 - RNA, 23 nt, Artificial Sequence
  Synthetic
uuuaagagaaugucuuugcuauu

SEQ ID NO: 406723 - RNA, 24 nt, Artificial Sequence
  Synthetic
auuuaagagaaugucuuugcuauu

SEQ ID NO: 406724 - RNA, 18 nt, Artificial Sequence
  Synthetic
uugcaauucuuugcuauu

SEQ ID NO: 406725 - RNA, 19 nt, Artificial Sequence
  Synthetic
guugcaauucuuugcuauu

SEQ ID NO: 406726 - RNA, 20 nt, Artificial Sequence
  Synthetic
gguugcaauucuuugcuauu

SEQ ID NO: 406727 - RNA, 21 nt, Artificial Sequence
  Synthetic
ugguugcaauucuuugcuauu

SEQ ID NO: 406728 - RNA, 22 nt, Artificial Sequence
  Synthetic
uugguugcaauucuuugcuauu

SEQ ID NO: 406729 - RNA, 23 nt, Artificial Sequence
  Synthetic
guugguugcaauucuuugcuauu

SEQ ID NO: 406730 - RNA, 24 nt, Artificial Sequence
  Synthetic
gguugguugcaauucuuugcuauu

SEQ ID NO: 406731 - RNA, 18 nt, Artificial Sequence
  Synthetic
agaagccauaaaucuauu

SEQ ID NO: 406732 - RNA, 19 nt, Artificial Sequence
  Synthetic
uagaagccauaaaucuauu

SEQ ID NO: 406733 - RNA, 20 nt, Artificial Sequence
  Synthetic
guagaagccauaaaucuauu

SEQ ID NO: 406734 - RNA, 21 nt, Artificial Sequence
  Synthetic
uguagaagccauaaaucuauu

SEQ ID NO: 406735 - RNA, 22 nt, Artificial Sequence
  Synthetic
cuguagaagccauaaaucuauu

SEQ ID NO: 406736 - RNA, 23 nt, Artificial Sequence
  Synthetic
ucuguagaagccauaaaucuauu

SEQ ID NO: 406737 - RNA, 24 nt, Artificial Sequence
  Synthetic
gucuguagaagccauaaaucuauu

SEQ ID NO: 406738 - RNA, 18 nt, Artificial Sequence
  Synthetic
auugaaaaugaaucuauu

SEQ ID NO: 406739 - RNA, 19 nt, Artificial Sequence
  Synthetic
uauugaaaaugaaucuauu

SEQ ID NO: 406740 - RNA, 20 nt, Artificial Sequence
  Synthetic
uuauugaaaaugaaucuauu

SEQ ID NO: 406741 - RNA, 21 nt, Artificial Sequence
  Synthetic
guuauugaaaaugaaucuauu

SEQ ID NO: 406742 - RNA, 22 nt, Artificial Sequence
  Synthetic
aguuauugaaaaugaaucuauu

SEQ ID NO: 406743 - RNA, 23 nt, Artificial Sequence
  Synthetic
uaguuauugaaaaugaaucuauu

SEQ ID NO: 406744 - RNA, 24 nt, Artificial Sequence
  Synthetic
auaguuauugaaaaugaaucuauu

SEQ ID NO: 406745 - RNA, 18 nt, Artificial Sequence
  Synthetic
auaugaaucacaucuauu

SEQ ID NO: 406746 - RNA, 19 nt, Artificial Sequence
  Synthetic
aauaugaaucacaucuauu

SEQ ID NO: 406747 - RNA, 20 nt, Artificial Sequence
  Synthetic
gaauaugaaucacaucuauu

SEQ ID NO: 406748 - RNA, 21 nt, Artificial Sequence
  Synthetic
agaauaugaaucacaucuauu

SEQ ID NO: 406749 - RNA, 22 nt, Artificial Sequence
  Synthetic
gagaauaugaaucacaucuauu

SEQ ID NO: 406750 - RNA, 23 nt, Artificial Sequence
  Synthetic
agagaauaugaaucacaucuauu

SEQ ID NO: 406751 - RNA, 24 nt, Artificial Sequence
  Synthetic
uagagaauaugaaucacaucuauu

SEQ ID NO: 406752 - RNA, 18 nt, Artificial Sequence
  Synthetic
cagguguuuuuaucuauu

SEQ ID NO: 406753 - RNA, 19 nt, Artificial Sequence
  Synthetic
ucagguguuuuuaucuauu

SEQ ID NO: 406754 - RNA, 20 nt, Artificial Sequence
  Synthetic
uucagguguuuuuaucuauu

SEQ ID NO: 406755 - RNA, 21 nt, Artificial Sequence
  Synthetic
uuucagguguuuuuaucuauu

SEQ ID NO: 406756 - RNA, 22 nt, Artificial Sequence
  Synthetic
auuucagguguuuuuaucuauu

SEQ ID NO: 406757 - RNA, 23 nt, Artificial Sequence
  Synthetic
aauuucagguguuuuuaucuauu

SEQ ID NO: 406758 - RNA, 24 nt, Artificial Sequence
  Synthetic
caauuucagguguuuuuaucuauu

SEQ ID NO: 406759 - RNA, 18 nt, Artificial Sequence
  Synthetic
cgauuuggccacucuauu

SEQ ID NO: 406760 - RNA, 19 nt, Artificial Sequence
  Synthetic
ucgauuuggccacucuauu

SEQ ID NO: 406761 - RNA, 20 nt, Artificial Sequence
  Synthetic
uucgauuuggccacucuauu

SEQ ID NO: 406762 - RNA, 21 nt, Artificial Sequence
  Synthetic
uuucgauuuggccacucuauu

SEQ ID NO: 406763 - RNA, 22 nt, Artificial Sequence
  Synthetic
uuuucgauuuggccacucuauu

SEQ ID NO: 406764 - RNA, 23 nt, Artificial Sequence
  Synthetic
guuuucgauuuggccacucuauu

SEQ ID NO: 406765 - RNA, 24 nt, Artificial Sequence
  Synthetic
gguuuucgauuuggccacucuauu

SEQ ID NO: 406766 - RNA, 18 nt, Artificial Sequence
  Synthetic
agcauccaucacucuauu

SEQ ID NO: 406767 - RNA, 19 nt, Artificial Sequence
  Synthetic
aagcauccaucacucuauu

SEQ ID NO: 406768 - RNA, 20 nt, Artificial Sequence
  Synthetic
uaagcauccaucacucuauu

SEQ ID NO: 406769 - RNA, 21 nt, Artificial Sequence
  Synthetic
uuaagcauccaucacucuauu

SEQ ID NO: 406770 - RNA, 22 nt, Artificial Sequence
  Synthetic
guuaagcauccaucacucuauu

SEQ ID NO: 406771 - RNA, 23 nt, Artificial Sequence
  Synthetic
uguuaagcauccaucacucuauu

SEQ ID NO: 406772 - RNA, 24 nt, Artificial Sequence
  Synthetic
uuguuaagcauccaucacucuauu

SEQ ID NO: 406773 - RNA, 18 nt, Artificial Sequence
  Synthetic
ugagagccugucucuauu

SEQ ID NO: 406774 - RNA, 19 nt, Artificial Sequence
  Synthetic
gugagagccugucucuauu

SEQ ID NO: 406775 - RNA, 20 nt, Artificial Sequence
  Synthetic
agugagagccugucucuauu

SEQ ID NO: 406776 - RNA, 21 nt, Artificial Sequence
  Synthetic
cagugagagccugucucuauu

SEQ ID NO: 406777 - RNA, 22 nt, Artificial Sequence
  Synthetic
acagugagagccugucucuauu

SEQ ID NO: 406778 - RNA, 23 nt, Artificial Sequence
  Synthetic
cacagugagagccugucucuauu

SEQ ID NO: 406779 - RNA, 24 nt, Artificial Sequence
  Synthetic
acacagugagagccugucucuauu

SEQ ID NO: 406780 - RNA, 18 nt, Artificial Sequence
  Synthetic
uaaccuaguuucucuauu

SEQ ID NO: 406781 - RNA, 19 nt, Artificial Sequence
  Synthetic
uuaaccuaguuucucuauu

SEQ ID NO: 406782 - RNA, 20 nt, Artificial Sequence
  Synthetic
cuuaaccuaguuucucuauu

SEQ ID NO: 406783 - RNA, 21 nt, Artificial Sequence
  Synthetic
ucuuaaccuaguuucucuauu

SEQ ID NO: 406784 - RNA, 22 nt, Artificial Sequence
  Synthetic
uucuuaaccuaguuucucuauu

SEQ ID NO: 406785 - RNA, 23 nt, Artificial Sequence
  Synthetic
auucuuaaccuaguuucucuauu

SEQ ID NO: 406786 - RNA, 24 nt, Artificial Sequence
  Synthetic
uauucuuaaccuaguuucucuauu

SEQ ID NO: 406787 - RNA, 18 nt, Artificial Sequence
  Synthetic
auagaagugaagucuauu

SEQ ID NO: 406788 - RNA, 19 nt, Artificial Sequence
  Synthetic
aauagaagugaagucuauu

SEQ ID NO: 406789 - RNA, 20 nt, Artificial Sequence
  Synthetic
gaauagaagugaagucuauu

SEQ ID NO: 406790 - RNA, 21 nt, Artificial Sequence
  Synthetic
ugaauagaagugaagucuauu

SEQ ID NO: 406791 - RNA, 22 nt, Artificial Sequence
  Synthetic
uugaauagaagugaagucuauu

SEQ ID NO: 406792 - RNA, 23 nt, Artificial Sequence
  Synthetic
cuugaauagaagugaagucuauu

SEQ ID NO: 406793 - RNA, 24 nt, Artificial Sequence
  Synthetic
gcuugaauagaagugaagucuauu

SEQ ID NO: 406794 - RNA, 18 nt, Artificial Sequence
  Synthetic
gggcgaaacaggucuauu

SEQ ID NO: 406795 - RNA, 19 nt, Artificial Sequence
  Synthetic
ugggcgaaacaggucuauu

SEQ ID NO: 406796 - RNA, 20 nt, Artificial Sequence
  Synthetic
gugggcgaaacaggucuauu

SEQ ID NO: 406797 - RNA, 21 nt, Artificial Sequence
  Synthetic
ugugggcgaaacaggucuauu

SEQ ID NO: 406798 - RNA, 22 nt, Artificial Sequence
  Synthetic
augugggcgaaacaggucuauu

SEQ ID NO: 406799 - RNA, 23 nt, Artificial Sequence
  Synthetic
aaugugggcgaaacaggucuauu

SEQ ID NO: 406800 - RNA, 24 nt, Artificial Sequence
  Synthetic
caaugugggcgaaacaggucuauu

SEQ ID NO: 406801 - RNA, 18 nt, Artificial Sequence
  Synthetic
agcaaagagaggucuauu

SEQ ID NO: 406802 - RNA, 19 nt, Artificial Sequence
  Synthetic
gagcaaagagaggucuauu

SEQ ID NO: 406803 - RNA, 20 nt, Artificial Sequence
  Synthetic
agagcaaagagaggucuauu

SEQ ID NO: 406804 - RNA, 21 nt, Artificial Sequence
  Synthetic
cagagcaaagagaggucuauu

SEQ ID NO: 406805 - RNA, 22 nt, Artificial Sequence
  Synthetic
acagagcaaagagaggucuauu

SEQ ID NO: 406806 - RNA, 23 nt, Artificial Sequence
  Synthetic
cacagagcaaagagaggucuauu

SEQ ID NO: 406807 - RNA, 24 nt, Artificial Sequence
  Synthetic
ccacagagcaaagagaggucuauu

SEQ ID NO: 406808 - RNA, 18 nt, Artificial Sequence
  Synthetic
acuuguuauuggucuauu

SEQ ID NO: 406809 - RNA, 19 nt, Artificial Sequence
  Synthetic
aacuuguuauuggucuauu

SEQ ID NO: 406810 - RNA, 20 nt, Artificial Sequence
  Synthetic
gaacuuguuauuggucuauu

SEQ ID NO: 406811 - RNA, 21 nt, Artificial Sequence
  Synthetic
agaacuuguuauuggucuauu

SEQ ID NO: 406812 - RNA, 22 nt, Artificial Sequence
  Synthetic
cagaacuuguuauuggucuauu

SEQ ID NO: 406813 - RNA, 23 nt, Artificial Sequence
  Synthetic
ucagaacuuguuauuggucuauu

SEQ ID NO: 406814 - RNA, 24 nt, Artificial Sequence
  Synthetic
uucagaacuuguuauuggucuauu

SEQ ID NO: 406815 - RNA, 18 nt, Artificial Sequence
  Synthetic
gcaugcaguaugucuauu

SEQ ID NO: 406816 - RNA, 19 nt, Artificial Sequence
  Synthetic
agcaugcaguaugucuauu

SEQ ID NO: 406817 - RNA, 20 nt, Artificial Sequence
  Synthetic
gagcaugcaguaugucuauu

SEQ ID NO: 406818 - RNA, 21 nt, Artificial Sequence
  Synthetic
ugagcaugcaguaugucuauu

SEQ ID NO: 406819 - RNA, 22 nt, Artificial Sequence
  Synthetic
gugagcaugcaguaugucuauu

SEQ ID NO: 406820 - RNA, 23 nt, Artificial Sequence
  Synthetic
ggugagcaugcaguaugucuauu

SEQ ID NO: 406821 - RNA, 24 nt, Artificial Sequence
  Synthetic
aggugagcaugcaguaugucuauu

SEQ ID NO: 406822 - RNA, 18 nt, Artificial Sequence
  Synthetic
ucuguucgagugucuauu

SEQ ID NO: 406823 - RNA, 19 nt, Artificial Sequence
  Synthetic
gucuguucgagugucuauu

SEQ ID NO: 406824 - RNA, 20 nt, Artificial Sequence
  Synthetic
ugucuguucgagugucuauu

SEQ ID NO: 406825 - RNA, 21 nt, Artificial Sequence
  Synthetic
cugucuguucgagugucuauu

SEQ ID NO: 406826 - RNA, 22 nt, Artificial Sequence
  Synthetic
acugucuguucgagugucuauu

SEQ ID NO: 406827 - RNA, 23 nt, Artificial Sequence
  Synthetic
cacugucuguucgagugucuauu

SEQ ID NO: 406828 - RNA, 24 nt, Artificial Sequence
  Synthetic
gcacugucuguucgagugucuauu

SEQ ID NO: 406829 - RNA, 18 nt, Artificial Sequence
  Synthetic
cauugggcugugucuauu

SEQ ID NO: 406830 - RNA, 19 nt, Artificial Sequence
  Synthetic
acauugggcugugucuauu

SEQ ID NO: 406831 - RNA, 20 nt, Artificial Sequence
  Synthetic
gacauugggcugugucuauu

SEQ ID NO: 406832 - RNA, 21 nt, Artificial Sequence
  Synthetic
ggacauugggcugugucuauu

SEQ ID NO: 406833 - RNA, 22 nt, Artificial Sequence
  Synthetic
uggacauugggcugugucuauu

SEQ ID NO: 406834 - RNA, 23 nt, Artificial Sequence
  Synthetic
auggacauugggcugugucuauu

SEQ ID NO: 406835 - RNA, 24 nt, Artificial Sequence
  Synthetic
aauggacauugggcugugucuauu

SEQ ID NO: 406836 - RNA, 18 nt, Artificial Sequence
  Synthetic
uuuccaagauugucuauu

SEQ ID NO: 406837 - RNA, 19 nt, Artificial Sequence
  Synthetic
uuuuccaagauugucuauu

SEQ ID NO: 406838 - RNA, 20 nt, Artificial Sequence
  Synthetic
cuuuuccaagauugucuauu

SEQ ID NO: 406839 - RNA, 21 nt, Artificial Sequence
  Synthetic
acuuuuccaagauugucuauu

SEQ ID NO: 406840 - RNA, 22 nt, Artificial Sequence
  Synthetic
uacuuuuccaagauugucuauu

SEQ ID NO: 406841 - RNA, 23 nt, Artificial Sequence
  Synthetic
uuacuuuuccaagauugucuauu

SEQ ID NO: 406842 - RNA, 24 nt, Artificial Sequence
  Synthetic
auuacuuuuccaagauugucuauu

SEQ ID NO: 406843 - RNA, 18 nt, Artificial Sequence
  Synthetic
uuuuuuuuaaauucuauu

SEQ ID NO: 406844 - RNA, 19 nt, Artificial Sequence
  Synthetic
uuuuuuuuuaaauucuauu

SEQ ID NO: 406845 - RNA, 20 nt, Artificial Sequence
  Synthetic
uuuuuuuuuuaaauucuauu

SEQ ID NO: 406846 - RNA, 21 nt, Artificial Sequence
  Synthetic
uuuuuuuuuuuaaauucuauu

SEQ ID NO: 406847 - RNA, 22 nt, Artificial Sequence
  Synthetic
uuuuuuuuuuuuaaauucuauu

SEQ ID NO: 406848 - RNA, 23 nt, Artificial Sequence
  Synthetic
guuuuuuuuuuuuaaauucuauu

SEQ ID NO: 406849 - RNA, 24 nt, Artificial Sequence
  Synthetic
uguuuuuuuuuuuuaaauucuauu

SEQ ID NO: 406850 - RNA, 18 nt, Artificial Sequence
  Synthetic
gauuuaaagaauucuauu

SEQ ID NO: 406851 - RNA, 19 nt, Artificial Sequence
  Synthetic
agauuuaaagaauucuauu

SEQ ID NO: 406852 - RNA, 20 nt, Artificial Sequence
  Synthetic
uagauuuaaagaauucuauu

SEQ ID NO: 406853 - RNA, 21 nt, Artificial Sequence
  Synthetic
auagauuuaaagaauucuauu

SEQ ID NO: 406854 - RNA, 22 nt, Artificial Sequence
  Synthetic
uauagauuuaaagaauucuauu

SEQ ID NO: 406855 - RNA, 23 nt, Artificial Sequence
  Synthetic
uuauagauuuaaagaauucuauu

SEQ ID NO: 406856 - RNA, 24 nt, Artificial Sequence
  Synthetic
guuauagauuuaaagaauucuauu

SEQ ID NO: 406857 - RNA, 18 nt, Artificial Sequence
  Synthetic
guagcuuuggauucuauu

SEQ ID NO: 406858 - RNA, 19 nt, Artificial Sequence
  Synthetic
aguagcuuuggauucuauu

SEQ ID NO: 406859 - RNA, 20 nt, Artificial Sequence
  Synthetic
gaguagcuuuggauucuauu

SEQ ID NO: 406860 - RNA, 21 nt, Artificial Sequence
  Synthetic
agaguagcuuuggauucuauu

SEQ ID NO: 406861 - RNA, 22 nt, Artificial Sequence
  Synthetic
uagaguagcuuuggauucuauu

SEQ ID NO: 406862 - RNA, 23 nt, Artificial Sequence
  Synthetic
uuagaguagcuuuggauucuauu

SEQ ID NO: 406863 - RNA, 24 nt, Artificial Sequence
  Synthetic
uuuagaguagcuuuggauucuauu

SEQ ID NO: 406864 - RNA, 18 nt, Artificial Sequence
  Synthetic
aaagcaguuuauucuauu

SEQ ID NO: 406865 - RNA, 19 nt, Artificial Sequence
  Synthetic
aaaagcaguuuauucuauu

SEQ ID NO: 406866 - RNA, 20 nt, Artificial Sequence
  Synthetic
uaaaagcaguuuauucuauu

SEQ ID NO: 406867 - RNA, 21 nt, Artificial Sequence
  Synthetic
guaaaagcaguuuauucuauu

SEQ ID NO: 406868 - RNA, 22 nt, Artificial Sequence
  Synthetic
uguaaaagcaguuuauucuauu

SEQ ID NO: 406869 - RNA, 23 nt, Artificial Sequence
  Synthetic
auguaaaagcaguuuauucuauu

SEQ ID NO: 406870 - RNA, 24 nt, Artificial Sequence
  Synthetic
uauguaaaagcaguuuauucuauu

SEQ ID NO: 406871 - RNA, 18 nt, Artificial Sequence
  Synthetic
uguagacauuguucuauu

SEQ ID NO: 406872 - RNA, 19 nt, Artificial Sequence
  Synthetic
auguagacauuguucuauu

SEQ ID NO: 406873 - RNA, 20 nt, Artificial Sequence
  Synthetic
cauguagacauuguucuauu

SEQ ID NO: 406874 - RNA, 21 nt, Artificial Sequence
  Synthetic
ucauguagacauuguucuauu

SEQ ID NO: 406875 - RNA, 22 nt, Artificial Sequence
  Synthetic
cucauguagacauuguucuauu

SEQ ID NO: 406876 - RNA, 23 nt, Artificial Sequence
  Synthetic
ccucauguagacauuguucuauu

SEQ ID NO: 406877 - RNA, 24 nt, Artificial Sequence
  Synthetic
cccucauguagacauuguucuauu

SEQ ID NO: 406878 - RNA, 18 nt, Artificial Sequence
  Synthetic
uucucuuagguuucuauu

SEQ ID NO: 406879 - RNA, 19 nt, Artificial Sequence
  Synthetic
uuucucuuagguuucuauu

SEQ ID NO: 406880 - RNA, 20 nt, Artificial Sequence
  Synthetic
auuucucuuagguuucuauu

SEQ ID NO: 406881 - RNA, 21 nt, Artificial Sequence
  Synthetic
aauuucucuuagguuucuauu

SEQ ID NO: 406882 - RNA, 22 nt, Artificial Sequence
  Synthetic
uaauuucucuuagguuucuauu

SEQ ID NO: 406883 - RNA, 23 nt, Artificial Sequence
  Synthetic
cuaauuucucuuagguuucuauu

SEQ ID NO: 406884 - RNA, 24 nt, Artificial Sequence
  Synthetic
gcuaauuucucuuagguuucuauu

SEQ ID NO: 406885 - RNA, 18 nt, Artificial Sequence
  Synthetic
gcuagauaauuuucuauu

SEQ ID NO: 406886 - RNA, 19 nt, Artificial Sequence
  Synthetic
agcuagauaauuuucuauu

SEQ ID NO: 406887 - RNA, 20 nt, Artificial Sequence
  Synthetic
aagcuagauaauuuucuauu

SEQ ID NO: 406888 - RNA, 21 nt, Artificial Sequence
  Synthetic
gaagcuagauaauuuucuauu

SEQ ID NO: 406889 - RNA, 22 nt, Artificial Sequence
  Synthetic
ugaagcuagauaauuuucuauu

SEQ ID NO: 406890 - RNA, 23 nt, Artificial Sequence
  Synthetic
cugaagcuagauaauuuucuauu

SEQ ID NO: 406891 - RNA, 24 nt, Artificial Sequence
  Synthetic
acugaagcuagauaauuuucuauu

SEQ ID NO: 406892 - RNA, 18 nt, Artificial Sequence
  Synthetic
aauuuuuaaaaaaguauu

SEQ ID NO: 406893 - RNA, 19 nt, Artificial Sequence
  Synthetic
gaauuuuuaaaaaaguauu

SEQ ID NO: 406894 - RNA, 20 nt, Artificial Sequence
  Synthetic
ugaauuuuuaaaaaaguauu

SEQ ID NO: 406895 - RNA, 21 nt, Artificial Sequence
  Synthetic
gugaauuuuuaaaaaaguauu

SEQ ID NO: 406896 - RNA, 22 nt, Artificial Sequence
  Synthetic
agugaauuuuuaaaaaaguauu

SEQ ID NO: 406897 - RNA, 23 nt, Artificial Sequence
  Synthetic
gagugaauuuuuaaaaaaguauu

SEQ ID NO: 406898 - RNA, 24 nt, Artificial Sequence
  Synthetic
ugagugaauuuuuaaaaaaguauu

SEQ ID NO: 406899 - RNA, 18 nt, Artificial Sequence
  Synthetic
ggaaguugcaaaaguauu

SEQ ID NO: 406900 - RNA, 19 nt, Artificial Sequence
  Synthetic
aggaaguugcaaaaguauu

SEQ ID NO: 406901 - RNA, 20 nt, Artificial Sequence
  Synthetic
caggaaguugcaaaaguauu

SEQ ID NO: 406902 - RNA, 21 nt, Artificial Sequence
  Synthetic
acaggaaguugcaaaaguauu

SEQ ID NO: 406903 - RNA, 22 nt, Artificial Sequence
  Synthetic
uacaggaaguugcaaaaguauu

SEQ ID NO: 406904 - RNA, 23 nt, Artificial Sequence
  Synthetic
uuacaggaaguugcaaaaguauu

SEQ ID NO: 406905 - RNA, 24 nt, Artificial Sequence
  Synthetic
cuuacaggaaguugcaaaaguauu

SEQ ID NO: 406906 - RNA, 18 nt, Artificial Sequence
  Synthetic
uacuuaacuaaaaguauu

SEQ ID NO: 406907 - RNA, 19 nt, Artificial Sequence
  Synthetic
uuacuuaacuaaaaguauu

SEQ ID NO: 406908 - RNA, 20 nt, Artificial Sequence
  Synthetic
uuuacuuaacuaaaaguauu

SEQ ID NO: 406909 - RNA, 21 nt, Artificial Sequence
  Synthetic
uuuuacuuaacuaaaaguauu

SEQ ID NO: 406910 - RNA, 22 nt, Artificial Sequence
  Synthetic
auuuuacuuaacuaaaaguauu

SEQ ID NO: 406911 - RNA, 23 nt, Artificial Sequence
  Synthetic
gauuuuacuuaacuaaaaguauu

SEQ ID NO: 406912 - RNA, 24 nt, Artificial Sequence
  Synthetic
agauuuuacuuaacuaaaaguauu

SEQ ID NO: 406913 - RNA, 18 nt, Artificial Sequence
  Synthetic
uugcacacagaaaguauu

SEQ ID NO: 406914 - RNA, 19 nt, Artificial Sequence
  Synthetic
guugcacacagaaaguauu

SEQ ID NO: 406915 - RNA, 20 nt, Artificial Sequence
  Synthetic
aguugcacacagaaaguauu

SEQ ID NO: 406916 - RNA, 21 nt, Artificial Sequence
  Synthetic
aaguugcacacagaaaguauu

SEQ ID NO: 406917 - RNA, 22 nt, Artificial Sequence
  Synthetic
aaaguugcacacagaaaguauu

SEQ ID NO: 406918 - RNA, 23 nt, Artificial Sequence
  Synthetic
aaaaguugcacacagaaaguauu

SEQ ID NO: 406919 - RNA, 24 nt, Artificial Sequence
  Synthetic
aaaaaguugcacacagaaaguauu

SEQ ID NO: 406920 - RNA, 18 nt, Artificial Sequence
  Synthetic
cauaucaccuaaaguauu

SEQ ID NO: 406921 - RNA, 19 nt, Artificial Sequence
  Synthetic
acauaucaccuaaaguauu

SEQ ID NO: 406922 - RNA, 20 nt, Artificial Sequence
  Synthetic
uacauaucaccuaaaguauu

SEQ ID NO: 406923 - RNA, 21 nt, Artificial Sequence
  Synthetic
auacauaucaccuaaaguauu

SEQ ID NO: 406924 - RNA, 22 nt, Artificial Sequence
  Synthetic
cauacauaucaccuaaaguauu

SEQ ID NO: 406925 - RNA, 23 nt, Artificial Sequence
  Synthetic
ucauacauaucaccuaaaguauu

SEQ ID NO: 406926 - RNA, 24 nt, Artificial Sequence
  Synthetic
aucauacauaucaccuaaaguauu

SEQ ID NO: 406927 - RNA, 18 nt, Artificial Sequence
  Synthetic
auuuucucuuaaaguauu

SEQ ID NO: 406928 - RNA, 19 nt, Artificial Sequence
  Synthetic
uauuuucucuuaaaguauu

SEQ ID NO: 406929 - RNA, 20 nt, Artificial Sequence
  Synthetic
uuauuuucucuuaaaguauu

SEQ ID NO: 406930 - RNA, 21 nt, Artificial Sequence
  Synthetic
uuuauuuucucuuaaaguauu

SEQ ID NO: 406931 - RNA, 22 nt, Artificial Sequence
  Synthetic
uuuuauuuucucuuaaaguauu

SEQ ID NO: 406932 - RNA, 23 nt, Artificial Sequence
  Synthetic
auuuuauuuucucuuaaaguauu

SEQ ID NO: 406933 - RNA, 24 nt, Artificial Sequence
  Synthetic
uauuuuauuuucucuuaaaguauu

SEQ ID NO: 406934 - RNA, 18 nt, Artificial Sequence
  Synthetic
uaaaguuguagaaguauu

SEQ ID NO: 406935 - RNA, 19 nt, Artificial Sequence
  Synthetic
guaaaguuguagaaguauu

SEQ ID NO: 406936 - RNA, 20 nt, Artificial Sequence
  Synthetic
uguaaaguuguagaaguauu

SEQ ID NO: 406937 - RNA, 21 nt, Artificial Sequence
  Synthetic
uuguaaaguuguagaaguauu

SEQ ID NO: 406938 - RNA, 22 nt, Artificial Sequence
  Synthetic
cuuguaaaguuguagaaguauu

SEQ ID NO: 406939 - RNA, 23 nt, Artificial Sequence
  Synthetic
ccuuguaaaguuguagaaguauu

SEQ ID NO: 406940 - RNA, 24 nt, Artificial Sequence
  Synthetic
gccuuguaaaguuguagaaguauu

SEQ ID NO: 406941 - RNA, 18 nt, Artificial Sequence
  Synthetic
ggcacuuuucacaguauu

SEQ ID NO: 406942 - RNA, 19 nt, Artificial Sequence
  Synthetic
uggcacuuuucacaguauu

SEQ ID NO: 406943 - RNA, 20 nt, Artificial Sequence
  Synthetic
uuggcacuuuucacaguauu

SEQ ID NO: 406944 - RNA, 21 nt, Artificial Sequence
  Synthetic
uuuggcacuuuucacaguauu

SEQ ID NO: 406945 - RNA, 22 nt, Artificial Sequence
  Synthetic
cuuuggcacuuuucacaguauu

SEQ ID NO: 406946 - RNA, 23 nt, Artificial Sequence
  Synthetic
acuuuggcacuuuucacaguauu

SEQ ID NO: 406947 - RNA, 24 nt, Artificial Sequence
  Synthetic
aacuuuggcacuuuucacaguauu

SEQ ID NO: 406948 - RNA, 18 nt, Artificial Sequence
  Synthetic
cacagcuaaagcaguauu

SEQ ID NO: 406949 - RNA, 19 nt, Artificial Sequence
  Synthetic
acacagcuaaagcaguauu

SEQ ID NO: 406950 - RNA, 20 nt, Artificial Sequence
  Synthetic
gacacagcuaaagcaguauu

SEQ ID NO: 406951 - RNA, 21 nt, Artificial Sequence
  Synthetic
ggacacagcuaaagcaguauu

SEQ ID NO: 406952 - RNA, 22 nt, Artificial Sequence
  Synthetic
gggacacagcuaaagcaguauu

SEQ ID NO: 406953 - RNA, 23 nt, Artificial Sequence
  Synthetic
ugggacacagcuaaagcaguauu

SEQ ID NO: 406954 - RNA, 24 nt, Artificial Sequence
  Synthetic
cugggacacagcuaaagcaguauu

SEQ ID NO: 406955 - RNA, 18 nt, Artificial Sequence
  Synthetic
uauauaaagagcaguauu

SEQ ID NO: 406956 - RNA, 19 nt, Artificial Sequence
  Synthetic
auauauaaagagcaguauu

SEQ ID NO: 406957 - RNA, 20 nt, Artificial Sequence
  Synthetic
aauauauaaagagcaguauu

SEQ ID NO: 406958 - RNA, 21 nt, Artificial Sequence
  Synthetic
aaauauauaaagagcaguauu

SEQ ID NO: 406959 - RNA, 22 nt, Artificial Sequence
  Synthetic
gaaauauauaaagagcaguauu

SEQ ID NO: 406960 - RNA, 23 nt, Artificial Sequence
  Synthetic
cgaaauauauaaagagcaguauu

SEQ ID NO: 406961 - RNA, 24 nt, Artificial Sequence
  Synthetic
acgaaauauauaaagagcaguauu

SEQ ID NO: 406962 - RNA, 18 nt, Artificial Sequence
  Synthetic
aagaacaccaucaguauu

SEQ ID NO: 406963 - RNA, 19 nt, Artificial Sequence
  Synthetic
gaagaacaccaucaguauu

SEQ ID NO: 406964 - RNA, 20 nt, Artificial Sequence
  Synthetic
agaagaacaccaucaguauu

SEQ ID NO: 406965 - RNA, 21 nt, Artificial Sequence
  Synthetic
aagaagaacaccaucaguauu

SEQ ID NO: 406966 - RNA, 22 nt, Artificial Sequence
  Synthetic
uaagaagaacaccaucaguauu

SEQ ID NO: 406967 - RNA, 23 nt, Artificial Sequence
  Synthetic
auaagaagaacaccaucaguauu

SEQ ID NO: 406968 - RNA, 24 nt, Artificial Sequence
  Synthetic
aauaagaagaacaccaucaguauu

SEQ ID NO: 406969 - RNA, 18 nt, Artificial Sequence
  Synthetic
caucauccuaucaguauu

SEQ ID NO: 406970 - RNA, 19 nt, Artificial Sequence
  Synthetic
acaucauccuaucaguauu

SEQ ID NO: 406971 - RNA, 20 nt, Artificial Sequence
  Synthetic
cacaucauccuaucaguauu

SEQ ID NO: 406972 - RNA, 21 nt, Artificial Sequence
  Synthetic
ucacaucauccuaucaguauu

SEQ ID NO: 406973 - RNA, 22 nt, Artificial Sequence
  Synthetic
uucacaucauccuaucaguauu

SEQ ID NO: 406974 - RNA, 23 nt, Artificial Sequence
  Synthetic
uuucacaucauccuaucaguauu

SEQ ID NO: 406975 - RNA, 24 nt, Artificial Sequence
  Synthetic
uuuucacaucauccuaucaguauu

SEQ ID NO: 406976 - RNA, 18 nt, Artificial Sequence
  Synthetic
gaacaucucgucaguauu

SEQ ID NO: 406977 - RNA, 19 nt, Artificial Sequence
  Synthetic
agaacaucucgucaguauu

SEQ ID NO: 406978 - RNA, 20 nt, Artificial Sequence
  Synthetic
uagaacaucucgucaguauu

SEQ ID NO: 406979 - RNA, 21 nt, Artificial Sequence
  Synthetic
auagaacaucucgucaguauu

SEQ ID NO: 406980 - RNA, 22 nt, Artificial Sequence
  Synthetic
cauagaacaucucgucaguauu

SEQ ID NO: 406981 - RNA, 23 nt, Artificial Sequence
  Synthetic
ucauagaacaucucgucaguauu

SEQ ID NO: 406982 - RNA, 24 nt, Artificial Sequence
  Synthetic
uucauagaacaucucgucaguauu

SEQ ID NO: 406983 - RNA, 18 nt, Artificial Sequence
  Synthetic
auguuuaggaagaguauu

SEQ ID NO: 406984 - RNA, 19 nt, Artificial Sequence
  Synthetic
cauguuuaggaagaguauu

SEQ ID NO: 406985 - RNA, 20 nt, Artificial Sequence
  Synthetic
acauguuuaggaagaguauu

SEQ ID NO: 406986 - RNA, 21 nt, Artificial Sequence
  Synthetic
uacauguuuaggaagaguauu

SEQ ID NO: 406987 - RNA, 22 nt, Artificial Sequence
  Synthetic
guacauguuuaggaagaguauu

SEQ ID NO: 406988 - RNA, 23 nt, Artificial Sequence
  Synthetic
uguacauguuuaggaagaguauu

SEQ ID NO: 406989 - RNA, 24 nt, Artificial Sequence
  Synthetic
cuguacauguuuaggaagaguauu

SEQ ID NO: 406990 - RNA, 18 nt, Artificial Sequence
  Synthetic
ugguugcgugggaguauu

SEQ ID NO: 406991 - RNA, 19 nt, Artificial Sequence
  Synthetic
gugguugcgugggaguauu

SEQ ID NO: 406992 - RNA, 20 nt, Artificial Sequence
  Synthetic
ugugguugcgugggaguauu

SEQ ID NO: 406993 - RNA, 21 nt, Artificial Sequence
  Synthetic
uugugguugcgugggaguauu

SEQ ID NO: 406994 - RNA, 22 nt, Artificial Sequence
  Synthetic
uuugugguugcgugggaguauu

SEQ ID NO: 406995 - RNA, 23 nt, Artificial Sequence
  Synthetic
uuuugugguugcgugggaguauu

SEQ ID NO: 406996 - RNA, 24 nt, Artificial Sequence
  Synthetic
guuuugugguugcgugggaguauu

SEQ ID NO: 406997 - RNA, 18 nt, Artificial Sequence
  Synthetic
gcuauucuccauaguauu

SEQ ID NO: 406998 - RNA, 19 nt, Artificial Sequence
  Synthetic
agcuauucuccauaguauu

SEQ ID NO: 406999 - RNA, 20 nt, Artificial Sequence
  Synthetic
uagcuauucuccauaguauu

SEQ ID NO: 407000 - RNA, 21 nt, Artificial Sequence
  Synthetic
guagcuauucuccauaguauu

SEQ ID NO: 407001 - RNA, 22 nt, Artificial Sequence
  Synthetic
uguagcuauucuccauaguauu

SEQ ID NO: 407002 - RNA, 23 nt, Artificial Sequence
  Synthetic
uuguagcuauucuccauaguauu

SEQ ID NO: 407003 - RNA, 24 nt, Artificial Sequence
  Synthetic
cuuguagcuauucuccauaguauu

SEQ ID NO: 407004 - RNA, 18 nt, Artificial Sequence
  Synthetic
gcguuuauaauuaguauu

SEQ ID NO: 407005 - RNA, 19 nt, Artificial Sequence
  Synthetic
ugcguuuauaauuaguauu

SEQ ID NO: 407006 - RNA, 20 nt, Artificial Sequence
  Synthetic
cugcguuuauaauuaguauu

SEQ ID NO: 407007 - RNA, 21 nt, Artificial Sequence
  Synthetic
gcugcguuuauaauuaguauu

SEQ ID NO: 407008 - RNA, 22 nt, Artificial Sequence
  Synthetic
agcugcguuuauaauuaguauu

SEQ ID NO: 407009 - RNA, 23 nt, Artificial Sequence
  Synthetic
gagcugcguuuauaauuaguauu

SEQ ID NO: 407010 - RNA, 24 nt, Artificial Sequence
  Synthetic
ugagcugcguuuauaauuaguauu

SEQ ID NO: 407011 - RNA, 18 nt, Artificial Sequence
  Synthetic
cacaauagaguuaguauu

SEQ ID NO: 407012 - RNA, 19 nt, Artificial Sequence
  Synthetic
ucacaauagaguuaguauu

SEQ ID NO: 407013 - RNA, 20 nt, Artificial Sequence
  Synthetic
uucacaauagaguuaguauu

SEQ ID NO: 407014 - RNA, 21 nt, Artificial Sequence
  Synthetic
auucacaauagaguuaguauu

SEQ ID NO: 407015 - RNA, 22 nt, Artificial Sequence
  Synthetic
uauucacaauagaguuaguauu

SEQ ID NO: 407016 - RNA, 23 nt, Artificial Sequence
  Synthetic
guauucacaauagaguuaguauu

SEQ ID NO: 407017 - RNA, 24 nt, Artificial Sequence
  Synthetic
uguauucacaauagaguuaguauu

SEQ ID NO: 407018 - RNA, 18 nt, Artificial Sequence
  Synthetic
agugcagcaauacguauu

SEQ ID NO: 407019 - RNA, 19 nt, Artificial Sequence
  Synthetic
uagugcagcaauacguauu

SEQ ID NO: 407020 - RNA, 20 nt, Artificial Sequence
  Synthetic
cuagugcagcaauacguauu

SEQ ID NO: 407021 - RNA, 21 nt, Artificial Sequence
  Synthetic
ucuagugcagcaauacguauu

SEQ ID NO: 407022 - RNA, 22 nt, Artificial Sequence
  Synthetic
gucuagugcagcaauacguauu

SEQ ID NO: 407023 - RNA, 23 nt, Artificial Sequence
  Synthetic
ggucuagugcagcaauacguauu

SEQ ID NO: 407024 - RNA, 24 nt, Artificial Sequence
  Synthetic
aggucuagugcagcaauacguauu

SEQ ID NO: 407025 - RNA, 18 nt, Artificial Sequence
  Synthetic
uacuaggugauacguauu

SEQ ID NO: 407026 - RNA, 19 nt, Artificial Sequence
  Synthetic
uuacuaggugauacguauu

SEQ ID NO: 407027 - RNA, 20 nt, Artificial Sequence
  Synthetic
auuacuaggugauacguauu

SEQ ID NO: 407028 - RNA, 21 nt, Artificial Sequence
  Synthetic
uauuacuaggugauacguauu

SEQ ID NO: 407029 - RNA, 22 nt, Artificial Sequence
  Synthetic
guauuacuaggugauacguauu

SEQ ID NO: 407030 - RNA, 23 nt, Artificial Sequence
  Synthetic
cguauuacuaggugauacguauu

SEQ ID NO: 407031 - RNA, 24 nt, Artificial Sequence
  Synthetic
gcguauuacuaggugauacguauu

SEQ ID NO: 407032 - RNA, 18 nt, Artificial Sequence
  Synthetic
uagaaguauuaagguauu

SEQ ID NO: 407033 - RNA, 19 nt, Artificial Sequence
  Synthetic
auagaaguauuaagguauu

SEQ ID NO: 407034 - RNA, 20 nt, Artificial Sequence
  Synthetic
aauagaaguauuaagguauu

SEQ ID NO: 407035 - RNA, 21 nt, Artificial Sequence
  Synthetic
uaauagaaguauuaagguauu

SEQ ID NO: 407036 - RNA, 22 nt, Artificial Sequence
  Synthetic
uuaauagaaguauuaagguauu

SEQ ID NO: 407037 - RNA, 23 nt, Artificial Sequence
  Synthetic
uuuaauagaaguauuaagguauu

SEQ ID NO: 407038 - RNA, 24 nt, Artificial Sequence
  Synthetic
uuuuaauagaaguauuaagguauu

SEQ ID NO: 407039 - RNA, 18 nt, Artificial Sequence
  Synthetic
uccucucuucuagguauu

SEQ ID NO: 407040 - RNA, 19 nt, Artificial Sequence
  Synthetic
cuccucucuucuagguauu

SEQ ID NO: 407041 - RNA, 20 nt, Artificial Sequence
  Synthetic
acuccucucuucuagguauu

SEQ ID NO: 407042 - RNA, 21 nt, Artificial Sequence
  Synthetic
aacuccucucuucuagguauu

SEQ ID NO: 407043 - RNA, 22 nt, Artificial Sequence
  Synthetic
caacuccucucuucuagguauu

SEQ ID NO: 407044 - RNA, 23 nt, Artificial Sequence
  Synthetic
ucaacuccucucuucuagguauu

SEQ ID NO: 407045 - RNA, 24 nt, Artificial Sequence
  Synthetic
uucaacuccucucuucuagguauu

SEQ ID NO: 407046 - RNA, 18 nt, Artificial Sequence
  Synthetic
guuaagcuuuaggguauu

SEQ ID NO: 407047 - RNA, 19 nt, Artificial Sequence
  Synthetic
gguuaagcuuuaggguauu

SEQ ID NO: 407048 - RNA, 20 nt, Artificial Sequence
  Synthetic
ugguuaagcuuuaggguauu

SEQ ID NO: 407049 - RNA, 21 nt, Artificial Sequence
  Synthetic
augguuaagcuuuaggguauu

SEQ ID NO: 407050 - RNA, 22 nt, Artificial Sequence
  Synthetic
aaugguuaagcuuuaggguauu

SEQ ID NO: 407051 - RNA, 23 nt, Artificial Sequence
  Synthetic
caaugguuaagcuuuaggguauu

SEQ ID NO: 407052 - RNA, 24 nt, Artificial Sequence
  Synthetic
acaaugguuaagcuuuaggguauu

SEQ ID NO: 407053 - RNA, 18 nt, Artificial Sequence
  Synthetic
uacaaaccaagggguauu

SEQ ID NO: 407054 - RNA, 19 nt, Artificial Sequence
  Synthetic
cuacaaaccaagggguauu

SEQ ID NO: 407055 - RNA, 20 nt, Artificial Sequence
  Synthetic
acuacaaaccaagggguauu

SEQ ID NO: 407056 - RNA, 21 nt, Artificial Sequence
  Synthetic
aacuacaaaccaagggguauu

SEQ ID NO: 407057 - RNA, 22 nt, Artificial Sequence
  Synthetic
gaacuacaaaccaagggguauu

SEQ ID NO: 407058 - RNA, 23 nt, Artificial Sequence
  Synthetic
agaacuacaaaccaagggguauu

SEQ ID NO: 407059 - RNA, 24 nt, Artificial Sequence
  Synthetic
gagaacuacaaaccaagggguauu

SEQ ID NO: 407060 - RNA, 18 nt, Artificial Sequence
  Synthetic
aucaguuuucuggguauu

SEQ ID NO: 407061 - RNA, 19 nt, Artificial Sequence
  Synthetic
aaucaguuuucuggguauu

SEQ ID NO: 407062 - RNA, 20 nt, Artificial Sequence
  Synthetic
aaaucaguuuucuggguauu

SEQ ID NO: 407063 - RNA, 21 nt, Artificial Sequence
  Synthetic
uaaaucaguuuucuggguauu

SEQ ID NO: 407064 - RNA, 22 nt, Artificial Sequence
  Synthetic
guaaaucaguuuucuggguauu

SEQ ID NO: 407065 - RNA, 23 nt, Artificial Sequence
  Synthetic
gguaaaucaguuuucuggguauu

SEQ ID NO: 407066 - RNA, 24 nt, Artificial Sequence
  Synthetic
ugguaaaucaguuuucuggguauu

SEQ ID NO: 407067 - RNA, 18 nt, Artificial Sequence
  Synthetic
aaagcuagaguggguauu

SEQ ID NO: 407068 - RNA, 19 nt, Artificial Sequence
  Synthetic
aaaagcuagaguggguauu

SEQ ID NO: 407069 - RNA, 20 nt, Artificial Sequence
  Synthetic
uaaaagcuagaguggguauu

SEQ ID NO: 407070 - RNA, 21 nt, Artificial Sequence
  Synthetic
uuaaaagcuagaguggguauu

SEQ ID NO: 407071 - RNA, 22 nt, Artificial Sequence
  Synthetic
uuuaaaagcuagaguggguauu

SEQ ID NO: 407072 - RNA, 23 nt, Artificial Sequence
  Synthetic
uuuuaaaagcuagaguggguauu

SEQ ID NO: 407073 - RNA, 24 nt, Artificial Sequence
  Synthetic
uuuuuaaaagcuagaguggguauu

SEQ ID NO: 407074 - RNA, 18 nt, Artificial Sequence
  Synthetic
cuuuucuauucugguauu

SEQ ID NO: 407075 - RNA, 19 nt, Artificial Sequence
  Synthetic
gcuuuucuauucugguauu

SEQ ID NO: 407076 - RNA, 20 nt, Artificial Sequence
  Synthetic
ugcuuuucuauucugguauu

SEQ ID NO: 407077 - RNA, 21 nt, Artificial Sequence
  Synthetic
cugcuuuucuauucugguauu

SEQ ID NO: 407078 - RNA, 22 nt, Artificial Sequence
  Synthetic
acugcuuuucuauucugguauu

SEQ ID NO: 407079 - RNA, 23 nt, Artificial Sequence
  Synthetic
gacugcuuuucuauucugguauu

SEQ ID NO: 407080 - RNA, 24 nt, Artificial Sequence
  Synthetic
ugacugcuuuucuauucugguauu

SEQ ID NO: 407081 - RNA, 18 nt, Artificial Sequence
  Synthetic
cuuuaauaaaaauguauu

SEQ ID NO: 407082 - RNA, 19 nt, Artificial Sequence
  Synthetic
ucuuuaauaaaaauguauu

SEQ ID NO: 407083 - RNA, 20 nt, Artificial Sequence
  Synthetic
uucuuuaauaaaaauguauu

SEQ ID NO: 407084 - RNA, 21 nt, Artificial Sequence
  Synthetic
guucuuuaauaaaaauguauu

SEQ ID NO: 407085 - RNA, 22 nt, Artificial Sequence
  Synthetic
uguucuuuaauaaaaauguauu

SEQ ID NO: 407086 - RNA, 23 nt, Artificial Sequence
  Synthetic
uuguucuuuaauaaaaauguauu

SEQ ID NO: 407087 - RNA, 24 nt, Artificial Sequence
  Synthetic
cuuguucuuuaauaaaaauguauu

SEQ ID NO: 407088 - RNA, 18 nt, Artificial Sequence
  Synthetic
aauguauucgaauguauu

SEQ ID NO: 407089 - RNA, 19 nt, Artificial Sequence
  Synthetic
uaauguauucgaauguauu

SEQ ID NO: 407090 - RNA, 20 nt, Artificial Sequence
  Synthetic
cuaauguauucgaauguauu

SEQ ID NO: 407091 - RNA, 21 nt, Artificial Sequence
  Synthetic
ucuaauguauucgaauguauu

SEQ ID NO: 407092 - RNA, 22 nt, Artificial Sequence
  Synthetic
aucuaauguauucgaauguauu

SEQ ID NO: 407093 - RNA, 23 nt, Artificial Sequence
  Synthetic
aaucuaauguauucgaauguauu

SEQ ID NO: 407094 - RNA, 24 nt, Artificial Sequence
  Synthetic
aaaucuaauguauucgaauguauu

SEQ ID NO: 407095 - RNA, 18 nt, Artificial Sequence
  Synthetic
aauuaacggauauguauu

SEQ ID NO: 407096 - RNA, 19 nt, Artificial Sequence
  Synthetic
aaauuaacggauauguauu

SEQ ID NO: 407097 - RNA, 20 nt, Artificial Sequence
  Synthetic
aaaauuaacggauauguauu

SEQ ID NO: 407098 - RNA, 21 nt, Artificial Sequence
  Synthetic
aaaaauuaacggauauguauu

SEQ ID NO: 407099 - RNA, 22 nt, Artificial Sequence
  Synthetic
aaaaaauuaacggauauguauu

SEQ ID NO: 407100 - RNA, 23 nt, Artificial Sequence
  Synthetic
uaaaaaauuaacggauauguauu

SEQ ID NO: 407101 - RNA, 24 nt, Artificial Sequence
  Synthetic
auaaaaaauuaacggauauguauu

SEQ ID NO: 407102 - RNA, 18 nt, Artificial Sequence
  Synthetic
cgacaugcagccuguauu

SEQ ID NO: 407103 - RNA, 19 nt, Artificial Sequence
  Synthetic
acgacaugcagccuguauu

SEQ ID NO: 407104 - RNA, 20 nt, Artificial Sequence
  Synthetic
cacgacaugcagccuguauu

SEQ ID NO: 407105 - RNA, 21 nt, Artificial Sequence
  Synthetic
acacgacaugcagccuguauu

SEQ ID NO: 407106 - RNA, 22 nt, Artificial Sequence
  Synthetic
gacacgacaugcagccuguauu

SEQ ID NO: 407107 - RNA, 23 nt, Artificial Sequence
  Synthetic
agacacgacaugcagccuguauu

SEQ ID NO: 407108 - RNA, 24 nt, Artificial Sequence
  Synthetic
cagacacgacaugcagccuguauu

SEQ ID NO: 407109 - RNA, 18 nt, Artificial Sequence
  Synthetic
ccaucagugugcuguauu

SEQ ID NO: 407110 - RNA, 19 nt, Artificial Sequence
  Synthetic
cccaucagugugcuguauu

SEQ ID NO: 407111 - RNA, 20 nt, Artificial Sequence
  Synthetic
acccaucagugugcuguauu

SEQ ID NO: 407112 - RNA, 21 nt, Artificial Sequence
  Synthetic
gacccaucagugugcuguauu

SEQ ID NO: 407113 - RNA, 22 nt, Artificial Sequence
  Synthetic
agacccaucagugugcuguauu

SEQ ID NO: 407114 - RNA, 23 nt, Artificial Sequence
  Synthetic
aagacccaucagugugcuguauu

SEQ ID NO: 407115 - RNA, 24 nt, Artificial Sequence
  Synthetic
caagacccaucagugugcuguauu

SEQ ID NO: 407116 - RNA, 18 nt, Artificial Sequence
  Synthetic
auacaaaugaucuguauu

SEQ ID NO: 407117 - RNA, 19 nt, Artificial Sequence
  Synthetic
aauacaaaugaucuguauu

SEQ ID NO: 407118 - RNA, 20 nt, Artificial Sequence
  Synthetic
aaauacaaaugaucuguauu

SEQ ID NO: 407119 - RNA, 21 nt, Artificial Sequence
  Synthetic
caaauacaaaugaucuguauu

SEQ ID NO: 407120 - RNA, 22 nt, Artificial Sequence
  Synthetic
ucaaauacaaaugaucuguauu

SEQ ID NO: 407121 - RNA, 23 nt, Artificial Sequence
  Synthetic
aucaaauacaaaugaucuguauu

SEQ ID NO: 407122 - RNA, 24 nt, Artificial Sequence
  Synthetic
uaucaaauacaaaugaucuguauu

SEQ ID NO: 407123 - RNA, 18 nt, Artificial Sequence
  Synthetic
acagaauagaaguguauu

SEQ ID NO: 407124 - RNA, 19 nt, Artificial Sequence
  Synthetic
cacagaauagaaguguauu

SEQ ID NO: 407125 - RNA, 20 nt, Artificial Sequence
  Synthetic
acacagaauagaaguguauu

SEQ ID NO: 407126 - RNA, 21 nt, Artificial Sequence
  Synthetic
aacacagaauagaaguguauu

SEQ ID NO: 407127 - RNA, 22 nt, Artificial Sequence
  Synthetic
gaacacagaauagaaguguauu

SEQ ID NO: 407128 - RNA, 23 nt, Artificial Sequence
  Synthetic
ugaacacagaauagaaguguauu

SEQ ID NO: 407129 - RNA, 24 nt, Artificial Sequence
  Synthetic
gugaacacagaauagaaguguauu

SEQ ID NO: 407130 - RNA, 18 nt, Artificial Sequence
  Synthetic
aagucaaaccaguguauu

SEQ ID NO: 407131 - RNA, 19 nt, Artificial Sequence
  Synthetic
gaagucaaaccaguguauu

SEQ ID NO: 407132 - RNA, 20 nt, Artificial Sequence
  Synthetic
ggaagucaaaccaguguauu

SEQ ID NO: 407133 - RNA, 21 nt, Artificial Sequence
  Synthetic
uggaagucaaaccaguguauu

SEQ ID NO: 407134 - RNA, 22 nt, Artificial Sequence
  Synthetic
uuggaagucaaaccaguguauu

SEQ ID NO: 407135 - RNA, 23 nt, Artificial Sequence
  Synthetic
uuuggaagucaaaccaguguauu

SEQ ID NO: 407136 - RNA, 24 nt, Artificial Sequence
  Synthetic
auuuggaagucaaaccaguguauu

SEQ ID NO: 407137 - RNA, 18 nt, Artificial Sequence
  Synthetic
ccaucagugugguguauu

SEQ ID NO: 407138 - RNA, 19 nt, Artificial Sequence
  Synthetic
accaucagugugguguauu

SEQ ID NO: 407139 - RNA, 20 nt, Artificial Sequence
  Synthetic
gaccaucagugugguguauu

SEQ ID NO: 407140 - RNA, 21 nt, Artificial Sequence
  Synthetic
ggaccaucagugugguguauu

SEQ ID NO: 407141 - RNA, 22 nt, Artificial Sequence
  Synthetic
aggaccaucagugugguguauu

SEQ ID NO: 407142 - RNA, 23 nt, Artificial Sequence
  Synthetic
caggaccaucagugugguguauu

SEQ ID NO: 407143 - RNA, 24 nt, Artificial Sequence
  Synthetic
ucaggaccaucagugugguguauu

SEQ ID NO: 407144 - RNA, 18 nt, Artificial Sequence
  Synthetic
guaaaucucauguguauu

SEQ ID NO: 407145 - RNA, 19 nt, Artificial Sequence
  Synthetic
uguaaaucucauguguauu

SEQ ID NO: 407146 - RNA, 20 nt, Artificial Sequence
  Synthetic
guguaaaucucauguguauu

SEQ ID NO: 407147 - RNA, 21 nt, Artificial Sequence
  Synthetic
uguguaaaucucauguguauu

SEQ ID NO: 407148 - RNA, 22 nt, Artificial Sequence
  Synthetic
auguguaaaucucauguguauu

SEQ ID NO: 407149 - RNA, 23 nt, Artificial Sequence
  Synthetic
aauguguaaaucucauguguauu

SEQ ID NO: 407150 - RNA, 24 nt, Artificial Sequence
  Synthetic
gaauguguaaaucucauguguauu

SEQ ID NO: 407151 - RNA, 18 nt, Artificial Sequence
  Synthetic
uuuguacuaaauuguauu

SEQ ID NO: 407152 - RNA, 19 nt, Artificial Sequence
  Synthetic
auuuguacuaaauuguauu

SEQ ID NO: 407153 - RNA, 20 nt, Artificial Sequence
  Synthetic
uauuuguacuaaauuguauu

SEQ ID NO: 407154 - RNA, 21 nt, Artificial Sequence
  Synthetic
uuauuuguacuaaauuguauu

SEQ ID NO: 407155 - RNA, 22 nt, Artificial Sequence
  Synthetic
uuuauuuguacuaaauuguauu

SEQ ID NO: 407156 - RNA, 23 nt, Artificial Sequence
  Synthetic
cuuuauuuguacuaaauuguauu

SEQ ID NO: 407157 - RNA, 24 nt, Artificial Sequence
  Synthetic
acuuuauuuguacuaaauuguauu

SEQ ID NO: 407158 - RNA, 18 nt, Artificial Sequence
  Synthetic
acugguuuauauuguauu

SEQ ID NO: 407159 - RNA, 19 nt, Artificial Sequence
  Synthetic
aacugguuuauauuguauu

SEQ ID NO: 407160 - RNA, 20 nt, Artificial Sequence
  Synthetic
gaacugguuuauauuguauu

SEQ ID NO: 407161 - RNA, 21 nt, Artificial Sequence
  Synthetic
ugaacugguuuauauuguauu

SEQ ID NO: 407162 - RNA, 22 nt, Artificial Sequence
  Synthetic
uugaacugguuuauauuguauu

SEQ ID NO: 407163 - RNA, 23 nt, Artificial Sequence
  Synthetic
auugaacugguuuauauuguauu

SEQ ID NO: 407164 - RNA, 24 nt, Artificial Sequence
  Synthetic
cauugaacugguuuauauuguauu

SEQ ID NO: 407165 - RNA, 18 nt, Artificial Sequence
  Synthetic
uuuuuaauuuauuguauu

SEQ ID NO: 407166 - RNA, 19 nt, Artificial Sequence
  Synthetic
uuuuuuaauuuauuguauu

SEQ ID NO: 407167 - RNA, 20 nt, Artificial Sequence
  Synthetic
uuuuuuuaauuuauuguauu

SEQ ID NO: 407168 - RNA, 21 nt, Artificial Sequence
  Synthetic
guuuuuuuaauuuauuguauu

SEQ ID NO: 407169 - RNA, 22 nt, Artificial Sequence
  Synthetic
aguuuuuuuaauuuauuguauu

SEQ ID NO: 407170 - RNA, 23 nt, Artificial Sequence
  Synthetic
aaguuuuuuuaauuuauuguauu

SEQ ID NO: 407171 - RNA, 24 nt, Artificial Sequence
  Synthetic
gaaguuuuuuuaauuuauuguauu

SEQ ID NO: 407172 - RNA, 18 nt, Artificial Sequence
  Synthetic
aguuaaagaacuuguauu

SEQ ID NO: 407173 - RNA, 19 nt, Artificial Sequence
  Synthetic
gaguuaaagaacuuguauu

SEQ ID NO: 407174 - RNA, 20 nt, Artificial Sequence
  Synthetic
ugaguuaaagaacuuguauu

SEQ ID NO: 407175 - RNA, 21 nt, Artificial Sequence
  Synthetic
uugaguuaaagaacuuguauu

SEQ ID NO: 407176 - RNA, 22 nt, Artificial Sequence
  Synthetic
uuugaguuaaagaacuuguauu

SEQ ID NO: 407177 - RNA, 23 nt, Artificial Sequence
  Synthetic
guuugaguuaaagaacuuguauu

SEQ ID NO: 407178 - RNA, 24 nt, Artificial Sequence
  Synthetic
uguuugaguuaaagaacuuguauu

SEQ ID NO: 407179 - RNA, 18 nt, Artificial Sequence
  Synthetic
gccaauuaaauuuguauu

SEQ ID NO: 407180 - RNA, 19 nt, Artificial Sequence
  Synthetic
agccaauuaaauuuguauu

SEQ ID NO: 407181 - RNA, 20 nt, Artificial Sequence
  Synthetic
aagccaauuaaauuuguauu

SEQ ID NO: 407182 - RNA, 21 nt, Artificial Sequence
  Synthetic
uaagccaauuaaauuuguauu

SEQ ID NO: 407183 - RNA, 22 nt, Artificial Sequence
  Synthetic
auaagccaauuaaauuuguauu

SEQ ID NO: 407184 - RNA, 23 nt, Artificial Sequence
  Synthetic
uauaagccaauuaaauuuguauu

SEQ ID NO: 407185 - RNA, 24 nt, Artificial Sequence
  Synthetic
auauaagccaauuaaauuuguauu

SEQ ID NO: 407186 - RNA, 18 nt, Artificial Sequence
  Synthetic
ucagauuccauuuguauu

SEQ ID NO: 407187 - RNA, 19 nt, Artificial Sequence
  Synthetic
aucagauuccauuuguauu

SEQ ID NO: 407188 - RNA, 20 nt, Artificial Sequence
  Synthetic
caucagauuccauuuguauu

SEQ ID NO: 407189 - RNA, 21 nt, Artificial Sequence
  Synthetic
ccaucagauuccauuuguauu

SEQ ID NO: 407190 - RNA, 22 nt, Artificial Sequence
  Synthetic
cccaucagauuccauuuguauu

SEQ ID NO: 407191 - RNA, 23 nt, Artificial Sequence
  Synthetic
ccccaucagauuccauuuguauu

SEQ ID NO: 407192 - RNA, 24 nt, Artificial Sequence
  Synthetic
cccccaucagauuccauuuguauu

SEQ ID NO: 407193 - RNA, 18 nt, Artificial Sequence
  Synthetic
ucacuuugauuuuguauu

SEQ ID NO: 407194 - RNA, 19 nt, Artificial Sequence
  Synthetic
uucacuuugauuuuguauu

SEQ ID NO: 407195 - RNA, 20 nt, Artificial Sequence
  Synthetic
uuucacuuugauuuuguauu

SEQ ID NO: 407196 - RNA, 21 nt, Artificial Sequence
  Synthetic
uuuucacuuugauuuuguauu

SEQ ID NO: 407197 - RNA, 22 nt, Artificial Sequence
  Synthetic
cuuuucacuuugauuuuguauu

SEQ ID NO: 407198 - RNA, 23 nt, Artificial Sequence
  Synthetic
ucuuuucacuuugauuuuguauu

SEQ ID NO: 407199 - RNA, 24 nt, Artificial Sequence
  Synthetic
aucuuuucacuuugauuuuguauu

SEQ ID NO: 407200 - RNA, 18 nt, Artificial Sequence
  Synthetic
accaucagcuuuuguauu

SEQ ID NO: 407201 - RNA, 19 nt, Artificial Sequence
  Synthetic
caccaucagcuuuuguauu

SEQ ID NO: 407202 - RNA, 20 nt, Artificial Sequence
  Synthetic
ucaccaucagcuuuuguauu

SEQ ID NO: 407203 - RNA, 21 nt, Artificial Sequence
  Synthetic
uucaccaucagcuuuuguauu

SEQ ID NO: 407204 - RNA, 22 nt, Artificial Sequence
  Synthetic
auucaccaucagcuuuuguauu

SEQ ID NO: 407205 - RNA, 23 nt, Artificial Sequence
  Synthetic
gauucaccaucagcuuuuguauu

SEQ ID NO: 407206 - RNA, 24 nt, Artificial Sequence
  Synthetic
ugauucaccaucagcuuuuguauu

SEQ ID NO: 407207 - RNA, 18 nt, Artificial Sequence
  Synthetic
uauccaaaaaaaauuauu

SEQ ID NO: 407208 - RNA, 19 nt, Artificial Sequence
  Synthetic
auauccaaaaaaaauuauu

SEQ ID NO: 407209 - RNA, 20 nt, Artificial Sequence
  Synthetic
cauauccaaaaaaaauuauu

SEQ ID NO: 407210 - RNA, 21 nt, Artificial Sequence
  Synthetic
ucauauccaaaaaaaauuauu

SEQ ID NO: 407211 - RNA, 22 nt, Artificial Sequence
  Synthetic
gucauauccaaaaaaaauuauu

SEQ ID NO: 407212 - RNA, 23 nt, Artificial Sequence
  Synthetic
cgucauauccaaaaaaaauuauu

SEQ ID NO: 407213 - RNA, 24 nt, Artificial Sequence
  Synthetic
gcgucauauccaaaaaaaauuauu

SEQ ID NO: 407214 - RNA, 18 nt, Artificial Sequence
  Synthetic
aguagauggaaaauuauu

SEQ ID NO: 407215 - RNA, 19 nt, Artificial Sequence
  Synthetic
caguagauggaaaauuauu

SEQ ID NO: 407216 - RNA, 20 nt, Artificial Sequence
  Synthetic
ucaguagauggaaaauuauu

SEQ ID NO: 407217 - RNA, 21 nt, Artificial Sequence
  Synthetic
gucaguagauggaaaauuauu

SEQ ID NO: 407218 - RNA, 22 nt, Artificial Sequence
  Synthetic
agucaguagauggaaaauuauu

SEQ ID NO: 407219 - RNA, 23 nt, Artificial Sequence
  Synthetic
gagucaguagauggaaaauuauu

SEQ ID NO: 407220 - RNA, 24 nt, Artificial Sequence
  Synthetic
ggagucaguagauggaaaauuauu

SEQ ID NO: 407221 - RNA, 18 nt, Artificial Sequence
  Synthetic
gugauauuacaaauuauu

SEQ ID NO: 407222 - RNA, 19 nt, Artificial Sequence
  Synthetic
ugugauauuacaaauuauu

SEQ ID NO: 407223 - RNA, 20 nt, Artificial Sequence
  Synthetic
augugauauuacaaauuauu

SEQ ID NO: 407224 - RNA, 21 nt, Artificial Sequence
  Synthetic
gaugugauauuacaaauuauu

SEQ ID NO: 407225 - RNA, 22 nt, Artificial Sequence
  Synthetic
agaugugauauuacaaauuauu

SEQ ID NO: 407226 - RNA, 23 nt, Artificial Sequence
  Synthetic
uagaugugauauuacaaauuauu

SEQ ID NO: 407227 - RNA, 24 nt, Artificial Sequence
  Synthetic
uuagaugugauauuacaaauuauu

SEQ ID NO: 407228 - RNA, 18 nt, Artificial Sequence
  Synthetic
uaauauuuucaaauuauu

SEQ ID NO: 407229 - RNA, 19 nt, Artificial Sequence
  Synthetic
auaauauuuucaaauuauu

SEQ ID NO: 407230 - RNA, 20 nt, Artificial Sequence
  Synthetic
gauaauauuuucaaauuauu

SEQ ID NO: 407231 - RNA, 21 nt, Artificial Sequence
  Synthetic
agauaauauuuucaaauuauu

SEQ ID NO: 407232 - RNA, 22 nt, Artificial Sequence
  Synthetic
aagauaauauuuucaaauuauu

SEQ ID NO: 407233 - RNA, 23 nt, Artificial Sequence
  Synthetic
aaagauaauauuuucaaauuauu

SEQ ID NO: 407234 - RNA, 24 nt, Artificial Sequence
  Synthetic
caaagauaauauuuucaaauuauu

SEQ ID NO: 407235 - RNA, 18 nt, Artificial Sequence
  Synthetic
ucagaguaauaaauuauu

SEQ ID NO: 407236 - RNA, 19 nt, Artificial Sequence
  Synthetic
uucagaguaauaaauuauu

SEQ ID NO: 407237 - RNA, 20 nt, Artificial Sequence
  Synthetic
auucagaguaauaaauuauu

SEQ ID NO: 407238 - RNA, 21 nt, Artificial Sequence
  Synthetic
aauucagaguaauaaauuauu

SEQ ID NO: 407239 - RNA, 22 nt, Artificial Sequence
  Synthetic
aaauucagaguaauaaauuauu

SEQ ID NO: 407240 - RNA, 23 nt, Artificial Sequence
  Synthetic
aaaauucagaguaauaaauuauu

SEQ ID NO: 407241 - RNA, 24 nt, Artificial Sequence
  Synthetic
gaaaauucagaguaauaaauuauu

SEQ ID NO: 407242 - RNA, 18 nt, Artificial Sequence
  Synthetic
uuuuuugcauaaauuauu

SEQ ID NO: 407243 - RNA, 19 nt, Artificial Sequence
  Synthetic
auuuuuugcauaaauuauu

SEQ ID NO: 407244 - RNA, 20 nt, Artificial Sequence
  Synthetic
aauuuuuugcauaaauuauu

SEQ ID NO: 407245 - RNA, 21 nt, Artificial Sequence
  Synthetic
caauuuuuugcauaaauuauu

SEQ ID NO: 407246 - RNA, 22 nt, Artificial Sequence
  Synthetic
acaauuuuuugcauaaauuauu

SEQ ID NO: 407247 - RNA, 23 nt, Artificial Sequence
  Synthetic
cacaauuuuuugcauaaauuauu

SEQ ID NO: 407248 - RNA, 24 nt, Artificial Sequence
  Synthetic
ccacaauuuuuugcauaaauuauu

SEQ ID NO: 407249 - RNA, 18 nt, Artificial Sequence
  Synthetic
aagauguuauaaauuauu

SEQ ID NO: 407250 - RNA, 19 nt, Artificial Sequence
  Synthetic
gaagauguuauaaauuauu

SEQ ID NO: 407251 - RNA, 20 nt, Artificial Sequence
  Synthetic
ugaagauguuauaaauuauu

SEQ ID NO: 407252 - RNA, 21 nt, Artificial Sequence
  Synthetic
cugaagauguuauaaauuauu

SEQ ID NO: 407253 - RNA, 22 nt, Artificial Sequence
  Synthetic
acugaagauguuauaaauuauu

SEQ ID NO: 407254 - RNA, 23 nt, Artificial Sequence
  Synthetic
aacugaagauguuauaaauuauu

SEQ ID NO: 407255 - RNA, 24 nt, Artificial Sequence
  Synthetic
aaacugaagauguuauaaauuauu

SEQ ID NO: 407256 - RNA, 18 nt, Artificial Sequence
  Synthetic
uaacuuuaaacaauuauu

SEQ ID NO: 407257 - RNA, 19 nt, Artificial Sequence
  Synthetic
cuaacuuuaaacaauuauu

SEQ ID NO: 407258 - RNA, 20 nt, Artificial Sequence
  Synthetic
gcuaacuuuaaacaauuauu

SEQ ID NO: 407259 - RNA, 21 nt, Artificial Sequence
  Synthetic
ggcuaacuuuaaacaauuauu

SEQ ID NO: 407260 - RNA, 22 nt, Artificial Sequence
  Synthetic
uggcuaacuuuaaacaauuauu

SEQ ID NO: 407261 - RNA, 23 nt, Artificial Sequence
  Synthetic
cuggcuaacuuuaaacaauuauu

SEQ ID NO: 407262 - RNA, 24 nt, Artificial Sequence
  Synthetic
ccuggcuaacuuuaaacaauuauu

SEQ ID NO: 407263 - RNA, 18 nt, Artificial Sequence
  Synthetic
auguauuuuucaauuauu

SEQ ID NO: 407264 - RNA, 19 nt, Artificial Sequence
  Synthetic
cauguauuuuucaauuauu

SEQ ID NO: 407265 - RNA, 20 nt, Artificial Sequence
  Synthetic
ucauguauuuuucaauuauu

SEQ ID NO: 407266 - RNA, 21 nt, Artificial Sequence
  Synthetic
aucauguauuuuucaauuauu

SEQ ID NO: 407267 - RNA, 22 nt, Artificial Sequence
  Synthetic
caucauguauuuuucaauuauu

SEQ ID NO: 407268 - RNA, 23 nt, Artificial Sequence
  Synthetic
ucaucauguauuuuucaauuauu

SEQ ID NO: 407269 - RNA, 24 nt, Artificial Sequence
  Synthetic
gucaucauguauuuuucaauuauu

SEQ ID NO: 407270 - RNA, 18 nt, Artificial Sequence
  Synthetic
acauaucacagaauuauu

SEQ ID NO: 407271 - RNA, 19 nt, Artificial Sequence
  Synthetic
uacauaucacagaauuauu

SEQ ID NO: 407272 - RNA, 20 nt, Artificial Sequence
  Synthetic
auacauaucacagaauuauu

SEQ ID NO: 407273 - RNA, 21 nt, Artificial Sequence
  Synthetic
aauacauaucacagaauuauu

SEQ ID NO: 407274 - RNA, 22 nt, Artificial Sequence
  Synthetic
aaauacauaucacagaauuauu

SEQ ID NO: 407275 - RNA, 23 nt, Artificial Sequence
  Synthetic
gaaauacauaucacagaauuauu

SEQ ID NO: 407276 - RNA, 24 nt, Artificial Sequence
  Synthetic
agaaauacauaucacagaauuauu

SEQ ID NO: 407277 - RNA, 18 nt, Artificial Sequence
  Synthetic
aauagcaggugaauuauu

SEQ ID NO: 407278 - RNA, 19 nt, Artificial Sequence
  Synthetic
uaauagcaggugaauuauu

SEQ ID NO: 407279 - RNA, 20 nt, Artificial Sequence
  Synthetic
uuaauagcaggugaauuauu

SEQ ID NO: 407280 - RNA, 21 nt, Artificial Sequence
  Synthetic
uuuaauagcaggugaauuauu

SEQ ID NO: 407281 - RNA, 22 nt, Artificial Sequence
  Synthetic
guuuaauagcaggugaauuauu

SEQ ID NO: 407282 - RNA, 23 nt, Artificial Sequence
  Synthetic
aguuuaauagcaggugaauuauu

SEQ ID NO: 407283 - RNA, 24 nt, Artificial Sequence
  Synthetic
aaguuuaauagcaggugaauuauu

SEQ ID NO: 407284 - RNA, 18 nt, Artificial Sequence
  Synthetic
uauuuaaaaauaauuauu

SEQ ID NO: 407285 - RNA, 19 nt, Artificial Sequence
  Synthetic
uuauuuaaaaauaauuauu

SEQ ID NO: 407286 - RNA, 20 nt, Artificial Sequence
  Synthetic
cuuauuuaaaaauaauuauu

SEQ ID NO: 407287 - RNA, 21 nt, Artificial Sequence
  Synthetic
ccuuauuuaaaaauaauuauu

SEQ ID NO: 407288 - RNA, 22 nt, Artificial Sequence
  Synthetic
cccuuauuuaaaaauaauuauu

SEQ ID NO: 407289 - RNA, 23 nt, Artificial Sequence
  Synthetic
ucccuuauuuaaaaauaauuauu

SEQ ID NO: 407290 - RNA, 24 nt, Artificial Sequence
  Synthetic
uucccuuauuuaaaaauaauuauu

SEQ ID NO: 407291 - RNA, 18 nt, Artificial Sequence
  Synthetic
ugauucugaauaauuauu

SEQ ID NO: 407292 - RNA, 19 nt, Artificial Sequence
  Synthetic
uugauucugaauaauuauu

SEQ ID NO: 407293 - RNA, 20 nt, Artificial Sequence
  Synthetic
auugauucugaauaauuauu

SEQ ID NO: 407294 - RNA, 21 nt, Artificial Sequence
  Synthetic
cauugauucugaauaauuauu

SEQ ID NO: 407295 - RNA, 22 nt, Artificial Sequence
  Synthetic
ucauugauucugaauaauuauu

SEQ ID NO: 407296 - RNA, 23 nt, Artificial Sequence
  Synthetic
uucauugauucugaauaauuauu

SEQ ID NO: 407297 - RNA, 24 nt, Artificial Sequence
  Synthetic
guucauugauucugaauaauuauu

SEQ ID NO: 407298 - RNA, 18 nt, Artificial Sequence
  Synthetic
accuuaagauuaauuauu

SEQ ID NO: 407299 - RNA, 19 nt, Artificial Sequence
  Synthetic
aaccuuaagauuaauuauu

SEQ ID NO: 407300 - RNA, 20 nt, Artificial Sequence
  Synthetic
gaaccuuaagauuaauuauu

SEQ ID NO: 407301 - RNA, 21 nt, Artificial Sequence
  Synthetic
ugaaccuuaagauuaauuauu

SEQ ID NO: 407302 - RNA, 22 nt, Artificial Sequence
  Synthetic
gugaaccuuaagauuaauuauu

SEQ ID NO: 407303 - RNA, 23 nt, Artificial Sequence
  Synthetic
agugaaccuuaagauuaauuauu

SEQ ID NO: 407304 - RNA, 24 nt, Artificial Sequence
  Synthetic
aagugaaccuuaagauuaauuauu

SEQ ID NO: 407305 - RNA, 18 nt, Artificial Sequence
  Synthetic
uacugaguuuuaauuauu

SEQ ID NO: 407306 - RNA, 19 nt, Artificial Sequence
  Synthetic
uuacugaguuuuaauuauu

SEQ ID NO: 407307 - RNA, 20 nt, Artificial Sequence
  Synthetic
cuuacugaguuuuaauuauu

SEQ ID NO: 407308 - RNA, 21 nt, Artificial Sequence
  Synthetic
acuuacugaguuuuaauuauu

SEQ ID NO: 407309 - RNA, 22 nt, Artificial Sequence
  Synthetic
cacuuacugaguuuuaauuauu

SEQ ID NO: 407310 - RNA, 23 nt, Artificial Sequence
  Synthetic
ccacuuacugaguuuuaauuauu

SEQ ID NO: 407311 - RNA, 24 nt, Artificial Sequence
  Synthetic
gccacuuacugaguuuuaauuauu

SEQ ID NO: 407312 - RNA, 18 nt, Artificial Sequence
  Synthetic
cuuucuuuuuuaauuauu

SEQ ID NO: 407313 - RNA, 19 nt, Artificial Sequence
  Synthetic
ucuuucuuuuuuaauuauu

SEQ ID NO: 407314 - RNA, 20 nt, Artificial Sequence
  Synthetic
cucuuucuuuuuuaauuauu

SEQ ID NO: 407315 - RNA, 21 nt, Artificial Sequence
  Synthetic
acucuuucuuuuuuaauuauu

SEQ ID NO: 407316 - RNA, 22 nt, Artificial Sequence
  Synthetic
cacucuuucuuuuuuaauuauu

SEQ ID NO: 407317 - RNA, 23 nt, Artificial Sequence
  Synthetic
ccacucuuucuuuuuuaauuauu

SEQ ID NO: 407318 - RNA, 24 nt, Artificial Sequence
  Synthetic
cccacucuuucuuuuuuaauuauu

SEQ ID NO: 407319 - RNA, 18 nt, Artificial Sequence
  Synthetic
gggcuuuaaaacauuauu

SEQ ID NO: 407320 - RNA, 19 nt, Artificial Sequence
  Synthetic
ugggcuuuaaaacauuauu

SEQ ID NO: 407321 - RNA, 20 nt, Artificial Sequence
  Synthetic
uugggcuuuaaaacauuauu

SEQ ID NO: 407322 - RNA, 21 nt, Artificial Sequence
  Synthetic
guugggcuuuaaaacauuauu

SEQ ID NO: 407323 - RNA, 22 nt, Artificial Sequence
  Synthetic
uguugggcuuuaaaacauuauu

SEQ ID NO: 407324 - RNA, 23 nt, Artificial Sequence
  Synthetic
uuguugggcuuuaaaacauuauu

SEQ ID NO: 407325 - RNA, 24 nt, Artificial Sequence
  Synthetic
auuguugggcuuuaaaacauuauu

SEQ ID NO: 407326 - RNA, 18 nt, Artificial Sequence
  Synthetic
acuacacugaacauuauu

SEQ ID NO: 407327 - RNA, 19 nt, Artificial Sequence
  Synthetic
uacuacacugaacauuauu

SEQ ID NO: 407328 - RNA, 20 nt, Artificial Sequence
  Synthetic
uuacuacacugaacauuauu

SEQ ID NO: 407329 - RNA, 21 nt, Artificial Sequence
  Synthetic
uuuacuacacugaacauuauu

SEQ ID NO: 407330 - RNA, 22 nt, Artificial Sequence
  Synthetic
uuuuacuacacugaacauuauu

SEQ ID NO: 407331 - RNA, 23 nt, Artificial Sequence
  Synthetic
auuuuacuacacugaacauuauu

SEQ ID NO: 407332 - RNA, 24 nt, Artificial Sequence
  Synthetic
aauuuuacuacacugaacauuauu

SEQ ID NO: 407333 - RNA, 18 nt, Artificial Sequence
  Synthetic
ucaauuauuaacauuauu

SEQ ID NO: 407334 - RNA, 19 nt, Artificial Sequence
  Synthetic
uucaauuauuaacauuauu

SEQ ID NO: 407335 - RNA, 20 nt, Artificial Sequence
  Synthetic
cuucaauuauuaacauuauu

SEQ ID NO: 407336 - RNA, 21 nt, Artificial Sequence
  Synthetic
ccuucaauuauuaacauuauu

SEQ ID NO: 407337 - RNA, 22 nt, Artificial Sequence
  Synthetic
gccuucaauuauuaacauuauu

SEQ ID NO: 407338 - RNA, 23 nt, Artificial Sequence
  Synthetic
agccuucaauuauuaacauuauu

SEQ ID NO: 407339 - RNA, 24 nt, Artificial Sequence
  Synthetic
aagccuucaauuauuaacauuauu

SEQ ID NO: 407340 - RNA, 18 nt, Artificial Sequence
  Synthetic
uauucauguuacauuauu

SEQ ID NO: 407341 - RNA, 19 nt, Artificial Sequence
  Synthetic
uuauucauguuacauuauu

SEQ ID NO: 407342 - RNA, 20 nt, Artificial Sequence
  Synthetic
uuuauucauguuacauuauu

SEQ ID NO: 407343 - RNA, 21 nt, Artificial Sequence
  Synthetic
cuuuauucauguuacauuauu

SEQ ID NO: 407344 - RNA, 22 nt, Artificial Sequence
  Synthetic
ucuuuauucauguuacauuauu

SEQ ID NO: 407345 - RNA, 23 nt, Artificial Sequence
  Synthetic
cucuuuauucauguuacauuauu

SEQ ID NO: 407346 - RNA, 24 nt, Artificial Sequence
  Synthetic
ccucuuuauucauguuacauuauu

SEQ ID NO: 407347 - RNA, 18 nt, Artificial Sequence
  Synthetic
aacaacgcuaccauuauu

SEQ ID NO: 407348 - RNA, 19 nt, Artificial Sequence
  Synthetic
aaacaacgcuaccauuauu

SEQ ID NO: 407349 - RNA, 20 nt, Artificial Sequence
  Synthetic
aaaacaacgcuaccauuauu

SEQ ID NO: 407350 - RNA, 21 nt, Artificial Sequence
  Synthetic
gaaaacaacgcuaccauuauu

SEQ ID NO: 407351 - RNA, 22 nt, Artificial Sequence
  Synthetic
agaaaacaacgcuaccauuauu

SEQ ID NO: 407352 - RNA, 23 nt, Artificial Sequence
  Synthetic
uagaaaacaacgcuaccauuauu

SEQ ID NO: 407353 - RNA, 24 nt, Artificial Sequence
  Synthetic
uuagaaaacaacgcuaccauuauu

SEQ ID NO: 407354 - RNA, 18 nt, Artificial Sequence
  Synthetic
cagaaauaucccauuauu

SEQ ID NO: 407355 - RNA, 19 nt, Artificial Sequence
  Synthetic
acagaaauaucccauuauu

SEQ ID NO: 407356 - RNA, 20 nt, Artificial Sequence
  Synthetic
uacagaaauaucccauuauu

SEQ ID NO: 407357 - RNA, 21 nt, Artificial Sequence
  Synthetic
guacagaaauaucccauuauu

SEQ ID NO: 407358 - RNA, 22 nt, Artificial Sequence
  Synthetic
gguacagaaauaucccauuauu

SEQ ID NO: 407359 - RNA, 23 nt, Artificial Sequence
  Synthetic
ggguacagaaauaucccauuauu

SEQ ID NO: 407360 - RNA, 24 nt, Artificial Sequence
  Synthetic
aggguacagaaauaucccauuauu

SEQ ID NO: 407361 - RNA, 18 nt, Artificial Sequence
  Synthetic
uaacucuagcagauuauu

SEQ ID NO: 407362 - RNA, 19 nt, Artificial Sequence
  Synthetic
uuaacucuagcagauuauu

SEQ ID NO: 407363 - RNA, 20 nt, Artificial Sequence
  Synthetic
uuuaacucuagcagauuauu

SEQ ID NO: 407364 - RNA, 21 nt, Artificial Sequence
  Synthetic
auuuaacucuagcagauuauu

SEQ ID NO: 407365 - RNA, 22 nt, Artificial Sequence
  Synthetic
uauuuaacucuagcagauuauu

SEQ ID NO: 407366 - RNA, 23 nt, Artificial Sequence
  Synthetic
guauuuaacucuagcagauuauu

SEQ ID NO: 407367 - RNA, 24 nt, Artificial Sequence
  Synthetic
uguauuuaacucuagcagauuauu

SEQ ID NO: 407368 - RNA, 18 nt, Artificial Sequence
  Synthetic
uauuuucccuagauuauu

SEQ ID NO: 407369 - RNA, 19 nt, Artificial Sequence
  Synthetic
guauuuucccuagauuauu

SEQ ID NO: 407370 - RNA, 20 nt, Artificial Sequence
  Synthetic
cguauuuucccuagauuauu

SEQ ID NO: 407371 - RNA, 21 nt, Artificial Sequence
  Synthetic
gcguauuuucccuagauuauu

SEQ ID NO: 407372 - RNA, 22 nt, Artificial Sequence
  Synthetic
ggcguauuuucccuagauuauu

SEQ ID NO: 407373 - RNA, 23 nt, Artificial Sequence
  Synthetic
aggcguauuuucccuagauuauu

SEQ ID NO: 407374 - RNA, 24 nt, Artificial Sequence
  Synthetic
gaggcguauuuucccuagauuauu

SEQ ID NO: 407375 - RNA, 18 nt, Artificial Sequence
  Synthetic
acuaaaauuaugauuauu

SEQ ID NO: 407376 - RNA, 19 nt, Artificial Sequence
  Synthetic
aacuaaaauuaugauuauu

SEQ ID NO: 407377 - RNA, 20 nt, Artificial Sequence
  Synthetic
aaacuaaaauuaugauuauu

SEQ ID NO: 407378 - RNA, 21 nt, Artificial Sequence
  Synthetic
caaacuaaaauuaugauuauu

SEQ ID NO: 407379 - RNA, 22 nt, Artificial Sequence
  Synthetic
acaaacuaaaauuaugauuauu

SEQ ID NO: 407380 - RNA, 23 nt, Artificial Sequence
  Synthetic
uacaaacuaaaauuaugauuauu

SEQ ID NO: 407381 - RNA, 24 nt, Artificial Sequence
  Synthetic
uuacaaacuaaaauuaugauuauu

SEQ ID NO: 407382 - RNA, 18 nt, Artificial Sequence
  Synthetic
agagaucaggugauuauu

SEQ ID NO: 407383 - RNA, 19 nt, Artificial Sequence
  Synthetic
aagagaucaggugauuauu

SEQ ID NO: 407384 - RNA, 20 nt, Artificial Sequence
  Synthetic
gaagagaucaggugauuauu

SEQ ID NO: 407385 - RNA, 21 nt, Artificial Sequence
  Synthetic
ugaagagaucaggugauuauu

SEQ ID NO: 407386 - RNA, 22 nt, Artificial Sequence
  Synthetic
uugaagagaucaggugauuauu

SEQ ID NO: 407387 - RNA, 23 nt, Artificial Sequence
  Synthetic
uuugaagagaucaggugauuauu

SEQ ID NO: 407388 - RNA, 24 nt, Artificial Sequence
  Synthetic
auuugaagagaucaggugauuauu

SEQ ID NO: 407389 - RNA, 18 nt, Artificial Sequence
  Synthetic
ugagugucugugauuauu

SEQ ID NO: 407390 - RNA, 19 nt, Artificial Sequence
  Synthetic
augagugucugugauuauu

SEQ ID NO: 407391 - RNA, 20 nt, Artificial Sequence
  Synthetic
gaugagugucugugauuauu

SEQ ID NO: 407392 - RNA, 21 nt, Artificial Sequence
  Synthetic
ugaugagugucugugauuauu

SEQ ID NO: 407393 - RNA, 22 nt, Artificial Sequence
  Synthetic
cugaugagugucugugauuauu

SEQ ID NO: 407394 - RNA, 23 nt, Artificial Sequence
  Synthetic
ucugaugagugucugugauuauu

SEQ ID NO: 407395 - RNA, 24 nt, Artificial Sequence
  Synthetic
gucugaugagugucugugauuauu

SEQ ID NO: 407396 - RNA, 18 nt, Artificial Sequence
  Synthetic
cuggcaaaauauauuauu

SEQ ID NO: 407397 - RNA, 19 nt, Artificial Sequence
  Synthetic
ccuggcaaaauauauuauu

SEQ ID NO: 407398 - RNA, 20 nt, Artificial Sequence
  Synthetic
accuggcaaaauauauuauu

SEQ ID NO: 407399 - RNA, 21 nt, Artificial Sequence
  Synthetic
aaccuggcaaaauauauuauu

SEQ ID NO: 407400 - RNA, 22 nt, Artificial Sequence
  Synthetic
uaaccuggcaaaauauauuauu

SEQ ID NO: 407401 - RNA, 23 nt, Artificial Sequence
  Synthetic
auaaccuggcaaaauauauuauu

SEQ ID NO: 407402 - RNA, 24 nt, Artificial Sequence
  Synthetic
uauaaccuggcaaaauauauuauu

SEQ ID NO: 407403 - RNA, 18 nt, Artificial Sequence
  Synthetic
uauucauaauauauuauu

SEQ ID NO: 407404 - RNA, 19 nt, Artificial Sequence
  Synthetic
uuauucauaauauauuauu

SEQ ID NO: 407405 - RNA, 20 nt, Artificial Sequence
  Synthetic
auuauucauaauauauuauu

SEQ ID NO: 407406 - RNA, 21 nt, Artificial Sequence
  Synthetic
uauuauucauaauauauuauu

SEQ ID NO: 407407 - RNA, 22 nt, Artificial Sequence
  Synthetic
uuauuauucauaauauauuauu

SEQ ID NO: 407408 - RNA, 23 nt, Artificial Sequence
  Synthetic
auuauuauucauaauauauuauu

SEQ ID NO: 407409 - RNA, 24 nt, Artificial Sequence
  Synthetic
uauuauuauucauaauauauuauu

SEQ ID NO: 407410 - RNA, 18 nt, Artificial Sequence
  Synthetic
ucaaggguuuauauuauu

SEQ ID NO: 407411 - RNA, 19 nt, Artificial Sequence
  Synthetic
gucaaggguuuauauuauu

SEQ ID NO: 407412 - RNA, 20 nt, Artificial Sequence
  Synthetic
ggucaaggguuuauauuauu

SEQ ID NO: 407413 - RNA, 21 nt, Artificial Sequence
  Synthetic
aggucaaggguuuauauuauu

SEQ ID NO: 407414 - RNA, 22 nt, Artificial Sequence
  Synthetic
aaggucaaggguuuauauuauu

SEQ ID NO: 407415 - RNA, 23 nt, Artificial Sequence
  Synthetic
aaaggucaaggguuuauauuauu

SEQ ID NO: 407416 - RNA, 24 nt, Artificial Sequence
  Synthetic
gaaaggucaaggguuuauauuauu

SEQ ID NO: 407417 - RNA, 18 nt, Artificial Sequence
  Synthetic
ugcaugucuucuauuauu

SEQ ID NO: 407418 - RNA, 19 nt, Artificial Sequence
  Synthetic
cugcaugucuucuauuauu

SEQ ID NO: 407419 - RNA, 20 nt, Artificial Sequence
  Synthetic
gcugcaugucuucuauuauu

SEQ ID NO: 407420 - RNA, 21 nt, Artificial Sequence
  Synthetic
agcugcaugucuucuauuauu

SEQ ID NO: 407421 - RNA, 22 nt, Artificial Sequence
  Synthetic
uagcugcaugucuucuauuauu

SEQ ID NO: 407422 - RNA, 23 nt, Artificial Sequence
  Synthetic
cuagcugcaugucuucuauuauu

SEQ ID NO: 407423 - RNA, 24 nt, Artificial Sequence
  Synthetic
acuagcugcaugucuucuauuauu

SEQ ID NO: 407424 - RNA, 18 nt, Artificial Sequence
  Synthetic
uaacaucuuaguauuauu

SEQ ID NO: 407425 - RNA, 19 nt, Artificial Sequence
  Synthetic
auaacaucuuaguauuauu

SEQ ID NO: 407426 - RNA, 20 nt, Artificial Sequence
  Synthetic
aauaacaucuuaguauuauu

SEQ ID NO: 407427 - RNA, 21 nt, Artificial Sequence
  Synthetic
aaauaacaucuuaguauuauu

SEQ ID NO: 407428 - RNA, 22 nt, Artificial Sequence
  Synthetic
caaauaacaucuuaguauuauu

SEQ ID NO: 407429 - RNA, 23 nt, Artificial Sequence
  Synthetic
ucaaauaacaucuuaguauuauu

SEQ ID NO: 407430 - RNA, 24 nt, Artificial Sequence
  Synthetic
gucaaauaacaucuuaguauuauu

SEQ ID NO: 407431 - RNA, 18 nt, Artificial Sequence
  Synthetic
aaaugaaucuguauuauu

SEQ ID NO: 407432 - RNA, 19 nt, Artificial Sequence
  Synthetic
gaaaugaaucuguauuauu

SEQ ID NO: 407433 - RNA, 20 nt, Artificial Sequence
  Synthetic
ggaaaugaaucuguauuauu

SEQ ID NO: 407434 - RNA, 21 nt, Artificial Sequence
  Synthetic
uggaaaugaaucuguauuauu

SEQ ID NO: 407435 - RNA, 22 nt, Artificial Sequence
  Synthetic
auggaaaugaaucuguauuauu

SEQ ID NO: 407436 - RNA, 23 nt, Artificial Sequence
  Synthetic
uauggaaaugaaucuguauuauu

SEQ ID NO: 407437 - RNA, 24 nt, Artificial Sequence
  Synthetic
uuauggaaaugaaucuguauuauu

SEQ ID NO: 407438 - RNA, 18 nt, Artificial Sequence
  Synthetic
ugcacuuaaauuauuauu

SEQ ID NO: 407439 - RNA, 19 nt, Artificial Sequence
  Synthetic
gugcacuuaaauuauuauu

SEQ ID NO: 407440 - RNA, 20 nt, Artificial Sequence
  Synthetic
ugugcacuuaaauuauuauu

SEQ ID NO: 407441 - RNA, 21 nt, Artificial Sequence
  Synthetic
cugugcacuuaaauuauuauu

SEQ ID NO: 407442 - RNA, 22 nt, Artificial Sequence
  Synthetic
acugugcacuuaaauuauuauu

SEQ ID NO: 407443 - RNA, 23 nt, Artificial Sequence
  Synthetic
uacugugcacuuaaauuauuauu

SEQ ID NO: 407444 - RNA, 24 nt, Artificial Sequence
  Synthetic
guacugugcacuuaaauuauuauu

SEQ ID NO: 407445 - RNA, 18 nt, Artificial Sequence
  Synthetic
uuuguagauauuauuauu

SEQ ID NO: 407446 - RNA, 19 nt, Artificial Sequence
  Synthetic
uuuuguagauauuauuauu

SEQ ID NO: 407447 - RNA, 20 nt, Artificial Sequence
  Synthetic
cuuuuguagauauuauuauu

SEQ ID NO: 407448 - RNA, 21 nt, Artificial Sequence
  Synthetic
ccuuuuguagauauuauuauu

SEQ ID NO: 407449 - RNA, 22 nt, Artificial Sequence
  Synthetic
uccuuuuguagauauuauuauu

SEQ ID NO: 407450 - RNA, 23 nt, Artificial Sequence
  Synthetic
auccuuuuguagauauuauuauu

SEQ ID NO: 407451 - RNA, 24 nt, Artificial Sequence
  Synthetic
gauccuuuuguagauauuauuauu

SEQ ID NO: 407452 - RNA, 18 nt, Artificial Sequence
  Synthetic
uagauagcucuuauuauu

SEQ ID NO: 407453 - RNA, 19 nt, Artificial Sequence
  Synthetic
auagauagcucuuauuauu

SEQ ID NO: 407454 - RNA, 20 nt, Artificial Sequence
  Synthetic
cauagauagcucuuauuauu

SEQ ID NO: 407455 - RNA, 24 nt, Artificial Sequence
  Synthetic
uugucauagauagcucuuauuauu

SEQ ID NO: 407456 - RNA, 18 nt, Artificial Sequence
  Synthetic
cauucucuuuuuauuauu

SEQ ID NO: 407457 - RNA, 19 nt, Artificial Sequence
  Synthetic
ucauucucuuuuuauuauu

SEQ ID NO: 407458 - RNA, 20 nt, Artificial Sequence
  Synthetic
gucauucucuuuuuauuauu

SEQ ID NO: 407459 - RNA, 21 nt, Artificial Sequence
  Synthetic
ggucauucucuuuuuauuauu

SEQ ID NO: 407460 - RNA, 22 nt, Artificial Sequence
  Synthetic
uggucauucucuuuuuauuauu

SEQ ID NO: 407461 - RNA, 23 nt, Artificial Sequence
  Synthetic
auggucauucucuuuuuauuauu

SEQ ID NO: 407462 - RNA, 24 nt, Artificial Sequence
  Synthetic
uauggucauucucuuuuuauuauu

SEQ ID NO: 407463 - RNA, 18 nt, Artificial Sequence
  Synthetic
ugucaguuuaaacuuauu

SEQ ID NO: 407464 - RNA, 19 nt, Artificial Sequence
  Synthetic
augucaguuuaaacuuauu

SEQ ID NO: 407465 - RNA, 20 nt, Artificial Sequence
  Synthetic
uaugucaguuuaaacuuauu

SEQ ID NO: 407466 - RNA, 21 nt, Artificial Sequence
  Synthetic
guaugucaguuuaaacuuauu

SEQ ID NO: 407467 - RNA, 22 nt, Artificial Sequence
  Synthetic
aguaugucaguuuaaacuuauu

SEQ ID NO: 407468 - RNA, 23 nt, Artificial Sequence
  Synthetic
gaguaugucaguuuaaacuuauu

SEQ ID NO: 407469 - RNA, 24 nt, Artificial Sequence
  Synthetic
agaguaugucaguuuaaacuuauu

SEQ ID NO: 407470 - RNA, 18 nt, Artificial Sequence
  Synthetic
ucugcugugucacuuauu

SEQ ID NO: 407471 - RNA, 19 nt, Artificial Sequence
  Synthetic
gucugcugugucacuuauu

SEQ ID NO: 407472 - RNA, 20 nt, Artificial Sequence
  Synthetic
ugucugcugugucacuuauu

SEQ ID NO: 407473 - RNA, 21 nt, Artificial Sequence
  Synthetic
gugucugcugugucacuuauu

SEQ ID NO: 407474 - RNA, 22 nt, Artificial Sequence
  Synthetic
agugucugcugugucacuuauu

SEQ ID NO: 407475 - RNA, 23 nt, Artificial Sequence
  Synthetic
gagugucugcugugucacuuauu

SEQ ID NO: 407476 - RNA, 24 nt, Artificial Sequence
  Synthetic
ugagugucugcugugucacuuauu

SEQ ID NO: 407477 - RNA, 18 nt, Artificial Sequence
  Synthetic
augugugugucacuuauu

SEQ ID NO: 407478 - RNA, 19 nt, Artificial Sequence
  Synthetic
uaugugugugucacuuauu

SEQ ID NO: 407479 - RNA, 20 nt, Artificial Sequence
  Synthetic
auaugugugugucacuuauu

SEQ ID NO: 407480 - RNA, 21 nt, Artificial Sequence
  Synthetic
aauaugugugugucacuuauu

SEQ ID NO: 407481 - RNA, 22 nt, Artificial Sequence
  Synthetic
uaauaugugugugucacuuauu

SEQ ID NO: 407482 - RNA, 23 nt, Artificial Sequence
  Synthetic
cuaauaugugugugucacuuauu

SEQ ID NO: 407483 - RNA, 24 nt, Artificial Sequence
  Synthetic
gcuaauaugugugugucacuuauu

SEQ ID NO: 407484 - RNA, 18 nt, Artificial Sequence
  Synthetic
agaugaaacagacuuauu

SEQ ID NO: 407485 - RNA, 19 nt, Artificial Sequence
  Synthetic
aagaugaaacagacuuauu

SEQ ID NO: 407486 - RNA, 20 nt, Artificial Sequence
  Synthetic
uaagaugaaacagacuuauu

SEQ ID NO: 407487 - RNA, 21 nt, Artificial Sequence
  Synthetic
auaagaugaaacagacuuauu

SEQ ID NO: 407488 - RNA, 22 nt, Artificial Sequence
  Synthetic
uauaagaugaaacagacuuauu

SEQ ID NO: 407489 - RNA, 23 nt, Artificial Sequence
  Synthetic
auauaagaugaaacagacuuauu

SEQ ID NO: 407490 - RNA, 24 nt, Artificial Sequence
  Synthetic
uauauaagaugaaacagacuuauu

SEQ ID NO: 407491 - RNA, 18 nt, Artificial Sequence
  Synthetic
uacuacacuggacuuauu

SEQ ID NO: 407492 - RNA, 19 nt, Artificial Sequence
  Synthetic
uuacuacacuggacuuauu

SEQ ID NO: 407493 - RNA, 20 nt, Artificial Sequence
  Synthetic
auuacuacacuggacuuauu

SEQ ID NO: 407494 - RNA, 21 nt, Artificial Sequence
  Synthetic
aauuacuacacuggacuuauu

SEQ ID NO: 407495 - RNA, 22 nt, Artificial Sequence
  Synthetic
gaauuacuacacuggacuuauu

SEQ ID NO: 407496 - RNA, 23 nt, Artificial Sequence
  Synthetic
ugaauuacuacacuggacuuauu

SEQ ID NO: 407497 - RNA, 24 nt, Artificial Sequence
  Synthetic
gugaauuacuacacuggacuuauu

SEQ ID NO: 407498 - RNA, 18 nt, Artificial Sequence
  Synthetic
agaguggagauacuuauu

SEQ ID NO: 407499 - RNA, 19 nt, Artificial Sequence
  Synthetic
aagaguggagauacuuauu

SEQ ID NO: 407500 - RNA, 20 nt, Artificial Sequence
  Synthetic
aaagaguggagauacuuauu

SEQ ID NO: 407501 - RNA, 21 nt, Artificial Sequence
  Synthetic
caaagaguggagauacuuauu

SEQ ID NO: 407502 - RNA, 22 nt, Artificial Sequence
  Synthetic
ccaaagaguggagauacuuauu

SEQ ID NO: 407503 - RNA, 23 nt, Artificial Sequence
  Synthetic
accaaagaguggagauacuuauu

SEQ ID NO: 407504 - RNA, 24 nt, Artificial Sequence
  Synthetic
caccaaagaguggagauacuuauu

SEQ ID NO: 407505 - RNA, 18 nt, Artificial Sequence
  Synthetic
aucaaauuaguacuuauu

SEQ ID NO: 407506 - RNA, 19 nt, Artificial Sequence
  Synthetic
uaucaaauuaguacuuauu

SEQ ID NO: 407507 - RNA, 20 nt, Artificial Sequence
  Synthetic
uuaucaaauuaguacuuauu

SEQ ID NO: 407508 - RNA, 21 nt, Artificial Sequence
  Synthetic
auuaucaaauuaguacuuauu

SEQ ID NO: 407509 - RNA, 22 nt, Artificial Sequence
  Synthetic
uauuaucaaauuaguacuuauu

SEQ ID NO: 407510 - RNA, 23 nt, Artificial Sequence
  Synthetic
uuauuaucaaauuaguacuuauu

SEQ ID NO: 407511 - RNA, 24 nt, Artificial Sequence
  Synthetic
uuuauuaucaaauuaguacuuauu

SEQ ID NO: 407512 - RNA, 18 nt, Artificial Sequence
  Synthetic
ggcuaguuguuacuuauu

SEQ ID NO: 407513 - RNA, 19 nt, Artificial Sequence
  Synthetic
aggcuaguuguuacuuauu

SEQ ID NO: 407514 - RNA, 20 nt, Artificial Sequence
  Synthetic
gaggcuaguuguuacuuauu

SEQ ID NO: 407515 - RNA, 21 nt, Artificial Sequence
  Synthetic
cgaggcuaguuguuacuuauu

SEQ ID NO: 407516 - RNA, 22 nt, Artificial Sequence
  Synthetic
ccgaggcuaguuguuacuuauu

SEQ ID NO: 407517 - RNA, 23 nt, Artificial Sequence
  Synthetic
uccgaggcuaguuguuacuuauu

SEQ ID NO: 407518 - RNA, 24 nt, Artificial Sequence
  Synthetic
uuccgaggcuaguuguuacuuauu

SEQ ID NO: 407519 - RNA, 18 nt, Artificial Sequence
  Synthetic
auccuaguucaccuuauu

SEQ ID NO: 407520 - RNA, 19 nt, Artificial Sequence
  Synthetic
uauccuaguucaccuuauu

SEQ ID NO: 407521 - RNA, 20 nt, Artificial Sequence
  Synthetic
uuauccuaguucaccuuauu

SEQ ID NO: 407522 - RNA, 21 nt, Artificial Sequence
  Synthetic
uuuauccuaguucaccuuauu

SEQ ID NO: 407523 - RNA, 22 nt, Artificial Sequence
  Synthetic
cuuuauccuaguucaccuuauu

SEQ ID NO: 407524 - RNA, 23 nt, Artificial Sequence
  Synthetic
ucuuuauccuaguucaccuuauu

SEQ ID NO: 407525 - RNA, 24 nt, Artificial Sequence
  Synthetic
gucuuuauccuaguucaccuuauu

SEQ ID NO: 407526 - RNA, 18 nt, Artificial Sequence
  Synthetic
ucucaauuuaugcuuauu

SEQ ID NO: 407527 - RNA, 19 nt, Artificial Sequence
  Synthetic
uucucaauuuaugcuuauu

SEQ ID NO: 407528 - RNA, 20 nt, Artificial Sequence
  Synthetic
auucucaauuuaugcuuauu

SEQ ID NO: 407529 - RNA, 21 nt, Artificial Sequence
  Synthetic
uauucucaauuuaugcuuauu

SEQ ID NO: 407530 - RNA, 22 nt, Artificial Sequence
  Synthetic
uuauucucaauuuaugcuuauu

SEQ ID NO: 407531 - RNA, 23 nt, Artificial Sequence
  Synthetic
cuuauucucaauuuaugcuuauu

SEQ ID NO: 407532 - RNA, 24 nt, Artificial Sequence
  Synthetic
acuuauucucaauuuaugcuuauu

SEQ ID NO: 407533 - RNA, 18 nt, Artificial Sequence
  Synthetic
auacccauccaucuuauu

SEQ ID NO: 407534 - RNA, 19 nt, Artificial Sequence
  Synthetic
aauacccauccaucuuauu

SEQ ID NO: 407535 - RNA, 20 nt, Artificial Sequence
  Synthetic
aaauacccauccaucuuauu

SEQ ID NO: 407536 - RNA, 21 nt, Artificial Sequence
  Synthetic
uaaauacccauccaucuuauu

SEQ ID NO: 407537 - RNA, 22 nt, Artificial Sequence
  Synthetic
uuaaauacccauccaucuuauu

SEQ ID NO: 407538 - RNA, 23 nt, Artificial Sequence
  Synthetic
guuaaauacccauccaucuuauu

SEQ ID NO: 407539 - RNA, 24 nt, Artificial Sequence
  Synthetic
uguuaaauacccauccaucuuauu

SEQ ID NO: 407540 - RNA, 18 nt, Artificial Sequence
  Synthetic
acucuuucauaucuuauu

SEQ ID NO: 407541 - RNA, 19 nt, Artificial Sequence
  Synthetic
uacucuuucauaucuuauu

SEQ ID NO: 407542 - RNA, 20 nt, Artificial Sequence
  Synthetic
cuacucuuucauaucuuauu

SEQ ID NO: 407543 - RNA, 21 nt, Artificial Sequence
  Synthetic
ucuacucuuucauaucuuauu

SEQ ID NO: 407544 - RNA, 22 nt, Artificial Sequence
  Synthetic
gucuacucuuucauaucuuauu

SEQ ID NO: 407545 - RNA, 23 nt, Artificial Sequence
  Synthetic
ggucuacucuuucauaucuuauu

SEQ ID NO: 407546 - RNA, 24 nt, Artificial Sequence
  Synthetic
aggucuacucuuucauaucuuauu

SEQ ID NO: 407547 - RNA, 18 nt, Artificial Sequence
  Synthetic
uacugaacuccucuuauu

SEQ ID NO: 407548 - RNA, 19 nt, Artificial Sequence
  Synthetic
uuacugaacuccucuuauu

SEQ ID NO: 407549 - RNA, 20 nt, Artificial Sequence
  Synthetic
uuuacugaacuccucuuauu

SEQ ID NO: 407550 - RNA, 21 nt, Artificial Sequence
  Synthetic
auuuacugaacuccucuuauu

SEQ ID NO: 407551 - RNA, 22 nt, Artificial Sequence
  Synthetic
uauuuacugaacuccucuuauu

SEQ ID NO: 407552 - RNA, 23 nt, Artificial Sequence
  Synthetic
auauuuacugaacuccucuuauu

SEQ ID NO: 407553 - RNA, 24 nt, Artificial Sequence
  Synthetic
aauauuuacugaacuccucuuauu

SEQ ID NO: 407554 - RNA, 18 nt, Artificial Sequence
  Synthetic
auuuugcaaucucuuauu

SEQ ID NO: 407555 - RNA, 19 nt, Artificial Sequence
  Synthetic
aauuuugcaaucucuuauu

SEQ ID NO: 407556 - RNA, 20 nt, Artificial Sequence
  Synthetic
aaauuuugcaaucucuuauu

SEQ ID NO: 407557 - RNA, 21 nt, Artificial Sequence
  Synthetic
caaauuuugcaaucucuuauu

SEQ ID NO: 407558 - RNA, 22 nt, Artificial Sequence
  Synthetic
acaaauuuugcaaucucuuauu

SEQ ID NO: 407559 - RNA, 23 nt, Artificial Sequence
  Synthetic
aacaaauuuugcaaucucuuauu

SEQ ID NO: 407560 - RNA, 24 nt, Artificial Sequence
  Synthetic
aaacaaauuuugcaaucucuuauu

SEQ ID NO: 407561 - RNA, 18 nt, Artificial Sequence
  Synthetic
uuagaaagaucucuuauu

SEQ ID NO: 407562 - RNA, 19 nt, Artificial Sequence
  Synthetic
uuuagaaagaucucuuauu

SEQ ID NO: 407563 - RNA, 20 nt, Artificial Sequence
  Synthetic
uuuuagaaagaucucuuauu

SEQ ID NO: 407564 - RNA, 21 nt, Artificial Sequence
  Synthetic
auuuuagaaagaucucuuauu

SEQ ID NO: 407565 - RNA, 22 nt, Artificial Sequence
  Synthetic
uauuuuagaaagaucucuuauu

SEQ ID NO: 407566 - RNA, 23 nt, Artificial Sequence
  Synthetic
auauuuuagaaagaucucuuauu

SEQ ID NO: 407567 - RNA, 24 nt, Artificial Sequence
  Synthetic
cauauuuuagaaagaucucuuauu

SEQ ID NO: 407568 - RNA, 18 nt, Artificial Sequence
  Synthetic
ucaauucuaucucuuauu

SEQ ID NO: 407569 - RNA, 19 nt, Artificial Sequence
  Synthetic
uucaauucuaucucuuauu

SEQ ID NO: 407570 - RNA, 20 nt, Artificial Sequence
  Synthetic
guucaauucuaucucuuauu

SEQ ID NO: 407571 - RNA, 21 nt, Artificial Sequence
  Synthetic
uguucaauucuaucucuuauu

SEQ ID NO: 407572 - RNA, 22 nt, Artificial Sequence
  Synthetic
cuguucaauucuaucucuuauu

SEQ ID NO: 407573 - RNA, 23 nt, Artificial Sequence
  Synthetic
gcuguucaauucuaucucuuauu

SEQ ID NO: 407574 - RNA, 24 nt, Artificial Sequence
  Synthetic
agcuguucaauucuaucucuuauu

SEQ ID NO: 407575 - RNA, 18 nt, Artificial Sequence
  Synthetic
ggguagcuuucucuuauu

SEQ ID NO: 407576 - RNA, 19 nt, Artificial Sequence
  Synthetic
uggguagcuuucucuuauu

SEQ ID NO: 407577 - RNA, 20 nt, Artificial Sequence
  Synthetic
auggguagcuuucucuuauu

SEQ ID NO: 407578 - RNA, 21 nt, Artificial Sequence
  Synthetic
aauggguagcuuucucuuauu

SEQ ID NO: 407579 - RNA, 22 nt, Artificial Sequence
  Synthetic
aaauggguagcuuucucuuauu

SEQ ID NO: 407580 - RNA, 23 nt, Artificial Sequence
  Synthetic
aaaauggguagcuuucucuuauu

SEQ ID NO: 407581 - RNA, 24 nt, Artificial Sequence
  Synthetic
gaaaauggguagcuuucucuuauu

SEQ ID NO: 407582 - RNA, 18 nt, Artificial Sequence
  Synthetic
auaaaugauuuucuuauu

SEQ ID NO: 407583 - RNA, 19 nt, Artificial Sequence
  Synthetic
gauaaaugauuuucuuauu

SEQ ID NO: 407584 - RNA, 20 nt, Artificial Sequence
  Synthetic
agauaaaugauuuucuuauu

SEQ ID NO: 407585 - RNA, 21 nt, Artificial Sequence
  Synthetic
aagauaaaugauuuucuuauu

SEQ ID NO: 407586 - RNA, 22 nt, Artificial Sequence
  Synthetic
gaagauaaaugauuuucuuauu

SEQ ID NO: 407587 - RNA, 23 nt, Artificial Sequence
  Synthetic
ggaagauaaaugauuuucuuauu

SEQ ID NO: 407588 - RNA, 24 nt, Artificial Sequence
  Synthetic
gggaagauaaaugauuuucuuauu

SEQ ID NO: 407589 - RNA, 18 nt, Artificial Sequence
  Synthetic
guuuuaccuuuucuuauu

SEQ ID NO: 407590 - RNA, 19 nt, Artificial Sequence
  Synthetic
uguuuuaccuuuucuuauu

SEQ ID NO: 407591 - RNA, 20 nt, Artificial Sequence
  Synthetic
auguuuuaccuuuucuuauu

SEQ ID NO: 407592 - RNA, 21 nt, Artificial Sequence
  Synthetic
cauguuuuaccuuuucuuauu

SEQ ID NO: 407593 - RNA, 22 nt, Artificial Sequence
  Synthetic
gcauguuuuaccuuuucuuauu

SEQ ID NO: 407594 - RNA, 23 nt, Artificial Sequence
  Synthetic
ugcauguuuuaccuuuucuuauu

SEQ ID NO: 407595 - RNA, 24 nt, Artificial Sequence
  Synthetic
gugcauguuuuaccuuuucuuauu

SEQ ID NO: 407596 - RNA, 18 nt, Artificial Sequence
  Synthetic
uggugucaaaaaguuauu

SEQ ID NO: 407597 - RNA, 19 nt, Artificial Sequence
  Synthetic
guggugucaaaaaguuauu

SEQ ID NO: 407598 - RNA, 20 nt, Artificial Sequence
  Synthetic
aguggugucaaaaaguuauu

SEQ ID NO: 407599 - RNA, 21 nt, Artificial Sequence
  Synthetic
caguggugucaaaaaguuauu

SEQ ID NO: 407600 - RNA, 22 nt, Artificial Sequence
  Synthetic
ccaguggugucaaaaaguuauu

SEQ ID NO: 407601 - RNA, 23 nt, Artificial Sequence
  Synthetic
cccaguggugucaaaaaguuauu

SEQ ID NO: 407602 - RNA, 24 nt, Artificial Sequence
  Synthetic
ucccaguggugucaaaaaguuauu

SEQ ID NO: 407603 - RNA, 18 nt, Artificial Sequence
  Synthetic
auucuagacaaaguuauu

SEQ ID NO: 407604 - RNA, 19 nt, Artificial Sequence
  Synthetic
aauucuagacaaaguuauu

SEQ ID NO: 407605 - RNA, 20 nt, Artificial Sequence
  Synthetic
caauucuagacaaaguuauu

SEQ ID NO: 407606 - RNA, 21 nt, Artificial Sequence
  Synthetic
ucaauucuagacaaaguuauu

SEQ ID NO: 407607 - RNA, 22 nt, Artificial Sequence
  Synthetic
aucaauucuagacaaaguuauu

SEQ ID NO: 407608 - RNA, 23 nt, Artificial Sequence
  Synthetic
gaucaauucuagacaaaguuauu

SEQ ID NO: 407609 - RNA, 24 nt, Artificial Sequence
  Synthetic
ugaucaauucuagacaaaguuauu

SEQ ID NO: 407610 - RNA, 18 nt, Artificial Sequence
  Synthetic
aagagguauuaaguuauu

SEQ ID NO: 407611 - RNA, 19 nt, Artificial Sequence
  Synthetic
aaagagguauuaaguuauu

SEQ ID NO: 407612 - RNA, 20 nt, Artificial Sequence
  Synthetic
gaaagagguauuaaguuauu

SEQ ID NO: 407613 - RNA, 21 nt, Artificial Sequence
  Synthetic
ugaaagagguauuaaguuauu

SEQ ID NO: 407614 - RNA, 22 nt, Artificial Sequence
  Synthetic
uugaaagagguauuaaguuauu

SEQ ID NO: 407615 - RNA, 23 nt, Artificial Sequence
  Synthetic
auugaaagagguauuaaguuauu

SEQ ID NO: 407616 - RNA, 24 nt, Artificial Sequence
  Synthetic
aauugaaagagguauuaaguuauu

SEQ ID NO: 407617 - RNA, 18 nt, Artificial Sequence
  Synthetic
gccagacugggaguuauu

SEQ ID NO: 407618 - RNA, 19 nt, Artificial Sequence
  Synthetic
agccagacugggaguuauu

SEQ ID NO: 407619 - RNA, 20 nt, Artificial Sequence
  Synthetic
cagccagacugggaguuauu

SEQ ID NO: 407620 - RNA, 21 nt, Artificial Sequence
  Synthetic
gcagccagacugggaguuauu

SEQ ID NO: 407621 - RNA, 22 nt, Artificial Sequence
  Synthetic
ugcagccagacugggaguuauu

SEQ ID NO: 407622 - RNA, 23 nt, Artificial Sequence
  Synthetic
gugcagccagacugggaguuauu

SEQ ID NO: 407623 - RNA, 24 nt, Artificial Sequence
  Synthetic
ggugcagccagacugggaguuauu

SEQ ID NO: 407624 - RNA, 18 nt, Artificial Sequence
  Synthetic
uugaaugauguaguuauu

SEQ ID NO: 407625 - RNA, 19 nt, Artificial Sequence
  Synthetic
uuugaaugauguaguuauu

SEQ ID NO: 407626 - RNA, 20 nt, Artificial Sequence
  Synthetic
uuuugaaugauguaguuauu

SEQ ID NO: 407627 - RNA, 21 nt, Artificial Sequence
  Synthetic
guuuugaaugauguaguuauu

SEQ ID NO: 407628 - RNA, 22 nt, Artificial Sequence
  Synthetic
aguuuugaaugauguaguuauu

SEQ ID NO: 407629 - RNA, 23 nt, Artificial Sequence
  Synthetic
uaguuuugaaugauguaguuauu

SEQ ID NO: 407630 - RNA, 24 nt, Artificial Sequence
  Synthetic
auaguuuugaaugauguaguuauu

SEQ ID NO: 407631 - RNA, 18 nt, Artificial Sequence
  Synthetic
cuaugugaggagguuauu

SEQ ID NO: 407632 - RNA, 19 nt, Artificial Sequence
  Synthetic
ccuaugugaggagguuauu

SEQ ID NO: 407633 - RNA, 20 nt, Artificial Sequence
  Synthetic
gccuaugugaggagguuauu

SEQ ID NO: 407634 - RNA, 21 nt, Artificial Sequence
  Synthetic
ggccuaugugaggagguuauu

SEQ ID NO: 407635 - RNA, 22 nt, Artificial Sequence
  Synthetic
uggccuaugugaggagguuauu

SEQ ID NO: 407636 - RNA, 23 nt, Artificial Sequence
  Synthetic
cuggccuaugugaggagguuauu

SEQ ID NO: 407637 - RNA, 24 nt, Artificial Sequence
  Synthetic
acuggccuaugugaggagguuauu

SEQ ID NO: 407638 - RNA, 18 nt, Artificial Sequence
  Synthetic
uccacagcuaauguuauu

SEQ ID NO: 407639 - RNA, 19 nt, Artificial Sequence
  Synthetic
uuccacagcuaauguuauu

SEQ ID NO: 407640 - RNA, 20 nt, Artificial Sequence
  Synthetic
auuccacagcuaauguuauu

SEQ ID NO: 407641 - RNA, 21 nt, Artificial Sequence
  Synthetic
aauuccacagcuaauguuauu

SEQ ID NO: 407642 - RNA, 22 nt, Artificial Sequence
  Synthetic
aaauuccacagcuaauguuauu

SEQ ID NO: 407643 - RNA, 23 nt, Artificial Sequence
  Synthetic
aaaauuccacagcuaauguuauu

SEQ ID NO: 407644 - RNA, 24 nt, Artificial Sequence
  Synthetic
aaaaauuccacagcuaauguuauu

SEQ ID NO: 407645 - RNA, 18 nt, Artificial Sequence
  Synthetic
gcauauuuucauguuauu

SEQ ID NO: 407646 - RNA, 19 nt, Artificial Sequence
  Synthetic
ggcauauuuucauguuauu

SEQ ID NO: 407647 - RNA, 20 nt, Artificial Sequence
  Synthetic
uggcauauuuucauguuauu

SEQ ID NO: 407648 - RNA, 21 nt, Artificial Sequence
  Synthetic
uuggcauauuuucauguuauu

SEQ ID NO: 407649 - RNA, 22 nt, Artificial Sequence
  Synthetic
guuggcauauuuucauguuauu

SEQ ID NO: 407650 - RNA, 23 nt, Artificial Sequence
  Synthetic
uguuggcauauuuucauguuauu

SEQ ID NO: 407651 - RNA, 24 nt, Artificial Sequence
  Synthetic
cuguuggcauauuuucauguuauu

SEQ ID NO: 407652 - RNA, 18 nt, Artificial Sequence
  Synthetic
gucuagaaauauguuauu

SEQ ID NO: 407653 - RNA, 19 nt, Artificial Sequence
  Synthetic
ugucuagaaauauguuauu

SEQ ID NO: 407654 - RNA, 20 nt, Artificial Sequence
  Synthetic
gugucuagaaauauguuauu

SEQ ID NO: 407655 - RNA, 21 nt, Artificial Sequence
  Synthetic
agugucuagaaauauguuauu

SEQ ID NO: 407656 - RNA, 22 nt, Artificial Sequence
  Synthetic
aagugucuagaaauauguuauu

SEQ ID NO: 407657 - RNA, 23 nt, Artificial Sequence
  Synthetic
gaagugucuagaaauauguuauu

SEQ ID NO: 407658 - RNA, 24 nt, Artificial Sequence
  Synthetic
agaagugucuagaaauauguuauu

SEQ ID NO: 407659 - RNA, 18 nt, Artificial Sequence
  Synthetic
ucuuagauauguguuauu

SEQ ID NO: 407660 - RNA, 19 nt, Artificial Sequence
  Synthetic
uucuuagauauguguuauu

SEQ ID NO: 407661 - RNA, 20 nt, Artificial Sequence
  Synthetic
cuucuuagauauguguuauu

SEQ ID NO: 407662 - RNA, 21 nt, Artificial Sequence
  Synthetic
ucuucuuagauauguguuauu

SEQ ID NO: 407663 - RNA, 22 nt, Artificial Sequence
  Synthetic
uucuucuuagauauguguuauu

SEQ ID NO: 407664 - RNA, 23 nt, Artificial Sequence
  Synthetic
uuucuucuuagauauguguuauu

SEQ ID NO: 407665 - RNA, 24 nt, Artificial Sequence
  Synthetic
cuuucuucuuagauauguguuauu

SEQ ID NO: 407666 - RNA, 18 nt, Artificial Sequence
  Synthetic
uuuuucaaacuuguuauu

SEQ ID NO: 407667 - RNA, 19 nt, Artificial Sequence
  Synthetic
auuuuucaaacuuguuauu

SEQ ID NO: 407668 - RNA, 20 nt, Artificial Sequence
  Synthetic
uauuuuucaaacuuguuauu

SEQ ID NO: 407669 - RNA, 21 nt, Artificial Sequence
  Synthetic
guauuuuucaaacuuguuauu

SEQ ID NO: 407670 - RNA, 22 nt, Artificial Sequence
  Synthetic
aguauuuuucaaacuuguuauu

SEQ ID NO: 407671 - RNA, 23 nt, Artificial Sequence
  Synthetic
caguauuuuucaaacuuguuauu

SEQ ID NO: 407672 - RNA, 24 nt, Artificial Sequence
  Synthetic
gcaguauuuuucaaacuuguuauu

SEQ ID NO: 407673 - RNA, 18 nt, Artificial Sequence
  Synthetic
aagaagugcuuuguuauu

SEQ ID NO: 407674 - RNA, 19 nt, Artificial Sequence
  Synthetic
aaagaagugcuuuguuauu

SEQ ID NO: 407675 - RNA, 20 nt, Artificial Sequence
  Synthetic
aaaagaagugcuuuguuauu

SEQ ID NO: 407676 - RNA, 21 nt, Artificial Sequence
  Synthetic
caaaagaagugcuuuguuauu

SEQ ID NO: 407677 - RNA, 22 nt, Artificial Sequence
  Synthetic
ccaaaagaagugcuuuguuauu

SEQ ID NO: 407678 - RNA, 23 nt, Artificial Sequence
  Synthetic
accaaaagaagugcuuuguuauu

SEQ ID NO: 407679 - RNA, 24 nt, Artificial Sequence
  Synthetic
gaccaaaagaagugcuuuguuauu

SEQ ID NO: 407680 - RNA, 18 nt, Artificial Sequence
  Synthetic
aaucauugagaauuuauu

SEQ ID NO: 407681 - RNA, 19 nt, Artificial Sequence
  Synthetic
aaaucauugagaauuuauu

SEQ ID NO: 407682 - RNA, 20 nt, Artificial Sequence
  Synthetic
caaaucauugagaauuuauu

SEQ ID NO: 407683 - RNA, 21 nt, Artificial Sequence
  Synthetic
acaaaucauugagaauuuauu

SEQ ID NO: 407684 - RNA, 22 nt, Artificial Sequence
  Synthetic
uacaaaucauugagaauuuauu

SEQ ID NO: 407685 - RNA, 23 nt, Artificial Sequence
  Synthetic
auacaaaucauugagaauuuauu

SEQ ID NO: 407686 - RNA, 24 nt, Artificial Sequence
  Synthetic
uauacaaaucauugagaauuuauu

SEQ ID NO: 407687 - RNA, 18 nt, Artificial Sequence
  Synthetic
aacaucaacacauuuauu

SEQ ID NO: 407688 - RNA, 19 nt, Artificial Sequence
  Synthetic
uaacaucaacacauuuauu

SEQ ID NO: 407689 - RNA, 20 nt, Artificial Sequence
  Synthetic
uuaacaucaacacauuuauu

SEQ ID NO: 407690 - RNA, 21 nt, Artificial Sequence
  Synthetic
uuuaacaucaacacauuuauu

SEQ ID NO: 407691 - RNA, 22 nt, Artificial Sequence
  Synthetic
cuuuaacaucaacacauuuauu

SEQ ID NO: 407692 - RNA, 23 nt, Artificial Sequence
  Synthetic
ccuuuaacaucaacacauuuauu

SEQ ID NO: 407693 - RNA, 24 nt, Artificial Sequence
  Synthetic
accuuuaacaucaacacauuuauu

SEQ ID NO: 407694 - RNA, 18 nt, Artificial Sequence
  Synthetic
uuccuauugacauuuauu

SEQ ID NO: 407695 - RNA, 19 nt, Artificial Sequence
  Synthetic
uuuccuauugacauuuauu

SEQ ID NO: 407696 - RNA, 20 nt, Artificial Sequence
  Synthetic
uuuuccuauugacauuuauu

SEQ ID NO: 407697 - RNA, 21 nt, Artificial Sequence
  Synthetic
uuuuuccuauugacauuuauu

SEQ ID NO: 407698 - RNA, 22 nt, Artificial Sequence
  Synthetic
auuuuuccuauugacauuuauu

SEQ ID NO: 407699 - RNA, 23 nt, Artificial Sequence
  Synthetic
aauuuuuccuauugacauuuauu

SEQ ID NO: 407700 - RNA, 24 nt, Artificial Sequence
  Synthetic
caauuuuuccuauugacauuuauu

SEQ ID NO: 407701 - RNA, 18 nt, Artificial Sequence
  Synthetic
uaugguacagcauuuauu

SEQ ID NO: 407702 - RNA, 19 nt, Artificial Sequence
  Synthetic
guaugguacagcauuuauu

SEQ ID NO: 407703 - RNA, 20 nt, Artificial Sequence
  Synthetic
aguaugguacagcauuuauu

SEQ ID NO: 407704 - RNA, 21 nt, Artificial Sequence
  Synthetic
uaguaugguacagcauuuauu

SEQ ID NO: 407705 - RNA, 22 nt, Artificial Sequence
  Synthetic
auaguaugguacagcauuuauu

SEQ ID NO: 407706 - RNA, 23 nt, Artificial Sequence
  Synthetic
gauaguaugguacagcauuuauu

SEQ ID NO: 407707 - RNA, 24 nt, Artificial Sequence
  Synthetic
ggauaguaugguacagcauuuauu

SEQ ID NO: 407708 - RNA, 18 nt, Artificial Sequence
  Synthetic
gcagcagcaagauuuauu

SEQ ID NO: 407709 - RNA, 19 nt, Artificial Sequence
  Synthetic
agcagcagcaagauuuauu

SEQ ID NO: 407710 - RNA, 20 nt, Artificial Sequence
  Synthetic
gagcagcagcaagauuuauu

SEQ ID NO: 407711 - RNA, 21 nt, Artificial Sequence
  Synthetic
cgagcagcagcaagauuuauu

SEQ ID NO: 407712 - RNA, 22 nt, Artificial Sequence
  Synthetic
gcgagcagcagcaagauuuauu

SEQ ID NO: 407713 - RNA, 23 nt, Artificial Sequence
  Synthetic
agcgagcagcagcaagauuuauu

SEQ ID NO: 407714 - RNA, 24 nt, Artificial Sequence
  Synthetic
cagcgagcagcagcaagauuuauu

SEQ ID NO: 407715 - RNA, 18 nt, Artificial Sequence
  Synthetic
cagucuuagagauuuauu

SEQ ID NO: 407716 - RNA, 19 nt, Artificial Sequence
  Synthetic
gcagucuuagagauuuauu

SEQ ID NO: 407717 - RNA, 20 nt, Artificial Sequence
  Synthetic
ugcagucuuagagauuuauu

SEQ ID NO: 407718 - RNA, 21 nt, Artificial Sequence
  Synthetic
augcagucuuagagauuuauu

SEQ ID NO: 407719 - RNA, 22 nt, Artificial Sequence
  Synthetic
aaugcagucuuagagauuuauu

SEQ ID NO: 407720 - RNA, 23 nt, Artificial Sequence
  Synthetic
caaugcagucuuagagauuuauu

SEQ ID NO: 407721 - RNA, 24 nt, Artificial Sequence
  Synthetic
ucaaugcagucuuagagauuuauu

SEQ ID NO: 407722 - RNA, 18 nt, Artificial Sequence
  Synthetic
uuuaagugaugauuuauu

SEQ ID NO: 407723 - RNA, 19 nt, Artificial Sequence
  Synthetic
guuuaagugaugauuuauu

SEQ ID NO: 407724 - RNA, 20 nt, Artificial Sequence
  Synthetic
uguuuaagugaugauuuauu

SEQ ID NO: 407725 - RNA, 21 nt, Artificial Sequence
  Synthetic
cuguuuaagugaugauuuauu

SEQ ID NO: 407726 - RNA, 22 nt, Artificial Sequence
  Synthetic
acuguuuaagugaugauuuauu

SEQ ID NO: 407727 - RNA, 23 nt, Artificial Sequence
  Synthetic
uacuguuuaagugaugauuuauu

SEQ ID NO: 407728 - RNA, 24 nt, Artificial Sequence
  Synthetic
uuacuguuuaagugaugauuuauu

SEQ ID NO: 407729 - RNA, 18 nt, Artificial Sequence
  Synthetic
aagagcaagugauuuauu

SEQ ID NO: 407730 - RNA, 19 nt, Artificial Sequence
  Synthetic
uaagagcaagugauuuauu

SEQ ID NO: 407731 - RNA, 20 nt, Artificial Sequence
  Synthetic
uuaagagcaagugauuuauu

SEQ ID NO: 407732 - RNA, 21 nt, Artificial Sequence
  Synthetic
uuuaagagcaagugauuuauu

SEQ ID NO: 407733 - RNA, 22 nt, Artificial Sequence
  Synthetic
uuuuaagagcaagugauuuauu

SEQ ID NO: 407734 - RNA, 23 nt, Artificial Sequence
  Synthetic
guuuuaagagcaagugauuuauu

SEQ ID NO: 407735 - RNA, 24 nt, Artificial Sequence
  Synthetic
gguuuuaagagcaagugauuuauu

SEQ ID NO: 407736 - RNA, 18 nt, Artificial Sequence
  Synthetic
uuaaaauaaauauuuauu

SEQ ID NO: 407737 - RNA, 19 nt, Artificial Sequence
  Synthetic
auuaaaauaaauauuuauu

SEQ ID NO: 407738 - RNA, 20 nt, Artificial Sequence
  Synthetic
gauuaaaauaaauauuuauu

SEQ ID NO: 407739 - RNA, 21 nt, Artificial Sequence
  Synthetic
agauuaaaauaaauauuuauu

SEQ ID NO: 407740 - RNA, 22 nt, Artificial Sequence
  Synthetic
cagauuaaaauaaauauuuauu

SEQ ID NO: 407741 - RNA, 23 nt, Artificial Sequence
  Synthetic
ccagauuaaaauaaauauuuauu

SEQ ID NO: 407742 - RNA, 24 nt, Artificial Sequence
  Synthetic
gccagauuaaaauaaauauuuauu

SEQ ID NO: 407743 - RNA, 18 nt, Artificial Sequence
  Synthetic
ucuacacagcuauuuauu

SEQ ID NO: 407744 - RNA, 19 nt, Artificial Sequence
  Synthetic
uucuacacagcuauuuauu

SEQ ID NO: 407745 - RNA, 20 nt, Artificial Sequence
  Synthetic
cuucuacacagcuauuuauu

SEQ ID NO: 407746 - RNA, 21 nt, Artificial Sequence
  Synthetic
ucuucuacacagcuauuuauu

SEQ ID NO: 407747 - RNA, 22 nt, Artificial Sequence
  Synthetic
uucuucuacacagcuauuuauu

SEQ ID NO: 407748 - RNA, 23 nt, Artificial Sequence
  Synthetic
uuucuucuacacagcuauuuauu

SEQ ID NO: 407749 - RNA, 24 nt, Artificial Sequence
  Synthetic
uuuucuucuacacagcuauuuauu

SEQ ID NO: 407750 - RNA, 18 nt, Artificial Sequence
  Synthetic
auugcuaauguauuuauu

SEQ ID NO: 407751 - RNA, 19 nt, Artificial Sequence
  Synthetic
cauugcuaauguauuuauu

SEQ ID NO: 407752 - RNA, 20 nt, Artificial Sequence
  Synthetic
ucauugcuaauguauuuauu

SEQ ID NO: 407753 - RNA, 21 nt, Artificial Sequence
  Synthetic
aucauugcuaauguauuuauu

SEQ ID NO: 407754 - RNA, 22 nt, Artificial Sequence
  Synthetic
gaucauugcuaauguauuuauu

SEQ ID NO: 407755 - RNA, 23 nt, Artificial Sequence
  Synthetic
agaucauugcuaauguauuuauu

SEQ ID NO: 407756 - RNA, 24 nt, Artificial Sequence
  Synthetic
aagaucauugcuaauguauuuauu

SEQ ID NO: 407757 - RNA, 18 nt, Artificial Sequence
  Synthetic
gacaauuauguauuuauu

SEQ ID NO: 407758 - RNA, 19 nt, Artificial Sequence
  Synthetic
ugacaauuauguauuuauu

SEQ ID NO: 407759 - RNA, 20 nt, Artificial Sequence
  Synthetic
cugacaauuauguauuuauu

SEQ ID NO: 407760 - RNA, 21 nt, Artificial Sequence
  Synthetic
ucugacaauuauguauuuauu

SEQ ID NO: 407761 - RNA, 22 nt, Artificial Sequence
  Synthetic
cucugacaauuauguauuuauu

SEQ ID NO: 407762 - RNA, 23 nt, Artificial Sequence
  Synthetic
acucugacaauuauguauuuauu

SEQ ID NO: 407763 - RNA, 24 nt, Artificial Sequence
  Synthetic
aacucugacaauuauguauuuauu

SEQ ID NO: 407764 - RNA, 18 nt, Artificial Sequence
  Synthetic
acuuuuuauuuauuuauu

SEQ ID NO: 407765 - RNA, 19 nt, Artificial Sequence
  Synthetic
aacuuuuuauuuauuuauu

SEQ ID NO: 407766 - RNA, 20 nt, Artificial Sequence
  Synthetic
uaacuuuuuauuuauuuauu

SEQ ID NO: 407767 - RNA, 21 nt, Artificial Sequence
  Synthetic
uuaacuuuuuauuuauuuauu

SEQ ID NO: 407768 - RNA, 22 nt, Artificial Sequence
  Synthetic
auuaacuuuuuauuuauuuauu

SEQ ID NO: 407769 - RNA, 23 nt, Artificial Sequence
  Synthetic
aauuaacuuuuuauuuauuuauu

SEQ ID NO: 407770 - RNA, 24 nt, Artificial Sequence
  Synthetic
uaauuaacuuuuuauuuauuuauu

SEQ ID NO: 407771 - RNA, 18 nt, Artificial Sequence
  Synthetic
aguggcacuuuauuuauu

SEQ ID NO: 407772 - RNA, 19 nt, Artificial Sequence
  Synthetic
caguggcacuuuauuuauu

SEQ ID NO: 407773 - RNA, 20 nt, Artificial Sequence
  Synthetic
acaguggcacuuuauuuauu

SEQ ID NO: 407774 - RNA, 21 nt, Artificial Sequence
  Synthetic
cacaguggcacuuuauuuauu

SEQ ID NO: 407775 - RNA, 22 nt, Artificial Sequence
  Synthetic
acacaguggcacuuuauuuauu

SEQ ID NO: 407776 - RNA, 23 nt, Artificial Sequence
  Synthetic
cacacaguggcacuuuauuuauu

SEQ ID NO: 407777 - RNA, 24 nt, Artificial Sequence
  Synthetic
acacacaguggcacuuuauuuauu

SEQ ID NO: 407778 - RNA, 18 nt, Artificial Sequence
  Synthetic
aagugcaguuuauuuauu

SEQ ID NO: 407779 - RNA, 19 nt, Artificial Sequence
  Synthetic
aaagugcaguuuauuuauu

SEQ ID NO: 407780 - RNA, 20 nt, Artificial Sequence
  Synthetic
caaagugcaguuuauuuauu

SEQ ID NO: 407781 - RNA, 21 nt, Artificial Sequence
  Synthetic
ccaaagugcaguuuauuuauu

SEQ ID NO: 407782 - RNA, 22 nt, Artificial Sequence
  Synthetic
gccaaagugcaguuuauuuauu

SEQ ID NO: 407783 - RNA, 23 nt, Artificial Sequence
  Synthetic
ugccaaagugcaguuuauuuauu

SEQ ID NO: 407784 - RNA, 24 nt, Artificial Sequence
  Synthetic
cugccaaagugcaguuuauuuauu

SEQ ID NO: 407785 - RNA, 18 nt, Artificial Sequence
  Synthetic
auacuaucauacuuuauu

SEQ ID NO: 407786 - RNA, 19 nt, Artificial Sequence
  Synthetic
uauacuaucauacuuuauu

SEQ ID NO: 407787 - RNA, 20 nt, Artificial Sequence
  Synthetic
auauacuaucauacuuuauu

SEQ ID NO: 407788 - RNA, 21 nt, Artificial Sequence
  Synthetic
uauauacuaucauacuuuauu

SEQ ID NO: 407789 - RNA, 22 nt, Artificial Sequence
  Synthetic
auauauacuaucauacuuuauu

SEQ ID NO: 407790 - RNA, 23 nt, Artificial Sequence
  Synthetic
aauauauacuaucauacuuuauu

SEQ ID NO: 407791 - RNA, 24 nt, Artificial Sequence
  Synthetic
caauauauacuaucauacuuuauu

SEQ ID NO: 407792 - RNA, 18 nt, Artificial Sequence
  Synthetic
ucaaccaauuacuuuauu

SEQ ID NO: 407793 - RNA, 19 nt, Artificial Sequence
  Synthetic
uucaaccaauuacuuuauu

SEQ ID NO: 407794 - RNA, 20 nt, Artificial Sequence
  Synthetic
uuucaaccaauuacuuuauu

SEQ ID NO: 407795 - RNA, 21 nt, Artificial Sequence
  Synthetic
auuucaaccaauuacuuuauu

SEQ ID NO: 407796 - RNA, 22 nt, Artificial Sequence
  Synthetic
aauuucaaccaauuacuuuauu

SEQ ID NO: 407797 - RNA, 23 nt, Artificial Sequence
  Synthetic
aaauuucaaccaauuacuuuauu

SEQ ID NO: 407798 - RNA, 24 nt, Artificial Sequence
  Synthetic
uaaauuucaaccaauuacuuuauu

SEQ ID NO: 407799 - RNA, 18 nt, Artificial Sequence
  Synthetic
gccauaguaggcuuuauu

SEQ ID NO: 407800 - RNA, 19 nt, Artificial Sequence
  Synthetic
ggccauaguaggcuuuauu

SEQ ID NO: 407801 - RNA, 20 nt, Artificial Sequence
  Synthetic
uggccauaguaggcuuuauu

SEQ ID NO: 407802 - RNA, 21 nt, Artificial Sequence
  Synthetic
guggccauaguaggcuuuauu

SEQ ID NO: 407803 - RNA, 22 nt, Artificial Sequence
  Synthetic
uguggccauaguaggcuuuauu

SEQ ID NO: 407804 - RNA, 23 nt, Artificial Sequence
  Synthetic
guguggccauaguaggcuuuauu

SEQ ID NO: 407805 - RNA, 24 nt, Artificial Sequence
  Synthetic
gguguggccauaguaggcuuuauu

SEQ ID NO: 407806 - RNA, 18 nt, Artificial Sequence
  Synthetic
ucucccuugcucuuuauu

SEQ ID NO: 407807 - RNA, 19 nt, Artificial Sequence
  Synthetic
cucucccuugcucuuuauu

SEQ ID NO: 407808 - RNA, 20 nt, Artificial Sequence
  Synthetic
ucucucccuugcucuuuauu

SEQ ID NO: 407809 - RNA, 21 nt, Artificial Sequence
  Synthetic
uucucucccuugcucuuuauu

SEQ ID NO: 407810 - RNA, 22 nt, Artificial Sequence
  Synthetic
cuucucucccuugcucuuuauu

SEQ ID NO: 407811 - RNA, 23 nt, Artificial Sequence
  Synthetic
ccuucucucccuugcucuuuauu

SEQ ID NO: 407812 - RNA, 24 nt, Artificial Sequence
  Synthetic
accuucucucccuugcucuuuauu

SEQ ID NO: 407813 - RNA, 18 nt, Artificial Sequence
  Synthetic
aaguuuaaauucuuuauu

SEQ ID NO: 407814 - RNA, 19 nt, Artificial Sequence
  Synthetic
caaguuuaaauucuuuauu

SEQ ID NO: 407815 - RNA, 20 nt, Artificial Sequence
  Synthetic
acaaguuuaaauucuuuauu

SEQ ID NO: 407816 - RNA, 21 nt, Artificial Sequence
  Synthetic
uacaaguuuaaauucuuuauu

SEQ ID NO: 407817 - RNA, 22 nt, Artificial Sequence
  Synthetic
uuacaaguuuaaauucuuuauu

SEQ ID NO: 407818 - RNA, 23 nt, Artificial Sequence
  Synthetic
auuacaaguuuaaauucuuuauu

SEQ ID NO: 407819 - RNA, 24 nt, Artificial Sequence
  Synthetic
cauuacaaguuuaaauucuuuauu

SEQ ID NO: 407820 - RNA, 18 nt, Artificial Sequence
  Synthetic
gaaaagacaaaguuuauu

SEQ ID NO: 407821 - RNA, 19 nt, Artificial Sequence
  Synthetic
agaaaagacaaaguuuauu

SEQ ID NO: 407822 - RNA, 20 nt, Artificial Sequence
  Synthetic
uagaaaagacaaaguuuauu

SEQ ID NO: 407823 - RNA, 21 nt, Artificial Sequence
  Synthetic
auagaaaagacaaaguuuauu

SEQ ID NO: 407824 - RNA, 22 nt, Artificial Sequence
  Synthetic
aauagaaaagacaaaguuuauu

SEQ ID NO: 407825 - RNA, 23 nt, Artificial Sequence
  Synthetic
caauagaaaagacaaaguuuauu

SEQ ID NO: 407826 - RNA, 24 nt, Artificial Sequence
  Synthetic
gcaauagaaaagacaaaguuuauu

SEQ ID NO: 407827 - RNA, 18 nt, Artificial Sequence
  Synthetic
gcaguauuaaaguuuauu

SEQ ID NO: 407828 - RNA, 19 nt, Artificial Sequence
  Synthetic
ugcaguauuaaaguuuauu

SEQ ID NO: 407829 - RNA, 20 nt, Artificial Sequence
  Synthetic
gugcaguauuaaaguuuauu

SEQ ID NO: 407830 - RNA, 21 nt, Artificial Sequence
  Synthetic
ugugcaguauuaaaguuuauu

SEQ ID NO: 407831 - RNA, 22 nt, Artificial Sequence
  Synthetic
cugugcaguauuaaaguuuauu

SEQ ID NO: 407832 - RNA, 23 nt, Artificial Sequence
  Synthetic
gcugugcaguauuaaaguuuauu

SEQ ID NO: 407833 - RNA, 24 nt, Artificial Sequence
  Synthetic
agcugugcaguauuaaaguuuauu

SEQ ID NO: 407834 - RNA, 18 nt, Artificial Sequence
  Synthetic
aguaaaagcaaguuuauu

SEQ ID NO: 407835 - RNA, 19 nt, Artificial Sequence
  Synthetic
aaguaaaagcaaguuuauu

SEQ ID NO: 407836 - RNA, 20 nt, Artificial Sequence
  Synthetic
aaaguaaaagcaaguuuauu

SEQ ID NO: 407837 - RNA, 21 nt, Artificial Sequence
  Synthetic
aaaaguaaaagcaaguuuauu

SEQ ID NO: 407838 - RNA, 22 nt, Artificial Sequence
  Synthetic
aaaaaguaaaagcaaguuuauu

SEQ ID NO: 407839 - RNA, 23 nt, Artificial Sequence
  Synthetic
aaaaaaguaaaagcaaguuuauu

SEQ ID NO: 407840 - RNA, 24 nt, Artificial Sequence
  Synthetic
aaaaaaaguaaaagcaaguuuauu

SEQ ID NO: 407841 - RNA, 18 nt, Artificial Sequence
  Synthetic
uaaaagugugaguuuauu

SEQ ID NO: 407842 - RNA, 19 nt, Artificial Sequence
  Synthetic
auaaaagugugaguuuauu

SEQ ID NO: 407843 - RNA, 20 nt, Artificial Sequence
  Synthetic
aauaaaagugugaguuuauu

SEQ ID NO: 407844 - RNA, 21 nt, Artificial Sequence
  Synthetic
aaauaaaagugugaguuuauu

SEQ ID NO: 407845 - RNA, 22 nt, Artificial Sequence
  Synthetic
gaaauaaaagugugaguuuauu

SEQ ID NO: 407846 - RNA, 23 nt, Artificial Sequence
  Synthetic
agaaauaaaagugugaguuuauu

SEQ ID NO: 407847 - RNA, 24 nt, Artificial Sequence
  Synthetic
uagaaauaaaagugugaguuuauu

SEQ ID NO: 407848 - RNA, 18 nt, Artificial Sequence
  Synthetic
aagagggagucguuuauu

SEQ ID NO: 407849 - RNA, 19 nt, Artificial Sequence
  Synthetic
uaagagggagucguuuauu

SEQ ID NO: 407850 - RNA, 20 nt, Artificial Sequence
  Synthetic
uuaagagggagucguuuauu

SEQ ID NO: 407851 - RNA, 21 nt, Artificial Sequence
  Synthetic
uuuaagagggagucguuuauu

SEQ ID NO: 407852 - RNA, 22 nt, Artificial Sequence
  Synthetic
uuuuaagagggagucguuuauu

SEQ ID NO: 407853 - RNA, 23 nt, Artificial Sequence
  Synthetic
guuuuaagagggagucguuuauu

SEQ ID NO: 407854 - RNA, 24 nt, Artificial Sequence
  Synthetic
aguuuuaagagggagucguuuauu

SEQ ID NO: 407855 - RNA, 18 nt, Artificial Sequence
  Synthetic
aaauaauauugguuuauu

SEQ ID NO: 407856 - RNA, 19 nt, Artificial Sequence
  Synthetic
caaauaauauugguuuauu

SEQ ID NO: 407857 - RNA, 20 nt, Artificial Sequence
  Synthetic
gcaaauaauauugguuuauu

SEQ ID NO: 407858 - RNA, 21 nt, Artificial Sequence
  Synthetic
ugcaaauaauauugguuuauu

SEQ ID NO: 407859 - RNA, 22 nt, Artificial Sequence
  Synthetic
augcaaauaauauugguuuauu

SEQ ID NO: 407860 - RNA, 23 nt, Artificial Sequence
  Synthetic
uaugcaaauaauauugguuuauu

SEQ ID NO: 407861 - RNA, 24 nt, Artificial Sequence
  Synthetic
auaugcaaauaauauugguuuauu

SEQ ID NO: 407862 - RNA, 18 nt, Artificial Sequence
  Synthetic
auucagaaauuguuuauu

SEQ ID NO: 407863 - RNA, 19 nt, Artificial Sequence
  Synthetic
cauucagaaauuguuuauu

SEQ ID NO: 407864 - RNA, 20 nt, Artificial Sequence
  Synthetic
ucauucagaaauuguuuauu

SEQ ID NO: 407865 - RNA, 21 nt, Artificial Sequence
  Synthetic
aucauucagaaauuguuuauu

SEQ ID NO: 407866 - RNA, 22 nt, Artificial Sequence
  Synthetic
gaucauucagaaauuguuuauu

SEQ ID NO: 407867 - RNA, 23 nt, Artificial Sequence
  Synthetic
agaucauucagaaauuguuuauu

SEQ ID NO: 407868 - RNA, 24 nt, Artificial Sequence
  Synthetic
aagaucauucagaaauuguuuauu

SEQ ID NO: 407869 - RNA, 18 nt, Artificial Sequence
  Synthetic
caaaggauguuguuuauu

SEQ ID NO: 407870 - RNA, 19 nt, Artificial Sequence
  Synthetic
acaaaggauguuguuuauu

SEQ ID NO: 407871 - RNA, 20 nt, Artificial Sequence
  Synthetic
uacaaaggauguuguuuauu

SEQ ID NO: 407872 - RNA, 21 nt, Artificial Sequence
  Synthetic
guacaaaggauguuguuuauu

SEQ ID NO: 407873 - RNA, 22 nt, Artificial Sequence
  Synthetic
uguacaaaggauguuguuuauu

SEQ ID NO: 407874 - RNA, 23 nt, Artificial Sequence
  Synthetic
auguacaaaggauguuguuuauu

SEQ ID NO: 407875 - RNA, 24 nt, Artificial Sequence
  Synthetic
aauguacaaaggauguuguuuauu

SEQ ID NO: 407876 - RNA, 18 nt, Artificial Sequence
  Synthetic
uucauuuguuuguuuauu

SEQ ID NO: 407877 - RNA, 19 nt, Artificial Sequence
  Synthetic
guucauuuguuuguuuauu

SEQ ID NO: 407878 - RNA, 20 nt, Artificial Sequence
  Synthetic
uguucauuuguuuguuuauu

SEQ ID NO: 407879 - RNA, 21 nt, Artificial Sequence
  Synthetic
uuguucauuuguuuguuuauu

SEQ ID NO: 407880 - RNA, 22 nt, Artificial Sequence
  Synthetic
cuuguucauuuguuuguuuauu

SEQ ID NO: 407881 - RNA, 23 nt, Artificial Sequence
  Synthetic
gcuuguucauuuguuuguuuauu

SEQ ID NO: 407882 - RNA, 24 nt, Artificial Sequence
  Synthetic
ugcuuguucauuuguuuguuuauu

SEQ ID NO: 407883 - RNA, 18 nt, Artificial Sequence
  Synthetic
acuagcucaaauuuuauu

SEQ ID NO: 407884 - RNA, 19 nt, Artificial Sequence
  Synthetic
uacuagcucaaauuuuauu

SEQ ID NO: 407885 - RNA, 20 nt, Artificial Sequence
  Synthetic
uuacuagcucaaauuuuauu

SEQ ID NO: 407886 - RNA, 21 nt, Artificial Sequence
  Synthetic
guuacuagcucaaauuuuauu

SEQ ID NO: 407887 - RNA, 22 nt, Artificial Sequence
  Synthetic
gguuacuagcucaaauuuuauu

SEQ ID NO: 407888 - RNA, 23 nt, Artificial Sequence
  Synthetic
ugguuacuagcucaaauuuuauu

SEQ ID NO: 407889 - RNA, 24 nt, Artificial Sequence
  Synthetic
gugguuacuagcucaaauuuuauu

SEQ ID NO: 407890 - RNA, 18 nt, Artificial Sequence
  Synthetic
uaacuuguaaauuuuauu

SEQ ID NO: 407891 - RNA, 19 nt, Artificial Sequence
  Synthetic
uuaacuuguaaauuuuauu

SEQ ID NO: 407892 - RNA, 20 nt, Artificial Sequence
  Synthetic
auuaacuuguaaauuuuauu

SEQ ID NO: 407893 - RNA, 21 nt, Artificial Sequence
  Synthetic
uauuaacuuguaaauuuuauu

SEQ ID NO: 407894 - RNA, 22 nt, Artificial Sequence
  Synthetic
uuauuaacuuguaaauuuuauu

SEQ ID NO: 407895 - RNA, 23 nt, Artificial Sequence
  Synthetic
cuuauuaacuuguaaauuuuauu

SEQ ID NO: 407896 - RNA, 24 nt, Artificial Sequence
  Synthetic
gcuuauuaacuuguaaauuuuauu

SEQ ID NO: 407897 - RNA, 18 nt, Artificial Sequence
  Synthetic
aaacuguuaaauuuuauu

SEQ ID NO: 407898 - RNA, 19 nt, Artificial Sequence
  Synthetic
uaaacuguuaaauuuuauu

SEQ ID NO: 407899 - RNA, 20 nt, Artificial Sequence
  Synthetic
auaaacuguuaaauuuuauu

SEQ ID NO: 407900 - RNA, 21 nt, Artificial Sequence
  Synthetic
aauaaacuguuaaauuuuauu

SEQ ID NO: 407901 - RNA, 22 nt, Artificial Sequence
  Synthetic
aaauaaacuguuaaauuuuauu

SEQ ID NO: 407902 - RNA, 23 nt, Artificial Sequence
  Synthetic
gaaauaaacuguuaaauuuuauu

SEQ ID NO: 407903 - RNA, 24 nt, Artificial Sequence
  Synthetic
agaaauaaacuguuaaauuuuauu

SEQ ID NO: 407904 - RNA, 18 nt, Artificial Sequence
  Synthetic
ucuuuuauuaauuuuauu

SEQ ID NO: 407905 - RNA, 19 nt, Artificial Sequence
  Synthetic
uucuuuuauuaauuuuauu

SEQ ID NO: 407906 - RNA, 20 nt, Artificial Sequence
  Synthetic
auucuuuuauuaauuuuauu

SEQ ID NO: 407907 - RNA, 21 nt, Artificial Sequence
  Synthetic
aauucuuuuauuaauuuuauu

SEQ ID NO: 407908 - RNA, 22 nt, Artificial Sequence
  Synthetic
gaauucuuuuauuaauuuuauu

SEQ ID NO: 407909 - RNA, 23 nt, Artificial Sequence
  Synthetic
ugaauucuuuuauuaauuuuauu

SEQ ID NO: 407910 - RNA, 24 nt, Artificial Sequence
  Synthetic
gugaauucuuuuauuaauuuuauu

SEQ ID NO: 407911 - RNA, 18 nt, Artificial Sequence
  Synthetic
auuccaucagauuuuauu

SEQ ID NO: 407912 - RNA, 19 nt, Artificial Sequence
  Synthetic
cauuccaucagauuuuauu

SEQ ID NO: 407913 - RNA, 20 nt, Artificial Sequence
  Synthetic
ucauuccaucagauuuuauu

SEQ ID NO: 407914 - RNA, 21 nt, Artificial Sequence
  Synthetic
gucauuccaucagauuuuauu

SEQ ID NO: 407915 - RNA, 22 nt, Artificial Sequence
  Synthetic
agucauuccaucagauuuuauu

SEQ ID NO: 407916 - RNA, 23 nt, Artificial Sequence
  Synthetic
uagucauuccaucagauuuuauu

SEQ ID NO: 407917 - RNA, 24 nt, Artificial Sequence
  Synthetic
cuagucauuccaucagauuuuauu

SEQ ID NO: 407918 - RNA, 18 nt, Artificial Sequence
  Synthetic
gaaaagagauauuuuauu

SEQ ID NO: 407919 - RNA, 19 nt, Artificial Sequence
  Synthetic
ggaaaagagauauuuuauu

SEQ ID NO: 407920 - RNA, 20 nt, Artificial Sequence
  Synthetic
aggaaaagagauauuuuauu

SEQ ID NO: 407921 - RNA, 21 nt, Artificial Sequence
  Synthetic
aaggaaaagagauauuuuauu

SEQ ID NO: 407922 - RNA, 22 nt, Artificial Sequence
  Synthetic
uaaggaaaagagauauuuuauu

SEQ ID NO: 407923 - RNA, 23 nt, Artificial Sequence
  Synthetic
auaaggaaaagagauauuuuauu

SEQ ID NO: 407924 - RNA, 24 nt, Artificial Sequence
  Synthetic
gauaaggaaaagagauauuuuauu

SEQ ID NO: 407925 - RNA, 18 nt, Artificial Sequence
  Synthetic
guuugccaguauuuuauu

SEQ ID NO: 407926 - RNA, 19 nt, Artificial Sequence
  Synthetic
gguuugccaguauuuuauu

SEQ ID NO: 407927 - RNA, 20 nt, Artificial Sequence
  Synthetic
cgguuugccaguauuuuauu

SEQ ID NO: 407928 - RNA, 21 nt, Artificial Sequence
  Synthetic
ucgguuugccaguauuuuauu

SEQ ID NO: 407929 - RNA, 22 nt, Artificial Sequence
  Synthetic
uucgguuugccaguauuuuauu

SEQ ID NO: 407930 - RNA, 23 nt, Artificial Sequence
  Synthetic
auucgguuugccaguauuuuauu

SEQ ID NO: 407931 - RNA, 24 nt, Artificial Sequence
  Synthetic
gauucgguuugccaguauuuuauu

SEQ ID NO: 407932 - RNA, 18 nt, Artificial Sequence
  Synthetic
aaagaagauuauuuuauu

SEQ ID NO: 407933 - RNA, 19 nt, Artificial Sequence
  Synthetic
caaagaagauuauuuuauu

SEQ ID NO: 407934 - RNA, 20 nt, Artificial Sequence
  Synthetic
gcaaagaagauuauuuuauu

SEQ ID NO: 407935 - RNA, 21 nt, Artificial Sequence
  Synthetic
agcaaagaagauuauuuuauu

SEQ ID NO: 407936 - RNA, 22 nt, Artificial Sequence
  Synthetic
uagcaaagaagauuauuuuauu

SEQ ID NO: 407937 - RNA, 23 nt, Artificial Sequence
  Synthetic
cuagcaaagaagauuauuuuauu

SEQ ID NO: 407938 - RNA, 24 nt, Artificial Sequence
  Synthetic
ucuagcaaagaagauuauuuuauu

SEQ ID NO: 407939 - RNA, 18 nt, Artificial Sequence
  Synthetic
cuuaucuucacuuuuauu

SEQ ID NO: 407940 - RNA, 19 nt, Artificial Sequence
  Synthetic
ccuuaucuucacuuuuauu

SEQ ID NO: 407941 - RNA, 20 nt, Artificial Sequence
  Synthetic
cccuuaucuucacuuuuauu

SEQ ID NO: 407942 - RNA, 21 nt, Artificial Sequence
  Synthetic
ucccuuaucuucacuuuuauu

SEQ ID NO: 407943 - RNA, 22 nt, Artificial Sequence
  Synthetic
aucccuuaucuucacuuuuauu

SEQ ID NO: 407944 - RNA, 23 nt, Artificial Sequence
  Synthetic
aaucccuuaucuucacuuuuauu

SEQ ID NO: 407945 - RNA, 24 nt, Artificial Sequence
  Synthetic
caaucccuuaucuucacuuuuauu

SEQ ID NO: 407946 - RNA, 18 nt, Artificial Sequence
  Synthetic
uaucaacauacuuuuauu

SEQ ID NO: 407947 - RNA, 19 nt, Artificial Sequence
  Synthetic
auaucaacauacuuuuauu

SEQ ID NO: 407948 - RNA, 20 nt, Artificial Sequence
  Synthetic
gauaucaacauacuuuuauu

SEQ ID NO: 407949 - RNA, 21 nt, Artificial Sequence
  Synthetic
agauaucaacauacuuuuauu

SEQ ID NO: 407950 - RNA, 22 nt, Artificial Sequence
  Synthetic
uagauaucaacauacuuuuauu

SEQ ID NO: 407951 - RNA, 23 nt, Artificial Sequence
  Synthetic
guagauaucaacauacuuuuauu

SEQ ID NO: 407952 - RNA, 24 nt, Artificial Sequence
  Synthetic
uguagauaucaacauacuuuuauu

SEQ ID NO: 407953 - RNA, 18 nt, Artificial Sequence
  Synthetic
uuccuccauccuuuuauu

SEQ ID NO: 407954 - RNA, 19 nt, Artificial Sequence
  Synthetic
cuuccuccauccuuuuauu

SEQ ID NO: 407955 - RNA, 20 nt, Artificial Sequence
  Synthetic
ucuuccuccauccuuuuauu

SEQ ID NO: 407956 - RNA, 21 nt, Artificial Sequence
  Synthetic
aucuuccuccauccuuuuauu

SEQ ID NO: 407957 - RNA, 22 nt, Artificial Sequence
  Synthetic
gaucuuccuccauccuuuuauu

SEQ ID NO: 407958 - RNA, 23 nt, Artificial Sequence
  Synthetic
agaucuuccuccauccuuuuauu

SEQ ID NO: 407959 - RNA, 24 nt, Artificial Sequence
  Synthetic
uagaucuuccuccauccuuuuauu

SEQ ID NO: 407960 - RNA, 18 nt, Artificial Sequence
  Synthetic
aaaacuccuccuuuuauu

SEQ ID NO: 407961 - RNA, 19 nt, Artificial Sequence
  Synthetic
aaaaacuccuccuuuuauu

SEQ ID NO: 407962 - RNA, 20 nt, Artificial Sequence
  Synthetic
aaaaaacuccuccuuuuauu

SEQ ID NO: 407963 - RNA, 21 nt, Artificial Sequence
  Synthetic
gaaaaaacuccuccuuuuauu

SEQ ID NO: 407964 - RNA, 22 nt, Artificial Sequence
  Synthetic
agaaaaaacuccuccuuuuauu

SEQ ID NO: 407965 - RNA, 23 nt, Artificial Sequence
  Synthetic
uagaaaaaacuccuccuuuuauu

SEQ ID NO: 407966 - RNA, 24 nt, Artificial Sequence
  Synthetic
uuagaaaaaacuccuccuuuuauu

SEQ ID NO: 407967 - RNA, 18 nt, Artificial Sequence
  Synthetic
ugguccuuuucuuuuauu

SEQ ID NO: 407968 - RNA, 19 nt, Artificial Sequence
  Synthetic
gugguccuuuucuuuuauu

SEQ ID NO: 407969 - RNA, 20 nt, Artificial Sequence
  Synthetic
cgugguccuuuucuuuuauu

SEQ ID NO: 407970 - RNA, 21 nt, Artificial Sequence
  Synthetic
ucgugguccuuuucuuuuauu

SEQ ID NO: 407971 - RNA, 22 nt, Artificial Sequence
  Synthetic
cucgugguccuuuucuuuuauu

SEQ ID NO: 407972 - RNA, 23 nt, Artificial Sequence
  Synthetic
ucucgugguccuuuucuuuuauu

SEQ ID NO: 407973 - RNA, 24 nt, Artificial Sequence
  Synthetic
uucucgugguccuuuucuuuuauu

SEQ ID NO: 407974 - RNA, 18 nt, Artificial Sequence
  Synthetic
gaauauguugguuuuauu

SEQ ID NO: 407975 - RNA, 19 nt, Artificial Sequence
  Synthetic
ugaauauguugguuuuauu

SEQ ID NO: 407976 - RNA, 20 nt, Artificial Sequence
  Synthetic
cugaauauguugguuuuauu

SEQ ID NO: 407977 - RNA, 21 nt, Artificial Sequence
  Synthetic
acugaauauguugguuuuauu

SEQ ID NO: 407978 - RNA, 22 nt, Artificial Sequence
  Synthetic
aacugaauauguugguuuuauu

SEQ ID NO: 407979 - RNA, 23 nt, Artificial Sequence
  Synthetic
aaacugaauauguugguuuuauu

SEQ ID NO: 407980 - RNA, 24 nt, Artificial Sequence
  Synthetic
aaaacugaauauguugguuuuauu

SEQ ID NO: 407981 - RNA, 18 nt, Artificial Sequence
  Synthetic
aacagcaaauguuuuauu

SEQ ID NO: 407982 - RNA, 19 nt, Artificial Sequence
  Synthetic
aaacagcaaauguuuuauu

SEQ ID NO: 407983 - RNA, 20 nt, Artificial Sequence
  Synthetic
uaaacagcaaauguuuuauu

SEQ ID NO: 407984 - RNA, 21 nt, Artificial Sequence
  Synthetic
cuaaacagcaaauguuuuauu

SEQ ID NO: 407985 - RNA, 22 nt, Artificial Sequence
  Synthetic
ucuaaacagcaaauguuuuauu

SEQ ID NO: 407986 - RNA, 23 nt, Artificial Sequence
  Synthetic
aucuaaacagcaaauguuuuauu

SEQ ID NO: 407987 - RNA, 24 nt, Artificial Sequence
  Synthetic
caucuaaacagcaaauguuuuauu

SEQ ID NO: 407988 - RNA, 18 nt, Artificial Sequence
  Synthetic
uuuaauuguuguuuuauu

SEQ ID NO: 407989 - RNA, 19 nt, Artificial Sequence
  Synthetic
uuuuaauuguuguuuuauu

SEQ ID NO: 407990 - RNA, 20 nt, Artificial Sequence
  Synthetic
guuuuaauuguuguuuuauu

SEQ ID NO: 407991 - RNA, 21 nt, Artificial Sequence
  Synthetic
gguuuuaauuguuguuuuauu

SEQ ID NO: 407992 - RNA, 22 nt, Artificial Sequence
  Synthetic
ugguuuuaauuguuguuuuauu

SEQ ID NO: 407993 - RNA, 23 nt, Artificial Sequence
  Synthetic
uugguuuuaauuguuguuuuauu

SEQ ID NO: 407994 - RNA, 24 nt, Artificial Sequence
  Synthetic
cuugguuuuaauuguuguuuuauu

SEQ ID NO: 407995 - RNA, 18 nt, Artificial Sequence
  Synthetic
ccucuaugaauuuuuauu

SEQ ID NO: 407996 - RNA, 19 nt, Artificial Sequence
  Synthetic
uccucuaugaauuuuuauu

SEQ ID NO: 407997 - RNA, 20 nt, Artificial Sequence
  Synthetic
uuccucuaugaauuuuuauu

SEQ ID NO: 407998 - RNA, 21 nt, Artificial Sequence
  Synthetic
uuuccucuaugaauuuuuauu

SEQ ID NO: 407999 - RNA, 22 nt, Artificial Sequence
  Synthetic
uuuuccucuaugaauuuuuauu

SEQ ID NO: 408000 - RNA, 23 nt, Artificial Sequence
  Synthetic
uuuuuccucuaugaauuuuuauu

SEQ ID NO: 408001 - RNA, 24 nt, Artificial Sequence
  Synthetic
uuuuuuccucuaugaauuuuuauu

SEQ ID NO: 408002 - RNA, 18 nt, Artificial Sequence
  Synthetic
acacauaacauuuuuauu

SEQ ID NO: 408003 - RNA, 19 nt, Artificial Sequence
  Synthetic
uacacauaacauuuuuauu

SEQ ID NO: 408004 - RNA, 20 nt, Artificial Sequence
  Synthetic
uuacacauaacauuuuuauu

SEQ ID NO: 408005 - RNA, 21 nt, Artificial Sequence
  Synthetic
auuacacauaacauuuuuauu

SEQ ID NO: 408006 - RNA, 22 nt, Artificial Sequence
  Synthetic
cauuacacauaacauuuuuauu

SEQ ID NO: 408007 - RNA, 23 nt, Artificial Sequence
  Synthetic
ucauuacacauaacauuuuuauu

SEQ ID NO: 408008 - RNA, 24 nt, Artificial Sequence
  Synthetic
uucauuacacauaacauuuuuauu

SEQ ID NO: 408009 - RNA, 18 nt, Artificial Sequence
  Synthetic
ucuuaccacauuuuuauu

SEQ ID NO: 408010 - RNA, 19 nt, Artificial Sequence
  Synthetic
aucuuaccacauuuuuauu

SEQ ID NO: 408011 - RNA, 20 nt, Artificial Sequence
  Synthetic
aaucuuaccacauuuuuauu

SEQ ID NO: 408012 - RNA, 21 nt, Artificial Sequence
  Synthetic
aaaucuuaccacauuuuuauu

SEQ ID NO: 408013 - RNA, 22 nt, Artificial Sequence
  Synthetic
aaaaucuuaccacauuuuuauu

SEQ ID NO: 408014 - RNA, 23 nt, Artificial Sequence
  Synthetic
aaaaaucuuaccacauuuuuauu

SEQ ID NO: 408015 - RNA, 24 nt, Artificial Sequence
  Synthetic
aaaaaaucuuaccacauuuuuauu

SEQ ID NO: 408016 - RNA, 18 nt, Artificial Sequence
  Synthetic
aucauccugauuuuuauu

SEQ ID NO: 408017 - RNA, 19 nt, Artificial Sequence
  Synthetic
caucauccugauuuuuauu

SEQ ID NO: 408018 - RNA, 20 nt, Artificial Sequence
  Synthetic
ucaucauccugauuuuuauu

SEQ ID NO: 408019 - RNA, 21 nt, Artificial Sequence
  Synthetic
uucaucauccugauuuuuauu

SEQ ID NO: 408020 - RNA, 22 nt, Artificial Sequence
  Synthetic
cuucaucauccugauuuuuauu

SEQ ID NO: 408021 - RNA, 23 nt, Artificial Sequence
  Synthetic
ucuucaucauccugauuuuuauu

SEQ ID NO: 408022 - RNA, 24 nt, Artificial Sequence
  Synthetic
uucuucaucauccugauuuuuauu

SEQ ID NO: 408023 - RNA, 18 nt, Artificial Sequence
  Synthetic
aaaugagcccuuuuuauu

SEQ ID NO: 408024 - RNA, 19 nt, Artificial Sequence
  Synthetic
gaaaugagcccuuuuuauu

SEQ ID NO: 408025 - RNA, 20 nt, Artificial Sequence
  Synthetic
agaaaugagcccuuuuuauu

SEQ ID NO: 408026 - RNA, 21 nt, Artificial Sequence
  Synthetic
aagaaaugagcccuuuuuauu

SEQ ID NO: 408027 - RNA, 22 nt, Artificial Sequence
  Synthetic
uaagaaaugagcccuuuuuauu

SEQ ID NO: 408028 - RNA, 23 nt, Artificial Sequence
  Synthetic
auaagaaaugagcccuuuuuauu

SEQ ID NO: 408029 - RNA, 24 nt, Artificial Sequence
  Synthetic
gauaagaaaugagcccuuuuuauu

SEQ ID NO: 408030 - RNA, 18 nt, Artificial Sequence
  Synthetic
uuauaguuuguuuuuauu

SEQ ID NO: 408031 - RNA, 19 nt, Artificial Sequence
  Synthetic
uuuauaguuuguuuuuauu

SEQ ID NO: 408032 - RNA, 20 nt, Artificial Sequence
  Synthetic
uuuuauaguuuguuuuuauu

SEQ ID NO: 408033 - RNA, 21 nt, Artificial Sequence
  Synthetic
cuuuuauaguuuguuuuuauu

SEQ ID NO: 408034 - RNA, 22 nt, Artificial Sequence
  Synthetic
ccuuuuauaguuuguuuuuauu

SEQ ID NO: 408035 - RNA, 23 nt, Artificial Sequence
  Synthetic
uccuuuuauaguuuguuuuuauu

SEQ ID NO: 408036 - RNA, 24 nt, Artificial Sequence
  Synthetic
cuccuuuuauaguuuguuuuuauu

SEQ ID NO: 408037 - RNA, 18 nt, Artificial Sequence
  Synthetic
acauauuuauuuuuuauu

SEQ ID NO: 408038 - RNA, 19 nt, Artificial Sequence
  Synthetic
cacauauuuauuuuuuauu

SEQ ID NO: 408039 - RNA, 20 nt, Artificial Sequence
  Synthetic
acacauauuuauuuuuuauu

SEQ ID NO: 408040 - RNA, 21 nt, Artificial Sequence
  Synthetic
aacacauauuuauuuuuuauu

SEQ ID NO: 408041 - RNA, 22 nt, Artificial Sequence
  Synthetic
uaacacauauuuauuuuuuauu

SEQ ID NO: 408042 - RNA, 23 nt, Artificial Sequence
  Synthetic
uuaacacauauuuauuuuuuauu

SEQ ID NO: 408043 - RNA, 24 nt, Artificial Sequence
  Synthetic
auuaacacauauuuauuuuuuauu

SEQ ID NO: 408044 - RNA, 18 nt, Artificial Sequence
  Synthetic
uuuuaagauuuuuuuauu

SEQ ID NO: 408045 - RNA, 19 nt, Artificial Sequence
  Synthetic
guuuuaagauuuuuuuauu

SEQ ID NO: 408046 - RNA, 20 nt, Artificial Sequence
  Synthetic
uguuuuaagauuuuuuuauu

SEQ ID NO: 408047 - RNA, 21 nt, Artificial Sequence
  Synthetic
auguuuuaagauuuuuuuauu

SEQ ID NO: 408048 - RNA, 22 nt, Artificial Sequence
  Synthetic
aauguuuuaagauuuuuuuauu

SEQ ID NO: 408049 - RNA, 23 nt, Artificial Sequence
  Synthetic
gaauguuuuaagauuuuuuuauu

SEQ ID NO: 408050 - RNA, 24 nt, Artificial Sequence
  Synthetic
agaauguuuuaagauuuuuuuauu

SEQ ID NO: 408051 - RNA, 18 nt, Artificial Sequence
  Synthetic
uuucccauugaaaaacuu

SEQ ID NO: 408052 - RNA, 19 nt, Artificial Sequence
  Synthetic
uuuucccauugaaaaacuu

SEQ ID NO: 408053 - RNA, 20 nt, Artificial Sequence
  Synthetic
guuuucccauugaaaaacuu

SEQ ID NO: 408054 - RNA, 21 nt, Artificial Sequence
  Synthetic
aguuuucccauugaaaaacuu

SEQ ID NO: 408055 - RNA, 22 nt, Artificial Sequence
  Synthetic
caguuuucccauugaaaaacuu

SEQ ID NO: 408056 - RNA, 23 nt, Artificial Sequence
  Synthetic
ccaguuuucccauugaaaaacuu

SEQ ID NO: 408057 - RNA, 24 nt, Artificial Sequence
  Synthetic
accaguuuucccauugaaaaacuu

SEQ ID NO: 408058 - RNA, 18 nt, Artificial Sequence
  Synthetic
aaguuuauuuaaaaacuu

SEQ ID NO: 408059 - RNA, 19 nt, Artificial Sequence
  Synthetic
aaaguuuauuuaaaaacuu

SEQ ID NO: 408060 - RNA, 20 nt, Artificial Sequence
  Synthetic
gaaaguuuauuuaaaaacuu

SEQ ID NO: 408061 - RNA, 21 nt, Artificial Sequence
  Synthetic
ugaaaguuuauuuaaaaacuu

SEQ ID NO: 408062 - RNA, 22 nt, Artificial Sequence
  Synthetic
augaaaguuuauuuaaaaacuu

SEQ ID NO: 408063 - RNA, 23 nt, Artificial Sequence
  Synthetic
aaugaaaguuuauuuaaaaacuu

SEQ ID NO: 408064 - RNA, 24 nt, Artificial Sequence
  Synthetic
gaaugaaaguuuauuuaaaaacuu

SEQ ID NO: 408065 - RNA, 18 nt, Artificial Sequence
  Synthetic
uacaauauaccaaaacuu

SEQ ID NO: 408066 - RNA, 19 nt, Artificial Sequence
  Synthetic
auacaauauaccaaaacuu

SEQ ID NO: 408067 - RNA, 20 nt, Artificial Sequence
  Synthetic
aauacaauauaccaaaacuu

SEQ ID NO: 408068 - RNA, 21 nt, Artificial Sequence
  Synthetic
aaauacaauauaccaaaacuu

SEQ ID NO: 408069 - RNA, 22 nt, Artificial Sequence
  Synthetic
aaaauacaauauaccaaaacuu

SEQ ID NO: 408070 - RNA, 23 nt, Artificial Sequence
  Synthetic
aaaaauacaauauaccaaaacuu

SEQ ID NO: 408071 - RNA, 24 nt, Artificial Sequence
  Synthetic
uaaaaauacaauauaccaaaacuu

SEQ ID NO: 408072 - RNA, 18 nt, Artificial Sequence
  Synthetic
uuacacaggugaaaacuu

SEQ ID NO: 408073 - RNA, 19 nt, Artificial Sequence
  Synthetic
guuacacaggugaaaacuu

SEQ ID NO: 408074 - RNA, 20 nt, Artificial Sequence
  Synthetic
aguuacacaggugaaaacuu

SEQ ID NO: 408075 - RNA, 21 nt, Artificial Sequence
  Synthetic
uaguuacacaggugaaaacuu

SEQ ID NO: 408076 - RNA, 22 nt, Artificial Sequence
  Synthetic
auaguuacacaggugaaaacuu

SEQ ID NO: 408077 - RNA, 23 nt, Artificial Sequence
  Synthetic
cauaguuacacaggugaaaacuu

SEQ ID NO: 408078 - RNA, 24 nt, Artificial Sequence
  Synthetic
ucauaguuacacaggugaaaacuu

SEQ ID NO: 408079 - RNA, 18 nt, Artificial Sequence
  Synthetic
ccgacaagacacaaacuu

SEQ ID NO: 408080 - RNA, 19 nt, Artificial Sequence
  Synthetic
uccgacaagacacaaacuu

SEQ ID NO: 408081 - RNA, 20 nt, Artificial Sequence
  Synthetic
uuccgacaagacacaaacuu

SEQ ID NO: 408082 - RNA, 21 nt, Artificial Sequence
  Synthetic
auuccgacaagacacaaacuu

SEQ ID NO: 408083 - RNA, 22 nt, Artificial Sequence
  Synthetic
cauuccgacaagacacaaacuu

SEQ ID NO: 408084 - RNA, 23 nt, Artificial Sequence
  Synthetic
ucauuccgacaagacacaaacuu

SEQ ID NO: 408085 - RNA, 24 nt, Artificial Sequence
  Synthetic
uucauuccgacaagacacaaacuu

SEQ ID NO: 408086 - RNA, 18 nt, Artificial Sequence
  Synthetic
cgacuccauuacaaacuu

SEQ ID NO: 408087 - RNA, 19 nt, Artificial Sequence
  Synthetic
gcgacuccauuacaaacuu

SEQ ID NO: 408088 - RNA, 20 nt, Artificial Sequence
  Synthetic
cgcgacuccauuacaaacuu

SEQ ID NO: 408089 - RNA, 21 nt, Artificial Sequence
  Synthetic
ucgcgacuccauuacaaacuu

SEQ ID NO: 408090 - RNA, 22 nt, Artificial Sequence
  Synthetic
aucgcgacuccauuacaaacuu

SEQ ID NO: 408091 - RNA, 23 nt, Artificial Sequence
  Synthetic
uaucgcgacuccauuacaaacuu

SEQ ID NO: 408092 - RNA, 24 nt, Artificial Sequence
  Synthetic
cuaucgcgacuccauuacaaacuu

SEQ ID NO: 408093 - RNA, 18 nt, Artificial Sequence
  Synthetic
gggggcaugagcaaacuu

SEQ ID NO: 408094 - RNA, 19 nt, Artificial Sequence
  Synthetic
agggggcaugagcaaacuu

SEQ ID NO: 408095 - RNA, 20 nt, Artificial Sequence
  Synthetic
aagggggcaugagcaaacuu

SEQ ID NO: 408096 - RNA, 21 nt, Artificial Sequence
  Synthetic
gaagggggcaugagcaaacuu

SEQ ID NO: 408097 - RNA, 22 nt, Artificial Sequence
  Synthetic
ugaagggggcaugagcaaacuu

SEQ ID NO: 408098 - RNA, 23 nt, Artificial Sequence
  Synthetic
augaagggggcaugagcaaacuu

SEQ ID NO: 408099 - RNA, 24 nt, Artificial Sequence
  Synthetic
aaugaagggggcaugagcaaacuu

SEQ ID NO: 408100 - RNA, 18 nt, Artificial Sequence
  Synthetic
cuauccuuugucaaacuu

SEQ ID NO: 408101 - RNA, 19 nt, Artificial Sequence
  Synthetic
gcuauccuuugucaaacuu

SEQ ID NO: 408102 - RNA, 20 nt, Artificial Sequence
  Synthetic
ugcuauccuuugucaaacuu

SEQ ID NO: 408103 - RNA, 21 nt, Artificial Sequence
  Synthetic
uugcuauccuuugucaaacuu

SEQ ID NO: 408104 - RNA, 22 nt, Artificial Sequence
  Synthetic
auugcuauccuuugucaaacuu

SEQ ID NO: 408105 - RNA, 23 nt, Artificial Sequence
  Synthetic
aauugcuauccuuugucaaacuu

SEQ ID NO: 408106 - RNA, 24 nt, Artificial Sequence
  Synthetic
uaauugcuauccuuugucaaacuu

SEQ ID NO: 408107 - RNA, 18 nt, Artificial Sequence
  Synthetic
gaaauuguugagaaacuu

SEQ ID NO: 408108 - RNA, 19 nt, Artificial Sequence
  Synthetic
agaaauuguugagaaacuu

SEQ ID NO: 408109 - RNA, 20 nt, Artificial Sequence
  Synthetic
gagaaauuguugagaaacuu

SEQ ID NO: 408110 - RNA, 21 nt, Artificial Sequence
  Synthetic
agagaaauuguugagaaacuu

SEQ ID NO: 408111 - RNA, 22 nt, Artificial Sequence
  Synthetic
cagagaaauuguugagaaacuu

SEQ ID NO: 408112 - RNA, 23 nt, Artificial Sequence
  Synthetic
ccagagaaauuguugagaaacuu

SEQ ID NO: 408113 - RNA, 24 nt, Artificial Sequence
  Synthetic
cccagagaaauuguugagaaacuu

SEQ ID NO: 408114 - RNA, 18 nt, Artificial Sequence
  Synthetic
uaaggugagaggaaacuu

SEQ ID NO: 408115 - RNA, 19 nt, Artificial Sequence
  Synthetic
auaaggugagaggaaacuu

SEQ ID NO: 408116 - RNA, 20 nt, Artificial Sequence
  Synthetic
cauaaggugagaggaaacuu

SEQ ID NO: 408117 - RNA, 21 nt, Artificial Sequence
  Synthetic
acauaaggugagaggaaacuu

SEQ ID NO: 408118 - RNA, 22 nt, Artificial Sequence
  Synthetic
uacauaaggugagaggaaacuu

SEQ ID NO: 408119 - RNA, 23 nt, Artificial Sequence
  Synthetic
guacauaaggugagaggaaacuu

SEQ ID NO: 408120 - RNA, 24 nt, Artificial Sequence
  Synthetic
gguacauaaggugagaggaaacuu

SEQ ID NO: 408121 - RNA, 18 nt, Artificial Sequence
  Synthetic
uuuguacucaugaaacuu

SEQ ID NO: 408122 - RNA, 19 nt, Artificial Sequence
  Synthetic
uuuuguacucaugaaacuu

SEQ ID NO: 408123 - RNA, 20 nt, Artificial Sequence
  Synthetic
auuuuguacucaugaaacuu

SEQ ID NO: 408124 - RNA, 21 nt, Artificial Sequence
  Synthetic
aauuuuguacucaugaaacuu

SEQ ID NO: 408125 - RNA, 22 nt, Artificial Sequence
  Synthetic
uaauuuuguacucaugaaacuu

SEQ ID NO: 408126 - RNA, 23 nt, Artificial Sequence
  Synthetic
uuaauuuuguacucaugaaacuu

SEQ ID NO: 408127 - RNA, 24 nt, Artificial Sequence
  Synthetic
uuuaauuuuguacucaugaaacuu

SEQ ID NO: 408128 - RNA, 18 nt, Artificial Sequence
  Synthetic
augucaacauugaaacuu

SEQ ID NO: 408129 - RNA, 19 nt, Artificial Sequence
  Synthetic
caugucaacauugaaacuu

SEQ ID NO: 408130 - RNA, 20 nt, Artificial Sequence
  Synthetic
ccaugucaacauugaaacuu

SEQ ID NO: 408131 - RNA, 21 nt, Artificial Sequence
  Synthetic
gccaugucaacauugaaacuu

SEQ ID NO: 408132 - RNA, 22 nt, Artificial Sequence
  Synthetic
ugccaugucaacauugaaacuu

SEQ ID NO: 408133 - RNA, 23 nt, Artificial Sequence
  Synthetic
cugccaugucaacauugaaacuu

SEQ ID NO: 408134 - RNA, 24 nt, Artificial Sequence
  Synthetic
ucugccaugucaacauugaaacuu

SEQ ID NO: 408135 - RNA, 18 nt, Artificial Sequence
  Synthetic
aucccgccuuugaaacuu

SEQ ID NO: 408136 - RNA, 19 nt, Artificial Sequence
  Synthetic
caucccgccuuugaaacuu

SEQ ID NO: 408137 - RNA, 20 nt, Artificial Sequence
  Synthetic
ccaucccgccuuugaaacuu

SEQ ID NO: 408138 - RNA, 21 nt, Artificial Sequence
  Synthetic
cccaucccgccuuugaaacuu

SEQ ID NO: 408139 - RNA, 22 nt, Artificial Sequence
  Synthetic
ucccaucccgccuuugaaacuu

SEQ ID NO: 408140 - RNA, 23 nt, Artificial Sequence
  Synthetic
uucccaucccgccuuugaaacuu

SEQ ID NO: 408141 - RNA, 24 nt, Artificial Sequence
  Synthetic
auucccaucccgccuuugaaacuu

SEQ ID NO: 408142 - RNA, 18 nt, Artificial Sequence
  Synthetic
aucccaaugcauaaacuu

SEQ ID NO: 408143 - RNA, 19 nt, Artificial Sequence
  Synthetic
aaucccaaugcauaaacuu

SEQ ID NO: 408144 - RNA, 20 nt, Artificial Sequence
  Synthetic
uaaucccaaugcauaaacuu

SEQ ID NO: 408145 - RNA, 21 nt, Artificial Sequence
  Synthetic
cuaaucccaaugcauaaacuu

SEQ ID NO: 408146 - RNA, 22 nt, Artificial Sequence
  Synthetic
gcuaaucccaaugcauaaacuu

SEQ ID NO: 408147 - RNA, 23 nt, Artificial Sequence
  Synthetic
ugcuaaucccaaugcauaaacuu

SEQ ID NO: 408148 - RNA, 24 nt, Artificial Sequence
  Synthetic
augcuaaucccaaugcauaaacuu

SEQ ID NO: 408149 - RNA, 18 nt, Artificial Sequence
  Synthetic
aaggaaaaggauaaacuu

SEQ ID NO: 408150 - RNA, 19 nt, Artificial Sequence
  Synthetic
uaaggaaaaggauaaacuu

SEQ ID NO: 408151 - RNA, 20 nt, Artificial Sequence
  Synthetic
auaaggaaaaggauaaacuu

SEQ ID NO: 408152 - RNA, 21 nt, Artificial Sequence
  Synthetic
uauaaggaaaaggauaaacuu

SEQ ID NO: 408153 - RNA, 22 nt, Artificial Sequence
  Synthetic
auauaaggaaaaggauaaacuu

SEQ ID NO: 408154 - RNA, 23 nt, Artificial Sequence
  Synthetic
cauauaaggaaaaggauaaacuu

SEQ ID NO: 408155 - RNA, 24 nt, Artificial Sequence
  Synthetic
ccauauaaggaaaaggauaaacuu

SEQ ID NO: 408156 - RNA, 18 nt, Artificial Sequence
  Synthetic
uauggcuugccuaaacuu

SEQ ID NO: 408157 - RNA, 19 nt, Artificial Sequence
  Synthetic
cuauggcuugccuaaacuu

SEQ ID NO: 408158 - RNA, 20 nt, Artificial Sequence
  Synthetic
gcuauggcuugccuaaacuu

SEQ ID NO: 408159 - RNA, 21 nt, Artificial Sequence
  Synthetic
cgcuauggcuugccuaaacuu

SEQ ID NO: 408160 - RNA, 22 nt, Artificial Sequence
  Synthetic
acgcuauggcuugccuaaacuu

SEQ ID NO: 408161 - RNA, 23 nt, Artificial Sequence
  Synthetic
gacgcuauggcuugccuaaacuu

SEQ ID NO: 408162 - RNA, 24 nt, Artificial Sequence
  Synthetic
ugacgcuauggcuugccuaaacuu

SEQ ID NO: 408163 - RNA, 18 nt, Artificial Sequence
  Synthetic
cuuaccccuucuaaacuu

SEQ ID NO: 408164 - RNA, 19 nt, Artificial Sequence
  Synthetic
acuuaccccuucuaaacuu

SEQ ID NO: 408165 - RNA, 20 nt, Artificial Sequence
  Synthetic
cacuuaccccuucuaaacuu

SEQ ID NO: 408166 - RNA, 21 nt, Artificial Sequence
  Synthetic
ucacuuaccccuucuaaacuu

SEQ ID NO: 408167 - RNA, 22 nt, Artificial Sequence
  Synthetic
gucacuuaccccuucuaaacuu

SEQ ID NO: 408168 - RNA, 23 nt, Artificial Sequence
  Synthetic
ugucacuuaccccuucuaaacuu

SEQ ID NO: 408169 - RNA, 24 nt, Artificial Sequence
  Synthetic
cugucacuuaccccuucuaaacuu

SEQ ID NO: 408170 - RNA, 18 nt, Artificial Sequence
  Synthetic
auucaaauauuuaaacuu

SEQ ID NO: 408171 - RNA, 19 nt, Artificial Sequence
  Synthetic
uauucaaauauuuaaacuu

SEQ ID NO: 408172 - RNA, 20 nt, Artificial Sequence
  Synthetic
cuauucaaauauuuaaacuu

SEQ ID NO: 408173 - RNA, 21 nt, Artificial Sequence
  Synthetic
acuauucaaauauuuaaacuu

SEQ ID NO: 408174 - RNA, 22 nt, Artificial Sequence
  Synthetic
aacuauucaaauauuuaaacuu

SEQ ID NO: 408175 - RNA, 23 nt, Artificial Sequence
  Synthetic
gaacuauucaaauauuuaaacuu

SEQ ID NO: 408176 - RNA, 24 nt, Artificial Sequence
  Synthetic
ugaacuauucaaauauuuaaacuu

SEQ ID NO: 408177 - RNA, 18 nt, Artificial Sequence
  Synthetic
cugugccacucacaacuu

SEQ ID NO: 408178 - RNA, 19 nt, Artificial Sequence
  Synthetic
ucugugccacucacaacuu

SEQ ID NO: 408179 - RNA, 20 nt, Artificial Sequence
  Synthetic
aucugugccacucacaacuu

SEQ ID NO: 408180 - RNA, 21 nt, Artificial Sequence
  Synthetic
aaucugugccacucacaacuu

SEQ ID NO: 408181 - RNA, 22 nt, Artificial Sequence
  Synthetic
aaaucugugccacucacaacuu

SEQ ID NO: 408182 - RNA, 23 nt, Artificial Sequence
  Synthetic
uaaaucugugccacucacaacuu

SEQ ID NO: 408183 - RNA, 24 nt, Artificial Sequence
  Synthetic
auaaaucugugccacucacaacuu

SEQ ID NO: 408184 - RNA, 18 nt, Artificial Sequence
  Synthetic
guguaaauuugacaacuu

SEQ ID NO: 408185 - RNA, 19 nt, Artificial Sequence
  Synthetic
aguguaaauuugacaacuu

SEQ ID NO: 408186 - RNA, 20 nt, Artificial Sequence
  Synthetic
uaguguaaauuugacaacuu

SEQ ID NO: 408187 - RNA, 21 nt, Artificial Sequence
  Synthetic
auaguguaaauuugacaacuu

SEQ ID NO: 408188 - RNA, 22 nt, Artificial Sequence
  Synthetic
gauaguguaaauuugacaacuu

SEQ ID NO: 408189 - RNA, 23 nt, Artificial Sequence
  Synthetic
ugauaguguaaauuugacaacuu

SEQ ID NO: 408190 - RNA, 24 nt, Artificial Sequence
  Synthetic
cugauaguguaaauuugacaacuu

SEQ ID NO: 408191 - RNA, 18 nt, Artificial Sequence
  Synthetic
ggaagcaauuuacaacuu

SEQ ID NO: 408192 - RNA, 19 nt, Artificial Sequence
  Synthetic
uggaagcaauuuacaacuu

SEQ ID NO: 408193 - RNA, 20 nt, Artificial Sequence
  Synthetic
cuggaagcaauuuacaacuu

SEQ ID NO: 408194 - RNA, 21 nt, Artificial Sequence
  Synthetic
ucuggaagcaauuuacaacuu

SEQ ID NO: 408195 - RNA, 22 nt, Artificial Sequence
  Synthetic
cucuggaagcaauuuacaacuu

SEQ ID NO: 408196 - RNA, 23 nt, Artificial Sequence
  Synthetic
ccucuggaagcaauuuacaacuu

SEQ ID NO: 408197 - RNA, 24 nt, Artificial Sequence
  Synthetic
gccucuggaagcaauuuacaacuu

SEQ ID NO: 408198 - RNA, 18 nt, Artificial Sequence
  Synthetic
uggcuuacacuccaacuu

SEQ ID NO: 408199 - RNA, 19 nt, Artificial Sequence
  Synthetic
cuggcuuacacuccaacuu

SEQ ID NO: 408200 - RNA, 20 nt, Artificial Sequence
  Synthetic
gcuggcuuacacuccaacuu

SEQ ID NO: 408201 - RNA, 21 nt, Artificial Sequence
  Synthetic
agcuggcuuacacuccaacuu

SEQ ID NO: 408202 - RNA, 22 nt, Artificial Sequence
  Synthetic
gagcuggcuuacacuccaacuu

SEQ ID NO: 408203 - RNA, 23 nt, Artificial Sequence
  Synthetic
agagcuggcuuacacuccaacuu

SEQ ID NO: 408204 - RNA, 24 nt, Artificial Sequence
  Synthetic
aagagcuggcuuacacuccaacuu

SEQ ID NO: 408205 - RNA, 18 nt, Artificial Sequence
  Synthetic
auuggauaagagcaacuu

SEQ ID NO: 408206 - RNA, 19 nt, Artificial Sequence
  Synthetic
gauuggauaagagcaacuu

SEQ ID NO: 408207 - RNA, 20 nt, Artificial Sequence
  Synthetic
ugauuggauaagagcaacuu

SEQ ID NO: 408208 - RNA, 21 nt, Artificial Sequence
  Synthetic
cugauuggauaagagcaacuu

SEQ ID NO: 408209 - RNA, 22 nt, Artificial Sequence
  Synthetic
acugauuggauaagagcaacuu

SEQ ID NO: 408210 - RNA, 23 nt, Artificial Sequence
  Synthetic
aacugauuggauaagagcaacuu

SEQ ID NO: 408211 - RNA, 24 nt, Artificial Sequence
  Synthetic
uaacugauuggauaagagcaacuu

SEQ ID NO: 408212 - RNA, 18 nt, Artificial Sequence
  Synthetic
cccagaguuuagcaacuu

SEQ ID NO: 408213 - RNA, 19 nt, Artificial Sequence
  Synthetic
acccagaguuuagcaacuu

SEQ ID NO: 408214 - RNA, 20 nt, Artificial Sequence
  Synthetic
aacccagaguuuagcaacuu

SEQ ID NO: 408215 - RNA, 21 nt, Artificial Sequence
  Synthetic
caacccagaguuuagcaacuu

SEQ ID NO: 408216 - RNA, 22 nt, Artificial Sequence
  Synthetic
gcaacccagaguuuagcaacuu

SEQ ID NO: 408217 - RNA, 23 nt, Artificial Sequence
  Synthetic
ggcaacccagaguuuagcaacuu

SEQ ID NO: 408218 - RNA, 24 nt, Artificial Sequence
  Synthetic
aggcaacccagaguuuagcaacuu

SEQ ID NO: 408219 - RNA, 18 nt, Artificial Sequence
  Synthetic
gguauauacaaucaacuu

SEQ ID NO: 408220 - RNA, 19 nt, Artificial Sequence
  Synthetic
ugguauauacaaucaacuu

SEQ ID NO: 408221 - RNA, 20 nt, Artificial Sequence
  Synthetic
uugguauauacaaucaacuu

SEQ ID NO: 408222 - RNA, 21 nt, Artificial Sequence
  Synthetic
cuugguauauacaaucaacuu

SEQ ID NO: 408223 - RNA, 22 nt, Artificial Sequence
  Synthetic
ucuugguauauacaaucaacuu

SEQ ID NO: 408224 - RNA, 23 nt, Artificial Sequence
  Synthetic
cucuugguauauacaaucaacuu

SEQ ID NO: 408225 - RNA, 24 nt, Artificial Sequence
  Synthetic
gcucuugguauauacaaucaacuu

SEQ ID NO: 408226 - RNA, 18 nt, Artificial Sequence
  Synthetic
aaaugagggacucaacuu

SEQ ID NO: 408227 - RNA, 19 nt, Artificial Sequence
  Synthetic
gaaaugagggacucaacuu

SEQ ID NO: 408228 - RNA, 20 nt, Artificial Sequence
  Synthetic
agaaaugagggacucaacuu

SEQ ID NO: 408229 - RNA, 21 nt, Artificial Sequence
  Synthetic
cagaaaugagggacucaacuu

SEQ ID NO: 408230 - RNA, 22 nt, Artificial Sequence
  Synthetic
gcagaaaugagggacucaacuu

SEQ ID NO: 408231 - RNA, 23 nt, Artificial Sequence
  Synthetic
ggcagaaaugagggacucaacuu

SEQ ID NO: 408232 - RNA, 24 nt, Artificial Sequence
  Synthetic
uggcagaaaugagggacucaacuu

SEQ ID NO: 408233 - RNA, 18 nt, Artificial Sequence
  Synthetic
gcccgauucauucaacuu

SEQ ID NO: 408234 - RNA, 19 nt, Artificial Sequence
  Synthetic
agcccgauucauucaacuu

SEQ ID NO: 408235 - RNA, 20 nt, Artificial Sequence
  Synthetic
uagcccgauucauucaacuu

SEQ ID NO: 408236 - RNA, 21 nt, Artificial Sequence
  Synthetic
cuagcccgauucauucaacuu

SEQ ID NO: 408237 - RNA, 22 nt, Artificial Sequence
  Synthetic
ccuagcccgauucauucaacuu

SEQ ID NO: 408238 - RNA, 23 nt, Artificial Sequence
  Synthetic
uccuagcccgauucauucaacuu

SEQ ID NO: 408239 - RNA, 24 nt, Artificial Sequence
  Synthetic
uuccuagcccgauucauucaacuu

SEQ ID NO: 408240 - RNA, 18 nt, Artificial Sequence
  Synthetic
aagcuggagaaagaacuu

SEQ ID NO: 408241 - RNA, 19 nt, Artificial Sequence
  Synthetic
gaagcuggagaaagaacuu

SEQ ID NO: 408242 - RNA, 20 nt, Artificial Sequence
  Synthetic
ggaagcuggagaaagaacuu

SEQ ID NO: 408243 - RNA, 21 nt, Artificial Sequence
  Synthetic
aggaagcuggagaaagaacuu

SEQ ID NO: 408244 - RNA, 22 nt, Artificial Sequence
  Synthetic
caggaagcuggagaaagaacuu

SEQ ID NO: 408245 - RNA, 23 nt, Artificial Sequence
  Synthetic
ccaggaagcuggagaaagaacuu

SEQ ID NO: 408246 - RNA, 24 nt, Artificial Sequence
  Synthetic
gccaggaagcuggagaaagaacuu

SEQ ID NO: 408247 - RNA, 18 nt, Artificial Sequence
  Synthetic
uagcuuccagcagaacuu

SEQ ID NO: 408248 - RNA, 19 nt, Artificial Sequence
  Synthetic
guagcuuccagcagaacuu

SEQ ID NO: 408249 - RNA, 20 nt, Artificial Sequence
  Synthetic
uguagcuuccagcagaacuu

SEQ ID NO: 408250 - RNA, 21 nt, Artificial Sequence
  Synthetic
cuguagcuuccagcagaacuu

SEQ ID NO: 408251 - RNA, 22 nt, Artificial Sequence
  Synthetic
acuguagcuuccagcagaacuu

SEQ ID NO: 408252 - RNA, 23 nt, Artificial Sequence
  Synthetic
aacuguagcuuccagcagaacuu

SEQ ID NO: 408253 - RNA, 24 nt, Artificial Sequence
  Synthetic
caacuguagcuuccagcagaacuu

SEQ ID NO: 408254 - RNA, 18 nt, Artificial Sequence
  Synthetic
gacaauaucagagaacuu

SEQ ID NO: 408255 - RNA, 19 nt, Artificial Sequence
  Synthetic
ggacaauaucagagaacuu

SEQ ID NO: 408256 - RNA, 20 nt, Artificial Sequence
  Synthetic
gggacaauaucagagaacuu

SEQ ID NO: 408257 - RNA, 21 nt, Artificial Sequence
  Synthetic
agggacaauaucagagaacuu

SEQ ID NO: 408258 - RNA, 22 nt, Artificial Sequence
  Synthetic
aagggacaauaucagagaacuu

SEQ ID NO: 408259 - RNA, 23 nt, Artificial Sequence
  Synthetic
aaagggacaauaucagagaacuu

SEQ ID NO: 408260 - RNA, 24 nt, Artificial Sequence
  Synthetic
caaagggacaauaucagagaacuu

SEQ ID NO: 408261 - RNA, 18 nt, Artificial Sequence
  Synthetic
uccaaguacuuagaacuu

SEQ ID NO: 408262 - RNA, 19 nt, Artificial Sequence
  Synthetic
uuccaaguacuuagaacuu

SEQ ID NO: 408263 - RNA, 20 nt, Artificial Sequence
  Synthetic
auuccaaguacuuagaacuu

SEQ ID NO: 408264 - RNA, 21 nt, Artificial Sequence
  Synthetic
aauuccaaguacuuagaacuu

SEQ ID NO: 408265 - RNA, 22 nt, Artificial Sequence
  Synthetic
gaauuccaaguacuuagaacuu

SEQ ID NO: 408266 - RNA, 23 nt, Artificial Sequence
  Synthetic
ugaauuccaaguacuuagaacuu

SEQ ID NO: 408267 - RNA, 24 nt, Artificial Sequence
  Synthetic
cugaauuccaaguacuuagaacuu

SEQ ID NO: 408268 - RNA, 18 nt, Artificial Sequence
  Synthetic
agagagaauuuggaacuu

SEQ ID NO: 408269 - RNA, 19 nt, Artificial Sequence
  Synthetic
cagagagaauuuggaacuu

SEQ ID NO: 408270 - RNA, 20 nt, Artificial Sequence
  Synthetic
acagagagaauuuggaacuu

SEQ ID NO: 408271 - RNA, 21 nt, Artificial Sequence
  Synthetic
cacagagagaauuuggaacuu

SEQ ID NO: 408272 - RNA, 22 nt, Artificial Sequence
  Synthetic
acacagagagaauuuggaacuu

SEQ ID NO: 408273 - RNA, 23 nt, Artificial Sequence
  Synthetic
cacacagagagaauuuggaacuu

SEQ ID NO: 408274 - RNA, 24 nt, Artificial Sequence
  Synthetic
acacacagagagaauuuggaacuu

SEQ ID NO: 408275 - RNA, 18 nt, Artificial Sequence
  Synthetic
uaaaauagggaugaacuu

SEQ ID NO: 408276 - RNA, 19 nt, Artificial Sequence
  Synthetic
cuaaaauagggaugaacuu

SEQ ID NO: 408277 - RNA, 20 nt, Artificial Sequence
  Synthetic
ccuaaaauagggaugaacuu

SEQ ID NO: 408278 - RNA, 21 nt, Artificial Sequence
  Synthetic
uccuaaaauagggaugaacuu

SEQ ID NO: 408279 - RNA, 22 nt, Artificial Sequence
  Synthetic
auccuaaaauagggaugaacuu

SEQ ID NO: 408280 - RNA, 23 nt, Artificial Sequence
  Synthetic
cauccuaaaauagggaugaacuu

SEQ ID NO: 408281 - RNA, 24 nt, Artificial Sequence
  Synthetic
acauccuaaaauagggaugaacuu

SEQ ID NO: 408282 - RNA, 18 nt, Artificial Sequence
  Synthetic
caagcaaguccugaacuu

SEQ ID NO: 408283 - RNA, 19 nt, Artificial Sequence
  Synthetic
acaagcaaguccugaacuu

SEQ ID NO: 408284 - RNA, 20 nt, Artificial Sequence
  Synthetic
aacaagcaaguccugaacuu

SEQ ID NO: 408285 - RNA, 21 nt, Artificial Sequence
  Synthetic
aaacaagcaaguccugaacuu

SEQ ID NO: 408286 - RNA, 22 nt, Artificial Sequence
  Synthetic
aaaacaagcaaguccugaacuu

SEQ ID NO: 408287 - RNA, 23 nt, Artificial Sequence
  Synthetic
aaaaacaagcaaguccugaacuu

SEQ ID NO: 408288 - RNA, 24 nt, Artificial Sequence
  Synthetic
aaaaaacaagcaaguccugaacuu

SEQ ID NO: 408289 - RNA, 18 nt, Artificial Sequence
  Synthetic
uugggagaagcugaacuu

SEQ ID NO: 408290 - RNA, 19 nt, Artificial Sequence
  Synthetic
auugggagaagcugaacuu

SEQ ID NO: 408291 - RNA, 20 nt, Artificial Sequence
  Synthetic
cauugggagaagcugaacuu

SEQ ID NO: 408292 - RNA, 21 nt, Artificial Sequence
  Synthetic
acauugggagaagcugaacuu

SEQ ID NO: 408293 - RNA, 22 nt, Artificial Sequence
  Synthetic
cacauugggagaagcugaacuu

SEQ ID NO: 408294 - RNA, 23 nt, Artificial Sequence
  Synthetic
acacauugggagaagcugaacuu

SEQ ID NO: 408295 - RNA, 24 nt, Artificial Sequence
  Synthetic
gacacauugggagaagcugaacuu

SEQ ID NO: 408296 - RNA, 18 nt, Artificial Sequence
  Synthetic
uucaaguggagugaacuu

SEQ ID NO: 408297 - RNA, 19 nt, Artificial Sequence
  Synthetic
cuucaaguggagugaacuu

SEQ ID NO: 408298 - RNA, 20 nt, Artificial Sequence
  Synthetic
acuucaaguggagugaacuu

SEQ ID NO: 408299 - RNA, 21 nt, Artificial Sequence
  Synthetic
aacuucaaguggagugaacuu

SEQ ID NO: 408300 - RNA, 22 nt, Artificial Sequence
  Synthetic
gaacuucaaguggagugaacuu

SEQ ID NO: 408301 - RNA, 23 nt, Artificial Sequence
  Synthetic
ugaacuucaaguggagugaacuu

SEQ ID NO: 408302 - RNA, 24 nt, Artificial Sequence
  Synthetic
augaacuucaaguggagugaacuu

SEQ ID NO: 408303 - RNA, 18 nt, Artificial Sequence
  Synthetic
acauuccagauugaacuu

SEQ ID NO: 408304 - RNA, 19 nt, Artificial Sequence
  Synthetic
uacauuccagauugaacuu

SEQ ID NO: 408305 - RNA, 20 nt, Artificial Sequence
  Synthetic
auacauuccagauugaacuu

SEQ ID NO: 408306 - RNA, 21 nt, Artificial Sequence
  Synthetic
uauacauuccagauugaacuu

SEQ ID NO: 408307 - RNA, 22 nt, Artificial Sequence
  Synthetic
auauacauuccagauugaacuu

SEQ ID NO: 408308 - RNA, 23 nt, Artificial Sequence
  Synthetic
cauauacauuccagauugaacuu

SEQ ID NO: 408309 - RNA, 24 nt, Artificial Sequence
  Synthetic
gcauauacauuccagauugaacuu

SEQ ID NO: 408310 - RNA, 18 nt, Artificial Sequence
  Synthetic
ccagaaucgcuugaacuu

SEQ ID NO: 408311 - RNA, 19 nt, Artificial Sequence
  Synthetic
accagaaucgcuugaacuu

SEQ ID NO: 408312 - RNA, 20 nt, Artificial Sequence
  Synthetic
uaccagaaucgcuugaacuu

SEQ ID NO: 408313 - RNA, 21 nt, Artificial Sequence
  Synthetic
guaccagaaucgcuugaacuu

SEQ ID NO: 408314 - RNA, 22 nt, Artificial Sequence
  Synthetic
gguaccagaaucgcuugaacuu

SEQ ID NO: 408315 - RNA, 23 nt, Artificial Sequence
  Synthetic
agguaccagaaucgcuugaacuu

SEQ ID NO: 408316 - RNA, 24 nt, Artificial Sequence
  Synthetic
gagguaccagaaucgcuugaacuu

SEQ ID NO: 408317 - RNA, 18 nt, Artificial Sequence
  Synthetic
cuguggaaauuugaacuu

SEQ ID NO: 408318 - RNA, 19 nt, Artificial Sequence
  Synthetic
ucuguggaaauuugaacuu

SEQ ID NO: 408319 - RNA, 20 nt, Artificial Sequence
  Synthetic
aucuguggaaauuugaacuu

SEQ ID NO: 408320 - RNA, 21 nt, Artificial Sequence
  Synthetic
gaucuguggaaauuugaacuu

SEQ ID NO: 408321 - RNA, 22 nt, Artificial Sequence
  Synthetic
agaucuguggaaauuugaacuu

SEQ ID NO: 408322 - RNA, 23 nt, Artificial Sequence
  Synthetic
gagaucuguggaaauuugaacuu

SEQ ID NO: 408323 - RNA, 24 nt, Artificial Sequence
  Synthetic
agagaucuguggaaauuugaacuu

SEQ ID NO: 408324 - RNA, 18 nt, Artificial Sequence
  Synthetic
agccuguccuuugaacuu

SEQ ID NO: 408325 - RNA, 19 nt, Artificial Sequence
  Synthetic
cagccuguccuuugaacuu

SEQ ID NO: 408326 - RNA, 20 nt, Artificial Sequence
  Synthetic
ucagccuguccuuugaacuu

SEQ ID NO: 408327 - RNA, 23 nt, Artificial Sequence
  Synthetic
gagucagccuguccuuugaacuu

SEQ ID NO: 408328 - RNA, 24 nt, Artificial Sequence
  Synthetic
agagucagccuguccuuugaacuu

SEQ ID NO: 408329 - RNA, 18 nt, Artificial Sequence
  Synthetic
uuucaugauaaauaacuu

SEQ ID NO: 408330 - RNA, 19 nt, Artificial Sequence
  Synthetic
auuucaugauaaauaacuu

SEQ ID NO: 408331 - RNA, 20 nt, Artificial Sequence
  Synthetic
uauuucaugauaaauaacuu

SEQ ID NO: 408332 - RNA, 21 nt, Artificial Sequence
  Synthetic
auauuucaugauaaauaacuu

SEQ ID NO: 408333 - RNA, 22 nt, Artificial Sequence
  Synthetic
aauauuucaugauaaauaacuu

SEQ ID NO: 408334 - RNA, 23 nt, Artificial Sequence
  Synthetic
uaauauuucaugauaaauaacuu

SEQ ID NO: 408335 - RNA, 24 nt, Artificial Sequence
  Synthetic
guaauauuucaugauaaauaacuu

SEQ ID NO: 408336 - RNA, 18 nt, Artificial Sequence
  Synthetic
uuagaauauuaauaacuu

SEQ ID NO: 408337 - RNA, 19 nt, Artificial Sequence
  Synthetic
uuuagaauauuaauaacuu

SEQ ID NO: 408338 - RNA, 20 nt, Artificial Sequence
  Synthetic
uuuuagaauauuaauaacuu

SEQ ID NO: 408339 - RNA, 21 nt, Artificial Sequence
  Synthetic
auuuuagaauauuaauaacuu

SEQ ID NO: 408340 - RNA, 22 nt, Artificial Sequence
  Synthetic
aauuuuagaauauuaauaacuu

SEQ ID NO: 408341 - RNA, 23 nt, Artificial Sequence
  Synthetic
uaauuuuagaauauuaauaacuu

SEQ ID NO: 408342 - RNA, 24 nt, Artificial Sequence
  Synthetic
uuaauuuuagaauauuaauaacuu

SEQ ID NO: 408343 - RNA, 18 nt, Artificial Sequence
  Synthetic
aacuugauggcauaacuu

SEQ ID NO: 408344 - RNA, 19 nt, Artificial Sequence
  Synthetic
caacuugauggcauaacuu

SEQ ID NO: 408345 - RNA, 20 nt, Artificial Sequence
  Synthetic
acaacuugauggcauaacuu

SEQ ID NO: 408346 - RNA, 21 nt, Artificial Sequence
  Synthetic
gacaacuugauggcauaacuu

SEQ ID NO: 408347 - RNA, 22 nt, Artificial Sequence
  Synthetic
ggacaacuugauggcauaacuu

SEQ ID NO: 408348 - RNA, 23 nt, Artificial Sequence
  Synthetic
gggacaacuugauggcauaacuu

SEQ ID NO: 408349 - RNA, 24 nt, Artificial Sequence
  Synthetic
agggacaacuugauggcauaacuu

SEQ ID NO: 408350 - RNA, 18 nt, Artificial Sequence
  Synthetic
augaguuauagauaacuu

SEQ ID NO: 408351 - RNA, 19 nt, Artificial Sequence
  Synthetic
caugaguuauagauaacuu

SEQ ID NO: 408352 - RNA, 20 nt, Artificial Sequence
  Synthetic
ucaugaguuauagauaacuu

SEQ ID NO: 408353 - RNA, 21 nt, Artificial Sequence
  Synthetic
cucaugaguuauagauaacuu

SEQ ID NO: 408354 - RNA, 22 nt, Artificial Sequence
  Synthetic
ucucaugaguuauagauaacuu

SEQ ID NO: 408355 - RNA, 23 nt, Artificial Sequence
  Synthetic
uucucaugaguuauagauaacuu

SEQ ID NO: 408356 - RNA, 24 nt, Artificial Sequence
  Synthetic
auucucaugaguuauagauaacuu

SEQ ID NO: 408357 - RNA, 18 nt, Artificial Sequence
  Synthetic
aaugaugagggauaacuu

SEQ ID NO: 408358 - RNA, 19 nt, Artificial Sequence
  Synthetic
caaugaugagggauaacuu

SEQ ID NO: 408359 - RNA, 20 nt, Artificial Sequence
  Synthetic
ccaaugaugagggauaacuu

SEQ ID NO: 408360 - RNA, 21 nt, Artificial Sequence
  Synthetic
gccaaugaugagggauaacuu

SEQ ID NO: 408361 - RNA, 22 nt, Artificial Sequence
  Synthetic
agccaaugaugagggauaacuu

SEQ ID NO: 408362 - RNA, 23 nt, Artificial Sequence
  Synthetic
gagccaaugaugagggauaacuu

SEQ ID NO: 408363 - RNA, 24 nt, Artificial Sequence
  Synthetic
ggagccaaugaugagggauaacuu

SEQ ID NO: 408364 - RNA, 18 nt, Artificial Sequence
  Synthetic
gacuagaagauauaacuu

SEQ ID NO: 408365 - RNA, 19 nt, Artificial Sequence
  Synthetic
agacuagaagauauaacuu

SEQ ID NO: 408366 - RNA, 20 nt, Artificial Sequence
  Synthetic
uagacuagaagauauaacuu

SEQ ID NO: 408367 - RNA, 21 nt, Artificial Sequence
  Synthetic
auagacuagaagauauaacuu

SEQ ID NO: 408368 - RNA, 22 nt, Artificial Sequence
  Synthetic
cauagacuagaagauauaacuu

SEQ ID NO: 408369 - RNA, 23 nt, Artificial Sequence
  Synthetic
ccauagacuagaagauauaacuu

SEQ ID NO: 408370 - RNA, 24 nt, Artificial Sequence
  Synthetic
uccauagacuagaagauauaacuu

SEQ ID NO: 408371 - RNA, 18 nt, Artificial Sequence
  Synthetic
cagcuauuuuuauaacuu

SEQ ID NO: 408372 - RNA, 19 nt, Artificial Sequence
  Synthetic
gcagcuauuuuuauaacuu

SEQ ID NO: 408373 - RNA, 20 nt, Artificial Sequence
  Synthetic
ugcagcuauuuuuauaacuu

SEQ ID NO: 408374 - RNA, 21 nt, Artificial Sequence
  Synthetic
augcagcuauuuuuauaacuu

SEQ ID NO: 408375 - RNA, 22 nt, Artificial Sequence
  Synthetic
caugcagcuauuuuuauaacuu

SEQ ID NO: 408376 - RNA, 23 nt, Artificial Sequence
  Synthetic
acaugcagcuauuuuuauaacuu

SEQ ID NO: 408377 - RNA, 24 nt, Artificial Sequence
  Synthetic
cacaugcagcuauuuuuauaacuu

SEQ ID NO: 408378 - RNA, 18 nt, Artificial Sequence
  Synthetic
uggaguuuagccuaacuu

SEQ ID NO: 408379 - RNA, 19 nt, Artificial Sequence
  Synthetic
auggaguuuagccuaacuu

SEQ ID NO: 408380 - RNA, 20 nt, Artificial Sequence
  Synthetic
uauggaguuuagccuaacuu

SEQ ID NO: 408381 - RNA, 21 nt, Artificial Sequence
  Synthetic
auauggaguuuagccuaacuu

SEQ ID NO: 408382 - RNA, 22 nt, Artificial Sequence
  Synthetic
gauauggaguuuagccuaacuu

SEQ ID NO: 408383 - RNA, 23 nt, Artificial Sequence
  Synthetic
agauauggaguuuagccuaacuu

SEQ ID NO: 408384 - RNA, 24 nt, Artificial Sequence
  Synthetic
uagauauggaguuuagccuaacuu

SEQ ID NO: 408385 - RNA, 18 nt, Artificial Sequence
  Synthetic
uguaguccuggcuaacuu

SEQ ID NO: 408386 - RNA, 19 nt, Artificial Sequence
  Synthetic
uuguaguccuggcuaacuu

SEQ ID NO: 408387 - RNA, 20 nt, Artificial Sequence
  Synthetic
cuuguaguccuggcuaacuu

SEQ ID NO: 408388 - RNA, 21 nt, Artificial Sequence
  Synthetic
gcuuguaguccuggcuaacuu

SEQ ID NO: 408389 - RNA, 22 nt, Artificial Sequence
  Synthetic
ugcuuguaguccuggcuaacuu

SEQ ID NO: 408390 - RNA, 23 nt, Artificial Sequence
  Synthetic
gugcuuguaguccuggcuaacuu

SEQ ID NO: 408391 - RNA, 24 nt, Artificial Sequence
  Synthetic
ugugcuuguaguccuggcuaacuu

SEQ ID NO: 408392 - RNA, 18 nt, Artificial Sequence
  Synthetic
aaaaauuaauucuaacuu

SEQ ID NO: 408393 - RNA, 19 nt, Artificial Sequence
  Synthetic
uaaaaauuaauucuaacuu

SEQ ID NO: 408394 - RNA, 20 nt, Artificial Sequence
  Synthetic
uuaaaaauuaauucuaacuu

SEQ ID NO: 408395 - RNA, 21 nt, Artificial Sequence
  Synthetic
uuuaaaaauuaauucuaacuu

SEQ ID NO: 408396 - RNA, 22 nt, Artificial Sequence
  Synthetic
cuuuaaaaauuaauucuaacuu

SEQ ID NO: 408397 - RNA, 23 nt, Artificial Sequence
  Synthetic
gcuuuaaaaauuaauucuaacuu

SEQ ID NO: 408398 - RNA, 24 nt, Artificial Sequence
  Synthetic
ugcuuuaaaaauuaauucuaacuu

SEQ ID NO: 408399 - RNA, 18 nt, Artificial Sequence
  Synthetic
uagaaaaguuauuaacuu

SEQ ID NO: 408400 - RNA, 19 nt, Artificial Sequence
  Synthetic
uuagaaaaguuauuaacuu

SEQ ID NO: 408401 - RNA, 20 nt, Artificial Sequence
  Synthetic
uuuagaaaaguuauuaacuu

SEQ ID NO: 408402 - RNA, 21 nt, Artificial Sequence
  Synthetic
uuuuagaaaaguuauuaacuu

SEQ ID NO: 408403 - RNA, 22 nt, Artificial Sequence
  Synthetic
auuuuagaaaaguuauuaacuu

SEQ ID NO: 408404 - RNA, 23 nt, Artificial Sequence
  Synthetic
uauuuuagaaaaguuauuaacuu

SEQ ID NO: 408405 - RNA, 24 nt, Artificial Sequence
  Synthetic
uuauuuuagaaaaguuauuaacuu

SEQ ID NO: 408406 - RNA, 18 nt, Artificial Sequence
  Synthetic
ugcguuuuagcuuaacuu

SEQ ID NO: 408407 - RNA, 19 nt, Artificial Sequence
  Synthetic
augcguuuuagcuuaacuu

SEQ ID NO: 408408 - RNA, 20 nt, Artificial Sequence
  Synthetic
caugcguuuuagcuuaacuu

SEQ ID NO: 408409 - RNA, 21 nt, Artificial Sequence
  Synthetic
ucaugcguuuuagcuuaacuu

SEQ ID NO: 408410 - RNA, 22 nt, Artificial Sequence
  Synthetic
aucaugcguuuuagcuuaacuu

SEQ ID NO: 408411 - RNA, 23 nt, Artificial Sequence
  Synthetic
aaucaugcguuuuagcuuaacuu

SEQ ID NO: 408412 - RNA, 24 nt, Artificial Sequence
  Synthetic
aaaucaugcguuuuagcuuaacuu

SEQ ID NO: 408413 - RNA, 18 nt, Artificial Sequence
  Synthetic
auuucuucaucuuaacuu

SEQ ID NO: 408414 - RNA, 19 nt, Artificial Sequence
  Synthetic
uauuucuucaucuuaacuu

SEQ ID NO: 408415 - RNA, 20 nt, Artificial Sequence
  Synthetic
uuauuucuucaucuuaacuu

SEQ ID NO: 408416 - RNA, 21 nt, Artificial Sequence
  Synthetic
guuauuucuucaucuuaacuu

SEQ ID NO: 408417 - RNA, 22 nt, Artificial Sequence
  Synthetic
uguuauuucuucaucuuaacuu

SEQ ID NO: 408418 - RNA, 23 nt, Artificial Sequence
  Synthetic
auguuauuucuucaucuuaacuu

SEQ ID NO: 408419 - RNA, 24 nt, Artificial Sequence
  Synthetic
uauguuauuucuucaucuuaacuu

SEQ ID NO: 408420 - RNA, 18 nt, Artificial Sequence
  Synthetic
cuacuuugcucuuaacuu

SEQ ID NO: 408421 - RNA, 19 nt, Artificial Sequence
  Synthetic
ucuacuuugcucuuaacuu

SEQ ID NO: 408422 - RNA, 20 nt, Artificial Sequence
  Synthetic
gucuacuuugcucuuaacuu

SEQ ID NO: 408423 - RNA, 21 nt, Artificial Sequence
  Synthetic
agucuacuuugcucuuaacuu

SEQ ID NO: 408424 - RNA, 22 nt, Artificial Sequence
  Synthetic
cagucuacuuugcucuuaacuu

SEQ ID NO: 408425 - RNA, 23 nt, Artificial Sequence
  Synthetic
ucagucuacuuugcucuuaacuu

SEQ ID NO: 408426 - RNA, 24 nt, Artificial Sequence
  Synthetic
cucagucuacuuugcucuuaacuu

SEQ ID NO: 408427 - RNA, 18 nt, Artificial Sequence
  Synthetic
cugggcaaagguuaacuu

SEQ ID NO: 408428 - RNA, 19 nt, Artificial Sequence
  Synthetic
gcugggcaaagguuaacuu

SEQ ID NO: 408429 - RNA, 20 nt, Artificial Sequence
  Synthetic
ugcugggcaaagguuaacuu

SEQ ID NO: 408430 - RNA, 21 nt, Artificial Sequence
  Synthetic
augcugggcaaagguuaacuu

SEQ ID NO: 408431 - RNA, 22 nt, Artificial Sequence
  Synthetic
gaugcugggcaaagguuaacuu

SEQ ID NO: 408432 - RNA, 23 nt, Artificial Sequence
  Synthetic
agaugcugggcaaagguuaacuu

SEQ ID NO: 408433 - RNA, 24 nt, Artificial Sequence
  Synthetic
aagaugcugggcaaagguuaacuu

SEQ ID NO: 408434 - RNA, 18 nt, Artificial Sequence
  Synthetic
gccaguauguaaacacuu

SEQ ID NO: 408435 - RNA, 19 nt, Artificial Sequence
  Synthetic
agccaguauguaaacacuu

SEQ ID NO: 408436 - RNA, 20 nt, Artificial Sequence
  Synthetic
cagccaguauguaaacacuu

SEQ ID NO: 408437 - RNA, 21 nt, Artificial Sequence
  Synthetic
ucagccaguauguaaacacuu

SEQ ID NO: 408438 - RNA, 22 nt, Artificial Sequence
  Synthetic
uucagccaguauguaaacacuu

SEQ ID NO: 408439 - RNA, 23 nt, Artificial Sequence
  Synthetic
uuucagccaguauguaaacacuu

SEQ ID NO: 408440 - RNA, 24 nt, Artificial Sequence
  Synthetic
cuuucagccaguauguaaacacuu

SEQ ID NO: 408441 - RNA, 18 nt, Artificial Sequence
  Synthetic
uaacagaaaacaacacuu

SEQ ID NO: 408442 - RNA, 19 nt, Artificial Sequence
  Synthetic
cuaacagaaaacaacacuu

SEQ ID NO: 408443 - RNA, 20 nt, Artificial Sequence
  Synthetic
ucuaacagaaaacaacacuu

SEQ ID NO: 408444 - RNA, 21 nt, Artificial Sequence
  Synthetic
aucuaacagaaaacaacacuu

SEQ ID NO: 408445 - RNA, 22 nt, Artificial Sequence
  Synthetic
uaucuaacagaaaacaacacuu

SEQ ID NO: 408446 - RNA, 23 nt, Artificial Sequence
  Synthetic
auaucuaacagaaaacaacacuu

SEQ ID NO: 408447 - RNA, 24 nt, Artificial Sequence
  Synthetic
gauaucuaacagaaaacaacacuu

SEQ ID NO: 408448 - RNA, 18 nt, Artificial Sequence
  Synthetic
aaaguuuaaacaacacuu

SEQ ID NO: 408449 - RNA, 19 nt, Artificial Sequence
  Synthetic
caaaguuuaaacaacacuu

SEQ ID NO: 408450 - RNA, 20 nt, Artificial Sequence
  Synthetic
gcaaaguuuaaacaacacuu

SEQ ID NO: 408451 - RNA, 21 nt, Artificial Sequence
  Synthetic
agcaaaguuuaaacaacacuu

SEQ ID NO: 408452 - RNA, 22 nt, Artificial Sequence
  Synthetic
cagcaaaguuuaaacaacacuu

SEQ ID NO: 408453 - RNA, 23 nt, Artificial Sequence
  Synthetic
ccagcaaaguuuaaacaacacuu

SEQ ID NO: 408454 - RNA, 24 nt, Artificial Sequence
  Synthetic
uccagcaaaguuuaaacaacacuu

SEQ ID NO: 408455 - RNA, 18 nt, Artificial Sequence
  Synthetic
ccuguaaucccaacacuu

SEQ ID NO: 408456 - RNA, 19 nt, Artificial Sequence
  Synthetic
gccuguaaucccaacacuu

SEQ ID NO: 408457 - RNA, 20 nt, Artificial Sequence
  Synthetic
cgccuguaaucccaacacuu

SEQ ID NO: 408458 - RNA, 21 nt, Artificial Sequence
  Synthetic
acgccuguaaucccaacacuu

SEQ ID NO: 408459 - RNA, 22 nt, Artificial Sequence
  Synthetic
cacgccuguaaucccaacacuu

SEQ ID NO: 408460 - RNA, 23 nt, Artificial Sequence
  Synthetic
ucacgccuguaaucccaacacuu

SEQ ID NO: 408461 - RNA, 24 nt, Artificial Sequence
  Synthetic
cucacgccuguaaucccaacacuu

SEQ ID NO: 408462 - RNA, 18 nt, Artificial Sequence
  Synthetic
cuuguaaucccaacacuu

SEQ ID NO: 408463 - RNA, 19 nt, Artificial Sequence
  Synthetic
gcuuguaaucccaacacuu

SEQ ID NO: 408464 - RNA, 20 nt, Artificial Sequence
  Synthetic
ugcuuguaaucccaacacuu

SEQ ID NO: 408465 - RNA, 21 nt, Artificial Sequence
  Synthetic
augcuuguaaucccaacacuu

SEQ ID NO: 408466 - RNA, 22 nt, Artificial Sequence
  Synthetic
caugcuuguaaucccaacacuu

SEQ ID NO: 408467 - RNA, 23 nt, Artificial Sequence
  Synthetic
ucaugcuuguaaucccaacacuu

SEQ ID NO: 408468 - RNA, 24 nt, Artificial Sequence
  Synthetic
cucaugcuuguaaucccaacacuu

SEQ ID NO: 408469 - RNA, 18 nt, Artificial Sequence
  Synthetic
ccucuacucccaacacuu

SEQ ID NO: 408470 - RNA, 19 nt, Artificial Sequence
  Synthetic
gccucuacucccaacacuu

SEQ ID NO: 408471 - RNA, 20 nt, Artificial Sequence
  Synthetic
cgccucuacucccaacacuu

SEQ ID NO: 408472 - RNA, 21 nt, Artificial Sequence
  Synthetic
acgccucuacucccaacacuu

SEQ ID NO: 408473 - RNA, 22 nt, Artificial Sequence
  Synthetic
uacgccucuacucccaacacuu

SEQ ID NO: 408474 - RNA, 23 nt, Artificial Sequence
  Synthetic
uuacgccucuacucccaacacuu

SEQ ID NO: 408475 - RNA, 24 nt, Artificial Sequence
  Synthetic
cuuacgccucuacucccaacacuu

SEQ ID NO: 408476 - RNA, 18 nt, Artificial Sequence
  Synthetic
guuauaaauccaacacuu

SEQ ID NO: 408477 - RNA, 19 nt, Artificial Sequence
  Synthetic
gguuauaaauccaacacuu

SEQ ID NO: 408478 - RNA, 20 nt, Artificial Sequence
  Synthetic
agguuauaaauccaacacuu

SEQ ID NO: 408479 - RNA, 21 nt, Artificial Sequence
  Synthetic
uagguuauaaauccaacacuu

SEQ ID NO: 408480 - RNA, 22 nt, Artificial Sequence
  Synthetic
auagguuauaaauccaacacuu

SEQ ID NO: 408481 - RNA, 23 nt, Artificial Sequence
  Synthetic
uauagguuauaaauccaacacuu

SEQ ID NO: 408482 - RNA, 24 nt, Artificial Sequence
  Synthetic
uuauagguuauaaauccaacacuu

SEQ ID NO: 408483 - RNA, 18 nt, Artificial Sequence
  Synthetic
acaucccuuccaacacuu

SEQ ID NO: 408484 - RNA, 19 nt, Artificial Sequence
  Synthetic
gacaucccuuccaacacuu

SEQ ID NO: 408485 - RNA, 20 nt, Artificial Sequence
  Synthetic
ggacaucccuuccaacacuu

SEQ ID NO: 408486 - RNA, 21 nt, Artificial Sequence
  Synthetic
aggacaucccuuccaacacuu

SEQ ID NO: 408487 - RNA, 22 nt, Artificial Sequence
  Synthetic
caggacaucccuuccaacacuu

SEQ ID NO: 408488 - RNA, 23 nt, Artificial Sequence
  Synthetic
ccaggacaucccuuccaacacuu

SEQ ID NO: 408489 - RNA, 24 nt, Artificial Sequence
  Synthetic
gccaggacaucccuuccaacacuu

SEQ ID NO: 408490 - RNA, 18 nt, Artificial Sequence
  Synthetic
auuagauuaucaacacuu

SEQ ID NO: 408491 - RNA, 19 nt, Artificial Sequence
  Synthetic
aauuagauuaucaacacuu

SEQ ID NO: 408492 - RNA, 20 nt, Artificial Sequence
  Synthetic
aaauuagauuaucaacacuu

SEQ ID NO: 408493 - RNA, 21 nt, Artificial Sequence
  Synthetic
aaaauuagauuaucaacacuu

SEQ ID NO: 408494 - RNA, 22 nt, Artificial Sequence
  Synthetic
caaaauuagauuaucaacacuu

SEQ ID NO: 408495 - RNA, 23 nt, Artificial Sequence
  Synthetic
acaaaauuagauuaucaacacuu

SEQ ID NO: 408496 - RNA, 24 nt, Artificial Sequence
  Synthetic
aacaaaauuagauuaucaacacuu

SEQ ID NO: 408497 - RNA, 18 nt, Artificial Sequence
  Synthetic
ccuguaaucucaacacuu

SEQ ID NO: 408498 - RNA, 19 nt, Artificial Sequence
  Synthetic
accuguaaucucaacacuu

SEQ ID NO: 408499 - RNA, 20 nt, Artificial Sequence
  Synthetic
caccuguaaucucaacacuu

SEQ ID NO: 408500 - RNA, 21 nt, Artificial Sequence
  Synthetic
acaccuguaaucucaacacuu

SEQ ID NO: 408501 - RNA, 22 nt, Artificial Sequence
  Synthetic
cacaccuguaaucucaacacuu

SEQ ID NO: 408502 - RNA, 23 nt, Artificial Sequence
  Synthetic
ucacaccuguaaucucaacacuu

SEQ ID NO: 408503 - RNA, 24 nt, Artificial Sequence
  Synthetic
cucacaccuguaaucucaacacuu

SEQ ID NO: 408504 - RNA, 18 nt, Artificial Sequence
  Synthetic
uucuuucaaugaacacuu

SEQ ID NO: 408505 - RNA, 19 nt, Artificial Sequence
  Synthetic
cuucuuucaaugaacacuu

SEQ ID NO: 408506 - RNA, 20 nt, Artificial Sequence
  Synthetic
ucuucuuucaaugaacacuu

SEQ ID NO: 408507 - RNA, 21 nt, Artificial Sequence
  Synthetic
uucuucuuucaaugaacacuu

SEQ ID NO: 408508 - RNA, 22 nt, Artificial Sequence
  Synthetic
uuucuucuuucaaugaacacuu

SEQ ID NO: 408509 - RNA, 23 nt, Artificial Sequence
  Synthetic
uuuucuucuuucaaugaacacuu

SEQ ID NO: 408510 - RNA, 24 nt, Artificial Sequence
  Synthetic
cuuuucuucuuucaaugaacacuu

SEQ ID NO: 408511 - RNA, 18 nt, Artificial Sequence
  Synthetic
ccuguaauccuaacacuu

SEQ ID NO: 408512 - RNA, 19 nt, Artificial Sequence
  Synthetic
accuguaauccuaacacuu

SEQ ID NO: 408513 - RNA, 20 nt, Artificial Sequence
  Synthetic
caccuguaauccuaacacuu

SEQ ID NO: 408514 - RNA, 21 nt, Artificial Sequence
  Synthetic
acaccuguaauccuaacacuu

SEQ ID NO: 408515 - RNA, 22 nt, Artificial Sequence
  Synthetic
cacaccuguaauccuaacacuu

SEQ ID NO: 408516 - RNA, 23 nt, Artificial Sequence
  Synthetic
ucacaccuguaauccuaacacuu

SEQ ID NO: 408517 - RNA, 24 nt, Artificial Sequence
  Synthetic
cucacaccuguaauccuaacacuu

SEQ ID NO: 408518 - RNA, 18 nt, Artificial Sequence
  Synthetic
acacacacacacacacuu

SEQ ID NO: 408519 - RNA, 19 nt, Artificial Sequence
  Synthetic
cacacacacacacacacuu

SEQ ID NO: 408520 - RNA, 20 nt, Artificial Sequence
  Synthetic
acacacacacacacacacuu

SEQ ID NO: 408521 - RNA, 21 nt, Artificial Sequence
  Synthetic
cacacacacacacacacacuu

SEQ ID NO: 408522 - RNA, 22 nt, Artificial Sequence
  Synthetic
acacacacacacacacacacuu

SEQ ID NO: 408523 - RNA, 23 nt, Artificial Sequence
  Synthetic
cacacacacacacacacacacuu

SEQ ID NO: 408524 - RNA, 24 nt, Artificial Sequence
  Synthetic
acacacacacacacacacacacuu

SEQ ID NO: 408525 - RNA, 18 nt, Artificial Sequence
  Synthetic
gggcuagcacacacacuu

SEQ ID NO: 408526 - RNA, 19 nt, Artificial Sequence
  Synthetic
agggcuagcacacacacuu

SEQ ID NO: 408527 - RNA, 20 nt, Artificial Sequence
  Synthetic
cagggcuagcacacacacuu

SEQ ID NO: 408528 - RNA, 21 nt, Artificial Sequence
  Synthetic
ucagggcuagcacacacacuu

SEQ ID NO: 408529 - RNA, 22 nt, Artificial Sequence
  Synthetic
gucagggcuagcacacacacuu

SEQ ID NO: 408530 - RNA, 23 nt, Artificial Sequence
  Synthetic
ggucagggcuagcacacacacuu

SEQ ID NO: 408531 - RNA, 24 nt, Artificial Sequence
  Synthetic
uggucagggcuagcacacacacuu

SEQ ID NO: 408532 - RNA, 18 nt, Artificial Sequence
  Synthetic
aguggucugcugacacuu

SEQ ID NO: 408533 - RNA, 19 nt, Artificial Sequence
  Synthetic
caguggucugcugacacuu

SEQ ID NO: 408534 - RNA, 20 nt, Artificial Sequence
  Synthetic
acaguggucugcugacacuu

SEQ ID NO: 408535 - RNA, 21 nt, Artificial Sequence
  Synthetic
cacaguggucugcugacacuu

SEQ ID NO: 408536 - RNA, 22 nt, Artificial Sequence
  Synthetic
gcacaguggucugcugacacuu

SEQ ID NO: 408537 - RNA, 23 nt, Artificial Sequence
  Synthetic
ugcacaguggucugcugacacuu

SEQ ID NO: 408538 - RNA, 24 nt, Artificial Sequence
  Synthetic
augcacaguggucugcugacacuu

SEQ ID NO: 408539 - RNA, 18 nt, Artificial Sequence
  Synthetic
guuuccaauuugacacuu

SEQ ID NO: 408540 - RNA, 19 nt, Artificial Sequence
  Synthetic
aguuuccaauuugacacuu

SEQ ID NO: 408541 - RNA, 20 nt, Artificial Sequence
  Synthetic
gaguuuccaauuugacacuu

SEQ ID NO: 408542 - RNA, 21 nt, Artificial Sequence
  Synthetic
ugaguuuccaauuugacacuu

SEQ ID NO: 408543 - RNA, 22 nt, Artificial Sequence
  Synthetic
cugaguuuccaauuugacacuu

SEQ ID NO: 408544 - RNA, 23 nt, Artificial Sequence
  Synthetic
gcugaguuuccaauuugacacuu

SEQ ID NO: 408545 - RNA, 24 nt, Artificial Sequence
  Synthetic
ugcugaguuuccaauuugacacuu

SEQ ID NO: 408546 - RNA, 18 nt, Artificial Sequence
  Synthetic
ugcuugauuuugacacuu

SEQ ID NO: 408547 - RNA, 19 nt, Artificial Sequence
  Synthetic
uugcuugauuuugacacuu

SEQ ID NO: 408548 - RNA, 20 nt, Artificial Sequence
  Synthetic
auugcuugauuuugacacuu

SEQ ID NO: 408549 - RNA, 21 nt, Artificial Sequence
  Synthetic
aauugcuugauuuugacacuu

SEQ ID NO: 408550 - RNA, 22 nt, Artificial Sequence
  Synthetic
caauugcuugauuuugacacuu

SEQ ID NO: 408551 - RNA, 23 nt, Artificial Sequence
  Synthetic
gcaauugcuugauuuugacacuu

SEQ ID NO: 408552 - RNA, 24 nt, Artificial Sequence
  Synthetic
agcaauugcuugauuuugacacuu

SEQ ID NO: 408553 - RNA, 18 nt, Artificial Sequence
  Synthetic
ucucaauauuauacacuu

SEQ ID NO: 408554 - RNA, 19 nt, Artificial Sequence
  Synthetic
aucucaauauuauacacuu

SEQ ID NO: 408555 - RNA, 20 nt, Artificial Sequence
  Synthetic
aaucucaauauuauacacuu

SEQ ID NO: 408556 - RNA, 21 nt, Artificial Sequence
  Synthetic
aaaucucaauauuauacacuu

SEQ ID NO: 408557 - RNA, 22 nt, Artificial Sequence
  Synthetic
aaaaucucaauauuauacacuu

SEQ ID NO: 408558 - RNA, 23 nt, Artificial Sequence
  Synthetic
aaaaaucucaauauuauacacuu

SEQ ID NO: 408559 - RNA, 24 nt, Artificial Sequence
  Synthetic
uaaaaaucucaauauuauacacuu

SEQ ID NO: 408560 - RNA, 18 nt, Artificial Sequence
  Synthetic
aaguuuugaccuacacuu

SEQ ID NO: 408561 - RNA, 19 nt, Artificial Sequence
  Synthetic
aaaguuuugaccuacacuu

SEQ ID NO: 408562 - RNA, 20 nt, Artificial Sequence
  Synthetic
aaaaguuuugaccuacacuu

SEQ ID NO: 408563 - RNA, 21 nt, Artificial Sequence
  Synthetic
gaaaaguuuugaccuacacuu

SEQ ID NO: 408564 - RNA, 22 nt, Artificial Sequence
  Synthetic
ggaaaaguuuugaccuacacuu

SEQ ID NO: 408565 - RNA, 23 nt, Artificial Sequence
  Synthetic
uggaaaaguuuugaccuacacuu

SEQ ID NO: 408566 - RNA, 24 nt, Artificial Sequence
  Synthetic
auggaaaaguuuugaccuacacuu

SEQ ID NO: 408567 - RNA, 18 nt, Artificial Sequence
  Synthetic
gagaacgagauuacacuu

SEQ ID NO: 408568 - RNA, 19 nt, Artificial Sequence
  Synthetic
agagaacgagauuacacuu

SEQ ID NO: 408569 - RNA, 20 nt, Artificial Sequence
  Synthetic
gagagaacgagauuacacuu

SEQ ID NO: 408570 - RNA, 21 nt, Artificial Sequence
  Synthetic
agagagaacgagauuacacuu

SEQ ID NO: 408571 - RNA, 22 nt, Artificial Sequence
  Synthetic
gagagagaacgagauuacacuu

SEQ ID NO: 408572 - RNA, 23 nt, Artificial Sequence
  Synthetic
agagagagaacgagauuacacuu

SEQ ID NO: 408573 - RNA, 24 nt, Artificial Sequence
  Synthetic
uagagagagaacgagauuacacuu

SEQ ID NO: 408574 - RNA, 18 nt, Artificial Sequence
  Synthetic
aucuagacgcuaccacuu

SEQ ID NO: 408575 - RNA, 19 nt, Artificial Sequence
  Synthetic
aaucuagacgcuaccacuu

SEQ ID NO: 408576 - RNA, 20 nt, Artificial Sequence
  Synthetic
aaaucuagacgcuaccacuu

SEQ ID NO: 408577 - RNA, 21 nt, Artificial Sequence
  Synthetic
gaaaucuagacgcuaccacuu

SEQ ID NO: 408578 - RNA, 22 nt, Artificial Sequence
  Synthetic
ugaaaucuagacgcuaccacuu

SEQ ID NO: 408579 - RNA, 23 nt, Artificial Sequence
  Synthetic
uugaaaucuagacgcuaccacuu

SEQ ID NO: 408580 - RNA, 24 nt, Artificial Sequence
  Synthetic
guugaaaucuagacgcuaccacuu

SEQ ID NO: 408581 - RNA, 18 nt, Artificial Sequence
  Synthetic
agagcagcaguaccacuu

SEQ ID NO: 408582 - RNA, 19 nt, Artificial Sequence
  Synthetic
cagagcagcaguaccacuu

SEQ ID NO: 408583 - RNA, 20 nt, Artificial Sequence
  Synthetic
acagagcagcaguaccacuu

SEQ ID NO: 408584 - RNA, 21 nt, Artificial Sequence
  Synthetic
cacagagcagcaguaccacuu

SEQ ID NO: 408585 - RNA, 22 nt, Artificial Sequence
  Synthetic
ccacagagcagcaguaccacuu

SEQ ID NO: 408586 - RNA, 23 nt, Artificial Sequence
  Synthetic
uccacagagcagcaguaccacuu

SEQ ID NO: 408587 - RNA, 24 nt, Artificial Sequence
  Synthetic
guccacagagcagcaguaccacuu

SEQ ID NO: 408588 - RNA, 18 nt, Artificial Sequence
  Synthetic
aaaucccaggccccacuu

SEQ ID NO: 408589 - RNA, 19 nt, Artificial Sequence
  Synthetic
gaaaucccaggccccacuu

SEQ ID NO: 408590 - RNA, 20 nt, Artificial Sequence
  Synthetic
ugaaaucccaggccccacuu

SEQ ID NO: 408591 - RNA, 21 nt, Artificial Sequence
  Synthetic
uugaaaucccaggccccacuu

SEQ ID NO: 408592 - RNA, 22 nt, Artificial Sequence
  Synthetic
uuugaaaucccaggccccacuu

SEQ ID NO: 408593 - RNA, 23 nt, Artificial Sequence
  Synthetic
uuuugaaaucccaggccccacuu

SEQ ID NO: 408594 - RNA, 24 nt, Artificial Sequence
  Synthetic
auuuugaaaucccaggccccacuu

SEQ ID NO: 408595 - RNA, 18 nt, Artificial Sequence
  Synthetic
aauacaccuuucccacuu

SEQ ID NO: 408596 - RNA, 19 nt, Artificial Sequence
  Synthetic
caauacaccuuucccacuu

SEQ ID NO: 408597 - RNA, 20 nt, Artificial Sequence
  Synthetic
acaauacaccuuucccacuu

SEQ ID NO: 408598 - RNA, 21 nt, Artificial Sequence
  Synthetic
aacaauacaccuuucccacuu

SEQ ID NO: 408599 - RNA, 22 nt, Artificial Sequence
  Synthetic
caacaauacaccuuucccacuu

SEQ ID NO: 408600 - RNA, 23 nt, Artificial Sequence
  Synthetic
ccaacaauacaccuuucccacuu

SEQ ID NO: 408601 - RNA, 24 nt, Artificial Sequence
  Synthetic
cccaacaauacaccuuucccacuu

SEQ ID NO: 408602 - RNA, 18 nt, Artificial Sequence
  Synthetic
cuguaaucccagccacuu

SEQ ID NO: 408603 - RNA, 19 nt, Artificial Sequence
  Synthetic
ccuguaaucccagccacuu

SEQ ID NO: 408604 - RNA, 20 nt, Artificial Sequence
  Synthetic
gccuguaaucccagccacuu

SEQ ID NO: 408605 - RNA, 21 nt, Artificial Sequence
  Synthetic
cgccuguaaucccagccacuu

SEQ ID NO: 408606 - RNA, 22 nt, Artificial Sequence
  Synthetic
gcgccuguaaucccagccacuu

SEQ ID NO: 408607 - RNA, 23 nt, Artificial Sequence
  Synthetic
ggcgccuguaaucccagccacuu

SEQ ID NO: 408608 - RNA, 24 nt, Artificial Sequence
  Synthetic
gggcgccuguaaucccagccacuu

SEQ ID NO: 408609 - RNA, 18 nt, Artificial Sequence
  Synthetic
gucauaaguauuccacuu

SEQ ID NO: 408610 - RNA, 19 nt, Artificial Sequence
  Synthetic
ugucauaaguauuccacuu

SEQ ID NO: 408611 - RNA, 20 nt, Artificial Sequence
  Synthetic
uugucauaaguauuccacuu

SEQ ID NO: 408612 - RNA, 21 nt, Artificial Sequence
  Synthetic
auugucauaaguauuccacuu

SEQ ID NO: 408613 - RNA, 22 nt, Artificial Sequence
  Synthetic
cauugucauaaguauuccacuu

SEQ ID NO: 408614 - RNA, 23 nt, Artificial Sequence
  Synthetic
ucauugucauaaguauuccacuu

SEQ ID NO: 408615 - RNA, 24 nt, Artificial Sequence
  Synthetic
uucauugucauaaguauuccacuu

SEQ ID NO: 408616 - RNA, 18 nt, Artificial Sequence
  Synthetic
ugaacuuggcuuccacuu

SEQ ID NO: 408617 - RNA, 19 nt, Artificial Sequence
  Synthetic
augaacuuggcuuccacuu

SEQ ID NO: 408618 - RNA, 20 nt, Artificial Sequence
  Synthetic
caugaacuuggcuuccacuu

SEQ ID NO: 408619 - RNA, 21 nt, Artificial Sequence
  Synthetic
ucaugaacuuggcuuccacuu

SEQ ID NO: 408620 - RNA, 22 nt, Artificial Sequence
  Synthetic
uucaugaacuuggcuuccacuu

SEQ ID NO: 408621 - RNA, 23 nt, Artificial Sequence
  Synthetic
auucaugaacuuggcuuccacuu

SEQ ID NO: 408622 - RNA, 24 nt, Artificial Sequence
  Synthetic
aauucaugaacuuggcuuccacuu

SEQ ID NO: 408623 - RNA, 18 nt, Artificial Sequence
  Synthetic
ucaucaacccaagcacuu

SEQ ID NO: 408624 - RNA, 19 nt, Artificial Sequence
  Synthetic
aucaucaacccaagcacuu

SEQ ID NO: 408625 - RNA, 20 nt, Artificial Sequence
  Synthetic
uaucaucaacccaagcacuu

SEQ ID NO: 408626 - RNA, 21 nt, Artificial Sequence
  Synthetic
cuaucaucaacccaagcacuu

SEQ ID NO: 408627 - RNA, 22 nt, Artificial Sequence
  Synthetic
gcuaucaucaacccaagcacuu

SEQ ID NO: 408628 - RNA, 23 nt, Artificial Sequence
  Synthetic
ggcuaucaucaacccaagcacuu

SEQ ID NO: 408629 - RNA, 24 nt, Artificial Sequence
  Synthetic
aggcuaucaucaacccaagcacuu

SEQ ID NO: 408630 - RNA, 18 nt, Artificial Sequence
  Synthetic
ccuguaauccaagcacuu

SEQ ID NO: 408631 - RNA, 19 nt, Artificial Sequence
  Synthetic
gccuguaauccaagcacuu

SEQ ID NO: 408632 - RNA, 20 nt, Artificial Sequence
  Synthetic
cgccuguaauccaagcacuu

SEQ ID NO: 408633 - RNA, 21 nt, Artificial Sequence
  Synthetic
acgccuguaauccaagcacuu

SEQ ID NO: 408634 - RNA, 22 nt, Artificial Sequence
  Synthetic
cacgccuguaauccaagcacuu

SEQ ID NO: 408635 - RNA, 23 nt, Artificial Sequence
  Synthetic
ucacgccuguaauccaagcacuu

SEQ ID NO: 408636 - RNA, 24 nt, Artificial Sequence
  Synthetic
cucacgccuguaauccaagcacuu

SEQ ID NO: 408637 - RNA, 20 nt, Artificial Sequence
  Synthetic
cgccuguaauaccagcacuu

SEQ ID NO: 408638 - RNA, 21 nt, Artificial Sequence
  Synthetic
gcgccuguaauaccagcacuu

SEQ ID NO: 408639 - RNA, 22 nt, Artificial Sequence
  Synthetic
cgcgccuguaauaccagcacuu

SEQ ID NO: 408640 - RNA, 23 nt, Artificial Sequence
  Synthetic
ucgcgccuguaauaccagcacuu

SEQ ID NO: 408641 - RNA, 24 nt, Artificial Sequence
  Synthetic
cucgcgccuguaauaccagcacuu

SEQ ID NO: 408642 - RNA, 18 nt, Artificial Sequence
  Synthetic
ccuguaaccccagcacuu

SEQ ID NO: 408643 - RNA, 19 nt, Artificial Sequence
  Synthetic
gccuguaaccccagcacuu

SEQ ID NO: 408644 - RNA, 20 nt, Artificial Sequence
  Synthetic
ugccuguaaccccagcacuu

SEQ ID NO: 408645 - RNA, 21 nt, Artificial Sequence
  Synthetic
augccuguaaccccagcacuu

SEQ ID NO: 408646 - RNA, 22 nt, Artificial Sequence
  Synthetic
caugccuguaaccccagcacuu

SEQ ID NO: 408647 - RNA, 23 nt, Artificial Sequence
  Synthetic
ucaugccuguaaccccagcacuu

SEQ ID NO: 408648 - RNA, 24 nt, Artificial Sequence
  Synthetic
cucaugccuguaaccccagcacuu

SEQ ID NO: 408649 - RNA, 18 nt, Artificial Sequence
  Synthetic
cccauaaucccagcacuu

SEQ ID NO: 408650 - RNA, 19 nt, Artificial Sequence
  Synthetic
ccccauaaucccagcacuu

SEQ ID NO: 408651 - RNA, 20 nt, Artificial Sequence
  Synthetic
uccccauaaucccagcacuu

SEQ ID NO: 408652 - RNA, 21 nt, Artificial Sequence
  Synthetic
guccccauaaucccagcacuu

SEQ ID NO: 408653 - RNA, 22 nt, Artificial Sequence
  Synthetic
uguccccauaaucccagcacuu

SEQ ID NO: 408654 - RNA, 23 nt, Artificial Sequence
  Synthetic
auguccccauaaucccagcacuu

SEQ ID NO: 408655 - RNA, 24 nt, Artificial Sequence
  Synthetic
cauguccccauaaucccagcacuu

SEQ ID NO: 408656 - RNA, 18 nt, Artificial Sequence
  Synthetic
cauauaaucccagcacuu

SEQ ID NO: 408657 - RNA, 19 nt, Artificial Sequence
  Synthetic
gcauauaaucccagcacuu

SEQ ID NO: 408658 - RNA, 20 nt, Artificial Sequence
  Synthetic
ugcauauaaucccagcacuu

SEQ ID NO: 408659 - RNA, 21 nt, Artificial Sequence
  Synthetic
augcauauaaucccagcacuu

SEQ ID NO: 408660 - RNA, 22 nt, Artificial Sequence
  Synthetic
caugcauauaaucccagcacuu

SEQ ID NO: 408661 - RNA, 23 nt, Artificial Sequence
  Synthetic
ucaugcauauaaucccagcacuu

SEQ ID NO: 408662 - RNA, 24 nt, Artificial Sequence
  Synthetic
cucaugcauauaaucccagcacuu

SEQ ID NO: 408663 - RNA, 18 nt, Artificial Sequence
  Synthetic
ccuauaaucccagcacuu

SEQ ID NO: 408664 - RNA, 19 nt, Artificial Sequence
  Synthetic
accuauaaucccagcacuu

SEQ ID NO: 408665 - RNA, 20 nt, Artificial Sequence
  Synthetic
caccuauaaucccagcacuu

SEQ ID NO: 408666 - RNA, 21 nt, Artificial Sequence
  Synthetic
acaccuauaaucccagcacuu

SEQ ID NO: 408667 - RNA, 22 nt, Artificial Sequence
  Synthetic
cacaccuauaaucccagcacuu

SEQ ID NO: 408668 - RNA, 23 nt, Artificial Sequence
  Synthetic
ucacaccuauaaucccagcacuu

SEQ ID NO: 408669 - RNA, 24 nt, Artificial Sequence
  Synthetic
cucacaccuauaaucccagcacuu

SEQ ID NO: 408670 - RNA, 19 nt, Artificial Sequence
  Synthetic
gccuauaaucccagcacuu

SEQ ID NO: 408671 - RNA, 20 nt, Artificial Sequence
  Synthetic
cgccuauaaucccagcacuu

SEQ ID NO: 408672 - RNA, 21 nt, Artificial Sequence
  Synthetic
acgccuauaaucccagcacuu

SEQ ID NO: 408673 - RNA, 22 nt, Artificial Sequence
  Synthetic
cacgccuauaaucccagcacuu

SEQ ID NO: 408674 - RNA, 23 nt, Artificial Sequence
  Synthetic
ucacgccuauaaucccagcacuu

SEQ ID NO: 408675 - RNA, 24 nt, Artificial Sequence
  Synthetic
cucacgccuauaaucccagcacuu

SEQ ID NO: 408676 - RNA, 19 nt, Artificial Sequence
  Synthetic
uccuauaaucccagcacuu

SEQ ID NO: 408677 - RNA, 20 nt, Artificial Sequence
  Synthetic
cuccuauaaucccagcacuu

SEQ ID NO: 408678 - RNA, 21 nt, Artificial Sequence
  Synthetic
acuccuauaaucccagcacuu

SEQ ID NO: 408679 - RNA, 22 nt, Artificial Sequence
  Synthetic
cacuccuauaaucccagcacuu

SEQ ID NO: 408680 - RNA, 23 nt, Artificial Sequence
  Synthetic
ucacuccuauaaucccagcacuu

SEQ ID NO: 408681 - RNA, 24 nt, Artificial Sequence
  Synthetic
cucacuccuauaaucccagcacuu

SEQ ID NO: 408682 - RNA, 18 nt, Artificial Sequence
  Synthetic
ccuguaaucccagcacuu

SEQ ID NO: 408683 - RNA, 19 nt, Artificial Sequence
  Synthetic
accuguaaucccagcacuu

SEQ ID NO: 408684 - RNA, 20 nt, Artificial Sequence
  Synthetic
caccuguaaucccagcacuu

SEQ ID NO: 408685 - RNA, 20 nt, Artificial Sequence
  Synthetic
uaccuguaaucccagcacuu

SEQ ID NO: 408686 - RNA, 21 nt, Artificial Sequence
  Synthetic
auaccuguaaucccagcacuu

SEQ ID NO: 408687 - RNA, 22 nt, Artificial Sequence
  Synthetic
cauaccuguaaucccagcacuu

SEQ ID NO: 408688 - RNA, 23 nt, Artificial Sequence
  Synthetic
ucauaccuguaaucccagcacuu

SEQ ID NO: 408689 - RNA, 24 nt, Artificial Sequence
  Synthetic
cucauaccuguaaucccagcacuu

SEQ ID NO: 408690 - RNA, 19 nt, Artificial Sequence
  Synthetic
gccuguaaucccagcacuu

SEQ ID NO: 408691 - RNA, 20 nt, Artificial Sequence
  Synthetic
agccuguaaucccagcacuu

SEQ ID NO: 408692 - RNA, 21 nt, Artificial Sequence
  Synthetic
aagccuguaaucccagcacuu

SEQ ID NO: 408693 - RNA, 22 nt, Artificial Sequence
  Synthetic
caagccuguaaucccagcacuu

SEQ ID NO: 408694 - RNA, 23 nt, Artificial Sequence
  Synthetic
ucaagccuguaaucccagcacuu

SEQ ID NO: 408695 - RNA, 24 nt, Artificial Sequence
  Synthetic
uucaagccuguaaucccagcacuu

SEQ ID NO: 408696 - RNA, 21 nt, Artificial Sequence
  Synthetic
acgccuguaaucccagcacuu

SEQ ID NO: 408697 - RNA, 22 nt, Artificial Sequence
  Synthetic
aacgccuguaaucccagcacuu

SEQ ID NO: 408698 - RNA, 23 nt, Artificial Sequence
  Synthetic
caacgccuguaaucccagcacuu

SEQ ID NO: 408699 - RNA, 24 nt, Artificial Sequence
  Synthetic
ucaacgccuguaaucccagcacuu

SEQ ID NO: 408700 - RNA, 22 nt, Artificial Sequence
  Synthetic
uacgccuguaaucccagcacuu

SEQ ID NO: 408701 - RNA, 23 nt, Artificial Sequence
  Synthetic
uuacgccuguaaucccagcacuu

SEQ ID NO: 408702 - RNA, 24 nt, Artificial Sequence
  Synthetic
cuuacgccuguaaucccagcacuu

SEQ ID NO: 408703 - RNA, 20 nt, Artificial Sequence
  Synthetic
ggccuguaaucccagcacuu

SEQ ID NO: 408704 - RNA, 21 nt, Artificial Sequence
  Synthetic
aggccuguaaucccagcacuu

SEQ ID NO: 408705 - RNA, 22 nt, Artificial Sequence
  Synthetic
caggccuguaaucccagcacuu

SEQ ID NO: 408706 - RNA, 23 nt, Artificial Sequence
  Synthetic
ucaggccuguaaucccagcacuu

SEQ ID NO: 408707 - RNA, 24 nt, Artificial Sequence
  Synthetic
cucaggccuguaaucccagcacuu

SEQ ID NO: 408708 - RNA, 20 nt, Artificial Sequence
  Synthetic
ugccuguaaucccagcacuu

SEQ ID NO: 408709 - RNA, 21 nt, Artificial Sequence
  Synthetic
augccuguaaucccagcacuu

SEQ ID NO: 408710 - RNA, 22 nt, Artificial Sequence
  Synthetic
caugccuguaaucccagcacuu

SEQ ID NO: 408711 - RNA, 23 nt, Artificial Sequence
  Synthetic
gcaugccuguaaucccagcacuu

SEQ ID NO: 408712 - RNA, 24 nt, Artificial Sequence
  Synthetic
ugcaugccuguaaucccagcacuu

SEQ ID NO: 408713 - RNA, 20 nt, Artificial Sequence
  Synthetic
ugucuguaaucccagcacuu

SEQ ID NO: 408714 - RNA, 21 nt, Artificial Sequence
  Synthetic
augucuguaaucccagcacuu

SEQ ID NO: 408715 - RNA, 22 nt, Artificial Sequence
  Synthetic
caugucuguaaucccagcacuu

SEQ ID NO: 408716 - RNA, 23 nt, Artificial Sequence
  Synthetic
ucaugucuguaaucccagcacuu

SEQ ID NO: 408717 - RNA, 24 nt, Artificial Sequence
  Synthetic
cucaugucuguaaucccagcacuu

SEQ ID NO: 408718 - RNA, 18 nt, Artificial Sequence
  Synthetic
ccuguacucccagcacuu

SEQ ID NO: 408719 - RNA, 19 nt, Artificial Sequence
  Synthetic
accuguacucccagcacuu

SEQ ID NO: 408720 - RNA, 20 nt, Artificial Sequence
  Synthetic
caccuguacucccagcacuu

SEQ ID NO: 408721 - RNA, 21 nt, Artificial Sequence
  Synthetic
acaccuguacucccagcacuu

SEQ ID NO: 408722 - RNA, 22 nt, Artificial Sequence
  Synthetic
cacaccuguacucccagcacuu

SEQ ID NO: 408723 - RNA, 23 nt, Artificial Sequence
  Synthetic
ucacaccuguacucccagcacuu

SEQ ID NO: 408724 - RNA, 24 nt, Artificial Sequence
  Synthetic
cucacaccuguacucccagcacuu

SEQ ID NO: 408725 - RNA, 18 nt, Artificial Sequence
  Synthetic
ccuguaauuccagcacuu

SEQ ID NO: 408726 - RNA, 19 nt, Artificial Sequence
  Synthetic
uccuguaauuccagcacuu

SEQ ID NO: 408727 - RNA, 20 nt, Artificial Sequence
  Synthetic
cuccuguaauuccagcacuu

SEQ ID NO: 408728 - RNA, 21 nt, Artificial Sequence
  Synthetic
acuccuguaauuccagcacuu

SEQ ID NO: 408729 - RNA, 22 nt, Artificial Sequence
  Synthetic
cacuccuguaauuccagcacuu

SEQ ID NO: 408730 - RNA, 23 nt, Artificial Sequence
  Synthetic
ucacuccuguaauuccagcacuu

SEQ ID NO: 408731 - RNA, 24 nt, Artificial Sequence
  Synthetic
cucacuccuguaauuccagcacuu

SEQ ID NO: 408732 - RNA, 18 nt, Artificial Sequence
  Synthetic
ccuguaaucgcagcacuu

SEQ ID NO: 408733 - RNA, 19 nt, Artificial Sequence
  Synthetic
gccuguaaucgcagcacuu

SEQ ID NO: 408734 - RNA, 20 nt, Artificial Sequence
  Synthetic
cgccuguaaucgcagcacuu

SEQ ID NO: 408735 - RNA, 21 nt, Artificial Sequence
  Synthetic
acgccuguaaucgcagcacuu

SEQ ID NO: 408736 - RNA, 22 nt, Artificial Sequence
  Synthetic
cacgccuguaaucgcagcacuu

SEQ ID NO: 408737 - RNA, 23 nt, Artificial Sequence
  Synthetic
ucacgccuguaaucgcagcacuu

SEQ ID NO: 408738 - RNA, 24 nt, Artificial Sequence
  Synthetic
cucacgccuguaaucgcagcacuu

SEQ ID NO: 408739 - RNA, 18 nt, Artificial Sequence
  Synthetic
ccuaugauccuagcacuu

SEQ ID NO: 408740 - RNA, 19 nt, Artificial Sequence
  Synthetic
gccuaugauccuagcacuu

SEQ ID NO: 408741 - RNA, 20 nt, Artificial Sequence
  Synthetic
ugccuaugauccuagcacuu

SEQ ID NO: 408742 - RNA, 21 nt, Artificial Sequence
  Synthetic
augccuaugauccuagcacuu

SEQ ID NO: 408743 - RNA, 22 nt, Artificial Sequence
  Synthetic
caugccuaugauccuagcacuu

SEQ ID NO: 408744 - RNA, 23 nt, Artificial Sequence
  Synthetic
ucaugccuaugauccuagcacuu

SEQ ID NO: 408745 - RNA, 24 nt, Artificial Sequence
  Synthetic
cucaugccuaugauccuagcacuu

SEQ ID NO: 408746 - RNA, 18 nt, Artificial Sequence
  Synthetic
uugguaguugucgcacuu

SEQ ID NO: 408747 - RNA, 19 nt, Artificial Sequence
  Synthetic
guugguaguugucgcacuu

SEQ ID NO: 408748 - RNA, 20 nt, Artificial Sequence
  Synthetic
gguugguaguugucgcacuu

SEQ ID NO: 408749 - RNA, 21 nt, Artificial Sequence
  Synthetic
ugguugguaguugucgcacuu

SEQ ID NO: 408750 - RNA, 22 nt, Artificial Sequence
  Synthetic
augguugguaguugucgcacuu

SEQ ID NO: 408751 - RNA, 23 nt, Artificial Sequence
  Synthetic
uaugguugguaguugucgcacuu

SEQ ID NO: 408752 - RNA, 24 nt, Artificial Sequence
  Synthetic
guaugguugguaguugucgcacuu

SEQ ID NO: 408753 - RNA, 18 nt, Artificial Sequence
  Synthetic
uuucucaagcaggcacuu

SEQ ID NO: 408754 - RNA, 19 nt, Artificial Sequence
  Synthetic
cuuucucaagcaggcacuu

SEQ ID NO: 408755 - RNA, 20 nt, Artificial Sequence
  Synthetic
gcuuucucaagcaggcacuu

SEQ ID NO: 408756 - RNA, 21 nt, Artificial Sequence
  Synthetic
agcuuucucaagcaggcacuu

SEQ ID NO: 408757 - RNA, 22 nt, Artificial Sequence
  Synthetic
gagcuuucucaagcaggcacuu

SEQ ID NO: 408758 - RNA, 23 nt, Artificial Sequence
  Synthetic
ugagcuuucucaagcaggcacuu

SEQ ID NO: 408759 - RNA, 24 nt, Artificial Sequence
  Synthetic
cugagcuuucucaagcaggcacuu

SEQ ID NO: 408760 - RNA, 18 nt, Artificial Sequence
  Synthetic
uugggauguagggcacuu

SEQ ID NO: 408761 - RNA, 19 nt, Artificial Sequence
  Synthetic
cuugggauguagggcacuu

SEQ ID NO: 408762 - RNA, 20 nt, Artificial Sequence
  Synthetic
ccuugggauguagggcacuu

SEQ ID NO: 408763 - RNA, 21 nt, Artificial Sequence
  Synthetic
accuugggauguagggcacuu

SEQ ID NO: 408764 - RNA, 22 nt, Artificial Sequence
  Synthetic
gaccuugggauguagggcacuu

SEQ ID NO: 408765 - RNA, 23 nt, Artificial Sequence
  Synthetic
cgaccuugggauguagggcacuu

SEQ ID NO: 408766 - RNA, 24 nt, Artificial Sequence
  Synthetic
gcgaccuugggauguagggcacuu

SEQ ID NO: 408767 - RNA, 18 nt, Artificial Sequence
  Synthetic
uaacgaacguuugcacuu

SEQ ID NO: 408768 - RNA, 19 nt, Artificial Sequence
  Synthetic
cuaacgaacguuugcacuu

SEQ ID NO: 408769 - RNA, 20 nt, Artificial Sequence
  Synthetic
ucuaacgaacguuugcacuu

SEQ ID NO: 408770 - RNA, 21 nt, Artificial Sequence
  Synthetic
uucuaacgaacguuugcacuu

SEQ ID NO: 408771 - RNA, 22 nt, Artificial Sequence
  Synthetic
cuucuaacgaacguuugcacuu

SEQ ID NO: 408772 - RNA, 23 nt, Artificial Sequence
  Synthetic
acuucuaacgaacguuugcacuu

SEQ ID NO: 408773 - RNA, 24 nt, Artificial Sequence
  Synthetic
aacuucuaacgaacguuugcacuu

SEQ ID NO: 408774 - RNA, 18 nt, Artificial Sequence
  Synthetic
ggcugaccacaaucacuu

SEQ ID NO: 408775 - RNA, 19 nt, Artificial Sequence
  Synthetic
uggcugaccacaaucacuu

SEQ ID NO: 408776 - RNA, 20 nt, Artificial Sequence
  Synthetic
uuggcugaccacaaucacuu

SEQ ID NO: 408777 - RNA, 21 nt, Artificial Sequence
  Synthetic
uuuggcugaccacaaucacuu

SEQ ID NO: 408778 - RNA, 22 nt, Artificial Sequence
  Synthetic
uuuuggcugaccacaaucacuu

SEQ ID NO: 408779 - RNA, 23 nt, Artificial Sequence
  Synthetic
auuuuggcugaccacaaucacuu

SEQ ID NO: 408780 - RNA, 24 nt, Artificial Sequence
  Synthetic
aauuuuggcugaccacaaucacuu

SEQ ID NO: 408781 - RNA, 18 nt, Artificial Sequence
  Synthetic
gcagcguuagcaucacuu

SEQ ID NO: 408782 - RNA, 19 nt, Artificial Sequence
  Synthetic
agcagcguuagcaucacuu

SEQ ID NO: 408783 - RNA, 20 nt, Artificial Sequence
  Synthetic
cagcagcguuagcaucacuu

SEQ ID NO: 408784 - RNA, 21 nt, Artificial Sequence
  Synthetic
ucagcagcguuagcaucacuu

SEQ ID NO: 408785 - RNA, 22 nt, Artificial Sequence
  Synthetic
aucagcagcguuagcaucacuu

SEQ ID NO: 408786 - RNA, 23 nt, Artificial Sequence
  Synthetic
gaucagcagcguuagcaucacuu

SEQ ID NO: 408787 - RNA, 24 nt, Artificial Sequence
  Synthetic
ggaucagcagcguuagcaucacuu

SEQ ID NO: 408788 - RNA, 18 nt, Artificial Sequence
  Synthetic
gcaguaucggcaucacuu

SEQ ID NO: 408789 - RNA, 19 nt, Artificial Sequence
  Synthetic
agcaguaucggcaucacuu

SEQ ID NO: 408790 - RNA, 20 nt, Artificial Sequence
  Synthetic
uagcaguaucggcaucacuu

SEQ ID NO: 408791 - RNA, 21 nt, Artificial Sequence
  Synthetic
cuagcaguaucggcaucacuu

SEQ ID NO: 408792 - RNA, 22 nt, Artificial Sequence
  Synthetic
acuagcaguaucggcaucacuu

SEQ ID NO: 408793 - RNA, 23 nt, Artificial Sequence
  Synthetic
gacuagcaguaucggcaucacuu

SEQ ID NO: 408794 - RNA, 24 nt, Artificial Sequence
  Synthetic
ggacuagcaguaucggcaucacuu

SEQ ID NO: 408795 - RNA, 18 nt, Artificial Sequence
  Synthetic
gaggugggcggaucacuu

SEQ ID NO: 408796 - RNA, 19 nt, Artificial Sequence
  Synthetic
cgaggugggcggaucacuu

SEQ ID NO: 408797 - RNA, 20 nt, Artificial Sequence
  Synthetic
ccgaggugggcggaucacuu

SEQ ID NO: 408798 - RNA, 21 nt, Artificial Sequence
  Synthetic
gccgaggugggcggaucacuu

SEQ ID NO: 408799 - RNA, 22 nt, Artificial Sequence
  Synthetic
ggccgaggugggcggaucacuu

SEQ ID NO: 408800 - RNA, 23 nt, Artificial Sequence
  Synthetic
aggccgaggugggcggaucacuu

SEQ ID NO: 408801 - RNA, 24 nt, Artificial Sequence
  Synthetic
gaggccgaggugggcggaucacuu

SEQ ID NO: 408802 - RNA, 18 nt, Artificial Sequence
  Synthetic
ucuaaaaucauaucacuu

SEQ ID NO: 408803 - RNA, 19 nt, Artificial Sequence
  Synthetic
aucuaaaaucauaucacuu

SEQ ID NO: 408804 - RNA, 20 nt, Artificial Sequence
  Synthetic
aaucuaaaaucauaucacuu

SEQ ID NO: 408805 - RNA, 21 nt, Artificial Sequence
  Synthetic
aaaucuaaaaucauaucacuu

SEQ ID NO: 408806 - RNA, 22 nt, Artificial Sequence
  Synthetic
uaaaucuaaaaucauaucacuu

SEQ ID NO: 408807 - RNA, 23 nt, Artificial Sequence
  Synthetic
auaaaucuaaaaucauaucacuu

SEQ ID NO: 408808 - RNA, 24 nt, Artificial Sequence
  Synthetic
uauaaaucuaaaaucauaucacuu

SEQ ID NO: 408809 - RNA, 18 nt, Artificial Sequence
  Synthetic
acgcccuuuauaucacuu

SEQ ID NO: 408810 - RNA, 19 nt, Artificial Sequence
  Synthetic
aacgcccuuuauaucacuu

SEQ ID NO: 408811 - RNA, 20 nt, Artificial Sequence
  Synthetic
caacgcccuuuauaucacuu

SEQ ID NO: 408812 - RNA, 21 nt, Artificial Sequence
  Synthetic
ucaacgcccuuuauaucacuu

SEQ ID NO: 408813 - RNA, 22 nt, Artificial Sequence
  Synthetic
aucaacgcccuuuauaucacuu

SEQ ID NO: 408814 - RNA, 23 nt, Artificial Sequence
  Synthetic
uaucaacgcccuuuauaucacuu

SEQ ID NO: 408815 - RNA, 24 nt, Artificial Sequence
  Synthetic
uuaucaacgcccuuuauaucacuu

SEQ ID NO: 408816 - RNA, 18 nt, Artificial Sequence
  Synthetic
uuauuaauacccucacuu

SEQ ID NO: 408817 - RNA, 19 nt, Artificial Sequence
  Synthetic
uuuauuaauacccucacuu

SEQ ID NO: 408818 - RNA, 20 nt, Artificial Sequence
  Synthetic
uuuuauuaauacccucacuu

SEQ ID NO: 408819 - RNA, 21 nt, Artificial Sequence
  Synthetic
cuuuuauuaauacccucacuu

SEQ ID NO: 408820 - RNA, 22 nt, Artificial Sequence
  Synthetic
acuuuuauuaauacccucacuu

SEQ ID NO: 408821 - RNA, 23 nt, Artificial Sequence
  Synthetic
uacuuuuauuaauacccucacuu

SEQ ID NO: 408822 - RNA, 24 nt, Artificial Sequence
  Synthetic
auacuuuuauuaauacccucacuu

SEQ ID NO: 408823 - RNA, 18 nt, Artificial Sequence
  Synthetic
cuuuucuaaaucucacuu

SEQ ID NO: 408824 - RNA, 19 nt, Artificial Sequence
  Synthetic
ucuuuucuaaaucucacuu

SEQ ID NO: 408825 - RNA, 20 nt, Artificial Sequence
  Synthetic
uucuuuucuaaaucucacuu

SEQ ID NO: 408826 - RNA, 21 nt, Artificial Sequence
  Synthetic
cuucuuuucuaaaucucacuu

SEQ ID NO: 408827 - RNA, 22 nt, Artificial Sequence
  Synthetic
gcuucuuuucuaaaucucacuu

SEQ ID NO: 408828 - RNA, 23 nt, Artificial Sequence
  Synthetic
ggcuucuuuucuaaaucucacuu

SEQ ID NO: 408829 - RNA, 24 nt, Artificial Sequence
  Synthetic
uggcuucuuuucuaaaucucacuu

SEQ ID NO: 408830 - RNA, 18 nt, Artificial Sequence
  Synthetic
guuugcagacucucacuu

SEQ ID NO: 408831 - RNA, 19 nt, Artificial Sequence
  Synthetic
aguuugcagacucucacuu

SEQ ID NO: 408832 - RNA, 20 nt, Artificial Sequence
  Synthetic
caguuugcagacucucacuu

SEQ ID NO: 408833 - RNA, 21 nt, Artificial Sequence
  Synthetic
gcaguuugcagacucucacuu

SEQ ID NO: 408834 - RNA, 22 nt, Artificial Sequence
  Synthetic
ugcaguuugcagacucucacuu

SEQ ID NO: 408835 - RNA, 23 nt, Artificial Sequence
  Synthetic
cugcaguuugcagacucucacuu

SEQ ID NO: 408836 - RNA, 24 nt, Artificial Sequence
  Synthetic
gcugcaguuugcagacucucacuu

SEQ ID NO: 408837 - RNA, 18 nt, Artificial Sequence
  Synthetic
aguaaugaaaauucacuu

SEQ ID NO: 408838 - RNA, 19 nt, Artificial Sequence
  Synthetic
uaguaaugaaaauucacuu

SEQ ID NO: 408839 - RNA, 20 nt, Artificial Sequence
  Synthetic
uuaguaaugaaaauucacuu

SEQ ID NO: 408840 - RNA, 21 nt, Artificial Sequence
  Synthetic
guuaguaaugaaaauucacuu

SEQ ID NO: 408841 - RNA, 22 nt, Artificial Sequence
  Synthetic
uguuaguaaugaaaauucacuu

SEQ ID NO: 408842 - RNA, 23 nt, Artificial Sequence
  Synthetic
guguuaguaaugaaaauucacuu

SEQ ID NO: 408843 - RNA, 24 nt, Artificial Sequence
  Synthetic
aguguuaguaaugaaaauucacuu

SEQ ID NO: 408844 - RNA, 18 nt, Artificial Sequence
  Synthetic
gauuuaaagaauucacuu

SEQ ID NO: 408845 - RNA, 19 nt, Artificial Sequence
  Synthetic
agauuuaaagaauucacuu

SEQ ID NO: 408846 - RNA, 20 nt, Artificial Sequence
  Synthetic
gagauuuaaagaauucacuu

SEQ ID NO: 408847 - RNA, 21 nt, Artificial Sequence
  Synthetic
agagauuuaaagaauucacuu

SEQ ID NO: 408848 - RNA, 22 nt, Artificial Sequence
  Synthetic
aagagauuuaaagaauucacuu

SEQ ID NO: 408849 - RNA, 23 nt, Artificial Sequence
  Synthetic
aaagagauuuaaagaauucacuu

SEQ ID NO: 408850 - RNA, 24 nt, Artificial Sequence
  Synthetic
aaaagagauuuaaagaauucacuu

SEQ ID NO: 408851 - RNA, 18 nt, Artificial Sequence
  Synthetic
uuaaaaaauuauucacuu

SEQ ID NO: 408852 - RNA, 19 nt, Artificial Sequence
  Synthetic
auuaaaaaauuauucacuu

SEQ ID NO: 408853 - RNA, 20 nt, Artificial Sequence
  Synthetic
aauuaaaaaauuauucacuu

SEQ ID NO: 408854 - RNA, 21 nt, Artificial Sequence
  Synthetic
uaauuaaaaaauuauucacuu

SEQ ID NO: 408855 - RNA, 22 nt, Artificial Sequence
  Synthetic
uuaauuaaaaaauuauucacuu

SEQ ID NO: 408856 - RNA, 23 nt, Artificial Sequence
  Synthetic
uuuaauuaaaaaauuauucacuu

SEQ ID NO: 408857 - RNA, 24 nt, Artificial Sequence
  Synthetic
uuuuaauuaaaaaauuauucacuu

SEQ ID NO: 408858 - RNA, 18 nt, Artificial Sequence
  Synthetic
uuuauuucuccuucacuu

SEQ ID NO: 408859 - RNA, 19 nt, Artificial Sequence
  Synthetic
uuuuauuucuccuucacuu

SEQ ID NO: 408860 - RNA, 20 nt, Artificial Sequence
  Synthetic
auuuuauuucuccuucacuu

SEQ ID NO: 408861 - RNA, 21 nt, Artificial Sequence
  Synthetic
uauuuuauuucuccuucacuu

SEQ ID NO: 408862 - RNA, 22 nt, Artificial Sequence
  Synthetic
guauuuuauuucuccuucacuu

SEQ ID NO: 408863 - RNA, 23 nt, Artificial Sequence
  Synthetic
aguauuuuauuucuccuucacuu

SEQ ID NO: 408864 - RNA, 24 nt, Artificial Sequence
  Synthetic
aaguauuuuauuucuccuucacuu

SEQ ID NO: 408865 - RNA, 18 nt, Artificial Sequence
  Synthetic
guuugugauauuucacuu

SEQ ID NO: 408866 - RNA, 19 nt, Artificial Sequence
  Synthetic
aguuugugauauuucacuu

SEQ ID NO: 408867 - RNA, 20 nt, Artificial Sequence
  Synthetic
aaguuugugauauuucacuu

SEQ ID NO: 408868 - RNA, 21 nt, Artificial Sequence
  Synthetic
caaguuugugauauuucacuu

SEQ ID NO: 408869 - RNA, 22 nt, Artificial Sequence
  Synthetic
ucaaguuugugauauuucacuu

SEQ ID NO: 408870 - RNA, 23 nt, Artificial Sequence
  Synthetic
aucaaguuugugauauuucacuu

SEQ ID NO: 408871 - RNA, 24 nt, Artificial Sequence
  Synthetic
uaucaaguuugugauauuucacuu

SEQ ID NO: 408872 - RNA, 18 nt, Artificial Sequence
  Synthetic
guguugaacacaagacuu

SEQ ID NO: 408873 - RNA, 19 nt, Artificial Sequence
  Synthetic
aguguugaacacaagacuu

SEQ ID NO: 408874 - RNA, 20 nt, Artificial Sequence
  Synthetic
caguguugaacacaagacuu

SEQ ID NO: 408875 - RNA, 21 nt, Artificial Sequence
  Synthetic
ucaguguugaacacaagacuu

SEQ ID NO: 408876 - RNA, 22 nt, Artificial Sequence
  Synthetic
cucaguguugaacacaagacuu

SEQ ID NO: 408877 - RNA, 23 nt, Artificial Sequence
  Synthetic
ucucaguguugaacacaagacuu

SEQ ID NO: 408878 - RNA, 24 nt, Artificial Sequence
  Synthetic
gucucaguguugaacacaagacuu

SEQ ID NO: 408879 - RNA, 18 nt, Artificial Sequence
  Synthetic
aaguuuauuggaagacuu

SEQ ID NO: 408880 - RNA, 19 nt, Artificial Sequence
  Synthetic
aaaguuuauuggaagacuu

SEQ ID NO: 408881 - RNA, 20 nt, Artificial Sequence
  Synthetic
uaaaguuuauuggaagacuu

SEQ ID NO: 408882 - RNA, 21 nt, Artificial Sequence
  Synthetic
cuaaaguuuauuggaagacuu

SEQ ID NO: 408883 - RNA, 22 nt, Artificial Sequence
  Synthetic
gcuaaaguuuauuggaagacuu

SEQ ID NO: 408884 - RNA, 23 nt, Artificial Sequence
  Synthetic
agcuaaaguuuauuggaagacuu

SEQ ID NO: 408885 - RNA, 24 nt, Artificial Sequence
  Synthetic
aagcuaaaguuuauuggaagacuu

SEQ ID NO: 408886 - RNA, 18 nt, Artificial Sequence
  Synthetic
gucuuucucugaagacuu

SEQ ID NO: 408887 - RNA, 19 nt, Artificial Sequence
  Synthetic
ugucuuucucugaagacuu

SEQ ID NO: 408888 - RNA, 20 nt, Artificial Sequence
  Synthetic
uugucuuucucugaagacuu

SEQ ID NO: 408889 - RNA, 21 nt, Artificial Sequence
  Synthetic
cuugucuuucucugaagacuu

SEQ ID NO: 408890 - RNA, 22 nt, Artificial Sequence
  Synthetic
acuugucuuucucugaagacuu

SEQ ID NO: 408891 - RNA, 23 nt, Artificial Sequence
  Synthetic
aacuugucuuucucugaagacuu

SEQ ID NO: 408892 - RNA, 24 nt, Artificial Sequence
  Synthetic
aaacuugucuuucucugaagacuu

SEQ ID NO: 408893 - RNA, 18 nt, Artificial Sequence
  Synthetic
uuuuaaagaauaagacuu

SEQ ID NO: 408894 - RNA, 19 nt, Artificial Sequence
  Synthetic
uuuuuaaagaauaagacuu

SEQ ID NO: 408895 - RNA, 20 nt, Artificial Sequence
  Synthetic
cuuuuuaaagaauaagacuu

SEQ ID NO: 408896 - RNA, 21 nt, Artificial Sequence
  Synthetic
acuuuuuaaagaauaagacuu

SEQ ID NO: 408897 - RNA, 22 nt, Artificial Sequence
  Synthetic
uacuuuuuaaagaauaagacuu

SEQ ID NO: 408898 - RNA, 23 nt, Artificial Sequence
  Synthetic
guacuuuuuaaagaauaagacuu

SEQ ID NO: 408899 - RNA, 24 nt, Artificial Sequence
  Synthetic
uguacuuuuuaaagaauaagacuu

SEQ ID NO: 408900 - RNA, 18 nt, Artificial Sequence
  Synthetic
caaagugcugucagacuu

SEQ ID NO: 408901 - RNA, 19 nt, Artificial Sequence
  Synthetic
ccaaagugcugucagacuu

SEQ ID NO: 408902 - RNA, 20 nt, Artificial Sequence
  Synthetic
uccaaagugcugucagacuu

SEQ ID NO: 408903 - RNA, 21 nt, Artificial Sequence
  Synthetic
uuccaaagugcugucagacuu

SEQ ID NO: 408904 - RNA, 22 nt, Artificial Sequence
  Synthetic
auuccaaagugcugucagacuu

SEQ ID NO: 408905 - RNA, 23 nt, Artificial Sequence
  Synthetic
uauuccaaagugcugucagacuu

SEQ ID NO: 408906 - RNA, 24 nt, Artificial Sequence
  Synthetic
auauuccaaagugcugucagacuu

SEQ ID NO: 408907 - RNA, 18 nt, Artificial Sequence
  Synthetic
aauguauccuagagacuu

SEQ ID NO: 408908 - RNA, 19 nt, Artificial Sequence
  Synthetic
caauguauccuagagacuu

SEQ ID NO: 408909 - RNA, 20 nt, Artificial Sequence
  Synthetic
ccaauguauccuagagacuu

SEQ ID NO: 408910 - RNA, 21 nt, Artificial Sequence
  Synthetic
cccaauguauccuagagacuu

SEQ ID NO: 408911 - RNA, 22 nt, Artificial Sequence
  Synthetic
ccccaauguauccuagagacuu

SEQ ID NO: 408912 - RNA, 23 nt, Artificial Sequence
  Synthetic
uccccaauguauccuagagacuu

SEQ ID NO: 408913 - RNA, 24 nt, Artificial Sequence
  Synthetic
cuccccaauguauccuagagacuu

SEQ ID NO: 408914 - RNA, 18 nt, Artificial Sequence
  Synthetic
uaguaagaaaugagacuu

SEQ ID NO: 408915 - RNA, 19 nt, Artificial Sequence
  Synthetic
cuaguaagaaaugagacuu

SEQ ID NO: 408916 - RNA, 20 nt, Artificial Sequence
  Synthetic
gcuaguaagaaaugagacuu

SEQ ID NO: 408917 - RNA, 21 nt, Artificial Sequence
  Synthetic
ugcuaguaagaaaugagacuu

SEQ ID NO: 408918 - RNA, 22 nt, Artificial Sequence
  Synthetic
augcuaguaagaaaugagacuu

SEQ ID NO: 408919 - RNA, 23 nt, Artificial Sequence
  Synthetic
aaugcuaguaagaaaugagacuu

SEQ ID NO: 408920 - RNA, 24 nt, Artificial Sequence
  Synthetic
aaaugcuaguaagaaaugagacuu

SEQ ID NO: 408921 - RNA, 18 nt, Artificial Sequence
  Synthetic
agcagaagaacuagacuu

SEQ ID NO: 408922 - RNA, 19 nt, Artificial Sequence
  Synthetic
cagcagaagaacuagacuu

SEQ ID NO: 408923 - RNA, 20 nt, Artificial Sequence
  Synthetic
ccagcagaagaacuagacuu

SEQ ID NO: 408924 - RNA, 21 nt, Artificial Sequence
  Synthetic
gccagcagaagaacuagacuu

SEQ ID NO: 408925 - RNA, 22 nt, Artificial Sequence
  Synthetic
ggccagcagaagaacuagacuu

SEQ ID NO: 408926 - RNA, 23 nt, Artificial Sequence
  Synthetic
aggccagcagaagaacuagacuu

SEQ ID NO: 408927 - RNA, 24 nt, Artificial Sequence
  Synthetic
caggccagcagaagaacuagacuu

SEQ ID NO: 408928 - RNA, 18 nt, Artificial Sequence
  Synthetic
acagcgauguguagacuu

SEQ ID NO: 408929 - RNA, 19 nt, Artificial Sequence
  Synthetic
gacagcgauguguagacuu

SEQ ID NO: 408930 - RNA, 20 nt, Artificial Sequence
  Synthetic
ggacagcgauguguagacuu

SEQ ID NO: 408931 - RNA, 21 nt, Artificial Sequence
  Synthetic
uggacagcgauguguagacuu

SEQ ID NO: 408932 - RNA, 22 nt, Artificial Sequence
  Synthetic
auggacagcgauguguagacuu

SEQ ID NO: 408933 - RNA, 23 nt, Artificial Sequence
  Synthetic
aauggacagcgauguguagacuu

SEQ ID NO: 408934 - RNA, 24 nt, Artificial Sequence
  Synthetic
uaauggacagcgauguguagacuu

SEQ ID NO: 408935 - RNA, 18 nt, Artificial Sequence
  Synthetic
ugacaacuguuuagacuu

SEQ ID NO: 408936 - RNA, 19 nt, Artificial Sequence
  Synthetic
uugacaacuguuuagacuu

SEQ ID NO: 408937 - RNA, 20 nt, Artificial Sequence
  Synthetic
cuugacaacuguuuagacuu

SEQ ID NO: 408938 - RNA, 21 nt, Artificial Sequence
  Synthetic
gcuugacaacuguuuagacuu

SEQ ID NO: 408939 - RNA, 22 nt, Artificial Sequence
  Synthetic
ggcuugacaacuguuuagacuu

SEQ ID NO: 408940 - RNA, 23 nt, Artificial Sequence
  Synthetic
gggcuugacaacuguuuagacuu

SEQ ID NO: 408941 - RNA, 24 nt, Artificial Sequence
  Synthetic
ggggcuugacaacuguuuagacuu

SEQ ID NO: 408942 - RNA, 18 nt, Artificial Sequence
  Synthetic
augaucccuaaacgacuu

SEQ ID NO: 408943 - RNA, 19 nt, Artificial Sequence
  Synthetic
uaugaucccuaaacgacuu

SEQ ID NO: 408944 - RNA, 20 nt, Artificial Sequence
  Synthetic
auaugaucccuaaacgacuu

SEQ ID NO: 408945 - RNA, 21 nt, Artificial Sequence
  Synthetic
cauaugaucccuaaacgacuu

SEQ ID NO: 408946 - RNA, 22 nt, Artificial Sequence
  Synthetic
ccauaugaucccuaaacgacuu

SEQ ID NO: 408947 - RNA, 23 nt, Artificial Sequence
  Synthetic
cccauaugaucccuaaacgacuu

SEQ ID NO: 408948 - RNA, 24 nt, Artificial Sequence
  Synthetic
gcccauaugaucccuaaacgacuu

SEQ ID NO: 408949 - RNA, 18 nt, Artificial Sequence
  Synthetic
aguuagauuuaacgacuu

SEQ ID NO: 408950 - RNA, 19 nt, Artificial Sequence
  Synthetic
gaguuagauuuaacgacuu

SEQ ID NO: 408951 - RNA, 20 nt, Artificial Sequence
  Synthetic
agaguuagauuuaacgacuu

SEQ ID NO: 408952 - RNA, 21 nt, Artificial Sequence
  Synthetic
cagaguuagauuuaacgacuu

SEQ ID NO: 408953 - RNA, 22 nt, Artificial Sequence
  Synthetic
ucagaguuagauuuaacgacuu

SEQ ID NO: 408954 - RNA, 23 nt, Artificial Sequence
  Synthetic
aucagaguuagauuuaacgacuu

SEQ ID NO: 408955 - RNA, 24 nt, Artificial Sequence
  Synthetic
caucagaguuagauuuaacgacuu

SEQ ID NO: 408956 - RNA, 18 nt, Artificial Sequence
  Synthetic
aaaccaagggaaggacuu

SEQ ID NO: 408957 - RNA, 19 nt, Artificial Sequence
  Synthetic
uaaaccaagggaaggacuu

SEQ ID NO: 408958 - RNA, 20 nt, Artificial Sequence
  Synthetic
cuaaaccaagggaaggacuu

SEQ ID NO: 408959 - RNA, 21 nt, Artificial Sequence
  Synthetic
gcuaaaccaagggaaggacuu

SEQ ID NO: 408960 - RNA, 22 nt, Artificial Sequence
  Synthetic
agcuaaaccaagggaaggacuu

SEQ ID NO: 408961 - RNA, 23 nt, Artificial Sequence
  Synthetic
uagcuaaaccaagggaaggacuu

SEQ ID NO: 408962 - RNA, 24 nt, Artificial Sequence
  Synthetic
uuagcuaaaccaagggaaggacuu

SEQ ID NO: 408963 - RNA, 18 nt, Artificial Sequence
  Synthetic
cuucaccaguaaggacuu

SEQ ID NO: 408964 - RNA, 19 nt, Artificial Sequence
  Synthetic
ucuucaccaguaaggacuu

SEQ ID NO: 408965 - RNA, 20 nt, Artificial Sequence
  Synthetic
cucuucaccaguaaggacuu

SEQ ID NO: 408966 - RNA, 21 nt, Artificial Sequence
  Synthetic
acucuucaccaguaaggacuu

SEQ ID NO: 408967 - RNA, 22 nt, Artificial Sequence
  Synthetic
uacucuucaccaguaaggacuu

SEQ ID NO: 408968 - RNA, 23 nt, Artificial Sequence
  Synthetic
auacucuucaccaguaaggacuu

SEQ ID NO: 408969 - RNA, 24 nt, Artificial Sequence
  Synthetic
cauacucuucaccaguaaggacuu

SEQ ID NO: 408970 - RNA, 18 nt, Artificial Sequence
  Synthetic
ucuguaacccuaggacuu

SEQ ID NO: 408971 - RNA, 19 nt, Artificial Sequence
  Synthetic
gucuguaacccuaggacuu

SEQ ID NO: 408972 - RNA, 20 nt, Artificial Sequence
  Synthetic
cgucuguaacccuaggacuu

SEQ ID NO: 408973 - RNA, 21 nt, Artificial Sequence
  Synthetic
acgucuguaacccuaggacuu

SEQ ID NO: 408974 - RNA, 22 nt, Artificial Sequence
  Synthetic
cacgucuguaacccuaggacuu

SEQ ID NO: 408975 - RNA, 23 nt, Artificial Sequence
  Synthetic
ucacgucuguaacccuaggacuu

SEQ ID NO: 408976 - RNA, 24 nt, Artificial Sequence
  Synthetic
cucacgucuguaacccuaggacuu

SEQ ID NO: 408977 - RNA, 18 nt, Artificial Sequence
  Synthetic
agaagcggaaacggacuu

SEQ ID NO: 408978 - RNA, 19 nt, Artificial Sequence
  Synthetic
uagaagcggaaacggacuu

SEQ ID NO: 408979 - RNA, 20 nt, Artificial Sequence
  Synthetic
auagaagcggaaacggacuu

SEQ ID NO: 408980 - RNA, 21 nt, Artificial Sequence
  Synthetic
gauagaagcggaaacggacuu

SEQ ID NO: 408981 - RNA, 22 nt, Artificial Sequence
  Synthetic
ugauagaagcggaaacggacuu

SEQ ID NO: 408982 - RNA, 23 nt, Artificial Sequence
  Synthetic
uugauagaagcggaaacggacuu

SEQ ID NO: 408983 - RNA, 24 nt, Artificial Sequence
  Synthetic
guugauagaagcggaaacggacuu

SEQ ID NO: 408984 - RNA, 18 nt, Artificial Sequence
  Synthetic
ucucuggggaugggacuu

SEQ ID NO: 408985 - RNA, 19 nt, Artificial Sequence
  Synthetic
aucucuggggaugggacuu

SEQ ID NO: 408986 - RNA, 20 nt, Artificial Sequence
  Synthetic
aaucucuggggaugggacuu

SEQ ID NO: 408987 - RNA, 21 nt, Artificial Sequence
  Synthetic
gaaucucuggggaugggacuu

SEQ ID NO: 408988 - RNA, 22 nt, Artificial Sequence
  Synthetic
agaaucucuggggaugggacuu

SEQ ID NO: 408989 - RNA, 23 nt, Artificial Sequence
  Synthetic
cagaaucucuggggaugggacuu

SEQ ID NO: 408990 - RNA, 24 nt, Artificial Sequence
  Synthetic
ucagaaucucuggggaugggacuu

SEQ ID NO: 408991 - RNA, 18 nt, Artificial Sequence
  Synthetic
acucccguugugggacuu

SEQ ID NO: 408992 - RNA, 19 nt, Artificial Sequence
  Synthetic
aacucccguugugggacuu

SEQ ID NO: 408993 - RNA, 20 nt, Artificial Sequence
  Synthetic
uaacucccguugugggacuu

SEQ ID NO: 408994 - RNA, 21 nt, Artificial Sequence
  Synthetic
auaacucccguugugggacuu

SEQ ID NO: 408995 - RNA, 22 nt, Artificial Sequence
  Synthetic
uauaacucccguugugggacuu

SEQ ID NO: 408996 - RNA, 23 nt, Artificial Sequence
  Synthetic
auauaacucccguugugggacuu

SEQ ID NO: 408997 - RNA, 24 nt, Artificial Sequence
  Synthetic
gauauaacucccguugugggacuu

SEQ ID NO: 408998 - RNA, 18 nt, Artificial Sequence
  Synthetic
aauuccuccaauggacuu

SEQ ID NO: 408999 - RNA, 19 nt, Artificial Sequence
  Synthetic
caauuccuccaauggacuu

SEQ ID NO: 409000 - RNA, 20 nt, Artificial Sequence
  Synthetic
acaauuccuccaauggacuu

SEQ ID NO: 409001 - RNA, 21 nt, Artificial Sequence
  Synthetic
gacaauuccuccaauggacuu

SEQ ID NO: 409002 - RNA, 22 nt, Artificial Sequence
  Synthetic
agacaauuccuccaauggacuu

SEQ ID NO: 409003 - RNA, 23 nt, Artificial Sequence
  Synthetic
aagacaauuccuccaauggacuu

SEQ ID NO: 409004 - RNA, 24 nt, Artificial Sequence
  Synthetic
aaagacaauuccuccaauggacuu

SEQ ID NO: 409005 - RNA, 18 nt, Artificial Sequence
  Synthetic
aagaauccggcuggacuu

SEQ ID NO: 409006 - RNA, 19 nt, Artificial Sequence
  Synthetic
gaagaauccggcuggacuu

SEQ ID NO: 409007 - RNA, 20 nt, Artificial Sequence
  Synthetic
agaagaauccggcuggacuu

SEQ ID NO: 409008 - RNA, 21 nt, Artificial Sequence
  Synthetic
gagaagaauccggcuggacuu

SEQ ID NO: 409009 - RNA, 22 nt, Artificial Sequence
  Synthetic
agagaagaauccggcuggacuu

SEQ ID NO: 409010 - RNA, 23 nt, Artificial Sequence
  Synthetic
uagagaagaauccggcuggacuu

SEQ ID NO: 409011 - RNA, 24 nt, Artificial Sequence
  Synthetic
uuagagaagaauccggcuggacuu

SEQ ID NO: 409012 - RNA, 18 nt, Artificial Sequence
  Synthetic
gauuucucaaguggacuu

SEQ ID NO: 409013 - RNA, 19 nt, Artificial Sequence
  Synthetic
agauuucucaaguggacuu

SEQ ID NO: 409014 - RNA, 20 nt, Artificial Sequence
  Synthetic
gagauuucucaaguggacuu

SEQ ID NO: 409015 - RNA, 21 nt, Artificial Sequence
  Synthetic
agagauuucucaaguggacuu

SEQ ID NO: 409016 - RNA, 22 nt, Artificial Sequence
  Synthetic
gagagauuucucaaguggacuu

SEQ ID NO: 409017 - RNA, 23 nt, Artificial Sequence
  Synthetic
agagagauuucucaaguggacuu

SEQ ID NO: 409018 - RNA, 24 nt, Artificial Sequence
  Synthetic
aagagagauuucucaaguggacuu

SEQ ID NO: 409019 - RNA, 18 nt, Artificial Sequence
  Synthetic
ugacaaagaacaugacuu

SEQ ID NO: 409020 - RNA, 19 nt, Artificial Sequence
  Synthetic
augacaaagaacaugacuu

SEQ ID NO: 409021 - RNA, 20 nt, Artificial Sequence
  Synthetic
caugacaaagaacaugacuu

SEQ ID NO: 409022 - RNA, 21 nt, Artificial Sequence
  Synthetic
ucaugacaaagaacaugacuu

SEQ ID NO: 409023 - RNA, 22 nt, Artificial Sequence
  Synthetic
cucaugacaaagaacaugacuu

SEQ ID NO: 409024 - RNA, 23 nt, Artificial Sequence
  Synthetic
ucucaugacaaagaacaugacuu

SEQ ID NO: 409025 - RNA, 24 nt, Artificial Sequence
  Synthetic
aucucaugacaaagaacaugacuu

SEQ ID NO: 409026 - RNA, 18 nt, Artificial Sequence
  Synthetic
ugucuggguacaugacuu

SEQ ID NO: 409027 - RNA, 19 nt, Artificial Sequence
  Synthetic
gugucuggguacaugacuu

SEQ ID NO: 409028 - RNA, 20 nt, Artificial Sequence
  Synthetic
agugucuggguacaugacuu

SEQ ID NO: 409029 - RNA, 21 nt, Artificial Sequence
  Synthetic
uagugucuggguacaugacuu

SEQ ID NO: 409030 - RNA, 22 nt, Artificial Sequence
  Synthetic
uuagugucuggguacaugacuu

SEQ ID NO: 409031 - RNA, 23 nt, Artificial Sequence
  Synthetic
guuagugucuggguacaugacuu

SEQ ID NO: 409032 - RNA, 24 nt, Artificial Sequence
  Synthetic
aguuagugucuggguacaugacuu

SEQ ID NO: 409033 - RNA, 18 nt, Artificial Sequence
  Synthetic
uaaauaacuauaugacuu

SEQ ID NO: 409034 - RNA, 19 nt, Artificial Sequence
  Synthetic
auaaauaacuauaugacuu

SEQ ID NO: 409035 - RNA, 20 nt, Artificial Sequence
  Synthetic
aauaaauaacuauaugacuu

SEQ ID NO: 409036 - RNA, 21 nt, Artificial Sequence
  Synthetic
aaauaaauaacuauaugacuu

SEQ ID NO: 409037 - RNA, 22 nt, Artificial Sequence
  Synthetic
uaaauaaauaacuauaugacuu

SEQ ID NO: 409038 - RNA, 23 nt, Artificial Sequence
  Synthetic
guaaauaaauaacuauaugacuu

SEQ ID NO: 409039 - RNA, 24 nt, Artificial Sequence
  Synthetic
aguaaauaaauaacuauaugacuu

SEQ ID NO: 409040 - RNA, 18 nt, Artificial Sequence
  Synthetic
aguucuugguuaugacuu

SEQ ID NO: 409041 - RNA, 19 nt, Artificial Sequence
  Synthetic
aaguucuugguuaugacuu

SEQ ID NO: 409042 - RNA, 20 nt, Artificial Sequence
  Synthetic
uaaguucuugguuaugacuu

SEQ ID NO: 409043 - RNA, 21 nt, Artificial Sequence
  Synthetic
uuaaguucuugguuaugacuu

SEQ ID NO: 409044 - RNA, 22 nt, Artificial Sequence
  Synthetic
cuuaaguucuugguuaugacuu

SEQ ID NO: 409045 - RNA, 23 nt, Artificial Sequence
  Synthetic
acuuaaguucuugguuaugacuu

SEQ ID NO: 409046 - RNA, 24 nt, Artificial Sequence
  Synthetic
uacuuaaguucuugguuaugacuu

SEQ ID NO: 409047 - RNA, 18 nt, Artificial Sequence
  Synthetic
cuugggaaaaccugacuu

SEQ ID NO: 409048 - RNA, 19 nt, Artificial Sequence
  Synthetic
acuugggaaaaccugacuu

SEQ ID NO: 409049 - RNA, 20 nt, Artificial Sequence
  Synthetic
gacuugggaaaaccugacuu

SEQ ID NO: 409050 - RNA, 21 nt, Artificial Sequence
  Synthetic
ugacuugggaaaaccugacuu

SEQ ID NO: 409051 - RNA, 22 nt, Artificial Sequence
  Synthetic
cugacuugggaaaaccugacuu

SEQ ID NO: 409052 - RNA, 23 nt, Artificial Sequence
  Synthetic
ucugacuugggaaaaccugacuu

SEQ ID NO: 409053 - RNA, 24 nt, Artificial Sequence
  Synthetic
gucugacuugggaaaaccugacuu

SEQ ID NO: 409054 - RNA, 18 nt, Artificial Sequence
  Synthetic
aggaccacaagcugacuu

SEQ ID NO: 409055 - RNA, 19 nt, Artificial Sequence
  Synthetic
gaggaccacaagcugacuu

SEQ ID NO: 409056 - RNA, 20 nt, Artificial Sequence
  Synthetic
ggaggaccacaagcugacuu

SEQ ID NO: 409057 - RNA, 21 nt, Artificial Sequence
  Synthetic
gggaggaccacaagcugacuu

SEQ ID NO: 409058 - RNA, 22 nt, Artificial Sequence
  Synthetic
ugggaggaccacaagcugacuu

SEQ ID NO: 409059 - RNA, 23 nt, Artificial Sequence
  Synthetic
uugggaggaccacaagcugacuu

SEQ ID NO: 409060 - RNA, 24 nt, Artificial Sequence
  Synthetic
auugggaggaccacaagcugacuu

SEQ ID NO: 409061 - RNA, 18 nt, Artificial Sequence
  Synthetic
ggauaccuagucugacuu

SEQ ID NO: 409062 - RNA, 19 nt, Artificial Sequence
  Synthetic
gggauaccuagucugacuu

SEQ ID NO: 409063 - RNA, 20 nt, Artificial Sequence
  Synthetic
ugggauaccuagucugacuu

SEQ ID NO: 409064 - RNA, 21 nt, Artificial Sequence
  Synthetic
cugggauaccuagucugacuu

SEQ ID NO: 409065 - RNA, 22 nt, Artificial Sequence
  Synthetic
ucugggauaccuagucugacuu

SEQ ID NO: 409066 - RNA, 23 nt, Artificial Sequence
  Synthetic
cucugggauaccuagucugacuu

SEQ ID NO: 409067 - RNA, 24 nt, Artificial Sequence
  Synthetic
ccucugggauaccuagucugacuu

SEQ ID NO: 409068 - RNA, 18 nt, Artificial Sequence
  Synthetic
uugucaucuuucugacuu

SEQ ID NO: 409069 - RNA, 19 nt, Artificial Sequence
  Synthetic
uuugucaucuuucugacuu

SEQ ID NO: 409070 - RNA, 20 nt, Artificial Sequence
  Synthetic
cuuugucaucuuucugacuu

SEQ ID NO: 409071 - RNA, 21 nt, Artificial Sequence
  Synthetic
ucuuugucaucuuucugacuu

SEQ ID NO: 409072 - RNA, 22 nt, Artificial Sequence
  Synthetic
uucuuugucaucuuucugacuu

SEQ ID NO: 409073 - RNA, 23 nt, Artificial Sequence
  Synthetic
uuucuuugucaucuuucugacuu

SEQ ID NO: 409074 - RNA, 24 nt, Artificial Sequence
  Synthetic
auuucuuugucaucuuucugacuu

SEQ ID NO: 409075 - RNA, 18 nt, Artificial Sequence
  Synthetic
gacuaguggcagugacuu

SEQ ID NO: 409076 - RNA, 19 nt, Artificial Sequence
  Synthetic
ugacuaguggcagugacuu

SEQ ID NO: 409077 - RNA, 20 nt, Artificial Sequence
  Synthetic
cugacuaguggcagugacuu

SEQ ID NO: 409078 - RNA, 21 nt, Artificial Sequence
  Synthetic
acugacuaguggcagugacuu

SEQ ID NO: 409079 - RNA, 22 nt, Artificial Sequence
  Synthetic
aacugacuaguggcagugacuu

SEQ ID NO: 409080 - RNA, 23 nt, Artificial Sequence
  Synthetic
aaacugacuaguggcagugacuu

SEQ ID NO: 409081 - RNA, 24 nt, Artificial Sequence
  Synthetic
aaaacugacuaguggcagugacuu

SEQ ID NO: 409082 - RNA, 18 nt, Artificial Sequence
  Synthetic
acuuuuauuaggugacuu

SEQ ID NO: 409083 - RNA, 19 nt, Artificial Sequence
  Synthetic
uacuuuuauuaggugacuu

SEQ ID NO: 409084 - RNA, 20 nt, Artificial Sequence
  Synthetic
guacuuuuauuaggugacuu

SEQ ID NO: 409085 - RNA, 21 nt, Artificial Sequence
  Synthetic
uguacuuuuauuaggugacuu

SEQ ID NO: 409086 - RNA, 22 nt, Artificial Sequence
  Synthetic
auguacuuuuauuaggugacuu

SEQ ID NO: 409087 - RNA, 23 nt, Artificial Sequence
  Synthetic
aauguacuuuuauuaggugacuu

SEQ ID NO: 409088 - RNA, 24 nt, Artificial Sequence
  Synthetic
aaauguacuuuuauuaggugacuu

SEQ ID NO: 409089 - RNA, 18 nt, Artificial Sequence
  Synthetic
aaccucuuucugugacuu

SEQ ID NO: 409090 - RNA, 19 nt, Artificial Sequence
  Synthetic
gaaccucuuucugugacuu

SEQ ID NO: 409091 - RNA, 20 nt, Artificial Sequence
  Synthetic
cgaaccucuuucugugacuu

SEQ ID NO: 409092 - RNA, 21 nt, Artificial Sequence
  Synthetic
ccgaaccucuuucugugacuu

SEQ ID NO: 409093 - RNA, 22 nt, Artificial Sequence
  Synthetic
uccgaaccucuuucugugacuu

SEQ ID NO: 409094 - RNA, 23 nt, Artificial Sequence
  Synthetic
uuccgaaccucuuucugugacuu

SEQ ID NO: 409095 - RNA, 24 nt, Artificial Sequence
  Synthetic
guuccgaaccucuuucugugacuu

SEQ ID NO: 409096 - RNA, 18 nt, Artificial Sequence
  Synthetic
agagaagcagcuugacuu

SEQ ID NO: 409097 - RNA, 19 nt, Artificial Sequence
  Synthetic
gagagaagcagcuugacuu

SEQ ID NO: 409098 - RNA, 20 nt, Artificial Sequence
  Synthetic
agagagaagcagcuugacuu

SEQ ID NO: 409099 - RNA, 21 nt, Artificial Sequence
  Synthetic
cagagagaagcagcuugacuu

SEQ ID NO: 409100 - RNA, 22 nt, Artificial Sequence
  Synthetic
ucagagagaagcagcuugacuu

SEQ ID NO: 409101 - RNA, 23 nt, Artificial Sequence
  Synthetic
aucagagagaagcagcuugacuu

SEQ ID NO: 409102 - RNA, 24 nt, Artificial Sequence
  Synthetic
caucagagagaagcagcuugacuu

SEQ ID NO: 409103 - RNA, 18 nt, Artificial Sequence
  Synthetic
auuuguaccuuuugacuu

SEQ ID NO: 409104 - RNA, 19 nt, Artificial Sequence
  Synthetic
gauuuguaccuuuugacuu

SEQ ID NO: 409105 - RNA, 20 nt, Artificial Sequence
  Synthetic
ggauuuguaccuuuugacuu

SEQ ID NO: 409106 - RNA, 21 nt, Artificial Sequence
  Synthetic
gggauuuguaccuuuugacuu

SEQ ID NO: 409107 - RNA, 22 nt, Artificial Sequence
  Synthetic
agggauuuguaccuuuugacuu

SEQ ID NO: 409108 - RNA, 23 nt, Artificial Sequence
  Synthetic
cagggauuuguaccuuuugacuu

SEQ ID NO: 409109 - RNA, 24 nt, Artificial Sequence
  Synthetic
ucagggauuuguaccuuuugacuu

SEQ ID NO: 409110 - RNA, 18 nt, Artificial Sequence
  Synthetic
aggagucauuaaauacuu

SEQ ID NO: 409111 - RNA, 19 nt, Artificial Sequence
  Synthetic
aaggagucauuaaauacuu

SEQ ID NO: 409112 - RNA, 20 nt, Artificial Sequence
  Synthetic
aaaggagucauuaaauacuu

SEQ ID NO: 409113 - RNA, 21 nt, Artificial Sequence
  Synthetic
aaaaggagucauuaaauacuu

SEQ ID NO: 409114 - RNA, 22 nt, Artificial Sequence
  Synthetic
aaaaaggagucauuaaauacuu

SEQ ID NO: 409115 - RNA, 23 nt, Artificial Sequence
  Synthetic
caaaaaggagucauuaaauacuu

SEQ ID NO: 409116 - RNA, 24 nt, Artificial Sequence
  Synthetic
gcaaaaaggagucauuaaauacuu

SEQ ID NO: 409117 - RNA, 18 nt, Artificial Sequence
  Synthetic
aacuaaucagcaauacuu

SEQ ID NO: 409118 - RNA, 19 nt, Artificial Sequence
  Synthetic
gaacuaaucagcaauacuu

SEQ ID NO: 409119 - RNA, 20 nt, Artificial Sequence
  Synthetic
agaacuaaucagcaauacuu

SEQ ID NO: 409120 - RNA, 21 nt, Artificial Sequence
  Synthetic
gagaacuaaucagcaauacuu

SEQ ID NO: 409121 - RNA, 22 nt, Artificial Sequence
  Synthetic
ugagaacuaaucagcaauacuu

SEQ ID NO: 409122 - RNA, 23 nt, Artificial Sequence
  Synthetic
cugagaacuaaucagcaauacuu

SEQ ID NO: 409123 - RNA, 24 nt, Artificial Sequence
  Synthetic
ucugagaacuaaucagcaauacuu

SEQ ID NO: 409124 - RNA, 18 nt, Artificial Sequence
  Synthetic
ggaauuuggagaauacuu

SEQ ID NO: 409125 - RNA, 19 nt, Artificial Sequence
  Synthetic
uggaauuuggagaauacuu

SEQ ID NO: 409126 - RNA, 20 nt, Artificial Sequence
  Synthetic
guggaauuuggagaauacuu

SEQ ID NO: 409127 - RNA, 21 nt, Artificial Sequence
  Synthetic
uguggaauuuggagaauacuu

SEQ ID NO: 409128 - RNA, 22 nt, Artificial Sequence
  Synthetic
guguggaauuuggagaauacuu

SEQ ID NO: 409129 - RNA, 23 nt, Artificial Sequence
  Synthetic
gguguggaauuuggagaauacuu

SEQ ID NO: 409130 - RNA, 24 nt, Artificial Sequence
  Synthetic
ugguguggaauuuggagaauacuu

SEQ ID NO: 409131 - RNA, 18 nt, Artificial Sequence
  Synthetic
gcuagccacauaauacuu

SEQ ID NO: 409132 - RNA, 19 nt, Artificial Sequence
  Synthetic
agcuagccacauaauacuu

SEQ ID NO: 409133 - RNA, 20 nt, Artificial Sequence
  Synthetic
cagcuagccacauaauacuu

SEQ ID NO: 409134 - RNA, 21 nt, Artificial Sequence
  Synthetic
ucagcuagccacauaauacuu

SEQ ID NO: 409135 - RNA, 22 nt, Artificial Sequence
  Synthetic
aucagcuagccacauaauacuu

SEQ ID NO: 409136 - RNA, 23 nt, Artificial Sequence
  Synthetic
uaucagcuagccacauaauacuu

SEQ ID NO: 409137 - RNA, 24 nt, Artificial Sequence
  Synthetic
cuaucagcuagccacauaauacuu

SEQ ID NO: 409138 - RNA, 18 nt, Artificial Sequence
  Synthetic
uucagaaaacuaauacuu

SEQ ID NO: 409139 - RNA, 19 nt, Artificial Sequence
  Synthetic
guucagaaaacuaauacuu

SEQ ID NO: 409140 - RNA, 20 nt, Artificial Sequence
  Synthetic
aguucagaaaacuaauacuu

SEQ ID NO: 409141 - RNA, 21 nt, Artificial Sequence
  Synthetic
caguucagaaaacuaauacuu

SEQ ID NO: 409142 - RNA, 22 nt, Artificial Sequence
  Synthetic
ccaguucagaaaacuaauacuu

SEQ ID NO: 409143 - RNA, 23 nt, Artificial Sequence
  Synthetic
gccaguucagaaaacuaauacuu

SEQ ID NO: 409144 - RNA, 24 nt, Artificial Sequence
  Synthetic
agccaguucagaaaacuaauacuu

SEQ ID NO: 409145 - RNA, 18 nt, Artificial Sequence
  Synthetic
auaaaaacagacauacuu

SEQ ID NO: 409146 - RNA, 19 nt, Artificial Sequence
  Synthetic
gauaaaaacagacauacuu

SEQ ID NO: 409147 - RNA, 20 nt, Artificial Sequence
  Synthetic
ggauaaaaacagacauacuu

SEQ ID NO: 409148 - RNA, 21 nt, Artificial Sequence
  Synthetic
uggauaaaaacagacauacuu

SEQ ID NO: 409149 - RNA, 22 nt, Artificial Sequence
  Synthetic
guggauaaaaacagacauacuu

SEQ ID NO: 409150 - RNA, 23 nt, Artificial Sequence
  Synthetic
uguggauaaaaacagacauacuu

SEQ ID NO: 409151 - RNA, 24 nt, Artificial Sequence
  Synthetic
uuguggauaaaaacagacauacuu

SEQ ID NO: 409152 - RNA, 18 nt, Artificial Sequence
  Synthetic
cguauucucaccauacuu

SEQ ID NO: 409153 - RNA, 19 nt, Artificial Sequence
  Synthetic
ucguauucucaccauacuu

SEQ ID NO: 409154 - RNA, 20 nt, Artificial Sequence
  Synthetic
uucguauucucaccauacuu

SEQ ID NO: 409155 - RNA, 21 nt, Artificial Sequence
  Synthetic
auucguauucucaccauacuu

SEQ ID NO: 409156 - RNA, 22 nt, Artificial Sequence
  Synthetic
aauucguauucucaccauacuu

SEQ ID NO: 409157 - RNA, 23 nt, Artificial Sequence
  Synthetic
gaauucguauucucaccauacuu

SEQ ID NO: 409158 - RNA, 24 nt, Artificial Sequence
  Synthetic
ggaauucguauucucaccauacuu

SEQ ID NO: 409159 - RNA, 18 nt, Artificial Sequence
  Synthetic
cuacuacuacucauacuu

SEQ ID NO: 409160 - RNA, 19 nt, Artificial Sequence
  Synthetic
acuacuacuacucauacuu

SEQ ID NO: 409161 - RNA, 20 nt, Artificial Sequence
  Synthetic
aacuacuacuacucauacuu

SEQ ID NO: 409162 - RNA, 21 nt, Artificial Sequence
  Synthetic
caacuacuacuacucauacuu

SEQ ID NO: 409163 - RNA, 22 nt, Artificial Sequence
  Synthetic
acaacuacuacuacucauacuu

SEQ ID NO: 409164 - RNA, 23 nt, Artificial Sequence
  Synthetic
aacaacuacuacuacucauacuu

SEQ ID NO: 409165 - RNA, 24 nt, Artificial Sequence
  Synthetic
caacaacuacuacuacucauacuu

SEQ ID NO: 409166 - RNA, 18 nt, Artificial Sequence
  Synthetic
uacuaaaagaugauacuu

SEQ ID NO: 409167 - RNA, 19 nt, Artificial Sequence
  Synthetic
auacuaaaagaugauacuu

SEQ ID NO: 409168 - RNA, 20 nt, Artificial Sequence
  Synthetic
cauacuaaaagaugauacuu

SEQ ID NO: 409169 - RNA, 21 nt, Artificial Sequence
  Synthetic
ucauacuaaaagaugauacuu

SEQ ID NO: 409170 - RNA, 22 nt, Artificial Sequence
  Synthetic
uucauacuaaaagaugauacuu

SEQ ID NO: 409171 - RNA, 23 nt, Artificial Sequence
  Synthetic
cuucauacuaaaagaugauacuu

SEQ ID NO: 409172 - RNA, 24 nt, Artificial Sequence
  Synthetic
ucuucauacuaaaagaugauacuu

SEQ ID NO: 409173 - RNA, 18 nt, Artificial Sequence
  Synthetic
aguugucagucuauacuu

SEQ ID NO: 409174 - RNA, 19 nt, Artificial Sequence
  Synthetic
aaguugucagucuauacuu

SEQ ID NO: 409175 - RNA, 20 nt, Artificial Sequence
  Synthetic
aaaguugucagucuauacuu

SEQ ID NO: 409176 - RNA, 21 nt, Artificial Sequence
  Synthetic
gaaaguugucagucuauacuu

SEQ ID NO: 409177 - RNA, 22 nt, Artificial Sequence
  Synthetic
ugaaaguugucagucuauacuu

SEQ ID NO: 409178 - RNA, 23 nt, Artificial Sequence
  Synthetic
gugaaaguugucagucuauacuu

SEQ ID NO: 409179 - RNA, 24 nt, Artificial Sequence
  Synthetic
ugugaaaguugucagucuauacuu

SEQ ID NO: 409180 - RNA, 18 nt, Artificial Sequence
  Synthetic
ugaguugauucuauacuu

SEQ ID NO: 409181 - RNA, 19 nt, Artificial Sequence
  Synthetic
uugaguugauucuauacuu

SEQ ID NO: 409182 - RNA, 20 nt, Artificial Sequence
  Synthetic
auugaguugauucuauacuu

SEQ ID NO: 409183 - RNA, 21 nt, Artificial Sequence
  Synthetic
aauugaguugauucuauacuu

SEQ ID NO: 409184 - RNA, 22 nt, Artificial Sequence
  Synthetic
aaauugaguugauucuauacuu

SEQ ID NO: 409185 - RNA, 23 nt, Artificial Sequence
  Synthetic
uaaauugaguugauucuauacuu

SEQ ID NO: 409186 - RNA, 24 nt, Artificial Sequence
  Synthetic
auaaauugaguugauucuauacuu

SEQ ID NO: 409187 - RNA, 18 nt, Artificial Sequence
  Synthetic
ccuauuacgaaacuacuu

SEQ ID NO: 409188 - RNA, 19 nt, Artificial Sequence
  Synthetic
uccuauuacgaaacuacuu

SEQ ID NO: 409189 - RNA, 20 nt, Artificial Sequence
  Synthetic
cuccuauuacgaaacuacuu

SEQ ID NO: 409190 - RNA, 21 nt, Artificial Sequence
  Synthetic
ucuccuauuacgaaacuacuu

SEQ ID NO: 409191 - RNA, 22 nt, Artificial Sequence
  Synthetic
uucuccuauuacgaaacuacuu

SEQ ID NO: 409192 - RNA, 23 nt, Artificial Sequence
  Synthetic
uuucuccuauuacgaaacuacuu

SEQ ID NO: 409193 - RNA, 24 nt, Artificial Sequence
  Synthetic
uuuucuccuauuacgaaacuacuu

SEQ ID NO: 409194 - RNA, 18 nt, Artificial Sequence
  Synthetic
ccuuuucuggaacuacuu

SEQ ID NO: 409195 - RNA, 19 nt, Artificial Sequence
  Synthetic
uccuuuucuggaacuacuu

SEQ ID NO: 409196 - RNA, 20 nt, Artificial Sequence
  Synthetic
uuccuuuucuggaacuacuu

SEQ ID NO: 409197 - RNA, 21 nt, Artificial Sequence
  Synthetic
guuccuuuucuggaacuacuu

SEQ ID NO: 409198 - RNA, 22 nt, Artificial Sequence
  Synthetic
aguuccuuuucuggaacuacuu

SEQ ID NO: 409199 - RNA, 23 nt, Artificial Sequence
  Synthetic
gaguuccuuuucuggaacuacuu

SEQ ID NO: 409200 - RNA, 24 nt, Artificial Sequence
  Synthetic
agaguuccuuuucuggaacuacuu

SEQ ID NO: 409201 - RNA, 18 nt, Artificial Sequence
  Synthetic
acaacauuuucacuacuu

SEQ ID NO: 409202 - RNA, 19 nt, Artificial Sequence
  Synthetic
aacaacauuuucacuacuu

SEQ ID NO: 409203 - RNA, 20 nt, Artificial Sequence
  Synthetic
uaacaacauuuucacuacuu

SEQ ID NO: 409204 - RNA, 21 nt, Artificial Sequence
  Synthetic
auaacaacauuuucacuacuu

SEQ ID NO: 409205 - RNA, 22 nt, Artificial Sequence
  Synthetic
uauaacaacauuuucacuacuu

SEQ ID NO: 409206 - RNA, 23 nt, Artificial Sequence
  Synthetic
uuauaacaacauuuucacuacuu

SEQ ID NO: 409207 - RNA, 24 nt, Artificial Sequence
  Synthetic
uuuauaacaacauuuucacuacuu

SEQ ID NO: 409208 - RNA, 18 nt, Artificial Sequence
  Synthetic
uugaucagcauacuacuu

SEQ ID NO: 409209 - RNA, 19 nt, Artificial Sequence
  Synthetic
uuugaucagcauacuacuu

SEQ ID NO: 409210 - RNA, 20 nt, Artificial Sequence
  Synthetic
uuuugaucagcauacuacuu

SEQ ID NO: 409211 - RNA, 21 nt, Artificial Sequence
  Synthetic
auuuugaucagcauacuacuu

SEQ ID NO: 409212 - RNA, 22 nt, Artificial Sequence
  Synthetic
uauuuugaucagcauacuacuu

SEQ ID NO: 409213 - RNA, 23 nt, Artificial Sequence
  Synthetic
cuauuuugaucagcauacuacuu

SEQ ID NO: 409214 - RNA, 24 nt, Artificial Sequence
  Synthetic
acuauuuugaucagcauacuacuu

SEQ ID NO: 409215 - RNA, 18 nt, Artificial Sequence
  Synthetic
ucccucuuauaccuacuu

SEQ ID NO: 409216 - RNA, 19 nt, Artificial Sequence
  Synthetic
uucccucuuauaccuacuu

SEQ ID NO: 409217 - RNA, 20 nt, Artificial Sequence
  Synthetic
uuucccucuuauaccuacuu

SEQ ID NO: 409218 - RNA, 21 nt, Artificial Sequence
  Synthetic
cuuucccucuuauaccuacuu

SEQ ID NO: 409219 - RNA, 22 nt, Artificial Sequence
  Synthetic
acuuucccucuuauaccuacuu

SEQ ID NO: 409220 - RNA, 23 nt, Artificial Sequence
  Synthetic
aacuuucccucuuauaccuacuu

SEQ ID NO: 409221 - RNA, 24 nt, Artificial Sequence
  Synthetic
caacuuucccucuuauaccuacuu

SEQ ID NO: 409222 - RNA, 18 nt, Artificial Sequence
  Synthetic
agucaacuuagccuacuu

SEQ ID NO: 409223 - RNA, 19 nt, Artificial Sequence
  Synthetic
uagucaacuuagccuacuu

SEQ ID NO: 409224 - RNA, 20 nt, Artificial Sequence
  Synthetic
auagucaacuuagccuacuu

SEQ ID NO: 409225 - RNA, 21 nt, Artificial Sequence
  Synthetic
cauagucaacuuagccuacuu

SEQ ID NO: 409226 - RNA, 22 nt, Artificial Sequence
  Synthetic
gcauagucaacuuagccuacuu

SEQ ID NO: 409227 - RNA, 23 nt, Artificial Sequence
  Synthetic
ugcauagucaacuuagccuacuu

SEQ ID NO: 409228 - RNA, 24 nt, Artificial Sequence
  Synthetic
uugcauagucaacuuagccuacuu

SEQ ID NO: 409229 - RNA, 18 nt, Artificial Sequence
  Synthetic
ccucagcuaugccuacuu

SEQ ID NO: 409230 - RNA, 19 nt, Artificial Sequence
  Synthetic
uccucagcuaugccuacuu

SEQ ID NO: 409231 - RNA, 20 nt, Artificial Sequence
  Synthetic
cuccucagcuaugccuacuu

SEQ ID NO: 409232 - RNA, 21 nt, Artificial Sequence
  Synthetic
acuccucagcuaugccuacuu

SEQ ID NO: 409233 - RNA, 22 nt, Artificial Sequence
  Synthetic
cacuccucagcuaugccuacuu

SEQ ID NO: 409234 - RNA, 23 nt, Artificial Sequence
  Synthetic
ucacuccucagcuaugccuacuu

SEQ ID NO: 409235 - RNA, 24 nt, Artificial Sequence
  Synthetic
cucacuccucagcuaugccuacuu

SEQ ID NO: 409236 - RNA, 18 nt, Artificial Sequence
  Synthetic
uacuuucaauuccuacuu

SEQ ID NO: 409237 - RNA, 19 nt, Artificial Sequence
  Synthetic
cuacuuucaauuccuacuu

SEQ ID NO: 409238 - RNA, 20 nt, Artificial Sequence
  Synthetic
acuacuuucaauuccuacuu

SEQ ID NO: 409239 - RNA, 21 nt, Artificial Sequence
  Synthetic
uacuacuuucaauuccuacuu

SEQ ID NO: 409240 - RNA, 22 nt, Artificial Sequence
  Synthetic
auacuacuuucaauuccuacuu

SEQ ID NO: 409241 - RNA, 23 nt, Artificial Sequence
  Synthetic
uauacuacuuucaauuccuacuu

SEQ ID NO: 409242 - RNA, 24 nt, Artificial Sequence
  Synthetic
uuauacuacuuucaauuccuacuu

SEQ ID NO: 409243 - RNA, 18 nt, Artificial Sequence
  Synthetic
cuugaaucacagcuacuu

SEQ ID NO: 409244 - RNA, 19 nt, Artificial Sequence
  Synthetic
acuugaaucacagcuacuu

SEQ ID NO: 409245 - RNA, 20 nt, Artificial Sequence
  Synthetic
gacuugaaucacagcuacuu

SEQ ID NO: 409246 - RNA, 21 nt, Artificial Sequence
  Synthetic
ugacuugaaucacagcuacuu

SEQ ID NO: 409247 - RNA, 22 nt, Artificial Sequence
  Synthetic
augacuugaaucacagcuacuu

SEQ ID NO: 409248 - RNA, 23 nt, Artificial Sequence
  Synthetic
caugacuugaaucacagcuacuu

SEQ ID NO: 409249 - RNA, 24 nt, Artificial Sequence
  Synthetic
acaugacuugaaucacagcuacuu

SEQ ID NO: 409250 - RNA, 18 nt, Artificial Sequence
  Synthetic
cuguaaucccagcuacuu

SEQ ID NO: 409251 - RNA, 19 nt, Artificial Sequence
  Synthetic
ccuguaaucccagcuacuu

SEQ ID NO: 409252 - RNA, 20 nt, Artificial Sequence
  Synthetic
accuguaaucccagcuacuu

SEQ ID NO: 409253 - RNA, 21 nt, Artificial Sequence
  Synthetic
caccuguaaucccagcuacuu

SEQ ID NO: 409254 - RNA, 22 nt, Artificial Sequence
  Synthetic
acaccuguaaucccagcuacuu

SEQ ID NO: 409255 - RNA, 23 nt, Artificial Sequence
  Synthetic
cacaccuguaaucccagcuacuu

SEQ ID NO: 409256 - RNA, 24 nt, Artificial Sequence
  Synthetic
gcacaccuguaaucccagcuacuu

SEQ ID NO: 409257 - RNA, 23 nt, Artificial Sequence
  Synthetic
ggcaccuguaaucccagcuacuu

SEQ ID NO: 409258 - RNA, 24 nt, Artificial Sequence
  Synthetic
gggcaccuguaaucccagcuacuu

SEQ ID NO: 409259 - RNA, 20 nt, Artificial Sequence
  Synthetic
cccuguaaucccagcuacuu

SEQ ID NO: 409260 - RNA, 21 nt, Artificial Sequence
  Synthetic
ucccuguaaucccagcuacuu

SEQ ID NO: 409261 - RNA, 22 nt, Artificial Sequence
  Synthetic
aucccuguaaucccagcuacuu

SEQ ID NO: 409262 - RNA, 23 nt, Artificial Sequence
  Synthetic
caucccuguaaucccagcuacuu

SEQ ID NO: 409263 - RNA, 24 nt, Artificial Sequence
  Synthetic
gcaucccuguaaucccagcuacuu

SEQ ID NO: 409264 - RNA, 20 nt, Artificial Sequence
  Synthetic
gccuguaaucccagcuacuu

SEQ ID NO: 409265 - RNA, 24 nt, Artificial Sequence
  Synthetic
aggcgccuguaaucccagcuacuu

SEQ ID NO: 409266 - RNA, 23 nt, Artificial Sequence
  Synthetic
ugcgccuguaaucccagcuacuu

SEQ ID NO: 409267 - RNA, 24 nt, Artificial Sequence
  Synthetic
gugcgccuguaaucccagcuacuu

SEQ ID NO: 409268 - RNA, 18 nt, Artificial Sequence
  Synthetic
uuguaaucccagcuacuu

SEQ ID NO: 409269 - RNA, 19 nt, Artificial Sequence
  Synthetic
cuuguaaucccagcuacuu

SEQ ID NO: 409270 - RNA, 20 nt, Artificial Sequence
  Synthetic
gcuuguaaucccagcuacuu

SEQ ID NO: 409271 - RNA, 21 nt, Artificial Sequence
  Synthetic
ugcuuguaaucccagcuacuu

SEQ ID NO: 409272 - RNA, 22 nt, Artificial Sequence
  Synthetic
augcuuguaaucccagcuacuu

SEQ ID NO: 409273 - RNA, 23 nt, Artificial Sequence
  Synthetic
caugcuuguaaucccagcuacuu

SEQ ID NO: 409274 - RNA, 24 nt, Artificial Sequence
  Synthetic
gcaugcuuguaaucccagcuacuu

SEQ ID NO: 409275 - RNA, 18 nt, Artificial Sequence
  Synthetic
cuagagucccagcuacuu

SEQ ID NO: 409276 - RNA, 19 nt, Artificial Sequence
  Synthetic
ccuagagucccagcuacuu

SEQ ID NO: 409277 - RNA, 20 nt, Artificial Sequence
  Synthetic
gccuagagucccagcuacuu

SEQ ID NO: 409278 - RNA, 21 nt, Artificial Sequence
  Synthetic
ugccuagagucccagcuacuu

SEQ ID NO: 409279 - RNA, 22 nt, Artificial Sequence
  Synthetic
augccuagagucccagcuacuu

SEQ ID NO: 409280 - RNA, 23 nt, Artificial Sequence
  Synthetic
caugccuagagucccagcuacuu

SEQ ID NO: 409281 - RNA, 24 nt, Artificial Sequence
  Synthetic
gcaugccuagagucccagcuacuu

SEQ ID NO: 409282 - RNA, 18 nt, Artificial Sequence
  Synthetic
cuauagucccagcuacuu

SEQ ID NO: 409283 - RNA, 19 nt, Artificial Sequence
  Synthetic
ccuauagucccagcuacuu

SEQ ID NO: 409284 - RNA, 20 nt, Artificial Sequence
  Synthetic
gccuauagucccagcuacuu

SEQ ID NO: 409285 - RNA, 21 nt, Artificial Sequence
  Synthetic
cgccuauagucccagcuacuu

SEQ ID NO: 409286 - RNA, 22 nt, Artificial Sequence
  Synthetic
acgccuauagucccagcuacuu

SEQ ID NO: 409287 - RNA, 23 nt, Artificial Sequence
  Synthetic
cacgccuauagucccagcuacuu

SEQ ID NO: 409288 - RNA, 24 nt, Artificial Sequence
  Synthetic
gcacgccuauagucccagcuacuu

SEQ ID NO: 409289 - RNA, 22 nt, Artificial Sequence
  Synthetic
gcgccuauagucccagcuacuu

SEQ ID NO: 409290 - RNA, 23 nt, Artificial Sequence
  Synthetic
ggcgccuauagucccagcuacuu

SEQ ID NO: 409291 - RNA, 24 nt, Artificial Sequence
  Synthetic
gggcgccuauagucccagcuacuu

SEQ ID NO: 409292 - RNA, 18 nt, Artificial Sequence
  Synthetic
cuguagucccagcuacuu

SEQ ID NO: 409293 - RNA, 19 nt, Artificial Sequence
  Synthetic
ccuguagucccagcuacuu

SEQ ID NO: 409294 - RNA, 20 nt, Artificial Sequence
  Synthetic
gccuguagucccagcuacuu

SEQ ID NO: 409295 - RNA, 22 nt, Artificial Sequence
  Synthetic
gcgccuguagucccagcuacuu

SEQ ID NO: 409296 - RNA, 23 nt, Artificial Sequence
  Synthetic
ggcgccuguagucccagcuacuu

SEQ ID NO: 409297 - RNA, 24 nt, Artificial Sequence
  Synthetic
gggcgccuguagucccagcuacuu

SEQ ID NO: 409298 - RNA, 21 nt, Artificial Sequence
  Synthetic
ugccuguagucccagcuacuu

SEQ ID NO: 409299 - RNA, 22 nt, Artificial Sequence
  Synthetic
augccuguagucccagcuacuu

SEQ ID NO: 409300 - RNA, 23 nt, Artificial Sequence
  Synthetic
caugccuguagucccagcuacuu

SEQ ID NO: 409301 - RNA, 24 nt, Artificial Sequence
  Synthetic
gcaugccuguagucccagcuacuu

SEQ ID NO: 409302 - RNA, 18 nt, Artificial Sequence
  Synthetic
uuguagucccagcuacuu

SEQ ID NO: 409303 - RNA, 19 nt, Artificial Sequence
  Synthetic
uuuguagucccagcuacuu

SEQ ID NO: 409304 - RNA, 20 nt, Artificial Sequence
  Synthetic
guuuguagucccagcuacuu

SEQ ID NO: 409305 - RNA, 21 nt, Artificial Sequence
  Synthetic
aguuuguagucccagcuacuu

SEQ ID NO: 409306 - RNA, 22 nt, Artificial Sequence
  Synthetic
aaguuuguagucccagcuacuu

SEQ ID NO: 409307 - RNA, 23 nt, Artificial Sequence
  Synthetic
caaguuuguagucccagcuacuu

SEQ ID NO: 409308 - RNA, 24 nt, Artificial Sequence
  Synthetic
ccaaguuuguagucccagcuacuu

SEQ ID NO: 409309 - RNA, 18 nt, Artificial Sequence
  Synthetic
cuguagucucagcuacuu

SEQ ID NO: 409310 - RNA, 19 nt, Artificial Sequence
  Synthetic
ccuguagucucagcuacuu

SEQ ID NO: 409311 - RNA, 20 nt, Artificial Sequence
  Synthetic
accuguagucucagcuacuu

SEQ ID NO: 409312 - RNA, 21 nt, Artificial Sequence
  Synthetic
caccuguagucucagcuacuu

SEQ ID NO: 409313 - RNA, 22 nt, Artificial Sequence
  Synthetic
gcaccuguagucucagcuacuu

SEQ ID NO: 409314 - RNA, 23 nt, Artificial Sequence
  Synthetic
ggcaccuguagucucagcuacuu

SEQ ID NO: 409315 - RNA, 24 nt, Artificial Sequence
  Synthetic
aggcaccuguagucucagcuacuu

SEQ ID NO: 409316 - RNA, 18 nt, Artificial Sequence
  Synthetic
cuguaauccuagcuacuu

SEQ ID NO: 409317 - RNA, 19 nt, Artificial Sequence
  Synthetic
ccuguaauccuagcuacuu

SEQ ID NO: 409318 - RNA, 20 nt, Artificial Sequence
  Synthetic
gccuguaauccuagcuacuu

SEQ ID NO: 409319 - RNA, 21 nt, Artificial Sequence
  Synthetic
cgccuguaauccuagcuacuu

SEQ ID NO: 409320 - RNA, 22 nt, Artificial Sequence
  Synthetic
gcgccuguaauccuagcuacuu

SEQ ID NO: 409321 - RNA, 23 nt, Artificial Sequence
  Synthetic
ugcgccuguaauccuagcuacuu

SEQ ID NO: 409322 - RNA, 24 nt, Artificial Sequence
  Synthetic
cugcgccuguaauccuagcuacuu

SEQ ID NO: 409323 - RNA, 18 nt, Artificial Sequence
  Synthetic
aaauagucuuagcuacuu

SEQ ID NO: 409324 - RNA, 19 nt, Artificial Sequence
  Synthetic
gaaauagucuuagcuacuu

SEQ ID NO: 409325 - RNA, 20 nt, Artificial Sequence
  Synthetic
agaaauagucuuagcuacuu

SEQ ID NO: 409326 - RNA, 21 nt, Artificial Sequence
  Synthetic
aagaaauagucuuagcuacuu

SEQ ID NO: 409327 - RNA, 22 nt, Artificial Sequence
  Synthetic
gaagaaauagucuuagcuacuu

SEQ ID NO: 409328 - RNA, 23 nt, Artificial Sequence
  Synthetic
agaagaaauagucuuagcuacuu

SEQ ID NO: 409329 - RNA, 24 nt, Artificial Sequence
  Synthetic
aagaagaaauagucuuagcuacuu

SEQ ID NO: 409330 - RNA, 18 nt, Artificial Sequence
  Synthetic
uugucucagggucuacuu

SEQ ID NO: 409331 - RNA, 19 nt, Artificial Sequence
  Synthetic
cuugucucagggucuacuu

SEQ ID NO: 409332 - RNA, 20 nt, Artificial Sequence
  Synthetic
ccuugucucagggucuacuu

SEQ ID NO: 409333 - RNA, 21 nt, Artificial Sequence
  Synthetic
uccuugucucagggucuacuu

SEQ ID NO: 409334 - RNA, 22 nt, Artificial Sequence
  Synthetic
auccuugucucagggucuacuu

SEQ ID NO: 409335 - RNA, 23 nt, Artificial Sequence
  Synthetic
aauccuugucucagggucuacuu

SEQ ID NO: 409336 - RNA, 24 nt, Artificial Sequence
  Synthetic
aaauccuugucucagggucuacuu

SEQ ID NO: 409337 - RNA, 18 nt, Artificial Sequence
  Synthetic
uucucuuaauuucuacuu

SEQ ID NO: 409338 - RNA, 19 nt, Artificial Sequence
  Synthetic
uuucucuuaauuucuacuu

SEQ ID NO: 409339 - RNA, 20 nt, Artificial Sequence
  Synthetic
auuucucuuaauuucuacuu

SEQ ID NO: 409340 - RNA, 21 nt, Artificial Sequence
  Synthetic
aauuucucuuaauuucuacuu

SEQ ID NO: 409341 - RNA, 22 nt, Artificial Sequence
  Synthetic
caauuucucuuaauuucuacuu

SEQ ID NO: 409342 - RNA, 23 nt, Artificial Sequence
  Synthetic
acaauuucucuuaauuucuacuu

SEQ ID NO: 409343 - RNA, 24 nt, Artificial Sequence
  Synthetic
aacaauuucucuuaauuucuacuu

SEQ ID NO: 409344 - RNA, 18 nt, Artificial Sequence
  Synthetic
uuggauauguuucuacuu

SEQ ID NO: 409345 - RNA, 19 nt, Artificial Sequence
  Synthetic
guuggauauguuucuacuu

SEQ ID NO: 409346 - RNA, 20 nt, Artificial Sequence
  Synthetic
aguuggauauguuucuacuu

SEQ ID NO: 409347 - RNA, 21 nt, Artificial Sequence
  Synthetic
gaguuggauauguuucuacuu

SEQ ID NO: 409348 - RNA, 22 nt, Artificial Sequence
  Synthetic
agaguuggauauguuucuacuu

SEQ ID NO: 409349 - RNA, 23 nt, Artificial Sequence
  Synthetic
cagaguuggauauguuucuacuu

SEQ ID NO: 409350 - RNA, 24 nt, Artificial Sequence
  Synthetic
acagaguuggauauguuucuacuu

SEQ ID NO: 409351 - RNA, 18 nt, Artificial Sequence
  Synthetic
ucuguguuuuuucuacuu

SEQ ID NO: 409352 - RNA, 19 nt, Artificial Sequence
  Synthetic
uucuguguuuuuucuacuu

SEQ ID NO: 409353 - RNA, 20 nt, Artificial Sequence
  Synthetic
uuucuguguuuuuucuacuu

SEQ ID NO: 409354 - RNA, 21 nt, Artificial Sequence
  Synthetic
guuucuguguuuuuucuacuu

SEQ ID NO: 409355 - RNA, 22 nt, Artificial Sequence
  Synthetic
uguuucuguguuuuuucuacuu

SEQ ID NO: 409356 - RNA, 23 nt, Artificial Sequence
  Synthetic
cuguuucuguguuuuuucuacuu

SEQ ID NO: 409357 - RNA, 24 nt, Artificial Sequence
  Synthetic
ccuguuucuguguuuuuucuacuu

SEQ ID NO: 409358 - RNA, 18 nt, Artificial Sequence
  Synthetic
uuugucaacaaaguacuu

SEQ ID NO: 409359 - RNA, 19 nt, Artificial Sequence
  Synthetic
cuuugucaacaaaguacuu

SEQ ID NO: 409360 - RNA, 20 nt, Artificial Sequence
  Synthetic
ucuuugucaacaaaguacuu

SEQ ID NO: 409361 - RNA, 21 nt, Artificial Sequence
  Synthetic
uucuuugucaacaaaguacuu

SEQ ID NO: 409362 - RNA, 22 nt, Artificial Sequence
  Synthetic
auucuuugucaacaaaguacuu

SEQ ID NO: 409363 - RNA, 23 nt, Artificial Sequence
  Synthetic
aauucuuugucaacaaaguacuu

SEQ ID NO: 409364 - RNA, 24 nt, Artificial Sequence
  Synthetic
gaauucuuugucaacaaaguacuu

SEQ ID NO: 409365 - RNA, 18 nt, Artificial Sequence
  Synthetic
caacucucgaaaguacuu

SEQ ID NO: 409366 - RNA, 19 nt, Artificial Sequence
  Synthetic
ucaacucucgaaaguacuu

SEQ ID NO: 409367 - RNA, 20 nt, Artificial Sequence
  Synthetic
gucaacucucgaaaguacuu

SEQ ID NO: 409368 - RNA, 21 nt, Artificial Sequence
  Synthetic
agucaacucucgaaaguacuu

SEQ ID NO: 409369 - RNA, 22 nt, Artificial Sequence
  Synthetic
cagucaacucucgaaaguacuu

SEQ ID NO: 409370 - RNA, 23 nt, Artificial Sequence
  Synthetic
acagucaacucucgaaaguacuu

SEQ ID NO: 409371 - RNA, 24 nt, Artificial Sequence
  Synthetic
uacagucaacucucgaaaguacuu

SEQ ID NO: 409372 - RNA, 18 nt, Artificial Sequence
  Synthetic
gaguugaaucaaguacuu

SEQ ID NO: 409373 - RNA, 19 nt, Artificial Sequence
  Synthetic
agaguugaaucaaguacuu

SEQ ID NO: 409374 - RNA, 20 nt, Artificial Sequence
  Synthetic
cagaguugaaucaaguacuu

SEQ ID NO: 409375 - RNA, 21 nt, Artificial Sequence
  Synthetic
ucagaguugaaucaaguacuu

SEQ ID NO: 409376 - RNA, 22 nt, Artificial Sequence
  Synthetic
uucagaguugaaucaaguacuu

SEQ ID NO: 409377 - RNA, 23 nt, Artificial Sequence
  Synthetic
auucagaguugaaucaaguacuu

SEQ ID NO: 409378 - RNA, 24 nt, Artificial Sequence
  Synthetic
aauucagaguugaaucaaguacuu

SEQ ID NO: 409379 - RNA, 18 nt, Artificial Sequence
  Synthetic
acuuuaagagaaguacuu

SEQ ID NO: 409380 - RNA, 19 nt, Artificial Sequence
  Synthetic
cacuuuaagagaaguacuu

SEQ ID NO: 409381 - RNA, 20 nt, Artificial Sequence
  Synthetic
acacuuuaagagaaguacuu

SEQ ID NO: 409382 - RNA, 21 nt, Artificial Sequence
  Synthetic
gacacuuuaagagaaguacuu

SEQ ID NO: 409383 - RNA, 22 nt, Artificial Sequence
  Synthetic
agacacuuuaagagaaguacuu

SEQ ID NO: 409384 - RNA, 23 nt, Artificial Sequence
  Synthetic
cagacacuuuaagagaaguacuu

SEQ ID NO: 409385 - RNA, 24 nt, Artificial Sequence
  Synthetic
gcagacacuuuaagagaaguacuu

SEQ ID NO: 409386 - RNA, 18 nt, Artificial Sequence
  Synthetic
ccuguaaucccaguacuu

SEQ ID NO: 409387 - RNA, 19 nt, Artificial Sequence
  Synthetic
gccuguaaucccaguacuu

SEQ ID NO: 409388 - RNA, 20 nt, Artificial Sequence
  Synthetic
agccuguaaucccaguacuu

SEQ ID NO: 409389 - RNA, 21 nt, Artificial Sequence
  Synthetic
cagccuguaaucccaguacuu

SEQ ID NO: 409390 - RNA, 22 nt, Artificial Sequence
  Synthetic
gcagccuguaaucccaguacuu

SEQ ID NO: 409391 - RNA, 23 nt, Artificial Sequence
  Synthetic
cgcagccuguaaucccaguacuu

SEQ ID NO: 409392 - RNA, 24 nt, Artificial Sequence
  Synthetic
gcgcagccuguaaucccaguacuu

SEQ ID NO: 409393 - RNA, 18 nt, Artificial Sequence
  Synthetic
ccuguaauccuaguacuu

SEQ ID NO: 409394 - RNA, 19 nt, Artificial Sequence
  Synthetic
accuguaauccuaguacuu

SEQ ID NO: 409395 - RNA, 20 nt, Artificial Sequence
  Synthetic
caccuguaauccuaguacuu

SEQ ID NO: 409396 - RNA, 21 nt, Artificial Sequence
  Synthetic
acaccuguaauccuaguacuu

SEQ ID NO: 409397 - RNA, 22 nt, Artificial Sequence
  Synthetic
cacaccuguaauccuaguacuu

SEQ ID NO: 409398 - RNA, 23 nt, Artificial Sequence
  Synthetic
ucacaccuguaauccuaguacuu

SEQ ID NO: 409399 - RNA, 24 nt, Artificial Sequence
  Synthetic
cucacaccuguaauccuaguacuu

SEQ ID NO: 409400 - RNA, 18 nt, Artificial Sequence
  Synthetic
agcacccacuuaguacuu

SEQ ID NO: 409401 - RNA, 19 nt, Artificial Sequence
  Synthetic
aagcacccacuuaguacuu

SEQ ID NO: 409402 - RNA, 20 nt, Artificial Sequence
  Synthetic
caagcacccacuuaguacuu

SEQ ID NO: 409403 - RNA, 21 nt, Artificial Sequence
  Synthetic
gcaagcacccacuuaguacuu

SEQ ID NO: 409404 - RNA, 22 nt, Artificial Sequence
  Synthetic
agcaagcacccacuuaguacuu

SEQ ID NO: 409405 - RNA, 23 nt, Artificial Sequence
  Synthetic
uagcaagcacccacuuaguacuu

SEQ ID NO: 409406 - RNA, 24 nt, Artificial Sequence
  Synthetic
guagcaagcacccacuuaguacuu

SEQ ID NO: 409407 - RNA, 18 nt, Artificial Sequence
  Synthetic
ucaauagcacagguacuu

SEQ ID NO: 409408 - RNA, 19 nt, Artificial Sequence
  Synthetic
aucaauagcacagguacuu

SEQ ID NO: 409409 - RNA, 20 nt, Artificial Sequence
  Synthetic
aaucaauagcacagguacuu

SEQ ID NO: 409410 - RNA, 21 nt, Artificial Sequence
  Synthetic
uaaucaauagcacagguacuu

SEQ ID NO: 409411 - RNA, 22 nt, Artificial Sequence
  Synthetic
auaaucaauagcacagguacuu

SEQ ID NO: 409412 - RNA, 23 nt, Artificial Sequence
  Synthetic
gauaaucaauagcacagguacuu

SEQ ID NO: 409413 - RNA, 24 nt, Artificial Sequence
  Synthetic
agauaaucaauagcacagguacuu

SEQ ID NO: 409414 - RNA, 18 nt, Artificial Sequence
  Synthetic
cuguaaucccagguacuu

SEQ ID NO: 409415 - RNA, 19 nt, Artificial Sequence
  Synthetic
ccuguaaucccagguacuu

SEQ ID NO: 409416 - RNA, 20 nt, Artificial Sequence
  Synthetic
gccuguaaucccagguacuu

SEQ ID NO: 409417 - RNA, 21 nt, Artificial Sequence
  Synthetic
ugccuguaaucccagguacuu

SEQ ID NO: 409418 - RNA, 22 nt, Artificial Sequence
  Synthetic
augccuguaaucccagguacuu

SEQ ID NO: 409419 - RNA, 23 nt, Artificial Sequence
  Synthetic
caugccuguaaucccagguacuu

SEQ ID NO: 409420 - RNA, 24 nt, Artificial Sequence
  Synthetic
acaugccuguaaucccagguacuu

SEQ ID NO: 409421 - RNA, 18 nt, Artificial Sequence
  Synthetic
uguuagaaccugguacuu

SEQ ID NO: 409422 - RNA, 19 nt, Artificial Sequence
  Synthetic
auguuagaaccugguacuu

SEQ ID NO: 409423 - RNA, 20 nt, Artificial Sequence
  Synthetic
gauguuagaaccugguacuu

SEQ ID NO: 409424 - RNA, 21 nt, Artificial Sequence
  Synthetic
ugauguuagaaccugguacuu

SEQ ID NO: 409425 - RNA, 22 nt, Artificial Sequence
  Synthetic
cugauguuagaaccugguacuu

SEQ ID NO: 409426 - RNA, 23 nt, Artificial Sequence
  Synthetic
ccugauguuagaaccugguacuu

SEQ ID NO: 409427 - RNA, 24 nt, Artificial Sequence
  Synthetic
uccugauguuagaaccugguacuu

SEQ ID NO: 409428 - RNA, 18 nt, Artificial Sequence
  Synthetic
gcugaaaacaauguacuu

SEQ ID NO: 409429 - RNA, 19 nt, Artificial Sequence
  Synthetic
ugcugaaaacaauguacuu

SEQ ID NO: 409430 - RNA, 20 nt, Artificial Sequence
  Synthetic
uugcugaaaacaauguacuu

SEQ ID NO: 409431 - RNA, 21 nt, Artificial Sequence
  Synthetic
uuugcugaaaacaauguacuu

SEQ ID NO: 409432 - RNA, 22 nt, Artificial Sequence
  Synthetic
uuuugcugaaaacaauguacuu

SEQ ID NO: 409433 - RNA, 23 nt, Artificial Sequence
  Synthetic
uuuuugcugaaaacaauguacuu

SEQ ID NO: 409434 - RNA, 24 nt, Artificial Sequence
  Synthetic
guuuuugcugaaaacaauguacuu

SEQ ID NO: 409435 - RNA, 18 nt, Artificial Sequence
  Synthetic
auuuucccacauguacuu

SEQ ID NO: 409436 - RNA, 19 nt, Artificial Sequence
  Synthetic
cauuuucccacauguacuu

SEQ ID NO: 409437 - RNA, 20 nt, Artificial Sequence
  Synthetic
gcauuuucccacauguacuu

SEQ ID NO: 409438 - RNA, 21 nt, Artificial Sequence
  Synthetic
agcauuuucccacauguacuu

SEQ ID NO: 409439 - RNA, 22 nt, Artificial Sequence
  Synthetic
uagcauuuucccacauguacuu

SEQ ID NO: 409440 - RNA, 23 nt, Artificial Sequence
  Synthetic
guagcauuuucccacauguacuu

SEQ ID NO: 409441 - RNA, 24 nt, Artificial Sequence
  Synthetic
uguagcauuuucccacauguacuu

SEQ ID NO: 409442 - RNA, 18 nt, Artificial Sequence
  Synthetic
uugacacaauguguacuu

SEQ ID NO: 409443 - RNA, 19 nt, Artificial Sequence
  Synthetic
uuugacacaauguguacuu

SEQ ID NO: 409444 - RNA, 20 nt, Artificial Sequence
  Synthetic
guuugacacaauguguacuu

SEQ ID NO: 409445 - RNA, 21 nt, Artificial Sequence
  Synthetic
aguuugacacaauguguacuu

SEQ ID NO: 409446 - RNA, 22 nt, Artificial Sequence
  Synthetic
uaguuugacacaauguguacuu

SEQ ID NO: 409447 - RNA, 23 nt, Artificial Sequence
  Synthetic
cuaguuugacacaauguguacuu

SEQ ID NO: 409448 - RNA, 24 nt, Artificial Sequence
  Synthetic
gcuaguuugacacaauguguacuu

SEQ ID NO: 409449 - RNA, 18 nt, Artificial Sequence
  Synthetic
aauguuacauguguacuu

SEQ ID NO: 409450 - RNA, 19 nt, Artificial Sequence
  Synthetic
gaauguuacauguguacuu

SEQ ID NO: 409451 - RNA, 20 nt, Artificial Sequence
  Synthetic
agaauguuacauguguacuu

SEQ ID NO: 409452 - RNA, 21 nt, Artificial Sequence
  Synthetic
gagaauguuacauguguacuu

SEQ ID NO: 409453 - RNA, 22 nt, Artificial Sequence
  Synthetic
ggagaauguuacauguguacuu

SEQ ID NO: 409454 - RNA, 23 nt, Artificial Sequence
  Synthetic
uggagaauguuacauguguacuu

SEQ ID NO: 409455 - RNA, 24 nt, Artificial Sequence
  Synthetic
cuggagaauguuacauguguacuu

SEQ ID NO: 409456 - RNA, 18 nt, Artificial Sequence
  Synthetic
acaagaauuguuguacuu

SEQ ID NO: 409457 - RNA, 19 nt, Artificial Sequence
  Synthetic
uacaagaauuguuguacuu

SEQ ID NO: 409458 - RNA, 20 nt, Artificial Sequence
  Synthetic
uuacaagaauuguuguacuu

SEQ ID NO: 409459 - RNA, 21 nt, Artificial Sequence
  Synthetic
guuacaagaauuguuguacuu

SEQ ID NO: 409460 - RNA, 22 nt, Artificial Sequence
  Synthetic
aguuacaagaauuguuguacuu

SEQ ID NO: 409461 - RNA, 23 nt, Artificial Sequence
  Synthetic
uaguuacaagaauuguuguacuu

SEQ ID NO: 409462 - RNA, 24 nt, Artificial Sequence
  Synthetic
uuaguuacaagaauuguuguacuu

SEQ ID NO: 409463 - RNA, 18 nt, Artificial Sequence
  Synthetic
aauaaaaaugaauuacuu

SEQ ID NO: 409464 - RNA, 19 nt, Artificial Sequence
  Synthetic
caauaaaaaugaauuacuu

SEQ ID NO: 409465 - RNA, 20 nt, Artificial Sequence
  Synthetic
ucaauaaaaaugaauuacuu

SEQ ID NO: 409466 - RNA, 21 nt, Artificial Sequence
  Synthetic
uucaauaaaaaugaauuacuu

SEQ ID NO: 409467 - RNA, 22 nt, Artificial Sequence
  Synthetic
uuucaauaaaaaugaauuacuu

SEQ ID NO: 409468 - RNA, 23 nt, Artificial Sequence
  Synthetic
uuuucaauaaaaaugaauuacuu

SEQ ID NO: 409469 - RNA, 24 nt, Artificial Sequence
  Synthetic
cuuuucaauaaaaaugaauuacuu

SEQ ID NO: 409470 - RNA, 18 nt, Artificial Sequence
  Synthetic
uauacacagccauuacuu

SEQ ID NO: 409471 - RNA, 19 nt, Artificial Sequence
  Synthetic
uuauacacagccauuacuu

SEQ ID NO: 409472 - RNA, 20 nt, Artificial Sequence
  Synthetic
auuauacacagccauuacuu

SEQ ID NO: 409473 - RNA, 21 nt, Artificial Sequence
  Synthetic
uauuauacacagccauuacuu

SEQ ID NO: 409474 - RNA, 22 nt, Artificial Sequence
  Synthetic
auauuauacacagccauuacuu

SEQ ID NO: 409475 - RNA, 23 nt, Artificial Sequence
  Synthetic
aauauuauacacagccauuacuu

SEQ ID NO: 409476 - RNA, 24 nt, Artificial Sequence
  Synthetic
caauauuauacacagccauuacuu

SEQ ID NO: 409477 - RNA, 18 nt, Artificial Sequence
  Synthetic
cucuuagguucauuacuu

SEQ ID NO: 409478 - RNA, 19 nt, Artificial Sequence
  Synthetic
ccucuuagguucauuacuu

SEQ ID NO: 409479 - RNA, 20 nt, Artificial Sequence
  Synthetic
cccucuuagguucauuacuu

SEQ ID NO: 409480 - RNA, 21 nt, Artificial Sequence
  Synthetic
ccccucuuagguucauuacuu

SEQ ID NO: 409481 - RNA, 22 nt, Artificial Sequence
  Synthetic
uccccucuuagguucauuacuu

SEQ ID NO: 409482 - RNA, 23 nt, Artificial Sequence
  Synthetic
cuccccucuuagguucauuacuu

SEQ ID NO: 409483 - RNA, 24 nt, Artificial Sequence
  Synthetic
acuccccucuuagguucauuacuu

SEQ ID NO: 409484 - RNA, 18 nt, Artificial Sequence
  Synthetic
uaaauauuuguauuacuu

SEQ ID NO: 409485 - RNA, 19 nt, Artificial Sequence
  Synthetic
cuaaauauuuguauuacuu

SEQ ID NO: 409486 - RNA, 20 nt, Artificial Sequence
  Synthetic
acuaaauauuuguauuacuu

SEQ ID NO: 409487 - RNA, 21 nt, Artificial Sequence
  Synthetic
uacuaaauauuuguauuacuu

SEQ ID NO: 409488 - RNA, 22 nt, Artificial Sequence
  Synthetic
uuacuaaauauuuguauuacuu

SEQ ID NO: 409489 - RNA, 23 nt, Artificial Sequence
  Synthetic
uuuacuaaauauuuguauuacuu

SEQ ID NO: 409490 - RNA, 24 nt, Artificial Sequence
  Synthetic
uuuuacuaaauauuuguauuacuu

SEQ ID NO: 409491 - RNA, 18 nt, Artificial Sequence
  Synthetic
ccaguuguauuauuacuu

SEQ ID NO: 409492 - RNA, 19 nt, Artificial Sequence
  Synthetic
cccaguuguauuauuacuu

SEQ ID NO: 409493 - RNA, 20 nt, Artificial Sequence
  Synthetic
ccccaguuguauuauuacuu

SEQ ID NO: 409494 - RNA, 21 nt, Artificial Sequence
  Synthetic
uccccaguuguauuauuacuu

SEQ ID NO: 409495 - RNA, 22 nt, Artificial Sequence
  Synthetic
uuccccaguuguauuauuacuu

SEQ ID NO: 409496 - RNA, 23 nt, Artificial Sequence
  Synthetic
cuuccccaguuguauuauuacuu

SEQ ID NO: 409497 - RNA, 24 nt, Artificial Sequence
  Synthetic
ucuuccccaguuguauuauuacuu

SEQ ID NO: 409498 - RNA, 18 nt, Artificial Sequence
  Synthetic
acuuguuauggcuuacuu

SEQ ID NO: 409499 - RNA, 19 nt, Artificial Sequence
  Synthetic
cacuuguuauggcuuacuu

SEQ ID NO: 409500 - RNA, 20 nt, Artificial Sequence
  Synthetic
acacuuguuauggcuuacuu

SEQ ID NO: 409501 - RNA, 21 nt, Artificial Sequence
  Synthetic
aacacuuguuauggcuuacuu

SEQ ID NO: 409502 - RNA, 22 nt, Artificial Sequence
  Synthetic
aaacacuuguuauggcuuacuu

SEQ ID NO: 409503 - RNA, 23 nt, Artificial Sequence
  Synthetic
caaacacuuguuauggcuuacuu

SEQ ID NO: 409504 - RNA, 24 nt, Artificial Sequence
  Synthetic
gcaaacacuuguuauggcuuacuu

SEQ ID NO: 409505 - RNA, 18 nt, Artificial Sequence
  Synthetic
auauuuucuuucuuacuu

SEQ ID NO: 409506 - RNA, 19 nt, Artificial Sequence
  Synthetic
aauauuuucuuucuuacuu

SEQ ID NO: 409507 - RNA, 20 nt, Artificial Sequence
  Synthetic
uaauauuuucuuucuuacuu

SEQ ID NO: 409508 - RNA, 21 nt, Artificial Sequence
  Synthetic
guaauauuuucuuucuuacuu

SEQ ID NO: 409509 - RNA, 22 nt, Artificial Sequence
  Synthetic
aguaauauuuucuuucuuacuu

SEQ ID NO: 409510 - RNA, 23 nt, Artificial Sequence
  Synthetic
aaguaauauuuucuuucuuacuu

SEQ ID NO: 409511 - RNA, 24 nt, Artificial Sequence
  Synthetic
uaaguaauauuuucuuucuuacuu

SEQ ID NO: 409512 - RNA, 18 nt, Artificial Sequence
  Synthetic
agauaugcggcguuacuu

SEQ ID NO: 409513 - RNA, 19 nt, Artificial Sequence
  Synthetic
uagauaugcggcguuacuu

SEQ ID NO: 409514 - RNA, 20 nt, Artificial Sequence
  Synthetic
guagauaugcggcguuacuu

SEQ ID NO: 409515 - RNA, 21 nt, Artificial Sequence
  Synthetic
uguagauaugcggcguuacuu

SEQ ID NO: 409516 - RNA, 22 nt, Artificial Sequence
  Synthetic
uuguagauaugcggcguuacuu

SEQ ID NO: 409517 - RNA, 23 nt, Artificial Sequence
  Synthetic
guuguagauaugcggcguuacuu

SEQ ID NO: 409518 - RNA, 24 nt, Artificial Sequence
  Synthetic
aguuguagauaugcggcguuacuu

SEQ ID NO: 409519 - RNA, 18 nt, Artificial Sequence
  Synthetic
aacaaauagugguuacuu

SEQ ID NO: 409520 - RNA, 19 nt, Artificial Sequence
  Synthetic
aaacaaauagugguuacuu

SEQ ID NO: 409521 - RNA, 20 nt, Artificial Sequence
  Synthetic
caaacaaauagugguuacuu

SEQ ID NO: 409522 - RNA, 21 nt, Artificial Sequence
  Synthetic
acaaacaaauagugguuacuu

SEQ ID NO: 409523 - RNA, 22 nt, Artificial Sequence
  Synthetic
aacaaacaaauagugguuacuu

SEQ ID NO: 409524 - RNA, 23 nt, Artificial Sequence
  Synthetic
caacaaacaaauagugguuacuu

SEQ ID NO: 409525 - RNA, 24 nt, Artificial Sequence
  Synthetic
gcaacaaacaaauagugguuacuu

SEQ ID NO: 409526 - RNA, 18 nt, Artificial Sequence
  Synthetic
agcugaauaauguuacuu

SEQ ID NO: 409527 - RNA, 19 nt, Artificial Sequence
  Synthetic
gagcugaauaauguuacuu

SEQ ID NO: 409528 - RNA, 20 nt, Artificial Sequence
  Synthetic
ggagcugaauaauguuacuu

SEQ ID NO: 409529 - RNA, 21 nt, Artificial Sequence
  Synthetic
aggagcugaauaauguuacuu

SEQ ID NO: 409530 - RNA, 22 nt, Artificial Sequence
  Synthetic
gaggagcugaauaauguuacuu

SEQ ID NO: 409531 - RNA, 23 nt, Artificial Sequence
  Synthetic
agaggagcugaauaauguuacuu

SEQ ID NO: 409532 - RNA, 24 nt, Artificial Sequence
  Synthetic
uagaggagcugaauaauguuacuu

SEQ ID NO: 409533 - RNA, 18 nt, Artificial Sequence
  Synthetic
gcaggagugauguuacuu

SEQ ID NO: 409534 - RNA, 19 nt, Artificial Sequence
  Synthetic
ugcaggagugauguuacuu

SEQ ID NO: 409535 - RNA, 20 nt, Artificial Sequence
  Synthetic
uugcaggagugauguuacuu

SEQ ID NO: 409536 - RNA, 21 nt, Artificial Sequence
  Synthetic
auugcaggagugauguuacuu

SEQ ID NO: 409537 - RNA, 22 nt, Artificial Sequence
  Synthetic
gauugcaggagugauguuacuu

SEQ ID NO: 409538 - RNA, 23 nt, Artificial Sequence
  Synthetic
agauugcaggagugauguuacuu

SEQ ID NO: 409539 - RNA, 24 nt, Artificial Sequence
  Synthetic
gagauugcaggagugauguuacuu

SEQ ID NO: 409540 - RNA, 18 nt, Artificial Sequence
  Synthetic
acagaggcauuguuacuu

SEQ ID NO: 409541 - RNA, 19 nt, Artificial Sequence
  Synthetic
gacagaggcauuguuacuu

SEQ ID NO: 409542 - RNA, 20 nt, Artificial Sequence
  Synthetic
agacagaggcauuguuacuu

SEQ ID NO: 409543 - RNA, 21 nt, Artificial Sequence
  Synthetic
cagacagaggcauuguuacuu

SEQ ID NO: 409544 - RNA, 22 nt, Artificial Sequence
  Synthetic
acagacagaggcauuguuacuu

SEQ ID NO: 409545 - RNA, 23 nt, Artificial Sequence
  Synthetic
aacagacagaggcauuguuacuu

SEQ ID NO: 409546 - RNA, 24 nt, Artificial Sequence
  Synthetic
uaacagacagaggcauuguuacuu

SEQ ID NO: 409547 - RNA, 18 nt, Artificial Sequence
  Synthetic
ucccgugacaauuuacuu

SEQ ID NO: 409548 - RNA, 19 nt, Artificial Sequence
  Synthetic
gucccgugacaauuuacuu

SEQ ID NO: 409549 - RNA, 20 nt, Artificial Sequence
  Synthetic
ugucccgugacaauuuacuu

SEQ ID NO: 409550 - RNA, 21 nt, Artificial Sequence
  Synthetic
gugucccgugacaauuuacuu

SEQ ID NO: 409551 - RNA, 22 nt, Artificial Sequence
  Synthetic
ugugucccgugacaauuuacuu

SEQ ID NO: 409552 - RNA, 23 nt, Artificial Sequence
  Synthetic
cugugucccgugacaauuuacuu

SEQ ID NO: 409553 - RNA, 24 nt, Artificial Sequence
  Synthetic
gcugugucccgugacaauuuacuu

SEQ ID NO: 409554 - RNA, 18 nt, Artificial Sequence
  Synthetic
uggugagaggcuuuacuu

SEQ ID NO: 409555 - RNA, 19 nt, Artificial Sequence
  Synthetic
auggugagaggcuuuacuu

SEQ ID NO: 409556 - RNA, 20 nt, Artificial Sequence
  Synthetic
aauggugagaggcuuuacuu

SEQ ID NO: 409557 - RNA, 21 nt, Artificial Sequence
  Synthetic
uaauggugagaggcuuuacuu

SEQ ID NO: 409558 - RNA, 22 nt, Artificial Sequence
  Synthetic
uuaauggugagaggcuuuacuu

SEQ ID NO: 409559 - RNA, 23 nt, Artificial Sequence
  Synthetic
guuaauggugagaggcuuuacuu

SEQ ID NO: 409560 - RNA, 24 nt, Artificial Sequence
  Synthetic
aguuaauggugagaggcuuuacuu

SEQ ID NO: 409561 - RNA, 18 nt, Artificial Sequence
  Synthetic
auguuccucaguuuacuu

SEQ ID NO: 409562 - RNA, 19 nt, Artificial Sequence
  Synthetic
aauguuccucaguuuacuu

SEQ ID NO: 409563 - RNA, 20 nt, Artificial Sequence
  Synthetic
aaauguuccucaguuuacuu

SEQ ID NO: 409564 - RNA, 21 nt, Artificial Sequence
  Synthetic
gaaauguuccucaguuuacuu

SEQ ID NO: 409565 - RNA, 22 nt, Artificial Sequence
  Synthetic
ugaaauguuccucaguuuacuu

SEQ ID NO: 409566 - RNA, 23 nt, Artificial Sequence
  Synthetic
uugaaauguuccucaguuuacuu

SEQ ID NO: 409567 - RNA, 24 nt, Artificial Sequence
  Synthetic
uuugaaauguuccucaguuuacuu

SEQ ID NO: 409568 - RNA, 18 nt, Artificial Sequence
  Synthetic
cucuugugagguuuacuu

SEQ ID NO: 409569 - RNA, 19 nt, Artificial Sequence
  Synthetic
ucucuugugagguuuacuu

SEQ ID NO: 409570 - RNA, 20 nt, Artificial Sequence
  Synthetic
uucucuugugagguuuacuu

SEQ ID NO: 409571 - RNA, 21 nt, Artificial Sequence
  Synthetic
uuucucuugugagguuuacuu

SEQ ID NO: 409572 - RNA, 22 nt, Artificial Sequence
  Synthetic
uuuucucuugugagguuuacuu

SEQ ID NO: 409573 - RNA, 23 nt, Artificial Sequence
  Synthetic
uuuuucucuugugagguuuacuu

SEQ ID NO: 409574 - RNA, 24 nt, Artificial Sequence
  Synthetic
uuuuuucucuugugagguuuacuu

SEQ ID NO: 409575 - RNA, 18 nt, Artificial Sequence
  Synthetic
cuuaaaauguguuuacuu

SEQ ID NO: 409576 - RNA, 19 nt, Artificial Sequence
  Synthetic
gcuuaaaauguguuuacuu

SEQ ID NO: 409577 - RNA, 20 nt, Artificial Sequence
  Synthetic
ugcuuaaaauguguuuacuu

SEQ ID NO: 409578 - RNA, 21 nt, Artificial Sequence
  Synthetic
augcuuaaaauguguuuacuu

SEQ ID NO: 409579 - RNA, 22 nt, Artificial Sequence
  Synthetic
caugcuuaaaauguguuuacuu

SEQ ID NO: 409580 - RNA, 23 nt, Artificial Sequence
  Synthetic
acaugcuuaaaauguguuuacuu

SEQ ID NO: 409581 - RNA, 24 nt, Artificial Sequence
  Synthetic
uacaugcuuaaaauguguuuacuu

SEQ ID NO: 409582 - RNA, 18 nt, Artificial Sequence
  Synthetic
auuuuacauuguuuacuu

SEQ ID NO: 409583 - RNA, 19 nt, Artificial Sequence
  Synthetic
uauuuuacauuguuuacuu

SEQ ID NO: 409584 - RNA, 20 nt, Artificial Sequence
  Synthetic
cuauuuuacauuguuuacuu

SEQ ID NO: 409585 - RNA, 21 nt, Artificial Sequence
  Synthetic
acuauuuuacauuguuuacuu

SEQ ID NO: 409586 - RNA, 22 nt, Artificial Sequence
  Synthetic
uacuauuuuacauuguuuacuu

SEQ ID NO: 409587 - RNA, 23 nt, Artificial Sequence
  Synthetic
cuacuauuuuacauuguuuacuu

SEQ ID NO: 409588 - RNA, 24 nt, Artificial Sequence
  Synthetic
ucuacuauuuuacauuguuuacuu

SEQ ID NO: 409589 - RNA, 18 nt, Artificial Sequence
  Synthetic
uaauuuuagauuuuacuu

SEQ ID NO: 409590 - RNA, 19 nt, Artificial Sequence
  Synthetic
uuaauuuuagauuuuacuu

SEQ ID NO: 409591 - RNA, 20 nt, Artificial Sequence
  Synthetic
auuaauuuuagauuuuacuu

SEQ ID NO: 409592 - RNA, 21 nt, Artificial Sequence
  Synthetic
aauuaauuuuagauuuuacuu

SEQ ID NO: 409593 - RNA, 22 nt, Artificial Sequence
  Synthetic
aaauuaauuuuagauuuuacuu

SEQ ID NO: 409594 - RNA, 23 nt, Artificial Sequence
  Synthetic
gaaauuaauuuuagauuuuacuu

SEQ ID NO: 409595 - RNA, 24 nt, Artificial Sequence
  Synthetic
ugaaauuaauuuuagauuuuacuu

SEQ ID NO: 409596 - RNA, 18 nt, Artificial Sequence
  Synthetic
uucagaaaacuuuuacuu

SEQ ID NO: 409597 - RNA, 19 nt, Artificial Sequence
  Synthetic
auucagaaaacuuuuacuu

SEQ ID NO: 409598 - RNA, 20 nt, Artificial Sequence
  Synthetic
uauucagaaaacuuuuacuu

SEQ ID NO: 409599 - RNA, 21 nt, Artificial Sequence
  Synthetic
uuauucagaaaacuuuuacuu

SEQ ID NO: 409600 - RNA, 22 nt, Artificial Sequence
  Synthetic
uuuauucagaaaacuuuuacuu

SEQ ID NO: 409601 - RNA, 23 nt, Artificial Sequence
  Synthetic
auuuauucagaaaacuuuuacuu

SEQ ID NO: 409602 - RNA, 24 nt, Artificial Sequence
  Synthetic
cauuuauucagaaaacuuuuacuu

SEQ ID NO: 409603 - RNA, 18 nt, Artificial Sequence
  Synthetic
gaauagaaugaaaaccuu

SEQ ID NO: 409604 - RNA, 19 nt, Artificial Sequence
  Synthetic
ugaauagaaugaaaaccuu

SEQ ID NO: 409605 - RNA, 20 nt, Artificial Sequence
  Synthetic
augaauagaaugaaaaccuu

SEQ ID NO: 409606 - RNA, 21 nt, Artificial Sequence
  Synthetic
uaugaauagaaugaaaaccuu

SEQ ID NO: 409607 - RNA, 22 nt, Artificial Sequence
  Synthetic
uuaugaauagaaugaaaaccuu

SEQ ID NO: 409608 - RNA, 23 nt, Artificial Sequence
  Synthetic
cuuaugaauagaaugaaaaccuu

SEQ ID NO: 409609 - RNA, 24 nt, Artificial Sequence
  Synthetic
ucuuaugaauagaaugaaaaccuu

SEQ ID NO: 409610 - RNA, 18 nt, Artificial Sequence
  Synthetic
uaacuuguauacaaccuu

SEQ ID NO: 409611 - RNA, 19 nt, Artificial Sequence
  Synthetic
uuaacuuguauacaaccuu

SEQ ID NO: 409612 - RNA, 20 nt, Artificial Sequence
  Synthetic
cuuaacuuguauacaaccuu

SEQ ID NO: 409613 - RNA, 21 nt, Artificial Sequence
  Synthetic
acuuaacuuguauacaaccuu

SEQ ID NO: 409614 - RNA, 22 nt, Artificial Sequence
  Synthetic
cacuuaacuuguauacaaccuu

SEQ ID NO: 409615 - RNA, 23 nt, Artificial Sequence
  Synthetic
ccacuuaacuuguauacaaccuu

SEQ ID NO: 409616 - RNA, 24 nt, Artificial Sequence
  Synthetic
gccacuuaacuuguauacaaccuu

SEQ ID NO: 409617 - RNA, 18 nt, Artificial Sequence
  Synthetic
gucaaucuggccaaccuu

SEQ ID NO: 409618 - RNA, 19 nt, Artificial Sequence
  Synthetic
ggucaaucuggccaaccuu

SEQ ID NO: 409619 - RNA, 20 nt, Artificial Sequence
  Synthetic
uggucaaucuggccaaccuu

SEQ ID NO: 409620 - RNA, 21 nt, Artificial Sequence
  Synthetic
uuggucaaucuggccaaccuu

SEQ ID NO: 409621 - RNA, 22 nt, Artificial Sequence
  Synthetic
uuuggucaaucuggccaaccuu

SEQ ID NO: 409622 - RNA, 23 nt, Artificial Sequence
  Synthetic
cuuuggucaaucuggccaaccuu

SEQ ID NO: 409623 - RNA, 24 nt, Artificial Sequence
  Synthetic
ccuuuggucaaucuggccaaccuu

SEQ ID NO: 409624 - RNA, 18 nt, Artificial Sequence
  Synthetic
guuuauuuugugaaccuu

SEQ ID NO: 409625 - RNA, 19 nt, Artificial Sequence
  Synthetic
aguuuauuuugugaaccuu

SEQ ID NO: 409626 - RNA, 20 nt, Artificial Sequence
  Synthetic
aaguuuauuuugugaaccuu

SEQ ID NO: 409627 - RNA, 21 nt, Artificial Sequence
  Synthetic
uaaguuuauuuugugaaccuu

SEQ ID NO: 409628 - RNA, 22 nt, Artificial Sequence
  Synthetic
auaaguuuauuuugugaaccuu

SEQ ID NO: 409629 - RNA, 23 nt, Artificial Sequence
  Synthetic
uauaaguuuauuuugugaaccuu

SEQ ID NO: 409630 - RNA, 24 nt, Artificial Sequence
  Synthetic
auauaaguuuauuuugugaaccuu

SEQ ID NO: 409631 - RNA, 18 nt, Artificial Sequence
  Synthetic
caugguauacauaaccuu

SEQ ID NO: 409632 - RNA, 19 nt, Artificial Sequence
  Synthetic
ucaugguauacauaaccuu

SEQ ID NO: 409633 - RNA, 20 nt, Artificial Sequence
  Synthetic
uucaugguauacauaaccuu

SEQ ID NO: 409634 - RNA, 21 nt, Artificial Sequence
  Synthetic
cuucaugguauacauaaccuu

SEQ ID NO: 409635 - RNA, 22 nt, Artificial Sequence
  Synthetic
acuucaugguauacauaaccuu

SEQ ID NO: 409636 - RNA, 23 nt, Artificial Sequence
  Synthetic
gacuucaugguauacauaaccuu

SEQ ID NO: 409637 - RNA, 24 nt, Artificial Sequence
  Synthetic
ugacuucaugguauacauaaccuu

SEQ ID NO: 409638 - RNA, 18 nt, Artificial Sequence
  Synthetic
uucccauuugcuaaccuu

SEQ ID NO: 409639 - RNA, 19 nt, Artificial Sequence
  Synthetic
cuucccauuugcuaaccuu

SEQ ID NO: 409640 - RNA, 20 nt, Artificial Sequence
  Synthetic
acuucccauuugcuaaccuu

SEQ ID NO: 409641 - RNA, 21 nt, Artificial Sequence
  Synthetic
uacuucccauuugcuaaccuu

SEQ ID NO: 409642 - RNA, 22 nt, Artificial Sequence
  Synthetic
uuacuucccauuugcuaaccuu

SEQ ID NO: 409643 - RNA, 23 nt, Artificial Sequence
  Synthetic
cuuacuucccauuugcuaaccuu

SEQ ID NO: 409644 - RNA, 24 nt, Artificial Sequence
  Synthetic
ucuuacuucccauuugcuaaccuu

SEQ ID NO: 409645 - RNA, 18 nt, Artificial Sequence
  Synthetic
gcucccacaauuaaccuu

SEQ ID NO: 409646 - RNA, 19 nt, Artificial Sequence
  Synthetic
agcucccacaauuaaccuu

SEQ ID NO: 409647 - RNA, 20 nt, Artificial Sequence
  Synthetic
gagcucccacaauuaaccuu

SEQ ID NO: 409648 - RNA, 21 nt, Artificial Sequence
  Synthetic
ugagcucccacaauuaaccuu

SEQ ID NO: 409649 - RNA, 22 nt, Artificial Sequence
  Synthetic
uugagcucccacaauuaaccuu

SEQ ID NO: 409650 - RNA, 23 nt, Artificial Sequence
  Synthetic
auugagcucccacaauuaaccuu

SEQ ID NO: 409651 - RNA, 24 nt, Artificial Sequence
  Synthetic
uauugagcucccacaauuaaccuu

SEQ ID NO: 409652 - RNA, 18 nt, Artificial Sequence
  Synthetic
gaaguacaagaacaccuu

SEQ ID NO: 409653 - RNA, 19 nt, Artificial Sequence
  Synthetic
ugaaguacaagaacaccuu

SEQ ID NO: 409654 - RNA, 20 nt, Artificial Sequence
  Synthetic
augaaguacaagaacaccuu

SEQ ID NO: 409655 - RNA, 21 nt, Artificial Sequence
  Synthetic
gaugaaguacaagaacaccuu

SEQ ID NO: 409656 - RNA, 22 nt, Artificial Sequence
  Synthetic
ggaugaaguacaagaacaccuu

SEQ ID NO: 409657 - RNA, 23 nt, Artificial Sequence
  Synthetic
gggaugaaguacaagaacaccuu

SEQ ID NO: 409658 - RNA, 24 nt, Artificial Sequence
  Synthetic
ugggaugaaguacaagaacaccuu

SEQ ID NO: 409659 - RNA, 18 nt, Artificial Sequence
  Synthetic
uauuaaguuaugcaccuu

SEQ ID NO: 409660 - RNA, 19 nt, Artificial Sequence
  Synthetic
uuauuaaguuaugcaccuu

SEQ ID NO: 409661 - RNA, 20 nt, Artificial Sequence
  Synthetic
cuuauuaaguuaugcaccuu

SEQ ID NO: 409662 - RNA, 21 nt, Artificial Sequence
  Synthetic
acuuauuaaguuaugcaccuu

SEQ ID NO: 409663 - RNA, 22 nt, Artificial Sequence
  Synthetic
gacuuauuaaguuaugcaccuu

SEQ ID NO: 409664 - RNA, 23 nt, Artificial Sequence
  Synthetic
ugacuuauuaaguuaugcaccuu

SEQ ID NO: 409665 - RNA, 24 nt, Artificial Sequence
  Synthetic
cugacuuauuaaguuaugcaccuu

SEQ ID NO: 409666 - RNA, 18 nt, Artificial Sequence
  Synthetic
uuauuucacuaucaccuu

SEQ ID NO: 409667 - RNA, 19 nt, Artificial Sequence
  Synthetic
uuuauuucacuaucaccuu

SEQ ID NO: 409668 - RNA, 20 nt, Artificial Sequence
  Synthetic
guuuauuucacuaucaccuu

SEQ ID NO: 409669 - RNA, 21 nt, Artificial Sequence
  Synthetic
uguuuauuucacuaucaccuu

SEQ ID NO: 409670 - RNA, 22 nt, Artificial Sequence
  Synthetic
uuguuuauuucacuaucaccuu

SEQ ID NO: 409671 - RNA, 23 nt, Artificial Sequence
  Synthetic
auuguuuauuucacuaucaccuu

SEQ ID NO: 409672 - RNA, 24 nt, Artificial Sequence
  Synthetic
uauuguuuauuucacuaucaccuu

SEQ ID NO: 409673 - RNA, 18 nt, Artificial Sequence
  Synthetic
auucuuaauggucaccuu

SEQ ID NO: 409674 - RNA, 19 nt, Artificial Sequence
  Synthetic
aauucuuaauggucaccuu

SEQ ID NO: 409675 - RNA, 20 nt, Artificial Sequence
  Synthetic
gaauucuuaauggucaccuu

SEQ ID NO: 409676 - RNA, 21 nt, Artificial Sequence
  Synthetic
agaauucuuaauggucaccuu

SEQ ID NO: 409677 - RNA, 22 nt, Artificial Sequence
  Synthetic
uagaauucuuaauggucaccuu

SEQ ID NO: 409678 - RNA, 23 nt, Artificial Sequence
  Synthetic
uuagaauucuuaauggucaccuu

SEQ ID NO: 409679 - RNA, 24 nt, Artificial Sequence
  Synthetic
guuagaauucuuaauggucaccuu

SEQ ID NO: 409680 - RNA, 18 nt, Artificial Sequence
  Synthetic
gauguucuaugucaccuu

SEQ ID NO: 409681 - RNA, 19 nt, Artificial Sequence
  Synthetic
ugauguucuaugucaccuu

SEQ ID NO: 409682 - RNA, 20 nt, Artificial Sequence
  Synthetic
uugauguucuaugucaccuu

SEQ ID NO: 409683 - RNA, 21 nt, Artificial Sequence
  Synthetic
guugauguucuaugucaccuu

SEQ ID NO: 409684 - RNA, 22 nt, Artificial Sequence
  Synthetic
uguugauguucuaugucaccuu

SEQ ID NO: 409685 - RNA, 23 nt, Artificial Sequence
  Synthetic
auguugauguucuaugucaccuu

SEQ ID NO: 409686 - RNA, 24 nt, Artificial Sequence
  Synthetic
uauguugauguucuaugucaccuu

SEQ ID NO: 409687 - RNA, 18 nt, Artificial Sequence
  Synthetic
gcuauucccugucaccuu

SEQ ID NO: 409688 - RNA, 19 nt, Artificial Sequence
  Synthetic
ugcuauucccugucaccuu

SEQ ID NO: 409689 - RNA, 20 nt, Artificial Sequence
  Synthetic
cugcuauucccugucaccuu

SEQ ID NO: 409690 - RNA, 21 nt, Artificial Sequence
  Synthetic
gcugcuauucccugucaccuu

SEQ ID NO: 409691 - RNA, 22 nt, Artificial Sequence
  Synthetic
ggcugcuauucccugucaccuu

SEQ ID NO: 409692 - RNA, 23 nt, Artificial Sequence
  Synthetic
aggcugcuauucccugucaccuu

SEQ ID NO: 409693 - RNA, 24 nt, Artificial Sequence
  Synthetic
uaggcugcuauucccugucaccuu

SEQ ID NO: 409694 - RNA, 18 nt, Artificial Sequence
  Synthetic
ugccugaauuaagaccuu

SEQ ID NO: 409695 - RNA, 19 nt, Artificial Sequence
  Synthetic
augccugaauuaagaccuu

SEQ ID NO: 409696 - RNA, 20 nt, Artificial Sequence
  Synthetic
gaugccugaauuaagaccuu

SEQ ID NO: 409697 - RNA, 21 nt, Artificial Sequence
  Synthetic
ggaugccugaauuaagaccuu

SEQ ID NO: 409698 - RNA, 22 nt, Artificial Sequence
  Synthetic
uggaugccugaauuaagaccuu

SEQ ID NO: 409699 - RNA, 23 nt, Artificial Sequence
  Synthetic
auggaugccugaauuaagaccuu

SEQ ID NO: 409700 - RNA, 24 nt, Artificial Sequence
  Synthetic
uauggaugccugaauuaagaccuu

SEQ ID NO: 409701 - RNA, 18 nt, Artificial Sequence
  Synthetic
gaacaaggaagagaccuu

SEQ ID NO: 409702 - RNA, 19 nt, Artificial Sequence
  Synthetic
ggaacaaggaagagaccuu

SEQ ID NO: 409703 - RNA, 20 nt, Artificial Sequence
  Synthetic
aggaacaaggaagagaccuu

SEQ ID NO: 409704 - RNA, 21 nt, Artificial Sequence
  Synthetic
aaggaacaaggaagagaccuu

SEQ ID NO: 409705 - RNA, 22 nt, Artificial Sequence
  Synthetic
uaaggaacaaggaagagaccuu

SEQ ID NO: 409706 - RNA, 23 nt, Artificial Sequence
  Synthetic
guaaggaacaaggaagagaccuu

SEQ ID NO: 409707 - RNA, 24 nt, Artificial Sequence
  Synthetic
gguaaggaacaaggaagagaccuu

SEQ ID NO: 409708 - RNA, 18 nt, Artificial Sequence
  Synthetic
agacaaggcauagaccuu

SEQ ID NO: 409709 - RNA, 19 nt, Artificial Sequence
  Synthetic
gagacaaggcauagaccuu

SEQ ID NO: 409710 - RNA, 20 nt, Artificial Sequence
  Synthetic
agagacaaggcauagaccuu

SEQ ID NO: 409711 - RNA, 21 nt, Artificial Sequence
  Synthetic
gagagacaaggcauagaccuu

SEQ ID NO: 409712 - RNA, 22 nt, Artificial Sequence
  Synthetic
agagagacaaggcauagaccuu

SEQ ID NO: 409713 - RNA, 23 nt, Artificial Sequence
  Synthetic
aagagagacaaggcauagaccuu

SEQ ID NO: 409714 - RNA, 24 nt, Artificial Sequence
  Synthetic
aaagagagacaaggcauagaccuu

SEQ ID NO: 409715 - RNA, 18 nt, Artificial Sequence
  Synthetic
gaucaauuguuagaccuu

SEQ ID NO: 409716 - RNA, 19 nt, Artificial Sequence
  Synthetic
ugaucaauuguuagaccuu

SEQ ID NO: 409717 - RNA, 20 nt, Artificial Sequence
  Synthetic
gugaucaauuguuagaccuu

SEQ ID NO: 409718 - RNA, 21 nt, Artificial Sequence
  Synthetic
agugaucaauuguuagaccuu

SEQ ID NO: 409719 - RNA, 22 nt, Artificial Sequence
  Synthetic
gagugaucaauuguuagaccuu

SEQ ID NO: 409720 - RNA, 23 nt, Artificial Sequence
  Synthetic
ggagugaucaauuguuagaccuu

SEQ ID NO: 409721 - RNA, 24 nt, Artificial Sequence
  Synthetic
cggagugaucaauuguuagaccuu

SEQ ID NO: 409722 - RNA, 18 nt, Artificial Sequence
  Synthetic
auuaaggugggcgaccuu

SEQ ID NO: 409723 - RNA, 19 nt, Artificial Sequence
  Synthetic
gauuaaggugggcgaccuu

SEQ ID NO: 409724 - RNA, 20 nt, Artificial Sequence
  Synthetic
ggauuaaggugggcgaccuu

SEQ ID NO: 409725 - RNA, 21 nt, Artificial Sequence
  Synthetic
gggauuaaggugggcgaccuu

SEQ ID NO: 409726 - RNA, 22 nt, Artificial Sequence
  Synthetic
cgggauuaaggugggcgaccuu

SEQ ID NO: 409727 - RNA, 23 nt, Artificial Sequence
  Synthetic
ucgggauuaaggugggcgaccuu

SEQ ID NO: 409728 - RNA, 24 nt, Artificial Sequence
  Synthetic
cucgggauuaaggugggcgaccuu

SEQ ID NO: 409729 - RNA, 18 nt, Artificial Sequence
  Synthetic
ucucagauucuugaccuu

SEQ ID NO: 409730 - RNA, 19 nt, Artificial Sequence
  Synthetic
cucucagauucuugaccuu

SEQ ID NO: 409731 - RNA, 20 nt, Artificial Sequence
  Synthetic
acucucagauucuugaccuu

SEQ ID NO: 409732 - RNA, 21 nt, Artificial Sequence
  Synthetic
cacucucagauucuugaccuu

SEQ ID NO: 409733 - RNA, 22 nt, Artificial Sequence
  Synthetic
ccacucucagauucuugaccuu

SEQ ID NO: 409734 - RNA, 23 nt, Artificial Sequence
  Synthetic
gccacucucagauucuugaccuu

SEQ ID NO: 409735 - RNA, 24 nt, Artificial Sequence
  Synthetic
agccacucucagauucuugaccuu

SEQ ID NO: 409736 - RNA, 18 nt, Artificial Sequence
  Synthetic
aaacauuaaacauaccuu

SEQ ID NO: 409737 - RNA, 19 nt, Artificial Sequence
  Synthetic
uaaacauuaaacauaccuu

SEQ ID NO: 409738 - RNA, 20 nt, Artificial Sequence
  Synthetic
auaaacauuaaacauaccuu

SEQ ID NO: 409739 - RNA, 21 nt, Artificial Sequence
  Synthetic
uauaaacauuaaacauaccuu

SEQ ID NO: 409740 - RNA, 22 nt, Artificial Sequence
  Synthetic
auauaaacauuaaacauaccuu

SEQ ID NO: 409741 - RNA, 23 nt, Artificial Sequence
  Synthetic
cauauaaacauuaaacauaccuu

SEQ ID NO: 409742 - RNA, 24 nt, Artificial Sequence
  Synthetic
acauauaaacauuaaacauaccuu

SEQ ID NO: 409743 - RNA, 18 nt, Artificial Sequence
  Synthetic
aauaaagcagcauaccuu

SEQ ID NO: 409744 - RNA, 19 nt, Artificial Sequence
  Synthetic
aaauaaagcagcauaccuu

SEQ ID NO: 409745 - RNA, 20 nt, Artificial Sequence
  Synthetic
uaaauaaagcagcauaccuu

SEQ ID NO: 409746 - RNA, 21 nt, Artificial Sequence
  Synthetic
auaaauaaagcagcauaccuu

SEQ ID NO: 409747 - RNA, 22 nt, Artificial Sequence
  Synthetic
aauaaauaaagcagcauaccuu

SEQ ID NO: 409748 - RNA, 23 nt, Artificial Sequence
  Synthetic
aaauaaauaaagcagcauaccuu

SEQ ID NO: 409749 - RNA, 24 nt, Artificial Sequence
  Synthetic
aaaauaaauaaagcagcauaccuu

SEQ ID NO: 409750 - RNA, 18 nt, Artificial Sequence
  Synthetic
guauuaaaguacuaccuu

SEQ ID NO: 409751 - RNA, 19 nt, Artificial Sequence
  Synthetic
gguauuaaaguacuaccuu

SEQ ID NO: 409752 - RNA, 20 nt, Artificial Sequence
  Synthetic
agguauuaaaguacuaccuu

SEQ ID NO: 409753 - RNA, 21 nt, Artificial Sequence
  Synthetic
uagguauuaaaguacuaccuu

SEQ ID NO: 409754 - RNA, 22 nt, Artificial Sequence
  Synthetic
uuagguauuaaaguacuaccuu

SEQ ID NO: 409755 - RNA, 23 nt, Artificial Sequence
  Synthetic
uuuagguauuaaaguacuaccuu

SEQ ID NO: 409756 - RNA, 24 nt, Artificial Sequence
  Synthetic
auuuagguauuaaaguacuaccuu

SEQ ID NO: 409757 - RNA, 18 nt, Artificial Sequence
  Synthetic
cacaauuguagcuaccuu

SEQ ID NO: 409758 - RNA, 19 nt, Artificial Sequence
  Synthetic
ccacaauuguagcuaccuu

SEQ ID NO: 409759 - RNA, 20 nt, Artificial Sequence
  Synthetic
gccacaauuguagcuaccuu

SEQ ID NO: 409760 - RNA, 21 nt, Artificial Sequence
  Synthetic
agccacaauuguagcuaccuu

SEQ ID NO: 409761 - RNA, 22 nt, Artificial Sequence
  Synthetic
cagccacaauuguagcuaccuu

SEQ ID NO: 409762 - RNA, 23 nt, Artificial Sequence
  Synthetic
gcagccacaauuguagcuaccuu

SEQ ID NO: 409763 - RNA, 24 nt, Artificial Sequence
  Synthetic
agcagccacaauuguagcuaccuu

SEQ ID NO: 409764 - RNA, 18 nt, Artificial Sequence
  Synthetic
gacuggcaagucuaccuu

SEQ ID NO: 409765 - RNA, 19 nt, Artificial Sequence
  Synthetic
agacuggcaagucuaccuu

SEQ ID NO: 409766 - RNA, 20 nt, Artificial Sequence
  Synthetic
gagacuggcaagucuaccuu

SEQ ID NO: 409767 - RNA, 21 nt, Artificial Sequence
  Synthetic
ggagacuggcaagucuaccuu

SEQ ID NO: 409768 - RNA, 22 nt, Artificial Sequence
  Synthetic
gggagacuggcaagucuaccuu

SEQ ID NO: 409769 - RNA, 23 nt, Artificial Sequence
  Synthetic
agggagacuggcaagucuaccuu

SEQ ID NO: 409770 - RNA, 24 nt, Artificial Sequence
  Synthetic
cagggagacuggcaagucuaccuu

SEQ ID NO: 409771 - RNA, 18 nt, Artificial Sequence
  Synthetic
agccuaagcuucuaccuu

SEQ ID NO: 409772 - RNA, 19 nt, Artificial Sequence
  Synthetic
uagccuaagcuucuaccuu

SEQ ID NO: 409773 - RNA, 20 nt, Artificial Sequence
  Synthetic
guagccuaagcuucuaccuu

SEQ ID NO: 409774 - RNA, 21 nt, Artificial Sequence
  Synthetic
aguagccuaagcuucuaccuu

SEQ ID NO: 409775 - RNA, 22 nt, Artificial Sequence
  Synthetic
caguagccuaagcuucuaccuu

SEQ ID NO: 409776 - RNA, 23 nt, Artificial Sequence
  Synthetic
ucaguagccuaagcuucuaccuu

SEQ ID NO: 409777 - RNA, 24 nt, Artificial Sequence
  Synthetic
aucaguagccuaagcuucuaccuu

SEQ ID NO: 409778 - RNA, 18 nt, Artificial Sequence
  Synthetic
aaacucuggcuguaccuu

SEQ ID NO: 409779 - RNA, 19 nt, Artificial Sequence
  Synthetic
caaacucuggcuguaccuu

SEQ ID NO: 409780 - RNA, 20 nt, Artificial Sequence
  Synthetic
ucaaacucuggcuguaccuu

SEQ ID NO: 409781 - RNA, 21 nt, Artificial Sequence
  Synthetic
uucaaacucuggcuguaccuu

SEQ ID NO: 409782 - RNA, 22 nt, Artificial Sequence
  Synthetic
auucaaacucuggcuguaccuu

SEQ ID NO: 409783 - RNA, 23 nt, Artificial Sequence
  Synthetic
gauucaaacucuggcuguaccuu

SEQ ID NO: 409784 - RNA, 24 nt, Artificial Sequence
  Synthetic
ggauucaaacucuggcuguaccuu

SEQ ID NO: 409785 - RNA, 18 nt, Artificial Sequence
  Synthetic
ugaauaaaauauuaccuu

SEQ ID NO: 409786 - RNA, 19 nt, Artificial Sequence
  Synthetic
gugaauaaaauauuaccuu

SEQ ID NO: 409787 - RNA, 20 nt, Artificial Sequence
  Synthetic
ugugaauaaaauauuaccuu

SEQ ID NO: 409788 - RNA, 21 nt, Artificial Sequence
  Synthetic
cugugaauaaaauauuaccuu

SEQ ID NO: 409789 - RNA, 22 nt, Artificial Sequence
  Synthetic
gcugugaauaaaauauuaccuu

SEQ ID NO: 409790 - RNA, 23 nt, Artificial Sequence
  Synthetic
ugcugugaauaaaauauuaccuu

SEQ ID NO: 409791 - RNA, 24 nt, Artificial Sequence
  Synthetic
augcugugaauaaaauauuaccuu

SEQ ID NO: 409792 - RNA, 18 nt, Artificial Sequence
  Synthetic
accuguguuuauuaccuu

SEQ ID NO: 409793 - RNA, 19 nt, Artificial Sequence
  Synthetic
caccuguguuuauuaccuu

SEQ ID NO: 409794 - RNA, 20 nt, Artificial Sequence
  Synthetic
ccaccuguguuuauuaccuu

SEQ ID NO: 409795 - RNA, 21 nt, Artificial Sequence
  Synthetic
cccaccuguguuuauuaccuu

SEQ ID NO: 409796 - RNA, 22 nt, Artificial Sequence
  Synthetic
ucccaccuguguuuauuaccuu

SEQ ID NO: 409797 - RNA, 23 nt, Artificial Sequence
  Synthetic
uucccaccuguguuuauuaccuu

SEQ ID NO: 409798 - RNA, 24 nt, Artificial Sequence
  Synthetic
cuucccaccuguguuuauuaccuu

SEQ ID NO: 409799 - RNA, 18 nt, Artificial Sequence
  Synthetic
uguauagaguguuaccuu

SEQ ID NO: 409800 - RNA, 19 nt, Artificial Sequence
  Synthetic
cuguauagaguguuaccuu

SEQ ID NO: 409801 - RNA, 20 nt, Artificial Sequence
  Synthetic
ccuguauagaguguuaccuu

SEQ ID NO: 409802 - RNA, 21 nt, Artificial Sequence
  Synthetic
cccuguauagaguguuaccuu

SEQ ID NO: 409803 - RNA, 22 nt, Artificial Sequence
  Synthetic
gcccuguauagaguguuaccuu

SEQ ID NO: 409804 - RNA, 23 nt, Artificial Sequence
  Synthetic
ugcccuguauagaguguuaccuu

SEQ ID NO: 409805 - RNA, 24 nt, Artificial Sequence
  Synthetic
augcccuguauagaguguuaccuu

SEQ ID NO: 409806 - RNA, 18 nt, Artificial Sequence
  Synthetic
ugaauauaacuuuaccuu

SEQ ID NO: 409807 - RNA, 19 nt, Artificial Sequence
  Synthetic
uugaauauaacuuuaccuu

SEQ ID NO: 409808 - RNA, 20 nt, Artificial Sequence
  Synthetic
auugaauauaacuuuaccuu

SEQ ID NO: 409809 - RNA, 21 nt, Artificial Sequence
  Synthetic
aauugaauauaacuuuaccuu

SEQ ID NO: 409810 - RNA, 22 nt, Artificial Sequence
  Synthetic
aaauugaauauaacuuuaccuu

SEQ ID NO: 409811 - RNA, 23 nt, Artificial Sequence
  Synthetic
aaaauugaauauaacuuuaccuu

SEQ ID NO: 409812 - RNA, 24 nt, Artificial Sequence
  Synthetic
uaaaauugaauauaacuuuaccuu

SEQ ID NO: 409813 - RNA, 18 nt, Artificial Sequence
  Synthetic
uuugcaagguuuuaccuu

SEQ ID NO: 409814 - RNA, 19 nt, Artificial Sequence
  Synthetic
uuuugcaagguuuuaccuu

SEQ ID NO: 409815 - RNA, 20 nt, Artificial Sequence
  Synthetic
uuuuugcaagguuuuaccuu

SEQ ID NO: 409816 - RNA, 21 nt, Artificial Sequence
  Synthetic
auuuuugcaagguuuuaccuu

SEQ ID NO: 409817 - RNA, 22 nt, Artificial Sequence
  Synthetic
uauuuuugcaagguuuuaccuu

SEQ ID NO: 409818 - RNA, 23 nt, Artificial Sequence
  Synthetic
auauuuuugcaagguuuuaccuu

SEQ ID NO: 409819 - RNA, 24 nt, Artificial Sequence
  Synthetic
uauauuuuugcaagguuuuaccuu

SEQ ID NO: 409820 - RNA, 18 nt, Artificial Sequence
  Synthetic
ucuuaucagacaacccuu

SEQ ID NO: 409821 - RNA, 19 nt, Artificial Sequence
  Synthetic
aucuuaucagacaacccuu

SEQ ID NO: 409822 - RNA, 20 nt, Artificial Sequence
  Synthetic
uaucuuaucagacaacccuu

SEQ ID NO: 409823 - RNA, 21 nt, Artificial Sequence
  Synthetic
uuaucuuaucagacaacccuu

SEQ ID NO: 409824 - RNA, 22 nt, Artificial Sequence
  Synthetic
guuaucuuaucagacaacccuu

SEQ ID NO: 409825 - RNA, 23 nt, Artificial Sequence
  Synthetic
gguuaucuuaucagacaacccuu

SEQ ID NO: 409826 - RNA, 24 nt, Artificial Sequence
  Synthetic
ggguuaucuuaucagacaacccuu

SEQ ID NO: 409827 - RNA, 18 nt, Artificial Sequence
  Synthetic
agguaaggaaacacccuu

SEQ ID NO: 409828 - RNA, 19 nt, Artificial Sequence
  Synthetic
cagguaaggaaacacccuu

SEQ ID NO: 409829 - RNA, 20 nt, Artificial Sequence
  Synthetic
acagguaaggaaacacccuu

SEQ ID NO: 409830 - RNA, 21 nt, Artificial Sequence
  Synthetic
uacagguaaggaaacacccuu

SEQ ID NO: 409831 - RNA, 22 nt, Artificial Sequence
  Synthetic
guacagguaaggaaacacccuu

SEQ ID NO: 409832 - RNA, 23 nt, Artificial Sequence
  Synthetic
gguacagguaaggaaacacccuu

SEQ ID NO: 409833 - RNA, 24 nt, Artificial Sequence
  Synthetic
ggguacagguaaggaaacacccuu

SEQ ID NO: 409834 - RNA, 18 nt, Artificial Sequence
  Synthetic
uaagcuggaaugacccuu

SEQ ID NO: 409835 - RNA, 19 nt, Artificial Sequence
  Synthetic
uuaagcuggaaugacccuu

SEQ ID NO: 409836 - RNA, 20 nt, Artificial Sequence
  Synthetic
cuuaagcuggaaugacccuu

SEQ ID NO: 409837 - RNA, 21 nt, Artificial Sequence
  Synthetic
ucuuaagcuggaaugacccuu

SEQ ID NO: 409838 - RNA, 22 nt, Artificial Sequence
  Synthetic
uucuuaagcuggaaugacccuu

SEQ ID NO: 409839 - RNA, 23 nt, Artificial Sequence
  Synthetic
guucuuaagcuggaaugacccuu

SEQ ID NO: 409840 - RNA, 24 nt, Artificial Sequence
  Synthetic
aguucuuaagcuggaaugacccuu

SEQ ID NO: 409841 - RNA, 18 nt, Artificial Sequence
  Synthetic
uuacuaaaucugacccuu

SEQ ID NO: 409842 - RNA, 19 nt, Artificial Sequence
  Synthetic
auuacuaaaucugacccuu

SEQ ID NO: 409843 - RNA, 20 nt, Artificial Sequence
  Synthetic
gauuacuaaaucugacccuu

SEQ ID NO: 409844 - RNA, 21 nt, Artificial Sequence
  Synthetic
ugauuacuaaaucugacccuu

SEQ ID NO: 409845 - RNA, 22 nt, Artificial Sequence
  Synthetic
gugauuacuaaaucugacccuu

SEQ ID NO: 409846 - RNA, 23 nt, Artificial Sequence
  Synthetic
agugauuacuaaaucugacccuu

SEQ ID NO: 409847 - RNA, 24 nt, Artificial Sequence
  Synthetic
gagugauuacuaaaucugacccuu

SEQ ID NO: 409848 - RNA, 18 nt, Artificial Sequence
  Synthetic
aauauaguuucuacccuu

SEQ ID NO: 409849 - RNA, 19 nt, Artificial Sequence
  Synthetic
caauauaguuucuacccuu

SEQ ID NO: 409850 - RNA, 20 nt, Artificial Sequence
  Synthetic
ucaauauaguuucuacccuu

SEQ ID NO: 409851 - RNA, 21 nt, Artificial Sequence
  Synthetic
uucaauauaguuucuacccuu

SEQ ID NO: 409852 - RNA, 22 nt, Artificial Sequence
  Synthetic
auucaauauaguuucuacccuu

SEQ ID NO: 409853 - RNA, 23 nt, Artificial Sequence
  Synthetic
gauucaauauaguuucuacccuu

SEQ ID NO: 409854 - RNA, 24 nt, Artificial Sequence
  Synthetic
ugauucaauauaguuucuacccuu

SEQ ID NO: 409855 - RNA, 18 nt, Artificial Sequence
  Synthetic
cuuuaaguguuuacccuu

SEQ ID NO: 409856 - RNA, 19 nt, Artificial Sequence
  Synthetic
gcuuuaaguguuuacccuu

SEQ ID NO: 409857 - RNA, 20 nt, Artificial Sequence
  Synthetic
ugcuuuaaguguuuacccuu

SEQ ID NO: 409858 - RNA, 21 nt, Artificial Sequence
  Synthetic
gugcuuuaaguguuuacccuu

SEQ ID NO: 409859 - RNA, 22 nt, Artificial Sequence
  Synthetic
ugugcuuuaaguguuuacccuu

SEQ ID NO: 409860 - RNA, 23 nt, Artificial Sequence
  Synthetic
cugugcuuuaaguguuuacccuu

SEQ ID NO: 409861 - RNA, 24 nt, Artificial Sequence
  Synthetic
acugugcuuuaaguguuuacccuu

SEQ ID NO: 409862 - RNA, 18 nt, Artificial Sequence
  Synthetic
aaggaggaaaagccccuu

SEQ ID NO: 409863 - RNA, 19 nt, Artificial Sequence
  Synthetic
aaaggaggaaaagccccuu

SEQ ID NO: 409864 - RNA, 20 nt, Artificial Sequence
  Synthetic
caaaggaggaaaagccccuu

SEQ ID NO: 409865 - RNA, 21 nt, Artificial Sequence
  Synthetic
gcaaaggaggaaaagccccuu

SEQ ID NO: 409866 - RNA, 22 nt, Artificial Sequence
  Synthetic
agcaaaggaggaaaagccccuu

SEQ ID NO: 409867 - RNA, 23 nt, Artificial Sequence
  Synthetic
gagcaaaggaggaaaagccccuu

SEQ ID NO: 409868 - RNA, 24 nt, Artificial Sequence
  Synthetic
cgagcaaaggaggaaaagccccuu

SEQ ID NO: 409869 - RNA, 18 nt, Artificial Sequence
  Synthetic
gcgcuugaauggccccuu

SEQ ID NO: 409870 - RNA, 19 nt, Artificial Sequence
  Synthetic
ggcgcuugaauggccccuu

SEQ ID NO: 409871 - RNA, 20 nt, Artificial Sequence
  Synthetic
uggcgcuugaauggccccuu

SEQ ID NO: 409872 - RNA, 21 nt, Artificial Sequence
  Synthetic
cuggcgcuugaauggccccuu

SEQ ID NO: 409873 - RNA, 22 nt, Artificial Sequence
  Synthetic
ccuggcgcuugaauggccccuu

SEQ ID NO: 409874 - RNA, 23 nt, Artificial Sequence
  Synthetic
accuggcgcuugaauggccccuu

SEQ ID NO: 409875 - RNA, 24 nt, Artificial Sequence
  Synthetic
caccuggcgcuugaauggccccuu

SEQ ID NO: 409876 - RNA, 18 nt, Artificial Sequence
  Synthetic
gaauuugaaaaagcccuu

SEQ ID NO: 409877 - RNA, 19 nt, Artificial Sequence
  Synthetic
ggaauuugaaaaagcccuu

SEQ ID NO: 409878 - RNA, 20 nt, Artificial Sequence
  Synthetic
uggaauuugaaaaagcccuu

SEQ ID NO: 409879 - RNA, 21 nt, Artificial Sequence
  Synthetic
guggaauuugaaaaagcccuu

SEQ ID NO: 409880 - RNA, 22 nt, Artificial Sequence
  Synthetic
uguggaauuugaaaaagcccuu

SEQ ID NO: 409881 - RNA, 23 nt, Artificial Sequence
  Synthetic
guguggaauuugaaaaagcccuu

SEQ ID NO: 409882 - RNA, 24 nt, Artificial Sequence
  Synthetic
aguguggaauuugaaaaagcccuu

SEQ ID NO: 409883 - RNA, 18 nt, Artificial Sequence
  Synthetic
gauauggucccagcccuu

SEQ ID NO: 409884 - RNA, 19 nt, Artificial Sequence
  Synthetic
agauauggucccagcccuu

SEQ ID NO: 409885 - RNA, 20 nt, Artificial Sequence
  Synthetic
cagauauggucccagcccuu

SEQ ID NO: 409886 - RNA, 21 nt, Artificial Sequence
  Synthetic
gcagauauggucccagcccuu

SEQ ID NO: 409887 - RNA, 22 nt, Artificial Sequence
  Synthetic
ggcagauauggucccagcccuu

SEQ ID NO: 409888 - RNA, 23 nt, Artificial Sequence
  Synthetic
aggcagauauggucccagcccuu

SEQ ID NO: 409889 - RNA, 24 nt, Artificial Sequence
  Synthetic
aaggcagauauggucccagcccuu

SEQ ID NO: 409890 - RNA, 18 nt, Artificial Sequence
  Synthetic
uaaucagcuugagcccuu

SEQ ID NO: 409891 - RNA, 19 nt, Artificial Sequence
  Synthetic
auaaucagcuugagcccuu

SEQ ID NO: 409892 - RNA, 20 nt, Artificial Sequence
  Synthetic
aauaaucagcuugagcccuu

SEQ ID NO: 409893 - RNA, 21 nt, Artificial Sequence
  Synthetic
aaauaaucagcuugagcccuu

SEQ ID NO: 409894 - RNA, 22 nt, Artificial Sequence
  Synthetic
aaaauaaucagcuugagcccuu

SEQ ID NO: 409895 - RNA, 23 nt, Artificial Sequence
  Synthetic
gaaaauaaucagcuugagcccuu

SEQ ID NO: 409896 - RNA, 24 nt, Artificial Sequence
  Synthetic
agaaaauaaucagcuugagcccuu

SEQ ID NO: 409897 - RNA, 18 nt, Artificial Sequence
  Synthetic
ggaaauugcauggcccuu

SEQ ID NO: 409898 - RNA, 19 nt, Artificial Sequence
  Synthetic
uggaaauugcauggcccuu

SEQ ID NO: 409899 - RNA, 20 nt, Artificial Sequence
  Synthetic
cuggaaauugcauggcccuu

SEQ ID NO: 409900 - RNA, 21 nt, Artificial Sequence
  Synthetic
ucuggaaauugcauggcccuu

SEQ ID NO: 409901 - RNA, 22 nt, Artificial Sequence
  Synthetic
uucuggaaauugcauggcccuu

SEQ ID NO: 409902 - RNA, 23 nt, Artificial Sequence
  Synthetic
guucuggaaauugcauggcccuu

SEQ ID NO: 409903 - RNA, 24 nt, Artificial Sequence
  Synthetic
aguucuggaaauugcauggcccuu

SEQ ID NO: 409904 - RNA, 18 nt, Artificial Sequence
  Synthetic
guugcaguuacugcccuu

SEQ ID NO: 409905 - RNA, 19 nt, Artificial Sequence
  Synthetic
gguugcaguuacugcccuu

SEQ ID NO: 409906 - RNA, 20 nt, Artificial Sequence
  Synthetic
ugguugcaguuacugcccuu

SEQ ID NO: 409907 - RNA, 21 nt, Artificial Sequence
  Synthetic
uugguugcaguuacugcccuu

SEQ ID NO: 409908 - RNA, 22 nt, Artificial Sequence
  Synthetic
cuugguugcaguuacugcccuu

SEQ ID NO: 409909 - RNA, 23 nt, Artificial Sequence
  Synthetic
acuugguugcaguuacugcccuu

SEQ ID NO: 409910 - RNA, 24 nt, Artificial Sequence
  Synthetic
aacuugguugcaguuacugcccuu

SEQ ID NO: 409911 - RNA, 18 nt, Artificial Sequence
  Synthetic
cccacgccuaaaucccuu

SEQ ID NO: 409912 - RNA, 19 nt, Artificial Sequence
  Synthetic
ucccacgccuaaaucccuu

SEQ ID NO: 409913 - RNA, 20 nt, Artificial Sequence
  Synthetic
cucccacgccuaaaucccuu

SEQ ID NO: 409914 - RNA, 21 nt, Artificial Sequence
  Synthetic
acucccacgccuaaaucccuu

SEQ ID NO: 409915 - RNA, 22 nt, Artificial Sequence
  Synthetic
gacucccacgccuaaaucccuu

SEQ ID NO: 409916 - RNA, 23 nt, Artificial Sequence
  Synthetic
ugacucccacgccuaaaucccuu

SEQ ID NO: 409917 - RNA, 24 nt, Artificial Sequence
  Synthetic
uugacucccacgccuaaaucccuu

SEQ ID NO: 409918 - RNA, 18 nt, Artificial Sequence
  Synthetic
ucugguuauuaaucccuu

SEQ ID NO: 409919 - RNA, 19 nt, Artificial Sequence
  Synthetic
uucugguuauuaaucccuu

SEQ ID NO: 409920 - RNA, 20 nt, Artificial Sequence
  Synthetic
auucugguuauuaaucccuu

SEQ ID NO: 409921 - RNA, 21 nt, Artificial Sequence
  Synthetic
uauucugguuauuaaucccuu

SEQ ID NO: 409922 - RNA, 22 nt, Artificial Sequence
  Synthetic
auauucugguuauuaaucccuu

SEQ ID NO: 409923 - RNA, 23 nt, Artificial Sequence
  Synthetic
uauauucugguuauuaaucccuu

SEQ ID NO: 409924 - RNA, 24 nt, Artificial Sequence
  Synthetic
auauauucugguuauuaaucccuu

SEQ ID NO: 409925 - RNA, 18 nt, Artificial Sequence
  Synthetic
aggcauuauccaucccuu

SEQ ID NO: 409926 - RNA, 19 nt, Artificial Sequence
  Synthetic
aaggcauuauccaucccuu

SEQ ID NO: 409927 - RNA, 20 nt, Artificial Sequence
  Synthetic
aaaggcauuauccaucccuu

SEQ ID NO: 409928 - RNA, 21 nt, Artificial Sequence
  Synthetic
caaaggcauuauccaucccuu

SEQ ID NO: 409929 - RNA, 22 nt, Artificial Sequence
  Synthetic
acaaaggcauuauccaucccuu

SEQ ID NO: 409930 - RNA, 23 nt, Artificial Sequence
  Synthetic
gacaaaggcauuauccaucccuu

SEQ ID NO: 409931 - RNA, 24 nt, Artificial Sequence
  Synthetic
agacaaaggcauuauccaucccuu

SEQ ID NO: 409932 - RNA, 18 nt, Artificial Sequence
  Synthetic
ccuagcagaagaucccuu

SEQ ID NO: 409933 - RNA, 19 nt, Artificial Sequence
  Synthetic
accuagcagaagaucccuu

SEQ ID NO: 409934 - RNA, 20 nt, Artificial Sequence
  Synthetic
aaccuagcagaagaucccuu

SEQ ID NO: 409935 - RNA, 21 nt, Artificial Sequence
  Synthetic
aaaccuagcagaagaucccuu

SEQ ID NO: 409936 - RNA, 22 nt, Artificial Sequence
  Synthetic
aaaaccuagcagaagaucccuu

SEQ ID NO: 409937 - RNA, 23 nt, Artificial Sequence
  Synthetic
uaaaaccuagcagaagaucccuu

SEQ ID NO: 409938 - RNA, 24 nt, Artificial Sequence
  Synthetic
guaaaaccuagcagaagaucccuu

SEQ ID NO: 409939 - RNA, 18 nt, Artificial Sequence
  Synthetic
aacccauguggaucccuu

SEQ ID NO: 409940 - RNA, 19 nt, Artificial Sequence
  Synthetic
uaacccauguggaucccuu

SEQ ID NO: 409941 - RNA, 20 nt, Artificial Sequence
  Synthetic
cuaacccauguggaucccuu

SEQ ID NO: 409942 - RNA, 21 nt, Artificial Sequence
  Synthetic
gcuaacccauguggaucccuu

SEQ ID NO: 409943 - RNA, 22 nt, Artificial Sequence
  Synthetic
ugcuaacccauguggaucccuu

SEQ ID NO: 409944 - RNA, 23 nt, Artificial Sequence
  Synthetic
gugcuaacccauguggaucccuu

SEQ ID NO: 409945 - RNA, 24 nt, Artificial Sequence
  Synthetic
cgugcuaacccauguggaucccuu

SEQ ID NO: 409946 - RNA, 18 nt, Artificial Sequence
  Synthetic
acuggagcuuuaucccuu

SEQ ID NO: 409947 - RNA, 19 nt, Artificial Sequence
  Synthetic
cacuggagcuuuaucccuu

SEQ ID NO: 409948 - RNA, 20 nt, Artificial Sequence
  Synthetic
ucacuggagcuuuaucccuu

SEQ ID NO: 409949 - RNA, 21 nt, Artificial Sequence
  Synthetic
gucacuggagcuuuaucccuu

SEQ ID NO: 409950 - RNA, 22 nt, Artificial Sequence
  Synthetic
ggucacuggagcuuuaucccuu

SEQ ID NO: 409951 - RNA, 23 nt, Artificial Sequence
  Synthetic
gggucacuggagcuuuaucccuu

SEQ ID NO: 409952 - RNA, 24 nt, Artificial Sequence
  Synthetic
ugggucacuggagcuuuaucccuu

SEQ ID NO: 409953 - RNA, 18 nt, Artificial Sequence
  Synthetic
acaucacaaaagucccuu

SEQ ID NO: 409954 - RNA, 19 nt, Artificial Sequence
  Synthetic
uacaucacaaaagucccuu

SEQ ID NO: 409955 - RNA, 20 nt, Artificial Sequence
  Synthetic
auacaucacaaaagucccuu

SEQ ID NO: 409956 - RNA, 21 nt, Artificial Sequence
  Synthetic
uauacaucacaaaagucccuu

SEQ ID NO: 409957 - RNA, 22 nt, Artificial Sequence
  Synthetic
auauacaucacaaaagucccuu

SEQ ID NO: 409958 - RNA, 23 nt, Artificial Sequence
  Synthetic
uauauacaucacaaaagucccuu

SEQ ID NO: 409959 - RNA, 24 nt, Artificial Sequence
  Synthetic
auauauacaucacaaaagucccuu

SEQ ID NO: 409960 - RNA, 18 nt, Artificial Sequence
  Synthetic
cauuuccaaaugucccuu

SEQ ID NO: 409961 - RNA, 19 nt, Artificial Sequence
  Synthetic
acauuuccaaaugucccuu

SEQ ID NO: 409962 - RNA, 20 nt, Artificial Sequence
  Synthetic
gacauuuccaaaugucccuu

SEQ ID NO: 409963 - RNA, 21 nt, Artificial Sequence
  Synthetic
agacauuuccaaaugucccuu

SEQ ID NO: 409964 - RNA, 22 nt, Artificial Sequence
  Synthetic
cagacauuuccaaaugucccuu

SEQ ID NO: 409965 - RNA, 23 nt, Artificial Sequence
  Synthetic
ccagacauuuccaaaugucccuu

SEQ ID NO: 409966 - RNA, 24 nt, Artificial Sequence
  Synthetic
cccagacauuuccaaaugucccuu

SEQ ID NO: 409967 - RNA, 18 nt, Artificial Sequence
  Synthetic
cuagcauaaaauucccuu

SEQ ID NO: 409968 - RNA, 19 nt, Artificial Sequence
  Synthetic
acuagcauaaaauucccuu

SEQ ID NO: 409969 - RNA, 20 nt, Artificial Sequence
  Synthetic
uacuagcauaaaauucccuu

SEQ ID NO: 409970 - RNA, 21 nt, Artificial Sequence
  Synthetic
uuacuagcauaaaauucccuu

SEQ ID NO: 409971 - RNA, 22 nt, Artificial Sequence
  Synthetic
uuuacuagcauaaaauucccuu

SEQ ID NO: 409972 - RNA, 23 nt, Artificial Sequence
  Synthetic
guuuacuagcauaaaauucccuu

SEQ ID NO: 409973 - RNA, 24 nt, Artificial Sequence
  Synthetic
cguuuacuagcauaaaauucccuu

SEQ ID NO: 409974 - RNA, 18 nt, Artificial Sequence
  Synthetic
gucuggcuucauucccuu

SEQ ID NO: 409975 - RNA, 19 nt, Artificial Sequence
  Synthetic
ugucuggcuucauucccuu

SEQ ID NO: 409976 - RNA, 20 nt, Artificial Sequence
  Synthetic
augucuggcuucauucccuu

SEQ ID NO: 409977 - RNA, 21 nt, Artificial Sequence
  Synthetic
uaugucuggcuucauucccuu

SEQ ID NO: 409978 - RNA, 22 nt, Artificial Sequence
  Synthetic
uuaugucuggcuucauucccuu

SEQ ID NO: 409979 - RNA, 23 nt, Artificial Sequence
  Synthetic
guuaugucuggcuucauucccuu

SEQ ID NO: 409980 - RNA, 24 nt, Artificial Sequence
  Synthetic
uguuaugucuggcuucauucccuu

SEQ ID NO: 409981 - RNA, 18 nt, Artificial Sequence
  Synthetic
ccuccaucuuguucccuu

SEQ ID NO: 409982 - RNA, 19 nt, Artificial Sequence
  Synthetic
uccuccaucuuguucccuu

SEQ ID NO: 409983 - RNA, 20 nt, Artificial Sequence
  Synthetic
auccuccaucuuguucccuu

SEQ ID NO: 409984 - RNA, 21 nt, Artificial Sequence
  Synthetic
aauccuccaucuuguucccuu

SEQ ID NO: 409985 - RNA, 22 nt, Artificial Sequence
  Synthetic
gaauccuccaucuuguucccuu

SEQ ID NO: 409986 - RNA, 23 nt, Artificial Sequence
  Synthetic
agaauccuccaucuuguucccuu

SEQ ID NO: 409987 - RNA, 24 nt, Artificial Sequence
  Synthetic
gagaauccuccaucuuguucccuu

SEQ ID NO: 409988 - RNA, 18 nt, Artificial Sequence
  Synthetic
ucuguccauuuuucccuu

SEQ ID NO: 409989 - RNA, 19 nt, Artificial Sequence
  Synthetic
uucuguccauuuuucccuu

SEQ ID NO: 409990 - RNA, 20 nt, Artificial Sequence
  Synthetic
cuucuguccauuuuucccuu

SEQ ID NO: 409991 - RNA, 21 nt, Artificial Sequence
  Synthetic
ccuucuguccauuuuucccuu

SEQ ID NO: 409992 - RNA, 22 nt, Artificial Sequence
  Synthetic
accuucuguccauuuuucccuu

SEQ ID NO: 409993 - RNA, 23 nt, Artificial Sequence
  Synthetic
aaccuucuguccauuuuucccuu

SEQ ID NO: 409994 - RNA, 24 nt, Artificial Sequence
  Synthetic
uaaccuucuguccauuuuucccuu

SEQ ID NO: 409995 - RNA, 18 nt, Artificial Sequence
  Synthetic
aacgccauacaaagccuu

SEQ ID NO: 409996 - RNA, 19 nt, Artificial Sequence
  Synthetic
gaacgccauacaaagccuu

SEQ ID NO: 409997 - RNA, 20 nt, Artificial Sequence
  Synthetic
agaacgccauacaaagccuu

SEQ ID NO: 409998 - RNA, 21 nt, Artificial Sequence
  Synthetic
uagaacgccauacaaagccuu

SEQ ID NO: 409999 - RNA, 22 nt, Artificial Sequence
  Synthetic
auagaacgccauacaaagccuu

SEQ ID NO: 410000 - RNA, 23 nt, Artificial Sequence
  Synthetic
uauagaacgccauacaaagccuu

SEQ ID NO: 410001 - RNA, 24 nt, Artificial Sequence
  Synthetic
uuauagaacgccauacaaagccuu

SEQ ID NO: 410002 - RNA, 18 nt, Artificial Sequence
  Synthetic
ccaagggagagaagccuu

SEQ ID NO: 410003 - RNA, 19 nt, Artificial Sequence
  Synthetic
uccaagggagagaagccuu

SEQ ID NO: 410004 - RNA, 20 nt, Artificial Sequence
  Synthetic
uuccaagggagagaagccuu

SEQ ID NO: 410005 - RNA, 21 nt, Artificial Sequence
  Synthetic
auuccaagggagagaagccuu

SEQ ID NO: 410006 - RNA, 22 nt, Artificial Sequence
  Synthetic
aauuccaagggagagaagccuu

SEQ ID NO: 410007 - RNA, 23 nt, Artificial Sequence
  Synthetic
uaauuccaagggagagaagccuu

SEQ ID NO: 410008 - RNA, 24 nt, Artificial Sequence
  Synthetic
cuaauuccaagggagagaagccuu

SEQ ID NO: 410009 - RNA, 18 nt, Artificial Sequence
  Synthetic
auaugcaaauuaagccuu

SEQ ID NO: 410010 - RNA, 19 nt, Artificial Sequence
  Synthetic
aauaugcaaauuaagccuu

SEQ ID NO: 410011 - RNA, 20 nt, Artificial Sequence
  Synthetic
aaauaugcaaauuaagccuu

SEQ ID NO: 410012 - RNA, 21 nt, Artificial Sequence
  Synthetic
gaaauaugcaaauuaagccuu

SEQ ID NO: 410013 - RNA, 22 nt, Artificial Sequence
  Synthetic
ugaaauaugcaaauuaagccuu

SEQ ID NO: 410014 - RNA, 23 nt, Artificial Sequence
  Synthetic
gugaaauaugcaaauuaagccuu

SEQ ID NO: 410015 - RNA, 24 nt, Artificial Sequence
  Synthetic
ugugaaauaugcaaauuaagccuu

SEQ ID NO: 410016 - RNA, 18 nt, Artificial Sequence
  Synthetic
uaaucuuacagcagccuu

SEQ ID NO: 410017 - RNA, 19 nt, Artificial Sequence
  Synthetic
uuaaucuuacagcagccuu

SEQ ID NO: 410018 - RNA, 20 nt, Artificial Sequence
  Synthetic
uuuaaucuuacagcagccuu

SEQ ID NO: 410019 - RNA, 21 nt, Artificial Sequence
  Synthetic
guuuaaucuuacagcagccuu

SEQ ID NO: 410020 - RNA, 22 nt, Artificial Sequence
  Synthetic
uguuuaaucuuacagcagccuu

SEQ ID NO: 410021 - RNA, 23 nt, Artificial Sequence
  Synthetic
cuguuuaaucuuacagcagccuu

SEQ ID NO: 410022 - RNA, 24 nt, Artificial Sequence
  Synthetic
ucuguuuaaucuuacagcagccuu

SEQ ID NO: 410023 - RNA, 18 nt, Artificial Sequence
  Synthetic
ugagcacagcgcagccuu

SEQ ID NO: 410024 - RNA, 19 nt, Artificial Sequence
  Synthetic
cugagcacagcgcagccuu

SEQ ID NO: 410025 - RNA, 20 nt, Artificial Sequence
  Synthetic
ucugagcacagcgcagccuu

SEQ ID NO: 410026 - RNA, 21 nt, Artificial Sequence
  Synthetic
aucugagcacagcgcagccuu

SEQ ID NO: 410027 - RNA, 22 nt, Artificial Sequence
  Synthetic
aaucugagcacagcgcagccuu

SEQ ID NO: 410028 - RNA, 23 nt, Artificial Sequence
  Synthetic
uaaucugagcacagcgcagccuu

SEQ ID NO: 410029 - RNA, 24 nt, Artificial Sequence
  Synthetic
cuaaucugagcacagcgcagccuu

SEQ ID NO: 410030 - RNA, 18 nt, Artificial Sequence
  Synthetic
auucuggacaucagccuu

SEQ ID NO: 410031 - RNA, 19 nt, Artificial Sequence
  Synthetic
uauucuggacaucagccuu

SEQ ID NO: 410032 - RNA, 20 nt, Artificial Sequence
  Synthetic
cuauucuggacaucagccuu

SEQ ID NO: 410033 - RNA, 21 nt, Artificial Sequence
  Synthetic
acuauucuggacaucagccuu

SEQ ID NO: 410034 - RNA, 22 nt, Artificial Sequence
  Synthetic
uacuauucuggacaucagccuu

SEQ ID NO: 410035 - RNA, 23 nt, Artificial Sequence
  Synthetic
auacuauucuggacaucagccuu

SEQ ID NO: 410036 - RNA, 24 nt, Artificial Sequence
  Synthetic
aauacuauucuggacaucagccuu

SEQ ID NO: 410037 - RNA, 18 nt, Artificial Sequence
  Synthetic
uccucccaccucagccuu

SEQ ID NO: 410038 - RNA, 19 nt, Artificial Sequence
  Synthetic
auccucccaccucagccuu

SEQ ID NO: 410039 - RNA, 20 nt, Artificial Sequence
  Synthetic
aauccucccaccucagccuu

SEQ ID NO: 410040 - RNA, 21 nt, Artificial Sequence
  Synthetic
uaauccucccaccucagccuu

SEQ ID NO: 410041 - RNA, 22 nt, Artificial Sequence
  Synthetic
guaauccucccaccucagccuu

SEQ ID NO: 410042 - RNA, 23 nt, Artificial Sequence
  Synthetic
aguaauccucccaccucagccuu

SEQ ID NO: 410043 - RNA, 24 nt, Artificial Sequence
  Synthetic
aaguaauccucccaccucagccuu

SEQ ID NO: 410044 - RNA, 18 nt, Artificial Sequence
  Synthetic
acaugacacaggagccuu

SEQ ID NO: 410045 - RNA, 19 nt, Artificial Sequence
  Synthetic
cacaugacacaggagccuu

SEQ ID NO: 410046 - RNA, 20 nt, Artificial Sequence
  Synthetic
ucacaugacacaggagccuu

SEQ ID NO: 410047 - RNA, 21 nt, Artificial Sequence
  Synthetic
uucacaugacacaggagccuu

SEQ ID NO: 410048 - RNA, 22 nt, Artificial Sequence
  Synthetic
uuucacaugacacaggagccuu

SEQ ID NO: 410049 - RNA, 23 nt, Artificial Sequence
  Synthetic
guuucacaugacacaggagccuu

SEQ ID NO: 410050 - RNA, 24 nt, Artificial Sequence
  Synthetic
aguuucacaugacacaggagccuu

SEQ ID NO: 410051 - RNA, 18 nt, Artificial Sequence
  Synthetic
cagggcaaagggagccuu

SEQ ID NO: 410052 - RNA, 19 nt, Artificial Sequence
  Synthetic
acagggcaaagggagccuu

SEQ ID NO: 410053 - RNA, 20 nt, Artificial Sequence
  Synthetic
aacagggcaaagggagccuu

SEQ ID NO: 410054 - RNA, 21 nt, Artificial Sequence
  Synthetic
gaacagggcaaagggagccuu

SEQ ID NO: 410055 - RNA, 22 nt, Artificial Sequence
  Synthetic
agaacagggcaaagggagccuu

SEQ ID NO: 410056 - RNA, 23 nt, Artificial Sequence
  Synthetic
aagaacagggcaaagggagccuu

SEQ ID NO: 410057 - RNA, 24 nt, Artificial Sequence
  Synthetic
uaagaacagggcaaagggagccuu

SEQ ID NO: 410058 - RNA, 18 nt, Artificial Sequence
  Synthetic
aagccccacgggagccuu

SEQ ID NO: 410059 - RNA, 19 nt, Artificial Sequence
  Synthetic
gaagccccacgggagccuu

SEQ ID NO: 410060 - RNA, 20 nt, Artificial Sequence
  Synthetic
agaagccccacgggagccuu

SEQ ID NO: 410061 - RNA, 21 nt, Artificial Sequence
  Synthetic
gagaagccccacgggagccuu

SEQ ID NO: 410062 - RNA, 22 nt, Artificial Sequence
  Synthetic
ugagaagccccacgggagccuu

SEQ ID NO: 410063 - RNA, 23 nt, Artificial Sequence
  Synthetic
cugagaagccccacgggagccuu

SEQ ID NO: 410064 - RNA, 24 nt, Artificial Sequence
  Synthetic
gcugagaagccccacgggagccuu

SEQ ID NO: 410065 - RNA, 18 nt, Artificial Sequence
  Synthetic
uuauuaauuccccgccuu

SEQ ID NO: 410066 - RNA, 19 nt, Artificial Sequence
  Synthetic
guuauuaauuccccgccuu

SEQ ID NO: 410067 - RNA, 20 nt, Artificial Sequence
  Synthetic
uguuauuaauuccccgccuu

SEQ ID NO: 410068 - RNA, 21 nt, Artificial Sequence
  Synthetic
cuguuauuaauuccccgccuu

SEQ ID NO: 410069 - RNA, 22 nt, Artificial Sequence
  Synthetic
ccuguuauuaauuccccgccuu

SEQ ID NO: 410070 - RNA, 23 nt, Artificial Sequence
  Synthetic
cccuguuauuaauuccccgccuu

SEQ ID NO: 410071 - RNA, 24 nt, Artificial Sequence
  Synthetic
gcccuguuauuaauuccccgccuu

SEQ ID NO: 410072 - RNA, 18 nt, Artificial Sequence
  Synthetic
cuuagccuuucaggccuu

SEQ ID NO: 410073 - RNA, 19 nt, Artificial Sequence
  Synthetic
ccuuagccuuucaggccuu

SEQ ID NO: 410074 - RNA, 20 nt, Artificial Sequence
  Synthetic
cccuuagccuuucaggccuu

SEQ ID NO: 410075 - RNA, 21 nt, Artificial Sequence
  Synthetic
ccccuuagccuuucaggccuu

SEQ ID NO: 410076 - RNA, 22 nt, Artificial Sequence
  Synthetic
uccccuuagccuuucaggccuu

SEQ ID NO: 410077 - RNA, 23 nt, Artificial Sequence
  Synthetic
cuccccuuagccuuucaggccuu

SEQ ID NO: 410078 - RNA, 24 nt, Artificial Sequence
  Synthetic
ccuccccuuagccuuucaggccuu

SEQ ID NO: 410079 - RNA, 18 nt, Artificial Sequence
  Synthetic
guuuucagccuaggccuu

SEQ ID NO: 410080 - RNA, 19 nt, Artificial Sequence
  Synthetic
aguuuucagccuaggccuu

SEQ ID NO: 410081 - RNA, 20 nt, Artificial Sequence
  Synthetic
caguuuucagccuaggccuu

SEQ ID NO: 410082 - RNA, 21 nt, Artificial Sequence
  Synthetic
acaguuuucagccuaggccuu

SEQ ID NO: 410083 - RNA, 22 nt, Artificial Sequence
  Synthetic
gacaguuuucagccuaggccuu

SEQ ID NO: 410084 - RNA, 23 nt, Artificial Sequence
  Synthetic
ugacaguuuucagccuaggccuu

SEQ ID NO: 410085 - RNA, 24 nt, Artificial Sequence
  Synthetic
gugacaguuuucagccuaggccuu

SEQ ID NO: 410086 - RNA, 18 nt, Artificial Sequence
  Synthetic
aaaagucauaagggccuu

SEQ ID NO: 410087 - RNA, 19 nt, Artificial Sequence
  Synthetic
aaaaagucauaagggccuu

SEQ ID NO: 410088 - RNA, 20 nt, Artificial Sequence
  Synthetic
gaaaaagucauaagggccuu

SEQ ID NO: 410089 - RNA, 21 nt, Artificial Sequence
  Synthetic
agaaaaagucauaagggccuu

SEQ ID NO: 410090 - RNA, 22 nt, Artificial Sequence
  Synthetic
cagaaaaagucauaagggccuu

SEQ ID NO: 410091 - RNA, 23 nt, Artificial Sequence
  Synthetic
ccagaaaaagucauaagggccuu

SEQ ID NO: 410092 - RNA, 24 nt, Artificial Sequence
  Synthetic
cccagaaaaagucauaagggccuu

SEQ ID NO: 410093 - RNA, 18 nt, Artificial Sequence
  Synthetic
cagauuguggagggccuu

SEQ ID NO: 410094 - RNA, 19 nt, Artificial Sequence
  Synthetic
ccagauuguggagggccuu

SEQ ID NO: 410095 - RNA, 20 nt, Artificial Sequence
  Synthetic
uccagauuguggagggccuu

SEQ ID NO: 410096 - RNA, 21 nt, Artificial Sequence
  Synthetic
guccagauuguggagggccuu

SEQ ID NO: 410097 - RNA, 22 nt, Artificial Sequence
  Synthetic
uguccagauuguggagggccuu

SEQ ID NO: 410098 - RNA, 23 nt, Artificial Sequence
  Synthetic
guguccagauuguggagggccuu

SEQ ID NO: 410099 - RNA, 24 nt, Artificial Sequence
  Synthetic
aguguccagauuguggagggccuu

SEQ ID NO: 410100 - RNA, 18 nt, Artificial Sequence
  Synthetic
uccuagggacauggccuu

SEQ ID NO: 410101 - RNA, 19 nt, Artificial Sequence
  Synthetic
auccuagggacauggccuu

SEQ ID NO: 410102 - RNA, 20 nt, Artificial Sequence
  Synthetic
cauccuagggacauggccuu

SEQ ID NO: 410103 - RNA, 21 nt, Artificial Sequence
  Synthetic
ucauccuagggacauggccuu

SEQ ID NO: 410104 - RNA, 22 nt, Artificial Sequence
  Synthetic
gucauccuagggacauggccuu

SEQ ID NO: 410105 - RNA, 23 nt, Artificial Sequence
  Synthetic
ggucauccuagggacauggccuu

SEQ ID NO: 410106 - RNA, 24 nt, Artificial Sequence
  Synthetic
gggucauccuagggacauggccuu

SEQ ID NO: 410107 - RNA, 18 nt, Artificial Sequence
  Synthetic
ugaagcacguauggccuu

SEQ ID NO: 410108 - RNA, 19 nt, Artificial Sequence
  Synthetic
augaagcacguauggccuu

SEQ ID NO: 410109 - RNA, 20 nt, Artificial Sequence
  Synthetic
caugaagcacguauggccuu

SEQ ID NO: 410110 - RNA, 21 nt, Artificial Sequence
  Synthetic
ucaugaagcacguauggccuu

SEQ ID NO: 410111 - RNA, 22 nt, Artificial Sequence
  Synthetic
uucaugaagcacguauggccuu

SEQ ID NO: 410112 - RNA, 23 nt, Artificial Sequence
  Synthetic
guucaugaagcacguauggccuu

SEQ ID NO: 410113 - RNA, 24 nt, Artificial Sequence
  Synthetic
uguucaugaagcacguauggccuu

SEQ ID NO: 410114 - RNA, 18 nt, Artificial Sequence
  Synthetic
cuauugacaaaaugccuu

SEQ ID NO: 410115 - RNA, 19 nt, Artificial Sequence
  Synthetic
ucuauugacaaaaugccuu

SEQ ID NO: 410116 - RNA, 20 nt, Artificial Sequence
  Synthetic
uucuauugacaaaaugccuu

SEQ ID NO: 410117 - RNA, 21 nt, Artificial Sequence
  Synthetic
auucuauugacaaaaugccuu

SEQ ID NO: 410118 - RNA, 22 nt, Artificial Sequence
  Synthetic
uauucuauugacaaaaugccuu

SEQ ID NO: 410119 - RNA, 23 nt, Artificial Sequence
  Synthetic
auauucuauugacaaaaugccuu

SEQ ID NO: 410120 - RNA, 24 nt, Artificial Sequence
  Synthetic
uauauucuauugacaaaaugccuu

SEQ ID NO: 410121 - RNA, 18 nt, Artificial Sequence
  Synthetic
acccuguuuaaaugccuu

SEQ ID NO: 410122 - RNA, 19 nt, Artificial Sequence
  Synthetic
aacccuguuuaaaugccuu

SEQ ID NO: 410123 - RNA, 20 nt, Artificial Sequence
  Synthetic
gaacccuguuuaaaugccuu

SEQ ID NO: 410124 - RNA, 21 nt, Artificial Sequence
  Synthetic
agaacccuguuuaaaugccuu

SEQ ID NO: 410125 - RNA, 22 nt, Artificial Sequence
  Synthetic
cagaacccuguuuaaaugccuu

SEQ ID NO: 410126 - RNA, 23 nt, Artificial Sequence
  Synthetic
acagaacccuguuuaaaugccuu

SEQ ID NO: 410127 - RNA, 24 nt, Artificial Sequence
  Synthetic
cacagaacccuguuuaaaugccuu

SEQ ID NO: 410128 - RNA, 18 nt, Artificial Sequence
  Synthetic
aaggaauaauaaugccuu

SEQ ID NO: 410129 - RNA, 19 nt, Artificial Sequence
  Synthetic
aaaggaauaauaaugccuu

SEQ ID NO: 410130 - RNA, 20 nt, Artificial Sequence
  Synthetic
aaaaggaauaauaaugccuu

SEQ ID NO: 410131 - RNA, 21 nt, Artificial Sequence
  Synthetic
aaaaaggaauaauaaugccuu

SEQ ID NO: 410132 - RNA, 22 nt, Artificial Sequence
  Synthetic
gaaaaaggaauaauaaugccuu

SEQ ID NO: 410133 - RNA, 23 nt, Artificial Sequence
  Synthetic
agaaaaaggaauaauaaugccuu

SEQ ID NO: 410134 - RNA, 24 nt, Artificial Sequence
  Synthetic
aagaaaaaggaauaauaaugccuu

SEQ ID NO: 410135 - RNA, 18 nt, Artificial Sequence
  Synthetic
ugcagauuuuaaugccuu

SEQ ID NO: 410136 - RNA, 19 nt, Artificial Sequence
  Synthetic
augcagauuuuaaugccuu

SEQ ID NO: 410137 - RNA, 20 nt, Artificial Sequence
  Synthetic
caugcagauuuuaaugccuu

SEQ ID NO: 410138 - RNA, 21 nt, Artificial Sequence
  Synthetic
ucaugcagauuuuaaugccuu

SEQ ID NO: 410139 - RNA, 22 nt, Artificial Sequence
  Synthetic
aucaugcagauuuuaaugccuu

SEQ ID NO: 410140 - RNA, 23 nt, Artificial Sequence
  Synthetic
caucaugcagauuuuaaugccuu

SEQ ID NO: 410141 - RNA, 24 nt, Artificial Sequence
  Synthetic
acaucaugcagauuuuaaugccuu

SEQ ID NO: 410142 - RNA, 18 nt, Artificial Sequence
  Synthetic
cuauuggguauaugccuu

SEQ ID NO: 410143 - RNA, 19 nt, Artificial Sequence
  Synthetic
ucuauuggguauaugccuu

SEQ ID NO: 410144 - RNA, 20 nt, Artificial Sequence
  Synthetic
cucuauuggguauaugccuu

SEQ ID NO: 410145 - RNA, 21 nt, Artificial Sequence
  Synthetic
ccucuauuggguauaugccuu

SEQ ID NO: 410146 - RNA, 22 nt, Artificial Sequence
  Synthetic
cccucuauuggguauaugccuu

SEQ ID NO: 410147 - RNA, 23 nt, Artificial Sequence
  Synthetic
ucccucuauuggguauaugccuu

SEQ ID NO: 410148 - RNA, 24 nt, Artificial Sequence
  Synthetic
gucccucuauuggguauaugccuu

SEQ ID NO: 410149 - RNA, 18 nt, Artificial Sequence
  Synthetic
aggacucaguccugccuu

SEQ ID NO: 410150 - RNA, 19 nt, Artificial Sequence
  Synthetic
gaggacucaguccugccuu

SEQ ID NO: 410151 - RNA, 20 nt, Artificial Sequence
  Synthetic
agaggacucaguccugccuu

SEQ ID NO: 410152 - RNA, 21 nt, Artificial Sequence
  Synthetic
uagaggacucaguccugccuu

SEQ ID NO: 410153 - RNA, 22 nt, Artificial Sequence
  Synthetic
auagaggacucaguccugccuu

SEQ ID NO: 410154 - RNA, 23 nt, Artificial Sequence
  Synthetic
cauagaggacucaguccugccuu

SEQ ID NO: 410155 - RNA, 24 nt, Artificial Sequence
  Synthetic
gcauagaggacucaguccugccuu

SEQ ID NO: 410156 - RNA, 18 nt, Artificial Sequence
  Synthetic
ucaugcgggcucugccuu

SEQ ID NO: 410157 - RNA, 19 nt, Artificial Sequence
  Synthetic
gucaugcgggcucugccuu

SEQ ID NO: 410158 - RNA, 20 nt, Artificial Sequence
  Synthetic
ggucaugcgggcucugccuu

SEQ ID NO: 410159 - RNA, 21 nt, Artificial Sequence
  Synthetic
aggucaugcgggcucugccuu

SEQ ID NO: 410160 - RNA, 22 nt, Artificial Sequence
  Synthetic
uaggucaugcgggcucugccuu

SEQ ID NO: 410161 - RNA, 23 nt, Artificial Sequence
  Synthetic
uuaggucaugcgggcucugccuu

SEQ ID NO: 410162 - RNA, 24 nt, Artificial Sequence
  Synthetic
auuaggucaugcgggcucugccuu

SEQ ID NO: 410163 - RNA, 18 nt, Artificial Sequence
  Synthetic
ucaguucaugucugccuu

SEQ ID NO: 410164 - RNA, 19 nt, Artificial Sequence
  Synthetic
cucaguucaugucugccuu

SEQ ID NO: 410165 - RNA, 20 nt, Artificial Sequence
  Synthetic
ccucaguucaugucugccuu

SEQ ID NO: 410166 - RNA, 21 nt, Artificial Sequence
  Synthetic
uccucaguucaugucugccuu

SEQ ID NO: 410167 - RNA, 22 nt, Artificial Sequence
  Synthetic
guccucaguucaugucugccuu

SEQ ID NO: 410168 - RNA, 23 nt, Artificial Sequence
  Synthetic
aguccucaguucaugucugccuu

SEQ ID NO: 410169 - RNA, 24 nt, Artificial Sequence
  Synthetic
gaguccucaguucaugucugccuu

SEQ ID NO: 410170 - RNA, 18 nt, Artificial Sequence
  Synthetic
ccuucuaccuucugccuu

SEQ ID NO: 410171 - RNA, 19 nt, Artificial Sequence
  Synthetic
cccuucuaccuucugccuu

SEQ ID NO: 410172 - RNA, 20 nt, Artificial Sequence
  Synthetic
gcccuucuaccuucugccuu

SEQ ID NO: 410173 - RNA, 21 nt, Artificial Sequence
  Synthetic
ugcccuucuaccuucugccuu

SEQ ID NO: 410174 - RNA, 22 nt, Artificial Sequence
  Synthetic
uugcccuucuaccuucugccuu

SEQ ID NO: 410175 - RNA, 23 nt, Artificial Sequence
  Synthetic
cuugcccuucuaccuucugccuu

SEQ ID NO: 410176 - RNA, 24 nt, Artificial Sequence
  Synthetic
ucuugcccuucuaccuucugccuu

SEQ ID NO: 410177 - RNA, 18 nt, Artificial Sequence
  Synthetic
ucuuuuucuuucugccuu

SEQ ID NO: 410178 - RNA, 19 nt, Artificial Sequence
  Synthetic
uucuuuuucuuucugccuu

SEQ ID NO: 410179 - RNA, 20 nt, Artificial Sequence
  Synthetic
uuucuuuuucuuucugccuu

SEQ ID NO: 410180 - RNA, 21 nt, Artificial Sequence
  Synthetic
cuuucuuuuucuuucugccuu

SEQ ID NO: 410181 - RNA, 22 nt, Artificial Sequence
  Synthetic
ucuuucuuuuucuuucugccuu

SEQ ID NO: 410182 - RNA, 23 nt, Artificial Sequence
  Synthetic
uucuuucuuuuucuuucugccuu

SEQ ID NO: 410183 - RNA, 24 nt, Artificial Sequence
  Synthetic
uuucuuucuuuuucuuucugccuu

SEQ ID NO: 410184 - RNA, 18 nt, Artificial Sequence
  Synthetic
uucugugugcagugccuu

SEQ ID NO: 410185 - RNA, 19 nt, Artificial Sequence
  Synthetic
uuucugugugcagugccuu

SEQ ID NO: 410186 - RNA, 20 nt, Artificial Sequence
  Synthetic
uuuucugugugcagugccuu

SEQ ID NO: 410187 - RNA, 21 nt, Artificial Sequence
  Synthetic
uuuuucugugugcagugccuu

SEQ ID NO: 410188 - RNA, 22 nt, Artificial Sequence
  Synthetic
auuuuucugugugcagugccuu

SEQ ID NO: 410189 - RNA, 23 nt, Artificial Sequence
  Synthetic
cauuuuucugugugcagugccuu

SEQ ID NO: 410190 - RNA, 24 nt, Artificial Sequence
  Synthetic
ccauuuuucugugugcagugccuu

SEQ ID NO: 410191 - RNA, 18 nt, Artificial Sequence
  Synthetic
ggucaguuuacuugccuu

SEQ ID NO: 410192 - RNA, 19 nt, Artificial Sequence
  Synthetic
aggucaguuuacuugccuu

SEQ ID NO: 410193 - RNA, 20 nt, Artificial Sequence
  Synthetic
aaggucaguuuacuugccuu

SEQ ID NO: 410194 - RNA, 21 nt, Artificial Sequence
  Synthetic
aaaggucaguuuacuugccuu

SEQ ID NO: 410195 - RNA, 22 nt, Artificial Sequence
  Synthetic
aaaaggucaguuuacuugccuu

SEQ ID NO: 410196 - RNA, 23 nt, Artificial Sequence
  Synthetic
uaaaaggucaguuuacuugccuu

SEQ ID NO: 410197 - RNA, 24 nt, Artificial Sequence
  Synthetic
uuaaaaggucaguuuacuugccuu

SEQ ID NO: 410198 - RNA, 18 nt, Artificial Sequence
  Synthetic
accacucagauuugccuu

SEQ ID NO: 410199 - RNA, 19 nt, Artificial Sequence
  Synthetic
caccacucagauuugccuu

SEQ ID NO: 410200 - RNA, 20 nt, Artificial Sequence
  Synthetic
ucaccacucagauuugccuu

SEQ ID NO: 410201 - RNA, 21 nt, Artificial Sequence
  Synthetic
cucaccacucagauuugccuu

SEQ ID NO: 410202 - RNA, 22 nt, Artificial Sequence
  Synthetic
acucaccacucagauuugccuu

SEQ ID NO: 410203 - RNA, 23 nt, Artificial Sequence
  Synthetic
aacucaccacucagauuugccuu

SEQ ID NO: 410204 - RNA, 24 nt, Artificial Sequence
  Synthetic
caacucaccacucagauuugccuu

SEQ ID NO: 410205 - RNA, 18 nt, Artificial Sequence
  Synthetic
uugaugcauauuugccuu

SEQ ID NO: 410206 - RNA, 19 nt, Artificial Sequence
  Synthetic
uuugaugcauauuugccuu

SEQ ID NO: 410207 - RNA, 20 nt, Artificial Sequence
  Synthetic
auuugaugcauauuugccuu

SEQ ID NO: 410208 - RNA, 21 nt, Artificial Sequence
  Synthetic
aauuugaugcauauuugccuu

SEQ ID NO: 410209 - RNA, 22 nt, Artificial Sequence
  Synthetic
aaauuugaugcauauuugccuu

SEQ ID NO: 410210 - RNA, 23 nt, Artificial Sequence
  Synthetic
aaaauuugaugcauauuugccuu

SEQ ID NO: 410211 - RNA, 24 nt, Artificial Sequence
  Synthetic
uaaaauuugaugcauauuugccuu

SEQ ID NO: 410212 - RNA, 18 nt, Artificial Sequence
  Synthetic
ccauuccguaaaauccuu

SEQ ID NO: 410213 - RNA, 19 nt, Artificial Sequence
  Synthetic
accauuccguaaaauccuu

SEQ ID NO: 410214 - RNA, 20 nt, Artificial Sequence
  Synthetic
caccauuccguaaaauccuu

SEQ ID NO: 410215 - RNA, 21 nt, Artificial Sequence
  Synthetic
ccaccauuccguaaaauccuu

SEQ ID NO: 410216 - RNA, 22 nt, Artificial Sequence
  Synthetic
accaccauuccguaaaauccuu

SEQ ID NO: 410217 - RNA, 23 nt, Artificial Sequence
  Synthetic
uaccaccauuccguaaaauccuu

SEQ ID NO: 410218 - RNA, 24 nt, Artificial Sequence
  Synthetic
guaccaccauuccguaaaauccuu

SEQ ID NO: 410219 - RNA, 18 nt, Artificial Sequence
  Synthetic
acuuauacuugaauccuu

SEQ ID NO: 410220 - RNA, 19 nt, Artificial Sequence
  Synthetic
aacuuauacuugaauccuu

SEQ ID NO: 410221 - RNA, 20 nt, Artificial Sequence
  Synthetic
caacuuauacuugaauccuu

SEQ ID NO: 410222 - RNA, 21 nt, Artificial Sequence
  Synthetic
ucaacuuauacuugaauccuu

SEQ ID NO: 410223 - RNA, 22 nt, Artificial Sequence
  Synthetic
gucaacuuauacuugaauccuu

SEQ ID NO: 410224 - RNA, 23 nt, Artificial Sequence
  Synthetic
ggucaacuuauacuugaauccuu

SEQ ID NO: 410225 - RNA, 24 nt, Artificial Sequence
  Synthetic
gggucaacuuauacuugaauccuu

SEQ ID NO: 410226 - RNA, 18 nt, Artificial Sequence
  Synthetic
cuguauucccuaauccuu

SEQ ID NO: 410227 - RNA, 19 nt, Artificial Sequence
  Synthetic
acuguauucccuaauccuu

SEQ ID NO: 410228 - RNA, 20 nt, Artificial Sequence
  Synthetic
uacuguauucccuaauccuu

SEQ ID NO: 410229 - RNA, 21 nt, Artificial Sequence
  Synthetic
cuacuguauucccuaauccuu

SEQ ID NO: 410230 - RNA, 22 nt, Artificial Sequence
  Synthetic
ucuacuguauucccuaauccuu

SEQ ID NO: 410231 - RNA, 23 nt, Artificial Sequence
  Synthetic
aucuacuguauucccuaauccuu

SEQ ID NO: 410232 - RNA, 24 nt, Artificial Sequence
  Synthetic
gaucuacuguauucccuaauccuu

SEQ ID NO: 410233 - RNA, 18 nt, Artificial Sequence
  Synthetic
uaaacauggaacauccuu

SEQ ID NO: 410234 - RNA, 19 nt, Artificial Sequence
  Synthetic
uuaaacauggaacauccuu

SEQ ID NO: 410235 - RNA, 20 nt, Artificial Sequence
  Synthetic
auuaaacauggaacauccuu

SEQ ID NO: 410236 - RNA, 21 nt, Artificial Sequence
  Synthetic
uauuaaacauggaacauccuu

SEQ ID NO: 410237 - RNA, 22 nt, Artificial Sequence
  Synthetic
cuauuaaacauggaacauccuu

SEQ ID NO: 410238 - RNA, 23 nt, Artificial Sequence
  Synthetic
acuauuaaacauggaacauccuu

SEQ ID NO: 410239 - RNA, 24 nt, Artificial Sequence
  Synthetic
gacuauuaaacauggaacauccuu

SEQ ID NO: 410240 - RNA, 18 nt, Artificial Sequence
  Synthetic
accagaauuggcauccuu

SEQ ID NO: 410241 - RNA, 19 nt, Artificial Sequence
  Synthetic
aaccagaauuggcauccuu

SEQ ID NO: 410242 - RNA, 20 nt, Artificial Sequence
  Synthetic
aaaccagaauuggcauccuu

SEQ ID NO: 410243 - RNA, 21 nt, Artificial Sequence
  Synthetic
aaaaccagaauuggcauccuu

SEQ ID NO: 410244 - RNA, 22 nt, Artificial Sequence
  Synthetic
uaaaaccagaauuggcauccuu

SEQ ID NO: 410245 - RNA, 23 nt, Artificial Sequence
  Synthetic
guaaaaccagaauuggcauccuu

SEQ ID NO: 410246 - RNA, 24 nt, Artificial Sequence
  Synthetic
uguaaaaccagaauuggcauccuu

SEQ ID NO: 410247 - RNA, 18 nt, Artificial Sequence
  Synthetic
ccaggaaggaucauccuu

SEQ ID NO: 410248 - RNA, 19 nt, Artificial Sequence
  Synthetic
accaggaaggaucauccuu

SEQ ID NO: 410249 - RNA, 20 nt, Artificial Sequence
  Synthetic
caccaggaaggaucauccuu

SEQ ID NO: 410250 - RNA, 21 nt, Artificial Sequence
  Synthetic
ccaccaggaaggaucauccuu

SEQ ID NO: 410251 - RNA, 22 nt, Artificial Sequence
  Synthetic
gccaccaggaaggaucauccuu

SEQ ID NO: 410252 - RNA, 23 nt, Artificial Sequence
  Synthetic
agccaccaggaaggaucauccuu

SEQ ID NO: 410253 - RNA, 24 nt, Artificial Sequence
  Synthetic
aagccaccaggaaggaucauccuu

SEQ ID NO: 410254 - RNA, 18 nt, Artificial Sequence
  Synthetic
uucuaguucuagauccuu

SEQ ID NO: 410255 - RNA, 19 nt, Artificial Sequence
  Synthetic
uuucuaguucuagauccuu

SEQ ID NO: 410256 - RNA, 20 nt, Artificial Sequence
  Synthetic
auuucuaguucuagauccuu

SEQ ID NO: 410257 - RNA, 21 nt, Artificial Sequence
  Synthetic
uauuucuaguucuagauccuu

SEQ ID NO: 410258 - RNA, 22 nt, Artificial Sequence
  Synthetic
guauuucuaguucuagauccuu

SEQ ID NO: 410259 - RNA, 23 nt, Artificial Sequence
  Synthetic
gguauuucuaguucuagauccuu

SEQ ID NO: 410260 - RNA, 24 nt, Artificial Sequence
  Synthetic
ugguauuucuaguucuagauccuu

SEQ ID NO: 410261 - RNA, 19 nt, Artificial Sequence
  Synthetic
uuucugguucuagauccuu

SEQ ID NO: 410262 - RNA, 20 nt, Artificial Sequence
  Synthetic
auuucugguucuagauccuu

SEQ ID NO: 410263 - RNA, 21 nt, Artificial Sequence
  Synthetic
uauuucugguucuagauccuu

SEQ ID NO: 410264 - RNA, 22 nt, Artificial Sequence
  Synthetic
guauuucugguucuagauccuu

SEQ ID NO: 410265 - RNA, 23 nt, Artificial Sequence
  Synthetic
gguauuucugguucuagauccuu

SEQ ID NO: 410266 - RNA, 24 nt, Artificial Sequence
  Synthetic
ugguauuucugguucuagauccuu

SEQ ID NO: 410267 - RNA, 18 nt, Artificial Sequence
  Synthetic
aguuucucuuagauccuu

SEQ ID NO: 410268 - RNA, 19 nt, Artificial Sequence
  Synthetic
aaguuucucuuagauccuu

SEQ ID NO: 410269 - RNA, 20 nt, Artificial Sequence
  Synthetic
uaaguuucucuuagauccuu

SEQ ID NO: 410270 - RNA, 21 nt, Artificial Sequence
  Synthetic
uuaaguuucucuuagauccuu

SEQ ID NO: 410271 - RNA, 22 nt, Artificial Sequence
  Synthetic
auuaaguuucucuuagauccuu

SEQ ID NO: 410272 - RNA, 23 nt, Artificial Sequence
  Synthetic
uauuaaguuucucuuagauccuu

SEQ ID NO: 410273 - RNA, 24 nt, Artificial Sequence
  Synthetic
cuauuaaguuucucuuagauccuu

SEQ ID NO: 410274 - RNA, 18 nt, Artificial Sequence
  Synthetic
gggguuggaaauauccuu

SEQ ID NO: 410275 - RNA, 19 nt, Artificial Sequence
  Synthetic
ugggguuggaaauauccuu

SEQ ID NO: 410276 - RNA, 20 nt, Artificial Sequence
  Synthetic
gugggguuggaaauauccuu

SEQ ID NO: 410277 - RNA, 21 nt, Artificial Sequence
  Synthetic
agugggguuggaaauauccuu

SEQ ID NO: 410278 - RNA, 22 nt, Artificial Sequence
  Synthetic
cagugggguuggaaauauccuu

SEQ ID NO: 410279 - RNA, 23 nt, Artificial Sequence
  Synthetic
gcagugggguuggaaauauccuu

SEQ ID NO: 410280 - RNA, 24 nt, Artificial Sequence
  Synthetic
ugcagugggguuggaaauauccuu

SEQ ID NO: 410281 - RNA, 18 nt, Artificial Sequence
  Synthetic
agcuguuuguauauccuu

SEQ ID NO: 410282 - RNA, 19 nt, Artificial Sequence
  Synthetic
cagcuguuuguauauccuu

SEQ ID NO: 410283 - RNA, 20 nt, Artificial Sequence
  Synthetic
ucagcuguuuguauauccuu

SEQ ID NO: 410284 - RNA, 21 nt, Artificial Sequence
  Synthetic
gucagcuguuuguauauccuu

SEQ ID NO: 410285 - RNA, 22 nt, Artificial Sequence
  Synthetic
ugucagcuguuuguauauccuu

SEQ ID NO: 410286 - RNA, 23 nt, Artificial Sequence
  Synthetic
uugucagcuguuuguauauccuu

SEQ ID NO: 410287 - RNA, 24 nt, Artificial Sequence
  Synthetic
auugucagcuguuuguauauccuu

SEQ ID NO: 410288 - RNA, 18 nt, Artificial Sequence
  Synthetic
uucugguucuguauccuu

SEQ ID NO: 410289 - RNA, 19 nt, Artificial Sequence
  Synthetic
uuucugguucuguauccuu

SEQ ID NO: 410290 - RNA, 20 nt, Artificial Sequence
  Synthetic
auuucugguucuguauccuu

SEQ ID NO: 410291 - RNA, 21 nt, Artificial Sequence
  Synthetic
uauuucugguucuguauccuu

SEQ ID NO: 410292 - RNA, 22 nt, Artificial Sequence
  Synthetic
guauuucugguucuguauccuu

SEQ ID NO: 410293 - RNA, 23 nt, Artificial Sequence
  Synthetic
gguauuucugguucuguauccuu

SEQ ID NO: 410294 - RNA, 24 nt, Artificial Sequence
  Synthetic
ugguauuucugguucuguauccuu

SEQ ID NO: 410295 - RNA, 18 nt, Artificial Sequence
  Synthetic
uauugucaaauuauccuu

SEQ ID NO: 410296 - RNA, 19 nt, Artificial Sequence
  Synthetic
guauugucaaauuauccuu

SEQ ID NO: 410297 - RNA, 20 nt, Artificial Sequence
  Synthetic
uguauugucaaauuauccuu

SEQ ID NO: 410298 - RNA, 21 nt, Artificial Sequence
  Synthetic
auguauugucaaauuauccuu

SEQ ID NO: 410299 - RNA, 22 nt, Artificial Sequence
  Synthetic
uauguauugucaaauuauccuu

SEQ ID NO: 410300 - RNA, 23 nt, Artificial Sequence
  Synthetic
uuauguauugucaaauuauccuu

SEQ ID NO: 410301 - RNA, 24 nt, Artificial Sequence
  Synthetic
uuuauguauugucaaauuauccuu

SEQ ID NO: 410302 - RNA, 18 nt, Artificial Sequence
  Synthetic
uauucuacuguuauccuu

SEQ ID NO: 410303 - RNA, 19 nt, Artificial Sequence
  Synthetic
uuauucuacuguuauccuu

SEQ ID NO: 410304 - RNA, 20 nt, Artificial Sequence
  Synthetic
uuuauucuacuguuauccuu

SEQ ID NO: 410305 - RNA, 21 nt, Artificial Sequence
  Synthetic
cuuuauucuacuguuauccuu

SEQ ID NO: 410306 - RNA, 22 nt, Artificial Sequence
  Synthetic
ucuuuauucuacuguuauccuu

SEQ ID NO: 410307 - RNA, 23 nt, Artificial Sequence
  Synthetic
uucuuuauucuacuguuauccuu

SEQ ID NO: 410308 - RNA, 24 nt, Artificial Sequence
  Synthetic
guucuuuauucuacuguuauccuu

SEQ ID NO: 410309 - RNA, 18 nt, Artificial Sequence
  Synthetic
aauuuucccaaacuccuu

SEQ ID NO: 410310 - RNA, 19 nt, Artificial Sequence
  Synthetic
uaauuuucccaaacuccuu

SEQ ID NO: 410311 - RNA, 20 nt, Artificial Sequence
  Synthetic
auaauuuucccaaacuccuu

SEQ ID NO: 410312 - RNA, 21 nt, Artificial Sequence
  Synthetic
aauaauuuucccaaacuccuu

SEQ ID NO: 410313 - RNA, 22 nt, Artificial Sequence
  Synthetic
aaauaauuuucccaaacuccuu

SEQ ID NO: 410314 - RNA, 23 nt, Artificial Sequence
  Synthetic
aaaauaauuuucccaaacuccuu

SEQ ID NO: 410315 - RNA, 24 nt, Artificial Sequence
  Synthetic
gaaaauaauuuucccaaacuccuu

SEQ ID NO: 410316 - RNA, 18 nt, Artificial Sequence
  Synthetic
uuccaauccaaacuccuu

SEQ ID NO: 410317 - RNA, 19 nt, Artificial Sequence
  Synthetic
auuccaauccaaacuccuu

SEQ ID NO: 410318 - RNA, 20 nt, Artificial Sequence
  Synthetic
aauuccaauccaaacuccuu

SEQ ID NO: 410319 - RNA, 21 nt, Artificial Sequence
  Synthetic
caauuccaauccaaacuccuu

SEQ ID NO: 410320 - RNA, 22 nt, Artificial Sequence
  Synthetic
ccaauuccaauccaaacuccuu

SEQ ID NO: 410321 - RNA, 23 nt, Artificial Sequence
  Synthetic
uccaauuccaauccaaacuccuu

SEQ ID NO: 410322 - RNA, 24 nt, Artificial Sequence
  Synthetic
uuccaauuccaauccaaacuccuu

SEQ ID NO: 410323 - RNA, 18 nt, Artificial Sequence
  Synthetic
gguugagauaaacuccuu

SEQ ID NO: 410324 - RNA, 19 nt, Artificial Sequence
  Synthetic
ugguugagauaaacuccuu

SEQ ID NO: 410325 - RNA, 20 nt, Artificial Sequence
  Synthetic
cugguugagauaaacuccuu

SEQ ID NO: 410326 - RNA, 21 nt, Artificial Sequence
  Synthetic
acugguugagauaaacuccuu

SEQ ID NO: 410327 - RNA, 22 nt, Artificial Sequence
  Synthetic
cacugguugagauaaacuccuu

SEQ ID NO: 410328 - RNA, 23 nt, Artificial Sequence
  Synthetic
ucacugguugagauaaacuccuu

SEQ ID NO: 410329 - RNA, 24 nt, Artificial Sequence
  Synthetic
uucacugguugagauaaacuccuu

SEQ ID NO: 410330 - RNA, 18 nt, Artificial Sequence
  Synthetic
uuugaauuuacacuccuu

SEQ ID NO: 410331 - RNA, 19 nt, Artificial Sequence
  Synthetic
uuuugaauuuacacuccuu

SEQ ID NO: 410332 - RNA, 20 nt, Artificial Sequence
  Synthetic
uuuuugaauuuacacuccuu

SEQ ID NO: 410333 - RNA, 21 nt, Artificial Sequence
  Synthetic
auuuuugaauuuacacuccuu

SEQ ID NO: 410334 - RNA, 22 nt, Artificial Sequence
  Synthetic
uauuuuugaauuuacacuccuu

SEQ ID NO: 410335 - RNA, 23 nt, Artificial Sequence
  Synthetic
guauuuuugaauuuacacuccuu

SEQ ID NO: 410336 - RNA, 24 nt, Artificial Sequence
  Synthetic
uguauuuuugaauuuacacuccuu

SEQ ID NO: 410337 - RNA, 18 nt, Artificial Sequence
  Synthetic
aaguccuccccacuccuu

SEQ ID NO: 410338 - RNA, 19 nt, Artificial Sequence
  Synthetic
gaaguccuccccacuccuu

SEQ ID NO: 410339 - RNA, 20 nt, Artificial Sequence
  Synthetic
ugaaguccuccccacuccuu

SEQ ID NO: 410340 - RNA, 21 nt, Artificial Sequence
  Synthetic
uugaaguccuccccacuccuu

SEQ ID NO: 410341 - RNA, 22 nt, Artificial Sequence
  Synthetic
uuugaaguccuccccacuccuu

SEQ ID NO: 410342 - RNA, 23 nt, Artificial Sequence
  Synthetic
uuuugaaguccuccccacuccuu

SEQ ID NO: 410343 - RNA, 24 nt, Artificial Sequence
  Synthetic
guuuugaaguccuccccacuccuu

SEQ ID NO: 410344 - RNA, 18 nt, Artificial Sequence
  Synthetic
accacaaagauacuccuu

SEQ ID NO: 410345 - RNA, 19 nt, Artificial Sequence
  Synthetic
caccacaaagauacuccuu

SEQ ID NO: 410346 - RNA, 20 nt, Artificial Sequence
  Synthetic
acaccacaaagauacuccuu

SEQ ID NO: 410347 - RNA, 21 nt, Artificial Sequence
  Synthetic
aacaccacaaagauacuccuu

SEQ ID NO: 410348 - RNA, 22 nt, Artificial Sequence
  Synthetic
gaacaccacaaagauacuccuu

SEQ ID NO: 410349 - RNA, 23 nt, Artificial Sequence
  Synthetic
agaacaccacaaagauacuccuu

SEQ ID NO: 410350 - RNA, 24 nt, Artificial Sequence
  Synthetic
gagaacaccacaaagauacuccuu

SEQ ID NO: 410351 - RNA, 18 nt, Artificial Sequence
  Synthetic
aguccuucacuacuccuu

SEQ ID NO: 410352 - RNA, 19 nt, Artificial Sequence
  Synthetic
caguccuucacuacuccuu

SEQ ID NO: 410353 - RNA, 20 nt, Artificial Sequence
  Synthetic
gcaguccuucacuacuccuu

SEQ ID NO: 410354 - RNA, 21 nt, Artificial Sequence
  Synthetic
agcaguccuucacuacuccuu

SEQ ID NO: 410355 - RNA, 22 nt, Artificial Sequence
  Synthetic
uagcaguccuucacuacuccuu

SEQ ID NO: 410356 - RNA, 23 nt, Artificial Sequence
  Synthetic
uuagcaguccuucacuacuccuu

SEQ ID NO: 410357 - RNA, 24 nt, Artificial Sequence
  Synthetic
cuuagcaguccuucacuacuccuu

SEQ ID NO: 410358 - RNA, 18 nt, Artificial Sequence
  Synthetic
auuuuuuucuuacuccuu

SEQ ID NO: 410359 - RNA, 19 nt, Artificial Sequence
  Synthetic
uauuuuuuucuuacuccuu

SEQ ID NO: 410360 - RNA, 20 nt, Artificial Sequence
  Synthetic
guauuuuuuucuuacuccuu

SEQ ID NO: 410361 - RNA, 21 nt, Artificial Sequence
  Synthetic
uguauuuuuuucuuacuccuu

SEQ ID NO: 410362 - RNA, 22 nt, Artificial Sequence
  Synthetic
auguauuuuuuucuuacuccuu

SEQ ID NO: 410363 - RNA, 23 nt, Artificial Sequence
  Synthetic
uauguauuuuuuucuuacuccuu

SEQ ID NO: 410364 - RNA, 24 nt, Artificial Sequence
  Synthetic
auauguauuuuuuucuuacuccuu

SEQ ID NO: 410365 - RNA, 18 nt, Artificial Sequence
  Synthetic
uuucauaaugcccuccuu

SEQ ID NO: 410366 - RNA, 19 nt, Artificial Sequence
  Synthetic
cuuucauaaugcccuccuu

SEQ ID NO: 410367 - RNA, 20 nt, Artificial Sequence
  Synthetic
ucuuucauaaugcccuccuu

SEQ ID NO: 410368 - RNA, 21 nt, Artificial Sequence
  Synthetic
aucuuucauaaugcccuccuu

SEQ ID NO: 410369 - RNA, 22 nt, Artificial Sequence
  Synthetic
uaucuuucauaaugcccuccuu

SEQ ID NO: 410370 - RNA, 23 nt, Artificial Sequence
  Synthetic
uuaucuuucauaaugcccuccuu

SEQ ID NO: 410371 - RNA, 24 nt, Artificial Sequence
  Synthetic
uuuaucuuucauaaugcccuccuu

SEQ ID NO: 410372 - RNA, 18 nt, Artificial Sequence
  Synthetic
uauuaguuugagcuccuu

SEQ ID NO: 410373 - RNA, 19 nt, Artificial Sequence
  Synthetic
uuauuaguuugagcuccuu

SEQ ID NO: 410374 - RNA, 20 nt, Artificial Sequence
  Synthetic
guuauuaguuugagcuccuu

SEQ ID NO: 410375 - RNA, 21 nt, Artificial Sequence
  Synthetic
gguuauuaguuugagcuccuu

SEQ ID NO: 410376 - RNA, 22 nt, Artificial Sequence
  Synthetic
ggguuauuaguuugagcuccuu

SEQ ID NO: 410377 - RNA, 23 nt, Artificial Sequence
  Synthetic
aggguuauuaguuugagcuccuu

SEQ ID NO: 410378 - RNA, 24 nt, Artificial Sequence
  Synthetic
uaggguuauuaguuugagcuccuu

SEQ ID NO: 410379 - RNA, 18 nt, Artificial Sequence
  Synthetic
cuagguugcaugcuccuu

SEQ ID NO: 410380 - RNA, 19 nt, Artificial Sequence
  Synthetic
ucuagguugcaugcuccuu

SEQ ID NO: 410381 - RNA, 20 nt, Artificial Sequence
  Synthetic
aucuagguugcaugcuccuu

SEQ ID NO: 410382 - RNA, 21 nt, Artificial Sequence
  Synthetic
gaucuagguugcaugcuccuu

SEQ ID NO: 410383 - RNA, 22 nt, Artificial Sequence
  Synthetic
ggaucuagguugcaugcuccuu

SEQ ID NO: 410384 - RNA, 23 nt, Artificial Sequence
  Synthetic
gggaucuagguugcaugcuccuu

SEQ ID NO: 410385 - RNA, 24 nt, Artificial Sequence
  Synthetic
agggaucuagguugcaugcuccuu

SEQ ID NO: 410386 - RNA, 18 nt, Artificial Sequence
  Synthetic
cuagguugugugcuccuu

SEQ ID NO: 410387 - RNA, 19 nt, Artificial Sequence
  Synthetic
ucuagguugugugcuccuu

SEQ ID NO: 410388 - RNA, 20 nt, Artificial Sequence
  Synthetic
aucuagguugugugcuccuu

SEQ ID NO: 410389 - RNA, 21 nt, Artificial Sequence
  Synthetic
gaucuagguugugugcuccuu

SEQ ID NO: 410390 - RNA, 22 nt, Artificial Sequence
  Synthetic
ggaucuagguugugugcuccuu

SEQ ID NO: 410391 - RNA, 23 nt, Artificial Sequence
  Synthetic
gggaucuagguugugugcuccuu

SEQ ID NO: 410392 - RNA, 24 nt, Artificial Sequence
  Synthetic
agggaucuagguugugugcuccuu

SEQ ID NO: 410393 - RNA, 18 nt, Artificial Sequence
  Synthetic
augggcuaaaaucuccuu

SEQ ID NO: 410394 - RNA, 19 nt, Artificial Sequence
  Synthetic
gaugggcuaaaaucuccuu

SEQ ID NO: 410395 - RNA, 20 nt, Artificial Sequence
  Synthetic
cgaugggcuaaaaucuccuu

SEQ ID NO: 410396 - RNA, 21 nt, Artificial Sequence
  Synthetic
ccgaugggcuaaaaucuccuu

SEQ ID NO: 410397 - RNA, 22 nt, Artificial Sequence
  Synthetic
gccgaugggcuaaaaucuccuu

SEQ ID NO: 410398 - RNA, 23 nt, Artificial Sequence
  Synthetic
ggccgaugggcuaaaaucuccuu

SEQ ID NO: 410399 - RNA, 24 nt, Artificial Sequence
  Synthetic
gggccgaugggcuaaaaucuccuu

SEQ ID NO: 410400 - RNA, 18 nt, Artificial Sequence
  Synthetic
gcuagcucccaaguccuu

SEQ ID NO: 410401 - RNA, 19 nt, Artificial Sequence
  Synthetic
ugcuagcucccaaguccuu

SEQ ID NO: 410402 - RNA, 20 nt, Artificial Sequence
  Synthetic
gugcuagcucccaaguccuu

SEQ ID NO: 410403 - RNA, 21 nt, Artificial Sequence
  Synthetic
agugcuagcucccaaguccuu

SEQ ID NO: 410404 - RNA, 22 nt, Artificial Sequence
  Synthetic
aagugcuagcucccaaguccuu

SEQ ID NO: 410405 - RNA, 23 nt, Artificial Sequence
  Synthetic
aaagugcuagcucccaaguccuu

SEQ ID NO: 410406 - RNA, 24 nt, Artificial Sequence
  Synthetic
caaagugcuagcucccaaguccuu

SEQ ID NO: 410407 - RNA, 18 nt, Artificial Sequence
  Synthetic
ggagaaggcacaguccuu

SEQ ID NO: 410408 - RNA, 19 nt, Artificial Sequence
  Synthetic
aggagaaggcacaguccuu

SEQ ID NO: 410409 - RNA, 20 nt, Artificial Sequence
  Synthetic
gaggagaaggcacaguccuu

SEQ ID NO: 410410 - RNA, 21 nt, Artificial Sequence
  Synthetic
agaggagaaggcacaguccuu

SEQ ID NO: 410411 - RNA, 22 nt, Artificial Sequence
  Synthetic
aagaggagaaggcacaguccuu

SEQ ID NO: 410412 - RNA, 23 nt, Artificial Sequence
  Synthetic
uaagaggagaaggcacaguccuu

SEQ ID NO: 410413 - RNA, 24 nt, Artificial Sequence
  Synthetic
cuaagaggagaaggcacaguccuu

SEQ ID NO: 410414 - RNA, 18 nt, Artificial Sequence
  Synthetic
cugcuaauguuaguccuu

SEQ ID NO: 410415 - RNA, 19 nt, Artificial Sequence
  Synthetic
ucugcuaauguuaguccuu

SEQ ID NO: 410416 - RNA, 20 nt, Artificial Sequence
  Synthetic
gucugcuaauguuaguccuu

SEQ ID NO: 410417 - RNA, 21 nt, Artificial Sequence
  Synthetic
ugucugcuaauguuaguccuu

SEQ ID NO: 410418 - RNA, 22 nt, Artificial Sequence
  Synthetic
cugucugcuaauguuaguccuu

SEQ ID NO: 410419 - RNA, 23 nt, Artificial Sequence
  Synthetic
gcugucugcuaauguuaguccuu

SEQ ID NO: 410420 - RNA, 24 nt, Artificial Sequence
  Synthetic
agcugucugcuaauguuaguccuu

SEQ ID NO: 410421 - RNA, 18 nt, Artificial Sequence
  Synthetic
ucaggaaauuguguccuu

SEQ ID NO: 410422 - RNA, 19 nt, Artificial Sequence
  Synthetic
cucaggaaauuguguccuu

SEQ ID NO: 410423 - RNA, 20 nt, Artificial Sequence
  Synthetic
ucucaggaaauuguguccuu

SEQ ID NO: 410424 - RNA, 21 nt, Artificial Sequence
  Synthetic
uucucaggaaauuguguccuu

SEQ ID NO: 410425 - RNA, 22 nt, Artificial Sequence
  Synthetic
uuucucaggaaauuguguccuu

SEQ ID NO: 410426 - RNA, 23 nt, Artificial Sequence
  Synthetic
uuuucucaggaaauuguguccuu

SEQ ID NO: 410427 - RNA, 24 nt, Artificial Sequence
  Synthetic
uuuuucucaggaaauuguguccuu

SEQ ID NO: 410428 - RNA, 18 nt, Artificial Sequence
  Synthetic
gagucugugguuguccuu

SEQ ID NO: 410429 - RNA, 19 nt, Artificial Sequence
  Synthetic
ugagucugugguuguccuu

SEQ ID NO: 410430 - RNA, 20 nt, Artificial Sequence
  Synthetic
cugagucugugguuguccuu

SEQ ID NO: 410431 - RNA, 21 nt, Artificial Sequence
  Synthetic
ccugagucugugguuguccuu

SEQ ID NO: 410432 - RNA, 22 nt, Artificial Sequence
  Synthetic
uccugagucugugguuguccuu

SEQ ID NO: 410433 - RNA, 23 nt, Artificial Sequence
  Synthetic
cuccugagucugugguuguccuu

SEQ ID NO: 410434 - RNA, 24 nt, Artificial Sequence
  Synthetic
gcuccugagucugugguuguccuu

SEQ ID NO: 410435 - RNA, 18 nt, Artificial Sequence
  Synthetic
gaacugguaccauuccuu

SEQ ID NO: 410436 - RNA, 19 nt, Artificial Sequence
  Synthetic
ggaacugguaccauuccuu

SEQ ID NO: 410437 - RNA, 20 nt, Artificial Sequence
  Synthetic
aggaacugguaccauuccuu

SEQ ID NO: 410438 - RNA, 18 nt, Artificial Sequence
  Synthetic
gagcugguaccauuccuu

SEQ ID NO: 410439 - RNA, 19 nt, Artificial Sequence
  Synthetic
ggagcugguaccauuccuu

SEQ ID NO: 410440 - RNA, 20 nt, Artificial Sequence
  Synthetic
aggagcugguaccauuccuu

SEQ ID NO: 410441 - RNA, 21 nt, Artificial Sequence
  Synthetic
gaggagcugguaccauuccuu

SEQ ID NO: 410442 - RNA, 22 nt, Artificial Sequence
  Synthetic
agaggagcugguaccauuccuu

SEQ ID NO: 410443 - RNA, 23 nt, Artificial Sequence
  Synthetic
aagaggagcugguaccauuccuu

SEQ ID NO: 410444 - RNA, 24 nt, Artificial Sequence
  Synthetic
aaagaggagcugguaccauuccuu

SEQ ID NO: 410445 - RNA, 18 nt, Artificial Sequence
  Synthetic
cucaaaccaucauuccuu

SEQ ID NO: 410446 - RNA, 19 nt, Artificial Sequence
  Synthetic
acucaaaccaucauuccuu

SEQ ID NO: 410447 - RNA, 20 nt, Artificial Sequence
  Synthetic
uacucaaaccaucauuccuu

SEQ ID NO: 410448 - RNA, 21 nt, Artificial Sequence
  Synthetic
uuacucaaaccaucauuccuu

SEQ ID NO: 410449 - RNA, 22 nt, Artificial Sequence
  Synthetic
auuacucaaaccaucauuccuu

SEQ ID NO: 410450 - RNA, 23 nt, Artificial Sequence
  Synthetic
gauuacucaaaccaucauuccuu

SEQ ID NO: 410451 - RNA, 24 nt, Artificial Sequence
  Synthetic
ggauuacucaaaccaucauuccuu

SEQ ID NO: 410452 - RNA, 18 nt, Artificial Sequence
  Synthetic
acuuaagcuugauuccuu

SEQ ID NO: 410453 - RNA, 19 nt, Artificial Sequence
  Synthetic
uacuuaagcuugauuccuu

SEQ ID NO: 410454 - RNA, 20 nt, Artificial Sequence
  Synthetic
cuacuuaagcuugauuccuu

SEQ ID NO: 410455 - RNA, 21 nt, Artificial Sequence
  Synthetic
acuacuuaagcuugauuccuu

SEQ ID NO: 410456 - RNA, 22 nt, Artificial Sequence
  Synthetic
gacuacuuaagcuugauuccuu

SEQ ID NO: 410457 - RNA, 23 nt, Artificial Sequence
  Synthetic
ggacuacuuaagcuugauuccuu

SEQ ID NO: 410458 - RNA, 24 nt, Artificial Sequence
  Synthetic
aggacuacuuaagcuugauuccuu

SEQ ID NO: 410459 - RNA, 18 nt, Artificial Sequence
  Synthetic
uuuuaaccacuauuccuu

SEQ ID NO: 410460 - RNA, 19 nt, Artificial Sequence
  Synthetic
uuuuuaaccacuauuccuu

SEQ ID NO: 410461 - RNA, 20 nt, Artificial Sequence
  Synthetic
auuuuuaaccacuauuccuu

SEQ ID NO: 410462 - RNA, 21 nt, Artificial Sequence
  Synthetic
uauuuuuaaccacuauuccuu

SEQ ID NO: 410463 - RNA, 22 nt, Artificial Sequence
  Synthetic
auauuuuuaaccacuauuccuu

SEQ ID NO: 410464 - RNA, 23 nt, Artificial Sequence
  Synthetic
uauauuuuuaaccacuauuccuu

SEQ ID NO: 410465 - RNA, 24 nt, Artificial Sequence
  Synthetic
auauauuuuuaaccacuauuccuu

SEQ ID NO: 410466 - RNA, 18 nt, Artificial Sequence
  Synthetic
aaggcuuuaaacuuccuu

SEQ ID NO: 410467 - RNA, 19 nt, Artificial Sequence
  Synthetic
caaggcuuuaaacuuccuu

SEQ ID NO: 410468 - RNA, 20 nt, Artificial Sequence
  Synthetic
ccaaggcuuuaaacuuccuu

SEQ ID NO: 410469 - RNA, 21 nt, Artificial Sequence
  Synthetic
uccaaggcuuuaaacuuccuu

SEQ ID NO: 410470 - RNA, 22 nt, Artificial Sequence
  Synthetic
cuccaaggcuuuaaacuuccuu

SEQ ID NO: 410471 - RNA, 23 nt, Artificial Sequence
  Synthetic
gcuccaaggcuuuaaacuuccuu

SEQ ID NO: 410472 - RNA, 24 nt, Artificial Sequence
  Synthetic
ggcuccaaggcuuuaaacuuccuu

SEQ ID NO: 410473 - RNA, 18 nt, Artificial Sequence
  Synthetic
cauguuuagcgcuuccuu

SEQ ID NO: 410474 - RNA, 19 nt, Artificial Sequence
  Synthetic
ccauguuuagcgcuuccuu

SEQ ID NO: 410475 - RNA, 20 nt, Artificial Sequence
  Synthetic
uccauguuuagcgcuuccuu

SEQ ID NO: 410476 - RNA, 21 nt, Artificial Sequence
  Synthetic
uuccauguuuagcgcuuccuu

SEQ ID NO: 410477 - RNA, 22 nt, Artificial Sequence
  Synthetic
uuuccauguuuagcgcuuccuu

SEQ ID NO: 410478 - RNA, 23 nt, Artificial Sequence
  Synthetic
cuuuccauguuuagcgcuuccuu

SEQ ID NO: 410479 - RNA, 24 nt, Artificial Sequence
  Synthetic
ccuuuccauguuuagcgcuuccuu

SEQ ID NO: 410480 - RNA, 18 nt, Artificial Sequence
  Synthetic
caggcucugaucuuccuu

SEQ ID NO: 410481 - RNA, 19 nt, Artificial Sequence
  Synthetic
ccaggcucugaucuuccuu

SEQ ID NO: 410482 - RNA, 20 nt, Artificial Sequence
  Synthetic
accaggcucugaucuuccuu

SEQ ID NO: 410483 - RNA, 21 nt, Artificial Sequence
  Synthetic
gaccaggcucugaucuuccuu

SEQ ID NO: 410484 - RNA, 22 nt, Artificial Sequence
  Synthetic
agaccaggcucugaucuuccuu

SEQ ID NO: 410485 - RNA, 23 nt, Artificial Sequence
  Synthetic
aagaccaggcucugaucuuccuu

SEQ ID NO: 410486 - RNA, 24 nt, Artificial Sequence
  Synthetic
aaagaccaggcucugaucuuccuu

SEQ ID NO: 410487 - RNA, 18 nt, Artificial Sequence
  Synthetic
uuuuugucacaguuccuu

SEQ ID NO: 410488 - RNA, 19 nt, Artificial Sequence
  Synthetic
cuuuuugucacaguuccuu

SEQ ID NO: 410489 - RNA, 20 nt, Artificial Sequence
  Synthetic
ucuuuuugucacaguuccuu

SEQ ID NO: 410490 - RNA, 21 nt, Artificial Sequence
  Synthetic
uucuuuuugucacaguuccuu

SEQ ID NO: 410491 - RNA, 22 nt, Artificial Sequence
  Synthetic
uuucuuuuugucacaguuccuu

SEQ ID NO: 410492 - RNA, 23 nt, Artificial Sequence
  Synthetic
uuuucuuuuugucacaguuccuu

SEQ ID NO: 410493 - RNA, 24 nt, Artificial Sequence
  Synthetic
uuuuucuuuuugucacaguuccuu

SEQ ID NO: 410494 - RNA, 18 nt, Artificial Sequence
  Synthetic
gcuagguuucaguuccuu

SEQ ID NO: 410495 - RNA, 19 nt, Artificial Sequence
  Synthetic
agcuagguuucaguuccuu

SEQ ID NO: 410496 - RNA, 20 nt, Artificial Sequence
  Synthetic
cagcuagguuucaguuccuu

SEQ ID NO: 410497 - RNA, 21 nt, Artificial Sequence
  Synthetic
ccagcuagguuucaguuccuu

SEQ ID NO: 410498 - RNA, 22 nt, Artificial Sequence
  Synthetic
accagcuagguuucaguuccuu

SEQ ID NO: 410499 - RNA, 23 nt, Artificial Sequence
  Synthetic
uaccagcuagguuucaguuccuu

SEQ ID NO: 410500 - RNA, 24 nt, Artificial Sequence
  Synthetic
guaccagcuagguuucaguuccuu

SEQ ID NO: 410501 - RNA, 18 nt, Artificial Sequence
  Synthetic
uaguuuugaggguuccuu

SEQ ID NO: 410502 - RNA, 19 nt, Artificial Sequence
  Synthetic
auaguuuugaggguuccuu

SEQ ID NO: 410503 - RNA, 20 nt, Artificial Sequence
  Synthetic
uauaguuuugaggguuccuu

SEQ ID NO: 410504 - RNA, 21 nt, Artificial Sequence
  Synthetic
guauaguuuugaggguuccuu

SEQ ID NO: 410505 - RNA, 22 nt, Artificial Sequence
  Synthetic
uguauaguuuugaggguuccuu

SEQ ID NO: 410506 - RNA, 23 nt, Artificial Sequence
  Synthetic
uuguauaguuuugaggguuccuu

SEQ ID NO: 410507 - RNA, 24 nt, Artificial Sequence
  Synthetic
uuuguauaguuuugaggguuccuu

SEQ ID NO: 410508 - RNA, 18 nt, Artificial Sequence
  Synthetic
caggaggguugguuccuu

SEQ ID NO: 410509 - RNA, 19 nt, Artificial Sequence
  Synthetic
ucaggaggguugguuccuu

SEQ ID NO: 410510 - RNA, 20 nt, Artificial Sequence
  Synthetic
gucaggaggguugguuccuu

SEQ ID NO: 410511 - RNA, 21 nt, Artificial Sequence
  Synthetic
ugucaggaggguugguuccuu

SEQ ID NO: 410512 - RNA, 22 nt, Artificial Sequence
  Synthetic
gugucaggaggguugguuccuu

SEQ ID NO: 410513 - RNA, 23 nt, Artificial Sequence
  Synthetic
ggugucaggaggguugguuccuu

SEQ ID NO: 410514 - RNA, 24 nt, Artificial Sequence
  Synthetic
aggugucaggaggguugguuccuu

SEQ ID NO: 410515 - RNA, 18 nt, Artificial Sequence
  Synthetic
aagaaguaaaauuuccuu

SEQ ID NO: 410516 - RNA, 19 nt, Artificial Sequence
  Synthetic
gaagaaguaaaauuuccuu

SEQ ID NO: 410517 - RNA, 20 nt, Artificial Sequence
  Synthetic
agaagaaguaaaauuuccuu

SEQ ID NO: 410518 - RNA, 21 nt, Artificial Sequence
  Synthetic
uagaagaaguaaaauuuccuu

SEQ ID NO: 410519 - RNA, 22 nt, Artificial Sequence
  Synthetic
auagaagaaguaaaauuuccuu

SEQ ID NO: 410520 - RNA, 23 nt, Artificial Sequence
  Synthetic
cauagaagaaguaaaauuuccuu

SEQ ID NO: 410521 - RNA, 24 nt, Artificial Sequence
  Synthetic
ucauagaagaaguaaaauuuccuu

SEQ ID NO: 410522 - RNA, 18 nt, Artificial Sequence
  Synthetic
gugaauaggaauuuccuu

SEQ ID NO: 410523 - RNA, 19 nt, Artificial Sequence
  Synthetic
agugaauaggaauuuccuu

SEQ ID NO: 410524 - RNA, 20 nt, Artificial Sequence
  Synthetic
gagugaauaggaauuuccuu

SEQ ID NO: 410525 - RNA, 21 nt, Artificial Sequence
  Synthetic
ugagugaauaggaauuuccuu

SEQ ID NO: 410526 - RNA, 22 nt, Artificial Sequence
  Synthetic
gugagugaauaggaauuuccuu

SEQ ID NO: 410527 - RNA, 23 nt, Artificial Sequence
  Synthetic
agugagugaauaggaauuuccuu

SEQ ID NO: 410528 - RNA, 24 nt, Artificial Sequence
  Synthetic
aagugagugaauaggaauuuccuu

SEQ ID NO: 410529 - RNA, 18 nt, Artificial Sequence
  Synthetic
ucacaucaacauuuccuu

SEQ ID NO: 410530 - RNA, 19 nt, Artificial Sequence
  Synthetic
cucacaucaacauuuccuu

SEQ ID NO: 410531 - RNA, 20 nt, Artificial Sequence
  Synthetic
ucucacaucaacauuuccuu

SEQ ID NO: 410532 - RNA, 21 nt, Artificial Sequence
  Synthetic
uucucacaucaacauuuccuu

SEQ ID NO: 410533 - RNA, 22 nt, Artificial Sequence
  Synthetic
cuucucacaucaacauuuccuu

SEQ ID NO: 410534 - RNA, 23 nt, Artificial Sequence
  Synthetic
ucuucucacaucaacauuuccuu

SEQ ID NO: 410535 - RNA, 24 nt, Artificial Sequence
  Synthetic
aucuucucacaucaacauuuccuu

SEQ ID NO: 410536 - RNA, 18 nt, Artificial Sequence
  Synthetic
agaauuuauuauuuccuu

SEQ ID NO: 410537 - RNA, 19 nt, Artificial Sequence
  Synthetic
cagaauuuauuauuuccuu

SEQ ID NO: 410538 - RNA, 20 nt, Artificial Sequence
  Synthetic
ucagaauuuauuauuuccuu

SEQ ID NO: 410539 - RNA, 21 nt, Artificial Sequence
  Synthetic
cucagaauuuauuauuuccuu

SEQ ID NO: 410540 - RNA, 22 nt, Artificial Sequence
  Synthetic
ccucagaauuuauuauuuccuu

SEQ ID NO: 410541 - RNA, 23 nt, Artificial Sequence
  Synthetic
accucagaauuuauuauuuccuu

SEQ ID NO: 410542 - RNA, 24 nt, Artificial Sequence
  Synthetic
aaccucagaauuuauuauuuccuu

SEQ ID NO: 410543 - RNA, 18 nt, Artificial Sequence
  Synthetic
gcauugauguguuuccuu

SEQ ID NO: 410544 - RNA, 19 nt, Artificial Sequence
  Synthetic
ugcauugauguguuuccuu

SEQ ID NO: 410545 - RNA, 20 nt, Artificial Sequence
  Synthetic
uugcauugauguguuuccuu

SEQ ID NO: 410546 - RNA, 21 nt, Artificial Sequence
  Synthetic
cuugcauugauguguuuccuu

SEQ ID NO: 410547 - RNA, 22 nt, Artificial Sequence
  Synthetic
gcuugcauugauguguuuccuu

SEQ ID NO: 410548 - RNA, 23 nt, Artificial Sequence
  Synthetic
ugcuugcauugauguguuuccuu

SEQ ID NO: 410549 - RNA, 24 nt, Artificial Sequence
  Synthetic
cugcuugcauugauguguuuccuu

SEQ ID NO: 410550 - RNA, 18 nt, Artificial Sequence
  Synthetic
ccacacuuauuuuuccuu

SEQ ID NO: 410551 - RNA, 19 nt, Artificial Sequence
  Synthetic
cccacacuuauuuuuccuu

SEQ ID NO: 410552 - RNA, 20 nt, Artificial Sequence
  Synthetic
ucccacacuuauuuuuccuu

SEQ ID NO: 410553 - RNA, 21 nt, Artificial Sequence
  Synthetic
uucccacacuuauuuuuccuu

SEQ ID NO: 410554 - RNA, 22 nt, Artificial Sequence
  Synthetic
auucccacacuuauuuuuccuu

SEQ ID NO: 410555 - RNA, 23 nt, Artificial Sequence
  Synthetic
uauucccacacuuauuuuuccuu

SEQ ID NO: 410556 - RNA, 24 nt, Artificial Sequence
  Synthetic
uuauucccacacuuauuuuuccuu

SEQ ID NO: 410557 - RNA, 18 nt, Artificial Sequence
  Synthetic
auaaacuguuuuuuccuu

SEQ ID NO: 410558 - RNA, 19 nt, Artificial Sequence
  Synthetic
gauaaacuguuuuuuccuu

SEQ ID NO: 410559 - RNA, 20 nt, Artificial Sequence
  Synthetic
ggauaaacuguuuuuuccuu

SEQ ID NO: 410560 - RNA, 21 nt, Artificial Sequence
  Synthetic
aggauaaacuguuuuuuccuu

SEQ ID NO: 410561 - RNA, 22 nt, Artificial Sequence
  Synthetic
aaggauaaacuguuuuuuccuu

SEQ ID NO: 410562 - RNA, 23 nt, Artificial Sequence
  Synthetic
uaaggauaaacuguuuuuuccuu

SEQ ID NO: 410563 - RNA, 24 nt, Artificial Sequence
  Synthetic
uuaaggauaaacuguuuuuuccuu

SEQ ID NO: 410564 - RNA, 18 nt, Artificial Sequence
  Synthetic
aguaaucucaaaaagcuu

SEQ ID NO: 410565 - RNA, 19 nt, Artificial Sequence
  Synthetic
caguaaucucaaaaagcuu

SEQ ID NO: 410566 - RNA, 20 nt, Artificial Sequence
  Synthetic
acaguaaucucaaaaagcuu

SEQ ID NO: 410567 - RNA, 21 nt, Artificial Sequence
  Synthetic
cacaguaaucucaaaaagcuu

SEQ ID NO: 410568 - RNA, 22 nt, Artificial Sequence
  Synthetic
ucacaguaaucucaaaaagcuu

SEQ ID NO: 410569 - RNA, 23 nt, Artificial Sequence
  Synthetic
uucacaguaaucucaaaaagcuu

SEQ ID NO: 410570 - RNA, 24 nt, Artificial Sequence
  Synthetic
uuucacaguaaucucaaaaagcuu

SEQ ID NO: 410571 - RNA, 18 nt, Artificial Sequence
  Synthetic
caaacucaguaaaagcuu

SEQ ID NO: 410572 - RNA, 19 nt, Artificial Sequence
  Synthetic
gcaaacucaguaaaagcuu

SEQ ID NO: 410573 - RNA, 20 nt, Artificial Sequence
  Synthetic
ugcaaacucaguaaaagcuu

SEQ ID NO: 410574 - RNA, 21 nt, Artificial Sequence
  Synthetic
gugcaaacucaguaaaagcuu

SEQ ID NO: 410575 - RNA, 22 nt, Artificial Sequence
  Synthetic
agugcaaacucaguaaaagcuu

SEQ ID NO: 410576 - RNA, 23 nt, Artificial Sequence
  Synthetic
uagugcaaacucaguaaaagcuu

SEQ ID NO: 410577 - RNA, 24 nt, Artificial Sequence
  Synthetic
auagugcaaacucaguaaaagcuu

SEQ ID NO: 410578 - RNA, 18 nt, Artificial Sequence
  Synthetic
agaaaaagagcaaagcuu

SEQ ID NO: 410579 - RNA, 19 nt, Artificial Sequence
  Synthetic
cagaaaaagagcaaagcuu

SEQ ID NO: 410580 - RNA, 20 nt, Artificial Sequence
  Synthetic
acagaaaaagagcaaagcuu

SEQ ID NO: 410581 - RNA, 21 nt, Artificial Sequence
  Synthetic
gacagaaaaagagcaaagcuu

SEQ ID NO: 410582 - RNA, 22 nt, Artificial Sequence
  Synthetic
ugacagaaaaagagcaaagcuu

SEQ ID NO: 410583 - RNA, 23 nt, Artificial Sequence
  Synthetic
augacagaaaaagagcaaagcuu

SEQ ID NO: 410584 - RNA, 24 nt, Artificial Sequence
  Synthetic
gaugacagaaaaagagcaaagcuu

SEQ ID NO: 410585 - RNA, 18 nt, Artificial Sequence
  Synthetic
uauuugaaaagaaagcuu

SEQ ID NO: 410586 - RNA, 19 nt, Artificial Sequence
  Synthetic
uuauuugaaaagaaagcuu

SEQ ID NO: 410587 - RNA, 20 nt, Artificial Sequence
  Synthetic
cuuauuugaaaagaaagcuu

SEQ ID NO: 410588 - RNA, 21 nt, Artificial Sequence
  Synthetic
ccuuauuugaaaagaaagcuu

SEQ ID NO: 410589 - RNA, 22 nt, Artificial Sequence
  Synthetic
accuuauuugaaaagaaagcuu

SEQ ID NO: 410590 - RNA, 23 nt, Artificial Sequence
  Synthetic
aaccuuauuugaaaagaaagcuu

SEQ ID NO: 410591 - RNA, 24 nt, Artificial Sequence
  Synthetic
aaaccuuauuugaaaagaaagcuu

SEQ ID NO: 410592 - RNA, 18 nt, Artificial Sequence
  Synthetic
ggugggaagggaaagcuu

SEQ ID NO: 410593 - RNA, 19 nt, Artificial Sequence
  Synthetic
uggugggaagggaaagcuu

SEQ ID NO: 410594 - RNA, 20 nt, Artificial Sequence
  Synthetic
cuggugggaagggaaagcuu

SEQ ID NO: 410595 - RNA, 21 nt, Artificial Sequence
  Synthetic
ccuggugggaagggaaagcuu

SEQ ID NO: 410596 - RNA, 22 nt, Artificial Sequence
  Synthetic
uccuggugggaagggaaagcuu

SEQ ID NO: 410597 - RNA, 23 nt, Artificial Sequence
  Synthetic
cuccuggugggaagggaaagcuu

SEQ ID NO: 410598 - RNA, 24 nt, Artificial Sequence
  Synthetic
acuccuggugggaagggaaagcuu

SEQ ID NO: 410599 - RNA, 18 nt, Artificial Sequence
  Synthetic
gaaguuauacuaaagcuu

SEQ ID NO: 410600 - RNA, 19 nt, Artificial Sequence
  Synthetic
ugaaguuauacuaaagcuu

SEQ ID NO: 410601 - RNA, 20 nt, Artificial Sequence
  Synthetic
uugaaguuauacuaaagcuu

SEQ ID NO: 410602 - RNA, 21 nt, Artificial Sequence
  Synthetic
uuugaaguuauacuaaagcuu

SEQ ID NO: 410603 - RNA, 22 nt, Artificial Sequence
  Synthetic
cuuugaaguuauacuaaagcuu

SEQ ID NO: 410604 - RNA, 23 nt, Artificial Sequence
  Synthetic
ucuuugaaguuauacuaaagcuu

SEQ ID NO: 410605 - RNA, 24 nt, Artificial Sequence
  Synthetic
aucuuugaaguuauacuaaagcuu

SEQ ID NO: 410606 - RNA, 18 nt, Artificial Sequence
  Synthetic
uauuuuaaauccaagcuu

SEQ ID NO: 410607 - RNA, 19 nt, Artificial Sequence
  Synthetic
auauuuuaaauccaagcuu

SEQ ID NO: 410608 - RNA, 20 nt, Artificial Sequence
  Synthetic
uauauuuuaaauccaagcuu

SEQ ID NO: 410609 - RNA, 21 nt, Artificial Sequence
  Synthetic
uuauauuuuaaauccaagcuu

SEQ ID NO: 410610 - RNA, 22 nt, Artificial Sequence
  Synthetic
guuauauuuuaaauccaagcuu

SEQ ID NO: 410611 - RNA, 23 nt, Artificial Sequence
  Synthetic
uguuauauuuuaaauccaagcuu

SEQ ID NO: 410612 - RNA, 24 nt, Artificial Sequence
  Synthetic
cuguuauauuuuaaauccaagcuu

SEQ ID NO: 410613 - RNA, 18 nt, Artificial Sequence
  Synthetic
gaaugaccuggcaagcuu

SEQ ID NO: 410614 - RNA, 19 nt, Artificial Sequence
  Synthetic
agaaugaccuggcaagcuu

SEQ ID NO: 410615 - RNA, 20 nt, Artificial Sequence
  Synthetic
aagaaugaccuggcaagcuu

SEQ ID NO: 410616 - RNA, 21 nt, Artificial Sequence
  Synthetic
uaagaaugaccuggcaagcuu

SEQ ID NO: 410617 - RNA, 22 nt, Artificial Sequence
  Synthetic
uuaagaaugaccuggcaagcuu

SEQ ID NO: 410618 - RNA, 23 nt, Artificial Sequence
  Synthetic
cuuaagaaugaccuggcaagcuu

SEQ ID NO: 410619 - RNA, 24 nt, Artificial Sequence
  Synthetic
gcuuaagaaugaccuggcaagcuu

SEQ ID NO: 410620 - RNA, 18 nt, Artificial Sequence
  Synthetic
uauuuccaaaucaagcuu

SEQ ID NO: 410621 - RNA, 19 nt, Artificial Sequence
  Synthetic
uuauuuccaaaucaagcuu

SEQ ID NO: 410622 - RNA, 20 nt, Artificial Sequence
  Synthetic
auuauuuccaaaucaagcuu

SEQ ID NO: 410623 - RNA, 21 nt, Artificial Sequence
  Synthetic
gauuauuuccaaaucaagcuu

SEQ ID NO: 410624 - RNA, 22 nt, Artificial Sequence
  Synthetic
ggauuauuuccaaaucaagcuu

SEQ ID NO: 410625 - RNA, 23 nt, Artificial Sequence
  Synthetic
gggauuauuuccaaaucaagcuu

SEQ ID NO: 410626 - RNA, 24 nt, Artificial Sequence
  Synthetic
ugggauuauuuccaaaucaagcuu

SEQ ID NO: 410627 - RNA, 18 nt, Artificial Sequence
  Synthetic
cuacagcuguucaagcuu

SEQ ID NO: 410628 - RNA, 19 nt, Artificial Sequence
  Synthetic
gcuacagcuguucaagcuu

SEQ ID NO: 410629 - RNA, 20 nt, Artificial Sequence
  Synthetic
ggcuacagcuguucaagcuu

SEQ ID NO: 410630 - RNA, 21 nt, Artificial Sequence
  Synthetic
aggcuacagcuguucaagcuu

SEQ ID NO: 410631 - RNA, 22 nt, Artificial Sequence
  Synthetic
gaggcuacagcuguucaagcuu

SEQ ID NO: 410632 - RNA, 23 nt, Artificial Sequence
  Synthetic
ugaggcuacagcuguucaagcuu

SEQ ID NO: 410633 - RNA, 24 nt, Artificial Sequence
  Synthetic
cugaggcuacagcuguucaagcuu

SEQ ID NO: 410634 - RNA, 18 nt, Artificial Sequence
  Synthetic
ggugucccugagaagcuu

SEQ ID NO: 410635 - RNA, 19 nt, Artificial Sequence
  Synthetic
uggugucccugagaagcuu

SEQ ID NO: 410636 - RNA, 20 nt, Artificial Sequence
  Synthetic
uuggugucccugagaagcuu

SEQ ID NO: 410637 - RNA, 21 nt, Artificial Sequence
  Synthetic
cuuggugucccugagaagcuu

SEQ ID NO: 410638 - RNA, 22 nt, Artificial Sequence
  Synthetic
ucuuggugucccugagaagcuu

SEQ ID NO: 410639 - RNA, 23 nt, Artificial Sequence
  Synthetic
cucuuggugucccugagaagcuu

SEQ ID NO: 410640 - RNA, 24 nt, Artificial Sequence
  Synthetic
acucuuggugucccugagaagcuu

SEQ ID NO: 410641 - RNA, 18 nt, Artificial Sequence
  Synthetic
caaacauaugggaagcuu

SEQ ID NO: 410642 - RNA, 19 nt, Artificial Sequence
  Synthetic
ccaaacauaugggaagcuu

SEQ ID NO: 410643 - RNA, 20 nt, Artificial Sequence
  Synthetic
accaaacauaugggaagcuu

SEQ ID NO: 410644 - RNA, 21 nt, Artificial Sequence
  Synthetic
gaccaaacauaugggaagcuu

SEQ ID NO: 410645 - RNA, 22 nt, Artificial Sequence
  Synthetic
ugaccaaacauaugggaagcuu

SEQ ID NO: 410646 - RNA, 23 nt, Artificial Sequence
  Synthetic
uugaccaaacauaugggaagcuu

SEQ ID NO: 410647 - RNA, 24 nt, Artificial Sequence
  Synthetic
auugaccaaacauaugggaagcuu

SEQ ID NO: 410648 - RNA, 18 nt, Artificial Sequence
  Synthetic
gauuccuaccugaagcuu

SEQ ID NO: 410649 - RNA, 19 nt, Artificial Sequence
  Synthetic
ggauuccuaccugaagcuu

SEQ ID NO: 410650 - RNA, 20 nt, Artificial Sequence
  Synthetic
aggauuccuaccugaagcuu

SEQ ID NO: 410651 - RNA, 21 nt, Artificial Sequence
  Synthetic
caggauuccuaccugaagcuu

SEQ ID NO: 410652 - RNA, 22 nt, Artificial Sequence
  Synthetic
gcaggauuccuaccugaagcuu

SEQ ID NO: 410653 - RNA, 23 nt, Artificial Sequence
  Synthetic
ugcaggauuccuaccugaagcuu

SEQ ID NO: 410654 - RNA, 24 nt, Artificial Sequence
  Synthetic
cugcaggauuccuaccugaagcuu

SEQ ID NO: 410655 - RNA, 18 nt, Artificial Sequence
  Synthetic
uuugaaacucugaagcuu

SEQ ID NO: 410656 - RNA, 19 nt, Artificial Sequence
  Synthetic
guuugaaacucugaagcuu

SEQ ID NO: 410657 - RNA, 20 nt, Artificial Sequence
  Synthetic
gguuugaaacucugaagcuu

SEQ ID NO: 410658 - RNA, 21 nt, Artificial Sequence
  Synthetic
ggguuugaaacucugaagcuu

SEQ ID NO: 410659 - RNA, 22 nt, Artificial Sequence
  Synthetic
uggguuugaaacucugaagcuu

SEQ ID NO: 410660 - RNA, 23 nt, Artificial Sequence
  Synthetic
cuggguuugaaacucugaagcuu

SEQ ID NO: 410661 - RNA, 24 nt, Artificial Sequence
  Synthetic
acuggguuugaaacucugaagcuu

SEQ ID NO: 410662 - RNA, 18 nt, Artificial Sequence
  Synthetic
uaaggaaagacacagcuu

SEQ ID NO: 410663 - RNA, 19 nt, Artificial Sequence
  Synthetic
cuaaggaaagacacagcuu

SEQ ID NO: 410664 - RNA, 20 nt, Artificial Sequence
  Synthetic
acuaaggaaagacacagcuu

SEQ ID NO: 410665 - RNA, 21 nt, Artificial Sequence
  Synthetic
uacuaaggaaagacacagcuu

SEQ ID NO: 410666 - RNA, 22 nt, Artificial Sequence
  Synthetic
auacuaaggaaagacacagcuu

SEQ ID NO: 410667 - RNA, 23 nt, Artificial Sequence
  Synthetic
cauacuaaggaaagacacagcuu

SEQ ID NO: 410668 - RNA, 24 nt, Artificial Sequence
  Synthetic
gcauacuaaggaaagacacagcuu

SEQ ID NO: 410669 - RNA, 18 nt, Artificial Sequence
  Synthetic
gcugccugcauacagcuu

SEQ ID NO: 410670 - RNA, 19 nt, Artificial Sequence
  Synthetic
ugcugccugcauacagcuu

SEQ ID NO: 410671 - RNA, 20 nt, Artificial Sequence
  Synthetic
uugcugccugcauacagcuu

SEQ ID NO: 410672 - RNA, 21 nt, Artificial Sequence
  Synthetic
uuugcugccugcauacagcuu

SEQ ID NO: 410673 - RNA, 22 nt, Artificial Sequence
  Synthetic
auuugcugccugcauacagcuu

SEQ ID NO: 410674 - RNA, 23 nt, Artificial Sequence
  Synthetic
aauuugcugccugcauacagcuu

SEQ ID NO: 410675 - RNA, 24 nt, Artificial Sequence
  Synthetic
caauuugcugccugcauacagcuu

SEQ ID NO: 410676 - RNA, 18 nt, Artificial Sequence
  Synthetic
ccucccaacuaccagcuu

SEQ ID NO: 410677 - RNA, 19 nt, Artificial Sequence
  Synthetic
gccucccaacuaccagcuu

SEQ ID NO: 410678 - RNA, 20 nt, Artificial Sequence
  Synthetic
agccucccaacuaccagcuu

SEQ ID NO: 410679 - RNA, 21 nt, Artificial Sequence
  Synthetic
gagccucccaacuaccagcuu

SEQ ID NO: 410680 - RNA, 22 nt, Artificial Sequence
  Synthetic
ugagccucccaacuaccagcuu

SEQ ID NO: 410681 - RNA, 23 nt, Artificial Sequence
  Synthetic
gugagccucccaacuaccagcuu

SEQ ID NO: 410682 - RNA, 24 nt, Artificial Sequence
  Synthetic
ugugagccucccaacuaccagcuu

SEQ ID NO: 410683 - RNA, 18 nt, Artificial Sequence
  Synthetic
ucuuagaugagccagcuu

SEQ ID NO: 410684 - RNA, 19 nt, Artificial Sequence
  Synthetic
gucuuagaugagccagcuu

SEQ ID NO: 410685 - RNA, 20 nt, Artificial Sequence
  Synthetic
ggucuuagaugagccagcuu

SEQ ID NO: 410686 - RNA, 21 nt, Artificial Sequence
  Synthetic
aggucuuagaugagccagcuu

SEQ ID NO: 410687 - RNA, 22 nt, Artificial Sequence
  Synthetic
gaggucuuagaugagccagcuu

SEQ ID NO: 410688 - RNA, 23 nt, Artificial Sequence
  Synthetic
agaggucuuagaugagccagcuu

SEQ ID NO: 410689 - RNA, 24 nt, Artificial Sequence
  Synthetic
gagaggucuuagaugagccagcuu

SEQ ID NO: 410690 - RNA, 18 nt, Artificial Sequence
  Synthetic
acuacagcaugccagcuu

SEQ ID NO: 410691 - RNA, 19 nt, Artificial Sequence
  Synthetic
cacuacagcaugccagcuu

SEQ ID NO: 410692 - RNA, 20 nt, Artificial Sequence
  Synthetic
ccacuacagcaugccagcuu

SEQ ID NO: 410693 - RNA, 21 nt, Artificial Sequence
  Synthetic
uccacuacagcaugccagcuu

SEQ ID NO: 410694 - RNA, 22 nt, Artificial Sequence
  Synthetic
cuccacuacagcaugccagcuu

SEQ ID NO: 410695 - RNA, 23 nt, Artificial Sequence
  Synthetic
ucuccacuacagcaugccagcuu

SEQ ID NO: 410696 - RNA, 24 nt, Artificial Sequence
  Synthetic
aucuccacuacagcaugccagcuu

SEQ ID NO: 410697 - RNA, 18 nt, Artificial Sequence
  Synthetic
ucucuguucguccagcuu

SEQ ID NO: 410698 - RNA, 19 nt, Artificial Sequence
  Synthetic
uucucuguucguccagcuu

SEQ ID NO: 410699 - RNA, 20 nt, Artificial Sequence
  Synthetic
cuucucuguucguccagcuu

SEQ ID NO: 410700 - RNA, 21 nt, Artificial Sequence
  Synthetic
gcuucucuguucguccagcuu

SEQ ID NO: 410701 - RNA, 22 nt, Artificial Sequence
  Synthetic
agcuucucuguucguccagcuu

SEQ ID NO: 410702 - RNA, 23 nt, Artificial Sequence
  Synthetic
gagcuucucuguucguccagcuu

SEQ ID NO: 410703 - RNA, 24 nt, Artificial Sequence
  Synthetic
ugagcuucucuguucguccagcuu

SEQ ID NO: 410704 - RNA, 18 nt, Artificial Sequence
  Synthetic
cuuacggacaggcagcuu

SEQ ID NO: 410705 - RNA, 19 nt, Artificial Sequence
  Synthetic
ucuuacggacaggcagcuu

SEQ ID NO: 410706 - RNA, 20 nt, Artificial Sequence
  Synthetic
uucuuacggacaggcagcuu

SEQ ID NO: 410707 - RNA, 21 nt, Artificial Sequence
  Synthetic
auucuuacggacaggcagcuu

SEQ ID NO: 410708 - RNA, 22 nt, Artificial Sequence
  Synthetic
gauucuuacggacaggcagcuu

SEQ ID NO: 410709 - RNA, 23 nt, Artificial Sequence
  Synthetic
ugauucuuacggacaggcagcuu

SEQ ID NO: 410710 - RNA, 24 nt, Artificial Sequence
  Synthetic
gugauucuuacggacaggcagcuu

SEQ ID NO: 410711 - RNA, 18 nt, Artificial Sequence
  Synthetic
gcacgcacguugcagcuu

SEQ ID NO: 410712 - RNA, 19 nt, Artificial Sequence
  Synthetic
ugcacgcacguugcagcuu

SEQ ID NO: 410713 - RNA, 20 nt, Artificial Sequence
  Synthetic
cugcacgcacguugcagcuu

SEQ ID NO: 410714 - RNA, 21 nt, Artificial Sequence
  Synthetic
ucugcacgcacguugcagcuu

SEQ ID NO: 410715 - RNA, 22 nt, Artificial Sequence
  Synthetic
aucugcacgcacguugcagcuu

SEQ ID NO: 410716 - RNA, 23 nt, Artificial Sequence
  Synthetic
gaucugcacgcacguugcagcuu

SEQ ID NO: 410717 - RNA, 24 nt, Artificial Sequence
  Synthetic
ggaucugcacgcacguugcagcuu

SEQ ID NO: 410718 - RNA, 18 nt, Artificial Sequence
  Synthetic
gaaguugcuuaucagcuu

SEQ ID NO: 410719 - RNA, 19 nt, Artificial Sequence
  Synthetic
ugaaguugcuuaucagcuu

SEQ ID NO: 410720 - RNA, 20 nt, Artificial Sequence
  Synthetic
cugaaguugcuuaucagcuu

SEQ ID NO: 410721 - RNA, 21 nt, Artificial Sequence
  Synthetic
gcugaaguugcuuaucagcuu

SEQ ID NO: 410722 - RNA, 22 nt, Artificial Sequence
  Synthetic
ugcugaaguugcuuaucagcuu

SEQ ID NO: 410723 - RNA, 23 nt, Artificial Sequence
  Synthetic
uugcugaaguugcuuaucagcuu

SEQ ID NO: 410724 - RNA, 24 nt, Artificial Sequence
  Synthetic
uuugcugaaguugcuuaucagcuu

SEQ ID NO: 410725 - RNA, 18 nt, Artificial Sequence
  Synthetic
ccagcaucuacucagcuu

SEQ ID NO: 410726 - RNA, 19 nt, Artificial Sequence
  Synthetic
accagcaucuacucagcuu

SEQ ID NO: 410727 - RNA, 20 nt, Artificial Sequence
  Synthetic
caccagcaucuacucagcuu

SEQ ID NO: 410728 - RNA, 21 nt, Artificial Sequence
  Synthetic
acaccagcaucuacucagcuu

SEQ ID NO: 410729 - RNA, 22 nt, Artificial Sequence
  Synthetic
gacaccagcaucuacucagcuu

SEQ ID NO: 410730 - RNA, 23 nt, Artificial Sequence
  Synthetic
ggacaccagcaucuacucagcuu

SEQ ID NO: 410731 - RNA, 24 nt, Artificial Sequence
  Synthetic
aggacaccagcaucuacucagcuu

SEQ ID NO: 410732 - RNA, 18 nt, Artificial Sequence
  Synthetic
caacauagaguucagcuu

SEQ ID NO: 410733 - RNA, 19 nt, Artificial Sequence
  Synthetic
acaacauagaguucagcuu

SEQ ID NO: 410734 - RNA, 20 nt, Artificial Sequence
  Synthetic
aacaacauagaguucagcuu

SEQ ID NO: 410735 - RNA, 21 nt, Artificial Sequence
  Synthetic
uaacaacauagaguucagcuu

SEQ ID NO: 410736 - RNA, 22 nt, Artificial Sequence
  Synthetic
cuaacaacauagaguucagcuu

SEQ ID NO: 410737 - RNA, 23 nt, Artificial Sequence
  Synthetic
ucuaacaacauagaguucagcuu

SEQ ID NO: 410738 - RNA, 24 nt, Artificial Sequence
  Synthetic
uucuaacaacauagaguucagcuu

SEQ ID NO: 410739 - RNA, 18 nt, Artificial Sequence
  Synthetic
aacaucucccaagagcuu

SEQ ID NO: 410740 - RNA, 19 nt, Artificial Sequence
  Synthetic
aaacaucucccaagagcuu

SEQ ID NO: 410741 - RNA, 20 nt, Artificial Sequence
  Synthetic
uaaacaucucccaagagcuu

SEQ ID NO: 410742 - RNA, 21 nt, Artificial Sequence
  Synthetic
auaaacaucucccaagagcuu

SEQ ID NO: 410743 - RNA, 22 nt, Artificial Sequence
  Synthetic
aauaaacaucucccaagagcuu

SEQ ID NO: 410744 - RNA, 23 nt, Artificial Sequence
  Synthetic
aaauaaacaucucccaagagcuu

SEQ ID NO: 410745 - RNA, 24 nt, Artificial Sequence
  Synthetic
caaauaaacaucucccaagagcuu

SEQ ID NO: 410746 - RNA, 18 nt, Artificial Sequence
  Synthetic
cagucaaagagagagcuu

SEQ ID NO: 410747 - RNA, 19 nt, Artificial Sequence
  Synthetic
gcagucaaagagagagcuu

SEQ ID NO: 410748 - RNA, 20 nt, Artificial Sequence
  Synthetic
agcagucaaagagagagcuu

SEQ ID NO: 410749 - RNA, 21 nt, Artificial Sequence
  Synthetic
cagcagucaaagagagagcuu

SEQ ID NO: 410750 - RNA, 22 nt, Artificial Sequence
  Synthetic
gcagcagucaaagagagagcuu

SEQ ID NO: 410751 - RNA, 23 nt, Artificial Sequence
  Synthetic
ggcagcagucaaagagagagcuu

SEQ ID NO: 410752 - RNA, 24 nt, Artificial Sequence
  Synthetic
gggcagcagucaaagagagagcuu

SEQ ID NO: 410753 - RNA, 18 nt, Artificial Sequence
  Synthetic
gguaugaaacuagagcuu

SEQ ID NO: 410754 - RNA, 19 nt, Artificial Sequence
  Synthetic
ugguaugaaacuagagcuu

SEQ ID NO: 410755 - RNA, 20 nt, Artificial Sequence
  Synthetic
augguaugaaacuagagcuu

SEQ ID NO: 410756 - RNA, 21 nt, Artificial Sequence
  Synthetic
caugguaugaaacuagagcuu

SEQ ID NO: 410757 - RNA, 22 nt, Artificial Sequence
  Synthetic
ucaugguaugaaacuagagcuu

SEQ ID NO: 410758 - RNA, 23 nt, Artificial Sequence
  Synthetic
cucaugguaugaaacuagagcuu

SEQ ID NO: 410759 - RNA, 24 nt, Artificial Sequence
  Synthetic
gcucaugguaugaaacuagagcuu

SEQ ID NO: 410760 - RNA, 18 nt, Artificial Sequence
  Synthetic
aaauuguauuuagagcuu

SEQ ID NO: 410761 - RNA, 19 nt, Artificial Sequence
  Synthetic
uaaauuguauuuagagcuu

SEQ ID NO: 410762 - RNA, 20 nt, Artificial Sequence
  Synthetic
cuaaauuguauuuagagcuu

SEQ ID NO: 410763 - RNA, 21 nt, Artificial Sequence
  Synthetic
acuaaauuguauuuagagcuu

SEQ ID NO: 410764 - RNA, 22 nt, Artificial Sequence
  Synthetic
uacuaaauuguauuuagagcuu

SEQ ID NO: 410765 - RNA, 23 nt, Artificial Sequence
  Synthetic
guacuaaauuguauuuagagcuu

SEQ ID NO: 410766 - RNA, 24 nt, Artificial Sequence
  Synthetic
uguacuaaauuguauuuagagcuu

SEQ ID NO: 410767 - RNA, 18 nt, Artificial Sequence
  Synthetic
ccagcuaaacuggagcuu

SEQ ID NO: 410768 - RNA, 19 nt, Artificial Sequence
  Synthetic
uccagcuaaacuggagcuu

SEQ ID NO: 410769 - RNA, 20 nt, Artificial Sequence
  Synthetic
auccagcuaaacuggagcuu

SEQ ID NO: 410770 - RNA, 21 nt, Artificial Sequence
  Synthetic
aauccagcuaaacuggagcuu

SEQ ID NO: 410771 - RNA, 22 nt, Artificial Sequence
  Synthetic
caauccagcuaaacuggagcuu

SEQ ID NO: 410772 - RNA, 23 nt, Artificial Sequence
  Synthetic
ccaauccagcuaaacuggagcuu

SEQ ID NO: 410773 - RNA, 24 nt, Artificial Sequence
  Synthetic
uccaauccagcuaaacuggagcuu

SEQ ID NO: 410774 - RNA, 18 nt, Artificial Sequence
  Synthetic
ggaggauugcuugagcuu

SEQ ID NO: 410775 - RNA, 19 nt, Artificial Sequence
  Synthetic
gggaggauugcuugagcuu

SEQ ID NO: 410776 - RNA, 20 nt, Artificial Sequence
  Synthetic
ugggaggauugcuugagcuu

SEQ ID NO: 410777 - RNA, 21 nt, Artificial Sequence
  Synthetic
gugggaggauugcuugagcuu

SEQ ID NO: 410778 - RNA, 22 nt, Artificial Sequence
  Synthetic
ggugggaggauugcuugagcuu

SEQ ID NO: 410779 - RNA, 23 nt, Artificial Sequence
  Synthetic
aggugggaggauugcuugagcuu

SEQ ID NO: 410780 - RNA, 24 nt, Artificial Sequence
  Synthetic
gaggugggaggauugcuugagcuu

SEQ ID NO: 410781 - RNA, 18 nt, Artificial Sequence
  Synthetic
ccuuucacucuugagcuu

SEQ ID NO: 410782 - RNA, 19 nt, Artificial Sequence
  Synthetic
uccuuucacucuugagcuu

SEQ ID NO: 410783 - RNA, 20 nt, Artificial Sequence
  Synthetic
uuccuuucacucuugagcuu

SEQ ID NO: 410784 - RNA, 21 nt, Artificial Sequence
  Synthetic
uuuccuuucacucuugagcuu

SEQ ID NO: 410785 - RNA, 22 nt, Artificial Sequence
  Synthetic
uuuuccuuucacucuugagcuu

SEQ ID NO: 410786 - RNA, 23 nt, Artificial Sequence
  Synthetic
uuuuuccuuucacucuugagcuu

SEQ ID NO: 410787 - RNA, 24 nt, Artificial Sequence
  Synthetic
auuuuuccuuucacucuugagcuu

SEQ ID NO: 410788 - RNA, 18 nt, Artificial Sequence
  Synthetic
aagcacagguuugagcuu

SEQ ID NO: 410789 - RNA, 19 nt, Artificial Sequence
  Synthetic
caagcacagguuugagcuu

SEQ ID NO: 410790 - RNA, 20 nt, Artificial Sequence
  Synthetic
ccaagcacagguuugagcuu

SEQ ID NO: 410791 - RNA, 21 nt, Artificial Sequence
  Synthetic
gccaagcacagguuugagcuu

SEQ ID NO: 410792 - RNA, 22 nt, Artificial Sequence
  Synthetic
ugccaagcacagguuugagcuu

SEQ ID NO: 410793 - RNA, 23 nt, Artificial Sequence
  Synthetic
gugccaagcacagguuugagcuu

SEQ ID NO: 410794 - RNA, 24 nt, Artificial Sequence
  Synthetic
ugugccaagcacagguuugagcuu

SEQ ID NO: 410795 - RNA, 18 nt, Artificial Sequence
  Synthetic
augugggucuaauagcuu

SEQ ID NO: 410796 - RNA, 19 nt, Artificial Sequence
  Synthetic
uaugugggucuaauagcuu

SEQ ID NO: 410797 - RNA, 20 nt, Artificial Sequence
  Synthetic
uuaugugggucuaauagcuu

SEQ ID NO: 410798 - RNA, 21 nt, Artificial Sequence
  Synthetic
uuuaugugggucuaauagcuu

SEQ ID NO: 410799 - RNA, 22 nt, Artificial Sequence
  Synthetic
auuuaugugggucuaauagcuu

SEQ ID NO: 410800 - RNA, 23 nt, Artificial Sequence
  Synthetic
aauuuaugugggucuaauagcuu

SEQ ID NO: 410801 - RNA, 24 nt, Artificial Sequence
  Synthetic
uaauuuaugugggucuaauagcuu

SEQ ID NO: 410802 - RNA, 18 nt, Artificial Sequence
  Synthetic
gaguguaagacauagcuu

SEQ ID NO: 410803 - RNA, 19 nt, Artificial Sequence
  Synthetic
ggaguguaagacauagcuu

SEQ ID NO: 410804 - RNA, 20 nt, Artificial Sequence
  Synthetic
aggaguguaagacauagcuu

SEQ ID NO: 410805 - RNA, 21 nt, Artificial Sequence
  Synthetic
aaggaguguaagacauagcuu

SEQ ID NO: 410806 - RNA, 22 nt, Artificial Sequence
  Synthetic
gaaggaguguaagacauagcuu

SEQ ID NO: 410807 - RNA, 23 nt, Artificial Sequence
  Synthetic
agaaggaguguaagacauagcuu

SEQ ID NO: 410808 - RNA, 24 nt, Artificial Sequence
  Synthetic
cagaaggaguguaagacauagcuu

SEQ ID NO: 410809 - RNA, 18 nt, Artificial Sequence
  Synthetic
ccauaaauuggauagcuu

SEQ ID NO: 410810 - RNA, 19 nt, Artificial Sequence
  Synthetic
gccauaaauuggauagcuu

SEQ ID NO: 410811 - RNA, 20 nt, Artificial Sequence
  Synthetic
ugccauaaauuggauagcuu

SEQ ID NO: 410812 - RNA, 21 nt, Artificial Sequence
  Synthetic
augccauaaauuggauagcuu

SEQ ID NO: 410813 - RNA, 22 nt, Artificial Sequence
  Synthetic
aaugccauaaauuggauagcuu

SEQ ID NO: 410814 - RNA, 23 nt, Artificial Sequence
  Synthetic
aaaugccauaaauuggauagcuu

SEQ ID NO: 410815 - RNA, 24 nt, Artificial Sequence
  Synthetic
gaaaugccauaaauuggauagcuu

SEQ ID NO: 410816 - RNA, 18 nt, Artificial Sequence
  Synthetic
aaccuuuuccucuagcuu

SEQ ID NO: 410817 - RNA, 19 nt, Artificial Sequence
  Synthetic
gaaccuuuuccucuagcuu

SEQ ID NO: 410818 - RNA, 20 nt, Artificial Sequence
  Synthetic
ggaaccuuuuccucuagcuu

SEQ ID NO: 410819 - RNA, 21 nt, Artificial Sequence
  Synthetic
uggaaccuuuuccucuagcuu

SEQ ID NO: 410820 - RNA, 22 nt, Artificial Sequence
  Synthetic
uuggaaccuuuuccucuagcuu

SEQ ID NO: 410821 - RNA, 23 nt, Artificial Sequence
  Synthetic
uuuggaaccuuuuccucuagcuu

SEQ ID NO: 410822 - RNA, 24 nt, Artificial Sequence
  Synthetic
cuuuggaaccuuuuccucuagcuu

SEQ ID NO: 410823 - RNA, 18 nt, Artificial Sequence
  Synthetic
guaucuucauucuagcuu

SEQ ID NO: 410824 - RNA, 19 nt, Artificial Sequence
  Synthetic
aguaucuucauucuagcuu

SEQ ID NO: 410825 - RNA, 20 nt, Artificial Sequence
  Synthetic
uaguaucuucauucuagcuu

SEQ ID NO: 410826 - RNA, 21 nt, Artificial Sequence
  Synthetic
cuaguaucuucauucuagcuu

SEQ ID NO: 410827 - RNA, 22 nt, Artificial Sequence
  Synthetic
gcuaguaucuucauucuagcuu

SEQ ID NO: 410828 - RNA, 23 nt, Artificial Sequence
  Synthetic
agcuaguaucuucauucuagcuu

SEQ ID NO: 410829 - RNA, 24 nt, Artificial Sequence
  Synthetic
uagcuaguaucuucauucuagcuu

SEQ ID NO: 410830 - RNA, 18 nt, Artificial Sequence
  Synthetic
gugugaguauucuagcuu

SEQ ID NO: 410831 - RNA, 19 nt, Artificial Sequence
  Synthetic
ugugugaguauucuagcuu

SEQ ID NO: 410832 - RNA, 20 nt, Artificial Sequence
  Synthetic
augugugaguauucuagcuu

SEQ ID NO: 410833 - RNA, 21 nt, Artificial Sequence
  Synthetic
uaugugugaguauucuagcuu

SEQ ID NO: 410834 - RNA, 22 nt, Artificial Sequence
  Synthetic
guaugugugaguauucuagcuu

SEQ ID NO: 410835 - RNA, 23 nt, Artificial Sequence
  Synthetic
uguaugugugaguauucuagcuu

SEQ ID NO: 410836 - RNA, 24 nt, Artificial Sequence
  Synthetic
guguaugugugaguauucuagcuu

SEQ ID NO: 410837 - RNA, 18 nt, Artificial Sequence
  Synthetic
acacauuguuucuagcuu

SEQ ID NO: 410838 - RNA, 19 nt, Artificial Sequence
  Synthetic
aacacauuguuucuagcuu

SEQ ID NO: 410839 - RNA, 20 nt, Artificial Sequence
  Synthetic
caacacauuguuucuagcuu

SEQ ID NO: 410840 - RNA, 21 nt, Artificial Sequence
  Synthetic
ccaacacauuguuucuagcuu

SEQ ID NO: 410841 - RNA, 22 nt, Artificial Sequence
  Synthetic
gccaacacauuguuucuagcuu

SEQ ID NO: 410842 - RNA, 23 nt, Artificial Sequence
  Synthetic
ugccaacacauuguuucuagcuu

SEQ ID NO: 410843 - RNA, 24 nt, Artificial Sequence
  Synthetic
cugccaacacauuguuucuagcuu

SEQ ID NO: 410844 - RNA, 18 nt, Artificial Sequence
  Synthetic
auaaagaagguguagcuu

SEQ ID NO: 410845 - RNA, 19 nt, Artificial Sequence
  Synthetic
aauaaagaagguguagcuu

SEQ ID NO: 410846 - RNA, 20 nt, Artificial Sequence
  Synthetic
uaauaaagaagguguagcuu

SEQ ID NO: 410847 - RNA, 21 nt, Artificial Sequence
  Synthetic
uuaauaaagaagguguagcuu

SEQ ID NO: 410848 - RNA, 22 nt, Artificial Sequence
  Synthetic
uuuaauaaagaagguguagcuu

SEQ ID NO: 410849 - RNA, 23 nt, Artificial Sequence
  Synthetic
uuuuaauaaagaagguguagcuu

SEQ ID NO: 410850 - RNA, 24 nt, Artificial Sequence
  Synthetic
guuuuaauaaagaagguguagcuu

SEQ ID NO: 410851 - RNA, 18 nt, Artificial Sequence
  Synthetic
cccaggucuguguagcuu

SEQ ID NO: 410852 - RNA, 19 nt, Artificial Sequence
  Synthetic
ucccaggucuguguagcuu

SEQ ID NO: 410853 - RNA, 20 nt, Artificial Sequence
  Synthetic
uucccaggucuguguagcuu

SEQ ID NO: 410854 - RNA, 21 nt, Artificial Sequence
  Synthetic
cuucccaggucuguguagcuu

SEQ ID NO: 410855 - RNA, 22 nt, Artificial Sequence
  Synthetic
ccuucccaggucuguguagcuu

SEQ ID NO: 410856 - RNA, 23 nt, Artificial Sequence
  Synthetic
uccuucccaggucuguguagcuu

SEQ ID NO: 410857 - RNA, 24 nt, Artificial Sequence
  Synthetic
cuccuucccaggucuguguagcuu

SEQ ID NO: 410858 - RNA, 18 nt, Artificial Sequence
  Synthetic
cucuuuaaaaguuagcuu

SEQ ID NO: 410859 - RNA, 19 nt, Artificial Sequence
  Synthetic
ucucuuuaaaaguuagcuu

SEQ ID NO: 410860 - RNA, 20 nt, Artificial Sequence
  Synthetic
aucucuuuaaaaguuagcuu

SEQ ID NO: 410861 - RNA, 21 nt, Artificial Sequence
  Synthetic
aaucucuuuaaaaguuagcuu

SEQ ID NO: 410862 - RNA, 22 nt, Artificial Sequence
  Synthetic
aaaucucuuuaaaaguuagcuu

SEQ ID NO: 410863 - RNA, 23 nt, Artificial Sequence
  Synthetic
caaaucucuuuaaaaguuagcuu

SEQ ID NO: 410864 - RNA, 24 nt, Artificial Sequence
  Synthetic
gcaaaucucuuuaaaaguuagcuu

SEQ ID NO: 410865 - RNA, 18 nt, Artificial Sequence
  Synthetic
gcagggagcauaacgcuu

SEQ ID NO: 410866 - RNA, 19 nt, Artificial Sequence
  Synthetic
ggcagggagcauaacgcuu

SEQ ID NO: 410867 - RNA, 20 nt, Artificial Sequence
  Synthetic
uggcagggagcauaacgcuu

SEQ ID NO: 410868 - RNA, 21 nt, Artificial Sequence
  Synthetic
guggcagggagcauaacgcuu

SEQ ID NO: 410869 - RNA, 22 nt, Artificial Sequence
  Synthetic
aguggcagggagcauaacgcuu

SEQ ID NO: 410870 - RNA, 23 nt, Artificial Sequence
  Synthetic
uaguggcagggagcauaacgcuu

SEQ ID NO: 410871 - RNA, 24 nt, Artificial Sequence
  Synthetic
guaguggcagggagcauaacgcuu

SEQ ID NO: 410872 - RNA, 18 nt, Artificial Sequence
  Synthetic
agguguugggugacgcuu

SEQ ID NO: 410873 - RNA, 19 nt, Artificial Sequence
  Synthetic
gagguguugggugacgcuu

SEQ ID NO: 410874 - RNA, 20 nt, Artificial Sequence
  Synthetic
ugagguguugggugacgcuu

SEQ ID NO: 410875 - RNA, 21 nt, Artificial Sequence
  Synthetic
augagguguugggugacgcuu

SEQ ID NO: 410876 - RNA, 22 nt, Artificial Sequence
  Synthetic
uaugagguguugggugacgcuu

SEQ ID NO: 410877 - RNA, 23 nt, Artificial Sequence
  Synthetic
auaugagguguugggugacgcuu

SEQ ID NO: 410878 - RNA, 24 nt, Artificial Sequence
  Synthetic
uauaugagguguugggugacgcuu

SEQ ID NO: 410879 - RNA, 18 nt, Artificial Sequence
  Synthetic
uuucaaucaaauacgcuu

SEQ ID NO: 410880 - RNA, 19 nt, Artificial Sequence
  Synthetic
uuuucaaucaaauacgcuu

SEQ ID NO: 410881 - RNA, 20 nt, Artificial Sequence
  Synthetic
auuuucaaucaaauacgcuu

SEQ ID NO: 410882 - RNA, 21 nt, Artificial Sequence
  Synthetic
gauuuucaaucaaauacgcuu

SEQ ID NO: 410883 - RNA, 22 nt, Artificial Sequence
  Synthetic
ugauuuucaaucaaauacgcuu

SEQ ID NO: 410884 - RNA, 23 nt, Artificial Sequence
  Synthetic
augauuuucaaucaaauacgcuu

SEQ ID NO: 410885 - RNA, 24 nt, Artificial Sequence
  Synthetic
caugauuuucaaucaaauacgcuu

SEQ ID NO: 410886 - RNA, 18 nt, Artificial Sequence
  Synthetic
ccugcacucccagcgcuu

SEQ ID NO: 410887 - RNA, 19 nt, Artificial Sequence
  Synthetic
gccugcacucccagcgcuu

SEQ ID NO: 410888 - RNA, 20 nt, Artificial Sequence
  Synthetic
cgccugcacucccagcgcuu

SEQ ID NO: 410889 - RNA, 21 nt, Artificial Sequence
  Synthetic
acgccugcacucccagcgcuu

SEQ ID NO: 410890 - RNA, 22 nt, Artificial Sequence
  Synthetic
cacgccugcacucccagcgcuu

SEQ ID NO: 410891 - RNA, 23 nt, Artificial Sequence
  Synthetic
ucacgccugcacucccagcgcuu

SEQ ID NO: 410892 - RNA, 24 nt, Artificial Sequence
  Synthetic
uucacgccugcacucccagcgcuu

SEQ ID NO: 410893 - RNA, 18 nt, Artificial Sequence
  Synthetic
ccuguaauuccagcgcuu

SEQ ID NO: 410894 - RNA, 19 nt, Artificial Sequence
  Synthetic
accuguaauuccagcgcuu

SEQ ID NO: 410895 - RNA, 20 nt, Artificial Sequence
  Synthetic
caccuguaauuccagcgcuu

SEQ ID NO: 410896 - RNA, 21 nt, Artificial Sequence
  Synthetic
acaccuguaauuccagcgcuu

SEQ ID NO: 410897 - RNA, 22 nt, Artificial Sequence
  Synthetic
cacaccuguaauuccagcgcuu

SEQ ID NO: 410898 - RNA, 23 nt, Artificial Sequence
  Synthetic
ucacaccuguaauuccagcgcuu

SEQ ID NO: 410899 - RNA, 24 nt, Artificial Sequence
  Synthetic
cucacaccuguaauuccagcgcuu

SEQ ID NO: 410900 - RNA, 18 nt, Artificial Sequence
  Synthetic
ccuguaaucucagcgcuu

SEQ ID NO: 410901 - RNA, 19 nt, Artificial Sequence
  Synthetic
gccuguaaucucagcgcuu

SEQ ID NO: 410902 - RNA, 20 nt, Artificial Sequence
  Synthetic
ugccuguaaucucagcgcuu

SEQ ID NO: 410903 - RNA, 21 nt, Artificial Sequence
  Synthetic
augccuguaaucucagcgcuu

SEQ ID NO: 410904 - RNA, 22 nt, Artificial Sequence
  Synthetic
caugccuguaaucucagcgcuu

SEQ ID NO: 410905 - RNA, 23 nt, Artificial Sequence
  Synthetic
ucaugccuguaaucucagcgcuu

SEQ ID NO: 410906 - RNA, 24 nt, Artificial Sequence
  Synthetic
cucaugccuguaaucucagcgcuu

SEQ ID NO: 410907 - RNA, 18 nt, Artificial Sequence
  Synthetic
aaaaauuaugccgcgcuu

SEQ ID NO: 410908 - RNA, 19 nt, Artificial Sequence
  Synthetic
gaaaaauuaugccgcgcuu

SEQ ID NO: 410909 - RNA, 20 nt, Artificial Sequence
  Synthetic
agaaaaauuaugccgcgcuu

SEQ ID NO: 410910 - RNA, 21 nt, Artificial Sequence
  Synthetic
aagaaaaauuaugccgcgcuu

SEQ ID NO: 410911 - RNA, 22 nt, Artificial Sequence
  Synthetic
caagaaaaauuaugccgcgcuu

SEQ ID NO: 410912 - RNA, 23 nt, Artificial Sequence
  Synthetic
ccaagaaaaauuaugccgcgcuu

SEQ ID NO: 410913 - RNA, 24 nt, Artificial Sequence
  Synthetic
uccaagaaaaauuaugccgcgcuu

SEQ ID NO: 410914 - RNA, 18 nt, Artificial Sequence
  Synthetic
aauuacugauaaucgcuu

SEQ ID NO: 410915 - RNA, 19 nt, Artificial Sequence
  Synthetic
uaauuacugauaaucgcuu

SEQ ID NO: 410916 - RNA, 20 nt, Artificial Sequence
  Synthetic
auaauuacugauaaucgcuu

SEQ ID NO: 410917 - RNA, 21 nt, Artificial Sequence
  Synthetic
uauaauuacugauaaucgcuu

SEQ ID NO: 410918 - RNA, 22 nt, Artificial Sequence
  Synthetic
auauaauuacugauaaucgcuu

SEQ ID NO: 410919 - RNA, 23 nt, Artificial Sequence
  Synthetic
aauauaauuacugauaaucgcuu

SEQ ID NO: 410920 - RNA, 24 nt, Artificial Sequence
  Synthetic
aaauauaauuacugauaaucgcuu

SEQ ID NO: 410921 - RNA, 18 nt, Artificial Sequence
  Synthetic
gggagcauuguuucgcuu

SEQ ID NO: 410922 - RNA, 19 nt, Artificial Sequence
  Synthetic
agggagcauuguuucgcuu

SEQ ID NO: 410923 - RNA, 20 nt, Artificial Sequence
  Synthetic
uagggagcauuguuucgcuu

SEQ ID NO: 410924 - RNA, 21 nt, Artificial Sequence
  Synthetic
auagggagcauuguuucgcuu

SEQ ID NO: 410925 - RNA, 22 nt, Artificial Sequence
  Synthetic
cauagggagcauuguuucgcuu

SEQ ID NO: 410926 - RNA, 23 nt, Artificial Sequence
  Synthetic
ucauagggagcauuguuucgcuu

SEQ ID NO: 410927 - RNA, 24 nt, Artificial Sequence
  Synthetic
aucauagggagcauuguuucgcuu

SEQ ID NO: 410928 - RNA, 18 nt, Artificial Sequence
  Synthetic
aaagacaggaaaaggcuu

SEQ ID NO: 410929 - RNA, 19 nt, Artificial Sequence
  Synthetic
uaaagacaggaaaaggcuu

SEQ ID NO: 410930 - RNA, 20 nt, Artificial Sequence
  Synthetic
uuaaagacaggaaaaggcuu

SEQ ID NO: 410931 - RNA, 21 nt, Artificial Sequence
  Synthetic
cuuaaagacaggaaaaggcuu

SEQ ID NO: 410932 - RNA, 22 nt, Artificial Sequence
  Synthetic
gcuuaaagacaggaaaaggcuu

SEQ ID NO: 410933 - RNA, 23 nt, Artificial Sequence
  Synthetic
ugcuuaaagacaggaaaaggcuu

SEQ ID NO: 410934 - RNA, 24 nt, Artificial Sequence
  Synthetic
uugcuuaaagacaggaaaaggcuu

SEQ ID NO: 410935 - RNA, 18 nt, Artificial Sequence
  Synthetic
guguuugagcaaaggcuu

SEQ ID NO: 410936 - RNA, 19 nt, Artificial Sequence
  Synthetic
uguguuugagcaaaggcuu

SEQ ID NO: 410937 - RNA, 20 nt, Artificial Sequence
  Synthetic
auguguuugagcaaaggcuu

SEQ ID NO: 410938 - RNA, 21 nt, Artificial Sequence
  Synthetic
aauguguuugagcaaaggcuu

SEQ ID NO: 410939 - RNA, 22 nt, Artificial Sequence
  Synthetic
gaauguguuugagcaaaggcuu

SEQ ID NO: 410940 - RNA, 23 nt, Artificial Sequence
  Synthetic
agaauguguuugagcaaaggcuu

SEQ ID NO: 410941 - RNA, 24 nt, Artificial Sequence
  Synthetic
cagaauguguuugagcaaaggcuu

SEQ ID NO: 410942 - RNA, 18 nt, Artificial Sequence
  Synthetic
auaggaccagaaaggcuu

SEQ ID NO: 410943 - RNA, 19 nt, Artificial Sequence
  Synthetic
cauaggaccagaaaggcuu

SEQ ID NO: 410944 - RNA, 20 nt, Artificial Sequence
  Synthetic
ccauaggaccagaaaggcuu

SEQ ID NO: 410945 - RNA, 21 nt, Artificial Sequence
  Synthetic
uccauaggaccagaaaggcuu

SEQ ID NO: 410946 - RNA, 22 nt, Artificial Sequence
  Synthetic
uuccauaggaccagaaaggcuu

SEQ ID NO: 410947 - RNA, 23 nt, Artificial Sequence
  Synthetic
uuuccauaggaccagaaaggcuu

SEQ ID NO: 410948 - RNA, 24 nt, Artificial Sequence
  Synthetic
cuuuccauaggaccagaaaggcuu

SEQ ID NO: 410949 - RNA, 18 nt, Artificial Sequence
  Synthetic
ucucugaauagaaggcuu

SEQ ID NO: 410950 - RNA, 19 nt, Artificial Sequence
  Synthetic
aucucugaauagaaggcuu

SEQ ID NO: 410951 - RNA, 20 nt, Artificial Sequence
  Synthetic
aaucucugaauagaaggcuu

SEQ ID NO: 410952 - RNA, 21 nt, Artificial Sequence
  Synthetic
gaaucucugaauagaaggcuu

SEQ ID NO: 410953 - RNA, 22 nt, Artificial Sequence
  Synthetic
agaaucucugaauagaaggcuu

SEQ ID NO: 410954 - RNA, 23 nt, Artificial Sequence
  Synthetic
uagaaucucugaauagaaggcuu

SEQ ID NO: 410955 - RNA, 24 nt, Artificial Sequence
  Synthetic
auagaaucucugaauagaaggcuu

SEQ ID NO: 410956 - RNA, 18 nt, Artificial Sequence
  Synthetic
agagauagcugaaggcuu

SEQ ID NO: 410957 - RNA, 19 nt, Artificial Sequence
  Synthetic
uagagauagcugaaggcuu

SEQ ID NO: 410958 - RNA, 20 nt, Artificial Sequence
  Synthetic
auagagauagcugaaggcuu

SEQ ID NO: 410959 - RNA, 21 nt, Artificial Sequence
  Synthetic
uauagagauagcugaaggcuu

SEQ ID NO: 410960 - RNA, 22 nt, Artificial Sequence
  Synthetic
guauagagauagcugaaggcuu

SEQ ID NO: 410961 - RNA, 23 nt, Artificial Sequence
  Synthetic
uguauagagauagcugaaggcuu

SEQ ID NO: 410962 - RNA, 24 nt, Artificial Sequence
  Synthetic
uuguauagagauagcugaaggcuu

SEQ ID NO: 410963 - RNA, 18 nt, Artificial Sequence
  Synthetic
ccucagaacuuaaggcuu

SEQ ID NO: 410964 - RNA, 19 nt, Artificial Sequence
  Synthetic
accucagaacuuaaggcuu

SEQ ID NO: 410965 - RNA, 20 nt, Artificial Sequence
  Synthetic
aaccucagaacuuaaggcuu

SEQ ID NO: 410966 - RNA, 21 nt, Artificial Sequence
  Synthetic
uaaccucagaacuuaaggcuu

SEQ ID NO: 410967 - RNA, 22 nt, Artificial Sequence
  Synthetic
cuaaccucagaacuuaaggcuu

SEQ ID NO: 410968 - RNA, 23 nt, Artificial Sequence
  Synthetic
ccuaaccucagaacuuaaggcuu

SEQ ID NO: 410969 - RNA, 24 nt, Artificial Sequence
  Synthetic
accuaaccucagaacuuaaggcuu

SEQ ID NO: 410970 - RNA, 18 nt, Artificial Sequence
  Synthetic
caugguuaacagaggcuu

SEQ ID NO: 410971 - RNA, 19 nt, Artificial Sequence
  Synthetic
ucaugguuaacagaggcuu

SEQ ID NO: 410972 - RNA, 20 nt, Artificial Sequence
  Synthetic
aucaugguuaacagaggcuu

SEQ ID NO: 410973 - RNA, 21 nt, Artificial Sequence
  Synthetic
aaucaugguuaacagaggcuu

SEQ ID NO: 410974 - RNA, 22 nt, Artificial Sequence
  Synthetic
gaaucaugguuaacagaggcuu

SEQ ID NO: 410975 - RNA, 23 nt, Artificial Sequence
  Synthetic
agaaucaugguuaacagaggcuu

SEQ ID NO: 410976 - RNA, 24 nt, Artificial Sequence
  Synthetic
uagaaucaugguuaacagaggcuu

SEQ ID NO: 410977 - RNA, 18 nt, Artificial Sequence
  Synthetic
cauguacuucagaggcuu

SEQ ID NO: 410978 - RNA, 19 nt, Artificial Sequence
  Synthetic
acauguacuucagaggcuu

SEQ ID NO: 410979 - RNA, 20 nt, Artificial Sequence
  Synthetic
cacauguacuucagaggcuu

SEQ ID NO: 410980 - RNA, 21 nt, Artificial Sequence
  Synthetic
ccacauguacuucagaggcuu

SEQ ID NO: 410981 - RNA, 22 nt, Artificial Sequence
  Synthetic
cccacauguacuucagaggcuu

SEQ ID NO: 410982 - RNA, 23 nt, Artificial Sequence
  Synthetic
ucccacauguacuucagaggcuu

SEQ ID NO: 410983 - RNA, 24 nt, Artificial Sequence
  Synthetic
uucccacauguacuucagaggcuu

SEQ ID NO: 410984 - RNA, 18 nt, Artificial Sequence
  Synthetic
aacuucaaaucgaggcuu

SEQ ID NO: 410985 - RNA, 19 nt, Artificial Sequence
  Synthetic
aaacuucaaaucgaggcuu

SEQ ID NO: 410986 - RNA, 20 nt, Artificial Sequence
  Synthetic
aaaacuucaaaucgaggcuu

SEQ ID NO: 410987 - RNA, 21 nt, Artificial Sequence
  Synthetic
uaaaacuucaaaucgaggcuu

SEQ ID NO: 410988 - RNA, 22 nt, Artificial Sequence
  Synthetic
uuaaaacuucaaaucgaggcuu

SEQ ID NO: 410989 - RNA, 23 nt, Artificial Sequence
  Synthetic
uuuaaaacuucaaaucgaggcuu

SEQ ID NO: 410990 - RNA, 24 nt, Artificial Sequence
  Synthetic
uuuuaaaacuucaaaucgaggcuu

SEQ ID NO: 410991 - RNA, 18 nt, Artificial Sequence
  Synthetic
cuggcuuaauggaggcuu

SEQ ID NO: 410992 - RNA, 19 nt, Artificial Sequence
  Synthetic
ccuggcuuaauggaggcuu

SEQ ID NO: 410993 - RNA, 20 nt, Artificial Sequence
  Synthetic
gccuggcuuaauggaggcuu

SEQ ID NO: 410994 - RNA, 21 nt, Artificial Sequence
  Synthetic
agccuggcuuaauggaggcuu

SEQ ID NO: 410995 - RNA, 22 nt, Artificial Sequence
  Synthetic
cagccuggcuuaauggaggcuu

SEQ ID NO: 410996 - RNA, 23 nt, Artificial Sequence
  Synthetic
gcagccuggcuuaauggaggcuu

SEQ ID NO: 410997 - RNA, 24 nt, Artificial Sequence
  Synthetic
ugcagccuggcuuaauggaggcuu

SEQ ID NO: 410998 - RNA, 18 nt, Artificial Sequence
  Synthetic
cuccuucuguggaggcuu

SEQ ID NO: 410999 - RNA, 19 nt, Artificial Sequence
  Synthetic
ucuccuucuguggaggcuu

SEQ ID NO: 411000 - RNA, 20 nt, Artificial Sequence
  Synthetic
aucuccuucuguggaggcuu

SEQ ID NO: 411001 - RNA, 21 nt, Artificial Sequence
  Synthetic
caucuccuucuguggaggcuu

SEQ ID NO: 411002 - RNA, 22 nt, Artificial Sequence
  Synthetic
gcaucuccuucuguggaggcuu

SEQ ID NO: 411003 - RNA, 23 nt, Artificial Sequence
  Synthetic
agcaucuccuucuguggaggcuu

SEQ ID NO: 411004 - RNA, 24 nt, Artificial Sequence
  Synthetic
cagcaucuccuucuguggaggcuu

SEQ ID NO: 411005 - RNA, 18 nt, Artificial Sequence
  Synthetic
cucugguggaugaggcuu

SEQ ID NO: 411006 - RNA, 19 nt, Artificial Sequence
  Synthetic
ccucugguggaugaggcuu

SEQ ID NO: 411007 - RNA, 20 nt, Artificial Sequence
  Synthetic
uccucugguggaugaggcuu

SEQ ID NO: 411008 - RNA, 21 nt, Artificial Sequence
  Synthetic
cuccucugguggaugaggcuu

SEQ ID NO: 411009 - RNA, 22 nt, Artificial Sequence
  Synthetic
ucuccucugguggaugaggcuu

SEQ ID NO: 411010 - RNA, 23 nt, Artificial Sequence
  Synthetic
aucuccucugguggaugaggcuu

SEQ ID NO: 411011 - RNA, 24 nt, Artificial Sequence
  Synthetic
caucuccucugguggaugaggcuu

SEQ ID NO: 411012 - RNA, 18 nt, Artificial Sequence
  Synthetic
cagaugauggugaggcuu

SEQ ID NO: 411013 - RNA, 19 nt, Artificial Sequence
  Synthetic
acagaugauggugaggcuu

SEQ ID NO: 411014 - RNA, 20 nt, Artificial Sequence
  Synthetic
aacagaugauggugaggcuu

SEQ ID NO: 411015 - RNA, 21 nt, Artificial Sequence
  Synthetic
caacagaugauggugaggcuu

SEQ ID NO: 411016 - RNA, 22 nt, Artificial Sequence
  Synthetic
acaacagaugauggugaggcuu

SEQ ID NO: 411017 - RNA, 23 nt, Artificial Sequence
  Synthetic
aacaacagaugauggugaggcuu

SEQ ID NO: 411018 - RNA, 24 nt, Artificial Sequence
  Synthetic
aaacaacagaugauggugaggcuu

SEQ ID NO: 411019 - RNA, 18 nt, Artificial Sequence
  Synthetic
auugacggaaguaggcuu

SEQ ID NO: 411020 - RNA, 19 nt, Artificial Sequence
  Synthetic
aauugacggaaguaggcuu

SEQ ID NO: 411021 - RNA, 20 nt, Artificial Sequence
  Synthetic
gaauugacggaaguaggcuu

SEQ ID NO: 411022 - RNA, 21 nt, Artificial Sequence
  Synthetic
cgaauugacggaaguaggcuu

SEQ ID NO: 411023 - RNA, 22 nt, Artificial Sequence
  Synthetic
acgaauugacggaaguaggcuu

SEQ ID NO: 411024 - RNA, 23 nt, Artificial Sequence
  Synthetic
gacgaauugacggaaguaggcuu

SEQ ID NO: 411025 - RNA, 24 nt, Artificial Sequence
  Synthetic
ugacgaauugacggaaguaggcuu

SEQ ID NO: 411026 - RNA, 18 nt, Artificial Sequence
  Synthetic
accaaauuugguaggcuu

SEQ ID NO: 411027 - RNA, 19 nt, Artificial Sequence
  Synthetic
caccaaauuugguaggcuu

SEQ ID NO: 411028 - RNA, 20 nt, Artificial Sequence
  Synthetic
ucaccaaauuugguaggcuu

SEQ ID NO: 411029 - RNA, 21 nt, Artificial Sequence
  Synthetic
gucaccaaauuugguaggcuu

SEQ ID NO: 411030 - RNA, 22 nt, Artificial Sequence
  Synthetic
agucaccaaauuugguaggcuu

SEQ ID NO: 411031 - RNA, 23 nt, Artificial Sequence
  Synthetic
aagucaccaaauuugguaggcuu

SEQ ID NO: 411032 - RNA, 24 nt, Artificial Sequence
  Synthetic
gaagucaccaaauuugguaggcuu

SEQ ID NO: 411033 - RNA, 18 nt, Artificial Sequence
  Synthetic
uauuuuucauguaggcuu

SEQ ID NO: 411034 - RNA, 19 nt, Artificial Sequence
  Synthetic
uuauuuuucauguaggcuu

SEQ ID NO: 411035 - RNA, 20 nt, Artificial Sequence
  Synthetic
auuauuuuucauguaggcuu

SEQ ID NO: 411036 - RNA, 21 nt, Artificial Sequence
  Synthetic
aauuauuuuucauguaggcuu

SEQ ID NO: 411037 - RNA, 22 nt, Artificial Sequence
  Synthetic
uaauuauuuuucauguaggcuu

SEQ ID NO: 411038 - RNA, 23 nt, Artificial Sequence
  Synthetic
auaauuauuuuucauguaggcuu

SEQ ID NO: 411039 - RNA, 24 nt, Artificial Sequence
  Synthetic
aauaauuauuuuucauguaggcuu

SEQ ID NO: 411040 - RNA, 18 nt, Artificial Sequence
  Synthetic
gaacucauaguuaggcuu

SEQ ID NO: 411041 - RNA, 19 nt, Artificial Sequence
  Synthetic
ugaacucauaguuaggcuu

SEQ ID NO: 411042 - RNA, 20 nt, Artificial Sequence
  Synthetic
augaacucauaguuaggcuu

SEQ ID NO: 411043 - RNA, 21 nt, Artificial Sequence
  Synthetic
uaugaacucauaguuaggcuu

SEQ ID NO: 411044 - RNA, 22 nt, Artificial Sequence
  Synthetic
uuaugaacucauaguuaggcuu

SEQ ID NO: 411045 - RNA, 23 nt, Artificial Sequence
  Synthetic
guuaugaacucauaguuaggcuu

SEQ ID NO: 411046 - RNA, 24 nt, Artificial Sequence
  Synthetic
aguuaugaacucauaguuaggcuu

SEQ ID NO: 411047 - RNA, 18 nt, Artificial Sequence
  Synthetic
augggcuaguuacggcuu

SEQ ID NO: 411048 - RNA, 19 nt, Artificial Sequence
  Synthetic
aaugggcuaguuacggcuu

SEQ ID NO: 411049 - RNA, 20 nt, Artificial Sequence
  Synthetic
caaugggcuaguuacggcuu

SEQ ID NO: 411050 - RNA, 21 nt, Artificial Sequence
  Synthetic
gcaaugggcuaguuacggcuu

SEQ ID NO: 411051 - RNA, 22 nt, Artificial Sequence
  Synthetic
ggcaaugggcuaguuacggcuu

SEQ ID NO: 411052 - RNA, 23 nt, Artificial Sequence
  Synthetic
uggcaaugggcuaguuacggcuu

SEQ ID NO: 411053 - RNA, 24 nt, Artificial Sequence
  Synthetic
auggcaaugggcuaguuacggcuu

SEQ ID NO: 411054 - RNA, 18 nt, Artificial Sequence
  Synthetic
uggcaggagucccggcuu

SEQ ID NO: 411055 - RNA, 19 nt, Artificial Sequence
  Synthetic
cuggcaggagucccggcuu

SEQ ID NO: 411056 - RNA, 20 nt, Artificial Sequence
  Synthetic
ucuggcaggagucccggcuu

SEQ ID NO: 411057 - RNA, 21 nt, Artificial Sequence
  Synthetic
aucuggcaggagucccggcuu

SEQ ID NO: 411058 - RNA, 22 nt, Artificial Sequence
  Synthetic
uaucuggcaggagucccggcuu

SEQ ID NO: 411059 - RNA, 23 nt, Artificial Sequence
  Synthetic
uuaucuggcaggagucccggcuu

SEQ ID NO: 411060 - RNA, 24 nt, Artificial Sequence
  Synthetic
guuaucuggcaggagucccggcuu

SEQ ID NO: 411061 - RNA, 18 nt, Artificial Sequence
  Synthetic
acagaaaacaaagggcuu

SEQ ID NO: 411062 - RNA, 19 nt, Artificial Sequence
  Synthetic
aacagaaaacaaagggcuu

SEQ ID NO: 411063 - RNA, 20 nt, Artificial Sequence
  Synthetic
uaacagaaaacaaagggcuu

SEQ ID NO: 411064 - RNA, 21 nt, Artificial Sequence
  Synthetic
auaacagaaaacaaagggcuu

SEQ ID NO: 411065 - RNA, 22 nt, Artificial Sequence
  Synthetic
aauaacagaaaacaaagggcuu

SEQ ID NO: 411066 - RNA, 23 nt, Artificial Sequence
  Synthetic
uaauaacagaaaacaaagggcuu

SEQ ID NO: 411067 - RNA, 24 nt, Artificial Sequence
  Synthetic
auaauaacagaaaacaaagggcuu

SEQ ID NO: 411068 - RNA, 18 nt, Artificial Sequence
  Synthetic
uacuaccacacagggcuu

SEQ ID NO: 411069 - RNA, 19 nt, Artificial Sequence
  Synthetic
cuacuaccacacagggcuu

SEQ ID NO: 411070 - RNA, 20 nt, Artificial Sequence
  Synthetic
acuacuaccacacagggcuu

SEQ ID NO: 411071 - RNA, 21 nt, Artificial Sequence
  Synthetic
gacuacuaccacacagggcuu

SEQ ID NO: 411072 - RNA, 22 nt, Artificial Sequence
  Synthetic
ugacuacuaccacacagggcuu

SEQ ID NO: 411073 - RNA, 23 nt, Artificial Sequence
  Synthetic
cugacuacuaccacacagggcuu

SEQ ID NO: 411074 - RNA, 24 nt, Artificial Sequence
  Synthetic
acugacuacuaccacacagggcuu

SEQ ID NO: 411075 - RNA, 18 nt, Artificial Sequence
  Synthetic
acacacccucuggggcuu

SEQ ID NO: 411076 - RNA, 19 nt, Artificial Sequence
  Synthetic
aacacacccucuggggcuu

SEQ ID NO: 411077 - RNA, 20 nt, Artificial Sequence
  Synthetic
uaacacacccucuggggcuu

SEQ ID NO: 411078 - RNA, 21 nt, Artificial Sequence
  Synthetic
guaacacacccucuggggcuu

SEQ ID NO: 411079 - RNA, 22 nt, Artificial Sequence
  Synthetic
uguaacacacccucuggggcuu

SEQ ID NO: 411080 - RNA, 23 nt, Artificial Sequence
  Synthetic
cuguaacacacccucuggggcuu

SEQ ID NO: 411081 - RNA, 24 nt, Artificial Sequence
  Synthetic
acuguaacacacccucuggggcuu

SEQ ID NO: 411082 - RNA, 18 nt, Artificial Sequence
  Synthetic
uacuuuuggcaugggcuu

SEQ ID NO: 411083 - RNA, 19 nt, Artificial Sequence
  Synthetic
auacuuuuggcaugggcuu

SEQ ID NO: 411084 - RNA, 20 nt, Artificial Sequence
  Synthetic
gauacuuuuggcaugggcuu

SEQ ID NO: 411085 - RNA, 21 nt, Artificial Sequence
  Synthetic
ggauacuuuuggcaugggcuu

SEQ ID NO: 411086 - RNA, 22 nt, Artificial Sequence
  Synthetic
uggauacuuuuggcaugggcuu

SEQ ID NO: 411087 - RNA, 23 nt, Artificial Sequence
  Synthetic
auggauacuuuuggcaugggcuu

SEQ ID NO: 411088 - RNA, 24 nt, Artificial Sequence
  Synthetic
aauggauacuuuuggcaugggcuu

SEQ ID NO: 411089 - RNA, 18 nt, Artificial Sequence
  Synthetic
uuuugguucuaugggcuu

SEQ ID NO: 411090 - RNA, 19 nt, Artificial Sequence
  Synthetic
guuuugguucuaugggcuu

SEQ ID NO: 411091 - RNA, 20 nt, Artificial Sequence
  Synthetic
aguuuugguucuaugggcuu

SEQ ID NO: 411092 - RNA, 21 nt, Artificial Sequence
  Synthetic
aaguuuugguucuaugggcuu

SEQ ID NO: 411093 - RNA, 22 nt, Artificial Sequence
  Synthetic
uaaguuuugguucuaugggcuu

SEQ ID NO: 411094 - RNA, 23 nt, Artificial Sequence
  Synthetic
guaaguuuugguucuaugggcuu

SEQ ID NO: 411095 - RNA, 24 nt, Artificial Sequence
  Synthetic
gguaaguuuugguucuaugggcuu

SEQ ID NO: 411096 - RNA, 18 nt, Artificial Sequence
  Synthetic
ucuuaagugugugggcuu

SEQ ID NO: 411097 - RNA, 19 nt, Artificial Sequence
  Synthetic
uucuuaagugugugggcuu

SEQ ID NO: 411098 - RNA, 20 nt, Artificial Sequence
  Synthetic
guucuuaagugugugggcuu

SEQ ID NO: 411099 - RNA, 21 nt, Artificial Sequence
  Synthetic
aguucuuaagugugugggcuu

SEQ ID NO: 411100 - RNA, 22 nt, Artificial Sequence
  Synthetic
uaguucuuaagugugugggcuu

SEQ ID NO: 411101 - RNA, 23 nt, Artificial Sequence
  Synthetic
auaguucuuaagugugugggcuu

SEQ ID NO: 411102 - RNA, 24 nt, Artificial Sequence
  Synthetic
uauaguucuuaagugugugggcuu

SEQ ID NO: 411103 - RNA, 18 nt, Artificial Sequence
  Synthetic
cuacccgccaaauggcuu

SEQ ID NO: 411104 - RNA, 19 nt, Artificial Sequence
  Synthetic
ucuacccgccaaauggcuu

SEQ ID NO: 411105 - RNA, 20 nt, Artificial Sequence
  Synthetic
cucuacccgccaaauggcuu

SEQ ID NO: 411106 - RNA, 21 nt, Artificial Sequence
  Synthetic
ccucuacccgccaaauggcuu

SEQ ID NO: 411107 - RNA, 22 nt, Artificial Sequence
  Synthetic
cccucuacccgccaaauggcuu

SEQ ID NO: 411108 - RNA, 23 nt, Artificial Sequence
  Synthetic
acccucuacccgccaaauggcuu

SEQ ID NO: 411109 - RNA, 24 nt, Artificial Sequence
  Synthetic
cacccucuacccgccaaauggcuu

SEQ ID NO: 411110 - RNA, 18 nt, Artificial Sequence
  Synthetic
gucugcuggauauggcuu

SEQ ID NO: 411111 - RNA, 19 nt, Artificial Sequence
  Synthetic
ggucugcuggauauggcuu

SEQ ID NO: 411112 - RNA, 20 nt, Artificial Sequence
  Synthetic
gggucugcuggauauggcuu

SEQ ID NO: 411113 - RNA, 21 nt, Artificial Sequence
  Synthetic
ugggucugcuggauauggcuu

SEQ ID NO: 411114 - RNA, 22 nt, Artificial Sequence
  Synthetic
gugggucugcuggauauggcuu

SEQ ID NO: 411115 - RNA, 23 nt, Artificial Sequence
  Synthetic
ggugggucugcuggauauggcuu

SEQ ID NO: 411116 - RNA, 24 nt, Artificial Sequence
  Synthetic
cggugggucugcuggauauggcuu

SEQ ID NO: 411117 - RNA, 18 nt, Artificial Sequence
  Synthetic
acagacgaacuauggcuu

SEQ ID NO: 411118 - RNA, 19 nt, Artificial Sequence
  Synthetic
gacagacgaacuauggcuu

SEQ ID NO: 411119 - RNA, 20 nt, Artificial Sequence
  Synthetic
ggacagacgaacuauggcuu

SEQ ID NO: 411120 - RNA, 21 nt, Artificial Sequence
  Synthetic
uggacagacgaacuauggcuu

SEQ ID NO: 411121 - RNA, 22 nt, Artificial Sequence
  Synthetic
guggacagacgaacuauggcuu

SEQ ID NO: 411122 - RNA, 23 nt, Artificial Sequence
  Synthetic
uguggacagacgaacuauggcuu

SEQ ID NO: 411123 - RNA, 24 nt, Artificial Sequence
  Synthetic
auguggacagacgaacuauggcuu

SEQ ID NO: 411124 - RNA, 18 nt, Artificial Sequence
  Synthetic
uuauuuacuuacuggcuu

SEQ ID NO: 411125 - RNA, 19 nt, Artificial Sequence
  Synthetic
auuauuuacuuacuggcuu

SEQ ID NO: 411126 - RNA, 20 nt, Artificial Sequence
  Synthetic
cauuauuuacuuacuggcuu

SEQ ID NO: 411127 - RNA, 21 nt, Artificial Sequence
  Synthetic
acauuauuuacuuacuggcuu

SEQ ID NO: 411128 - RNA, 22 nt, Artificial Sequence
  Synthetic
cacauuauuuacuuacuggcuu

SEQ ID NO: 411129 - RNA, 23 nt, Artificial Sequence
  Synthetic
ccacauuauuuacuuacuggcuu

SEQ ID NO: 411130 - RNA, 24 nt, Artificial Sequence
  Synthetic
accacauuauuuacuuacuggcuu

SEQ ID NO: 411131 - RNA, 18 nt, Artificial Sequence
  Synthetic
ccaucugcaauguggcuu

SEQ ID NO: 411132 - RNA, 19 nt, Artificial Sequence
  Synthetic
accaucugcaauguggcuu

SEQ ID NO: 411133 - RNA, 20 nt, Artificial Sequence
  Synthetic
uaccaucugcaauguggcuu

SEQ ID NO: 411134 - RNA, 21 nt, Artificial Sequence
  Synthetic
cuaccaucugcaauguggcuu

SEQ ID NO: 411135 - RNA, 22 nt, Artificial Sequence
  Synthetic
acuaccaucugcaauguggcuu

SEQ ID NO: 411136 - RNA, 23 nt, Artificial Sequence
  Synthetic
uacuaccaucugcaauguggcuu

SEQ ID NO: 411137 - RNA, 24 nt, Artificial Sequence
  Synthetic
auacuaccaucugcaauguggcuu

SEQ ID NO: 411138 - RNA, 18 nt, Artificial Sequence
  Synthetic
caagguguuuuguggcuu

SEQ ID NO: 411139 - RNA, 19 nt, Artificial Sequence
  Synthetic
gcaagguguuuuguggcuu

SEQ ID NO: 411140 - RNA, 20 nt, Artificial Sequence
  Synthetic
agcaagguguuuuguggcuu

SEQ ID NO: 411141 - RNA, 21 nt, Artificial Sequence
  Synthetic
cagcaagguguuuuguggcuu

SEQ ID NO: 411142 - RNA, 22 nt, Artificial Sequence
  Synthetic
acagcaagguguuuuguggcuu

SEQ ID NO: 411143 - RNA, 23 nt, Artificial Sequence
  Synthetic
aacagcaagguguuuuguggcuu

SEQ ID NO: 411144 - RNA, 24 nt, Artificial Sequence
  Synthetic
uaacagcaagguguuuuguggcuu

SEQ ID NO: 411145 - RNA, 18 nt, Artificial Sequence
  Synthetic
uuguguuuuuuguggcuu

SEQ ID NO: 411146 - RNA, 19 nt, Artificial Sequence
  Synthetic
uuuguguuuuuuguggcuu

SEQ ID NO: 411147 - RNA, 20 nt, Artificial Sequence
  Synthetic
auuuguguuuuuuguggcuu

SEQ ID NO: 411148 - RNA, 21 nt, Artificial Sequence
  Synthetic
uauuuguguuuuuuguggcuu

SEQ ID NO: 411149 - RNA, 22 nt, Artificial Sequence
  Synthetic
cuauuuguguuuuuuguggcuu

SEQ ID NO: 411150 - RNA, 23 nt, Artificial Sequence
  Synthetic
ucuauuuguguuuuuuguggcuu

SEQ ID NO: 411151 - RNA, 24 nt, Artificial Sequence
  Synthetic
uucuauuuguguuuuuuguggcuu

SEQ ID NO: 411152 - RNA, 18 nt, Artificial Sequence
  Synthetic
cauucuggacauuggcuu

SEQ ID NO: 411153 - RNA, 19 nt, Artificial Sequence
  Synthetic
ccauucuggacauuggcuu

SEQ ID NO: 411154 - RNA, 20 nt, Artificial Sequence
  Synthetic
accauucuggacauuggcuu

SEQ ID NO: 411155 - RNA, 21 nt, Artificial Sequence
  Synthetic
uaccauucuggacauuggcuu

SEQ ID NO: 411156 - RNA, 22 nt, Artificial Sequence
  Synthetic
auaccauucuggacauuggcuu

SEQ ID NO: 411157 - RNA, 23 nt, Artificial Sequence
  Synthetic
aauaccauucuggacauuggcuu

SEQ ID NO: 411158 - RNA, 24 nt, Artificial Sequence
  Synthetic
aaauaccauucuggacauuggcuu

SEQ ID NO: 411159 - RNA, 18 nt, Artificial Sequence
  Synthetic
ugauagugugguuggcuu

SEQ ID NO: 411160 - RNA, 19 nt, Artificial Sequence
  Synthetic
uugauagugugguuggcuu

SEQ ID NO: 411161 - RNA, 20 nt, Artificial Sequence
  Synthetic
cuugauagugugguuggcuu

SEQ ID NO: 411162 - RNA, 21 nt, Artificial Sequence
  Synthetic
acuugauagugugguuggcuu

SEQ ID NO: 411163 - RNA, 22 nt, Artificial Sequence
  Synthetic
uacuugauagugugguuggcuu

SEQ ID NO: 411164 - RNA, 23 nt, Artificial Sequence
  Synthetic
auacuugauagugugguuggcuu

SEQ ID NO: 411165 - RNA, 24 nt, Artificial Sequence
  Synthetic
aauacuugauagugugguuggcuu

SEQ ID NO: 411166 - RNA, 18 nt, Artificial Sequence
  Synthetic
gacucuucauguuggcuu

SEQ ID NO: 411167 - RNA, 19 nt, Artificial Sequence
  Synthetic
ugacucuucauguuggcuu

SEQ ID NO: 411168 - RNA, 20 nt, Artificial Sequence
  Synthetic
cugacucuucauguuggcuu

SEQ ID NO: 411169 - RNA, 21 nt, Artificial Sequence
  Synthetic
ucugacucuucauguuggcuu

SEQ ID NO: 411170 - RNA, 22 nt, Artificial Sequence
  Synthetic
aucugacucuucauguuggcuu

SEQ ID NO: 411171 - RNA, 23 nt, Artificial Sequence
  Synthetic
caucugacucuucauguuggcuu

SEQ ID NO: 411172 - RNA, 24 nt, Artificial Sequence
  Synthetic
ccaucugacucuucauguuggcuu

SEQ ID NO: 411173 - RNA, 18 nt, Artificial Sequence
  Synthetic
uggauuaggcuuuggcuu

SEQ ID NO: 411174 - RNA, 19 nt, Artificial Sequence
  Synthetic
cuggauuaggcuuuggcuu

SEQ ID NO: 411175 - RNA, 20 nt, Artificial Sequence
  Synthetic
ucuggauuaggcuuuggcuu

SEQ ID NO: 411176 - RNA, 21 nt, Artificial Sequence
  Synthetic
cucuggauuaggcuuuggcuu

SEQ ID NO: 411177 - RNA, 22 nt, Artificial Sequence
  Synthetic
gcucuggauuaggcuuuggcuu

SEQ ID NO: 411178 - RNA, 23 nt, Artificial Sequence
  Synthetic
ugcucuggauuaggcuuuggcuu

SEQ ID NO: 411179 - RNA, 24 nt, Artificial Sequence
  Synthetic
uugcucuggauuaggcuuuggcuu

SEQ ID NO: 411180 - RNA, 18 nt, Artificial Sequence
  Synthetic
uugguacaaguuuggcuu

SEQ ID NO: 411181 - RNA, 19 nt, Artificial Sequence
  Synthetic
uuugguacaaguuuggcuu

SEQ ID NO: 411182 - RNA, 20 nt, Artificial Sequence
  Synthetic
uuuugguacaaguuuggcuu

SEQ ID NO: 411183 - RNA, 21 nt, Artificial Sequence
  Synthetic
cuuuugguacaaguuuggcuu

SEQ ID NO: 411184 - RNA, 22 nt, Artificial Sequence
  Synthetic
acuuuugguacaaguuuggcuu

SEQ ID NO: 411185 - RNA, 23 nt, Artificial Sequence
  Synthetic
gacuuuugguacaaguuuggcuu

SEQ ID NO: 411186 - RNA, 24 nt, Artificial Sequence
  Synthetic
ugacuuuugguacaaguuuggcuu

SEQ ID NO: 411187 - RNA, 18 nt, Artificial Sequence
  Synthetic
aauuuucauguuuggcuu

SEQ ID NO: 411188 - RNA, 19 nt, Artificial Sequence
  Synthetic
aaauuuucauguuuggcuu

SEQ ID NO: 411189 - RNA, 20 nt, Artificial Sequence
  Synthetic
uaaauuuucauguuuggcuu

SEQ ID NO: 411190 - RNA, 21 nt, Artificial Sequence
  Synthetic
uuaaauuuucauguuuggcuu

SEQ ID NO: 411191 - RNA, 22 nt, Artificial Sequence
  Synthetic
auuaaauuuucauguuuggcuu

SEQ ID NO: 411192 - RNA, 23 nt, Artificial Sequence
  Synthetic
aauuaaauuuucauguuuggcuu

SEQ ID NO: 411193 - RNA, 24 nt, Artificial Sequence
  Synthetic
uaauuaaauuuucauguuuggcuu

SEQ ID NO: 411194 - RNA, 18 nt, Artificial Sequence
  Synthetic
gagaacaaaaaaaugcuu

SEQ ID NO: 411195 - RNA, 19 nt, Artificial Sequence
  Synthetic
ggagaacaaaaaaaugcuu

SEQ ID NO: 411196 - RNA, 20 nt, Artificial Sequence
  Synthetic
aggagaacaaaaaaaugcuu

SEQ ID NO: 411197 - RNA, 21 nt, Artificial Sequence
  Synthetic
gaggagaacaaaaaaaugcuu

SEQ ID NO: 411198 - RNA, 22 nt, Artificial Sequence
  Synthetic
agaggagaacaaaaaaaugcuu

SEQ ID NO: 411199 - RNA, 23 nt, Artificial Sequence
  Synthetic
aagaggagaacaaaaaaaugcuu

SEQ ID NO: 411200 - RNA, 24 nt, Artificial Sequence
  Synthetic
aaagaggagaacaaaaaaaugcuu

SEQ ID NO: 411201 - RNA, 18 nt, Artificial Sequence
  Synthetic
uuuuaaaccacaaugcuu

SEQ ID NO: 411202 - RNA, 19 nt, Artificial Sequence
  Synthetic
auuuuaaaccacaaugcuu

SEQ ID NO: 411203 - RNA, 20 nt, Artificial Sequence
  Synthetic
uauuuuaaaccacaaugcuu

SEQ ID NO: 411204 - RNA, 21 nt, Artificial Sequence
  Synthetic
auauuuuaaaccacaaugcuu

SEQ ID NO: 411205 - RNA, 22 nt, Artificial Sequence
  Synthetic
aauauuuuaaaccacaaugcuu

SEQ ID NO: 411206 - RNA, 23 nt, Artificial Sequence
  Synthetic
gaauauuuuaaaccacaaugcuu

SEQ ID NO: 411207 - RNA, 24 nt, Artificial Sequence
  Synthetic
ugaauauuuuaaaccacaaugcuu

SEQ ID NO: 411208 - RNA, 18 nt, Artificial Sequence
  Synthetic
cuucugaagagaaugcuu

SEQ ID NO: 411209 - RNA, 19 nt, Artificial Sequence
  Synthetic
acuucugaagagaaugcuu

SEQ ID NO: 411210 - RNA, 20 nt, Artificial Sequence
  Synthetic
aacuucugaagagaaugcuu

SEQ ID NO: 411211 - RNA, 21 nt, Artificial Sequence
  Synthetic
uaacuucugaagagaaugcuu

SEQ ID NO: 411212 - RNA, 22 nt, Artificial Sequence
  Synthetic
uuaacuucugaagagaaugcuu

SEQ ID NO: 411213 - RNA, 23 nt, Artificial Sequence
  Synthetic
auuaacuucugaagagaaugcuu

SEQ ID NO: 411214 - RNA, 24 nt, Artificial Sequence
  Synthetic
uauuaacuucugaagagaaugcuu

SEQ ID NO: 411215 - RNA, 18 nt, Artificial Sequence
  Synthetic
uuauuuaucggaaugcuu

SEQ ID NO: 411216 - RNA, 19 nt, Artificial Sequence
  Synthetic
uuuauuuaucggaaugcuu

SEQ ID NO: 411217 - RNA, 20 nt, Artificial Sequence
  Synthetic
auuuauuuaucggaaugcuu

SEQ ID NO: 411218 - RNA, 21 nt, Artificial Sequence
  Synthetic
aauuuauuuaucggaaugcuu

SEQ ID NO: 411219 - RNA, 22 nt, Artificial Sequence
  Synthetic
aaauuuauuuaucggaaugcuu

SEQ ID NO: 411220 - RNA, 23 nt, Artificial Sequence
  Synthetic
aaaauuuauuuaucggaaugcuu

SEQ ID NO: 411221 - RNA, 24 nt, Artificial Sequence
  Synthetic
gaaaauuuauuuaucggaaugcuu

SEQ ID NO: 411222 - RNA, 18 nt, Artificial Sequence
  Synthetic
gaacugaacugaaugcuu

SEQ ID NO: 411223 - RNA, 19 nt, Artificial Sequence
  Synthetic
ugaacugaacugaaugcuu

SEQ ID NO: 411224 - RNA, 20 nt, Artificial Sequence
  Synthetic
cugaacugaacugaaugcuu

SEQ ID NO: 411225 - RNA, 21 nt, Artificial Sequence
  Synthetic
ucugaacugaacugaaugcuu

SEQ ID NO: 411226 - RNA, 22 nt, Artificial Sequence
  Synthetic
uucugaacugaacugaaugcuu

SEQ ID NO: 411227 - RNA, 23 nt, Artificial Sequence
  Synthetic
cuucugaacugaacugaaugcuu

SEQ ID NO: 411228 - RNA, 24 nt, Artificial Sequence
  Synthetic
ucuucugaacugaacugaaugcuu

SEQ ID NO: 411229 - RNA, 18 nt, Artificial Sequence
  Synthetic
auacuaaauugaaugcuu

SEQ ID NO: 411230 - RNA, 19 nt, Artificial Sequence
  Synthetic
aauacuaaauugaaugcuu

SEQ ID NO: 411231 - RNA, 20 nt, Artificial Sequence
  Synthetic
gaauacuaaauugaaugcuu

SEQ ID NO: 411232 - RNA, 21 nt, Artificial Sequence
  Synthetic
ugaauacuaaauugaaugcuu

SEQ ID NO: 411233 - RNA, 22 nt, Artificial Sequence
  Synthetic
augaauacuaaauugaaugcuu

SEQ ID NO: 411234 - RNA, 23 nt, Artificial Sequence
  Synthetic
uaugaauacuaaauugaaugcuu

SEQ ID NO: 411235 - RNA, 24 nt, Artificial Sequence
  Synthetic
cuaugaauacuaaauugaaugcuu

SEQ ID NO: 411236 - RNA, 18 nt, Artificial Sequence
  Synthetic
cuugcuacuauaaugcuu

SEQ ID NO: 411237 - RNA, 19 nt, Artificial Sequence
  Synthetic
ccuugcuacuauaaugcuu

SEQ ID NO: 411238 - RNA, 20 nt, Artificial Sequence
  Synthetic
accuugcuacuauaaugcuu

SEQ ID NO: 411239 - RNA, 21 nt, Artificial Sequence
  Synthetic
caccuugcuacuauaaugcuu

SEQ ID NO: 411240 - RNA, 22 nt, Artificial Sequence
  Synthetic
ucaccuugcuacuauaaugcuu

SEQ ID NO: 411241 - RNA, 23 nt, Artificial Sequence
  Synthetic
aucaccuugcuacuauaaugcuu

SEQ ID NO: 411242 - RNA, 24 nt, Artificial Sequence
  Synthetic
aaucaccuugcuacuauaaugcuu

SEQ ID NO: 411243 - RNA, 18 nt, Artificial Sequence
  Synthetic
aaauuuaaaagcaugcuu

SEQ ID NO: 411244 - RNA, 19 nt, Artificial Sequence
  Synthetic
aaaauuuaaaagcaugcuu

SEQ ID NO: 411245 - RNA, 20 nt, Artificial Sequence
  Synthetic
aaaaauuuaaaagcaugcuu

SEQ ID NO: 411246 - RNA, 21 nt, Artificial Sequence
  Synthetic
aaaaaauuuaaaagcaugcuu

SEQ ID NO: 411247 - RNA, 22 nt, Artificial Sequence
  Synthetic
aaaaaaauuuaaaagcaugcuu

SEQ ID NO: 411248 - RNA, 23 nt, Artificial Sequence
  Synthetic
aaaaaaaauuuaaaagcaugcuu

SEQ ID NO: 411249 - RNA, 24 nt, Artificial Sequence
  Synthetic
aaaaaaaaauuuaaaagcaugcuu

SEQ ID NO: 411250 - RNA, 18 nt, Artificial Sequence
  Synthetic
cuaucagguuucaugcuu

SEQ ID NO: 411251 - RNA, 19 nt, Artificial Sequence
  Synthetic
ucuaucagguuucaugcuu

SEQ ID NO: 411252 - RNA, 20 nt, Artificial Sequence
  Synthetic
gucuaucagguuucaugcuu

SEQ ID NO: 411253 - RNA, 21 nt, Artificial Sequence
  Synthetic
ugucuaucagguuucaugcuu

SEQ ID NO: 411254 - RNA, 22 nt, Artificial Sequence
  Synthetic
augucuaucagguuucaugcuu

SEQ ID NO: 411255 - RNA, 23 nt, Artificial Sequence
  Synthetic
aaugucuaucagguuucaugcuu

SEQ ID NO: 411256 - RNA, 24 nt, Artificial Sequence
  Synthetic
gaaugucuaucagguuucaugcuu

SEQ ID NO: 411257 - RNA, 18 nt, Artificial Sequence
  Synthetic
aaagaaugagagaugcuu

SEQ ID NO: 411258 - RNA, 19 nt, Artificial Sequence
  Synthetic
caaagaaugagagaugcuu

SEQ ID NO: 411259 - RNA, 20 nt, Artificial Sequence
  Synthetic
ccaaagaaugagagaugcuu

SEQ ID NO: 411260 - RNA, 21 nt, Artificial Sequence
  Synthetic
cccaaagaaugagagaugcuu

SEQ ID NO: 411261 - RNA, 22 nt, Artificial Sequence
  Synthetic
gcccaaagaaugagagaugcuu

SEQ ID NO: 411262 - RNA, 23 nt, Artificial Sequence
  Synthetic
ugcccaaagaaugagagaugcuu

SEQ ID NO: 411263 - RNA, 24 nt, Artificial Sequence
  Synthetic
uugcccaaagaaugagagaugcuu

SEQ ID NO: 411264 - RNA, 18 nt, Artificial Sequence
  Synthetic
cuuuaaaaauauaugcuu

SEQ ID NO: 411265 - RNA, 19 nt, Artificial Sequence
  Synthetic
acuuuaaaaauauaugcuu

SEQ ID NO: 411266 - RNA, 20 nt, Artificial Sequence
  Synthetic
uacuuuaaaaauauaugcuu

SEQ ID NO: 411267 - RNA, 21 nt, Artificial Sequence
  Synthetic
cuacuuuaaaaauauaugcuu

SEQ ID NO: 411268 - RNA, 22 nt, Artificial Sequence
  Synthetic
gcuacuuuaaaaauauaugcuu

SEQ ID NO: 411269 - RNA, 23 nt, Artificial Sequence
  Synthetic
agcuacuuuaaaaauauaugcuu

SEQ ID NO: 411270 - RNA, 24 nt, Artificial Sequence
  Synthetic
gagcuacuuuaaaaauauaugcuu

SEQ ID NO: 411271 - RNA, 18 nt, Artificial Sequence
  Synthetic
aacauccuauuuaugcuu

SEQ ID NO: 411272 - RNA, 19 nt, Artificial Sequence
  Synthetic
caacauccuauuuaugcuu

SEQ ID NO: 411273 - RNA, 20 nt, Artificial Sequence
  Synthetic
ucaacauccuauuuaugcuu

SEQ ID NO: 411274 - RNA, 21 nt, Artificial Sequence
  Synthetic
aucaacauccuauuuaugcuu

SEQ ID NO: 411275 - RNA, 22 nt, Artificial Sequence
  Synthetic
aaucaacauccuauuuaugcuu

SEQ ID NO: 411276 - RNA, 23 nt, Artificial Sequence
  Synthetic
gaaucaacauccuauuuaugcuu

SEQ ID NO: 411277 - RNA, 24 nt, Artificial Sequence
  Synthetic
ugaaucaacauccuauuuaugcuu

SEQ ID NO: 411278 - RNA, 18 nt, Artificial Sequence
  Synthetic
uauuuucuuucacugcuu

SEQ ID NO: 411279 - RNA, 19 nt, Artificial Sequence
  Synthetic
uuauuuucuuucacugcuu

SEQ ID NO: 411280 - RNA, 20 nt, Artificial Sequence
  Synthetic
uuuauuuucuuucacugcuu

SEQ ID NO: 411281 - RNA, 21 nt, Artificial Sequence
  Synthetic
uuuuauuuucuuucacugcuu

SEQ ID NO: 411282 - RNA, 22 nt, Artificial Sequence
  Synthetic
guuuuauuuucuuucacugcuu

SEQ ID NO: 411283 - RNA, 23 nt, Artificial Sequence
  Synthetic
uguuuuauuuucuuucacugcuu

SEQ ID NO: 411284 - RNA, 24 nt, Artificial Sequence
  Synthetic
uuguuuuauuuucuuucacugcuu

SEQ ID NO: 411285 - RNA, 18 nt, Artificial Sequence
  Synthetic
augugggcacuacugcuu

SEQ ID NO: 411286 - RNA, 19 nt, Artificial Sequence
  Synthetic
uaugugggcacuacugcuu

SEQ ID NO: 411287 - RNA, 20 nt, Artificial Sequence
  Synthetic
auaugugggcacuacugcuu

SEQ ID NO: 411288 - RNA, 21 nt, Artificial Sequence
  Synthetic
aauaugugggcacuacugcuu

SEQ ID NO: 411289 - RNA, 22 nt, Artificial Sequence
  Synthetic
aaauaugugggcacuacugcuu

SEQ ID NO: 411290 - RNA, 23 nt, Artificial Sequence
  Synthetic
uaaauaugugggcacuacugcuu

SEQ ID NO: 411291 - RNA, 24 nt, Artificial Sequence
  Synthetic
auaaauaugugggcacuacugcuu

SEQ ID NO: 411292 - RNA, 18 nt, Artificial Sequence
  Synthetic
agauuuaagcuacugcuu

SEQ ID NO: 411293 - RNA, 19 nt, Artificial Sequence
  Synthetic
uagauuuaagcuacugcuu

SEQ ID NO: 411294 - RNA, 20 nt, Artificial Sequence
  Synthetic
uuagauuuaagcuacugcuu

SEQ ID NO: 411295 - RNA, 21 nt, Artificial Sequence
  Synthetic
cuuagauuuaagcuacugcuu

SEQ ID NO: 411296 - RNA, 22 nt, Artificial Sequence
  Synthetic
acuuagauuuaagcuacugcuu

SEQ ID NO: 411297 - RNA, 23 nt, Artificial Sequence
  Synthetic
gacuuagauuuaagcuacugcuu

SEQ ID NO: 411298 - RNA, 24 nt, Artificial Sequence
  Synthetic
ugacuuagauuuaagcuacugcuu

SEQ ID NO: 411299 - RNA, 18 nt, Artificial Sequence
  Synthetic
uagucucaugaccugcuu

SEQ ID NO: 411300 - RNA, 19 nt, Artificial Sequence
  Synthetic
auagucucaugaccugcuu

SEQ ID NO: 411301 - RNA, 20 nt, Artificial Sequence
  Synthetic
gauagucucaugaccugcuu

SEQ ID NO: 411302 - RNA, 21 nt, Artificial Sequence
  Synthetic
ugauagucucaugaccugcuu

SEQ ID NO: 411303 - RNA, 22 nt, Artificial Sequence
  Synthetic
augauagucucaugaccugcuu

SEQ ID NO: 411304 - RNA, 23 nt, Artificial Sequence
  Synthetic
uaugauagucucaugaccugcuu

SEQ ID NO: 411305 - RNA, 24 nt, Artificial Sequence
  Synthetic
guaugauagucucaugaccugcuu

SEQ ID NO: 411306 - RNA, 18 nt, Artificial Sequence
  Synthetic
aaauggagucuccugcuu

SEQ ID NO: 411307 - RNA, 19 nt, Artificial Sequence
  Synthetic
aaaauggagucuccugcuu

SEQ ID NO: 411308 - RNA, 20 nt, Artificial Sequence
  Synthetic
uaaaauggagucuccugcuu

SEQ ID NO: 411309 - RNA, 21 nt, Artificial Sequence
  Synthetic
uuaaaauggagucuccugcuu

SEQ ID NO: 411310 - RNA, 22 nt, Artificial Sequence
  Synthetic
auuaaaauggagucuccugcuu

SEQ ID NO: 411311 - RNA, 23 nt, Artificial Sequence
  Synthetic
aauuaaaauggagucuccugcuu

SEQ ID NO: 411312 - RNA, 24 nt, Artificial Sequence
  Synthetic
aaauuaaaauggagucuccugcuu

SEQ ID NO: 411313 - RNA, 18 nt, Artificial Sequence
  Synthetic
gcuacauuauagcugcuu

SEQ ID NO: 411314 - RNA, 19 nt, Artificial Sequence
  Synthetic
ggcuacauuauagcugcuu

SEQ ID NO: 411315 - RNA, 20 nt, Artificial Sequence
  Synthetic
cggcuacauuauagcugcuu

SEQ ID NO: 411316 - RNA, 21 nt, Artificial Sequence
  Synthetic
ucggcuacauuauagcugcuu

SEQ ID NO: 411317 - RNA, 22 nt, Artificial Sequence
  Synthetic
uucggcuacauuauagcugcuu

SEQ ID NO: 411318 - RNA, 23 nt, Artificial Sequence
  Synthetic
cuucggcuacauuauagcugcuu

SEQ ID NO: 411319 - RNA, 24 nt, Artificial Sequence
  Synthetic
gcuucggcuacauuauagcugcuu

SEQ ID NO: 411320 - RNA, 18 nt, Artificial Sequence
  Synthetic
gugagcgagaggcugcuu

SEQ ID NO: 411321 - RNA, 19 nt, Artificial Sequence
  Synthetic
agugagcgagaggcugcuu

SEQ ID NO: 411322 - RNA, 20 nt, Artificial Sequence
  Synthetic
gagugagcgagaggcugcuu

SEQ ID NO: 411323 - RNA, 21 nt, Artificial Sequence
  Synthetic
ugagugagcgagaggcugcuu

SEQ ID NO: 411324 - RNA, 22 nt, Artificial Sequence
  Synthetic
gugagugagcgagaggcugcuu

SEQ ID NO: 411325 - RNA, 23 nt, Artificial Sequence
  Synthetic
ggugagugagcgagaggcugcuu

SEQ ID NO: 411326 - RNA, 24 nt, Artificial Sequence
  Synthetic
gggugagugagcgagaggcugcuu

SEQ ID NO: 411327 - RNA, 18 nt, Artificial Sequence
  Synthetic
uuuauuuucgcucugcuu

SEQ ID NO: 411328 - RNA, 19 nt, Artificial Sequence
  Synthetic
uuuuauuuucgcucugcuu

SEQ ID NO: 411329 - RNA, 20 nt, Artificial Sequence
  Synthetic
cuuuuauuuucgcucugcuu

SEQ ID NO: 411330 - RNA, 21 nt, Artificial Sequence
  Synthetic
acuuuuauuuucgcucugcuu

SEQ ID NO: 411331 - RNA, 22 nt, Artificial Sequence
  Synthetic
uacuuuuauuuucgcucugcuu

SEQ ID NO: 411332 - RNA, 23 nt, Artificial Sequence
  Synthetic
auacuuuuauuuucgcucugcuu

SEQ ID NO: 411333 - RNA, 24 nt, Artificial Sequence
  Synthetic
gauacuuuuauuuucgcucugcuu

SEQ ID NO: 411334 - RNA, 18 nt, Artificial Sequence
  Synthetic
uggcuuuggaaagugcuu

SEQ ID NO: 411335 - RNA, 19 nt, Artificial Sequence
  Synthetic
uuggcuuuggaaagugcuu

SEQ ID NO: 411336 - RNA, 20 nt, Artificial Sequence
  Synthetic
uuuggcuuuggaaagugcuu

SEQ ID NO: 411337 - RNA, 21 nt, Artificial Sequence
  Synthetic
guuuggcuuuggaaagugcuu

SEQ ID NO: 411338 - RNA, 22 nt, Artificial Sequence
  Synthetic
aguuuggcuuuggaaagugcuu

SEQ ID NO: 411339 - RNA, 23 nt, Artificial Sequence
  Synthetic
aaguuuggcuuuggaaagugcuu

SEQ ID NO: 411340 - RNA, 24 nt, Artificial Sequence
  Synthetic
caaguuuggcuuuggaaagugcuu

SEQ ID NO: 411341 - RNA, 18 nt, Artificial Sequence
  Synthetic
cuuguaaucccagugcuu

SEQ ID NO: 411342 - RNA, 19 nt, Artificial Sequence
  Synthetic
acuuguaaucccagugcuu

SEQ ID NO: 411343 - RNA, 20 nt, Artificial Sequence
  Synthetic
cacuuguaaucccagugcuu

SEQ ID NO: 411344 - RNA, 21 nt, Artificial Sequence
  Synthetic
acacuuguaaucccagugcuu

SEQ ID NO: 411345 - RNA, 22 nt, Artificial Sequence
  Synthetic
cacacuuguaaucccagugcuu

SEQ ID NO: 411346 - RNA, 23 nt, Artificial Sequence
  Synthetic
ucacacuuguaaucccagugcuu

SEQ ID NO: 411347 - RNA, 24 nt, Artificial Sequence
  Synthetic
cucacacuuguaaucccagugcuu

SEQ ID NO: 411348 - RNA, 18 nt, Artificial Sequence
  Synthetic
ccugucaucucagugcuu

SEQ ID NO: 411349 - RNA, 19 nt, Artificial Sequence
  Synthetic
gccugucaucucagugcuu

SEQ ID NO: 411350 - RNA, 20 nt, Artificial Sequence
  Synthetic
ugccugucaucucagugcuu

SEQ ID NO: 411351 - RNA, 21 nt, Artificial Sequence
  Synthetic
augccugucaucucagugcuu

SEQ ID NO: 411352 - RNA, 22 nt, Artificial Sequence
  Synthetic
caugccugucaucucagugcuu

SEQ ID NO: 411353 - RNA, 23 nt, Artificial Sequence
  Synthetic
ucaugccugucaucucagugcuu

SEQ ID NO: 411354 - RNA, 24 nt, Artificial Sequence
  Synthetic
cucaugccugucaucucagugcuu

SEQ ID NO: 411355 - RNA, 18 nt, Artificial Sequence
  Synthetic
ggcaacagaaaugugcuu

SEQ ID NO: 411356 - RNA, 19 nt, Artificial Sequence
  Synthetic
uggcaacagaaaugugcuu

SEQ ID NO: 411357 - RNA, 20 nt, Artificial Sequence
  Synthetic
auggcaacagaaaugugcuu

SEQ ID NO: 411358 - RNA, 21 nt, Artificial Sequence
  Synthetic
uauggcaacagaaaugugcuu

SEQ ID NO: 411359 - RNA, 22 nt, Artificial Sequence
  Synthetic
cuauggcaacagaaaugugcuu

SEQ ID NO: 411360 - RNA, 23 nt, Artificial Sequence
  Synthetic
ucuauggcaacagaaaugugcuu

SEQ ID NO: 411361 - RNA, 24 nt, Artificial Sequence
  Synthetic
uucuauggcaacagaaaugugcuu

SEQ ID NO: 411362 - RNA, 18 nt, Artificial Sequence
  Synthetic
uaaagaguucaugugcuu

SEQ ID NO: 411363 - RNA, 19 nt, Artificial Sequence
  Synthetic
auaaagaguucaugugcuu

SEQ ID NO: 411364 - RNA, 20 nt, Artificial Sequence
  Synthetic
aauaaagaguucaugugcuu

SEQ ID NO: 411365 - RNA, 21 nt, Artificial Sequence
  Synthetic
gaauaaagaguucaugugcuu

SEQ ID NO: 411366 - RNA, 22 nt, Artificial Sequence
  Synthetic
agaauaaagaguucaugugcuu

SEQ ID NO: 411367 - RNA, 23 nt, Artificial Sequence
  Synthetic
uagaauaaagaguucaugugcuu

SEQ ID NO: 411368 - RNA, 24 nt, Artificial Sequence
  Synthetic
uuagaauaaagaguucaugugcuu

SEQ ID NO: 411369 - RNA, 18 nt, Artificial Sequence
  Synthetic
ggauuuucugaugugcuu

SEQ ID NO: 411370 - RNA, 19 nt, Artificial Sequence
  Synthetic
aggauuuucugaugugcuu

SEQ ID NO: 411371 - RNA, 20 nt, Artificial Sequence
  Synthetic
aaggauuuucugaugugcuu

SEQ ID NO: 411372 - RNA, 21 nt, Artificial Sequence
  Synthetic
aaaggauuuucugaugugcuu

SEQ ID NO: 411373 - RNA, 22 nt, Artificial Sequence
  Synthetic
uaaaggauuuucugaugugcuu

SEQ ID NO: 411374 - RNA, 23 nt, Artificial Sequence
  Synthetic
guaaaggauuuucugaugugcuu

SEQ ID NO: 411375 - RNA, 24 nt, Artificial Sequence
  Synthetic
gguaaaggauuuucugaugugcuu

SEQ ID NO: 411376 - RNA, 18 nt, Artificial Sequence
  Synthetic
uuaaugacuacugugcuu

SEQ ID NO: 411377 - RNA, 19 nt, Artificial Sequence
  Synthetic
auuaaugacuacugugcuu

SEQ ID NO: 411378 - RNA, 20 nt, Artificial Sequence
  Synthetic
aauuaaugacuacugugcuu

SEQ ID NO: 411379 - RNA, 21 nt, Artificial Sequence
  Synthetic
caauuaaugacuacugugcuu

SEQ ID NO: 411380 - RNA, 22 nt, Artificial Sequence
  Synthetic
gcaauuaaugacuacugugcuu

SEQ ID NO: 411381 - RNA, 23 nt, Artificial Sequence
  Synthetic
agcaauuaaugacuacugugcuu

SEQ ID NO: 411382 - RNA, 24 nt, Artificial Sequence
  Synthetic
uagcaauuaaugacuacugugcuu

SEQ ID NO: 411383 - RNA, 18 nt, Artificial Sequence
  Synthetic
ccuguaaucccugugcuu

SEQ ID NO: 411384 - RNA, 19 nt, Artificial Sequence
  Synthetic
gccuguaaucccugugcuu

SEQ ID NO: 411385 - RNA, 20 nt, Artificial Sequence
  Synthetic
ugccuguaaucccugugcuu

SEQ ID NO: 411386 - RNA, 21 nt, Artificial Sequence
  Synthetic
augccuguaaucccugugcuu

SEQ ID NO: 411387 - RNA, 22 nt, Artificial Sequence
  Synthetic
caugccuguaaucccugugcuu

SEQ ID NO: 411388 - RNA, 23 nt, Artificial Sequence
  Synthetic
ucaugccuguaaucccugugcuu

SEQ ID NO: 411389 - RNA, 24 nt, Artificial Sequence
  Synthetic
cucaugccuguaaucccugugcuu

SEQ ID NO: 411390 - RNA, 18 nt, Artificial Sequence
  Synthetic
ugagaaugcuuugugcuu

SEQ ID NO: 411391 - RNA, 19 nt, Artificial Sequence
  Synthetic
augagaaugcuuugugcuu

SEQ ID NO: 411392 - RNA, 20 nt, Artificial Sequence
  Synthetic
uaugagaaugcuuugugcuu

SEQ ID NO: 411393 - RNA, 21 nt, Artificial Sequence
  Synthetic
cuaugagaaugcuuugugcuu

SEQ ID NO: 411394 - RNA, 22 nt, Artificial Sequence
  Synthetic
acuaugagaaugcuuugugcuu

SEQ ID NO: 411395 - RNA, 23 nt, Artificial Sequence
  Synthetic
gacuaugagaaugcuuugugcuu

SEQ ID NO: 411396 - RNA, 24 nt, Artificial Sequence
  Synthetic
ggacuaugagaaugcuuugugcuu

SEQ ID NO: 411397 - RNA, 18 nt, Artificial Sequence
  Synthetic
guuuuguuauaauugcuu

SEQ ID NO: 411398 - RNA, 19 nt, Artificial Sequence
  Synthetic
gguuuuguuauaauugcuu

SEQ ID NO: 411399 - RNA, 20 nt, Artificial Sequence
  Synthetic
ugguuuuguuauaauugcuu

SEQ ID NO: 411400 - RNA, 21 nt, Artificial Sequence
  Synthetic
uugguuuuguuauaauugcuu

SEQ ID NO: 411401 - RNA, 22 nt, Artificial Sequence
  Synthetic
uuugguuuuguuauaauugcuu

SEQ ID NO: 411402 - RNA, 23 nt, Artificial Sequence
  Synthetic
uuuugguuuuguuauaauugcuu

SEQ ID NO: 411403 - RNA, 24 nt, Artificial Sequence
  Synthetic
uuuuugguuuuguuauaauugcuu

SEQ ID NO: 411404 - RNA, 18 nt, Artificial Sequence
  Synthetic
aagugauucuaauugcuu

SEQ ID NO: 411405 - RNA, 19 nt, Artificial Sequence
  Synthetic
gaagugauucuaauugcuu

SEQ ID NO: 411406 - RNA, 20 nt, Artificial Sequence
  Synthetic
agaagugauucuaauugcuu

SEQ ID NO: 411407 - RNA, 21 nt, Artificial Sequence
  Synthetic
aagaagugauucuaauugcuu

SEQ ID NO: 411408 - RNA, 22 nt, Artificial Sequence
  Synthetic
aaagaagugauucuaauugcuu

SEQ ID NO: 411409 - RNA, 23 nt, Artificial Sequence
  Synthetic
aaaagaagugauucuaauugcuu

SEQ ID NO: 411410 - RNA, 24 nt, Artificial Sequence
  Synthetic
caaaagaagugauucuaauugcuu

SEQ ID NO: 411411 - RNA, 18 nt, Artificial Sequence
  Synthetic
gguuaaaagagauugcuu

SEQ ID NO: 411412 - RNA, 19 nt, Artificial Sequence
  Synthetic
ggguuaaaagagauugcuu

SEQ ID NO: 411413 - RNA, 20 nt, Artificial Sequence
  Synthetic
aggguuaaaagagauugcuu

SEQ ID NO: 411414 - RNA, 21 nt, Artificial Sequence
  Synthetic
aaggguuaaaagagauugcuu

SEQ ID NO: 411415 - RNA, 22 nt, Artificial Sequence
  Synthetic
gaaggguuaaaagagauugcuu

SEQ ID NO: 411416 - RNA, 23 nt, Artificial Sequence
  Synthetic
agaaggguuaaaagagauugcuu

SEQ ID NO: 411417 - RNA, 24 nt, Artificial Sequence
  Synthetic
uagaaggguuaaaagagauugcuu

SEQ ID NO: 411418 - RNA, 18 nt, Artificial Sequence
  Synthetic
cuugauauugacuugcuu

SEQ ID NO: 411419 - RNA, 19 nt, Artificial Sequence
  Synthetic
acuugauauugacuugcuu

SEQ ID NO: 411420 - RNA, 20 nt, Artificial Sequence
  Synthetic
uacuugauauugacuugcuu

SEQ ID NO: 411421 - RNA, 21 nt, Artificial Sequence
  Synthetic
cuacuugauauugacuugcuu

SEQ ID NO: 411422 - RNA, 22 nt, Artificial Sequence
  Synthetic
ucuacuugauauugacuugcuu

SEQ ID NO: 411423 - RNA, 23 nt, Artificial Sequence
  Synthetic
uucuacuugauauugacuugcuu

SEQ ID NO: 411424 - RNA, 24 nt, Artificial Sequence
  Synthetic
guucuacuugauauugacuugcuu

SEQ ID NO: 411425 - RNA, 18 nt, Artificial Sequence
  Synthetic
uagaucauucucuugcuu

SEQ ID NO: 411426 - RNA, 19 nt, Artificial Sequence
  Synthetic
cuagaucauucucuugcuu

SEQ ID NO: 411427 - RNA, 20 nt, Artificial Sequence
  Synthetic
ccuagaucauucucuugcuu

SEQ ID NO: 411428 - RNA, 21 nt, Artificial Sequence
  Synthetic
uccuagaucauucucuugcuu

SEQ ID NO: 411429 - RNA, 22 nt, Artificial Sequence
  Synthetic
cuccuagaucauucucuugcuu

SEQ ID NO: 411430 - RNA, 23 nt, Artificial Sequence
  Synthetic
ucuccuagaucauucucuugcuu

SEQ ID NO: 411431 - RNA, 24 nt, Artificial Sequence
  Synthetic
cucuccuagaucauucucuugcuu

SEQ ID NO: 411432 - RNA, 18 nt, Artificial Sequence
  Synthetic
uuuaugauccaguugcuu

SEQ ID NO: 411433 - RNA, 19 nt, Artificial Sequence
  Synthetic
cuuuaugauccaguugcuu

SEQ ID NO: 411434 - RNA, 20 nt, Artificial Sequence
  Synthetic
ccuuuaugauccaguugcuu

SEQ ID NO: 411435 - RNA, 21 nt, Artificial Sequence
  Synthetic
uccuuuaugauccaguugcuu

SEQ ID NO: 411436 - RNA, 22 nt, Artificial Sequence
  Synthetic
cuccuuuaugauccaguugcuu

SEQ ID NO: 411437 - RNA, 23 nt, Artificial Sequence
  Synthetic
ccuccuuuaugauccaguugcuu

SEQ ID NO: 411438 - RNA, 24 nt, Artificial Sequence
  Synthetic
cccuccuuuaugauccaguugcuu

SEQ ID NO: 411439 - RNA, 18 nt, Artificial Sequence
  Synthetic
uaggaagcagaguugcuu

SEQ ID NO: 411440 - RNA, 19 nt, Artificial Sequence
  Synthetic
auaggaagcagaguugcuu

SEQ ID NO: 411441 - RNA, 20 nt, Artificial Sequence
  Synthetic
aauaggaagcagaguugcuu

SEQ ID NO: 411442 - RNA, 21 nt, Artificial Sequence
  Synthetic
gaauaggaagcagaguugcuu

SEQ ID NO: 411443 - RNA, 22 nt, Artificial Sequence
  Synthetic
agaauaggaagcagaguugcuu

SEQ ID NO: 411444 - RNA, 23 nt, Artificial Sequence
  Synthetic
uagaauaggaagcagaguugcuu

SEQ ID NO: 411445 - RNA, 24 nt, Artificial Sequence
  Synthetic
uuagaauaggaagcagaguugcuu

SEQ ID NO: 411446 - RNA, 18 nt, Artificial Sequence
  Synthetic
aaucgucaggaguugcuu

SEQ ID NO: 411447 - RNA, 19 nt, Artificial Sequence
  Synthetic
gaaucgucaggaguugcuu

SEQ ID NO: 411448 - RNA, 20 nt, Artificial Sequence
  Synthetic
agaaucgucaggaguugcuu

SEQ ID NO: 411449 - RNA, 21 nt, Artificial Sequence
  Synthetic
uagaaucgucaggaguugcuu

SEQ ID NO: 411450 - RNA, 22 nt, Artificial Sequence
  Synthetic
cuagaaucgucaggaguugcuu

SEQ ID NO: 411451 - RNA, 23 nt, Artificial Sequence
  Synthetic
ccuagaaucgucaggaguugcuu

SEQ ID NO: 411452 - RNA, 24 nt, Artificial Sequence
  Synthetic
uccuagaaucgucaggaguugcuu

SEQ ID NO: 411453 - RNA, 18 nt, Artificial Sequence
  Synthetic
aggauaaaaacguugcuu

SEQ ID NO: 411454 - RNA, 19 nt, Artificial Sequence
  Synthetic
aaggauaaaaacguugcuu

SEQ ID NO: 411455 - RNA, 20 nt, Artificial Sequence
  Synthetic
aaaggauaaaaacguugcuu

SEQ ID NO: 411456 - RNA, 21 nt, Artificial Sequence
  Synthetic
gaaaggauaaaaacguugcuu

SEQ ID NO: 411457 - RNA, 22 nt, Artificial Sequence
  Synthetic
ugaaaggauaaaaacguugcuu

SEQ ID NO: 411458 - RNA, 23 nt, Artificial Sequence
  Synthetic
augaaaggauaaaaacguugcuu

SEQ ID NO: 411459 - RNA, 24 nt, Artificial Sequence
  Synthetic
caugaaaggauaaaaacguugcuu

SEQ ID NO: 411460 - RNA, 18 nt, Artificial Sequence
  Synthetic
aaccucaggugguugcuu

SEQ ID NO: 411461 - RNA, 19 nt, Artificial Sequence
  Synthetic
caaccucaggugguugcuu

SEQ ID NO: 411462 - RNA, 20 nt, Artificial Sequence
  Synthetic
ucaaccucaggugguugcuu

SEQ ID NO: 411463 - RNA, 21 nt, Artificial Sequence
  Synthetic
uucaaccucaggugguugcuu

SEQ ID NO: 411464 - RNA, 22 nt, Artificial Sequence
  Synthetic
uuucaaccucaggugguugcuu

SEQ ID NO: 411465 - RNA, 23 nt, Artificial Sequence
  Synthetic
uuuucaaccucaggugguugcuu

SEQ ID NO: 411466 - RNA, 24 nt, Artificial Sequence
  Synthetic
uuuuucaaccucaggugguugcuu

SEQ ID NO: 411467 - RNA, 18 nt, Artificial Sequence
  Synthetic
cagcucaggcuguugcuu

SEQ ID NO: 411468 - RNA, 19 nt, Artificial Sequence
  Synthetic
acagcucaggcuguugcuu

SEQ ID NO: 411469 - RNA, 20 nt, Artificial Sequence
  Synthetic
uacagcucaggcuguugcuu

SEQ ID NO: 411470 - RNA, 21 nt, Artificial Sequence
  Synthetic
guacagcucaggcuguugcuu

SEQ ID NO: 411471 - RNA, 22 nt, Artificial Sequence
  Synthetic
aguacagcucaggcuguugcuu

SEQ ID NO: 411472 - RNA, 23 nt, Artificial Sequence
  Synthetic
aaguacagcucaggcuguugcuu

SEQ ID NO: 411473 - RNA, 24 nt, Artificial Sequence
  Synthetic
aaaguacagcucaggcuguugcuu

SEQ ID NO: 411474 - RNA, 18 nt, Artificial Sequence
  Synthetic
auugaaauggauuugcuu

SEQ ID NO: 411475 - RNA, 19 nt, Artificial Sequence
  Synthetic
gauugaaauggauuugcuu

SEQ ID NO: 411476 - RNA, 20 nt, Artificial Sequence
  Synthetic
agauugaaauggauuugcuu

SEQ ID NO: 411477 - RNA, 21 nt, Artificial Sequence
  Synthetic
gagauugaaauggauuugcuu

SEQ ID NO: 411478 - RNA, 22 nt, Artificial Sequence
  Synthetic
ggagauugaaauggauuugcuu

SEQ ID NO: 411479 - RNA, 23 nt, Artificial Sequence
  Synthetic
uggagauugaaauggauuugcuu

SEQ ID NO: 411480 - RNA, 24 nt, Artificial Sequence
  Synthetic
guggagauugaaauggauuugcuu

SEQ ID NO: 411481 - RNA, 18 nt, Artificial Sequence
  Synthetic
ccgucuacuucuuugcuu

SEQ ID NO: 411482 - RNA, 19 nt, Artificial Sequence
  Synthetic
accgucuacuucuuugcuu

SEQ ID NO: 411483 - RNA, 20 nt, Artificial Sequence
  Synthetic
uaccgucuacuucuuugcuu

SEQ ID NO: 411484 - RNA, 21 nt, Artificial Sequence
  Synthetic
guaccgucuacuucuuugcuu

SEQ ID NO: 411485 - RNA, 22 nt, Artificial Sequence
  Synthetic
gguaccgucuacuucuuugcuu

SEQ ID NO: 411486 - RNA, 23 nt, Artificial Sequence
  Synthetic
agguaccgucuacuucuuugcuu

SEQ ID NO: 411487 - RNA, 24 nt, Artificial Sequence
  Synthetic
aagguaccgucuacuucuuugcuu

SEQ ID NO: 411488 - RNA, 18 nt, Artificial Sequence
  Synthetic
uuuugccaaaguuugcuu

SEQ ID NO: 411489 - RNA, 19 nt, Artificial Sequence
  Synthetic
guuuugccaaaguuugcuu

SEQ ID NO: 411490 - RNA, 20 nt, Artificial Sequence
  Synthetic
aguuuugccaaaguuugcuu

SEQ ID NO: 411491 - RNA, 21 nt, Artificial Sequence
  Synthetic
aaguuuugccaaaguuugcuu

SEQ ID NO: 411492 - RNA, 22 nt, Artificial Sequence
  Synthetic
aaaguuuugccaaaguuugcuu

SEQ ID NO: 411493 - RNA, 23 nt, Artificial Sequence
  Synthetic
caaaguuuugccaaaguuugcuu

SEQ ID NO: 411494 - RNA, 24 nt, Artificial Sequence
  Synthetic
ccaaaguuuugccaaaguuugcuu

SEQ ID NO: 411495 - RNA, 18 nt, Artificial Sequence
  Synthetic
uuggcaggauguuugcuu

SEQ ID NO: 411496 - RNA, 19 nt, Artificial Sequence
  Synthetic
auuggcaggauguuugcuu

SEQ ID NO: 411497 - RNA, 20 nt, Artificial Sequence
  Synthetic
cauuggcaggauguuugcuu

SEQ ID NO: 411498 - RNA, 21 nt, Artificial Sequence
  Synthetic
ucauuggcaggauguuugcuu

SEQ ID NO: 411499 - RNA, 22 nt, Artificial Sequence
  Synthetic
uucauuggcaggauguuugcuu

SEQ ID NO: 411500 - RNA, 23 nt, Artificial Sequence
  Synthetic
guucauuggcaggauguuugcuu

SEQ ID NO: 411501 - RNA, 24 nt, Artificial Sequence
  Synthetic
aguucauuggcaggauguuugcuu

SEQ ID NO: 411502 - RNA, 18 nt, Artificial Sequence
  Synthetic
ccauuuguauguuugcuu

SEQ ID NO: 411503 - RNA, 19 nt, Artificial Sequence
  Synthetic
gccauuuguauguuugcuu

SEQ ID NO: 411504 - RNA, 20 nt, Artificial Sequence
  Synthetic
agccauuuguauguuugcuu

SEQ ID NO: 411505 - RNA, 21 nt, Artificial Sequence
  Synthetic
uagccauuuguauguuugcuu

SEQ ID NO: 411506 - RNA, 22 nt, Artificial Sequence
  Synthetic
uuagccauuuguauguuugcuu

SEQ ID NO: 411507 - RNA, 23 nt, Artificial Sequence
  Synthetic
guuagccauuuguauguuugcuu

SEQ ID NO: 411508 - RNA, 24 nt, Artificial Sequence
  Synthetic
uguuagccauuuguauguuugcuu

SEQ ID NO: 411509 - RNA, 18 nt, Artificial Sequence
  Synthetic
ccagcuugcauuuugcuu

SEQ ID NO: 411510 - RNA, 19 nt, Artificial Sequence
  Synthetic
gccagcuugcauuuugcuu

SEQ ID NO: 411511 - RNA, 20 nt, Artificial Sequence
  Synthetic
ugccagcuugcauuuugcuu

SEQ ID NO: 411512 - RNA, 21 nt, Artificial Sequence
  Synthetic
augccagcuugcauuuugcuu

SEQ ID NO: 411513 - RNA, 22 nt, Artificial Sequence
  Synthetic
caugccagcuugcauuuugcuu

SEQ ID NO: 411514 - RNA, 23 nt, Artificial Sequence
  Synthetic
ccaugccagcuugcauuuugcuu

SEQ ID NO: 411515 - RNA, 24 nt, Artificial Sequence
  Synthetic
uccaugccagcuugcauuuugcuu

SEQ ID NO: 411516 - RNA, 18 nt, Artificial Sequence
  Synthetic
ccuaguuuuguuuugcuu

SEQ ID NO: 411517 - RNA, 19 nt, Artificial Sequence
  Synthetic
uccuaguuuuguuuugcuu

SEQ ID NO: 411518 - RNA, 20 nt, Artificial Sequence
  Synthetic
cuccuaguuuuguuuugcuu

SEQ ID NO: 411519 - RNA, 21 nt, Artificial Sequence
  Synthetic
ccuccuaguuuuguuuugcuu

SEQ ID NO: 411520 - RNA, 22 nt, Artificial Sequence
  Synthetic
cccuccuaguuuuguuuugcuu

SEQ ID NO: 411521 - RNA, 23 nt, Artificial Sequence
  Synthetic
ucccuccuaguuuuguuuugcuu

SEQ ID NO: 411522 - RNA, 24 nt, Artificial Sequence
  Synthetic
cucccuccuaguuuuguuuugcuu

SEQ ID NO: 411523 - RNA, 18 nt, Artificial Sequence
  Synthetic
uuuccagguuuuuugcuu

SEQ ID NO: 411524 - RNA, 19 nt, Artificial Sequence
  Synthetic
uuuuccagguuuuuugcuu

SEQ ID NO: 411525 - RNA, 20 nt, Artificial Sequence
  Synthetic
cuuuuccagguuuuuugcuu

SEQ ID NO: 411526 - RNA, 21 nt, Artificial Sequence
  Synthetic
ccuuuuccagguuuuuugcuu

SEQ ID NO: 411527 - RNA, 22 nt, Artificial Sequence
  Synthetic
cccuuuuccagguuuuuugcuu

SEQ ID NO: 411528 - RNA, 23 nt, Artificial Sequence
  Synthetic
ucccuuuuccagguuuuuugcuu

SEQ ID NO: 411529 - RNA, 24 nt, Artificial Sequence
  Synthetic
aucccuuuuccagguuuuuugcuu

SEQ ID NO: 411530 - RNA, 18 nt, Artificial Sequence
  Synthetic
caccuuuacuaaaaucuu

SEQ ID NO: 411531 - RNA, 19 nt, Artificial Sequence
  Synthetic
acaccuuuacuaaaaucuu

SEQ ID NO: 411532 - RNA, 20 nt, Artificial Sequence
  Synthetic
aacaccuuuacuaaaaucuu

SEQ ID NO: 411533 - RNA, 21 nt, Artificial Sequence
  Synthetic
aaacaccuuuacuaaaaucuu

SEQ ID NO: 411534 - RNA, 22 nt, Artificial Sequence
  Synthetic
aaaacaccuuuacuaaaaucuu

SEQ ID NO: 411535 - RNA, 23 nt, Artificial Sequence
  Synthetic
aaaaacaccuuuacuaaaaucuu

SEQ ID NO: 411536 - RNA, 24 nt, Artificial Sequence
  Synthetic
aaaaaacaccuuuacuaaaaucuu

SEQ ID NO: 411537 - RNA, 18 nt, Artificial Sequence
  Synthetic
auggcaucugcaaaucuu

SEQ ID NO: 411538 - RNA, 19 nt, Artificial Sequence
  Synthetic
gauggcaucugcaaaucuu

SEQ ID NO: 411539 - RNA, 20 nt, Artificial Sequence
  Synthetic
ugauggcaucugcaaaucuu

SEQ ID NO: 411540 - RNA, 21 nt, Artificial Sequence
  Synthetic
augauggcaucugcaaaucuu

SEQ ID NO: 411541 - RNA, 22 nt, Artificial Sequence
  Synthetic
uaugauggcaucugcaaaucuu

SEQ ID NO: 411542 - RNA, 23 nt, Artificial Sequence
  Synthetic
guaugauggcaucugcaaaucuu

SEQ ID NO: 411543 - RNA, 24 nt, Artificial Sequence
  Synthetic
uguaugauggcaucugcaaaucuu

SEQ ID NO: 411544 - RNA, 18 nt, Artificial Sequence
  Synthetic
auacuucagucaaaucuu

SEQ ID NO: 411545 - RNA, 19 nt, Artificial Sequence
  Synthetic
aauacuucagucaaaucuu

SEQ ID NO: 411546 - RNA, 20 nt, Artificial Sequence
  Synthetic
aaauacuucagucaaaucuu

SEQ ID NO: 411547 - RNA, 21 nt, Artificial Sequence
  Synthetic
aaaauacuucagucaaaucuu

SEQ ID NO: 411548 - RNA, 22 nt, Artificial Sequence
  Synthetic
gaaaauacuucagucaaaucuu

SEQ ID NO: 411549 - RNA, 23 nt, Artificial Sequence
  Synthetic
ggaaaauacuucagucaaaucuu

SEQ ID NO: 411550 - RNA, 24 nt, Artificial Sequence
  Synthetic
gggaaaauacuucagucaaaucuu

SEQ ID NO: 411551 - RNA, 18 nt, Artificial Sequence
  Synthetic
ucuuauuaaagaaaucuu

SEQ ID NO: 411552 - RNA, 19 nt, Artificial Sequence
  Synthetic
cucuuauuaaagaaaucuu

SEQ ID NO: 411553 - RNA, 20 nt, Artificial Sequence
  Synthetic
ucucuuauuaaagaaaucuu

SEQ ID NO: 411554 - RNA, 21 nt, Artificial Sequence
  Synthetic
aucucuuauuaaagaaaucuu

SEQ ID NO: 411555 - RNA, 22 nt, Artificial Sequence
  Synthetic
caucucuuauuaaagaaaucuu

SEQ ID NO: 411556 - RNA, 23 nt, Artificial Sequence
  Synthetic
gcaucucuuauuaaagaaaucuu

SEQ ID NO: 411557 - RNA, 24 nt, Artificial Sequence
  Synthetic
ugcaucucuuauuaaagaaaucuu

SEQ ID NO: 411558 - RNA, 18 nt, Artificial Sequence
  Synthetic
cucugccuaauaaaucuu

SEQ ID NO: 411559 - RNA, 19 nt, Artificial Sequence
  Synthetic
gcucugccuaauaaaucuu

SEQ ID NO: 411560 - RNA, 20 nt, Artificial Sequence
  Synthetic
ugcucugccuaauaaaucuu

SEQ ID NO: 411561 - RNA, 21 nt, Artificial Sequence
  Synthetic
cugcucugccuaauaaaucuu

SEQ ID NO: 411562 - RNA, 22 nt, Artificial Sequence
  Synthetic
acugcucugccuaauaaaucuu

SEQ ID NO: 411563 - RNA, 23 nt, Artificial Sequence
  Synthetic
cacugcucugccuaauaaaucuu

SEQ ID NO: 411564 - RNA, 24 nt, Artificial Sequence
  Synthetic
ucacugcucugccuaauaaaucuu

SEQ ID NO: 411565 - RNA, 18 nt, Artificial Sequence
  Synthetic
gguuggggaaacaaucuu

SEQ ID NO: 411566 - RNA, 19 nt, Artificial Sequence
  Synthetic
ugguuggggaaacaaucuu

SEQ ID NO: 411567 - RNA, 20 nt, Artificial Sequence
  Synthetic
cugguuggggaaacaaucuu

SEQ ID NO: 411568 - RNA, 21 nt, Artificial Sequence
  Synthetic
ccugguuggggaaacaaucuu

SEQ ID NO: 411569 - RNA, 22 nt, Artificial Sequence
  Synthetic
uccugguuggggaaacaaucuu

SEQ ID NO: 411570 - RNA, 23 nt, Artificial Sequence
  Synthetic
uuccugguuggggaaacaaucuu

SEQ ID NO: 411571 - RNA, 24 nt, Artificial Sequence
  Synthetic
uuuccugguuggggaaacaaucuu

SEQ ID NO: 411572 - RNA, 18 nt, Artificial Sequence
  Synthetic
auagugaaagacaaucuu

SEQ ID NO: 411573 - RNA, 19 nt, Artificial Sequence
  Synthetic
gauagugaaagacaaucuu

SEQ ID NO: 411574 - RNA, 20 nt, Artificial Sequence
  Synthetic
agauagugaaagacaaucuu

SEQ ID NO: 411575 - RNA, 21 nt, Artificial Sequence
  Synthetic
gagauagugaaagacaaucuu

SEQ ID NO: 411576 - RNA, 22 nt, Artificial Sequence
  Synthetic
agagauagugaaagacaaucuu

SEQ ID NO: 411577 - RNA, 23 nt, Artificial Sequence
  Synthetic
aagagauagugaaagacaaucuu

SEQ ID NO: 411578 - RNA, 24 nt, Artificial Sequence
  Synthetic
aaagagauagugaaagacaaucuu

SEQ ID NO: 411579 - RNA, 18 nt, Artificial Sequence
  Synthetic
aaaucuuuacagaaucuu

SEQ ID NO: 411580 - RNA, 19 nt, Artificial Sequence
  Synthetic
aaaaucuuuacagaaucuu

SEQ ID NO: 411581 - RNA, 20 nt, Artificial Sequence
  Synthetic
caaaaucuuuacagaaucuu

SEQ ID NO: 411582 - RNA, 21 nt, Artificial Sequence
  Synthetic
acaaaaucuuuacagaaucuu

SEQ ID NO: 411583 - RNA, 22 nt, Artificial Sequence
  Synthetic
uacaaaaucuuuacagaaucuu

SEQ ID NO: 411584 - RNA, 23 nt, Artificial Sequence
  Synthetic
guacaaaaucuuuacagaaucuu

SEQ ID NO: 411585 - RNA, 24 nt, Artificial Sequence
  Synthetic
uguacaaaaucuuuacagaaucuu

SEQ ID NO: 411586 - RNA, 18 nt, Artificial Sequence
  Synthetic
uaauaguuguagaaucuu

SEQ ID NO: 411587 - RNA, 19 nt, Artificial Sequence
  Synthetic
uuaauaguuguagaaucuu

SEQ ID NO: 411588 - RNA, 20 nt, Artificial Sequence
  Synthetic
cuuaauaguuguagaaucuu

SEQ ID NO: 411589 - RNA, 21 nt, Artificial Sequence
  Synthetic
gcuuaauaguuguagaaucuu

SEQ ID NO: 411590 - RNA, 22 nt, Artificial Sequence
  Synthetic
agcuuaauaguuguagaaucuu

SEQ ID NO: 411591 - RNA, 23 nt, Artificial Sequence
  Synthetic
uagcuuaauaguuguagaaucuu

SEQ ID NO: 411592 - RNA, 24 nt, Artificial Sequence
  Synthetic
uuagcuuaauaguuguagaaucuu

SEQ ID NO: 411593 - RNA, 18 nt, Artificial Sequence
  Synthetic
aaauuuugauggaaucuu

SEQ ID NO: 411594 - RNA, 19 nt, Artificial Sequence
  Synthetic
uaaauuuugauggaaucuu

SEQ ID NO: 411595 - RNA, 20 nt, Artificial Sequence
  Synthetic
auaaauuuugauggaaucuu

SEQ ID NO: 411596 - RNA, 21 nt, Artificial Sequence
  Synthetic
aauaaauuuugauggaaucuu

SEQ ID NO: 411597 - RNA, 22 nt, Artificial Sequence
  Synthetic
aaauaaauuuugauggaaucuu

SEQ ID NO: 411598 - RNA, 23 nt, Artificial Sequence
  Synthetic
caaauaaauuuugauggaaucuu

SEQ ID NO: 411599 - RNA, 24 nt, Artificial Sequence
  Synthetic
acaaauaaauuuugauggaaucuu

SEQ ID NO: 411600 - RNA, 18 nt, Artificial Sequence
  Synthetic
guauuuaaucugaaucuu

SEQ ID NO: 411601 - RNA, 19 nt, Artificial Sequence
  Synthetic
uguauuuaaucugaaucuu

SEQ ID NO: 411602 - RNA, 20 nt, Artificial Sequence
  Synthetic
uuguauuuaaucugaaucuu

SEQ ID NO: 411603 - RNA, 21 nt, Artificial Sequence
  Synthetic
uuuguauuuaaucugaaucuu

SEQ ID NO: 411604 - RNA, 22 nt, Artificial Sequence
  Synthetic
uuuuguauuuaaucugaaucuu

SEQ ID NO: 411605 - RNA, 23 nt, Artificial Sequence
  Synthetic
cuuuuguauuuaaucugaaucuu

SEQ ID NO: 411606 - RNA, 24 nt, Artificial Sequence
  Synthetic
ccuuuuguauuuaaucugaaucuu

SEQ ID NO: 411607 - RNA, 18 nt, Artificial Sequence
  Synthetic
gucuauuagcauaaucuu

SEQ ID NO: 411608 - RNA, 19 nt, Artificial Sequence
  Synthetic
agucuauuagcauaaucuu

SEQ ID NO: 411609 - RNA, 20 nt, Artificial Sequence
  Synthetic
gagucuauuagcauaaucuu

SEQ ID NO: 411610 - RNA, 21 nt, Artificial Sequence
  Synthetic
agagucuauuagcauaaucuu

SEQ ID NO: 411611 - RNA, 22 nt, Artificial Sequence
  Synthetic
cagagucuauuagcauaaucuu

SEQ ID NO: 411612 - RNA, 23 nt, Artificial Sequence
  Synthetic
gcagagucuauuagcauaaucuu

SEQ ID NO: 411613 - RNA, 24 nt, Artificial Sequence
  Synthetic
ggcagagucuauuagcauaaucuu

SEQ ID NO: 411614 - RNA, 18 nt, Artificial Sequence
  Synthetic
agaugcauauguaaucuu

SEQ ID NO: 411615 - RNA, 19 nt, Artificial Sequence
  Synthetic
aagaugcauauguaaucuu

SEQ ID NO: 411616 - RNA, 20 nt, Artificial Sequence
  Synthetic
uaagaugcauauguaaucuu

SEQ ID NO: 411617 - RNA, 21 nt, Artificial Sequence
  Synthetic
uuaagaugcauauguaaucuu

SEQ ID NO: 411618 - RNA, 22 nt, Artificial Sequence
  Synthetic
auuaagaugcauauguaaucuu

SEQ ID NO: 411619 - RNA, 23 nt, Artificial Sequence
  Synthetic
aauuaagaugcauauguaaucuu

SEQ ID NO: 411620 - RNA, 24 nt, Artificial Sequence
  Synthetic
caauuaagaugcauauguaaucuu

SEQ ID NO: 411621 - RNA, 18 nt, Artificial Sequence
  Synthetic
aaagauaaaauuaaucuu

SEQ ID NO: 411622 - RNA, 19 nt, Artificial Sequence
  Synthetic
aaaagauaaaauuaaucuu

SEQ ID NO: 411623 - RNA, 20 nt, Artificial Sequence
  Synthetic
aaaaagauaaaauuaaucuu

SEQ ID NO: 411624 - RNA, 21 nt, Artificial Sequence
  Synthetic
aaaaaagauaaaauuaaucuu

SEQ ID NO: 411625 - RNA, 22 nt, Artificial Sequence
  Synthetic
uaaaaaagauaaaauuaaucuu

SEQ ID NO: 411626 - RNA, 23 nt, Artificial Sequence
  Synthetic
auaaaaaagauaaaauuaaucuu

SEQ ID NO: 411627 - RNA, 24 nt, Artificial Sequence
  Synthetic
aauaaaaaagauaaaauuaaucuu

SEQ ID NO: 411628 - RNA, 18 nt, Artificial Sequence
  Synthetic
cggccagcucuuaaucuu

SEQ ID NO: 411629 - RNA, 19 nt, Artificial Sequence
  Synthetic
ccggccagcucuuaaucuu

SEQ ID NO: 411630 - RNA, 20 nt, Artificial Sequence
  Synthetic
cccggccagcucuuaaucuu

SEQ ID NO: 411631 - RNA, 21 nt, Artificial Sequence
  Synthetic
gcccggccagcucuuaaucuu

SEQ ID NO: 411632 - RNA, 22 nt, Artificial Sequence
  Synthetic
cgcccggccagcucuuaaucuu

SEQ ID NO: 411633 - RNA, 23 nt, Artificial Sequence
  Synthetic
gcgcccggccagcucuuaaucuu

SEQ ID NO: 411634 - RNA, 24 nt, Artificial Sequence
  Synthetic
cgcgcccggccagcucuuaaucuu

SEQ ID NO: 411635 - RNA, 18 nt, Artificial Sequence
  Synthetic
agcacuucauuuaaucuu

SEQ ID NO: 411636 - RNA, 19 nt, Artificial Sequence
  Synthetic
cagcacuucauuuaaucuu

SEQ ID NO: 411637 - RNA, 20 nt, Artificial Sequence
  Synthetic
acagcacuucauuuaaucuu

SEQ ID NO: 411638 - RNA, 21 nt, Artificial Sequence
  Synthetic
aacagcacuucauuuaaucuu

SEQ ID NO: 411639 - RNA, 22 nt, Artificial Sequence
  Synthetic
aaacagcacuucauuuaaucuu

SEQ ID NO: 411640 - RNA, 23 nt, Artificial Sequence
  Synthetic
uaaacagcacuucauuuaaucuu

SEQ ID NO: 411641 - RNA, 24 nt, Artificial Sequence
  Synthetic
uuaaacagcacuucauuuaaucuu

SEQ ID NO: 411642 - RNA, 18 nt, Artificial Sequence
  Synthetic
acuuuaguuaaacaucuu

SEQ ID NO: 411643 - RNA, 19 nt, Artificial Sequence
  Synthetic
cacuuuaguuaaacaucuu

SEQ ID NO: 411644 - RNA, 20 nt, Artificial Sequence
  Synthetic
ucacuuuaguuaaacaucuu

SEQ ID NO: 411645 - RNA, 21 nt, Artificial Sequence
  Synthetic
aucacuuuaguuaaacaucuu

SEQ ID NO: 411646 - RNA, 22 nt, Artificial Sequence
  Synthetic
aaucacuuuaguuaaacaucuu

SEQ ID NO: 411647 - RNA, 23 nt, Artificial Sequence
  Synthetic
uaaucacuuuaguuaaacaucuu

SEQ ID NO: 411648 - RNA, 24 nt, Artificial Sequence
  Synthetic
uuaaucacuuuaguuaaacaucuu

SEQ ID NO: 411649 - RNA, 18 nt, Artificial Sequence
  Synthetic
caguuucauuaccaucuu

SEQ ID NO: 411650 - RNA, 19 nt, Artificial Sequence
  Synthetic
ucaguuucauuaccaucuu

SEQ ID NO: 411651 - RNA, 20 nt, Artificial Sequence
  Synthetic
gucaguuucauuaccaucuu

SEQ ID NO: 411652 - RNA, 21 nt, Artificial Sequence
  Synthetic
ugucaguuucauuaccaucuu

SEQ ID NO: 411653 - RNA, 22 nt, Artificial Sequence
  Synthetic
augucaguuucauuaccaucuu

SEQ ID NO: 411654 - RNA, 23 nt, Artificial Sequence
  Synthetic
gaugucaguuucauuaccaucuu

SEQ ID NO: 411655 - RNA, 24 nt, Artificial Sequence
  Synthetic
ugaugucaguuucauuaccaucuu

SEQ ID NO: 411656 - RNA, 18 nt, Artificial Sequence
  Synthetic
ucuauuuaaaagcaucuu

SEQ ID NO: 411657 - RNA, 19 nt, Artificial Sequence
  Synthetic
uucuauuuaaaagcaucuu

SEQ ID NO: 411658 - RNA, 20 nt, Artificial Sequence
  Synthetic
uuucuauuuaaaagcaucuu

SEQ ID NO: 411659 - RNA, 21 nt, Artificial Sequence
  Synthetic
uuuucuauuuaaaagcaucuu

SEQ ID NO: 411660 - RNA, 22 nt, Artificial Sequence
  Synthetic
uuuuucuauuuaaaagcaucuu

SEQ ID NO: 411661 - RNA, 23 nt, Artificial Sequence
  Synthetic
guuuuucuauuuaaaagcaucuu

SEQ ID NO: 411662 - RNA, 24 nt, Artificial Sequence
  Synthetic
gguuuuucuauuuaaaagcaucuu

SEQ ID NO: 411663 - RNA, 18 nt, Artificial Sequence
  Synthetic
auuuguguagagcaucuu

SEQ ID NO: 411664 - RNA, 19 nt, Artificial Sequence
  Synthetic
cauuuguguagagcaucuu

SEQ ID NO: 411665 - RNA, 20 nt, Artificial Sequence
  Synthetic
ccauuuguguagagcaucuu

SEQ ID NO: 411666 - RNA, 21 nt, Artificial Sequence
  Synthetic
accauuuguguagagcaucuu

SEQ ID NO: 411667 - RNA, 22 nt, Artificial Sequence
  Synthetic
aaccauuuguguagagcaucuu

SEQ ID NO: 411668 - RNA, 23 nt, Artificial Sequence
  Synthetic
aaaccauuuguguagagcaucuu

SEQ ID NO: 411669 - RNA, 24 nt, Artificial Sequence
  Synthetic
gaaaccauuuguguagagcaucuu

SEQ ID NO: 411670 - RNA, 18 nt, Artificial Sequence
  Synthetic
aagggucucuagcaucuu

SEQ ID NO: 411671 - RNA, 19 nt, Artificial Sequence
  Synthetic
uaagggucucuagcaucuu

SEQ ID NO: 411672 - RNA, 20 nt, Artificial Sequence
  Synthetic
cuaagggucucuagcaucuu

SEQ ID NO: 411673 - RNA, 21 nt, Artificial Sequence
  Synthetic
ucuaagggucucuagcaucuu

SEQ ID NO: 411674 - RNA, 22 nt, Artificial Sequence
  Synthetic
gucuaagggucucuagcaucuu

SEQ ID NO: 411675 - RNA, 23 nt, Artificial Sequence
  Synthetic
ggucuaagggucucuagcaucuu

SEQ ID NO: 411676 - RNA, 24 nt, Artificial Sequence
  Synthetic
uggucuaagggucucuagcaucuu

SEQ ID NO: 411677 - RNA, 18 nt, Artificial Sequence
  Synthetic
agccaaagguggcaucuu

SEQ ID NO: 411678 - RNA, 19 nt, Artificial Sequence
  Synthetic
cagccaaagguggcaucuu

SEQ ID NO: 411679 - RNA, 20 nt, Artificial Sequence
  Synthetic
acagccaaagguggcaucuu

SEQ ID NO: 411680 - RNA, 21 nt, Artificial Sequence
  Synthetic
uacagccaaagguggcaucuu

SEQ ID NO: 411681 - RNA, 22 nt, Artificial Sequence
  Synthetic
auacagccaaagguggcaucuu

SEQ ID NO: 411682 - RNA, 23 nt, Artificial Sequence
  Synthetic
gauacagccaaagguggcaucuu

SEQ ID NO: 411683 - RNA, 24 nt, Artificial Sequence
  Synthetic
agauacagccaaagguggcaucuu

SEQ ID NO: 411684 - RNA, 18 nt, Artificial Sequence
  Synthetic
uucagaauucugcaucuu

SEQ ID NO: 411685 - RNA, 19 nt, Artificial Sequence
  Synthetic
auucagaauucugcaucuu

SEQ ID NO: 411686 - RNA, 20 nt, Artificial Sequence
  Synthetic
cauucagaauucugcaucuu

SEQ ID NO: 411687 - RNA, 21 nt, Artificial Sequence
  Synthetic
acauucagaauucugcaucuu

SEQ ID NO: 411688 - RNA, 22 nt, Artificial Sequence
  Synthetic
aacauucagaauucugcaucuu

SEQ ID NO: 411689 - RNA, 23 nt, Artificial Sequence
  Synthetic
caacauucagaauucugcaucuu

SEQ ID NO: 411690 - RNA, 24 nt, Artificial Sequence
  Synthetic
ucaacauucagaauucugcaucuu

SEQ ID NO: 411691 - RNA, 18 nt, Artificial Sequence
  Synthetic
uuacuugaauugcaucuu

SEQ ID NO: 411692 - RNA, 19 nt, Artificial Sequence
  Synthetic
uuuacuugaauugcaucuu

SEQ ID NO: 411693 - RNA, 20 nt, Artificial Sequence
  Synthetic
auuuacuugaauugcaucuu

SEQ ID NO: 411694 - RNA, 21 nt, Artificial Sequence
  Synthetic
uauuuacuugaauugcaucuu

SEQ ID NO: 411695 - RNA, 22 nt, Artificial Sequence
  Synthetic
auauuuacuugaauugcaucuu

SEQ ID NO: 411696 - RNA, 23 nt, Artificial Sequence
  Synthetic
cauauuuacuugaauugcaucuu

SEQ ID NO: 411697 - RNA, 24 nt, Artificial Sequence
  Synthetic
acauauuuacuugaauugcaucuu

SEQ ID NO: 411698 - RNA, 18 nt, Artificial Sequence
  Synthetic
uaugcuguuugucaucuu

SEQ ID NO: 411699 - RNA, 19 nt, Artificial Sequence
  Synthetic
auaugcuguuugucaucuu

SEQ ID NO: 411700 - RNA, 20 nt, Artificial Sequence
  Synthetic
uauaugcuguuugucaucuu

SEQ ID NO: 411701 - RNA, 21 nt, Artificial Sequence
  Synthetic
auauaugcuguuugucaucuu

SEQ ID NO: 411702 - RNA, 22 nt, Artificial Sequence
  Synthetic
uauauaugcuguuugucaucuu

SEQ ID NO: 411703 - RNA, 23 nt, Artificial Sequence
  Synthetic
auauauaugcuguuugucaucuu

SEQ ID NO: 411704 - RNA, 24 nt, Artificial Sequence
  Synthetic
uauauauaugcuguuugucaucuu

SEQ ID NO: 411705 - RNA, 18 nt, Artificial Sequence
  Synthetic
uaaauccucuuucaucuu

SEQ ID NO: 411706 - RNA, 19 nt, Artificial Sequence
  Synthetic
cuaaauccucuuucaucuu

SEQ ID NO: 411707 - RNA, 20 nt, Artificial Sequence
  Synthetic
ccuaaauccucuuucaucuu

SEQ ID NO: 411708 - RNA, 21 nt, Artificial Sequence
  Synthetic
uccuaaauccucuuucaucuu

SEQ ID NO: 411709 - RNA, 22 nt, Artificial Sequence
  Synthetic
auccuaaauccucuuucaucuu

SEQ ID NO: 411710 - RNA, 23 nt, Artificial Sequence
  Synthetic
uauccuaaauccucuuucaucuu

SEQ ID NO: 411711 - RNA, 24 nt, Artificial Sequence
  Synthetic
guauccuaaauccucuuucaucuu

SEQ ID NO: 411712 - RNA, 18 nt, Artificial Sequence
  Synthetic
gaccaagauuuucaucuu

SEQ ID NO: 411713 - RNA, 19 nt, Artificial Sequence
  Synthetic
agaccaagauuuucaucuu

SEQ ID NO: 411714 - RNA, 20 nt, Artificial Sequence
  Synthetic
aagaccaagauuuucaucuu

SEQ ID NO: 411715 - RNA, 21 nt, Artificial Sequence
  Synthetic
aaagaccaagauuuucaucuu

SEQ ID NO: 411716 - RNA, 22 nt, Artificial Sequence
  Synthetic
gaaagaccaagauuuucaucuu

SEQ ID NO: 411717 - RNA, 23 nt, Artificial Sequence
  Synthetic
ugaaagaccaagauuuucaucuu

SEQ ID NO: 411718 - RNA, 24 nt, Artificial Sequence
  Synthetic
augaaagaccaagauuuucaucuu

SEQ ID NO: 411719 - RNA, 18 nt, Artificial Sequence
  Synthetic
ugagccgaaacagaucuu

SEQ ID NO: 411720 - RNA, 19 nt, Artificial Sequence
  Synthetic
augagccgaaacagaucuu

SEQ ID NO: 411721 - RNA, 20 nt, Artificial Sequence
  Synthetic
caugagccgaaacagaucuu

SEQ ID NO: 411722 - RNA, 21 nt, Artificial Sequence
  Synthetic
ccaugagccgaaacagaucuu

SEQ ID NO: 411723 - RNA, 22 nt, Artificial Sequence
  Synthetic
accaugagccgaaacagaucuu

SEQ ID NO: 411724 - RNA, 23 nt, Artificial Sequence
  Synthetic
uaccaugagccgaaacagaucuu

SEQ ID NO: 411725 - RNA, 24 nt, Artificial Sequence
  Synthetic
uuaccaugagccgaaacagaucuu

SEQ ID NO: 411726 - RNA, 18 nt, Artificial Sequence
  Synthetic
ggccucuuucucgaucuu

SEQ ID NO: 411727 - RNA, 19 nt, Artificial Sequence
  Synthetic
uggccucuuucucgaucuu

SEQ ID NO: 411728 - RNA, 20 nt, Artificial Sequence
  Synthetic
auggccucuuucucgaucuu

SEQ ID NO: 411729 - RNA, 21 nt, Artificial Sequence
  Synthetic
gauggccucuuucucgaucuu

SEQ ID NO: 411730 - RNA, 22 nt, Artificial Sequence
  Synthetic
ggauggccucuuucucgaucuu

SEQ ID NO: 411731 - RNA, 23 nt, Artificial Sequence
  Synthetic
cggauggccucuuucucgaucuu

SEQ ID NO: 411732 - RNA, 24 nt, Artificial Sequence
  Synthetic
ccggauggccucuuucucgaucuu

SEQ ID NO: 411733 - RNA, 18 nt, Artificial Sequence
  Synthetic
cuaacuucuaaggaucuu

SEQ ID NO: 411734 - RNA, 19 nt, Artificial Sequence
  Synthetic
ccuaacuucuaaggaucuu

SEQ ID NO: 411735 - RNA, 20 nt, Artificial Sequence
  Synthetic
uccuaacuucuaaggaucuu

SEQ ID NO: 411736 - RNA, 21 nt, Artificial Sequence
  Synthetic
uuccuaacuucuaaggaucuu

SEQ ID NO: 411737 - RNA, 22 nt, Artificial Sequence
  Synthetic
auuccuaacuucuaaggaucuu

SEQ ID NO: 411738 - RNA, 23 nt, Artificial Sequence
  Synthetic
cauuccuaacuucuaaggaucuu

SEQ ID NO: 411739 - RNA, 24 nt, Artificial Sequence
  Synthetic
ccauuccuaacuucuaaggaucuu

SEQ ID NO: 411740 - RNA, 18 nt, Artificial Sequence
  Synthetic
ccagggggacaugaucuu

SEQ ID NO: 411741 - RNA, 19 nt, Artificial Sequence
  Synthetic
cccagggggacaugaucuu

SEQ ID NO: 411742 - RNA, 20 nt, Artificial Sequence
  Synthetic
ucccagggggacaugaucuu

SEQ ID NO: 411743 - RNA, 21 nt, Artificial Sequence
  Synthetic
uucccagggggacaugaucuu

SEQ ID NO: 411744 - RNA, 22 nt, Artificial Sequence
  Synthetic
guucccagggggacaugaucuu

SEQ ID NO: 411745 - RNA, 23 nt, Artificial Sequence
  Synthetic
aguucccagggggacaugaucuu

SEQ ID NO: 411746 - RNA, 24 nt, Artificial Sequence
  Synthetic
uaguucccagggggacaugaucuu

SEQ ID NO: 411747 - RNA, 18 nt, Artificial Sequence
  Synthetic
gaucucaaaacugaucuu

SEQ ID NO: 411748 - RNA, 19 nt, Artificial Sequence
  Synthetic
ggaucucaaaacugaucuu

SEQ ID NO: 411749 - RNA, 20 nt, Artificial Sequence
  Synthetic
uggaucucaaaacugaucuu

SEQ ID NO: 411750 - RNA, 21 nt, Artificial Sequence
  Synthetic
uuggaucucaaaacugaucuu

SEQ ID NO: 411751 - RNA, 22 nt, Artificial Sequence
  Synthetic
cuuggaucucaaaacugaucuu

SEQ ID NO: 411752 - RNA, 23 nt, Artificial Sequence
  Synthetic
ucuuggaucucaaaacugaucuu

SEQ ID NO: 411753 - RNA, 24 nt, Artificial Sequence
  Synthetic
aucuuggaucucaaaacugaucuu

SEQ ID NO: 411754 - RNA, 18 nt, Artificial Sequence
  Synthetic
uuuguagaaacugaucuu

SEQ ID NO: 411755 - RNA, 19 nt, Artificial Sequence
  Synthetic
cuuuguagaaacugaucuu

SEQ ID NO: 411756 - RNA, 20 nt, Artificial Sequence
  Synthetic
acuuuguagaaacugaucuu

SEQ ID NO: 411757 - RNA, 21 nt, Artificial Sequence
  Synthetic
gacuuuguagaaacugaucuu

SEQ ID NO: 411758 - RNA, 22 nt, Artificial Sequence
  Synthetic
ugacuuuguagaaacugaucuu

SEQ ID NO: 411759 - RNA, 23 nt, Artificial Sequence
  Synthetic
gugacuuuguagaaacugaucuu

SEQ ID NO: 411760 - RNA, 24 nt, Artificial Sequence
  Synthetic
ugugacuuuguagaaacugaucuu

SEQ ID NO: 411761 - RNA, 18 nt, Artificial Sequence
  Synthetic
ugucuuguuucugaucuu

SEQ ID NO: 411762 - RNA, 19 nt, Artificial Sequence
  Synthetic
uugucuuguuucugaucuu

SEQ ID NO: 411763 - RNA, 20 nt, Artificial Sequence
  Synthetic
cuugucuuguuucugaucuu

SEQ ID NO: 411764 - RNA, 21 nt, Artificial Sequence
  Synthetic
ucuugucuuguuucugaucuu

SEQ ID NO: 411765 - RNA, 22 nt, Artificial Sequence
  Synthetic
uucuugucuuguuucugaucuu

SEQ ID NO: 411766 - RNA, 23 nt, Artificial Sequence
  Synthetic
auucuugucuuguuucugaucuu

SEQ ID NO: 411767 - RNA, 24 nt, Artificial Sequence
  Synthetic
cauucuugucuuguuucugaucuu

SEQ ID NO: 411768 - RNA, 18 nt, Artificial Sequence
  Synthetic
caauacgugcuugaucuu

SEQ ID NO: 411769 - RNA, 19 nt, Artificial Sequence
  Synthetic
ccaauacgugcuugaucuu

SEQ ID NO: 411770 - RNA, 20 nt, Artificial Sequence
  Synthetic
accaauacgugcuugaucuu

SEQ ID NO: 411771 - RNA, 21 nt, Artificial Sequence
  Synthetic
uaccaauacgugcuugaucuu

SEQ ID NO: 411772 - RNA, 22 nt, Artificial Sequence
  Synthetic
uuaccaauacgugcuugaucuu

SEQ ID NO: 411773 - RNA, 23 nt, Artificial Sequence
  Synthetic
cuuaccaauacgugcuugaucuu

SEQ ID NO: 411774 - RNA, 24 nt, Artificial Sequence
  Synthetic
ucuuaccaauacgugcuugaucuu

SEQ ID NO: 411775 - RNA, 18 nt, Artificial Sequence
  Synthetic
agaucucagguugaucuu

SEQ ID NO: 411776 - RNA, 19 nt, Artificial Sequence
  Synthetic
gagaucucagguugaucuu

SEQ ID NO: 411777 - RNA, 20 nt, Artificial Sequence
  Synthetic
ggagaucucagguugaucuu

SEQ ID NO: 411778 - RNA, 21 nt, Artificial Sequence
  Synthetic
uggagaucucagguugaucuu

SEQ ID NO: 411779 - RNA, 22 nt, Artificial Sequence
  Synthetic
uuggagaucucagguugaucuu

SEQ ID NO: 411780 - RNA, 23 nt, Artificial Sequence
  Synthetic
guuggagaucucagguugaucuu

SEQ ID NO: 411781 - RNA, 24 nt, Artificial Sequence
  Synthetic
uguuggagaucucagguugaucuu

SEQ ID NO: 411782 - RNA, 18 nt, Artificial Sequence
  Synthetic
uggaaacaauuugaucuu

SEQ ID NO: 411783 - RNA, 19 nt, Artificial Sequence
  Synthetic
uuggaaacaauuugaucuu

SEQ ID NO: 411784 - RNA, 20 nt, Artificial Sequence
  Synthetic
cuuggaaacaauuugaucuu

SEQ ID NO: 411785 - RNA, 21 nt, Artificial Sequence
  Synthetic
acuuggaaacaauuugaucuu

SEQ ID NO: 411786 - RNA, 22 nt, Artificial Sequence
  Synthetic
cacuuggaaacaauuugaucuu

SEQ ID NO: 411787 - RNA, 23 nt, Artificial Sequence
  Synthetic
ucacuuggaaacaauuugaucuu

SEQ ID NO: 411788 - RNA, 24 nt, Artificial Sequence
  Synthetic
uucacuuggaaacaauuugaucuu

SEQ ID NO: 411789 - RNA, 18 nt, Artificial Sequence
  Synthetic
aaaaauggaaaauaucuu

SEQ ID NO: 411790 - RNA, 19 nt, Artificial Sequence
  Synthetic
gaaaaauggaaaauaucuu

SEQ ID NO: 411791 - RNA, 20 nt, Artificial Sequence
  Synthetic
agaaaaauggaaaauaucuu

SEQ ID NO: 411792 - RNA, 21 nt, Artificial Sequence
  Synthetic
uagaaaaauggaaaauaucuu

SEQ ID NO: 411793 - RNA, 22 nt, Artificial Sequence
  Synthetic
guagaaaaauggaaaauaucuu

SEQ ID NO: 411794 - RNA, 23 nt, Artificial Sequence
  Synthetic
gguagaaaaauggaaaauaucuu

SEQ ID NO: 411795 - RNA, 24 nt, Artificial Sequence
  Synthetic
agguagaaaaauggaaaauaucuu

SEQ ID NO: 411796 - RNA, 18 nt, Artificial Sequence
  Synthetic
uucuuaucuagauaucuu

SEQ ID NO: 411797 - RNA, 19 nt, Artificial Sequence
  Synthetic
guucuuaucuagauaucuu

SEQ ID NO: 411798 - RNA, 20 nt, Artificial Sequence
  Synthetic
aguucuuaucuagauaucuu

SEQ ID NO: 411799 - RNA, 21 nt, Artificial Sequence
  Synthetic
uaguucuuaucuagauaucuu

SEQ ID NO: 411800 - RNA, 22 nt, Artificial Sequence
  Synthetic
uuaguucuuaucuagauaucuu

SEQ ID NO: 411801 - RNA, 23 nt, Artificial Sequence
  Synthetic
uuuaguucuuaucuagauaucuu

SEQ ID NO: 411802 - RNA, 24 nt, Artificial Sequence
  Synthetic
uuuuaguucuuaucuagauaucuu

SEQ ID NO: 411803 - RNA, 18 nt, Artificial Sequence
  Synthetic
caaguuauuugcuaucuu

SEQ ID NO: 411804 - RNA, 19 nt, Artificial Sequence
  Synthetic
acaaguuauuugcuaucuu

SEQ ID NO: 411805 - RNA, 20 nt, Artificial Sequence
  Synthetic
uacaaguuauuugcuaucuu

SEQ ID NO: 411806 - RNA, 21 nt, Artificial Sequence
  Synthetic
uuacaaguuauuugcuaucuu

SEQ ID NO: 411807 - RNA, 22 nt, Artificial Sequence
  Synthetic
uuuacaaguuauuugcuaucuu

SEQ ID NO: 411808 - RNA, 23 nt, Artificial Sequence
  Synthetic
guuuacaaguuauuugcuaucuu

SEQ ID NO: 411809 - RNA, 24 nt, Artificial Sequence
  Synthetic
aguuuacaaguuauuugcuaucuu

SEQ ID NO: 411810 - RNA, 18 nt, Artificial Sequence
  Synthetic
auuuuggcucaguaucuu

SEQ ID NO: 411811 - RNA, 19 nt, Artificial Sequence
  Synthetic
aauuuuggcucaguaucuu

SEQ ID NO: 411812 - RNA, 20 nt, Artificial Sequence
  Synthetic
aaauuuuggcucaguaucuu

SEQ ID NO: 411813 - RNA, 21 nt, Artificial Sequence
  Synthetic
caaauuuuggcucaguaucuu

SEQ ID NO: 411814 - RNA, 22 nt, Artificial Sequence
  Synthetic
ucaaauuuuggcucaguaucuu

SEQ ID NO: 411815 - RNA, 23 nt, Artificial Sequence
  Synthetic
cucaaauuuuggcucaguaucuu

SEQ ID NO: 411816 - RNA, 24 nt, Artificial Sequence
  Synthetic
ucucaaauuuuggcucaguaucuu

SEQ ID NO: 411817 - RNA, 18 nt, Artificial Sequence
  Synthetic
agcucacugccguaucuu

SEQ ID NO: 411818 - RNA, 19 nt, Artificial Sequence
  Synthetic
gagcucacugccguaucuu

SEQ ID NO: 411819 - RNA, 20 nt, Artificial Sequence
  Synthetic
agagcucacugccguaucuu

SEQ ID NO: 411820 - RNA, 21 nt, Artificial Sequence
  Synthetic
gagagcucacugccguaucuu

SEQ ID NO: 411821 - RNA, 22 nt, Artificial Sequence
  Synthetic
ugagagcucacugccguaucuu

SEQ ID NO: 411822 - RNA, 23 nt, Artificial Sequence
  Synthetic
augagagcucacugccguaucuu

SEQ ID NO: 411823 - RNA, 24 nt, Artificial Sequence
  Synthetic
caugagagcucacugccguaucuu

SEQ ID NO: 411824 - RNA, 18 nt, Artificial Sequence
  Synthetic
ggauucccucuuuaucuu

SEQ ID NO: 411825 - RNA, 19 nt, Artificial Sequence
  Synthetic
aggauucccucuuuaucuu

SEQ ID NO: 411826 - RNA, 20 nt, Artificial Sequence
  Synthetic
gaggauucccucuuuaucuu

SEQ ID NO: 411827 - RNA, 21 nt, Artificial Sequence
  Synthetic
ggaggauucccucuuuaucuu

SEQ ID NO: 411828 - RNA, 22 nt, Artificial Sequence
  Synthetic
gggaggauucccucuuuaucuu

SEQ ID NO: 411829 - RNA, 23 nt, Artificial Sequence
  Synthetic
agggaggauucccucuuuaucuu

SEQ ID NO: 411830 - RNA, 24 nt, Artificial Sequence
  Synthetic
uagggaggauucccucuuuaucuu

SEQ ID NO: 411831 - RNA, 18 nt, Artificial Sequence
  Synthetic
aaagcugugguuuaucuu

SEQ ID NO: 411832 - RNA, 19 nt, Artificial Sequence
  Synthetic
caaagcugugguuuaucuu

SEQ ID NO: 411833 - RNA, 20 nt, Artificial Sequence
  Synthetic
ucaaagcugugguuuaucuu

SEQ ID NO: 411834 - RNA, 21 nt, Artificial Sequence
  Synthetic
uucaaagcugugguuuaucuu

SEQ ID NO: 411835 - RNA, 22 nt, Artificial Sequence
  Synthetic
cuucaaagcugugguuuaucuu

SEQ ID NO: 411836 - RNA, 23 nt, Artificial Sequence
  Synthetic
gcuucaaagcugugguuuaucuu

SEQ ID NO: 411837 - RNA, 24 nt, Artificial Sequence
  Synthetic
agcuucaaagcugugguuuaucuu

SEQ ID NO: 411838 - RNA, 18 nt, Artificial Sequence
  Synthetic
uuuaguguguuuuaucuu

SEQ ID NO: 411839 - RNA, 19 nt, Artificial Sequence
  Synthetic
auuuaguguguuuuaucuu

SEQ ID NO: 411840 - RNA, 20 nt, Artificial Sequence
  Synthetic
uauuuaguguguuuuaucuu

SEQ ID NO: 411841 - RNA, 21 nt, Artificial Sequence
  Synthetic
uuauuuaguguguuuuaucuu

SEQ ID NO: 411842 - RNA, 22 nt, Artificial Sequence
  Synthetic
auuauuuaguguguuuuaucuu

SEQ ID NO: 411843 - RNA, 23 nt, Artificial Sequence
  Synthetic
aauuauuuaguguguuuuaucuu

SEQ ID NO: 411844 - RNA, 24 nt, Artificial Sequence
  Synthetic
uaauuauuuaguguguuuuaucuu

SEQ ID NO: 411845 - RNA, 18 nt, Artificial Sequence
  Synthetic
uugccaaagaaaacucuu

SEQ ID NO: 411846 - RNA, 19 nt, Artificial Sequence
  Synthetic
auugccaaagaaaacucuu

SEQ ID NO: 411847 - RNA, 20 nt, Artificial Sequence
  Synthetic
uauugccaaagaaaacucuu

SEQ ID NO: 411848 - RNA, 21 nt, Artificial Sequence
  Synthetic
auauugccaaagaaaacucuu

SEQ ID NO: 411849 - RNA, 22 nt, Artificial Sequence
  Synthetic
gauauugccaaagaaaacucuu

SEQ ID NO: 411850 - RNA, 23 nt, Artificial Sequence
  Synthetic
ugauauugccaaagaaaacucuu

SEQ ID NO: 411851 - RNA, 24 nt, Artificial Sequence
  Synthetic
gugauauugccaaagaaaacucuu

SEQ ID NO: 411852 - RNA, 18 nt, Artificial Sequence
  Synthetic
ggguaauaacaaacucuu

SEQ ID NO: 411853 - RNA, 19 nt, Artificial Sequence
  Synthetic
uggguaauaacaaacucuu

SEQ ID NO: 411854 - RNA, 20 nt, Artificial Sequence
  Synthetic
guggguaauaacaaacucuu

SEQ ID NO: 411855 - RNA, 21 nt, Artificial Sequence
  Synthetic
gguggguaauaacaaacucuu

SEQ ID NO: 411856 - RNA, 22 nt, Artificial Sequence
  Synthetic
agguggguaauaacaaacucuu

SEQ ID NO: 411857 - RNA, 23 nt, Artificial Sequence
  Synthetic
aagguggguaauaacaaacucuu

SEQ ID NO: 411858 - RNA, 24 nt, Artificial Sequence
  Synthetic
gaagguggguaauaacaaacucuu

SEQ ID NO: 411859 - RNA, 18 nt, Artificial Sequence
  Synthetic
ucuacagcuuaaacucuu

SEQ ID NO: 411860 - RNA, 19 nt, Artificial Sequence
  Synthetic
uucuacagcuuaaacucuu

SEQ ID NO: 411861 - RNA, 20 nt, Artificial Sequence
  Synthetic
uuucuacagcuuaaacucuu

SEQ ID NO: 411862 - RNA, 21 nt, Artificial Sequence
  Synthetic
cuuucuacagcuuaaacucuu

SEQ ID NO: 411863 - RNA, 22 nt, Artificial Sequence
  Synthetic
gcuuucuacagcuuaaacucuu

SEQ ID NO: 411864 - RNA, 23 nt, Artificial Sequence
  Synthetic
agcuuucuacagcuuaaacucuu

SEQ ID NO: 411865 - RNA, 24 nt, Artificial Sequence
  Synthetic
uagcuuucuacagcuuaaacucuu

SEQ ID NO: 411866 - RNA, 18 nt, Artificial Sequence
  Synthetic
ugaagcauaagaacucuu

SEQ ID NO: 411867 - RNA, 19 nt, Artificial Sequence
  Synthetic
augaagcauaagaacucuu

SEQ ID NO: 411868 - RNA, 20 nt, Artificial Sequence
  Synthetic
uaugaagcauaagaacucuu

SEQ ID NO: 411869 - RNA, 21 nt, Artificial Sequence
  Synthetic
uuaugaagcauaagaacucuu

SEQ ID NO: 411870 - RNA, 22 nt, Artificial Sequence
  Synthetic
auuaugaagcauaagaacucuu

SEQ ID NO: 411871 - RNA, 23 nt, Artificial Sequence
  Synthetic
gauuaugaagcauaagaacucuu

SEQ ID NO: 411872 - RNA, 24 nt, Artificial Sequence
  Synthetic
ugauuaugaagcauaagaacucuu

SEQ ID NO: 411873 - RNA, 18 nt, Artificial Sequence
  Synthetic
augccauuuagaacucuu

SEQ ID NO: 411874 - RNA, 19 nt, Artificial Sequence
  Synthetic
uaugccauuuagaacucuu

SEQ ID NO: 411875 - RNA, 20 nt, Artificial Sequence
  Synthetic
auaugccauuuagaacucuu

SEQ ID NO: 411876 - RNA, 21 nt, Artificial Sequence
  Synthetic
aauaugccauuuagaacucuu

SEQ ID NO: 411877 - RNA, 22 nt, Artificial Sequence
  Synthetic
aaauaugccauuuagaacucuu

SEQ ID NO: 411878 - RNA, 23 nt, Artificial Sequence
  Synthetic
gaaauaugccauuuagaacucuu

SEQ ID NO: 411879 - RNA, 24 nt, Artificial Sequence
  Synthetic
agaaauaugccauuuagaacucuu

SEQ ID NO: 411880 - RNA, 18 nt, Artificial Sequence
  Synthetic
gauguucauuccacucuu

SEQ ID NO: 411881 - RNA, 19 nt, Artificial Sequence
  Synthetic
ggauguucauuccacucuu

SEQ ID NO: 411882 - RNA, 20 nt, Artificial Sequence
  Synthetic
gggauguucauuccacucuu

SEQ ID NO: 411883 - RNA, 21 nt, Artificial Sequence
  Synthetic
ugggauguucauuccacucuu

SEQ ID NO: 411884 - RNA, 22 nt, Artificial Sequence
  Synthetic
uugggauguucauuccacucuu

SEQ ID NO: 411885 - RNA, 23 nt, Artificial Sequence
  Synthetic
uuugggauguucauuccacucuu

SEQ ID NO: 411886 - RNA, 24 nt, Artificial Sequence
  Synthetic
uuuugggauguucauuccacucuu

SEQ ID NO: 411887 - RNA, 18 nt, Artificial Sequence
  Synthetic
uauguacuaggcacucuu

SEQ ID NO: 411888 - RNA, 19 nt, Artificial Sequence
  Synthetic
cuauguacuaggcacucuu

SEQ ID NO: 411889 - RNA, 20 nt, Artificial Sequence
  Synthetic
acuauguacuaggcacucuu

SEQ ID NO: 411890 - RNA, 21 nt, Artificial Sequence
  Synthetic
uacuauguacuaggcacucuu

SEQ ID NO: 411891 - RNA, 22 nt, Artificial Sequence
  Synthetic
cuacuauguacuaggcacucuu

SEQ ID NO: 411892 - RNA, 23 nt, Artificial Sequence
  Synthetic
ccuacuauguacuaggcacucuu

SEQ ID NO: 411893 - RNA, 24 nt, Artificial Sequence
  Synthetic
gccuacuauguacuaggcacucuu

SEQ ID NO: 411894 - RNA, 18 nt, Artificial Sequence
  Synthetic
ucauauauuggcacucuu

SEQ ID NO: 411895 - RNA, 19 nt, Artificial Sequence
  Synthetic
uucauauauuggcacucuu

SEQ ID NO: 411896 - RNA, 20 nt, Artificial Sequence
  Synthetic
auucauauauuggcacucuu

SEQ ID NO: 411897 - RNA, 21 nt, Artificial Sequence
  Synthetic
uauucauauauuggcacucuu

SEQ ID NO: 411898 - RNA, 22 nt, Artificial Sequence
  Synthetic
uuauucauauauuggcacucuu

SEQ ID NO: 411899 - RNA, 23 nt, Artificial Sequence
  Synthetic
auuauucauauauuggcacucuu

SEQ ID NO: 411900 - RNA, 24 nt, Artificial Sequence
  Synthetic
uauuauucauauauuggcacucuu

SEQ ID NO: 411901 - RNA, 18 nt, Artificial Sequence
  Synthetic
agaaggggaaagacucuu

SEQ ID NO: 411902 - RNA, 19 nt, Artificial Sequence
  Synthetic
gagaaggggaaagacucuu

SEQ ID NO: 411903 - RNA, 20 nt, Artificial Sequence
  Synthetic
agagaaggggaaagacucuu

SEQ ID NO: 411904 - RNA, 21 nt, Artificial Sequence
  Synthetic
gagagaaggggaaagacucuu

SEQ ID NO: 411905 - RNA, 22 nt, Artificial Sequence
  Synthetic
agagagaaggggaaagacucuu

SEQ ID NO: 411906 - RNA, 23 nt, Artificial Sequence
  Synthetic
aagagagaaggggaaagacucuu

SEQ ID NO: 411907 - RNA, 24 nt, Artificial Sequence
  Synthetic
caagagagaaggggaaagacucuu

SEQ ID NO: 411908 - RNA, 18 nt, Artificial Sequence
  Synthetic
uaccuccauucuacucuu

SEQ ID NO: 411909 - RNA, 19 nt, Artificial Sequence
  Synthetic
guaccuccauucuacucuu

SEQ ID NO: 411910 - RNA, 20 nt, Artificial Sequence
  Synthetic
aguaccuccauucuacucuu

SEQ ID NO: 411911 - RNA, 21 nt, Artificial Sequence
  Synthetic
aaguaccuccauucuacucuu

SEQ ID NO: 411912 - RNA, 22 nt, Artificial Sequence
  Synthetic
aaaguaccuccauucuacucuu

SEQ ID NO: 411913 - RNA, 23 nt, Artificial Sequence
  Synthetic
aaaaguaccuccauucuacucuu

SEQ ID NO: 411914 - RNA, 24 nt, Artificial Sequence
  Synthetic
uaaaaguaccuccauucuacucuu

SEQ ID NO: 411915 - RNA, 18 nt, Artificial Sequence
  Synthetic
cuacucaacuguacucuu

SEQ ID NO: 411916 - RNA, 19 nt, Artificial Sequence
  Synthetic
ccuacucaacuguacucuu

SEQ ID NO: 411917 - RNA, 20 nt, Artificial Sequence
  Synthetic
gccuacucaacuguacucuu

SEQ ID NO: 411918 - RNA, 21 nt, Artificial Sequence
  Synthetic
ugccuacucaacuguacucuu

SEQ ID NO: 411919 - RNA, 22 nt, Artificial Sequence
  Synthetic
cugccuacucaacuguacucuu

SEQ ID NO: 411920 - RNA, 23 nt, Artificial Sequence
  Synthetic
ccugccuacucaacuguacucuu

SEQ ID NO: 411921 - RNA, 24 nt, Artificial Sequence
  Synthetic
cccugccuacucaacuguacucuu

SEQ ID NO: 411922 - RNA, 18 nt, Artificial Sequence
  Synthetic
acucuguagcaaccucuu

SEQ ID NO: 411923 - RNA, 19 nt, Artificial Sequence
  Synthetic
aacucuguagcaaccucuu

SEQ ID NO: 411924 - RNA, 20 nt, Artificial Sequence
  Synthetic
gaacucuguagcaaccucuu

SEQ ID NO: 411925 - RNA, 21 nt, Artificial Sequence
  Synthetic
ggaacucuguagcaaccucuu

SEQ ID NO: 411926 - RNA, 22 nt, Artificial Sequence
  Synthetic
uggaacucuguagcaaccucuu

SEQ ID NO: 411927 - RNA, 23 nt, Artificial Sequence
  Synthetic
cuggaacucuguagcaaccucuu

SEQ ID NO: 411928 - RNA, 24 nt, Artificial Sequence
  Synthetic
ccuggaacucuguagcaaccucuu

SEQ ID NO: 411929 - RNA, 18 nt, Artificial Sequence
  Synthetic
uagaguucaucaccucuu

SEQ ID NO: 411930 - RNA, 19 nt, Artificial Sequence
  Synthetic
auagaguucaucaccucuu

SEQ ID NO: 411931 - RNA, 20 nt, Artificial Sequence
  Synthetic
cauagaguucaucaccucuu

SEQ ID NO: 411932 - RNA, 21 nt, Artificial Sequence
  Synthetic
acauagaguucaucaccucuu

SEQ ID NO: 411933 - RNA, 22 nt, Artificial Sequence
  Synthetic
aacauagaguucaucaccucuu

SEQ ID NO: 411934 - RNA, 23 nt, Artificial Sequence
  Synthetic
aaacauagaguucaucaccucuu

SEQ ID NO: 411935 - RNA, 24 nt, Artificial Sequence
  Synthetic
gaaacauagaguucaucaccucuu

SEQ ID NO: 411936 - RNA, 18 nt, Artificial Sequence
  Synthetic
cacaucaggcccccucuu

SEQ ID NO: 411937 - RNA, 19 nt, Artificial Sequence
  Synthetic
ccacaucaggcccccucuu

SEQ ID NO: 411938 - RNA, 20 nt, Artificial Sequence
  Synthetic
gccacaucaggcccccucuu

SEQ ID NO: 411939 - RNA, 21 nt, Artificial Sequence
  Synthetic
ugccacaucaggcccccucuu

SEQ ID NO: 411940 - RNA, 22 nt, Artificial Sequence
  Synthetic
cugccacaucaggcccccucuu

SEQ ID NO: 411941 - RNA, 23 nt, Artificial Sequence
  Synthetic
acugccacaucaggcccccucuu

SEQ ID NO: 411942 - RNA, 24 nt, Artificial Sequence
  Synthetic
uacugccacaucaggcccccucuu

SEQ ID NO: 411943 - RNA, 18 nt, Artificial Sequence
  Synthetic
ccauccugccucccucuu

SEQ ID NO: 411944 - RNA, 19 nt, Artificial Sequence
  Synthetic
uccauccugccucccucuu

SEQ ID NO: 411945 - RNA, 20 nt, Artificial Sequence
  Synthetic
guccauccugccucccucuu

SEQ ID NO: 411946 - RNA, 21 nt, Artificial Sequence
  Synthetic
aguccauccugccucccucuu

SEQ ID NO: 411947 - RNA, 22 nt, Artificial Sequence
  Synthetic
aaguccauccugccucccucuu

SEQ ID NO: 411948 - RNA, 23 nt, Artificial Sequence
  Synthetic
aaaguccauccugccucccucuu

SEQ ID NO: 411949 - RNA, 24 nt, Artificial Sequence
  Synthetic
gaaaguccauccugccucccucuu

SEQ ID NO: 411950 - RNA, 18 nt, Artificial Sequence
  Synthetic
guucugcaucagccucuu

SEQ ID NO: 411951 - RNA, 19 nt, Artificial Sequence
  Synthetic
aguucugcaucagccucuu

SEQ ID NO: 411952 - RNA, 20 nt, Artificial Sequence
  Synthetic
aaguucugcaucagccucuu

SEQ ID NO: 411953 - RNA, 21 nt, Artificial Sequence
  Synthetic
uaaguucugcaucagccucuu

SEQ ID NO: 411954 - RNA, 22 nt, Artificial Sequence
  Synthetic
uuaaguucugcaucagccucuu

SEQ ID NO: 411955 - RNA, 23 nt, Artificial Sequence
  Synthetic
auuaaguucugcaucagccucuu

SEQ ID NO: 411956 - RNA, 24 nt, Artificial Sequence
  Synthetic
uauuaaguucugcaucagccucuu

SEQ ID NO: 411957 - RNA, 18 nt, Artificial Sequence
  Synthetic
auguacuacuggccucuu

SEQ ID NO: 411958 - RNA, 19 nt, Artificial Sequence
  Synthetic
gauguacuacuggccucuu

SEQ ID NO: 411959 - RNA, 20 nt, Artificial Sequence
  Synthetic
ggauguacuacuggccucuu

SEQ ID NO: 411960 - RNA, 21 nt, Artificial Sequence
  Synthetic
aggauguacuacuggccucuu

SEQ ID NO: 411961 - RNA, 22 nt, Artificial Sequence
  Synthetic
aaggauguacuacuggccucuu

SEQ ID NO: 411962 - RNA, 23 nt, Artificial Sequence
  Synthetic
aaaggauguacuacuggccucuu

SEQ ID NO: 411963 - RNA, 24 nt, Artificial Sequence
  Synthetic
gaaaggauguacuacuggccucuu

SEQ ID NO: 411964 - RNA, 18 nt, Artificial Sequence
  Synthetic
gaaaauauugaagcucuu

SEQ ID NO: 411965 - RNA, 19 nt, Artificial Sequence
  Synthetic
ugaaaauauugaagcucuu

SEQ ID NO: 411966 - RNA, 20 nt, Artificial Sequence
  Synthetic
cugaaaauauugaagcucuu

SEQ ID NO: 411967 - RNA, 21 nt, Artificial Sequence
  Synthetic
ucugaaaauauugaagcucuu

SEQ ID NO: 411968 - RNA, 22 nt, Artificial Sequence
  Synthetic
cucugaaaauauugaagcucuu

SEQ ID NO: 411969 - RNA, 23 nt, Artificial Sequence
  Synthetic
acucugaaaauauugaagcucuu

SEQ ID NO: 411970 - RNA, 24 nt, Artificial Sequence
  Synthetic
uacucugaaaauauugaagcucuu

SEQ ID NO: 411971 - RNA, 18 nt, Artificial Sequence
  Synthetic
aaagugcuuuaagcucuu

SEQ ID NO: 411972 - RNA, 19 nt, Artificial Sequence
  Synthetic
uaaagugcuuuaagcucuu

SEQ ID NO: 411973 - RNA, 20 nt, Artificial Sequence
  Synthetic
auaaagugcuuuaagcucuu

SEQ ID NO: 411974 - RNA, 21 nt, Artificial Sequence
  Synthetic
cauaaagugcuuuaagcucuu

SEQ ID NO: 411975 - RNA, 22 nt, Artificial Sequence
  Synthetic
ccauaaagugcuuuaagcucuu

SEQ ID NO: 411976 - RNA, 23 nt, Artificial Sequence
  Synthetic
uccauaaagugcuuuaagcucuu

SEQ ID NO: 411977 - RNA, 24 nt, Artificial Sequence
  Synthetic
uuccauaaagugcuuuaagcucuu

SEQ ID NO: 411978 - RNA, 18 nt, Artificial Sequence
  Synthetic
gaugaauaaacagcucuu

SEQ ID NO: 411979 - RNA, 19 nt, Artificial Sequence
  Synthetic
ugaugaauaaacagcucuu

SEQ ID NO: 411980 - RNA, 20 nt, Artificial Sequence
  Synthetic
augaugaauaaacagcucuu

SEQ ID NO: 411981 - RNA, 21 nt, Artificial Sequence
  Synthetic
caugaugaauaaacagcucuu

SEQ ID NO: 411982 - RNA, 22 nt, Artificial Sequence
  Synthetic
ccaugaugaauaaacagcucuu

SEQ ID NO: 411983 - RNA, 23 nt, Artificial Sequence
  Synthetic
cccaugaugaauaaacagcucuu

SEQ ID NO: 411984 - RNA, 24 nt, Artificial Sequence
  Synthetic
acccaugaugaauaaacagcucuu

SEQ ID NO: 411985 - RNA, 18 nt, Artificial Sequence
  Synthetic
ucugcuauuauagcucuu

SEQ ID NO: 411986 - RNA, 19 nt, Artificial Sequence
  Synthetic
uucugcuauuauagcucuu

SEQ ID NO: 411987 - RNA, 20 nt, Artificial Sequence
  Synthetic
uuucugcuauuauagcucuu

SEQ ID NO: 411988 - RNA, 21 nt, Artificial Sequence
  Synthetic
auuucugcuauuauagcucuu

SEQ ID NO: 411989 - RNA, 22 nt, Artificial Sequence
  Synthetic
uauuucugcuauuauagcucuu

SEQ ID NO: 411990 - RNA, 23 nt, Artificial Sequence
  Synthetic
guauuucugcuauuauagcucuu

SEQ ID NO: 411991 - RNA, 24 nt, Artificial Sequence
  Synthetic
uguauuucugcuauuauagcucuu

SEQ ID NO: 411992 - RNA, 18 nt, Artificial Sequence
  Synthetic
ccgauuauauuagcucuu

SEQ ID NO: 411993 - RNA, 19 nt, Artificial Sequence
  Synthetic
uccgauuauauuagcucuu

SEQ ID NO: 411994 - RNA, 20 nt, Artificial Sequence
  Synthetic
cuccgauuauauuagcucuu

SEQ ID NO: 411995 - RNA, 21 nt, Artificial Sequence
  Synthetic
ccuccgauuauauuagcucuu

SEQ ID NO: 411996 - RNA, 22 nt, Artificial Sequence
  Synthetic
gccuccgauuauauuagcucuu

SEQ ID NO: 411997 - RNA, 23 nt, Artificial Sequence
  Synthetic
ugccuccgauuauauuagcucuu

SEQ ID NO: 411998 - RNA, 24 nt, Artificial Sequence
  Synthetic
cugccuccgauuauauuagcucuu

SEQ ID NO: 411999 - RNA, 18 nt, Artificial Sequence
  Synthetic
aagcacaaugccgcucuu

SEQ ID NO: 412000 - RNA, 19 nt, Artificial Sequence
  Synthetic
caagcacaaugccgcucuu

SEQ ID NO: 412001 - RNA, 20 nt, Artificial Sequence
  Synthetic
acaagcacaaugccgcucuu

SEQ ID NO: 412002 - RNA, 21 nt, Artificial Sequence
  Synthetic
uacaagcacaaugccgcucuu

SEQ ID NO: 412003 - RNA, 22 nt, Artificial Sequence
  Synthetic
auacaagcacaaugccgcucuu

SEQ ID NO: 412004 - RNA, 23 nt, Artificial Sequence
  Synthetic
cauacaagcacaaugccgcucuu

SEQ ID NO: 412005 - RNA, 24 nt, Artificial Sequence
  Synthetic
ucauacaagcacaaugccgcucuu

SEQ ID NO: 412006 - RNA, 18 nt, Artificial Sequence
  Synthetic
augugucuuucggcucuu

SEQ ID NO: 412007 - RNA, 19 nt, Artificial Sequence
  Synthetic
aaugugucuuucggcucuu

SEQ ID NO: 412008 - RNA, 20 nt, Artificial Sequence
  Synthetic
aaaugugucuuucggcucuu

SEQ ID NO: 412009 - RNA, 21 nt, Artificial Sequence
  Synthetic
aaaaugugucuuucggcucuu

SEQ ID NO: 412010 - RNA, 22 nt, Artificial Sequence
  Synthetic
gaaaaugugucuuucggcucuu

SEQ ID NO: 412011 - RNA, 23 nt, Artificial Sequence
  Synthetic
ugaaaaugugucuuucggcucuu

SEQ ID NO: 412012 - RNA, 24 nt, Artificial Sequence
  Synthetic
augaaaaugugucuuucggcucuu

SEQ ID NO: 412013 - RNA, 18 nt, Artificial Sequence
  Synthetic
acccauaccauggcucuu

SEQ ID NO: 412014 - RNA, 19 nt, Artificial Sequence
  Synthetic
gacccauaccauggcucuu

SEQ ID NO: 412015 - RNA, 20 nt, Artificial Sequence
  Synthetic
ugacccauaccauggcucuu

SEQ ID NO: 412016 - RNA, 21 nt, Artificial Sequence
  Synthetic
gugacccauaccauggcucuu

SEQ ID NO: 412017 - RNA, 22 nt, Artificial Sequence
  Synthetic
ugugacccauaccauggcucuu

SEQ ID NO: 412018 - RNA, 23 nt, Artificial Sequence
  Synthetic
cugugacccauaccauggcucuu

SEQ ID NO: 412019 - RNA, 24 nt, Artificial Sequence
  Synthetic
acugugacccauaccauggcucuu

SEQ ID NO: 412020 - RNA, 18 nt, Artificial Sequence
  Synthetic
guuguaaauauggcucuu

SEQ ID NO: 412021 - RNA, 19 nt, Artificial Sequence
  Synthetic
aguuguaaauauggcucuu

SEQ ID NO: 412022 - RNA, 20 nt, Artificial Sequence
  Synthetic
aaguuguaaauauggcucuu

SEQ ID NO: 412023 - RNA, 21 nt, Artificial Sequence
  Synthetic
aaaguuguaaauauggcucuu

SEQ ID NO: 412024 - RNA, 22 nt, Artificial Sequence
  Synthetic
caaaguuguaaauauggcucuu

SEQ ID NO: 412025 - RNA, 23 nt, Artificial Sequence
  Synthetic
ucaaaguuguaaauauggcucuu

SEQ ID NO: 412026 - RNA, 24 nt, Artificial Sequence
  Synthetic
aucaaaguuguaaauauggcucuu

SEQ ID NO: 412027 - RNA, 18 nt, Artificial Sequence
  Synthetic
ucaguguuaucugcucuu

SEQ ID NO: 412028 - RNA, 19 nt, Artificial Sequence
  Synthetic
aucaguguuaucugcucuu

SEQ ID NO: 412029 - RNA, 20 nt, Artificial Sequence
  Synthetic
caucaguguuaucugcucuu

SEQ ID NO: 412030 - RNA, 21 nt, Artificial Sequence
  Synthetic
gcaucaguguuaucugcucuu

SEQ ID NO: 412031 - RNA, 22 nt, Artificial Sequence
  Synthetic
ggcaucaguguuaucugcucuu

SEQ ID NO: 412032 - RNA, 23 nt, Artificial Sequence
  Synthetic
aggcaucaguguuaucugcucuu

SEQ ID NO: 412033 - RNA, 24 nt, Artificial Sequence
  Synthetic
aaggcaucaguguuaucugcucuu

SEQ ID NO: 412034 - RNA, 18 nt, Artificial Sequence
  Synthetic
guaaagcauugugcucuu

SEQ ID NO: 412035 - RNA, 19 nt, Artificial Sequence
  Synthetic
aguaaagcauugugcucuu

SEQ ID NO: 412036 - RNA, 20 nt, Artificial Sequence
  Synthetic
caguaaagcauugugcucuu

SEQ ID NO: 412037 - RNA, 21 nt, Artificial Sequence
  Synthetic
ucaguaaagcauugugcucuu

SEQ ID NO: 412038 - RNA, 22 nt, Artificial Sequence
  Synthetic
uucaguaaagcauugugcucuu

SEQ ID NO: 412039 - RNA, 23 nt, Artificial Sequence
  Synthetic
guucaguaaagcauugugcucuu

SEQ ID NO: 412040 - RNA, 24 nt, Artificial Sequence
  Synthetic
uguucaguaaagcauugugcucuu

SEQ ID NO: 412041 - RNA, 18 nt, Artificial Sequence
  Synthetic
guuuuuugcauugcucuu

SEQ ID NO: 412042 - RNA, 19 nt, Artificial Sequence
  Synthetic
gguuuuuugcauugcucuu

SEQ ID NO: 412043 - RNA, 20 nt, Artificial Sequence
  Synthetic
agguuuuuugcauugcucuu

SEQ ID NO: 412044 - RNA, 21 nt, Artificial Sequence
  Synthetic
cagguuuuuugcauugcucuu

SEQ ID NO: 412045 - RNA, 22 nt, Artificial Sequence
  Synthetic
ucagguuuuuugcauugcucuu

SEQ ID NO: 412046 - RNA, 23 nt, Artificial Sequence
  Synthetic
uucagguuuuuugcauugcucuu

SEQ ID NO: 412047 - RNA, 24 nt, Artificial Sequence
  Synthetic
guucagguuuuuugcauugcucuu

SEQ ID NO: 412048 - RNA, 18 nt, Artificial Sequence
  Synthetic
uucccaaaccuugcucuu

SEQ ID NO: 412049 - RNA, 19 nt, Artificial Sequence
  Synthetic
cuucccaaaccuugcucuu

SEQ ID NO: 412050 - RNA, 20 nt, Artificial Sequence
  Synthetic
ccuucccaaaccuugcucuu

SEQ ID NO: 412051 - RNA, 21 nt, Artificial Sequence
  Synthetic
gccuucccaaaccuugcucuu

SEQ ID NO: 412052 - RNA, 22 nt, Artificial Sequence
  Synthetic
agccuucccaaaccuugcucuu

SEQ ID NO: 412053 - RNA, 23 nt, Artificial Sequence
  Synthetic
aagccuucccaaaccuugcucuu

SEQ ID NO: 412054 - RNA, 24 nt, Artificial Sequence
  Synthetic
uaagccuucccaaaccuugcucuu

SEQ ID NO: 412055 - RNA, 18 nt, Artificial Sequence
  Synthetic
ugaugaaaaucaucucuu

SEQ ID NO: 412056 - RNA, 19 nt, Artificial Sequence
  Synthetic
uugaugaaaaucaucucuu

SEQ ID NO: 412057 - RNA, 20 nt, Artificial Sequence
  Synthetic
uuugaugaaaaucaucucuu

SEQ ID NO: 412058 - RNA, 21 nt, Artificial Sequence
  Synthetic
uuuugaugaaaaucaucucuu

SEQ ID NO: 412059 - RNA, 22 nt, Artificial Sequence
  Synthetic
cuuuugaugaaaaucaucucuu

SEQ ID NO: 412060 - RNA, 23 nt, Artificial Sequence
  Synthetic
acuuuugaugaaaaucaucucuu

SEQ ID NO: 412061 - RNA, 24 nt, Artificial Sequence
  Synthetic
uacuuuugaugaaaaucaucucuu

SEQ ID NO: 412062 - RNA, 18 nt, Artificial Sequence
  Synthetic
uucuaacagugaucucuu

SEQ ID NO: 412063 - RNA, 19 nt, Artificial Sequence
  Synthetic
uuucuaacagugaucucuu

SEQ ID NO: 412064 - RNA, 20 nt, Artificial Sequence
  Synthetic
auuucuaacagugaucucuu

SEQ ID NO: 412065 - RNA, 21 nt, Artificial Sequence
  Synthetic
aauuucuaacagugaucucuu

SEQ ID NO: 412066 - RNA, 22 nt, Artificial Sequence
  Synthetic
aaauuucuaacagugaucucuu

SEQ ID NO: 412067 - RNA, 23 nt, Artificial Sequence
  Synthetic
caaauuucuaacagugaucucuu

SEQ ID NO: 412068 - RNA, 24 nt, Artificial Sequence
  Synthetic
gcaaauuucuaacagugaucucuu

SEQ ID NO: 412069 - RNA, 18 nt, Artificial Sequence
  Synthetic
auuccuuguuuaucucuu

SEQ ID NO: 412070 - RNA, 19 nt, Artificial Sequence
  Synthetic
gauuccuuguuuaucucuu

SEQ ID NO: 412071 - RNA, 20 nt, Artificial Sequence
  Synthetic
ggauuccuuguuuaucucuu

SEQ ID NO: 412072 - RNA, 21 nt, Artificial Sequence
  Synthetic
aggauuccuuguuuaucucuu

SEQ ID NO: 412073 - RNA, 22 nt, Artificial Sequence
  Synthetic
uaggauuccuuguuuaucucuu

SEQ ID NO: 412074 - RNA, 23 nt, Artificial Sequence
  Synthetic
cuaggauuccuuguuuaucucuu

SEQ ID NO: 412075 - RNA, 24 nt, Artificial Sequence
  Synthetic
ucuaggauuccuuguuuaucucuu

SEQ ID NO: 412076 - RNA, 18 nt, Artificial Sequence
  Synthetic
agccgauuuuacucucuu

SEQ ID NO: 412077 - RNA, 19 nt, Artificial Sequence
  Synthetic
cagccgauuuuacucucuu

SEQ ID NO: 412078 - RNA, 20 nt, Artificial Sequence
  Synthetic
ccagccgauuuuacucucuu

SEQ ID NO: 412079 - RNA, 21 nt, Artificial Sequence
  Synthetic
cccagccgauuuuacucucuu

SEQ ID NO: 412080 - RNA, 22 nt, Artificial Sequence
  Synthetic
gcccagccgauuuuacucucuu

SEQ ID NO: 412081 - RNA, 23 nt, Artificial Sequence
  Synthetic
cgcccagccgauuuuacucucuu

SEQ ID NO: 412082 - RNA, 24 nt, Artificial Sequence
  Synthetic
acgcccagccgauuuuacucucuu

SEQ ID NO: 412083 - RNA, 18 nt, Artificial Sequence
  Synthetic
guuauuuugcucucucuu

SEQ ID NO: 412084 - RNA, 19 nt, Artificial Sequence
  Synthetic
aguuauuuugcucucucuu

SEQ ID NO: 412085 - RNA, 20 nt, Artificial Sequence
  Synthetic
caguuauuuugcucucucuu

SEQ ID NO: 412086 - RNA, 21 nt, Artificial Sequence
  Synthetic
ucaguuauuuugcucucucuu

SEQ ID NO: 412087 - RNA, 22 nt, Artificial Sequence
  Synthetic
cucaguuauuuugcucucucuu

SEQ ID NO: 412088 - RNA, 23 nt, Artificial Sequence
  Synthetic
ucucaguuauuuugcucucucuu

SEQ ID NO: 412089 - RNA, 24 nt, Artificial Sequence
  Synthetic
gucucaguuauuuugcucucucuu

SEQ ID NO: 412090 - RNA, 18 nt, Artificial Sequence
  Synthetic
aauaaaaaucucucucuu

SEQ ID NO: 412091 - RNA, 19 nt, Artificial Sequence
  Synthetic
aaauaaaaaucucucucuu

SEQ ID NO: 412092 - RNA, 20 nt, Artificial Sequence
  Synthetic
aaaauaaaaaucucucucuu

SEQ ID NO: 412093 - RNA, 21 nt, Artificial Sequence
  Synthetic
aaaaauaaaaaucucucucuu

SEQ ID NO: 412094 - RNA, 22 nt, Artificial Sequence
  Synthetic
aaaaaauaaaaaucucucucuu

SEQ ID NO: 412095 - RNA, 23 nt, Artificial Sequence
  Synthetic
gaaaaaauaaaaaucucucucuu

SEQ ID NO: 412096 - RNA, 24 nt, Artificial Sequence
  Synthetic
agaaaaaauaaaaaucucucucuu

SEQ ID NO: 412097 - RNA, 18 nt, Artificial Sequence
  Synthetic
caaugugaggucucucuu

SEQ ID NO: 412098 - RNA, 19 nt, Artificial Sequence
  Synthetic
acaaugugaggucucucuu

SEQ ID NO: 412099 - RNA, 20 nt, Artificial Sequence
  Synthetic
cacaaugugaggucucucuu

SEQ ID NO: 412100 - RNA, 21 nt, Artificial Sequence
  Synthetic
ucacaaugugaggucucucuu

SEQ ID NO: 412101 - RNA, 22 nt, Artificial Sequence
  Synthetic
aucacaaugugaggucucucuu

SEQ ID NO: 412102 - RNA, 23 nt, Artificial Sequence
  Synthetic
aaucacaaugugaggucucucuu

SEQ ID NO: 412103 - RNA, 24 nt, Artificial Sequence
  Synthetic
aaaucacaaugugaggucucucuu

SEQ ID NO: 412104 - RNA, 18 nt, Artificial Sequence
  Synthetic
gaaggucuucauucucuu

SEQ ID NO: 412105 - RNA, 19 nt, Artificial Sequence
  Synthetic
ugaaggucuucauucucuu

SEQ ID NO: 412106 - RNA, 20 nt, Artificial Sequence
  Synthetic
augaaggucuucauucucuu

SEQ ID NO: 412107 - RNA, 21 nt, Artificial Sequence
  Synthetic
caugaaggucuucauucucuu

SEQ ID NO: 412108 - RNA, 22 nt, Artificial Sequence
  Synthetic
ccaugaaggucuucauucucuu

SEQ ID NO: 412109 - RNA, 23 nt, Artificial Sequence
  Synthetic
accaugaaggucuucauucucuu

SEQ ID NO: 412110 - RNA, 24 nt, Artificial Sequence
  Synthetic
gaccaugaaggucuucauucucuu

SEQ ID NO: 412111 - RNA, 18 nt, Artificial Sequence
  Synthetic
uaaauuguugauucucuu

SEQ ID NO: 412112 - RNA, 19 nt, Artificial Sequence
  Synthetic
guaaauuguugauucucuu

SEQ ID NO: 412113 - RNA, 20 nt, Artificial Sequence
  Synthetic
gguaaauuguugauucucuu

SEQ ID NO: 412114 - RNA, 21 nt, Artificial Sequence
  Synthetic
ugguaaauuguugauucucuu

SEQ ID NO: 412115 - RNA, 22 nt, Artificial Sequence
  Synthetic
augguaaauuguugauucucuu

SEQ ID NO: 412116 - RNA, 23 nt, Artificial Sequence
  Synthetic
uaugguaaauuguugauucucuu

SEQ ID NO: 412117 - RNA, 24 nt, Artificial Sequence
  Synthetic
guaugguaaauuguugauucucuu

SEQ ID NO: 412118 - RNA, 18 nt, Artificial Sequence
  Synthetic
uuacgguuuucuucucuu

SEQ ID NO: 412119 - RNA, 19 nt, Artificial Sequence
  Synthetic
cuuacgguuuucuucucuu

SEQ ID NO: 412120 - RNA, 20 nt, Artificial Sequence
  Synthetic
ccuuacgguuuucuucucuu

SEQ ID NO: 412121 - RNA, 21 nt, Artificial Sequence
  Synthetic
cccuuacgguuuucuucucuu

SEQ ID NO: 412122 - RNA, 22 nt, Artificial Sequence
  Synthetic
acccuuacgguuuucuucucuu

SEQ ID NO: 412123 - RNA, 23 nt, Artificial Sequence
  Synthetic
aacccuuacgguuuucuucucuu

SEQ ID NO: 412124 - RNA, 24 nt, Artificial Sequence
  Synthetic
gaacccuuacgguuuucuucucuu

SEQ ID NO: 412125 - RNA, 18 nt, Artificial Sequence
  Synthetic
cugaauuaaauuucucuu

SEQ ID NO: 412126 - RNA, 19 nt, Artificial Sequence
  Synthetic
ccugaauuaaauuucucuu

SEQ ID NO: 412127 - RNA, 20 nt, Artificial Sequence
  Synthetic
cccugaauuaaauuucucuu

SEQ ID NO: 412128 - RNA, 21 nt, Artificial Sequence
  Synthetic
ucccugaauuaaauuucucuu

SEQ ID NO: 412129 - RNA, 22 nt, Artificial Sequence
  Synthetic
aucccugaauuaaauuucucuu

SEQ ID NO: 412130 - RNA, 23 nt, Artificial Sequence
  Synthetic
uaucccugaauuaaauuucucuu

SEQ ID NO: 412131 - RNA, 24 nt, Artificial Sequence
  Synthetic
auaucccugaauuaaauuucucuu

SEQ ID NO: 412132 - RNA, 18 nt, Artificial Sequence
  Synthetic
aacaggccuauuucucuu

SEQ ID NO: 412133 - RNA, 19 nt, Artificial Sequence
  Synthetic
aaacaggccuauuucucuu

SEQ ID NO: 412134 - RNA, 20 nt, Artificial Sequence
  Synthetic
gaaacaggccuauuucucuu

SEQ ID NO: 412135 - RNA, 21 nt, Artificial Sequence
  Synthetic
agaaacaggccuauuucucuu

SEQ ID NO: 412136 - RNA, 22 nt, Artificial Sequence
  Synthetic
aagaaacaggccuauuucucuu

SEQ ID NO: 412137 - RNA, 23 nt, Artificial Sequence
  Synthetic
aaagaaacaggccuauuucucuu

SEQ ID NO: 412138 - RNA, 24 nt, Artificial Sequence
  Synthetic
uaaagaaacaggccuauuucucuu

SEQ ID NO: 412139 - RNA, 18 nt, Artificial Sequence
  Synthetic
uguuuuuaacuuucucuu

SEQ ID NO: 412140 - RNA, 19 nt, Artificial Sequence
  Synthetic
cuguuuuuaacuuucucuu

SEQ ID NO: 412141 - RNA, 20 nt, Artificial Sequence
  Synthetic
ccuguuuuuaacuuucucuu

SEQ ID NO: 412142 - RNA, 21 nt, Artificial Sequence
  Synthetic
cccuguuuuuaacuuucucuu

SEQ ID NO: 412143 - RNA, 22 nt, Artificial Sequence
  Synthetic
ccccuguuuuuaacuuucucuu

SEQ ID NO: 412144 - RNA, 23 nt, Artificial Sequence
  Synthetic
uccccuguuuuuaacuuucucuu

SEQ ID NO: 412145 - RNA, 24 nt, Artificial Sequence
  Synthetic
uuccccuguuuuuaacuuucucuu

SEQ ID NO: 412146 - RNA, 18 nt, Artificial Sequence
  Synthetic
cuaacccuacuuucucuu

SEQ ID NO: 412147 - RNA, 19 nt, Artificial Sequence
  Synthetic
acuaacccuacuuucucuu

SEQ ID NO: 412148 - RNA, 20 nt, Artificial Sequence
  Synthetic
aacuaacccuacuuucucuu

SEQ ID NO: 412149 - RNA, 21 nt, Artificial Sequence
  Synthetic
aaacuaacccuacuuucucuu

SEQ ID NO: 412150 - RNA, 22 nt, Artificial Sequence
  Synthetic
uaaacuaacccuacuuucucuu

SEQ ID NO: 412151 - RNA, 23 nt, Artificial Sequence
  Synthetic
guaaacuaacccuacuuucucuu

SEQ ID NO: 412152 - RNA, 24 nt, Artificial Sequence
  Synthetic
aguaaacuaacccuacuuucucuu

SEQ ID NO: 412153 - RNA, 18 nt, Artificial Sequence
  Synthetic
gagcaguggcuuucucuu

SEQ ID NO: 412154 - RNA, 19 nt, Artificial Sequence
  Synthetic
ggagcaguggcuuucucuu

SEQ ID NO: 412155 - RNA, 20 nt, Artificial Sequence
  Synthetic
aggagcaguggcuuucucuu

SEQ ID NO: 412156 - RNA, 21 nt, Artificial Sequence
  Synthetic
gaggagcaguggcuuucucuu

SEQ ID NO: 412157 - RNA, 22 nt, Artificial Sequence
  Synthetic
ggaggagcaguggcuuucucuu

SEQ ID NO: 412158 - RNA, 23 nt, Artificial Sequence
  Synthetic
gggaggagcaguggcuuucucuu

SEQ ID NO: 412159 - RNA, 24 nt, Artificial Sequence
  Synthetic
ugggaggagcaguggcuuucucuu

SEQ ID NO: 412160 - RNA, 18 nt, Artificial Sequence
  Synthetic
gaaccucagguuucucuu

SEQ ID NO: 412161 - RNA, 19 nt, Artificial Sequence
  Synthetic
ugaaccucagguuucucuu

SEQ ID NO: 412162 - RNA, 20 nt, Artificial Sequence
  Synthetic
gugaaccucagguuucucuu

SEQ ID NO: 412163 - RNA, 21 nt, Artificial Sequence
  Synthetic
cgugaaccucagguuucucuu

SEQ ID NO: 412164 - RNA, 22 nt, Artificial Sequence
  Synthetic
ccgugaaccucagguuucucuu

SEQ ID NO: 412165 - RNA, 23 nt, Artificial Sequence
  Synthetic
uccgugaaccucagguuucucuu

SEQ ID NO: 412166 - RNA, 24 nt, Artificial Sequence
  Synthetic
auccgugaaccucagguuucucuu

SEQ ID NO: 412167 - RNA, 18 nt, Artificial Sequence
  Synthetic
ggaccuuaauuuucucuu

SEQ ID NO: 412168 - RNA, 19 nt, Artificial Sequence
  Synthetic
uggaccuuaauuuucucuu

SEQ ID NO: 412169 - RNA, 20 nt, Artificial Sequence
  Synthetic
cuggaccuuaauuuucucuu

SEQ ID NO: 412170 - RNA, 21 nt, Artificial Sequence
  Synthetic
ucuggaccuuaauuuucucuu

SEQ ID NO: 412171 - RNA, 22 nt, Artificial Sequence
  Synthetic
uucuggaccuuaauuuucucuu

SEQ ID NO: 412172 - RNA, 23 nt, Artificial Sequence
  Synthetic
uuucuggaccuuaauuuucucuu

SEQ ID NO: 412173 - RNA, 24 nt, Artificial Sequence
  Synthetic
uuuucuggaccuuaauuuucucuu

SEQ ID NO: 412174 - RNA, 18 nt, Artificial Sequence
  Synthetic
acuucagucuuuucucuu

SEQ ID NO: 412175 - RNA, 19 nt, Artificial Sequence
  Synthetic
gacuucagucuuuucucuu

SEQ ID NO: 412176 - RNA, 20 nt, Artificial Sequence
  Synthetic
ggacuucagucuuuucucuu

SEQ ID NO: 412177 - RNA, 21 nt, Artificial Sequence
  Synthetic
gggacuucagucuuuucucuu

SEQ ID NO: 412178 - RNA, 22 nt, Artificial Sequence
  Synthetic
ggggacuucagucuuuucucuu

SEQ ID NO: 412179 - RNA, 23 nt, Artificial Sequence
  Synthetic
uggggacuucagucuuuucucuu

SEQ ID NO: 412180 - RNA, 24 nt, Artificial Sequence
  Synthetic
cuggggacuucagucuuuucucuu

SEQ ID NO: 412181 - RNA, 18 nt, Artificial Sequence
  Synthetic
uaaccucuuuuuucucuu

SEQ ID NO: 412182 - RNA, 19 nt, Artificial Sequence
  Synthetic
auaaccucuuuuuucucuu

SEQ ID NO: 412183 - RNA, 20 nt, Artificial Sequence
  Synthetic
aauaaccucuuuuuucucuu

SEQ ID NO: 412184 - RNA, 21 nt, Artificial Sequence
  Synthetic
uaauaaccucuuuuuucucuu

SEQ ID NO: 412185 - RNA, 22 nt, Artificial Sequence
  Synthetic
uuaauaaccucuuuuuucucuu

SEQ ID NO: 412186 - RNA, 23 nt, Artificial Sequence
  Synthetic
uuuaauaaccucuuuuuucucuu

SEQ ID NO: 412187 - RNA, 24 nt, Artificial Sequence
  Synthetic
auuuaauaaccucuuuuuucucuu

SEQ ID NO: 412188 - RNA, 18 nt, Artificial Sequence
  Synthetic
uucucaaagagaagucuu

SEQ ID NO: 412189 - RNA, 19 nt, Artificial Sequence
  Synthetic
cuucucaaagagaagucuu

SEQ ID NO: 412190 - RNA, 20 nt, Artificial Sequence
  Synthetic
gcuucucaaagagaagucuu

SEQ ID NO: 412191 - RNA, 21 nt, Artificial Sequence
  Synthetic
ugcuucucaaagagaagucuu

SEQ ID NO: 412192 - RNA, 22 nt, Artificial Sequence
  Synthetic
cugcuucucaaagagaagucuu

SEQ ID NO: 412193 - RNA, 23 nt, Artificial Sequence
  Synthetic
ucugcuucucaaagagaagucuu

SEQ ID NO: 412194 - RNA, 24 nt, Artificial Sequence
  Synthetic
aucugcuucucaaagagaagucuu

SEQ ID NO: 412195 - RNA, 18 nt, Artificial Sequence
  Synthetic
cuaagaguaggaagucuu

SEQ ID NO: 412196 - RNA, 19 nt, Artificial Sequence
  Synthetic
acuaagaguaggaagucuu

SEQ ID NO: 412197 - RNA, 20 nt, Artificial Sequence
  Synthetic
aacuaagaguaggaagucuu

SEQ ID NO: 412198 - RNA, 21 nt, Artificial Sequence
  Synthetic
gaacuaagaguaggaagucuu

SEQ ID NO: 412199 - RNA, 22 nt, Artificial Sequence
  Synthetic
ugaacuaagaguaggaagucuu

SEQ ID NO: 412200 - RNA, 23 nt, Artificial Sequence
  Synthetic
uugaacuaagaguaggaagucuu

SEQ ID NO: 412201 - RNA, 24 nt, Artificial Sequence
  Synthetic
uuugaacuaagaguaggaagucuu

SEQ ID NO: 412202 - RNA, 18 nt, Artificial Sequence
  Synthetic
agcccugggauaagucuu

SEQ ID NO: 412203 - RNA, 19 nt, Artificial Sequence
  Synthetic
aagcccugggauaagucuu

SEQ ID NO: 412204 - RNA, 20 nt, Artificial Sequence
  Synthetic
aaagcccugggauaagucuu

SEQ ID NO: 412205 - RNA, 21 nt, Artificial Sequence
  Synthetic
aaaagcccugggauaagucuu

SEQ ID NO: 412206 - RNA, 22 nt, Artificial Sequence
  Synthetic
gaaaagcccugggauaagucuu

SEQ ID NO: 412207 - RNA, 23 nt, Artificial Sequence
  Synthetic
agaaaagcccugggauaagucuu

SEQ ID NO: 412208 - RNA, 24 nt, Artificial Sequence
  Synthetic
aagaaaagcccugggauaagucuu

SEQ ID NO: 412209 - RNA, 18 nt, Artificial Sequence
  Synthetic
aaacuaagucuaagucuu

SEQ ID NO: 412210 - RNA, 19 nt, Artificial Sequence
  Synthetic
aaaacuaagucuaagucuu

SEQ ID NO: 412211 - RNA, 20 nt, Artificial Sequence
  Synthetic
gaaaacuaagucuaagucuu

SEQ ID NO: 412212 - RNA, 21 nt, Artificial Sequence
  Synthetic
ugaaaacuaagucuaagucuu

SEQ ID NO: 412213 - RNA, 22 nt, Artificial Sequence
  Synthetic
cugaaaacuaagucuaagucuu

SEQ ID NO: 412214 - RNA, 23 nt, Artificial Sequence
  Synthetic
ucugaaaacuaagucuaagucuu

SEQ ID NO: 412215 - RNA, 24 nt, Artificial Sequence
  Synthetic
uucugaaaacuaagucuaagucuu

SEQ ID NO: 412216 - RNA, 18 nt, Artificial Sequence
  Synthetic
ugcaaaacuuuaagucuu

SEQ ID NO: 412217 - RNA, 19 nt, Artificial Sequence
  Synthetic
uugcaaaacuuuaagucuu

SEQ ID NO: 412218 - RNA, 20 nt, Artificial Sequence
  Synthetic
guugcaaaacuuuaagucuu

SEQ ID NO: 412219 - RNA, 21 nt, Artificial Sequence
  Synthetic
aguugcaaaacuuuaagucuu

SEQ ID NO: 412220 - RNA, 22 nt, Artificial Sequence
  Synthetic
uaguugcaaaacuuuaagucuu

SEQ ID NO: 412221 - RNA, 23 nt, Artificial Sequence
  Synthetic
guaguugcaaaacuuuaagucuu

SEQ ID NO: 412222 - RNA, 24 nt, Artificial Sequence
  Synthetic
uguaguugcaaaacuuuaagucuu

SEQ ID NO: 412223 - RNA, 18 nt, Artificial Sequence
  Synthetic
cacaggaaaaacagucuu

SEQ ID NO: 412224 - RNA, 19 nt, Artificial Sequence
  Synthetic
ucacaggaaaaacagucuu

SEQ ID NO: 412225 - RNA, 20 nt, Artificial Sequence
  Synthetic
uucacaggaaaaacagucuu

SEQ ID NO: 412226 - RNA, 21 nt, Artificial Sequence
  Synthetic
cuucacaggaaaaacagucuu

SEQ ID NO: 412227 - RNA, 22 nt, Artificial Sequence
  Synthetic
ccuucacaggaaaaacagucuu

SEQ ID NO: 412228 - RNA, 23 nt, Artificial Sequence
  Synthetic
accuucacaggaaaaacagucuu

SEQ ID NO: 412229 - RNA, 24 nt, Artificial Sequence
  Synthetic
uaccuucacaggaaaaacagucuu

SEQ ID NO: 412230 - RNA, 18 nt, Artificial Sequence
  Synthetic
cagaugaugugcagucuu

SEQ ID NO: 412231 - RNA, 19 nt, Artificial Sequence
  Synthetic
ucagaugaugugcagucuu

SEQ ID NO: 412232 - RNA, 20 nt, Artificial Sequence
  Synthetic
aucagaugaugugcagucuu

SEQ ID NO: 412233 - RNA, 21 nt, Artificial Sequence
  Synthetic
caucagaugaugugcagucuu

SEQ ID NO: 412234 - RNA, 22 nt, Artificial Sequence
  Synthetic
gcaucagaugaugugcagucuu

SEQ ID NO: 412235 - RNA, 23 nt, Artificial Sequence
  Synthetic
ugcaucagaugaugugcagucuu

SEQ ID NO: 412236 - RNA, 24 nt, Artificial Sequence
  Synthetic
augcaucagaugaugugcagucuu

SEQ ID NO: 412237 - RNA, 18 nt, Artificial Sequence
  Synthetic
uagugaauuuucagucuu

SEQ ID NO: 412238 - RNA, 19 nt, Artificial Sequence
  Synthetic
guagugaauuuucagucuu

SEQ ID NO: 412239 - RNA, 20 nt, Artificial Sequence
  Synthetic
gguagugaauuuucagucuu

SEQ ID NO: 412240 - RNA, 21 nt, Artificial Sequence
  Synthetic
ggguagugaauuuucagucuu

SEQ ID NO: 412241 - RNA, 22 nt, Artificial Sequence
  Synthetic
uggguagugaauuuucagucuu

SEQ ID NO: 412242 - RNA, 23 nt, Artificial Sequence
  Synthetic
auggguagugaauuuucagucuu

SEQ ID NO: 412243 - RNA, 24 nt, Artificial Sequence
  Synthetic
aauggguagugaauuuucagucuu

SEQ ID NO: 412244 - RNA, 18 nt, Artificial Sequence
  Synthetic
gcuggggaucagagucuu

SEQ ID NO: 412245 - RNA, 19 nt, Artificial Sequence
  Synthetic
agcuggggaucagagucuu

SEQ ID NO: 412246 - RNA, 20 nt, Artificial Sequence
  Synthetic
gagcuggggaucagagucuu

SEQ ID NO: 412247 - RNA, 21 nt, Artificial Sequence
  Synthetic
ugagcuggggaucagagucuu

SEQ ID NO: 412248 - RNA, 22 nt, Artificial Sequence
  Synthetic
uugagcuggggaucagagucuu

SEQ ID NO: 412249 - RNA, 23 nt, Artificial Sequence
  Synthetic
cuugagcuggggaucagagucuu

SEQ ID NO: 412250 - RNA, 24 nt, Artificial Sequence
  Synthetic
ccuugagcuggggaucagagucuu

SEQ ID NO: 412251 - RNA, 18 nt, Artificial Sequence
  Synthetic
uuuaguuuauggagucuu

SEQ ID NO: 412252 - RNA, 19 nt, Artificial Sequence
  Synthetic
cuuuaguuuauggagucuu

SEQ ID NO: 412253 - RNA, 20 nt, Artificial Sequence
  Synthetic
ucuuuaguuuauggagucuu

SEQ ID NO: 412254 - RNA, 21 nt, Artificial Sequence
  Synthetic
uucuuuaguuuauggagucuu

SEQ ID NO: 412255 - RNA, 22 nt, Artificial Sequence
  Synthetic
cuucuuuaguuuauggagucuu

SEQ ID NO: 412256 - RNA, 23 nt, Artificial Sequence
  Synthetic
ucuucuuuaguuuauggagucuu

SEQ ID NO: 412257 - RNA, 24 nt, Artificial Sequence
  Synthetic
uucuucuuuaguuuauggagucuu

SEQ ID NO: 412258 - RNA, 18 nt, Artificial Sequence
  Synthetic
ucuaggcauuugagucuu

SEQ ID NO: 412259 - RNA, 19 nt, Artificial Sequence
  Synthetic
uucuaggcauuugagucuu

SEQ ID NO: 412260 - RNA, 20 nt, Artificial Sequence
  Synthetic
uuucuaggcauuugagucuu

SEQ ID NO: 412261 - RNA, 21 nt, Artificial Sequence
  Synthetic
auuucuaggcauuugagucuu

SEQ ID NO: 412262 - RNA, 22 nt, Artificial Sequence
  Synthetic
cauuucuaggcauuugagucuu

SEQ ID NO: 412263 - RNA, 23 nt, Artificial Sequence
  Synthetic
gcauuucuaggcauuugagucuu

SEQ ID NO: 412264 - RNA, 24 nt, Artificial Sequence
  Synthetic
ugcauuucuaggcauuugagucuu

SEQ ID NO: 412265 - RNA, 18 nt, Artificial Sequence
  Synthetic
uugggauauaauagucuu

SEQ ID NO: 412266 - RNA, 19 nt, Artificial Sequence
  Synthetic
cuugggauauaauagucuu

SEQ ID NO: 412267 - RNA, 20 nt, Artificial Sequence
  Synthetic
acuugggauauaauagucuu

SEQ ID NO: 412268 - RNA, 21 nt, Artificial Sequence
  Synthetic
aacuugggauauaauagucuu

SEQ ID NO: 412269 - RNA, 22 nt, Artificial Sequence
  Synthetic
caacuugggauauaauagucuu

SEQ ID NO: 412270 - RNA, 23 nt, Artificial Sequence
  Synthetic
ucaacuugggauauaauagucuu

SEQ ID NO: 412271 - RNA, 24 nt, Artificial Sequence
  Synthetic
cucaacuugggauauaauagucuu

SEQ ID NO: 412272 - RNA, 18 nt, Artificial Sequence
  Synthetic
cuaaucagcaguagucuu

SEQ ID NO: 412273 - RNA, 19 nt, Artificial Sequence
  Synthetic
ucuaaucagcaguagucuu

SEQ ID NO: 412274 - RNA, 20 nt, Artificial Sequence
  Synthetic
aucuaaucagcaguagucuu

SEQ ID NO: 412275 - RNA, 21 nt, Artificial Sequence
  Synthetic
caucuaaucagcaguagucuu

SEQ ID NO: 412276 - RNA, 22 nt, Artificial Sequence
  Synthetic
gcaucuaaucagcaguagucuu

SEQ ID NO: 412277 - RNA, 23 nt, Artificial Sequence
  Synthetic
agcaucuaaucagcaguagucuu

SEQ ID NO: 412278 - RNA, 24 nt, Artificial Sequence
  Synthetic
aagcaucuaaucagcaguagucuu

SEQ ID NO: 412279 - RNA, 18 nt, Artificial Sequence
  Synthetic
cagaaaauccguagucuu

SEQ ID NO: 412280 - RNA, 19 nt, Artificial Sequence
  Synthetic
acagaaaauccguagucuu

SEQ ID NO: 412281 - RNA, 20 nt, Artificial Sequence
  Synthetic
aacagaaaauccguagucuu

SEQ ID NO: 412282 - RNA, 21 nt, Artificial Sequence
  Synthetic
aaacagaaaauccguagucuu

SEQ ID NO: 412283 - RNA, 22 nt, Artificial Sequence
  Synthetic
gaaacagaaaauccguagucuu

SEQ ID NO: 412284 - RNA, 23 nt, Artificial Sequence
  Synthetic
agaaacagaaaauccguagucuu

SEQ ID NO: 412285 - RNA, 24 nt, Artificial Sequence
  Synthetic
aagaaacagaaaauccguagucuu

SEQ ID NO: 412286 - RNA, 18 nt, Artificial Sequence
  Synthetic
uauaaccugauuagucuu

SEQ ID NO: 412287 - RNA, 19 nt, Artificial Sequence
  Synthetic
guauaaccugauuagucuu

SEQ ID NO: 412288 - RNA, 20 nt, Artificial Sequence
  Synthetic
uguauaaccugauuagucuu

SEQ ID NO: 412289 - RNA, 21 nt, Artificial Sequence
  Synthetic
cuguauaaccugauuagucuu

SEQ ID NO: 412290 - RNA, 22 nt, Artificial Sequence
  Synthetic
ccuguauaaccugauuagucuu

SEQ ID NO: 412291 - RNA, 23 nt, Artificial Sequence
  Synthetic
uccuguauaaccugauuagucuu

SEQ ID NO: 412292 - RNA, 24 nt, Artificial Sequence
  Synthetic
uuccuguauaaccugauuagucuu

SEQ ID NO: 412293 - RNA, 18 nt, Artificial Sequence
  Synthetic
gugagagcuuuucgucuu

SEQ ID NO: 412294 - RNA, 19 nt, Artificial Sequence
  Synthetic
ugugagagcuuuucgucuu

SEQ ID NO: 412295 - RNA, 20 nt, Artificial Sequence
  Synthetic
augugagagcuuuucgucuu

SEQ ID NO: 412296 - RNA, 21 nt, Artificial Sequence
  Synthetic
uaugugagagcuuuucgucuu

SEQ ID NO: 412297 - RNA, 22 nt, Artificial Sequence
  Synthetic
auaugugagagcuuuucgucuu

SEQ ID NO: 412298 - RNA, 23 nt, Artificial Sequence
  Synthetic
gauaugugagagcuuuucgucuu

SEQ ID NO: 412299 - RNA, 24 nt, Artificial Sequence
  Synthetic
agauaugugagagcuuuucgucuu

SEQ ID NO: 412300 - RNA, 18 nt, Artificial Sequence
  Synthetic
ggugauuuuggaggucuu

SEQ ID NO: 412301 - RNA, 19 nt, Artificial Sequence
  Synthetic
uggugauuuuggaggucuu

SEQ ID NO: 412302 - RNA, 20 nt, Artificial Sequence
  Synthetic
auggugauuuuggaggucuu

SEQ ID NO: 412303 - RNA, 21 nt, Artificial Sequence
  Synthetic
cauggugauuuuggaggucuu

SEQ ID NO: 412304 - RNA, 22 nt, Artificial Sequence
  Synthetic
ccauggugauuuuggaggucuu

SEQ ID NO: 412305 - RNA, 23 nt, Artificial Sequence
  Synthetic
accauggugauuuuggaggucuu

SEQ ID NO: 412306 - RNA, 24 nt, Artificial Sequence
  Synthetic
caccauggugauuuuggaggucuu

SEQ ID NO: 412307 - RNA, 18 nt, Artificial Sequence
  Synthetic
uuauauguuugaggucuu

SEQ ID NO: 412308 - RNA, 19 nt, Artificial Sequence
  Synthetic
auuauauguuugaggucuu

SEQ ID NO: 412309 - RNA, 20 nt, Artificial Sequence
  Synthetic
uauuauauguuugaggucuu

SEQ ID NO: 412310 - RNA, 21 nt, Artificial Sequence
  Synthetic
guauuauauguuugaggucuu

SEQ ID NO: 412311 - RNA, 22 nt, Artificial Sequence
  Synthetic
uguauuauauguuugaggucuu

SEQ ID NO: 412312 - RNA, 23 nt, Artificial Sequence
  Synthetic
auguauuauauguuugaggucuu

SEQ ID NO: 412313 - RNA, 24 nt, Artificial Sequence
  Synthetic
aauguauuauauguuugaggucuu

SEQ ID NO: 412314 - RNA, 18 nt, Artificial Sequence
  Synthetic
uuugggcagcacggucuu

SEQ ID NO: 412315 - RNA, 19 nt, Artificial Sequence
  Synthetic
cuuugggcagcacggucuu

SEQ ID NO: 412316 - RNA, 20 nt, Artificial Sequence
  Synthetic
ccuuugggcagcacggucuu

SEQ ID NO: 412317 - RNA, 21 nt, Artificial Sequence
  Synthetic
uccuuugggcagcacggucuu

SEQ ID NO: 412318 - RNA, 22 nt, Artificial Sequence
  Synthetic
auccuuugggcagcacggucuu

SEQ ID NO: 412319 - RNA, 23 nt, Artificial Sequence
  Synthetic
cauccuuugggcagcacggucuu

SEQ ID NO: 412320 - RNA, 24 nt, Artificial Sequence
  Synthetic
ucauccuuugggcagcacggucuu

SEQ ID NO: 412321 - RNA, 18 nt, Artificial Sequence
  Synthetic
uaacuugucuagggucuu

SEQ ID NO: 412322 - RNA, 19 nt, Artificial Sequence
  Synthetic
guaacuugucuagggucuu

SEQ ID NO: 412323 - RNA, 20 nt, Artificial Sequence
  Synthetic
cguaacuugucuagggucuu

SEQ ID NO: 412324 - RNA, 21 nt, Artificial Sequence
  Synthetic
acguaacuugucuagggucuu

SEQ ID NO: 412325 - RNA, 22 nt, Artificial Sequence
  Synthetic
aacguaacuugucuagggucuu

SEQ ID NO: 412326 - RNA, 23 nt, Artificial Sequence
  Synthetic
uaacguaacuugucuagggucuu

SEQ ID NO: 412327 - RNA, 24 nt, Artificial Sequence
  Synthetic
cuaacguaacuugucuagggucuu

SEQ ID NO: 412328 - RNA, 18 nt, Artificial Sequence
  Synthetic
cuggagccccugggucuu

SEQ ID NO: 412329 - RNA, 19 nt, Artificial Sequence
  Synthetic
ccuggagccccugggucuu

SEQ ID NO: 412330 - RNA, 20 nt, Artificial Sequence
  Synthetic
accuggagccccugggucuu

SEQ ID NO: 412331 - RNA, 21 nt, Artificial Sequence
  Synthetic
uaccuggagccccugggucuu

SEQ ID NO: 412332 - RNA, 22 nt, Artificial Sequence
  Synthetic
uuaccuggagccccugggucuu

SEQ ID NO: 412333 - RNA, 23 nt, Artificial Sequence
  Synthetic
guuaccuggagccccugggucuu

SEQ ID NO: 412334 - RNA, 24 nt, Artificial Sequence
  Synthetic
uguuaccuggagccccugggucuu

SEQ ID NO: 412335 - RNA, 18 nt, Artificial Sequence
  Synthetic
cauuuuguguauggucuu

SEQ ID NO: 412336 - RNA, 19 nt, Artificial Sequence
  Synthetic
ucauuuuguguauggucuu

SEQ ID NO: 412337 - RNA, 20 nt, Artificial Sequence
  Synthetic
aucauuuuguguauggucuu

SEQ ID NO: 412338 - RNA, 21 nt, Artificial Sequence
  Synthetic
aaucauuuuguguauggucuu

SEQ ID NO: 412339 - RNA, 22 nt, Artificial Sequence
  Synthetic
aaaucauuuuguguauggucuu

SEQ ID NO: 412340 - RNA, 23 nt, Artificial Sequence
  Synthetic
gaaaucauuuuguguauggucuu

SEQ ID NO: 412341 - RNA, 24 nt, Artificial Sequence
  Synthetic
ugaaaucauuuuguguauggucuu

SEQ ID NO: 412342 - RNA, 18 nt, Artificial Sequence
  Synthetic
aauaaauuuucuggucuu

SEQ ID NO: 412343 - RNA, 19 nt, Artificial Sequence
  Synthetic
uaauaaauuuucuggucuu

SEQ ID NO: 412344 - RNA, 20 nt, Artificial Sequence
  Synthetic
uuaauaaauuuucuggucuu

SEQ ID NO: 412345 - RNA, 21 nt, Artificial Sequence
  Synthetic
cuuaauaaauuuucuggucuu

SEQ ID NO: 412346 - RNA, 22 nt, Artificial Sequence
  Synthetic
ccuuaauaaauuuucuggucuu

SEQ ID NO: 412347 - RNA, 23 nt, Artificial Sequence
  Synthetic
gccuuaauaaauuuucuggucuu

SEQ ID NO: 412348 - RNA, 24 nt, Artificial Sequence
  Synthetic
ugccuuaauaaauuuucuggucuu

SEQ ID NO: 412349 - RNA, 18 nt, Artificial Sequence
  Synthetic
uuuaggguuauuggucuu

SEQ ID NO: 412350 - RNA, 19 nt, Artificial Sequence
  Synthetic
uuuuaggguuauuggucuu

SEQ ID NO: 412351 - RNA, 20 nt, Artificial Sequence
  Synthetic
uuuuuaggguuauuggucuu

SEQ ID NO: 412352 - RNA, 21 nt, Artificial Sequence
  Synthetic
uuuuuuaggguuauuggucuu

SEQ ID NO: 412353 - RNA, 22 nt, Artificial Sequence
  Synthetic
auuuuuuaggguuauuggucuu

SEQ ID NO: 412354 - RNA, 23 nt, Artificial Sequence
  Synthetic
aauuuuuuaggguuauuggucuu

SEQ ID NO: 412355 - RNA, 24 nt, Artificial Sequence
  Synthetic
uaauuuuuuaggguuauuggucuu

SEQ ID NO: 412356 - RNA, 18 nt, Artificial Sequence
  Synthetic
uuucagaccuuuggucuu

SEQ ID NO: 412357 - RNA, 19 nt, Artificial Sequence
  Synthetic
uuuucagaccuuuggucuu

SEQ ID NO: 412358 - RNA, 20 nt, Artificial Sequence
  Synthetic
uuuuucagaccuuuggucuu

SEQ ID NO: 412359 - RNA, 21 nt, Artificial Sequence
  Synthetic
auuuuucagaccuuuggucuu

SEQ ID NO: 412360 - RNA, 22 nt, Artificial Sequence
  Synthetic
uauuuuucagaccuuuggucuu

SEQ ID NO: 412361 - RNA, 23 nt, Artificial Sequence
  Synthetic
uuauuuuucagaccuuuggucuu

SEQ ID NO: 412362 - RNA, 24 nt, Artificial Sequence
  Synthetic
guuauuuuucagaccuuuggucuu

SEQ ID NO: 412363 - RNA, 18 nt, Artificial Sequence
  Synthetic
cacuguugcuuuggucuu

SEQ ID NO: 412364 - RNA, 19 nt, Artificial Sequence
  Synthetic
gcacuguugcuuuggucuu

SEQ ID NO: 412365 - RNA, 20 nt, Artificial Sequence
  Synthetic
ugcacuguugcuuuggucuu

SEQ ID NO: 412366 - RNA, 21 nt, Artificial Sequence
  Synthetic
augcacuguugcuuuggucuu

SEQ ID NO: 412367 - RNA, 22 nt, Artificial Sequence
  Synthetic
caugcacuguugcuuuggucuu

SEQ ID NO: 412368 - RNA, 23 nt, Artificial Sequence
  Synthetic
ucaugcacuguugcuuuggucuu

SEQ ID NO: 412369 - RNA, 24 nt, Artificial Sequence
  Synthetic
uucaugcacuguugcuuuggucuu

SEQ ID NO: 412370 - RNA, 18 nt, Artificial Sequence
  Synthetic
gccugauugaaaugucuu

SEQ ID NO: 412371 - RNA, 19 nt, Artificial Sequence
  Synthetic
agccugauugaaaugucuu

SEQ ID NO: 412372 - RNA, 20 nt, Artificial Sequence
  Synthetic
uagccugauugaaaugucuu

SEQ ID NO: 412373 - RNA, 21 nt, Artificial Sequence
  Synthetic
uuagccugauugaaaugucuu

SEQ ID NO: 412374 - RNA, 22 nt, Artificial Sequence
  Synthetic
uuuagccugauugaaaugucuu

SEQ ID NO: 412375 - RNA, 23 nt, Artificial Sequence
  Synthetic
guuuagccugauugaaaugucuu

SEQ ID NO: 412376 - RNA, 24 nt, Artificial Sequence
  Synthetic
aguuuagccugauugaaaugucuu

SEQ ID NO: 412377 - RNA, 18 nt, Artificial Sequence
  Synthetic
cacacuucccaaugucuu

SEQ ID NO: 412378 - RNA, 19 nt, Artificial Sequence
  Synthetic
ccacacuucccaaugucuu

SEQ ID NO: 412379 - RNA, 20 nt, Artificial Sequence
  Synthetic
cccacacuucccaaugucuu

SEQ ID NO: 412380 - RNA, 21 nt, Artificial Sequence
  Synthetic
acccacacuucccaaugucuu

SEQ ID NO: 412381 - RNA, 22 nt, Artificial Sequence
  Synthetic
cacccacacuucccaaugucuu

SEQ ID NO: 412382 - RNA, 23 nt, Artificial Sequence
  Synthetic
ucacccacacuucccaaugucuu

SEQ ID NO: 412383 - RNA, 24 nt, Artificial Sequence
  Synthetic
gucacccacacuucccaaugucuu

SEQ ID NO: 412384 - RNA, 18 nt, Artificial Sequence
  Synthetic
aucccacuggaaugucuu

SEQ ID NO: 412385 - RNA, 19 nt, Artificial Sequence
  Synthetic
uaucccacuggaaugucuu

SEQ ID NO: 412386 - RNA, 20 nt, Artificial Sequence
  Synthetic
uuaucccacuggaaugucuu

SEQ ID NO: 412387 - RNA, 21 nt, Artificial Sequence
  Synthetic
uuuaucccacuggaaugucuu

SEQ ID NO: 412388 - RNA, 22 nt, Artificial Sequence
  Synthetic
uuuuaucccacuggaaugucuu

SEQ ID NO: 412389 - RNA, 23 nt, Artificial Sequence
  Synthetic
uuuuuaucccacuggaaugucuu

SEQ ID NO: 412390 - RNA, 24 nt, Artificial Sequence
  Synthetic
uuuuuuaucccacuggaaugucuu

SEQ ID NO: 412391 - RNA, 18 nt, Artificial Sequence
  Synthetic
uuuguauguggaugucuu

SEQ ID NO: 412392 - RNA, 19 nt, Artificial Sequence
  Synthetic
auuuguauguggaugucuu

SEQ ID NO: 412393 - RNA, 20 nt, Artificial Sequence
  Synthetic
aauuuguauguggaugucuu

SEQ ID NO: 412394 - RNA, 21 nt, Artificial Sequence
  Synthetic
aaauuuguauguggaugucuu

SEQ ID NO: 412395 - RNA, 22 nt, Artificial Sequence
  Synthetic
aaaauuuguauguggaugucuu

SEQ ID NO: 412396 - RNA, 23 nt, Artificial Sequence
  Synthetic
uaaaauuuguauguggaugucuu

SEQ ID NO: 412397 - RNA, 24 nt, Artificial Sequence
  Synthetic
uuaaaauuuguauguggaugucuu

SEQ ID NO: 412398 - RNA, 18 nt, Artificial Sequence
  Synthetic
ggacaggcugacugucuu

SEQ ID NO: 412399 - RNA, 19 nt, Artificial Sequence
  Synthetic
aggacaggcugacugucuu

SEQ ID NO: 412400 - RNA, 20 nt, Artificial Sequence
  Synthetic
aaggacaggcugacugucuu

SEQ ID NO: 412401 - RNA, 21 nt, Artificial Sequence
  Synthetic
aaaggacaggcugacugucuu

SEQ ID NO: 412402 - RNA, 22 nt, Artificial Sequence
  Synthetic
caaaggacaggcugacugucuu

SEQ ID NO: 412403 - RNA, 23 nt, Artificial Sequence
  Synthetic
ucaaaggacaggcugacugucuu

SEQ ID NO: 412404 - RNA, 24 nt, Artificial Sequence
  Synthetic
uucaaaggacaggcugacugucuu

SEQ ID NO: 412405 - RNA, 18 nt, Artificial Sequence
  Synthetic
uaacuggcuggcugucuu

SEQ ID NO: 412406 - RNA, 19 nt, Artificial Sequence
  Synthetic
cuaacuggcuggcugucuu

SEQ ID NO: 412407 - RNA, 20 nt, Artificial Sequence
  Synthetic
ccuaacuggcuggcugucuu

SEQ ID NO: 412408 - RNA, 21 nt, Artificial Sequence
  Synthetic
uccuaacuggcuggcugucuu

SEQ ID NO: 412409 - RNA, 22 nt, Artificial Sequence
  Synthetic
auccuaacuggcuggcugucuu

SEQ ID NO: 412410 - RNA, 23 nt, Artificial Sequence
  Synthetic
gauccuaacuggcuggcugucuu

SEQ ID NO: 412411 - RNA, 24 nt, Artificial Sequence
  Synthetic
ugauccuaacuggcuggcugucuu

SEQ ID NO: 412412 - RNA, 18 nt, Artificial Sequence
  Synthetic
uaauauuuauggugucuu

SEQ ID NO: 412413 - RNA, 19 nt, Artificial Sequence
  Synthetic
guaauauuuauggugucuu

SEQ ID NO: 412414 - RNA, 20 nt, Artificial Sequence
  Synthetic
uguaauauuuauggugucuu

SEQ ID NO: 412415 - RNA, 21 nt, Artificial Sequence
  Synthetic
uuguaauauuuauggugucuu

SEQ ID NO: 412416 - RNA, 22 nt, Artificial Sequence
  Synthetic
auuguaauauuuauggugucuu

SEQ ID NO: 412417 - RNA, 23 nt, Artificial Sequence
  Synthetic
gauuguaauauuuauggugucuu

SEQ ID NO: 412418 - RNA, 24 nt, Artificial Sequence
  Synthetic
agauuguaauauuuauggugucuu

SEQ ID NO: 412419 - RNA, 18 nt, Artificial Sequence
  Synthetic
uccagccccuugugucuu

SEQ ID NO: 412420 - RNA, 19 nt, Artificial Sequence
  Synthetic
cuccagccccuugugucuu

SEQ ID NO: 412421 - RNA, 20 nt, Artificial Sequence
  Synthetic
ucuccagccccuugugucuu

SEQ ID NO: 412422 - RNA, 21 nt, Artificial Sequence
  Synthetic
cucuccagccccuugugucuu

SEQ ID NO: 412423 - RNA, 22 nt, Artificial Sequence
  Synthetic
ucucuccagccccuugugucuu

SEQ ID NO: 412424 - RNA, 23 nt, Artificial Sequence
  Synthetic
uucucuccagccccuugugucuu

SEQ ID NO: 412425 - RNA, 24 nt, Artificial Sequence
  Synthetic
uuucucuccagccccuugugucuu

SEQ ID NO: 412426 - RNA, 18 nt, Artificial Sequence
  Synthetic
auuuuugguacuugucuu

SEQ ID NO: 412427 - RNA, 19 nt, Artificial Sequence
  Synthetic
cauuuuugguacuugucuu

SEQ ID NO: 412428 - RNA, 20 nt, Artificial Sequence
  Synthetic
acauuuuugguacuugucuu

SEQ ID NO: 412429 - RNA, 21 nt, Artificial Sequence
  Synthetic
aacauuuuugguacuugucuu

SEQ ID NO: 412430 - RNA, 22 nt, Artificial Sequence
  Synthetic
uaacauuuuugguacuugucuu

SEQ ID NO: 412431 - RNA, 23 nt, Artificial Sequence
  Synthetic
uuaacauuuuugguacuugucuu

SEQ ID NO: 412432 - RNA, 24 nt, Artificial Sequence
  Synthetic
auuaacauuuuugguacuugucuu

SEQ ID NO: 412433 - RNA, 18 nt, Artificial Sequence
  Synthetic
gcuguggaagcuugucuu

SEQ ID NO: 412434 - RNA, 19 nt, Artificial Sequence
  Synthetic
agcuguggaagcuugucuu

SEQ ID NO: 412435 - RNA, 20 nt, Artificial Sequence
  Synthetic
aagcuguggaagcuugucuu

SEQ ID NO: 412436 - RNA, 21 nt, Artificial Sequence
  Synthetic
aaagcuguggaagcuugucuu

SEQ ID NO: 412437 - RNA, 22 nt, Artificial Sequence
  Synthetic
caaagcuguggaagcuugucuu

SEQ ID NO: 412438 - RNA, 23 nt, Artificial Sequence
  Synthetic
acaaagcuguggaagcuugucuu

SEQ ID NO: 412439 - RNA, 24 nt, Artificial Sequence
  Synthetic
cacaaagcuguggaagcuugucuu

SEQ ID NO: 412440 - RNA, 18 nt, Artificial Sequence
  Synthetic
uuucucuuaaaaauucuu

SEQ ID NO: 412441 - RNA, 19 nt, Artificial Sequence
  Synthetic
uuuucucuuaaaaauucuu

SEQ ID NO: 412442 - RNA, 20 nt, Artificial Sequence
  Synthetic
uuuuucucuuaaaaauucuu

SEQ ID NO: 412443 - RNA, 21 nt, Artificial Sequence
  Synthetic
cuuuuucucuuaaaaauucuu

SEQ ID NO: 412444 - RNA, 22 nt, Artificial Sequence
  Synthetic
ccuuuuucucuuaaaaauucuu

SEQ ID NO: 412445 - RNA, 23 nt, Artificial Sequence
  Synthetic
cccuuuuucucuuaaaaauucuu

SEQ ID NO: 412446 - RNA, 24 nt, Artificial Sequence
  Synthetic
ucccuuuuucucuuaaaaauucuu

SEQ ID NO: 412447 - RNA, 18 nt, Artificial Sequence
  Synthetic
gucuauaauaaaauucuu

SEQ ID NO: 412448 - RNA, 19 nt, Artificial Sequence
  Synthetic
ugucuauaauaaaauucuu

SEQ ID NO: 412449 - RNA, 20 nt, Artificial Sequence
  Synthetic
cugucuauaauaaaauucuu

SEQ ID NO: 412450 - RNA, 21 nt, Artificial Sequence
  Synthetic
ucugucuauaauaaaauucuu

SEQ ID NO: 412451 - RNA, 22 nt, Artificial Sequence
  Synthetic
aucugucuauaauaaaauucuu

SEQ ID NO: 412452 - RNA, 23 nt, Artificial Sequence
  Synthetic
aaucugucuauaauaaaauucuu

SEQ ID NO: 412453 - RNA, 24 nt, Artificial Sequence
  Synthetic
uaaucugucuauaauaaaauucuu

SEQ ID NO: 412454 - RNA, 18 nt, Artificial Sequence
  Synthetic
guuacucuacaaauucuu

SEQ ID NO: 412455 - RNA, 19 nt, Artificial Sequence
  Synthetic
aguuacucuacaaauucuu

SEQ ID NO: 412456 - RNA, 20 nt, Artificial Sequence
  Synthetic
aaguuacucuacaaauucuu

SEQ ID NO: 412457 - RNA, 21 nt, Artificial Sequence
  Synthetic
uaaguuacucuacaaauucuu

SEQ ID NO: 412458 - RNA, 22 nt, Artificial Sequence
  Synthetic
cuaaguuacucuacaaauucuu

SEQ ID NO: 412459 - RNA, 23 nt, Artificial Sequence
  Synthetic
ucuaaguuacucuacaaauucuu

SEQ ID NO: 412460 - RNA, 24 nt, Artificial Sequence
  Synthetic
gucuaaguuacucuacaaauucuu

SEQ ID NO: 412461 - RNA, 18 nt, Artificial Sequence
  Synthetic
aucugagaagaaauucuu

SEQ ID NO: 412462 - RNA, 19 nt, Artificial Sequence
  Synthetic
uaucugagaagaaauucuu

SEQ ID NO: 412463 - RNA, 20 nt, Artificial Sequence
  Synthetic
auaucugagaagaaauucuu

SEQ ID NO: 412464 - RNA, 21 nt, Artificial Sequence
  Synthetic
cauaucugagaagaaauucuu

SEQ ID NO: 412465 - RNA, 22 nt, Artificial Sequence
  Synthetic
acauaucugagaagaaauucuu

SEQ ID NO: 412466 - RNA, 23 nt, Artificial Sequence
  Synthetic
gacauaucugagaagaaauucuu

SEQ ID NO: 412467 - RNA, 24 nt, Artificial Sequence
  Synthetic
agacauaucugagaagaaauucuu

SEQ ID NO: 412468 - RNA, 18 nt, Artificial Sequence
  Synthetic
aagguagauuaaauucuu

SEQ ID NO: 412469 - RNA, 19 nt, Artificial Sequence
  Synthetic
caagguagauuaaauucuu

SEQ ID NO: 412470 - RNA, 20 nt, Artificial Sequence
  Synthetic
ucaagguagauuaaauucuu

SEQ ID NO: 412471 - RNA, 21 nt, Artificial Sequence
  Synthetic
uucaagguagauuaaauucuu

SEQ ID NO: 412472 - RNA, 22 nt, Artificial Sequence
  Synthetic
cuucaagguagauuaaauucuu

SEQ ID NO: 412473 - RNA, 23 nt, Artificial Sequence
  Synthetic
ccuucaagguagauuaaauucuu

SEQ ID NO: 412474 - RNA, 24 nt, Artificial Sequence
  Synthetic
accuucaagguagauuaaauucuu

SEQ ID NO: 412475 - RNA, 18 nt, Artificial Sequence
  Synthetic
aaggcccauggaauucuu

SEQ ID NO: 412476 - RNA, 19 nt, Artificial Sequence
  Synthetic
aaaggcccauggaauucuu

SEQ ID NO: 412477 - RNA, 20 nt, Artificial Sequence
  Synthetic
caaaggcccauggaauucuu

SEQ ID NO: 412478 - RNA, 21 nt, Artificial Sequence
  Synthetic
gcaaaggcccauggaauucuu

SEQ ID NO: 412479 - RNA, 22 nt, Artificial Sequence
  Synthetic
agcaaaggcccauggaauucuu

SEQ ID NO: 412480 - RNA, 23 nt, Artificial Sequence
  Synthetic
cagcaaaggcccauggaauucuu

SEQ ID NO: 412481 - RNA, 24 nt, Artificial Sequence
  Synthetic
acagcaaaggcccauggaauucuu

SEQ ID NO: 412482 - RNA, 18 nt, Artificial Sequence
  Synthetic
guuggagauugaauucuu

SEQ ID NO: 412483 - RNA, 19 nt, Artificial Sequence
  Synthetic
aguuggagauugaauucuu

SEQ ID NO: 412484 - RNA, 20 nt, Artificial Sequence
  Synthetic
gaguuggagauugaauucuu

SEQ ID NO: 412485 - RNA, 21 nt, Artificial Sequence
  Synthetic
agaguuggagauugaauucuu

SEQ ID NO: 412486 - RNA, 22 nt, Artificial Sequence
  Synthetic
aagaguuggagauugaauucuu

SEQ ID NO: 412487 - RNA, 23 nt, Artificial Sequence
  Synthetic
uaagaguuggagauugaauucuu

SEQ ID NO: 412488 - RNA, 24 nt, Artificial Sequence
  Synthetic
cuaagaguuggagauugaauucuu

SEQ ID NO: 412489 - RNA, 18 nt, Artificial Sequence
  Synthetic
aaguucucuugaauucuu

SEQ ID NO: 412490 - RNA, 19 nt, Artificial Sequence
  Synthetic
gaaguucucuugaauucuu

SEQ ID NO: 412491 - RNA, 20 nt, Artificial Sequence
  Synthetic
agaaguucucuugaauucuu

SEQ ID NO: 412492 - RNA, 21 nt, Artificial Sequence
  Synthetic
cagaaguucucuugaauucuu

SEQ ID NO: 412493 - RNA, 22 nt, Artificial Sequence
  Synthetic
ucagaaguucucuugaauucuu

SEQ ID NO: 412494 - RNA, 23 nt, Artificial Sequence
  Synthetic
uucagaaguucucuugaauucuu

SEQ ID NO: 412495 - RNA, 24 nt, Artificial Sequence
  Synthetic
cuucagaaguucucuugaauucuu

SEQ ID NO: 412496 - RNA, 18 nt, Artificial Sequence
  Synthetic
auuuguuuaauaauucuu

SEQ ID NO: 412497 - RNA, 19 nt, Artificial Sequence
  Synthetic
aauuuguuuaauaauucuu

SEQ ID NO: 412498 - RNA, 20 nt, Artificial Sequence
  Synthetic
aaauuuguuuaauaauucuu

SEQ ID NO: 412499 - RNA, 21 nt, Artificial Sequence
  Synthetic
caaauuuguuuaauaauucuu

SEQ ID NO: 412500 - RNA, 22 nt, Artificial Sequence
  Synthetic
gcaaauuuguuuaauaauucuu

SEQ ID NO: 412501 - RNA, 23 nt, Artificial Sequence
  Synthetic
agcaaauuuguuuaauaauucuu

SEQ ID NO: 412502 - RNA, 24 nt, Artificial Sequence
  Synthetic
cagcaaauuuguuuaauaauucuu

SEQ ID NO: 412503 - RNA, 18 nt, Artificial Sequence
  Synthetic
ucauagaggauaauucuu

SEQ ID NO: 412504 - RNA, 19 nt, Artificial Sequence
  Synthetic
cucauagaggauaauucuu

SEQ ID NO: 412505 - RNA, 20 nt, Artificial Sequence
  Synthetic
ucucauagaggauaauucuu

SEQ ID NO: 412506 - RNA, 21 nt, Artificial Sequence
  Synthetic
cucucauagaggauaauucuu

SEQ ID NO: 412507 - RNA, 22 nt, Artificial Sequence
  Synthetic
acucucauagaggauaauucuu

SEQ ID NO: 412508 - RNA, 23 nt, Artificial Sequence
  Synthetic
uacucucauagaggauaauucuu

SEQ ID NO: 412509 - RNA, 24 nt, Artificial Sequence
  Synthetic
uuacucucauagaggauaauucuu

SEQ ID NO: 412510 - RNA, 18 nt, Artificial Sequence
  Synthetic
ucaaauuuguuaauucuu

SEQ ID NO: 412511 - RNA, 19 nt, Artificial Sequence
  Synthetic
uucaaauuuguuaauucuu

SEQ ID NO: 412512 - RNA, 20 nt, Artificial Sequence
  Synthetic
uuucaaauuuguuaauucuu

SEQ ID NO: 412513 - RNA, 21 nt, Artificial Sequence
  Synthetic
auuucaaauuuguuaauucuu

SEQ ID NO: 412514 - RNA, 22 nt, Artificial Sequence
  Synthetic
aauuucaaauuuguuaauucuu

SEQ ID NO: 412515 - RNA, 23 nt, Artificial Sequence
  Synthetic
uaauuucaaauuuguuaauucuu

SEQ ID NO: 412516 - RNA, 24 nt, Artificial Sequence
  Synthetic
uuaauuucaaauuuguuaauucuu

SEQ ID NO: 412517 - RNA, 18 nt, Artificial Sequence
  Synthetic
gaaauuuagcacauucuu

SEQ ID NO: 412518 - RNA, 19 nt, Artificial Sequence
  Synthetic
ggaaauuuagcacauucuu

SEQ ID NO: 412519 - RNA, 20 nt, Artificial Sequence
  Synthetic
uggaaauuuagcacauucuu

SEQ ID NO: 412520 - RNA, 21 nt, Artificial Sequence
  Synthetic
guggaaauuuagcacauucuu

SEQ ID NO: 412521 - RNA, 22 nt, Artificial Sequence
  Synthetic
aguggaaauuuagcacauucuu

SEQ ID NO: 412522 - RNA, 23 nt, Artificial Sequence
  Synthetic
aaguggaaauuuagcacauucuu

SEQ ID NO: 412523 - RNA, 24 nt, Artificial Sequence
  Synthetic
caaguggaaauuuagcacauucuu

SEQ ID NO: 412524 - RNA, 18 nt, Artificial Sequence
  Synthetic
gguugacaagccauucuu

SEQ ID NO: 412525 - RNA, 19 nt, Artificial Sequence
  Synthetic
agguugacaagccauucuu

SEQ ID NO: 412526 - RNA, 20 nt, Artificial Sequence
  Synthetic
gagguugacaagccauucuu

SEQ ID NO: 412527 - RNA, 21 nt, Artificial Sequence
  Synthetic
agagguugacaagccauucuu

SEQ ID NO: 412528 - RNA, 22 nt, Artificial Sequence
  Synthetic
uagagguugacaagccauucuu

SEQ ID NO: 412529 - RNA, 23 nt, Artificial Sequence
  Synthetic
guagagguugacaagccauucuu

SEQ ID NO: 412530 - RNA, 24 nt, Artificial Sequence
  Synthetic
aguagagguugacaagccauucuu

SEQ ID NO: 412531 - RNA, 18 nt, Artificial Sequence
  Synthetic
guuuuugaaggcauucuu

SEQ ID NO: 412532 - RNA, 19 nt, Artificial Sequence
  Synthetic
uguuuuugaaggcauucuu

SEQ ID NO: 412533 - RNA, 20 nt, Artificial Sequence
  Synthetic
guguuuuugaaggcauucuu

SEQ ID NO: 412534 - RNA, 21 nt, Artificial Sequence
  Synthetic
uguguuuuugaaggcauucuu

SEQ ID NO: 412535 - RNA, 22 nt, Artificial Sequence
  Synthetic
cuguguuuuugaaggcauucuu

SEQ ID NO: 412536 - RNA, 23 nt, Artificial Sequence
  Synthetic
ucuguguuuuugaaggcauucuu

SEQ ID NO: 412537 - RNA, 24 nt, Artificial Sequence
  Synthetic
cucuguguuuuugaaggcauucuu

SEQ ID NO: 412538 - RNA, 18 nt, Artificial Sequence
  Synthetic
gugauuuuaugcauucuu

SEQ ID NO: 412539 - RNA, 19 nt, Artificial Sequence
  Synthetic
ugugauuuuaugcauucuu

SEQ ID NO: 412540 - RNA, 20 nt, Artificial Sequence
  Synthetic
cugugauuuuaugcauucuu

SEQ ID NO: 412541 - RNA, 21 nt, Artificial Sequence
  Synthetic
acugugauuuuaugcauucuu

SEQ ID NO: 412542 - RNA, 22 nt, Artificial Sequence
  Synthetic
uacugugauuuuaugcauucuu

SEQ ID NO: 412543 - RNA, 23 nt, Artificial Sequence
  Synthetic
auacugugauuuuaugcauucuu

SEQ ID NO: 412544 - RNA, 24 nt, Artificial Sequence
  Synthetic
gauacugugauuuuaugcauucuu

SEQ ID NO: 412545 - RNA, 18 nt, Artificial Sequence
  Synthetic
aucuaagcuaucauucuu

SEQ ID NO: 412546 - RNA, 19 nt, Artificial Sequence
  Synthetic
aaucuaagcuaucauucuu

SEQ ID NO: 412547 - RNA, 20 nt, Artificial Sequence
  Synthetic
gaaucuaagcuaucauucuu

SEQ ID NO: 412548 - RNA, 21 nt, Artificial Sequence
  Synthetic
ggaaucuaagcuaucauucuu

SEQ ID NO: 412549 - RNA, 22 nt, Artificial Sequence
  Synthetic
aggaaucuaagcuaucauucuu

SEQ ID NO: 412550 - RNA, 23 nt, Artificial Sequence
  Synthetic
gaggaaucuaagcuaucauucuu

SEQ ID NO: 412551 - RNA, 24 nt, Artificial Sequence
  Synthetic
agaggaaucuaagcuaucauucuu

SEQ ID NO: 412552 - RNA, 18 nt, Artificial Sequence
  Synthetic
cuaucucugcucauucuu

SEQ ID NO: 412553 - RNA, 19 nt, Artificial Sequence
  Synthetic
gcuaucucugcucauucuu

SEQ ID NO: 412554 - RNA, 20 nt, Artificial Sequence
  Synthetic
ggcuaucucugcucauucuu

SEQ ID NO: 412555 - RNA, 21 nt, Artificial Sequence
  Synthetic
gggcuaucucugcucauucuu

SEQ ID NO: 412556 - RNA, 22 nt, Artificial Sequence
  Synthetic
ggggcuaucucugcucauucuu

SEQ ID NO: 412557 - RNA, 23 nt, Artificial Sequence
  Synthetic
uggggcuaucucugcucauucuu

SEQ ID NO: 412558 - RNA, 24 nt, Artificial Sequence
  Synthetic
uuggggcuaucucugcucauucuu

SEQ ID NO: 412559 - RNA, 18 nt, Artificial Sequence
  Synthetic
gaguaaaguuucauucuu

SEQ ID NO: 412560 - RNA, 19 nt, Artificial Sequence
  Synthetic
ugaguaaaguuucauucuu

SEQ ID NO: 412561 - RNA, 20 nt, Artificial Sequence
  Synthetic
uugaguaaaguuucauucuu

SEQ ID NO: 412562 - RNA, 21 nt, Artificial Sequence
  Synthetic
auugaguaaaguuucauucuu

SEQ ID NO: 412563 - RNA, 22 nt, Artificial Sequence
  Synthetic
aauugaguaaaguuucauucuu

SEQ ID NO: 412564 - RNA, 23 nt, Artificial Sequence
  Synthetic
caauugaguaaaguuucauucuu

SEQ ID NO: 412565 - RNA, 24 nt, Artificial Sequence
  Synthetic
ucaauugaguaaaguuucauucuu

SEQ ID NO: 412566 - RNA, 18 nt, Artificial Sequence
  Synthetic
agugucauaaagauucuu

SEQ ID NO: 412567 - RNA, 19 nt, Artificial Sequence
  Synthetic
cagugucauaaagauucuu

SEQ ID NO: 412568 - RNA, 20 nt, Artificial Sequence
  Synthetic
acagugucauaaagauucuu

SEQ ID NO: 412569 - RNA, 21 nt, Artificial Sequence
  Synthetic
uacagugucauaaagauucuu

SEQ ID NO: 412570 - RNA, 22 nt, Artificial Sequence
  Synthetic
uuacagugucauaaagauucuu

SEQ ID NO: 412571 - RNA, 23 nt, Artificial Sequence
  Synthetic
guuacagugucauaaagauucuu

SEQ ID NO: 412572 - RNA, 24 nt, Artificial Sequence
  Synthetic
aguuacagugucauaaagauucuu

SEQ ID NO: 412573 - RNA, 18 nt, Artificial Sequence
  Synthetic
uugguuaugaagauucuu

SEQ ID NO: 412574 - RNA, 19 nt, Artificial Sequence
  Synthetic
guugguuaugaagauucuu

SEQ ID NO: 412575 - RNA, 20 nt, Artificial Sequence
  Synthetic
aguugguuaugaagauucuu

SEQ ID NO: 412576 - RNA, 21 nt, Artificial Sequence
  Synthetic
aaguugguuaugaagauucuu

SEQ ID NO: 412577 - RNA, 22 nt, Artificial Sequence
  Synthetic
gaaguugguuaugaagauucuu

SEQ ID NO: 412578 - RNA, 23 nt, Artificial Sequence
  Synthetic
ugaaguugguuaugaagauucuu

SEQ ID NO: 412579 - RNA, 24 nt, Artificial Sequence
  Synthetic
augaaguugguuaugaagauucuu

SEQ ID NO: 412580 - RNA, 18 nt, Artificial Sequence
  Synthetic
acuuggcaauggauucuu

SEQ ID NO: 412581 - RNA, 19 nt, Artificial Sequence
  Synthetic
aacuuggcaauggauucuu

SEQ ID NO: 412582 - RNA, 20 nt, Artificial Sequence
  Synthetic
aaacuuggcaauggauucuu

SEQ ID NO: 412583 - RNA, 21 nt, Artificial Sequence
  Synthetic
caaacuuggcaauggauucuu

SEQ ID NO: 412584 - RNA, 22 nt, Artificial Sequence
  Synthetic
ccaaacuuggcaauggauucuu

SEQ ID NO: 412585 - RNA, 23 nt, Artificial Sequence
  Synthetic
uccaaacuuggcaauggauucuu

SEQ ID NO: 412586 - RNA, 24 nt, Artificial Sequence
  Synthetic
guccaaacuuggcaauggauucuu

SEQ ID NO: 412587 - RNA, 18 nt, Artificial Sequence
  Synthetic
aaagguuuggugauucuu

SEQ ID NO: 412588 - RNA, 19 nt, Artificial Sequence
  Synthetic
aaaagguuuggugauucuu

SEQ ID NO: 412589 - RNA, 20 nt, Artificial Sequence
  Synthetic
aaaaagguuuggugauucuu

SEQ ID NO: 412590 - RNA, 21 nt, Artificial Sequence
  Synthetic
caaaaagguuuggugauucuu

SEQ ID NO: 412591 - RNA, 22 nt, Artificial Sequence
  Synthetic
gcaaaaagguuuggugauucuu

SEQ ID NO: 412592 - RNA, 23 nt, Artificial Sequence
  Synthetic
ggcaaaaagguuuggugauucuu

SEQ ID NO: 412593 - RNA, 24 nt, Artificial Sequence
  Synthetic
aggcaaaaagguuuggugauucuu

SEQ ID NO: 412594 - RNA, 18 nt, Artificial Sequence
  Synthetic
ugaaauaagaauauucuu

SEQ ID NO: 412595 - RNA, 19 nt, Artificial Sequence
  Synthetic
gugaaauaagaauauucuu

SEQ ID NO: 412596 - RNA, 20 nt, Artificial Sequence
  Synthetic
ggugaaauaagaauauucuu

SEQ ID NO: 412597 - RNA, 21 nt, Artificial Sequence
  Synthetic
uggugaaauaagaauauucuu

SEQ ID NO: 412598 - RNA, 22 nt, Artificial Sequence
  Synthetic
auggugaaauaagaauauucuu

SEQ ID NO: 412599 - RNA, 23 nt, Artificial Sequence
  Synthetic
gauggugaaauaagaauauucuu

SEQ ID NO: 412600 - RNA, 24 nt, Artificial Sequence
  Synthetic
ugauggugaaauaagaauauucuu

SEQ ID NO: 412601 - RNA, 18 nt, Artificial Sequence
  Synthetic
gaauuaauuuauauucuu

SEQ ID NO: 412602 - RNA, 19 nt, Artificial Sequence
  Synthetic
agaauuaauuuauauucuu

SEQ ID NO: 412603 - RNA, 20 nt, Artificial Sequence
  Synthetic
uagaauuaauuuauauucuu

SEQ ID NO: 412604 - RNA, 21 nt, Artificial Sequence
  Synthetic
guagaauuaauuuauauucuu

SEQ ID NO: 412605 - RNA, 22 nt, Artificial Sequence
  Synthetic
uguagaauuaauuuauauucuu

SEQ ID NO: 412606 - RNA, 23 nt, Artificial Sequence
  Synthetic
uuguagaauuaauuuauauucuu

SEQ ID NO: 412607 - RNA, 24 nt, Artificial Sequence
  Synthetic
auuguagaauuaauuuauauucuu

SEQ ID NO: 412608 - RNA, 18 nt, Artificial Sequence
  Synthetic
cugaugacuauuauucuu

SEQ ID NO: 412609 - RNA, 19 nt, Artificial Sequence
  Synthetic
ucugaugacuauuauucuu

SEQ ID NO: 412610 - RNA, 20 nt, Artificial Sequence
  Synthetic
gucugaugacuauuauucuu

SEQ ID NO: 412611 - RNA, 21 nt, Artificial Sequence
  Synthetic
ggucugaugacuauuauucuu

SEQ ID NO: 412612 - RNA, 22 nt, Artificial Sequence
  Synthetic
gggucugaugacuauuauucuu

SEQ ID NO: 412613 - RNA, 23 nt, Artificial Sequence
  Synthetic
ugggucugaugacuauuauucuu

SEQ ID NO: 412614 - RNA, 24 nt, Artificial Sequence
  Synthetic
cugggucugaugacuauuauucuu

SEQ ID NO: 412615 - RNA, 18 nt, Artificial Sequence
  Synthetic
uuuauggcuuuuauucuu

SEQ ID NO: 412616 - RNA, 19 nt, Artificial Sequence
  Synthetic
auuuauggcuuuuauucuu

SEQ ID NO: 412617 - RNA, 20 nt, Artificial Sequence
  Synthetic
aauuuauggcuuuuauucuu

SEQ ID NO: 412618 - RNA, 21 nt, Artificial Sequence
  Synthetic
uaauuuauggcuuuuauucuu

SEQ ID NO: 412619 - RNA, 22 nt, Artificial Sequence
  Synthetic
guaauuuauggcuuuuauucuu

SEQ ID NO: 412620 - RNA, 23 nt, Artificial Sequence
  Synthetic
uguaauuuauggcuuuuauucuu

SEQ ID NO: 412621 - RNA, 24 nt, Artificial Sequence
  Synthetic
uuguaauuuauggcuuuuauucuu

SEQ ID NO: 412622 - RNA, 18 nt, Artificial Sequence
  Synthetic
ugcuucaaagaacuucuu

SEQ ID NO: 412623 - RNA, 19 nt, Artificial Sequence
  Synthetic
gugcuucaaagaacuucuu

SEQ ID NO: 412624 - RNA, 20 nt, Artificial Sequence
  Synthetic
ggugcuucaaagaacuucuu

SEQ ID NO: 412625 - RNA, 21 nt, Artificial Sequence
  Synthetic
uggugcuucaaagaacuucuu

SEQ ID NO: 412626 - RNA, 22 nt, Artificial Sequence
  Synthetic
uuggugcuucaaagaacuucuu

SEQ ID NO: 412627 - RNA, 23 nt, Artificial Sequence
  Synthetic
auuggugcuucaaagaacuucuu

SEQ ID NO: 412628 - RNA, 24 nt, Artificial Sequence
  Synthetic
gauuggugcuucaaagaacuucuu

SEQ ID NO: 412629 - RNA, 18 nt, Artificial Sequence
  Synthetic
ggagauuaggaacuucuu

SEQ ID NO: 412630 - RNA, 19 nt, Artificial Sequence
  Synthetic
uggagauuaggaacuucuu

SEQ ID NO: 412631 - RNA, 20 nt, Artificial Sequence
  Synthetic
auggagauuaggaacuucuu

SEQ ID NO: 412632 - RNA, 21 nt, Artificial Sequence
  Synthetic
gauggagauuaggaacuucuu

SEQ ID NO: 412633 - RNA, 22 nt, Artificial Sequence
  Synthetic
agauggagauuaggaacuucuu

SEQ ID NO: 412634 - RNA, 23 nt, Artificial Sequence
  Synthetic
cagauggagauuaggaacuucuu

SEQ ID NO: 412635 - RNA, 24 nt, Artificial Sequence
  Synthetic
ucagauggagauuaggaacuucuu

SEQ ID NO: 412636 - RNA, 18 nt, Artificial Sequence
  Synthetic
cuaaugggaccacuucuu

SEQ ID NO: 412637 - RNA, 19 nt, Artificial Sequence
  Synthetic
gcuaaugggaccacuucuu

SEQ ID NO: 412638 - RNA, 20 nt, Artificial Sequence
  Synthetic
ugcuaaugggaccacuucuu

SEQ ID NO: 412639 - RNA, 21 nt, Artificial Sequence
  Synthetic
augcuaaugggaccacuucuu

SEQ ID NO: 412640 - RNA, 22 nt, Artificial Sequence
  Synthetic
aaugcuaaugggaccacuucuu

SEQ ID NO: 412641 - RNA, 23 nt, Artificial Sequence
  Synthetic
caaugcuaaugggaccacuucuu

SEQ ID NO: 412642 - RNA, 24 nt, Artificial Sequence
  Synthetic
gcaaugcuaaugggaccacuucuu

SEQ ID NO: 412643 - RNA, 18 nt, Artificial Sequence
  Synthetic
ccauguaugagacuucuu

SEQ ID NO: 412644 - RNA, 19 nt, Artificial Sequence
  Synthetic
cccauguaugagacuucuu

SEQ ID NO: 412645 - RNA, 20 nt, Artificial Sequence
  Synthetic
gcccauguaugagacuucuu

SEQ ID NO: 412646 - RNA, 21 nt, Artificial Sequence
  Synthetic
agcccauguaugagacuucuu

SEQ ID NO: 412647 - RNA, 22 nt, Artificial Sequence
  Synthetic
cagcccauguaugagacuucuu

SEQ ID NO: 412648 - RNA, 23 nt, Artificial Sequence
  Synthetic
ucagcccauguaugagacuucuu

SEQ ID NO: 412649 - RNA, 24 nt, Artificial Sequence
  Synthetic
uucagcccauguaugagacuucuu

SEQ ID NO: 412650 - RNA, 18 nt, Artificial Sequence
  Synthetic
cuuauucauauacuucuu

SEQ ID NO: 412651 - RNA, 19 nt, Artificial Sequence
  Synthetic
ccuuauucauauacuucuu

SEQ ID NO: 412652 - RNA, 20 nt, Artificial Sequence
  Synthetic
cccuuauucauauacuucuu

SEQ ID NO: 412653 - RNA, 21 nt, Artificial Sequence
  Synthetic
ucccuuauucauauacuucuu

SEQ ID NO: 412654 - RNA, 22 nt, Artificial Sequence
  Synthetic
uucccuuauucauauacuucuu

SEQ ID NO: 412655 - RNA, 23 nt, Artificial Sequence
  Synthetic
auucccuuauucauauacuucuu

SEQ ID NO: 412656 - RNA, 24 nt, Artificial Sequence
  Synthetic
cauucccuuauucauauacuucuu

SEQ ID NO: 412657 - RNA, 18 nt, Artificial Sequence
  Synthetic
ggauaacaaugccuucuu

SEQ ID NO: 412658 - RNA, 19 nt, Artificial Sequence
  Synthetic
aggauaacaaugccuucuu

SEQ ID NO: 412659 - RNA, 20 nt, Artificial Sequence
  Synthetic
uaggauaacaaugccuucuu

SEQ ID NO: 412660 - RNA, 21 nt, Artificial Sequence
  Synthetic
auaggauaacaaugccuucuu

SEQ ID NO: 412661 - RNA, 22 nt, Artificial Sequence
  Synthetic
cauaggauaacaaugccuucuu

SEQ ID NO: 412662 - RNA, 23 nt, Artificial Sequence
  Synthetic
ucauaggauaacaaugccuucuu

SEQ ID NO: 412663 - RNA, 24 nt, Artificial Sequence
  Synthetic
cucauaggauaacaaugccuucuu

SEQ ID NO: 412664 - RNA, 18 nt, Artificial Sequence
  Synthetic
gauccagagcuccuucuu

SEQ ID NO: 412665 - RNA, 19 nt, Artificial Sequence
  Synthetic
ggauccagagcuccuucuu

SEQ ID NO: 412666 - RNA, 20 nt, Artificial Sequence
  Synthetic
cggauccagagcuccuucuu

SEQ ID NO: 412667 - RNA, 21 nt, Artificial Sequence
  Synthetic
acggauccagagcuccuucuu

SEQ ID NO: 412668 - RNA, 22 nt, Artificial Sequence
  Synthetic
aacggauccagagcuccuucuu

SEQ ID NO: 412669 - RNA, 23 nt, Artificial Sequence
  Synthetic
gaacggauccagagcuccuucuu

SEQ ID NO: 412670 - RNA, 24 nt, Artificial Sequence
  Synthetic
ugaacggauccagagcuccuucuu

SEQ ID NO: 412671 - RNA, 18 nt, Artificial Sequence
  Synthetic
gaaaaugccuuccuucuu

SEQ ID NO: 412672 - RNA, 19 nt, Artificial Sequence
  Synthetic
ugaaaaugccuuccuucuu

SEQ ID NO: 412673 - RNA, 20 nt, Artificial Sequence
  Synthetic
gugaaaaugccuuccuucuu

SEQ ID NO: 412674 - RNA, 21 nt, Artificial Sequence
  Synthetic
ggugaaaaugccuuccuucuu

SEQ ID NO: 412675 - RNA, 22 nt, Artificial Sequence
  Synthetic
gggugaaaaugccuuccuucuu

SEQ ID NO: 412676 - RNA, 23 nt, Artificial Sequence
  Synthetic
ugggugaaaaugccuuccuucuu

SEQ ID NO: 412677 - RNA, 24 nt, Artificial Sequence
  Synthetic
gugggugaaaaugccuuccuucuu

SEQ ID NO: 412678 - RNA, 18 nt, Artificial Sequence
  Synthetic
uuuugccagaagcuucuu

SEQ ID NO: 412679 - RNA, 19 nt, Artificial Sequence
  Synthetic
uuuuugccagaagcuucuu

SEQ ID NO: 412680 - RNA, 20 nt, Artificial Sequence
  Synthetic
auuuuugccagaagcuucuu

SEQ ID NO: 412681 - RNA, 21 nt, Artificial Sequence
  Synthetic
uauuuuugccagaagcuucuu

SEQ ID NO: 412682 - RNA, 22 nt, Artificial Sequence
  Synthetic
uuauuuuugccagaagcuucuu

SEQ ID NO: 412683 - RNA, 23 nt, Artificial Sequence
  Synthetic
uuuauuuuugccagaagcuucuu

SEQ ID NO: 412684 - RNA, 24 nt, Artificial Sequence
  Synthetic
uuuuauuuuugccagaagcuucuu

SEQ ID NO: 412685 - RNA, 18 nt, Artificial Sequence
  Synthetic
uuguccucuaagcuucuu

SEQ ID NO: 412686 - RNA, 19 nt, Artificial Sequence
  Synthetic
auuguccucuaagcuucuu

SEQ ID NO: 412687 - RNA, 20 nt, Artificial Sequence
  Synthetic
gauuguccucuaagcuucuu

SEQ ID NO: 412688 - RNA, 21 nt, Artificial Sequence
  Synthetic
agauuguccucuaagcuucuu

SEQ ID NO: 412689 - RNA, 22 nt, Artificial Sequence
  Synthetic
uagauuguccucuaagcuucuu

SEQ ID NO: 412690 - RNA, 23 nt, Artificial Sequence
  Synthetic
auagauuguccucuaagcuucuu

SEQ ID NO: 412691 - RNA, 24 nt, Artificial Sequence
  Synthetic
aauagauuguccucuaagcuucuu

SEQ ID NO: 412692 - RNA, 18 nt, Artificial Sequence
  Synthetic
cucaauugugagcuucuu

SEQ ID NO: 412693 - RNA, 19 nt, Artificial Sequence
  Synthetic
acucaauugugagcuucuu

SEQ ID NO: 412694 - RNA, 20 nt, Artificial Sequence
  Synthetic
uacucaauugugagcuucuu

SEQ ID NO: 412695 - RNA, 21 nt, Artificial Sequence
  Synthetic
cuacucaauugugagcuucuu

SEQ ID NO: 412696 - RNA, 22 nt, Artificial Sequence
  Synthetic
ccuacucaauugugagcuucuu

SEQ ID NO: 412697 - RNA, 23 nt, Artificial Sequence
  Synthetic
cccuacucaauugugagcuucuu

SEQ ID NO: 412698 - RNA, 24 nt, Artificial Sequence
  Synthetic
ccccuacucaauugugagcuucuu

SEQ ID NO: 412699 - RNA, 18 nt, Artificial Sequence
  Synthetic
guuguaguaaugcuucuu

SEQ ID NO: 412700 - RNA, 19 nt, Artificial Sequence
  Synthetic
uguuguaguaaugcuucuu

SEQ ID NO: 412701 - RNA, 20 nt, Artificial Sequence
  Synthetic
guguuguaguaaugcuucuu

SEQ ID NO: 412702 - RNA, 21 nt, Artificial Sequence
  Synthetic
aguguuguaguaaugcuucuu

SEQ ID NO: 412703 - RNA, 22 nt, Artificial Sequence
  Synthetic
aaguguuguaguaaugcuucuu

SEQ ID NO: 412704 - RNA, 23 nt, Artificial Sequence
  Synthetic
uaaguguuguaguaaugcuucuu

SEQ ID NO: 412705 - RNA, 24 nt, Artificial Sequence
  Synthetic
cuaaguguuguaguaaugcuucuu

SEQ ID NO: 412706 - RNA, 18 nt, Artificial Sequence
  Synthetic
gaaguucagaaucuucuu

SEQ ID NO: 412707 - RNA, 19 nt, Artificial Sequence
  Synthetic
agaaguucagaaucuucuu

SEQ ID NO: 412708 - RNA, 20 nt, Artificial Sequence
  Synthetic
gagaaguucagaaucuucuu

SEQ ID NO: 412709 - RNA, 21 nt, Artificial Sequence
  Synthetic
agagaaguucagaaucuucuu

SEQ ID NO: 412710 - RNA, 22 nt, Artificial Sequence
  Synthetic
uagagaaguucagaaucuucuu

SEQ ID NO: 412711 - RNA, 23 nt, Artificial Sequence
  Synthetic
cuagagaaguucagaaucuucuu

SEQ ID NO: 412712 - RNA, 24 nt, Artificial Sequence
  Synthetic
gcuagagaaguucagaaucuucuu

SEQ ID NO: 412713 - RNA, 18 nt, Artificial Sequence
  Synthetic
uaguauauugaucuucuu

SEQ ID NO: 412714 - RNA, 19 nt, Artificial Sequence
  Synthetic
auaguauauugaucuucuu

SEQ ID NO: 412715 - RNA, 20 nt, Artificial Sequence
  Synthetic
uauaguauauugaucuucuu

SEQ ID NO: 412716 - RNA, 21 nt, Artificial Sequence
  Synthetic
auauaguauauugaucuucuu

SEQ ID NO: 412717 - RNA, 22 nt, Artificial Sequence
  Synthetic
cauauaguauauugaucuucuu

SEQ ID NO: 412718 - RNA, 23 nt, Artificial Sequence
  Synthetic
ucauauaguauauugaucuucuu

SEQ ID NO: 412719 - RNA, 24 nt, Artificial Sequence
  Synthetic
gucauauaguauauugaucuucuu

SEQ ID NO: 412720 - RNA, 18 nt, Artificial Sequence
  Synthetic
ucauuucuauaucuucuu

SEQ ID NO: 412721 - RNA, 19 nt, Artificial Sequence
  Synthetic
cucauuucuauaucuucuu

SEQ ID NO: 412722 - RNA, 20 nt, Artificial Sequence
  Synthetic
acucauuucuauaucuucuu

SEQ ID NO: 412723 - RNA, 21 nt, Artificial Sequence
  Synthetic
uacucauuucuauaucuucuu

SEQ ID NO: 412724 - RNA, 22 nt, Artificial Sequence
  Synthetic
auacucauuucuauaucuucuu

SEQ ID NO: 412725 - RNA, 23 nt, Artificial Sequence
  Synthetic
aauacucauuucuauaucuucuu

SEQ ID NO: 412726 - RNA, 24 nt, Artificial Sequence
  Synthetic
gaauacucauuucuauaucuucuu

SEQ ID NO: 412727 - RNA, 18 nt, Artificial Sequence
  Synthetic
aaaaccaauuaucuucuu

SEQ ID NO: 412728 - RNA, 19 nt, Artificial Sequence
  Synthetic
aaaaaccaauuaucuucuu

SEQ ID NO: 412729 - RNA, 20 nt, Artificial Sequence
  Synthetic
uaaaaaccaauuaucuucuu

SEQ ID NO: 412730 - RNA, 21 nt, Artificial Sequence
  Synthetic
uuaaaaaccaauuaucuucuu

SEQ ID NO: 412731 - RNA, 22 nt, Artificial Sequence
  Synthetic
uuuaaaaaccaauuaucuucuu

SEQ ID NO: 412732 - RNA, 23 nt, Artificial Sequence
  Synthetic
cuuuaaaaaccaauuaucuucuu

SEQ ID NO: 412733 - RNA, 24 nt, Artificial Sequence
  Synthetic
ccuuuaaaaaccaauuaucuucuu

SEQ ID NO: 412734 - RNA, 18 nt, Artificial Sequence
  Synthetic
cugcauaaaugucuucuu

SEQ ID NO: 412735 - RNA, 19 nt, Artificial Sequence
  Synthetic
gcugcauaaaugucuucuu

SEQ ID NO: 412736 - RNA, 20 nt, Artificial Sequence
  Synthetic
agcugcauaaaugucuucuu

SEQ ID NO: 412737 - RNA, 21 nt, Artificial Sequence
  Synthetic
uagcugcauaaaugucuucuu

SEQ ID NO: 412738 - RNA, 22 nt, Artificial Sequence
  Synthetic
uuagcugcauaaaugucuucuu

SEQ ID NO: 412739 - RNA, 23 nt, Artificial Sequence
  Synthetic
guuagcugcauaaaugucuucuu

SEQ ID NO: 412740 - RNA, 24 nt, Artificial Sequence
  Synthetic
uguuagcugcauaaaugucuucuu

SEQ ID NO: 412741 - RNA, 20 nt, Artificial Sequence
  Synthetic
ggcugcauaaaugucuucuu

SEQ ID NO: 412742 - RNA, 18 nt, Artificial Sequence
  Synthetic
ucauuuuaaugucuucuu

SEQ ID NO: 412743 - RNA, 19 nt, Artificial Sequence
  Synthetic
gucauuuuaaugucuucuu

SEQ ID NO: 412744 - RNA, 20 nt, Artificial Sequence
  Synthetic
ggucauuuuaaugucuucuu

SEQ ID NO: 412745 - RNA, 21 nt, Artificial Sequence
  Synthetic
uggucauuuuaaugucuucuu

SEQ ID NO: 412746 - RNA, 22 nt, Artificial Sequence
  Synthetic
uuggucauuuuaaugucuucuu

SEQ ID NO: 412747 - RNA, 23 nt, Artificial Sequence
  Synthetic
guuggucauuuuaaugucuucuu

SEQ ID NO: 412748 - RNA, 24 nt, Artificial Sequence
  Synthetic
uguuggucauuuuaaugucuucuu

SEQ ID NO: 412749 - RNA, 18 nt, Artificial Sequence
  Synthetic
ccauuuguaugucuucuu

SEQ ID NO: 412750 - RNA, 19 nt, Artificial Sequence
  Synthetic
gccauuuguaugucuucuu

SEQ ID NO: 412751 - RNA, 20 nt, Artificial Sequence
  Synthetic
ugccauuuguaugucuucuu

SEQ ID NO: 412752 - RNA, 21 nt, Artificial Sequence
  Synthetic
uugccauuuguaugucuucuu

SEQ ID NO: 412753 - RNA, 22 nt, Artificial Sequence
  Synthetic
uuugccauuuguaugucuucuu

SEQ ID NO: 412754 - RNA, 23 nt, Artificial Sequence
  Synthetic
guuugccauuuguaugucuucuu

SEQ ID NO: 412755 - RNA, 24 nt, Artificial Sequence
  Synthetic
uguuugccauuuguaugucuucuu

SEQ ID NO: 412756 - RNA, 18 nt, Artificial Sequence
  Synthetic
acauuuuccugucuucuu

SEQ ID NO: 412757 - RNA, 19 nt, Artificial Sequence
  Synthetic
cacauuuuccugucuucuu

SEQ ID NO: 412758 - RNA, 20 nt, Artificial Sequence
  Synthetic
ccacauuuuccugucuucuu

SEQ ID NO: 412759 - RNA, 21 nt, Artificial Sequence
  Synthetic
uccacauuuuccugucuucuu

SEQ ID NO: 412760 - RNA, 22 nt, Artificial Sequence
  Synthetic
uuccacauuuuccugucuucuu

SEQ ID NO: 412761 - RNA, 23 nt, Artificial Sequence
  Synthetic
uuuccacauuuuccugucuucuu

SEQ ID NO: 412762 - RNA, 24 nt, Artificial Sequence
  Synthetic
uuuuccacauuuuccugucuucuu

SEQ ID NO: 412763 - RNA, 18 nt, Artificial Sequence
  Synthetic
auggauuucugucuucuu

SEQ ID NO: 412764 - RNA, 19 nt, Artificial Sequence
  Synthetic
uauggauuucugucuucuu

SEQ ID NO: 412765 - RNA, 20 nt, Artificial Sequence
  Synthetic
auauggauuucugucuucuu

SEQ ID NO: 412766 - RNA, 21 nt, Artificial Sequence
  Synthetic
aauauggauuucugucuucuu

SEQ ID NO: 412767 - RNA, 22 nt, Artificial Sequence
  Synthetic
aaauauggauuucugucuucuu

SEQ ID NO: 412768 - RNA, 23 nt, Artificial Sequence
  Synthetic
aaaauauggauuucugucuucuu

SEQ ID NO: 412769 - RNA, 24 nt, Artificial Sequence
  Synthetic
aaaaauauggauuucugucuucuu

SEQ ID NO: 412770 - RNA, 18 nt, Artificial Sequence
  Synthetic
cauaccggauuucuucuu

SEQ ID NO: 412771 - RNA, 19 nt, Artificial Sequence
  Synthetic
acauaccggauuucuucuu

SEQ ID NO: 412772 - RNA, 20 nt, Artificial Sequence
  Synthetic
cacauaccggauuucuucuu

SEQ ID NO: 412773 - RNA, 21 nt, Artificial Sequence
  Synthetic
ucacauaccggauuucuucuu

SEQ ID NO: 412774 - RNA, 22 nt, Artificial Sequence
  Synthetic
uucacauaccggauuucuucuu

SEQ ID NO: 412775 - RNA, 23 nt, Artificial Sequence
  Synthetic
cuucacauaccggauuucuucuu

SEQ ID NO: 412776 - RNA, 24 nt, Artificial Sequence
  Synthetic
gcuucacauaccggauuucuucuu

SEQ ID NO: 412777 - RNA, 18 nt, Artificial Sequence
  Synthetic
aaauaaauauuucuucuu

SEQ ID NO: 412778 - RNA, 19 nt, Artificial Sequence
  Synthetic
aaaauaaauauuucuucuu

SEQ ID NO: 412779 - RNA, 20 nt, Artificial Sequence
  Synthetic
aaaaauaaauauuucuucuu

SEQ ID NO: 412780 - RNA, 21 nt, Artificial Sequence
  Synthetic
gaaaaauaaauauuucuucuu

SEQ ID NO: 412781 - RNA, 22 nt, Artificial Sequence
  Synthetic
agaaaaauaaauauuucuucuu

SEQ ID NO: 412782 - RNA, 23 nt, Artificial Sequence
  Synthetic
aagaaaaauaaauauuucuucuu

SEQ ID NO: 412783 - RNA, 24 nt, Artificial Sequence
  Synthetic
uaagaaaaauaaauauuucuucuu

SEQ ID NO: 412784 - RNA, 18 nt, Artificial Sequence
  Synthetic
guuaagucaaaaguucuu

SEQ ID NO: 412785 - RNA, 19 nt, Artificial Sequence
  Synthetic
gguuaagucaaaaguucuu

SEQ ID NO: 412786 - RNA, 20 nt, Artificial Sequence
  Synthetic
ugguuaagucaaaaguucuu

SEQ ID NO: 412787 - RNA, 21 nt, Artificial Sequence
  Synthetic
gugguuaagucaaaaguucuu

SEQ ID NO: 412788 - RNA, 22 nt, Artificial Sequence
  Synthetic
agugguuaagucaaaaguucuu

SEQ ID NO: 412789 - RNA, 23 nt, Artificial Sequence
  Synthetic
gagugguuaagucaaaaguucuu

SEQ ID NO: 412790 - RNA, 24 nt, Artificial Sequence
  Synthetic
ugagugguuaagucaaaaguucuu

SEQ ID NO: 412791 - RNA, 18 nt, Artificial Sequence
  Synthetic
uacaacaauaaaguucuu

SEQ ID NO: 412792 - RNA, 19 nt, Artificial Sequence
  Synthetic
guacaacaauaaaguucuu

SEQ ID NO: 412793 - RNA, 20 nt, Artificial Sequence
  Synthetic
gguacaacaauaaaguucuu

SEQ ID NO: 412794 - RNA, 21 nt, Artificial Sequence
  Synthetic
ugguacaacaauaaaguucuu

SEQ ID NO: 412795 - RNA, 22 nt, Artificial Sequence
  Synthetic
cugguacaacaauaaaguucuu

SEQ ID NO: 412796 - RNA, 23 nt, Artificial Sequence
  Synthetic
ccugguacaacaauaaaguucuu

SEQ ID NO: 412797 - RNA, 24 nt, Artificial Sequence
  Synthetic
gccugguacaacaauaaaguucuu

SEQ ID NO: 412798 - RNA, 18 nt, Artificial Sequence
  Synthetic
uuucacgauucaguucuu

SEQ ID NO: 412799 - RNA, 19 nt, Artificial Sequence
  Synthetic
auuucacgauucaguucuu

SEQ ID NO: 412800 - RNA, 20 nt, Artificial Sequence
  Synthetic
uauuucacgauucaguucuu

SEQ ID NO: 412801 - RNA, 21 nt, Artificial Sequence
  Synthetic
guauuucacgauucaguucuu

SEQ ID NO: 412802 - RNA, 22 nt, Artificial Sequence
  Synthetic
gguauuucacgauucaguucuu

SEQ ID NO: 412803 - RNA, 23 nt, Artificial Sequence
  Synthetic
ugguauuucacgauucaguucuu

SEQ ID NO: 412804 - RNA, 24 nt, Artificial Sequence
  Synthetic
augguauuucacgauucaguucuu

SEQ ID NO: 412805 - RNA, 18 nt, Artificial Sequence
  Synthetic
caucauugagccguucuu

SEQ ID NO: 412806 - RNA, 19 nt, Artificial Sequence
  Synthetic
ucaucauugagccguucuu

SEQ ID NO: 412807 - RNA, 20 nt, Artificial Sequence
  Synthetic
aucaucauugagccguucuu

SEQ ID NO: 412808 - RNA, 21 nt, Artificial Sequence
  Synthetic
uaucaucauugagccguucuu

SEQ ID NO: 412809 - RNA, 22 nt, Artificial Sequence
  Synthetic
auaucaucauugagccguucuu

SEQ ID NO: 412810 - RNA, 23 nt, Artificial Sequence
  Synthetic
aauaucaucauugagccguucuu

SEQ ID NO: 412811 - RNA, 24 nt, Artificial Sequence
  Synthetic
aaauaucaucauugagccguucuu

SEQ ID NO: 412812 - RNA, 18 nt, Artificial Sequence
  Synthetic
acaaaauuaaucguucuu

SEQ ID NO: 412813 - RNA, 19 nt, Artificial Sequence
  Synthetic
aacaaaauuaaucguucuu

SEQ ID NO: 412814 - RNA, 20 nt, Artificial Sequence
  Synthetic
aaacaaaauuaaucguucuu

SEQ ID NO: 412815 - RNA, 21 nt, Artificial Sequence
  Synthetic
uaaacaaaauuaaucguucuu

SEQ ID NO: 412816 - RNA, 22 nt, Artificial Sequence
  Synthetic
auaaacaaaauuaaucguucuu

SEQ ID NO: 412817 - RNA, 23 nt, Artificial Sequence
  Synthetic
aauaaacaaaauuaaucguucuu

SEQ ID NO: 412818 - RNA, 24 nt, Artificial Sequence
  Synthetic
uaauaaacaaaauuaaucguucuu

SEQ ID NO: 412819 - RNA, 18 nt, Artificial Sequence
  Synthetic
cuucaaaagaugguucuu

SEQ ID NO: 412820 - RNA, 19 nt, Artificial Sequence
  Synthetic
ccuucaaaagaugguucuu

SEQ ID NO: 412821 - RNA, 20 nt, Artificial Sequence
  Synthetic
uccuucaaaagaugguucuu

SEQ ID NO: 412822 - RNA, 21 nt, Artificial Sequence
  Synthetic
auccuucaaaagaugguucuu

SEQ ID NO: 412823 - RNA, 22 nt, Artificial Sequence
  Synthetic
cauccuucaaaagaugguucuu

SEQ ID NO: 412824 - RNA, 23 nt, Artificial Sequence
  Synthetic
gcauccuucaaaagaugguucuu

SEQ ID NO: 412825 - RNA, 24 nt, Artificial Sequence
  Synthetic
ugcauccuucaaaagaugguucuu

SEQ ID NO: 412826 - RNA, 18 nt, Artificial Sequence
  Synthetic
aaccucugacauguucuu

SEQ ID NO: 412827 - RNA, 19 nt, Artificial Sequence
  Synthetic
caaccucugacauguucuu

SEQ ID NO: 412828 - RNA, 20 nt, Artificial Sequence
  Synthetic
gcaaccucugacauguucuu

SEQ ID NO: 412829 - RNA, 21 nt, Artificial Sequence
  Synthetic
ggcaaccucugacauguucuu

SEQ ID NO: 412830 - RNA, 22 nt, Artificial Sequence
  Synthetic
uggcaaccucugacauguucuu

SEQ ID NO: 412831 - RNA, 23 nt, Artificial Sequence
  Synthetic
uuggcaaccucugacauguucuu

SEQ ID NO: 412832 - RNA, 24 nt, Artificial Sequence
  Synthetic
uuuggcaaccucugacauguucuu

SEQ ID NO: 412833 - RNA, 18 nt, Artificial Sequence
  Synthetic
cuuguaaaguauguucuu

SEQ ID NO: 412834 - RNA, 19 nt, Artificial Sequence
  Synthetic
ucuuguaaaguauguucuu

SEQ ID NO: 412835 - RNA, 20 nt, Artificial Sequence
  Synthetic
gucuuguaaaguauguucuu

SEQ ID NO: 412836 - RNA, 21 nt, Artificial Sequence
  Synthetic
ugucuuguaaaguauguucuu

SEQ ID NO: 412837 - RNA, 22 nt, Artificial Sequence
  Synthetic
gugucuuguaaaguauguucuu

SEQ ID NO: 412838 - RNA, 23 nt, Artificial Sequence
  Synthetic
agugucuuguaaaguauguucuu

SEQ ID NO: 412839 - RNA, 24 nt, Artificial Sequence
  Synthetic
aagugucuuguaaaguauguucuu

SEQ ID NO: 412840 - RNA, 18 nt, Artificial Sequence
  Synthetic
cauuuguagguuguucuu

SEQ ID NO: 412841 - RNA, 19 nt, Artificial Sequence
  Synthetic
acauuuguagguuguucuu

SEQ ID NO: 412842 - RNA, 20 nt, Artificial Sequence
  Synthetic
gacauuuguagguuguucuu

SEQ ID NO: 412843 - RNA, 21 nt, Artificial Sequence
  Synthetic
agacauuuguagguuguucuu

SEQ ID NO: 412844 - RNA, 22 nt, Artificial Sequence
  Synthetic
uagacauuuguagguuguucuu

SEQ ID NO: 412845 - RNA, 23 nt, Artificial Sequence
  Synthetic
guagacauuuguagguuguucuu

SEQ ID NO: 412846 - RNA, 24 nt, Artificial Sequence
  Synthetic
gguagacauuuguagguuguucuu

SEQ ID NO: 412847 - RNA, 18 nt, Artificial Sequence
  Synthetic
uacaagauuuuuguucuu

SEQ ID NO: 412848 - RNA, 19 nt, Artificial Sequence
  Synthetic
auacaagauuuuuguucuu

SEQ ID NO: 412849 - RNA, 20 nt, Artificial Sequence
  Synthetic
gauacaagauuuuuguucuu

SEQ ID NO: 412850 - RNA, 21 nt, Artificial Sequence
  Synthetic
ggauacaagauuuuuguucuu

SEQ ID NO: 412851 - RNA, 22 nt, Artificial Sequence
  Synthetic
uggauacaagauuuuuguucuu

SEQ ID NO: 412852 - RNA, 23 nt, Artificial Sequence
  Synthetic
cuggauacaagauuuuuguucuu

SEQ ID NO: 412853 - RNA, 24 nt, Artificial Sequence
  Synthetic
ucuggauacaagauuuuuguucuu

SEQ ID NO: 412854 - RNA, 18 nt, Artificial Sequence
  Synthetic
ugaaauuaagaauuucuu

SEQ ID NO: 412855 - RNA, 19 nt, Artificial Sequence
  Synthetic
gugaaauuaagaauuucuu

SEQ ID NO: 412856 - RNA, 20 nt, Artificial Sequence
  Synthetic
agugaaauuaagaauuucuu

SEQ ID NO: 412857 - RNA, 21 nt, Artificial Sequence
  Synthetic
uagugaaauuaagaauuucuu

SEQ ID NO: 412858 - RNA, 22 nt, Artificial Sequence
  Synthetic
auagugaaauuaagaauuucuu

SEQ ID NO: 412859 - RNA, 23 nt, Artificial Sequence
  Synthetic
aauagugaaauuaagaauuucuu

SEQ ID NO: 412860 - RNA, 24 nt, Artificial Sequence
  Synthetic
aaauagugaaauuaagaauuucuu

SEQ ID NO: 412861 - RNA, 18 nt, Artificial Sequence
  Synthetic
gccaauccagaauuucuu

SEQ ID NO: 412862 - RNA, 19 nt, Artificial Sequence
  Synthetic
ugccaauccagaauuucuu

SEQ ID NO: 412863 - RNA, 20 nt, Artificial Sequence
  Synthetic
uugccaauccagaauuucuu

SEQ ID NO: 412864 - RNA, 21 nt, Artificial Sequence
  Synthetic
uuugccaauccagaauuucuu

SEQ ID NO: 412865 - RNA, 22 nt, Artificial Sequence
  Synthetic
cuuugccaauccagaauuucuu

SEQ ID NO: 412866 - RNA, 23 nt, Artificial Sequence
  Synthetic
acuuugccaauccagaauuucuu

SEQ ID NO: 412867 - RNA, 24 nt, Artificial Sequence
  Synthetic
uacuuugccaauccagaauuucuu

SEQ ID NO: 412868 - RNA, 18 nt, Artificial Sequence
  Synthetic
auaacacugccauuucuu

SEQ ID NO: 412869 - RNA, 19 nt, Artificial Sequence
  Synthetic
gauaacacugccauuucuu

SEQ ID NO: 412870 - RNA, 20 nt, Artificial Sequence
  Synthetic
agauaacacugccauuucuu

SEQ ID NO: 412871 - RNA, 21 nt, Artificial Sequence
  Synthetic
gagauaacacugccauuucuu

SEQ ID NO: 412872 - RNA, 22 nt, Artificial Sequence
  Synthetic
ggagauaacacugccauuucuu

SEQ ID NO: 412873 - RNA, 23 nt, Artificial Sequence
  Synthetic
uggagauaacacugccauuucuu

SEQ ID NO: 412874 - RNA, 24 nt, Artificial Sequence
  Synthetic
cuggagauaacacugccauuucuu

SEQ ID NO: 412875 - RNA, 18 nt, Artificial Sequence
  Synthetic
augcauguucgauuucuu

SEQ ID NO: 412876 - RNA, 19 nt, Artificial Sequence
  Synthetic
uaugcauguucgauuucuu

SEQ ID NO: 412877 - RNA, 20 nt, Artificial Sequence
  Synthetic
uuaugcauguucgauuucuu

SEQ ID NO: 412878 - RNA, 21 nt, Artificial Sequence
  Synthetic
auuaugcauguucgauuucuu

SEQ ID NO: 412879 - RNA, 22 nt, Artificial Sequence
  Synthetic
uauuaugcauguucgauuucuu

SEQ ID NO: 412880 - RNA, 23 nt, Artificial Sequence
  Synthetic
auauuaugcauguucgauuucuu

SEQ ID NO: 412881 - RNA, 24 nt, Artificial Sequence
  Synthetic
uauauuaugcauguucgauuucuu

SEQ ID NO: 412882 - RNA, 18 nt, Artificial Sequence
  Synthetic
uucagcccaggauuucuu

SEQ ID NO: 412883 - RNA, 19 nt, Artificial Sequence
  Synthetic
uuucagcccaggauuucuu

SEQ ID NO: 412884 - RNA, 20 nt, Artificial Sequence
  Synthetic
guuucagcccaggauuucuu

SEQ ID NO: 412885 - RNA, 21 nt, Artificial Sequence
  Synthetic
aguuucagcccaggauuucuu

SEQ ID NO: 412886 - RNA, 22 nt, Artificial Sequence
  Synthetic
gaguuucagcccaggauuucuu

SEQ ID NO: 412887 - RNA, 23 nt, Artificial Sequence
  Synthetic
agaguuucagcccaggauuucuu

SEQ ID NO: 412888 - RNA, 24 nt, Artificial Sequence
  Synthetic
cagaguuucagcccaggauuucuu

SEQ ID NO: 412889 - RNA, 18 nt, Artificial Sequence
  Synthetic
uuguacguauuauuucuu

SEQ ID NO: 412890 - RNA, 19 nt, Artificial Sequence
  Synthetic
guuguacguauuauuucuu

SEQ ID NO: 412891 - RNA, 20 nt, Artificial Sequence
  Synthetic
gguuguacguauuauuucuu

SEQ ID NO: 412892 - RNA, 21 nt, Artificial Sequence
  Synthetic
ugguuguacguauuauuucuu

SEQ ID NO: 412893 - RNA, 22 nt, Artificial Sequence
  Synthetic
gugguuguacguauuauuucuu

SEQ ID NO: 412894 - RNA, 23 nt, Artificial Sequence
  Synthetic
ugugguuguacguauuauuucuu

SEQ ID NO: 412895 - RNA, 24 nt, Artificial Sequence
  Synthetic
uugugguuguacguauuauuucuu

SEQ ID NO: 412896 - RNA, 18 nt, Artificial Sequence
  Synthetic
uuuuuugcuuuauuucuu

SEQ ID NO: 412897 - RNA, 19 nt, Artificial Sequence
  Synthetic
uuuuuuugcuuuauuucuu

SEQ ID NO: 412898 - RNA, 20 nt, Artificial Sequence
  Synthetic
uuuuuuuugcuuuauuucuu

SEQ ID NO: 412899 - RNA, 21 nt, Artificial Sequence
  Synthetic
uuuuuuuuugcuuuauuucuu

SEQ ID NO: 412900 - RNA, 22 nt, Artificial Sequence
  Synthetic
uuuuuuuuuugcuuuauuucuu

SEQ ID NO: 412901 - RNA, 23 nt, Artificial Sequence
  Synthetic
uuuuuuuuuuugcuuuauuucuu

SEQ ID NO: 412902 - RNA, 24 nt, Artificial Sequence
  Synthetic
auuuuuuuuuuugcuuuauuucuu

SEQ ID NO: 412903 - RNA, 18 nt, Artificial Sequence
  Synthetic
uaaaauucuaacuuucuu

SEQ ID NO: 412904 - RNA, 19 nt, Artificial Sequence
  Synthetic
uuaaaauucuaacuuucuu

SEQ ID NO: 412905 - RNA, 20 nt, Artificial Sequence
  Synthetic
uuuaaaauucuaacuuucuu

SEQ ID NO: 412906 - RNA, 21 nt, Artificial Sequence
  Synthetic
auuuaaaauucuaacuuucuu

SEQ ID NO: 412907 - RNA, 22 nt, Artificial Sequence
  Synthetic
uauuuaaaauucuaacuuucuu

SEQ ID NO: 412908 - RNA, 23 nt, Artificial Sequence
  Synthetic
uuauuuaaaauucuaacuuucuu

SEQ ID NO: 412909 - RNA, 24 nt, Artificial Sequence
  Synthetic
uuuauuuaaaauucuaacuuucuu

SEQ ID NO: 412910 - RNA, 18 nt, Artificial Sequence
  Synthetic
uuuacuguucccuuucuu

SEQ ID NO: 412911 - RNA, 19 nt, Artificial Sequence
  Synthetic
uuuuacuguucccuuucuu

SEQ ID NO: 412912 - RNA, 20 nt, Artificial Sequence
  Synthetic
cuuuuacuguucccuuucuu

SEQ ID NO: 412913 - RNA, 21 nt, Artificial Sequence
  Synthetic
acuuuuacuguucccuuucuu

SEQ ID NO: 412914 - RNA, 22 nt, Artificial Sequence
  Synthetic
gacuuuuacuguucccuuucuu

SEQ ID NO: 412915 - RNA, 23 nt, Artificial Sequence
  Synthetic
ugacuuuuacuguucccuuucuu

SEQ ID NO: 412916 - RNA, 24 nt, Artificial Sequence
  Synthetic
augacuuuuacuguucccuuucuu

SEQ ID NO: 412917 - RNA, 18 nt, Artificial Sequence
  Synthetic
cccacauuuuccuuucuu

SEQ ID NO: 412918 - RNA, 19 nt, Artificial Sequence
  Synthetic
ucccacauuuuccuuucuu

SEQ ID NO: 412919 - RNA, 20 nt, Artificial Sequence
  Synthetic
gucccacauuuuccuuucuu

SEQ ID NO: 412920 - RNA, 21 nt, Artificial Sequence
  Synthetic
ugucccacauuuuccuuucuu

SEQ ID NO: 412921 - RNA, 22 nt, Artificial Sequence
  Synthetic
cugucccacauuuuccuuucuu

SEQ ID NO: 412922 - RNA, 23 nt, Artificial Sequence
  Synthetic
acugucccacauuuuccuuucuu

SEQ ID NO: 412923 - RNA, 24 nt, Artificial Sequence
  Synthetic
aacugucccacauuuuccuuucuu

SEQ ID NO: 412924 - RNA, 18 nt, Artificial Sequence
  Synthetic
gacuuuuuaagcuuucuu

SEQ ID NO: 412925 - RNA, 19 nt, Artificial Sequence
  Synthetic
agacuuuuuaagcuuucuu

SEQ ID NO: 412926 - RNA, 20 nt, Artificial Sequence
  Synthetic
cagacuuuuuaagcuuucuu

SEQ ID NO: 412927 - RNA, 21 nt, Artificial Sequence
  Synthetic
gcagacuuuuuaagcuuucuu

SEQ ID NO: 412928 - RNA, 22 nt, Artificial Sequence
  Synthetic
agcagacuuuuuaagcuuucuu

SEQ ID NO: 412929 - RNA, 23 nt, Artificial Sequence
  Synthetic
uagcagacuuuuuaagcuuucuu

SEQ ID NO: 412930 - RNA, 24 nt, Artificial Sequence
  Synthetic
uuagcagacuuuuuaagcuuucuu

SEQ ID NO: 412931 - RNA, 18 nt, Artificial Sequence
  Synthetic
cuaugugccagcuuucuu

SEQ ID NO: 412932 - RNA, 19 nt, Artificial Sequence
  Synthetic
ucuaugugccagcuuucuu

SEQ ID NO: 412933 - RNA, 20 nt, Artificial Sequence
  Synthetic
uucuaugugccagcuuucuu

SEQ ID NO: 412934 - RNA, 21 nt, Artificial Sequence
  Synthetic
cuucuaugugccagcuuucuu

SEQ ID NO: 412935 - RNA, 22 nt, Artificial Sequence
  Synthetic
ccuucuaugugccagcuuucuu

SEQ ID NO: 412936 - RNA, 23 nt, Artificial Sequence
  Synthetic
cccuucuaugugccagcuuucuu

SEQ ID NO: 412937 - RNA, 24 nt, Artificial Sequence
  Synthetic
ccccuucuaugugccagcuuucuu

SEQ ID NO: 412938 - RNA, 18 nt, Artificial Sequence
  Synthetic
aggagaaugagcuuucuu

SEQ ID NO: 412939 - RNA, 19 nt, Artificial Sequence
  Synthetic
caggagaaugagcuuucuu

SEQ ID NO: 412940 - RNA, 20 nt, Artificial Sequence
  Synthetic
acaggagaaugagcuuucuu

SEQ ID NO: 412941 - RNA, 21 nt, Artificial Sequence
  Synthetic
aacaggagaaugagcuuucuu

SEQ ID NO: 412942 - RNA, 22 nt, Artificial Sequence
  Synthetic
aaacaggagaaugagcuuucuu

SEQ ID NO: 412943 - RNA, 23 nt, Artificial Sequence
  Synthetic
aaaacaggagaaugagcuuucuu

SEQ ID NO: 412944 - RNA, 24 nt, Artificial Sequence
  Synthetic
caaaacaggagaaugagcuuucuu

SEQ ID NO: 412945 - RNA, 18 nt, Artificial Sequence
  Synthetic
ugcuguuggggcuuucuu

SEQ ID NO: 412946 - RNA, 19 nt, Artificial Sequence
  Synthetic
augcuguuggggcuuucuu

SEQ ID NO: 412947 - RNA, 20 nt, Artificial Sequence
  Synthetic
gaugcuguuggggcuuucuu

SEQ ID NO: 412948 - RNA, 21 nt, Artificial Sequence
  Synthetic
ugaugcuguuggggcuuucuu

SEQ ID NO: 412949 - RNA, 22 nt, Artificial Sequence
  Synthetic
gugaugcuguuggggcuuucuu

SEQ ID NO: 412950 - RNA, 23 nt, Artificial Sequence
  Synthetic
ggugaugcuguuggggcuuucuu

SEQ ID NO: 412951 - RNA, 24 nt, Artificial Sequence
  Synthetic
gggugaugcuguuggggcuuucuu

SEQ ID NO: 412952 - RNA, 18 nt, Artificial Sequence
  Synthetic
aacgcuaugcucuuucuu

SEQ ID NO: 412953 - RNA, 19 nt, Artificial Sequence
  Synthetic
uaacgcuaugcucuuucuu

SEQ ID NO: 412954 - RNA, 20 nt, Artificial Sequence
  Synthetic
uuaacgcuaugcucuuucuu

SEQ ID NO: 412955 - RNA, 21 nt, Artificial Sequence
  Synthetic
cuuaacgcuaugcucuuucuu

SEQ ID NO: 412956 - RNA, 22 nt, Artificial Sequence
  Synthetic
acuuaacgcuaugcucuuucuu

SEQ ID NO: 412957 - RNA, 23 nt, Artificial Sequence
  Synthetic
uacuuaacgcuaugcucuuucuu

SEQ ID NO: 412958 - RNA, 24 nt, Artificial Sequence
  Synthetic
auacuuaacgcuaugcucuuucuu

SEQ ID NO: 412959 - RNA, 18 nt, Artificial Sequence
  Synthetic
uucauguuucucuuucuu

SEQ ID NO: 412960 - RNA, 19 nt, Artificial Sequence
  Synthetic
uuucauguuucucuuucuu

SEQ ID NO: 412961 - RNA, 20 nt, Artificial Sequence
  Synthetic
cuuucauguuucucuuucuu

SEQ ID NO: 412962 - RNA, 21 nt, Artificial Sequence
  Synthetic
ccuuucauguuucucuuucuu

SEQ ID NO: 412963 - RNA, 22 nt, Artificial Sequence
  Synthetic
accuuucauguuucucuuucuu

SEQ ID NO: 412964 - RNA, 23 nt, Artificial Sequence
  Synthetic
aaccuuucauguuucucuuucuu

SEQ ID NO: 412965 - RNA, 24 nt, Artificial Sequence
  Synthetic
uaaccuuucauguuucucuuucuu

SEQ ID NO: 412966 - RNA, 18 nt, Artificial Sequence
  Synthetic
gugggaggguucuuucuu

SEQ ID NO: 412967 - RNA, 19 nt, Artificial Sequence
  Synthetic
ggugggaggguucuuucuu

SEQ ID NO: 412968 - RNA, 20 nt, Artificial Sequence
  Synthetic
aggugggaggguucuuucuu

SEQ ID NO: 412969 - RNA, 21 nt, Artificial Sequence
  Synthetic
aaggugggaggguucuuucuu

SEQ ID NO: 412970 - RNA, 22 nt, Artificial Sequence
  Synthetic
uaaggugggaggguucuuucuu

SEQ ID NO: 412971 - RNA, 23 nt, Artificial Sequence
  Synthetic
guaaggugggaggguucuuucuu

SEQ ID NO: 412972 - RNA, 24 nt, Artificial Sequence
  Synthetic
uguaaggugggaggguucuuucuu

SEQ ID NO: 412973 - RNA, 18 nt, Artificial Sequence
  Synthetic
ggaauuuuuuucuuucuu

SEQ ID NO: 412974 - RNA, 19 nt, Artificial Sequence
  Synthetic
uggaauuuuuuucuuucuu

SEQ ID NO: 412975 - RNA, 20 nt, Artificial Sequence
  Synthetic
uuggaauuuuuuucuuucuu

SEQ ID NO: 412976 - RNA, 21 nt, Artificial Sequence
  Synthetic
auuggaauuuuuuucuuucuu

SEQ ID NO: 412977 - RNA, 22 nt, Artificial Sequence
  Synthetic
aauuggaauuuuuuucuuucuu

SEQ ID NO: 412978 - RNA, 23 nt, Artificial Sequence
  Synthetic
aaauuggaauuuuuuucuuucuu

SEQ ID NO: 412979 - RNA, 24 nt, Artificial Sequence
  Synthetic
aaaauuggaauuuuuuucuuucuu

SEQ ID NO: 412980 - RNA, 18 nt, Artificial Sequence
  Synthetic
agaaugaauaaguuucuu

SEQ ID NO: 412981 - RNA, 19 nt, Artificial Sequence
  Synthetic
uagaaugaauaaguuucuu

SEQ ID NO: 412982 - RNA, 20 nt, Artificial Sequence
  Synthetic
cuagaaugaauaaguuucuu

SEQ ID NO: 412983 - RNA, 21 nt, Artificial Sequence
  Synthetic
ucuagaaugaauaaguuucuu

SEQ ID NO: 412984 - RNA, 22 nt, Artificial Sequence
  Synthetic
uucuagaaugaauaaguuucuu

SEQ ID NO: 412985 - RNA, 23 nt, Artificial Sequence
  Synthetic
auucuagaaugaauaaguuucuu

SEQ ID NO: 412986 - RNA, 24 nt, Artificial Sequence
  Synthetic
uauucuagaaugaauaaguuucuu

SEQ ID NO: 412987 - RNA, 18 nt, Artificial Sequence
  Synthetic
cuuuaauagcaguuucuu

SEQ ID NO: 412988 - RNA, 19 nt, Artificial Sequence
  Synthetic
ucuuuaauagcaguuucuu

SEQ ID NO: 412989 - RNA, 20 nt, Artificial Sequence
  Synthetic
aucuuuaauagcaguuucuu

SEQ ID NO: 412990 - RNA, 21 nt, Artificial Sequence
  Synthetic
uaucuuuaauagcaguuucuu

SEQ ID NO: 412991 - RNA, 22 nt, Artificial Sequence
  Synthetic
uuaucuuuaauagcaguuucuu

SEQ ID NO: 412992 - RNA, 23 nt, Artificial Sequence
  Synthetic
cuuaucuuuaauagcaguuucuu

SEQ ID NO: 412993 - RNA, 24 nt, Artificial Sequence
  Synthetic
acuuaucuuuaauagcaguuucuu

SEQ ID NO: 412994 - RNA, 18 nt, Artificial Sequence
  Synthetic
cccaaaucacuguuucuu

SEQ ID NO: 412995 - RNA, 19 nt, Artificial Sequence
  Synthetic
acccaaaucacuguuucuu

SEQ ID NO: 412996 - RNA, 20 nt, Artificial Sequence
  Synthetic
cacccaaaucacuguuucuu

SEQ ID NO: 412997 - RNA, 21 nt, Artificial Sequence
  Synthetic
ccacccaaaucacuguuucuu

SEQ ID NO: 412998 - RNA, 22 nt, Artificial Sequence
  Synthetic
uccacccaaaucacuguuucuu

SEQ ID NO: 412999 - RNA, 23 nt, Artificial Sequence
  Synthetic
cuccacccaaaucacuguuucuu

SEQ ID NO: 413000 - RNA, 24 nt, Artificial Sequence
  Synthetic
ucuccacccaaaucacuguuucuu

SEQ ID NO: 413001 - RNA, 18 nt, Artificial Sequence
  Synthetic
aaagaaaggcuguuucuu

SEQ ID NO: 413002 - RNA, 19 nt, Artificial Sequence
  Synthetic
caaagaaaggcuguuucuu

SEQ ID NO: 413003 - RNA, 20 nt, Artificial Sequence
  Synthetic
ccaaagaaaggcuguuucuu

SEQ ID NO: 413004 - RNA, 21 nt, Artificial Sequence
  Synthetic
accaaagaaaggcuguuucuu

SEQ ID NO: 413005 - RNA, 22 nt, Artificial Sequence
  Synthetic
uaccaaagaaaggcuguuucuu

SEQ ID NO: 413006 - RNA, 23 nt, Artificial Sequence
  Synthetic
uuaccaaagaaaggcuguuucuu

SEQ ID NO: 413007 - RNA, 24 nt, Artificial Sequence
  Synthetic
uuuaccaaagaaaggcuguuucuu

SEQ ID NO: 413008 - RNA, 18 nt, Artificial Sequence
  Synthetic
ggagcaauucuguuucuu

SEQ ID NO: 413009 - RNA, 19 nt, Artificial Sequence
  Synthetic
gggagcaauucuguuucuu

SEQ ID NO: 413010 - RNA, 20 nt, Artificial Sequence
  Synthetic
agggagcaauucuguuucuu

SEQ ID NO: 413011 - RNA, 21 nt, Artificial Sequence
  Synthetic
cagggagcaauucuguuucuu

SEQ ID NO: 413012 - RNA, 22 nt, Artificial Sequence
  Synthetic
ucagggagcaauucuguuucuu

SEQ ID NO: 413013 - RNA, 23 nt, Artificial Sequence
  Synthetic
aucagggagcaauucuguuucuu

SEQ ID NO: 413014 - RNA, 24 nt, Artificial Sequence
  Synthetic
caucagggagcaauucuguuucuu

SEQ ID NO: 413015 - RNA, 18 nt, Artificial Sequence
  Synthetic
ccauccuucuuguuucuu

SEQ ID NO: 413016 - RNA, 19 nt, Artificial Sequence
  Synthetic
cccauccuucuuguuucuu

SEQ ID NO: 413017 - RNA, 20 nt, Artificial Sequence
  Synthetic
acccauccuucuuguuucuu

SEQ ID NO: 413018 - RNA, 21 nt, Artificial Sequence
  Synthetic
uacccauccuucuuguuucuu

SEQ ID NO: 413019 - RNA, 22 nt, Artificial Sequence
  Synthetic
uuacccauccuucuuguuucuu

SEQ ID NO: 413020 - RNA, 23 nt, Artificial Sequence
  Synthetic
auuacccauccuucuuguuucuu

SEQ ID NO: 413021 - RNA, 24 nt, Artificial Sequence
  Synthetic
uauuacccauccuucuuguuucuu

SEQ ID NO: 413022 - RNA, 18 nt, Artificial Sequence
  Synthetic
augauuucaaauuuucuu

SEQ ID NO: 413023 - RNA, 19 nt, Artificial Sequence
  Synthetic
caugauuucaaauuuucuu

SEQ ID NO: 413024 - RNA, 20 nt, Artificial Sequence
  Synthetic
acaugauuucaaauuuucuu

SEQ ID NO: 413025 - RNA, 21 nt, Artificial Sequence
  Synthetic
gacaugauuucaaauuuucuu

SEQ ID NO: 413026 - RNA, 22 nt, Artificial Sequence
  Synthetic
agacaugauuucaaauuuucuu

SEQ ID NO: 413027 - RNA, 23 nt, Artificial Sequence
  Synthetic
uagacaugauuucaaauuuucuu

SEQ ID NO: 413028 - RNA, 24 nt, Artificial Sequence
  Synthetic
cuagacaugauuucaaauuuucuu

SEQ ID NO: 413029 - RNA, 18 nt, Artificial Sequence
  Synthetic
agaagaauccauuuucuu

SEQ ID NO: 413030 - RNA, 19 nt, Artificial Sequence
  Synthetic
aagaagaauccauuuucuu

SEQ ID NO: 413031 - RNA, 20 nt, Artificial Sequence
  Synthetic
aaagaagaauccauuuucuu

SEQ ID NO: 413032 - RNA, 21 nt, Artificial Sequence
  Synthetic
aaaagaagaauccauuuucuu

SEQ ID NO: 413033 - RNA, 22 nt, Artificial Sequence
  Synthetic
aaaaagaagaauccauuuucuu

SEQ ID NO: 413034 - RNA, 23 nt, Artificial Sequence
  Synthetic
uaaaaagaagaauccauuuucuu

SEQ ID NO: 413035 - RNA, 24 nt, Artificial Sequence
  Synthetic
uuaaaaagaagaauccauuuucuu

SEQ ID NO: 413036 - RNA, 18 nt, Artificial Sequence
  Synthetic
aucucuguccauuuucuu

SEQ ID NO: 413037 - RNA, 19 nt, Artificial Sequence
  Synthetic
aaucucuguccauuuucuu

SEQ ID NO: 413038 - RNA, 20 nt, Artificial Sequence
  Synthetic
uaaucucuguccauuuucuu

SEQ ID NO: 413039 - RNA, 21 nt, Artificial Sequence
  Synthetic
guaaucucuguccauuuucuu

SEQ ID NO: 413040 - RNA, 22 nt, Artificial Sequence
  Synthetic
aguaaucucuguccauuuucuu

SEQ ID NO: 413041 - RNA, 23 nt, Artificial Sequence
  Synthetic
uaguaaucucuguccauuuucuu

SEQ ID NO: 413042 - RNA, 24 nt, Artificial Sequence
  Synthetic
auaguaaucucuguccauuuucuu

SEQ ID NO: 413043 - RNA, 18 nt, Artificial Sequence
  Synthetic
ggaauuuaagauuuucuu

SEQ ID NO: 413044 - RNA, 19 nt, Artificial Sequence
  Synthetic
aggaauuuaagauuuucuu

SEQ ID NO: 413045 - RNA, 20 nt, Artificial Sequence
  Synthetic
gaggaauuuaagauuuucuu

SEQ ID NO: 413046 - RNA, 21 nt, Artificial Sequence
  Synthetic
cgaggaauuuaagauuuucuu

SEQ ID NO: 413047 - RNA, 22 nt, Artificial Sequence
  Synthetic
ucgaggaauuuaagauuuucuu

SEQ ID NO: 413048 - RNA, 23 nt, Artificial Sequence
  Synthetic
cucgaggaauuuaagauuuucuu

SEQ ID NO: 413049 - RNA, 24 nt, Artificial Sequence
  Synthetic
ucucgaggaauuuaagauuuucuu

SEQ ID NO: 413050 - RNA, 18 nt, Artificial Sequence
  Synthetic
uauaccacauauuuucuu

SEQ ID NO: 413051 - RNA, 19 nt, Artificial Sequence
  Synthetic
cuauaccacauauuuucuu

SEQ ID NO: 413052 - RNA, 20 nt, Artificial Sequence
  Synthetic
ucuauaccacauauuuucuu

SEQ ID NO: 413053 - RNA, 21 nt, Artificial Sequence
  Synthetic
gucuauaccacauauuuucuu

SEQ ID NO: 413054 - RNA, 22 nt, Artificial Sequence
  Synthetic
ggucuauaccacauauuuucuu

SEQ ID NO: 413055 - RNA, 23 nt, Artificial Sequence
  Synthetic
gggucuauaccacauauuuucuu

SEQ ID NO: 413056 - RNA, 24 nt, Artificial Sequence
  Synthetic
cgggucuauaccacauauuuucuu

SEQ ID NO: 413057 - RNA, 18 nt, Artificial Sequence
  Synthetic
cuguguauauauuuucuu

SEQ ID NO: 413058 - RNA, 19 nt, Artificial Sequence
  Synthetic
gcuguguauauauuuucuu

SEQ ID NO: 413059 - RNA, 20 nt, Artificial Sequence
  Synthetic
ggcuguguauauauuuucuu

SEQ ID NO: 413060 - RNA, 21 nt, Artificial Sequence
  Synthetic
uggcuguguauauauuuucuu

SEQ ID NO: 413061 - RNA, 22 nt, Artificial Sequence
  Synthetic
uuggcuguguauauauuuucuu

SEQ ID NO: 413062 - RNA, 23 nt, Artificial Sequence
  Synthetic
guuggcuguguauauauuuucuu

SEQ ID NO: 413063 - RNA, 24 nt, Artificial Sequence
  Synthetic
uguuggcuguguauauauuuucuu

SEQ ID NO: 413064 - RNA, 18 nt, Artificial Sequence
  Synthetic
uuuuuucuauauuuucuu

SEQ ID NO: 413065 - RNA, 19 nt, Artificial Sequence
  Synthetic
uuuuuuucuauauuuucuu

SEQ ID NO: 413066 - RNA, 20 nt, Artificial Sequence
  Synthetic
auuuuuuucuauauuuucuu

SEQ ID NO: 413067 - RNA, 21 nt, Artificial Sequence
  Synthetic
gauuuuuuucuauauuuucuu

SEQ ID NO: 413068 - RNA, 22 nt, Artificial Sequence
  Synthetic
agauuuuuuucuauauuuucuu

SEQ ID NO: 413069 - RNA, 23 nt, Artificial Sequence
  Synthetic
gagauuuuuuucuauauuuucuu

SEQ ID NO: 413070 - RNA, 24 nt, Artificial Sequence
  Synthetic
ugagauuuuuuucuauauuuucuu

SEQ ID NO: 413071 - RNA, 18 nt, Artificial Sequence
  Synthetic
ucauacacuccuuuucuu

SEQ ID NO: 413072 - RNA, 19 nt, Artificial Sequence
  Synthetic
uucauacacuccuuuucuu

SEQ ID NO: 413073 - RNA, 20 nt, Artificial Sequence
  Synthetic
cuucauacacuccuuuucuu

SEQ ID NO: 413074 - RNA, 21 nt, Artificial Sequence
  Synthetic
ucuucauacacuccuuuucuu

SEQ ID NO: 413075 - RNA, 22 nt, Artificial Sequence
  Synthetic
aucuucauacacuccuuuucuu

SEQ ID NO: 413076 - RNA, 23 nt, Artificial Sequence
  Synthetic
uaucuucauacacuccuuuucuu

SEQ ID NO: 413077 - RNA, 24 nt, Artificial Sequence
  Synthetic
cuaucuucauacacuccuuuucuu

SEQ ID NO: 413078 - RNA, 18 nt, Artificial Sequence
  Synthetic
uuuguuauuucuuuucuu

SEQ ID NO: 413079 - RNA, 19 nt, Artificial Sequence
  Synthetic
cuuuguuauuucuuuucuu

SEQ ID NO: 413080 - RNA, 20 nt, Artificial Sequence
  Synthetic
ucuuuguuauuucuuuucuu

SEQ ID NO: 413081 - RNA, 21 nt, Artificial Sequence
  Synthetic
aucuuuguuauuucuuuucuu

SEQ ID NO: 413082 - RNA, 22 nt, Artificial Sequence
  Synthetic
gaucuuuguuauuucuuuucuu

SEQ ID NO: 413083 - RNA, 23 nt, Artificial Sequence
  Synthetic
ugaucuuuguuauuucuuuucuu

SEQ ID NO: 413084 - RNA, 24 nt, Artificial Sequence
  Synthetic
cugaucuuuguuauuucuuuucuu

SEQ ID NO: 413085 - RNA, 18 nt, Artificial Sequence
  Synthetic
ugauugugaaguuuucuu

SEQ ID NO: 413086 - RNA, 19 nt, Artificial Sequence
  Synthetic
cugauugugaaguuuucuu

SEQ ID NO: 413087 - RNA, 20 nt, Artificial Sequence
  Synthetic
ucugauugugaaguuuucuu

SEQ ID NO: 413088 - RNA, 21 nt, Artificial Sequence
  Synthetic
cucugauugugaaguuuucuu

SEQ ID NO: 413089 - RNA, 22 nt, Artificial Sequence
  Synthetic
ucucugauugugaaguuuucuu

SEQ ID NO: 413090 - RNA, 23 nt, Artificial Sequence
  Synthetic
cucucugauugugaaguuuucuu

SEQ ID NO: 413091 - RNA, 24 nt, Artificial Sequence
  Synthetic
ccucucugauugugaaguuuucuu

SEQ ID NO: 413092 - RNA, 18 nt, Artificial Sequence
  Synthetic
guagguauucguuuucuu

SEQ ID NO: 413093 - RNA, 19 nt, Artificial Sequence
  Synthetic
aguagguauucguuuucuu

SEQ ID NO: 413094 - RNA, 20 nt, Artificial Sequence
  Synthetic
caguagguauucguuuucuu

SEQ ID NO: 413095 - RNA, 21 nt, Artificial Sequence
  Synthetic
gcaguagguauucguuuucuu

SEQ ID NO: 413096 - RNA, 22 nt, Artificial Sequence
  Synthetic
ugcaguagguauucguuuucuu

SEQ ID NO: 413097 - RNA, 23 nt, Artificial Sequence
  Synthetic
augcaguagguauucguuuucuu

SEQ ID NO: 413098 - RNA, 24 nt, Artificial Sequence
  Synthetic
caugcaguagguauucguuuucuu

SEQ ID NO: 413099 - RNA, 18 nt, Artificial Sequence
  Synthetic
uagcauucaauuuuucuu

SEQ ID NO: 413100 - RNA, 19 nt, Artificial Sequence
  Synthetic
guagcauucaauuuuucuu

SEQ ID NO: 413101 - RNA, 20 nt, Artificial Sequence
  Synthetic
aguagcauucaauuuuucuu

SEQ ID NO: 413102 - RNA, 21 nt, Artificial Sequence
  Synthetic
aaguagcauucaauuuuucuu

SEQ ID NO: 413103 - RNA, 22 nt, Artificial Sequence
  Synthetic
caaguagcauucaauuuuucuu

SEQ ID NO: 413104 - RNA, 23 nt, Artificial Sequence
  Synthetic
ucaaguagcauucaauuuuucuu

SEQ ID NO: 413105 - RNA, 24 nt, Artificial Sequence
  Synthetic
uucaaguagcauucaauuuuucuu

SEQ ID NO: 413106 - RNA, 18 nt, Artificial Sequence
  Synthetic
uuguguagaauuuuucuu

SEQ ID NO: 413107 - RNA, 19 nt, Artificial Sequence
  Synthetic
auuguguagaauuuuucuu

SEQ ID NO: 413108 - RNA, 20 nt, Artificial Sequence
  Synthetic
aauuguguagaauuuuucuu

SEQ ID NO: 413109 - RNA, 21 nt, Artificial Sequence
  Synthetic
gaauuguguagaauuuuucuu

SEQ ID NO: 413110 - RNA, 22 nt, Artificial Sequence
  Synthetic
ggaauuguguagaauuuuucuu

SEQ ID NO: 413111 - RNA, 23 nt, Artificial Sequence
  Synthetic
aggaauuguguagaauuuuucuu

SEQ ID NO: 413112 - RNA, 24 nt, Artificial Sequence
  Synthetic
caggaauuguguagaauuuuucuu

SEQ ID NO: 413113 - RNA, 18 nt, Artificial Sequence
  Synthetic
ucucacucccuuuuucuu

SEQ ID NO: 413114 - RNA, 19 nt, Artificial Sequence
  Synthetic
cucucacucccuuuuucuu

SEQ ID NO: 413115 - RNA, 20 nt, Artificial Sequence
  Synthetic
ucucucacucccuuuuucuu

SEQ ID NO: 413116 - RNA, 21 nt, Artificial Sequence
  Synthetic
uucucucacucccuuuuucuu

SEQ ID NO: 413117 - RNA, 22 nt, Artificial Sequence
  Synthetic
cuucucucacucccuuuuucuu

SEQ ID NO: 413118 - RNA, 23 nt, Artificial Sequence
  Synthetic
gcuucucucacucccuuuuucuu

SEQ ID NO: 413119 - RNA, 24 nt, Artificial Sequence
  Synthetic
ugcuucucucacucccuuuuucuu

SEQ ID NO: 413120 - RNA, 18 nt, Artificial Sequence
  Synthetic
uaggacauucuuuuucuu

SEQ ID NO: 413121 - RNA, 19 nt, Artificial Sequence
  Synthetic
auaggacauucuuuuucuu

SEQ ID NO: 413122 - RNA, 20 nt, Artificial Sequence
  Synthetic
aauaggacauucuuuuucuu

SEQ ID NO: 413123 - RNA, 21 nt, Artificial Sequence
  Synthetic
aaauaggacauucuuuuucuu

SEQ ID NO: 413124 - RNA, 22 nt, Artificial Sequence
  Synthetic
gaaauaggacauucuuuuucuu

SEQ ID NO: 413125 - RNA, 23 nt, Artificial Sequence
  Synthetic
ggaaauaggacauucuuuuucuu

SEQ ID NO: 413126 - RNA, 24 nt, Artificial Sequence
  Synthetic
uggaaauaggacauucuuuuucuu

SEQ ID NO: 413127 - RNA, 18 nt, Artificial Sequence
  Synthetic
guacuuuuucuuuuucuu

SEQ ID NO: 413128 - RNA, 19 nt, Artificial Sequence
  Synthetic
uguacuuuuucuuuuucuu

SEQ ID NO: 413129 - RNA, 20 nt, Artificial Sequence
  Synthetic
uuguacuuuuucuuuuucuu

SEQ ID NO: 413130 - RNA, 21 nt, Artificial Sequence
  Synthetic
uuuguacuuuuucuuuuucuu

SEQ ID NO: 413131 - RNA, 22 nt, Artificial Sequence
  Synthetic
uuuuguacuuuuucuuuuucuu

SEQ ID NO: 413132 - RNA, 23 nt, Artificial Sequence
  Synthetic
uuuuuguacuuuuucuuuuucuu

SEQ ID NO: 413133 - RNA, 24 nt, Artificial Sequence
  Synthetic
guuuuuguacuuuuucuuuuucuu

SEQ ID NO: 413134 - RNA, 18 nt, Artificial Sequence
  Synthetic
uuuguauucugaaaaguu

SEQ ID NO: 413135 - RNA, 19 nt, Artificial Sequence
  Synthetic
auuuguauucugaaaaguu

SEQ ID NO: 413136 - RNA, 20 nt, Artificial Sequence
  Synthetic
aauuuguauucugaaaaguu

SEQ ID NO: 413137 - RNA, 21 nt, Artificial Sequence
  Synthetic
aaauuuguauucugaaaaguu

SEQ ID NO: 413138 - RNA, 22 nt, Artificial Sequence
  Synthetic
uaaauuuguauucugaaaaguu

SEQ ID NO: 413139 - RNA, 23 nt, Artificial Sequence
  Synthetic
uuaaauuuguauucugaaaaguu

SEQ ID NO: 413140 - RNA, 24 nt, Artificial Sequence
  Synthetic
auuaaauuuguauucugaaaaguu

SEQ ID NO: 413141 - RNA, 18 nt, Artificial Sequence
  Synthetic
gaagaggaaguaaaaguu

SEQ ID NO: 413142 - RNA, 19 nt, Artificial Sequence
  Synthetic
ugaagaggaaguaaaaguu

SEQ ID NO: 413143 - RNA, 20 nt, Artificial Sequence
  Synthetic
gugaagaggaaguaaaaguu

SEQ ID NO: 413144 - RNA, 21 nt, Artificial Sequence
  Synthetic
agugaagaggaaguaaaaguu

SEQ ID NO: 413145 - RNA, 22 nt, Artificial Sequence
  Synthetic
uagugaagaggaaguaaaaguu

SEQ ID NO: 413146 - RNA, 23 nt, Artificial Sequence
  Synthetic
cuagugaagaggaaguaaaaguu

SEQ ID NO: 413147 - RNA, 24 nt, Artificial Sequence
  Synthetic
ucuagugaagaggaaguaaaaguu

SEQ ID NO: 413148 - RNA, 18 nt, Artificial Sequence
  Synthetic
ugaaaauaauuaaaaguu

SEQ ID NO: 413149 - RNA, 19 nt, Artificial Sequence
  Synthetic
augaaaauaauuaaaaguu

SEQ ID NO: 413150 - RNA, 20 nt, Artificial Sequence
  Synthetic
aaugaaaauaauuaaaaguu

SEQ ID NO: 413151 - RNA, 21 nt, Artificial Sequence
  Synthetic
uaaugaaaauaauuaaaaguu

SEQ ID NO: 413152 - RNA, 22 nt, Artificial Sequence
  Synthetic
auaaugaaaauaauuaaaaguu

SEQ ID NO: 413153 - RNA, 23 nt, Artificial Sequence
  Synthetic
aauaaugaaaauaauuaaaaguu

SEQ ID NO: 413154 - RNA, 24 nt, Artificial Sequence
  Synthetic
aaauaaugaaaauaauuaaaaguu

SEQ ID NO: 413155 - RNA, 18 nt, Artificial Sequence
  Synthetic
ggucauaucuuaaaaguu

SEQ ID NO: 413156 - RNA, 19 nt, Artificial Sequence
  Synthetic
aggucauaucuuaaaaguu

SEQ ID NO: 413157 - RNA, 20 nt, Artificial Sequence
  Synthetic
aaggucauaucuuaaaaguu

SEQ ID NO: 413158 - RNA, 21 nt, Artificial Sequence
  Synthetic
caaggucauaucuuaaaaguu

SEQ ID NO: 413159 - RNA, 22 nt, Artificial Sequence
  Synthetic
ccaaggucauaucuuaaaaguu

SEQ ID NO: 413160 - RNA, 23 nt, Artificial Sequence
  Synthetic
gccaaggucauaucuuaaaaguu

SEQ ID NO: 413161 - RNA, 24 nt, Artificial Sequence
  Synthetic
ugccaaggucauaucuuaaaaguu

SEQ ID NO: 413162 - RNA, 18 nt, Artificial Sequence
  Synthetic
guauaaagacacaaaguu

SEQ ID NO: 413163 - RNA, 19 nt, Artificial Sequence
  Synthetic
aguauaaagacacaaaguu

SEQ ID NO: 413164 - RNA, 20 nt, Artificial Sequence
  Synthetic
caguauaaagacacaaaguu

SEQ ID NO: 413165 - RNA, 21 nt, Artificial Sequence
  Synthetic
gcaguauaaagacacaaaguu

SEQ ID NO: 413166 - RNA, 22 nt, Artificial Sequence
  Synthetic
agcaguauaaagacacaaaguu

SEQ ID NO: 413167 - RNA, 23 nt, Artificial Sequence
  Synthetic
uagcaguauaaagacacaaaguu

SEQ ID NO: 413168 - RNA, 24 nt, Artificial Sequence
  Synthetic
uuagcaguauaaagacacaaaguu

SEQ ID NO: 413169 - RNA, 18 nt, Artificial Sequence
  Synthetic
uuaaaagucuccaaaguu

SEQ ID NO: 413170 - RNA, 19 nt, Artificial Sequence
  Synthetic
uuuaaaagucuccaaaguu

SEQ ID NO: 413171 - RNA, 20 nt, Artificial Sequence
  Synthetic
uuuuaaaagucuccaaaguu

SEQ ID NO: 413172 - RNA, 21 nt, Artificial Sequence
  Synthetic
uuuuuaaaagucuccaaaguu

SEQ ID NO: 413173 - RNA, 22 nt, Artificial Sequence
  Synthetic
uuuuuuaaaagucuccaaaguu

SEQ ID NO: 413174 - RNA, 23 nt, Artificial Sequence
  Synthetic
auuuuuuaaaagucuccaaaguu

SEQ ID NO: 413175 - RNA, 24 nt, Artificial Sequence
  Synthetic
gauuuuuuaaaagucuccaaaguu

SEQ ID NO: 413176 - RNA, 18 nt, Artificial Sequence
  Synthetic
aagcagagcaucaaaguu

SEQ ID NO: 413177 - RNA, 19 nt, Artificial Sequence
  Synthetic
gaagcagagcaucaaaguu

SEQ ID NO: 413178 - RNA, 20 nt, Artificial Sequence
  Synthetic
ggaagcagagcaucaaaguu

SEQ ID NO: 413179 - RNA, 21 nt, Artificial Sequence
  Synthetic
gggaagcagagcaucaaaguu

SEQ ID NO: 413180 - RNA, 22 nt, Artificial Sequence
  Synthetic
agggaagcagagcaucaaaguu

SEQ ID NO: 413181 - RNA, 23 nt, Artificial Sequence
  Synthetic
aagggaagcagagcaucaaaguu

SEQ ID NO: 413182 - RNA, 24 nt, Artificial Sequence
  Synthetic
aaagggaagcagagcaucaaaguu

SEQ ID NO: 413183 - RNA, 18 nt, Artificial Sequence
  Synthetic
uagacacauaucaaaguu

SEQ ID NO: 413184 - RNA, 19 nt, Artificial Sequence
  Synthetic
uuagacacauaucaaaguu

SEQ ID NO: 413185 - RNA, 20 nt, Artificial Sequence
  Synthetic
guuagacacauaucaaaguu

SEQ ID NO: 413186 - RNA, 21 nt, Artificial Sequence
  Synthetic
cguuagacacauaucaaaguu

SEQ ID NO: 413187 - RNA, 22 nt, Artificial Sequence
  Synthetic
acguuagacacauaucaaaguu

SEQ ID NO: 413188 - RNA, 23 nt, Artificial Sequence
  Synthetic
uacguuagacacauaucaaaguu

SEQ ID NO: 413189 - RNA, 24 nt, Artificial Sequence
  Synthetic
guacguuagacacauaucaaaguu

SEQ ID NO: 413190 - RNA, 18 nt, Artificial Sequence
  Synthetic
uguguaaacgucaaaguu

SEQ ID NO: 413191 - RNA, 19 nt, Artificial Sequence
  Synthetic
auguguaaacgucaaaguu

SEQ ID NO: 413192 - RNA, 20 nt, Artificial Sequence
  Synthetic
cauguguaaacgucaaaguu

SEQ ID NO: 413193 - RNA, 21 nt, Artificial Sequence
  Synthetic
gcauguguaaacgucaaaguu

SEQ ID NO: 413194 - RNA, 22 nt, Artificial Sequence
  Synthetic
ugcauguguaaacgucaaaguu

SEQ ID NO: 413195 - RNA, 23 nt, Artificial Sequence
  Synthetic
uugcauguguaaacgucaaaguu

SEQ ID NO: 413196 - RNA, 24 nt, Artificial Sequence
  Synthetic
guugcauguguaaacgucaaaguu

SEQ ID NO: 413197 - RNA, 18 nt, Artificial Sequence
  Synthetic
ccacuuacuuucaaaguu

SEQ ID NO: 413198 - RNA, 19 nt, Artificial Sequence
  Synthetic
cccacuuacuuucaaaguu

SEQ ID NO: 413199 - RNA, 20 nt, Artificial Sequence
  Synthetic
ucccacuuacuuucaaaguu

SEQ ID NO: 413200 - RNA, 21 nt, Artificial Sequence
  Synthetic
aucccacuuacuuucaaaguu

SEQ ID NO: 413201 - RNA, 22 nt, Artificial Sequence
  Synthetic
caucccacuuacuuucaaaguu

SEQ ID NO: 413202 - RNA, 23 nt, Artificial Sequence
  Synthetic
ucaucccacuuacuuucaaaguu

SEQ ID NO: 413203 - RNA, 24 nt, Artificial Sequence
  Synthetic
aucaucccacuuacuuucaaaguu

SEQ ID NO: 413204 - RNA, 18 nt, Artificial Sequence
  Synthetic
aguuauuuuaagaaaguu

SEQ ID NO: 413205 - RNA, 19 nt, Artificial Sequence
  Synthetic
uaguuauuuuaagaaaguu

SEQ ID NO: 413206 - RNA, 20 nt, Artificial Sequence
  Synthetic
auaguuauuuuaagaaaguu

SEQ ID NO: 413207 - RNA, 21 nt, Artificial Sequence
  Synthetic
uauaguuauuuuaagaaaguu

SEQ ID NO: 413208 - RNA, 22 nt, Artificial Sequence
  Synthetic
cuauaguuauuuuaagaaaguu

SEQ ID NO: 413209 - RNA, 23 nt, Artificial Sequence
  Synthetic
ccuauaguuauuuuaagaaaguu

SEQ ID NO: 413210 - RNA, 24 nt, Artificial Sequence
  Synthetic
accuauaguuauuuuaagaaaguu

SEQ ID NO: 413211 - RNA, 18 nt, Artificial Sequence
  Synthetic
auuauccuucagaaaguu

SEQ ID NO: 413212 - RNA, 19 nt, Artificial Sequence
  Synthetic
aauuauccuucagaaaguu

SEQ ID NO: 413213 - RNA, 20 nt, Artificial Sequence
  Synthetic
aaauuauccuucagaaaguu

SEQ ID NO: 413214 - RNA, 21 nt, Artificial Sequence
  Synthetic
caaauuauccuucagaaaguu

SEQ ID NO: 413215 - RNA, 22 nt, Artificial Sequence
  Synthetic
ucaaauuauccuucagaaaguu

SEQ ID NO: 413216 - RNA, 23 nt, Artificial Sequence
  Synthetic
gucaaauuauccuucagaaaguu

SEQ ID NO: 413217 - RNA, 24 nt, Artificial Sequence
  Synthetic
ugucaaauuauccuucagaaaguu

SEQ ID NO: 413218 - RNA, 18 nt, Artificial Sequence
  Synthetic
uggaguugugagaaaguu

SEQ ID NO: 413219 - RNA, 19 nt, Artificial Sequence
  Synthetic
uuggaguugugagaaaguu

SEQ ID NO: 413220 - RNA, 20 nt, Artificial Sequence
  Synthetic
guuggaguugugagaaaguu

SEQ ID NO: 413221 - RNA, 21 nt, Artificial Sequence
  Synthetic
uguuggaguugugagaaaguu

SEQ ID NO: 413222 - RNA, 22 nt, Artificial Sequence
  Synthetic
auguuggaguugugagaaaguu

SEQ ID NO: 413223 - RNA, 23 nt, Artificial Sequence
  Synthetic
gauguuggaguugugagaaaguu

SEQ ID NO: 413224 - RNA, 24 nt, Artificial Sequence
  Synthetic
ggauguuggaguugugagaaaguu

SEQ ID NO: 413225 - RNA, 18 nt, Artificial Sequence
  Synthetic
accagauaauggaaaguu

SEQ ID NO: 413226 - RNA, 19 nt, Artificial Sequence
  Synthetic
aaccagauaauggaaaguu

SEQ ID NO: 413227 - RNA, 20 nt, Artificial Sequence
  Synthetic
uaaccagauaauggaaaguu

SEQ ID NO: 413228 - RNA, 21 nt, Artificial Sequence
  Synthetic
uuaaccagauaauggaaaguu

SEQ ID NO: 413229 - RNA, 22 nt, Artificial Sequence
  Synthetic
auuaaccagauaauggaaaguu

SEQ ID NO: 413230 - RNA, 23 nt, Artificial Sequence
  Synthetic
aauuaaccagauaauggaaaguu

SEQ ID NO: 413231 - RNA, 24 nt, Artificial Sequence
  Synthetic
aaauuaaccagauaauggaaaguu

SEQ ID NO: 413232 - RNA, 18 nt, Artificial Sequence
  Synthetic
uccagauaauggaaaguu

SEQ ID NO: 413233 - RNA, 19 nt, Artificial Sequence
  Synthetic
auccagauaauggaaaguu

SEQ ID NO: 413234 - RNA, 20 nt, Artificial Sequence
  Synthetic
uauccagauaauggaaaguu

SEQ ID NO: 413235 - RNA, 21 nt, Artificial Sequence
  Synthetic
uuauccagauaauggaaaguu

SEQ ID NO: 413236 - RNA, 22 nt, Artificial Sequence
  Synthetic
auuauccagauaauggaaaguu

SEQ ID NO: 413237 - RNA, 23 nt, Artificial Sequence
  Synthetic
aauuauccagauaauggaaaguu

SEQ ID NO: 413238 - RNA, 24 nt, Artificial Sequence
  Synthetic
aaauuauccagauaauggaaaguu

SEQ ID NO: 413239 - RNA, 18 nt, Artificial Sequence
  Synthetic
ggagaagaaaugaaaguu

SEQ ID NO: 413240 - RNA, 19 nt, Artificial Sequence
  Synthetic
aggagaagaaaugaaaguu

SEQ ID NO: 413241 - RNA, 20 nt, Artificial Sequence
  Synthetic
gaggagaagaaaugaaaguu

SEQ ID NO: 413242 - RNA, 21 nt, Artificial Sequence
  Synthetic
ggaggagaagaaaugaaaguu

SEQ ID NO: 413243 - RNA, 22 nt, Artificial Sequence
  Synthetic
aggaggagaagaaaugaaaguu

SEQ ID NO: 413244 - RNA, 23 nt, Artificial Sequence
  Synthetic
gaggaggagaagaaaugaaaguu

SEQ ID NO: 413245 - RNA, 24 nt, Artificial Sequence
  Synthetic
ugaggaggagaagaaaugaaaguu

SEQ ID NO: 413246 - RNA, 18 nt, Artificial Sequence
  Synthetic
aacauaccuaugaaaguu

SEQ ID NO: 413247 - RNA, 19 nt, Artificial Sequence
  Synthetic
caacauaccuaugaaaguu

SEQ ID NO: 413248 - RNA, 20 nt, Artificial Sequence
  Synthetic
gcaacauaccuaugaaaguu

SEQ ID NO: 413249 - RNA, 21 nt, Artificial Sequence
  Synthetic
agcaacauaccuaugaaaguu

SEQ ID NO: 413250 - RNA, 22 nt, Artificial Sequence
  Synthetic
gagcaacauaccuaugaaaguu

SEQ ID NO: 413251 - RNA, 23 nt, Artificial Sequence
  Synthetic
ggagcaacauaccuaugaaaguu

SEQ ID NO: 413252 - RNA, 24 nt, Artificial Sequence
  Synthetic
aggagcaacauaccuaugaaaguu

SEQ ID NO: 413253 - RNA, 18 nt, Artificial Sequence
  Synthetic
acugggcaguugaaaguu

SEQ ID NO: 413254 - RNA, 19 nt, Artificial Sequence
  Synthetic
gacugggcaguugaaaguu

SEQ ID NO: 413255 - RNA, 20 nt, Artificial Sequence
  Synthetic
ugacugggcaguugaaaguu

SEQ ID NO: 413256 - RNA, 21 nt, Artificial Sequence
  Synthetic
gugacugggcaguugaaaguu

SEQ ID NO: 413257 - RNA, 22 nt, Artificial Sequence
  Synthetic
ugugacugggcaguugaaaguu

SEQ ID NO: 413258 - RNA, 23 nt, Artificial Sequence
  Synthetic
cugugacugggcaguugaaaguu

SEQ ID NO: 413259 - RNA, 24 nt, Artificial Sequence
  Synthetic
ucugugacugggcaguugaaaguu

SEQ ID NO: 413260 - RNA, 18 nt, Artificial Sequence
  Synthetic
uuuuuucuucauaaaguu

SEQ ID NO: 413261 - RNA, 19 nt, Artificial Sequence
  Synthetic
uuuuuuucuucauaaaguu

SEQ ID NO: 413262 - RNA, 20 nt, Artificial Sequence
  Synthetic
uuuuuuuucuucauaaaguu

SEQ ID NO: 413263 - RNA, 21 nt, Artificial Sequence
  Synthetic
auuuuuuuucuucauaaaguu

SEQ ID NO: 413264 - RNA, 22 nt, Artificial Sequence
  Synthetic
aauuuuuuuucuucauaaaguu

SEQ ID NO: 413265 - RNA, 23 nt, Artificial Sequence
  Synthetic
uaauuuuuuuucuucauaaaguu

SEQ ID NO: 413266 - RNA, 24 nt, Artificial Sequence
  Synthetic
guaauuuuuuuucuucauaaaguu

SEQ ID NO: 413267 - RNA, 18 nt, Artificial Sequence
  Synthetic
aagauucaaccuaaaguu

SEQ ID NO: 413268 - RNA, 19 nt, Artificial Sequence
  Synthetic
gaagauucaaccuaaaguu

SEQ ID NO: 413269 - RNA, 20 nt, Artificial Sequence
  Synthetic
agaagauucaaccuaaaguu

SEQ ID NO: 413270 - RNA, 21 nt, Artificial Sequence
  Synthetic
aagaagauucaaccuaaaguu

SEQ ID NO: 413271 - RNA, 22 nt, Artificial Sequence
  Synthetic
aaagaagauucaaccuaaaguu

SEQ ID NO: 413272 - RNA, 23 nt, Artificial Sequence
  Synthetic
aaaagaagauucaaccuaaaguu

SEQ ID NO: 413273 - RNA, 24 nt, Artificial Sequence
  Synthetic
gaaaagaagauucaaccuaaaguu

SEQ ID NO: 413274 - RNA, 18 nt, Artificial Sequence
  Synthetic
uuauuguucccuaaaguu

SEQ ID NO: 413275 - RNA, 19 nt, Artificial Sequence
  Synthetic
guuauuguucccuaaaguu

SEQ ID NO: 413276 - RNA, 20 nt, Artificial Sequence
  Synthetic
uguuauuguucccuaaaguu

SEQ ID NO: 413277 - RNA, 21 nt, Artificial Sequence
  Synthetic
auguuauuguucccuaaaguu

SEQ ID NO: 413278 - RNA, 22 nt, Artificial Sequence
  Synthetic
aauguuauuguucccuaaaguu

SEQ ID NO: 413279 - RNA, 23 nt, Artificial Sequence
  Synthetic
uaauguuauuguucccuaaaguu

SEQ ID NO: 413280 - RNA, 24 nt, Artificial Sequence
  Synthetic
auaauguuauuguucccuaaaguu

SEQ ID NO: 413281 - RNA, 18 nt, Artificial Sequence
  Synthetic
guuaguaaugcuaaaguu

SEQ ID NO: 413282 - RNA, 19 nt, Artificial Sequence
  Synthetic
uguuaguaaugcuaaaguu

SEQ ID NO: 413283 - RNA, 20 nt, Artificial Sequence
  Synthetic
auguuaguaaugcuaaaguu

SEQ ID NO: 413284 - RNA, 21 nt, Artificial Sequence
  Synthetic
aauguuaguaaugcuaaaguu

SEQ ID NO: 413285 - RNA, 22 nt, Artificial Sequence
  Synthetic
aaauguuaguaaugcuaaaguu

SEQ ID NO: 413286 - RNA, 23 nt, Artificial Sequence
  Synthetic
uaaauguuaguaaugcuaaaguu

SEQ ID NO: 413287 - RNA, 24 nt, Artificial Sequence
  Synthetic
cuaaauguuaguaaugcuaaaguu

SEQ ID NO: 413288 - RNA, 18 nt, Artificial Sequence
  Synthetic
guuguuacuuguaaaguu

SEQ ID NO: 413289 - RNA, 19 nt, Artificial Sequence
  Synthetic
aguuguuacuuguaaaguu

SEQ ID NO: 413290 - RNA, 20 nt, Artificial Sequence
  Synthetic
uaguuguuacuuguaaaguu

SEQ ID NO: 413291 - RNA, 21 nt, Artificial Sequence
  Synthetic
auaguuguuacuuguaaaguu

SEQ ID NO: 413292 - RNA, 22 nt, Artificial Sequence
  Synthetic
aauaguuguuacuuguaaaguu

SEQ ID NO: 413293 - RNA, 23 nt, Artificial Sequence
  Synthetic
gaauaguuguuacuuguaaaguu

SEQ ID NO: 413294 - RNA, 24 nt, Artificial Sequence
  Synthetic
ggaauaguuguuacuuguaaaguu

SEQ ID NO: 413295 - RNA, 18 nt, Artificial Sequence
  Synthetic
aaaauguuuuuuaaaguu

SEQ ID NO: 413296 - RNA, 19 nt, Artificial Sequence
  Synthetic
caaaauguuuuuuaaaguu

SEQ ID NO: 413297 - RNA, 20 nt, Artificial Sequence
  Synthetic
acaaaauguuuuuuaaaguu

SEQ ID NO: 413298 - RNA, 21 nt, Artificial Sequence
  Synthetic
cacaaaauguuuuuuaaaguu

SEQ ID NO: 413299 - RNA, 22 nt, Artificial Sequence
  Synthetic
acacaaaauguuuuuuaaaguu

SEQ ID NO: 413300 - RNA, 23 nt, Artificial Sequence
  Synthetic
uacacaaaauguuuuuuaaaguu

SEQ ID NO: 413301 - RNA, 24 nt, Artificial Sequence
  Synthetic
guacacaaaauguuuuuuaaaguu

SEQ ID NO: 413302 - RNA, 18 nt, Artificial Sequence
  Synthetic
gaguuucauaaacaaguu

SEQ ID NO: 413303 - RNA, 19 nt, Artificial Sequence
  Synthetic
ggaguuucauaaacaaguu

SEQ ID NO: 413304 - RNA, 20 nt, Artificial Sequence
  Synthetic
gggaguuucauaaacaaguu

SEQ ID NO: 413305 - RNA, 21 nt, Artificial Sequence
  Synthetic
ugggaguuucauaaacaaguu

SEQ ID NO: 413306 - RNA, 22 nt, Artificial Sequence
  Synthetic
cugggaguuucauaaacaaguu

SEQ ID NO: 413307 - RNA, 23 nt, Artificial Sequence
  Synthetic
ccugggaguuucauaaacaaguu

SEQ ID NO: 413308 - RNA, 24 nt, Artificial Sequence
  Synthetic
accugggaguuucauaaacaaguu

SEQ ID NO: 413309 - RNA, 18 nt, Artificial Sequence
  Synthetic
ccaaaaggcggacaaguu

SEQ ID NO: 413310 - RNA, 19 nt, Artificial Sequence
  Synthetic
uccaaaaggcggacaaguu

SEQ ID NO: 413311 - RNA, 20 nt, Artificial Sequence
  Synthetic
auccaaaaggcggacaaguu

SEQ ID NO: 413312 - RNA, 21 nt, Artificial Sequence
  Synthetic
uauccaaaaggcggacaaguu

SEQ ID NO: 413313 - RNA, 22 nt, Artificial Sequence
  Synthetic
auauccaaaaggcggacaaguu

SEQ ID NO: 413314 - RNA, 23 nt, Artificial Sequence
  Synthetic
aauauccaaaaggcggacaaguu

SEQ ID NO: 413315 - RNA, 24 nt, Artificial Sequence
  Synthetic
gaauauccaaaaggcggacaaguu

SEQ ID NO: 413316 - RNA, 18 nt, Artificial Sequence
  Synthetic
ggcaagucugagcaaguu

SEQ ID NO: 413317 - RNA, 19 nt, Artificial Sequence
  Synthetic
aggcaagucugagcaaguu

SEQ ID NO: 413318 - RNA, 20 nt, Artificial Sequence
  Synthetic
uaggcaagucugagcaaguu

SEQ ID NO: 413319 - RNA, 21 nt, Artificial Sequence
  Synthetic
auaggcaagucugagcaaguu

SEQ ID NO: 413320 - RNA, 22 nt, Artificial Sequence
  Synthetic
aauaggcaagucugagcaaguu

SEQ ID NO: 413321 - RNA, 23 nt, Artificial Sequence
  Synthetic
gaauaggcaagucugagcaaguu

SEQ ID NO: 413322 - RNA, 24 nt, Artificial Sequence
  Synthetic
agaauaggcaagucugagcaaguu

SEQ ID NO: 413323 - RNA, 18 nt, Artificial Sequence
  Synthetic
guauuuucugagcaaguu

SEQ ID NO: 413324 - RNA, 19 nt, Artificial Sequence
  Synthetic
aguauuuucugagcaaguu

SEQ ID NO: 413325 - RNA, 20 nt, Artificial Sequence
  Synthetic
caguauuuucugagcaaguu

SEQ ID NO: 413326 - RNA, 21 nt, Artificial Sequence
  Synthetic
ucaguauuuucugagcaaguu

SEQ ID NO: 413327 - RNA, 22 nt, Artificial Sequence
  Synthetic
aucaguauuuucugagcaaguu

SEQ ID NO: 413328 - RNA, 23 nt, Artificial Sequence
  Synthetic
caucaguauuuucugagcaaguu

SEQ ID NO: 413329 - RNA, 24 nt, Artificial Sequence
  Synthetic
acaucaguauuuucugagcaaguu

SEQ ID NO: 413330 - RNA, 18 nt, Artificial Sequence
  Synthetic
ucacauugaagucaaguu

SEQ ID NO: 413331 - RNA, 19 nt, Artificial Sequence
  Synthetic
uucacauugaagucaaguu

SEQ ID NO: 413332 - RNA, 20 nt, Artificial Sequence
  Synthetic
guucacauugaagucaaguu

SEQ ID NO: 413333 - RNA, 21 nt, Artificial Sequence
  Synthetic
aguucacauugaagucaaguu

SEQ ID NO: 413334 - RNA, 22 nt, Artificial Sequence
  Synthetic
uaguucacauugaagucaaguu

SEQ ID NO: 413335 - RNA, 23 nt, Artificial Sequence
  Synthetic
guaguucacauugaagucaaguu

SEQ ID NO: 413336 - RNA, 24 nt, Artificial Sequence
  Synthetic
uguaguucacauugaagucaaguu

SEQ ID NO: 413337 - RNA, 18 nt, Artificial Sequence
  Synthetic
uuagugucccuucaaguu

SEQ ID NO: 413338 - RNA, 19 nt, Artificial Sequence
  Synthetic
auuagugucccuucaaguu

SEQ ID NO: 413339 - RNA, 20 nt, Artificial Sequence
  Synthetic
cauuagugucccuucaaguu

SEQ ID NO: 413340 - RNA, 21 nt, Artificial Sequence
  Synthetic
ucauuagugucccuucaaguu

SEQ ID NO: 413341 - RNA, 22 nt, Artificial Sequence
  Synthetic
gucauuagugucccuucaaguu

SEQ ID NO: 413342 - RNA, 23 nt, Artificial Sequence
  Synthetic
ugucauuagugucccuucaaguu

SEQ ID NO: 413343 - RNA, 24 nt, Artificial Sequence
  Synthetic
augucauuagugucccuucaaguu

SEQ ID NO: 413344 - RNA, 18 nt, Artificial Sequence
  Synthetic
uuacccuuuguucaaguu

SEQ ID NO: 413345 - RNA, 19 nt, Artificial Sequence
  Synthetic
cuuacccuuuguucaaguu

SEQ ID NO: 413346 - RNA, 20 nt, Artificial Sequence
  Synthetic
ucuuacccuuuguucaaguu

SEQ ID NO: 413347 - RNA, 21 nt, Artificial Sequence
  Synthetic
cucuuacccuuuguucaaguu

SEQ ID NO: 413348 - RNA, 22 nt, Artificial Sequence
  Synthetic
ccucuuacccuuuguucaaguu

SEQ ID NO: 413349 - RNA, 23 nt, Artificial Sequence
  Synthetic
accucuuacccuuuguucaaguu

SEQ ID NO: 413350 - RNA, 24 nt, Artificial Sequence
  Synthetic
uaccucuuacccuuuguucaaguu

SEQ ID NO: 413351 - RNA, 18 nt, Artificial Sequence
  Synthetic
uuaaggcuucaagaaguu

SEQ ID NO: 413352 - RNA, 19 nt, Artificial Sequence
  Synthetic
auuaaggcuucaagaaguu

SEQ ID NO: 413353 - RNA, 20 nt, Artificial Sequence
  Synthetic
aauuaaggcuucaagaaguu

SEQ ID NO: 413354 - RNA, 21 nt, Artificial Sequence
  Synthetic
aaauuaaggcuucaagaaguu

SEQ ID NO: 413355 - RNA, 22 nt, Artificial Sequence
  Synthetic
gaaauuaaggcuucaagaaguu

SEQ ID NO: 413356 - RNA, 23 nt, Artificial Sequence
  Synthetic
ggaaauuaaggcuucaagaaguu

SEQ ID NO: 413357 - RNA, 24 nt, Artificial Sequence
  Synthetic
aggaaauuaaggcuucaagaaguu

SEQ ID NO: 413358 - RNA, 18 nt, Artificial Sequence
  Synthetic
ccucuuaaagcagaaguu

SEQ ID NO: 413359 - RNA, 19 nt, Artificial Sequence
  Synthetic
uccucuuaaagcagaaguu

SEQ ID NO: 413360 - RNA, 20 nt, Artificial Sequence
  Synthetic
guccucuuaaagcagaaguu

SEQ ID NO: 413361 - RNA, 21 nt, Artificial Sequence
  Synthetic
uguccucuuaaagcagaaguu

SEQ ID NO: 413362 - RNA, 22 nt, Artificial Sequence
  Synthetic
auguccucuuaaagcagaaguu

SEQ ID NO: 413363 - RNA, 23 nt, Artificial Sequence
  Synthetic
aauguccucuuaaagcagaaguu

SEQ ID NO: 413364 - RNA, 24 nt, Artificial Sequence
  Synthetic
aaauguccucuuaaagcagaaguu

SEQ ID NO: 413365 - RNA, 18 nt, Artificial Sequence
  Synthetic
caguuuauuugagaaguu

SEQ ID NO: 413366 - RNA, 19 nt, Artificial Sequence
  Synthetic
ucaguuuauuugagaaguu

SEQ ID NO: 413367 - RNA, 20 nt, Artificial Sequence
  Synthetic
gucaguuuauuugagaaguu

SEQ ID NO: 413368 - RNA, 21 nt, Artificial Sequence
  Synthetic
ggucaguuuauuugagaaguu

SEQ ID NO: 413369 - RNA, 22 nt, Artificial Sequence
  Synthetic
aggucaguuuauuugagaaguu

SEQ ID NO: 413370 - RNA, 23 nt, Artificial Sequence
  Synthetic
aaggucaguuuauuugagaaguu

SEQ ID NO: 413371 - RNA, 24 nt, Artificial Sequence
  Synthetic
gaaggucaguuuauuugagaaguu

SEQ ID NO: 413372 - RNA, 18 nt, Artificial Sequence
  Synthetic
gaggcucuaauagaaguu

SEQ ID NO: 413373 - RNA, 19 nt, Artificial Sequence
  Synthetic
ugaggcucuaauagaaguu

SEQ ID NO: 413374 - RNA, 20 nt, Artificial Sequence
  Synthetic
augaggcucuaauagaaguu

SEQ ID NO: 413375 - RNA, 21 nt, Artificial Sequence
  Synthetic
caugaggcucuaauagaaguu

SEQ ID NO: 413376 - RNA, 22 nt, Artificial Sequence
  Synthetic
acaugaggcucuaauagaaguu

SEQ ID NO: 413377 - RNA, 23 nt, Artificial Sequence
  Synthetic
cacaugaggcucuaauagaaguu

SEQ ID NO: 413378 - RNA, 24 nt, Artificial Sequence
  Synthetic
ccacaugaggcucuaauagaaguu

SEQ ID NO: 413379 - RNA, 18 nt, Artificial Sequence
  Synthetic
uacucagaauuagaaguu

SEQ ID NO: 413380 - RNA, 19 nt, Artificial Sequence
  Synthetic
guacucagaauuagaaguu

SEQ ID NO: 413381 - RNA, 20 nt, Artificial Sequence
  Synthetic
aguacucagaauuagaaguu

SEQ ID NO: 413382 - RNA, 21 nt, Artificial Sequence
  Synthetic
caguacucagaauuagaaguu

SEQ ID NO: 413383 - RNA, 22 nt, Artificial Sequence
  Synthetic
acaguacucagaauuagaaguu

SEQ ID NO: 413384 - RNA, 23 nt, Artificial Sequence
  Synthetic
gacaguacucagaauuagaaguu

SEQ ID NO: 413385 - RNA, 24 nt, Artificial Sequence
  Synthetic
agacaguacucagaauuagaaguu

SEQ ID NO: 413386 - RNA, 18 nt, Artificial Sequence
  Synthetic
aauacuuugaaggaaguu

SEQ ID NO: 413387 - RNA, 19 nt, Artificial Sequence
  Synthetic
uaauacuuugaaggaaguu

SEQ ID NO: 413388 - RNA, 20 nt, Artificial Sequence
  Synthetic
auaauacuuugaaggaaguu

SEQ ID NO: 413389 - RNA, 21 nt, Artificial Sequence
  Synthetic
gauaauacuuugaaggaaguu

SEQ ID NO: 413390 - RNA, 22 nt, Artificial Sequence
  Synthetic
agauaauacuuugaaggaaguu

SEQ ID NO: 413391 - RNA, 23 nt, Artificial Sequence
  Synthetic
uagauaauacuuugaaggaaguu

SEQ ID NO: 413392 - RNA, 24 nt, Artificial Sequence
  Synthetic
uuagauaauacuuugaaggaaguu

SEQ ID NO: 413393 - RNA, 18 nt, Artificial Sequence
  Synthetic
uuaaaacauaaggaaguu

SEQ ID NO: 413394 - RNA, 19 nt, Artificial Sequence
  Synthetic
auuaaaacauaaggaaguu

SEQ ID NO: 413395 - RNA, 20 nt, Artificial Sequence
  Synthetic
gauuaaaacauaaggaaguu

SEQ ID NO: 413396 - RNA, 21 nt, Artificial Sequence
  Synthetic
ggauuaaaacauaaggaaguu

SEQ ID NO: 413397 - RNA, 22 nt, Artificial Sequence
  Synthetic
aggauuaaaacauaaggaaguu

SEQ ID NO: 413398 - RNA, 23 nt, Artificial Sequence
  Synthetic
gaggauuaaaacauaaggaaguu

SEQ ID NO: 413399 - RNA, 24 nt, Artificial Sequence
  Synthetic
ugaggauuaaaacauaaggaaguu

SEQ ID NO: 413400 - RNA, 18 nt, Artificial Sequence
  Synthetic
auauaguaaugggaaguu

SEQ ID NO: 413401 - RNA, 19 nt, Artificial Sequence
  Synthetic
cauauaguaaugggaaguu

SEQ ID NO: 413402 - RNA, 20 nt, Artificial Sequence
  Synthetic
ucauauaguaaugggaaguu

SEQ ID NO: 413403 - RNA, 21 nt, Artificial Sequence
  Synthetic
cucauauaguaaugggaaguu

SEQ ID NO: 413404 - RNA, 22 nt, Artificial Sequence
  Synthetic
gcucauauaguaaugggaaguu

SEQ ID NO: 413405 - RNA, 23 nt, Artificial Sequence
  Synthetic
agcucauauaguaaugggaaguu

SEQ ID NO: 413406 - RNA, 24 nt, Artificial Sequence
  Synthetic
gagcucauauaguaaugggaaguu

SEQ ID NO: 413407 - RNA, 18 nt, Artificial Sequence
  Synthetic
cucacauaacuggaaguu

SEQ ID NO: 413408 - RNA, 19 nt, Artificial Sequence
  Synthetic
acucacauaacuggaaguu

SEQ ID NO: 413409 - RNA, 20 nt, Artificial Sequence
  Synthetic
aacucacauaacuggaaguu

SEQ ID NO: 413410 - RNA, 21 nt, Artificial Sequence
  Synthetic
caacucacauaacuggaaguu

SEQ ID NO: 413411 - RNA, 22 nt, Artificial Sequence
  Synthetic
ucaacucacauaacuggaaguu

SEQ ID NO: 413412 - RNA, 23 nt, Artificial Sequence
  Synthetic
uucaacucacauaacuggaaguu

SEQ ID NO: 413413 - RNA, 24 nt, Artificial Sequence
  Synthetic
auucaacucacauaacuggaaguu

SEQ ID NO: 413414 - RNA, 18 nt, Artificial Sequence
  Synthetic
ugcaauuuuuuggaaguu

SEQ ID NO: 413415 - RNA, 19 nt, Artificial Sequence
  Synthetic
uugcaauuuuuuggaaguu

SEQ ID NO: 413416 - RNA, 20 nt, Artificial Sequence
  Synthetic
auugcaauuuuuuggaaguu

SEQ ID NO: 413417 - RNA, 21 nt, Artificial Sequence
  Synthetic
aauugcaauuuuuuggaaguu

SEQ ID NO: 413418 - RNA, 22 nt, Artificial Sequence
  Synthetic
gaauugcaauuuuuuggaaguu

SEQ ID NO: 413419 - RNA, 23 nt, Artificial Sequence
  Synthetic
agaauugcaauuuuuuggaaguu

SEQ ID NO: 413420 - RNA, 24 nt, Artificial Sequence
  Synthetic
aagaauugcaauuuuuuggaaguu

SEQ ID NO: 413421 - RNA, 18 nt, Artificial Sequence
  Synthetic
aaugcaauaagugaaguu

SEQ ID NO: 413422 - RNA, 19 nt, Artificial Sequence
  Synthetic
gaaugcaauaagugaaguu

SEQ ID NO: 413423 - RNA, 20 nt, Artificial Sequence
  Synthetic
agaaugcaauaagugaaguu

SEQ ID NO: 413424 - RNA, 21 nt, Artificial Sequence
  Synthetic
cagaaugcaauaagugaaguu

SEQ ID NO: 413425 - RNA, 22 nt, Artificial Sequence
  Synthetic
ucagaaugcaauaagugaaguu

SEQ ID NO: 413426 - RNA, 23 nt, Artificial Sequence
  Synthetic
uucagaaugcaauaagugaaguu

SEQ ID NO: 413427 - RNA, 24 nt, Artificial Sequence
  Synthetic
auucagaaugcaauaagugaaguu

SEQ ID NO: 413428 - RNA, 18 nt, Artificial Sequence
  Synthetic
acacacaccagugaaguu

SEQ ID NO: 413429 - RNA, 19 nt, Artificial Sequence
  Synthetic
cacacacaccagugaaguu

SEQ ID NO: 413430 - RNA, 20 nt, Artificial Sequence
  Synthetic
acacacacaccagugaaguu

SEQ ID NO: 413431 - RNA, 21 nt, Artificial Sequence
  Synthetic
cacacacacaccagugaaguu

SEQ ID NO: 413432 - RNA, 22 nt, Artificial Sequence
  Synthetic
acacacacacaccagugaaguu

SEQ ID NO: 413433 - RNA, 23 nt, Artificial Sequence
  Synthetic
uacacacacacaccagugaaguu

SEQ ID NO: 413434 - RNA, 24 nt, Artificial Sequence
  Synthetic
uuacacacacacaccagugaaguu

SEQ ID NO: 413435 - RNA, 18 nt, Artificial Sequence
  Synthetic
augcuugaaaaauaaguu

SEQ ID NO: 413436 - RNA, 19 nt, Artificial Sequence
  Synthetic
aaugcuugaaaaauaaguu

SEQ ID NO: 413437 - RNA, 20 nt, Artificial Sequence
  Synthetic
aaaugcuugaaaaauaaguu

SEQ ID NO: 413438 - RNA, 21 nt, Artificial Sequence
  Synthetic
aaaaugcuugaaaaauaaguu

SEQ ID NO: 413439 - RNA, 22 nt, Artificial Sequence
  Synthetic
uaaaaugcuugaaaaauaaguu

SEQ ID NO: 413440 - RNA, 23 nt, Artificial Sequence
  Synthetic
uuaaaaugcuugaaaaauaaguu

SEQ ID NO: 413441 - RNA, 24 nt, Artificial Sequence
  Synthetic
uuuaaaaugcuugaaaaauaaguu

SEQ ID NO: 413442 - RNA, 18 nt, Artificial Sequence
  Synthetic
aaaaaugagaaauaaguu

SEQ ID NO: 413443 - RNA, 19 nt, Artificial Sequence
  Synthetic
caaaaaugagaaauaaguu

SEQ ID NO: 413444 - RNA, 20 nt, Artificial Sequence
  Synthetic
ccaaaaaugagaaauaaguu

SEQ ID NO: 413445 - RNA, 21 nt, Artificial Sequence
  Synthetic
uccaaaaaugagaaauaaguu

SEQ ID NO: 413446 - RNA, 22 nt, Artificial Sequence
  Synthetic
cuccaaaaaugagaaauaaguu

SEQ ID NO: 413447 - RNA, 23 nt, Artificial Sequence
  Synthetic
ucuccaaaaaugagaaauaaguu

SEQ ID NO: 413448 - RNA, 24 nt, Artificial Sequence
  Synthetic
uucuccaaaaaugagaaauaaguu

SEQ ID NO: 413449 - RNA, 18 nt, Artificial Sequence
  Synthetic
auaacaccagaauaaguu

SEQ ID NO: 413450 - RNA, 19 nt, Artificial Sequence
  Synthetic
aauaacaccagaauaaguu

SEQ ID NO: 413451 - RNA, 20 nt, Artificial Sequence
  Synthetic
caauaacaccagaauaaguu

SEQ ID NO: 413452 - RNA, 21 nt, Artificial Sequence
  Synthetic
ccaauaacaccagaauaaguu

SEQ ID NO: 413453 - RNA, 22 nt, Artificial Sequence
  Synthetic
gccaauaacaccagaauaaguu

SEQ ID NO: 413454 - RNA, 23 nt, Artificial Sequence
  Synthetic
ugccaauaacaccagaauaaguu

SEQ ID NO: 413455 - RNA, 24 nt, Artificial Sequence
  Synthetic
augccaauaacaccagaauaaguu

SEQ ID NO: 413456 - RNA, 18 nt, Artificial Sequence
  Synthetic
uaaauuuuaccauaaguu

SEQ ID NO: 413457 - RNA, 19 nt, Artificial Sequence
  Synthetic
uuaaauuuuaccauaaguu

SEQ ID NO: 413458 - RNA, 20 nt, Artificial Sequence
  Synthetic
auuaaauuuuaccauaaguu

SEQ ID NO: 413459 - RNA, 21 nt, Artificial Sequence
  Synthetic
aauuaaauuuuaccauaaguu

SEQ ID NO: 413460 - RNA, 22 nt, Artificial Sequence
  Synthetic
caauuaaauuuuaccauaaguu

SEQ ID NO: 413461 - RNA, 23 nt, Artificial Sequence
  Synthetic
gcaauuaaauuuuaccauaaguu

SEQ ID NO: 413462 - RNA, 24 nt, Artificial Sequence
  Synthetic
ggcaauuaaauuuuaccauaaguu

SEQ ID NO: 413463 - RNA, 18 nt, Artificial Sequence
  Synthetic
gccuuggaggcauaaguu

SEQ ID NO: 413464 - RNA, 19 nt, Artificial Sequence
  Synthetic
agccuuggaggcauaaguu

SEQ ID NO: 413465 - RNA, 20 nt, Artificial Sequence
  Synthetic
cagccuuggaggcauaaguu

SEQ ID NO: 413466 - RNA, 21 nt, Artificial Sequence
  Synthetic
acagccuuggaggcauaaguu

SEQ ID NO: 413467 - RNA, 22 nt, Artificial Sequence
  Synthetic
cacagccuuggaggcauaaguu

SEQ ID NO: 413468 - RNA, 23 nt, Artificial Sequence
  Synthetic
acacagccuuggaggcauaaguu

SEQ ID NO: 413469 - RNA, 24 nt, Artificial Sequence
  Synthetic
cacacagccuuggaggcauaaguu

SEQ ID NO: 413470 - RNA, 18 nt, Artificial Sequence
  Synthetic
uacaucaguggauaaguu

SEQ ID NO: 413471 - RNA, 19 nt, Artificial Sequence
  Synthetic
cuacaucaguggauaaguu

SEQ ID NO: 413472 - RNA, 20 nt, Artificial Sequence
  Synthetic
ucuacaucaguggauaaguu

SEQ ID NO: 413473 - RNA, 21 nt, Artificial Sequence
  Synthetic
uucuacaucaguggauaaguu

SEQ ID NO: 413474 - RNA, 22 nt, Artificial Sequence
  Synthetic
uuucuacaucaguggauaaguu

SEQ ID NO: 413475 - RNA, 23 nt, Artificial Sequence
  Synthetic
guuucuacaucaguggauaaguu

SEQ ID NO: 413476 - RNA, 24 nt, Artificial Sequence
  Synthetic
cguuucuacaucaguggauaaguu

SEQ ID NO: 413477 - RNA, 18 nt, Artificial Sequence
  Synthetic
uuaucucucauauaaguu

SEQ ID NO: 413478 - RNA, 19 nt, Artificial Sequence
  Synthetic
uuuaucucucauauaaguu

SEQ ID NO: 413479 - RNA, 20 nt, Artificial Sequence
  Synthetic
auuuaucucucauauaaguu

SEQ ID NO: 413480 - RNA, 21 nt, Artificial Sequence
  Synthetic
aauuuaucucucauauaaguu

SEQ ID NO: 413481 - RNA, 22 nt, Artificial Sequence
  Synthetic
aaauuuaucucucauauaaguu

SEQ ID NO: 413482 - RNA, 23 nt, Artificial Sequence
  Synthetic
caaauuuaucucucauauaaguu

SEQ ID NO: 413483 - RNA, 24 nt, Artificial Sequence
  Synthetic
ccaaauuuaucucucauauaaguu

SEQ ID NO: 413484 - RNA, 18 nt, Artificial Sequence
  Synthetic
uucccagucauauaaguu

SEQ ID NO: 413485 - RNA, 19 nt, Artificial Sequence
  Synthetic
uuucccagucauauaaguu

SEQ ID NO: 413486 - RNA, 20 nt, Artificial Sequence
  Synthetic
uuuucccagucauauaaguu

SEQ ID NO: 413487 - RNA, 21 nt, Artificial Sequence
  Synthetic
uuuuucccagucauauaaguu

SEQ ID NO: 413488 - RNA, 22 nt, Artificial Sequence
  Synthetic
cuuuuucccagucauauaaguu

SEQ ID NO: 413489 - RNA, 23 nt, Artificial Sequence
  Synthetic
ucuuuuucccagucauauaaguu

SEQ ID NO: 413490 - RNA, 24 nt, Artificial Sequence
  Synthetic
aucuuuuucccagucauauaaguu

SEQ ID NO: 413491 - RNA, 18 nt, Artificial Sequence
  Synthetic
guuagaccuuaguaaguu

SEQ ID NO: 413492 - RNA, 19 nt, Artificial Sequence
  Synthetic
aguuagaccuuaguaaguu

SEQ ID NO: 413493 - RNA, 20 nt, Artificial Sequence
  Synthetic
aaguuagaccuuaguaaguu

SEQ ID NO: 413494 - RNA, 21 nt, Artificial Sequence
  Synthetic
caaguuagaccuuaguaaguu

SEQ ID NO: 413495 - RNA, 22 nt, Artificial Sequence
  Synthetic
acaaguuagaccuuaguaaguu

SEQ ID NO: 413496 - RNA, 23 nt, Artificial Sequence
  Synthetic
uacaaguuagaccuuaguaaguu

SEQ ID NO: 413497 - RNA, 24 nt, Artificial Sequence
  Synthetic
uuacaaguuagaccuuaguaaguu

SEQ ID NO: 413498 - RNA, 18 nt, Artificial Sequence
  Synthetic
uucagauuaggguaaguu

SEQ ID NO: 413499 - RNA, 19 nt, Artificial Sequence
  Synthetic
auucagauuaggguaaguu

SEQ ID NO: 413500 - RNA, 20 nt, Artificial Sequence
  Synthetic
cauucagauuaggguaaguu

SEQ ID NO: 413501 - RNA, 21 nt, Artificial Sequence
  Synthetic
acauucagauuaggguaaguu

SEQ ID NO: 413502 - RNA, 22 nt, Artificial Sequence
  Synthetic
cacauucagauuaggguaaguu

SEQ ID NO: 413503 - RNA, 23 nt, Artificial Sequence
  Synthetic
gcacauucagauuaggguaaguu

SEQ ID NO: 413504 - RNA, 24 nt, Artificial Sequence
  Synthetic
ggcacauucagauuaggguaaguu

SEQ ID NO: 413505 - RNA, 18 nt, Artificial Sequence
  Synthetic
accagaacaguguaaguu

SEQ ID NO: 413506 - RNA, 19 nt, Artificial Sequence
  Synthetic
gaccagaacaguguaaguu

SEQ ID NO: 413507 - RNA, 20 nt, Artificial Sequence
  Synthetic
ugaccagaacaguguaaguu

SEQ ID NO: 413508 - RNA, 21 nt, Artificial Sequence
  Synthetic
augaccagaacaguguaaguu

SEQ ID NO: 413509 - RNA, 22 nt, Artificial Sequence
  Synthetic
uaugaccagaacaguguaaguu

SEQ ID NO: 413510 - RNA, 23 nt, Artificial Sequence
  Synthetic
uuaugaccagaacaguguaaguu

SEQ ID NO: 413511 - RNA, 24 nt, Artificial Sequence
  Synthetic
guuaugaccagaacaguguaaguu

SEQ ID NO: 413512 - RNA, 18 nt, Artificial Sequence
  Synthetic
ucuuccuguaauuaaguu

SEQ ID NO: 413513 - RNA, 19 nt, Artificial Sequence
  Synthetic
cucuuccuguaauuaaguu

SEQ ID NO: 413514 - RNA, 20 nt, Artificial Sequence
  Synthetic
ucucuuccuguaauuaaguu

SEQ ID NO: 413515 - RNA, 21 nt, Artificial Sequence
  Synthetic
aucucuuccuguaauuaaguu

SEQ ID NO: 413516 - RNA, 22 nt, Artificial Sequence
  Synthetic
caucucuuccuguaauuaaguu

SEQ ID NO: 413517 - RNA, 23 nt, Artificial Sequence
  Synthetic
ucaucucuuccuguaauuaaguu

SEQ ID NO: 413518 - RNA, 24 nt, Artificial Sequence
  Synthetic
aucaucucuuccuguaauuaaguu

SEQ ID NO: 413519 - RNA, 18 nt, Artificial Sequence
  Synthetic
uuuaauuauacuuaaguu

SEQ ID NO: 413520 - RNA, 19 nt, Artificial Sequence
  Synthetic
uuuuaauuauacuuaaguu

SEQ ID NO: 413521 - RNA, 20 nt, Artificial Sequence
  Synthetic
uuuuuaauuauacuuaaguu

SEQ ID NO: 413522 - RNA, 21 nt, Artificial Sequence
  Synthetic
uuuuuuaauuauacuuaaguu

SEQ ID NO: 413523 - RNA, 22 nt, Artificial Sequence
  Synthetic
uuuuuuuaauuauacuuaaguu

SEQ ID NO: 413524 - RNA, 23 nt, Artificial Sequence
  Synthetic
uuuuuuuuaauuauacuuaaguu

SEQ ID NO: 413525 - RNA, 24 nt, Artificial Sequence
  Synthetic
uuuuuuuuuaauuauacuuaaguu

SEQ ID NO: 413526 - RNA, 18 nt, Artificial Sequence
  Synthetic
auauaugaaucuuaaguu

SEQ ID NO: 413527 - RNA, 19 nt, Artificial Sequence
  Synthetic
gauauaugaaucuuaaguu

SEQ ID NO: 413528 - RNA, 20 nt, Artificial Sequence
  Synthetic
ggauauaugaaucuuaaguu

SEQ ID NO: 413529 - RNA, 21 nt, Artificial Sequence
  Synthetic
uggauauaugaaucuuaaguu

SEQ ID NO: 413530 - RNA, 22 nt, Artificial Sequence
  Synthetic
cuggauauaugaaucuuaaguu

SEQ ID NO: 413531 - RNA, 23 nt, Artificial Sequence
  Synthetic
gcuggauauaugaaucuuaaguu

SEQ ID NO: 413532 - RNA, 24 nt, Artificial Sequence
  Synthetic
agcuggauauaugaaucuuaaguu

SEQ ID NO: 413533 - RNA, 18 nt, Artificial Sequence
  Synthetic
ugaaguugcaguuaaguu

SEQ ID NO: 413534 - RNA, 19 nt, Artificial Sequence
  Synthetic
uugaaguugcaguuaaguu

SEQ ID NO: 413535 - RNA, 20 nt, Artificial Sequence
  Synthetic
uuugaaguugcaguuaaguu

SEQ ID NO: 413536 - RNA, 21 nt, Artificial Sequence
  Synthetic
uuuugaaguugcaguuaaguu

SEQ ID NO: 413537 - RNA, 22 nt, Artificial Sequence
  Synthetic
auuuugaaguugcaguuaaguu

SEQ ID NO: 413538 - RNA, 23 nt, Artificial Sequence
  Synthetic
aauuuugaaguugcaguuaaguu

SEQ ID NO: 413539 - RNA, 24 nt, Artificial Sequence
  Synthetic
aaauuuugaaguugcaguuaaguu

SEQ ID NO: 413540 - RNA, 18 nt, Artificial Sequence
  Synthetic
auuauuauacuuuaaguu

SEQ ID NO: 413541 - RNA, 19 nt, Artificial Sequence
  Synthetic
cauuauuauacuuuaaguu

SEQ ID NO: 413542 - RNA, 20 nt, Artificial Sequence
  Synthetic
ucauuauuauacuuuaaguu

SEQ ID NO: 413543 - RNA, 21 nt, Artificial Sequence
  Synthetic
uucauuauuauacuuuaaguu

SEQ ID NO: 413544 - RNA, 22 nt, Artificial Sequence
  Synthetic
uuucauuauuauacuuuaaguu

SEQ ID NO: 413545 - RNA, 23 nt, Artificial Sequence
  Synthetic
uuuucauuauuauacuuuaaguu

SEQ ID NO: 413546 - RNA, 24 nt, Artificial Sequence
  Synthetic
uuuuucauuauuauacuuuaaguu

SEQ ID NO: 413547 - RNA, 19 nt, Artificial Sequence
  Synthetic
uauuauuauacuuuaaguu

SEQ ID NO: 413548 - RNA, 20 nt, Artificial Sequence
  Synthetic
uuauuauuauacuuuaaguu

SEQ ID NO: 413549 - RNA, 21 nt, Artificial Sequence
  Synthetic
uuuauuauuauacuuuaaguu

SEQ ID NO: 413550 - RNA, 22 nt, Artificial Sequence
  Synthetic
uuuuauuauuauacuuuaaguu

SEQ ID NO: 413551 - RNA, 23 nt, Artificial Sequence
  Synthetic
uuuuuauuauuauacuuuaaguu

SEQ ID NO: 413552 - RNA, 24 nt, Artificial Sequence
  Synthetic
uuuuuuauuauuauacuuuaaguu

SEQ ID NO: 413553 - RNA, 18 nt, Artificial Sequence
  Synthetic
uuaauuuuacuuuaaguu

SEQ ID NO: 413554 - RNA, 19 nt, Artificial Sequence
  Synthetic
uuuaauuuuacuuuaaguu

SEQ ID NO: 413555 - RNA, 20 nt, Artificial Sequence
  Synthetic
uuuuaauuuuacuuuaaguu

SEQ ID NO: 413556 - RNA, 21 nt, Artificial Sequence
  Synthetic
uuuuuaauuuuacuuuaaguu

SEQ ID NO: 413557 - RNA, 22 nt, Artificial Sequence
  Synthetic
uuuuuuaauuuuacuuuaaguu

SEQ ID NO: 413558 - RNA, 23 nt, Artificial Sequence
  Synthetic
guuuuuuaauuuuacuuuaaguu

SEQ ID NO: 413559 - RNA, 24 nt, Artificial Sequence
  Synthetic
aguuuuuuaauuuuacuuuaaguu

SEQ ID NO: 413560 - RNA, 18 nt, Artificial Sequence
  Synthetic
uaacuuuuauuuuaaguu

SEQ ID NO: 413561 - RNA, 19 nt, Artificial Sequence
  Synthetic
uuaacuuuuauuuuaaguu

SEQ ID NO: 413562 - RNA, 20 nt, Artificial Sequence
  Synthetic
cuuaacuuuuauuuuaaguu

SEQ ID NO: 413563 - RNA, 21 nt, Artificial Sequence
  Synthetic
ucuuaacuuuuauuuuaaguu

SEQ ID NO: 413564 - RNA, 22 nt, Artificial Sequence
  Synthetic
uucuuaacuuuuauuuuaaguu

SEQ ID NO: 413565 - RNA, 23 nt, Artificial Sequence
  Synthetic
uuucuuaacuuuuauuuuaaguu

SEQ ID NO: 413566 - RNA, 24 nt, Artificial Sequence
  Synthetic
uuuucuuaacuuuuauuuuaaguu

SEQ ID NO: 413567 - RNA, 18 nt, Artificial Sequence
  Synthetic
uuuuuucacuuuuaaguu

SEQ ID NO: 413568 - RNA, 19 nt, Artificial Sequence
  Synthetic
auuuuuucacuuuuaaguu

SEQ ID NO: 413569 - RNA, 20 nt, Artificial Sequence
  Synthetic
uauuuuuucacuuuuaaguu

SEQ ID NO: 413570 - RNA, 21 nt, Artificial Sequence
  Synthetic
uuauuuuuucacuuuuaaguu

SEQ ID NO: 413571 - RNA, 22 nt, Artificial Sequence
  Synthetic
uuuauuuuuucacuuuuaaguu

SEQ ID NO: 413572 - RNA, 23 nt, Artificial Sequence
  Synthetic
uuuuauuuuuucacuuuuaaguu

SEQ ID NO: 413573 - RNA, 24 nt, Artificial Sequence
  Synthetic
uuuuuauuuuuucacuuuuaaguu

SEQ ID NO: 413574 - RNA, 18 nt, Artificial Sequence
  Synthetic
acaacuuugaaaacaguu

SEQ ID NO: 413575 - RNA, 19 nt, Artificial Sequence
  Synthetic
aacaacuuugaaaacaguu

SEQ ID NO: 413576 - RNA, 20 nt, Artificial Sequence
  Synthetic
aaacaacuuugaaaacaguu

SEQ ID NO: 413577 - RNA, 21 nt, Artificial Sequence
  Synthetic
gaaacaacuuugaaaacaguu

SEQ ID NO: 413578 - RNA, 22 nt, Artificial Sequence
  Synthetic
ugaaacaacuuugaaaacaguu

SEQ ID NO: 413579 - RNA, 23 nt, Artificial Sequence
  Synthetic
gugaaacaacuuugaaaacaguu

SEQ ID NO: 413580 - RNA, 24 nt, Artificial Sequence
  Synthetic
ggugaaacaacuuugaaaacaguu

SEQ ID NO: 413581 - RNA, 18 nt, Artificial Sequence
  Synthetic
ucaagauggcaaacaguu

SEQ ID NO: 413582 - RNA, 19 nt, Artificial Sequence
  Synthetic
uucaagauggcaaacaguu

SEQ ID NO: 413583 - RNA, 20 nt, Artificial Sequence
  Synthetic
auucaagauggcaaacaguu

SEQ ID NO: 413584 - RNA, 21 nt, Artificial Sequence
  Synthetic
aauucaagauggcaaacaguu

SEQ ID NO: 413585 - RNA, 22 nt, Artificial Sequence
  Synthetic
gaauucaagauggcaaacaguu

SEQ ID NO: 413586 - RNA, 23 nt, Artificial Sequence
  Synthetic
agaauucaagauggcaaacaguu

SEQ ID NO: 413587 - RNA, 24 nt, Artificial Sequence
  Synthetic
cagaauucaagauggcaaacaguu

SEQ ID NO: 413588 - RNA, 18 nt, Artificial Sequence
  Synthetic
uucugagcagaaacaguu

SEQ ID NO: 413589 - RNA, 19 nt, Artificial Sequence
  Synthetic
uuucugagcagaaacaguu

SEQ ID NO: 413590 - RNA, 20 nt, Artificial Sequence
  Synthetic
cuuucugagcagaaacaguu

SEQ ID NO: 413591 - RNA, 21 nt, Artificial Sequence
  Synthetic
ucuuucugagcagaaacaguu

SEQ ID NO: 413592 - RNA, 22 nt, Artificial Sequence
  Synthetic
uucuuucugagcagaaacaguu

SEQ ID NO: 413593 - RNA, 23 nt, Artificial Sequence
  Synthetic
cuucuuucugagcagaaacaguu

SEQ ID NO: 413594 - RNA, 24 nt, Artificial Sequence
  Synthetic
acuucuuucugagcagaaacaguu

SEQ ID NO: 413595 - RNA, 18 nt, Artificial Sequence
  Synthetic
gucugagaugaaacaguu

SEQ ID NO: 413596 - RNA, 19 nt, Artificial Sequence
  Synthetic
agucugagaugaaacaguu

SEQ ID NO: 413597 - RNA, 20 nt, Artificial Sequence
  Synthetic
gagucugagaugaaacaguu

SEQ ID NO: 413598 - RNA, 21 nt, Artificial Sequence
  Synthetic
agagucugagaugaaacaguu

SEQ ID NO: 413599 - RNA, 22 nt, Artificial Sequence
  Synthetic
aagagucugagaugaaacaguu

SEQ ID NO: 413600 - RNA, 23 nt, Artificial Sequence
  Synthetic
aaagagucugagaugaaacaguu

SEQ ID NO: 413601 - RNA, 24 nt, Artificial Sequence
  Synthetic
gaaagagucugagaugaaacaguu

SEQ ID NO: 413602 - RNA, 18 nt, Artificial Sequence
  Synthetic
uuauggguuucaacaguu

SEQ ID NO: 413603 - RNA, 19 nt, Artificial Sequence
  Synthetic
auuauggguuucaacaguu

SEQ ID NO: 413604 - RNA, 20 nt, Artificial Sequence
  Synthetic
aauuauggguuucaacaguu

SEQ ID NO: 413605 - RNA, 21 nt, Artificial Sequence
  Synthetic
aaauuauggguuucaacaguu

SEQ ID NO: 413606 - RNA, 22 nt, Artificial Sequence
  Synthetic
aaaauuauggguuucaacaguu

SEQ ID NO: 413607 - RNA, 23 nt, Artificial Sequence
  Synthetic
caaaauuauggguuucaacaguu

SEQ ID NO: 413608 - RNA, 24 nt, Artificial Sequence
  Synthetic
ucaaaauuauggguuucaacaguu

SEQ ID NO: 413609 - RNA, 18 nt, Artificial Sequence
  Synthetic
gcacagguuggaacaguu

SEQ ID NO: 413610 - RNA, 19 nt, Artificial Sequence
  Synthetic
ggcacagguuggaacaguu

SEQ ID NO: 413611 - RNA, 20 nt, Artificial Sequence
  Synthetic
aggcacagguuggaacaguu

SEQ ID NO: 413612 - RNA, 21 nt, Artificial Sequence
  Synthetic
gaggcacagguuggaacaguu

SEQ ID NO: 413613 - RNA, 22 nt, Artificial Sequence
  Synthetic
agaggcacagguuggaacaguu

SEQ ID NO: 413614 - RNA, 23 nt, Artificial Sequence
  Synthetic
aagaggcacagguuggaacaguu

SEQ ID NO: 413615 - RNA, 24 nt, Artificial Sequence
  Synthetic
uaagaggcacagguuggaacaguu

SEQ ID NO: 413616 - RNA, 18 nt, Artificial Sequence
  Synthetic
ucauaacuuugaacaguu

SEQ ID NO: 413617 - RNA, 19 nt, Artificial Sequence
  Synthetic
uucauaacuuugaacaguu

SEQ ID NO: 413618 - RNA, 20 nt, Artificial Sequence
  Synthetic
uuucauaacuuugaacaguu

SEQ ID NO: 413619 - RNA, 21 nt, Artificial Sequence
  Synthetic
auuucauaacuuugaacaguu

SEQ ID NO: 413620 - RNA, 22 nt, Artificial Sequence
  Synthetic
cauuucauaacuuugaacaguu

SEQ ID NO: 413621 - RNA, 23 nt, Artificial Sequence
  Synthetic
ccauuucauaacuuugaacaguu

SEQ ID NO: 413622 - RNA, 24 nt, Artificial Sequence
  Synthetic
cccauuucauaacuuugaacaguu

SEQ ID NO: 413623 - RNA, 18 nt, Artificial Sequence
  Synthetic
uaaguagagguaacaguu

SEQ ID NO: 413624 - RNA, 19 nt, Artificial Sequence
  Synthetic
uuaaguagagguaacaguu

SEQ ID NO: 413625 - RNA, 20 nt, Artificial Sequence
  Synthetic
auuaaguagagguaacaguu

SEQ ID NO: 413626 - RNA, 21 nt, Artificial Sequence
  Synthetic
gauuaaguagagguaacaguu

SEQ ID NO: 413627 - RNA, 22 nt, Artificial Sequence
  Synthetic
ggauuaaguagagguaacaguu

SEQ ID NO: 413628 - RNA, 23 nt, Artificial Sequence
  Synthetic
gggauuaaguagagguaacaguu

SEQ ID NO: 413629 - RNA, 24 nt, Artificial Sequence
  Synthetic
ugggauuaaguagagguaacaguu

SEQ ID NO: 413630 - RNA, 18 nt, Artificial Sequence
  Synthetic
acauuauaauuaacaguu

SEQ ID NO: 413631 - RNA, 19 nt, Artificial Sequence
  Synthetic
cacauuauaauuaacaguu

SEQ ID NO: 413632 - RNA, 20 nt, Artificial Sequence
  Synthetic
acacauuauaauuaacaguu

SEQ ID NO: 413633 - RNA, 21 nt, Artificial Sequence
  Synthetic
aacacauuauaauuaacaguu

SEQ ID NO: 413634 - RNA, 22 nt, Artificial Sequence
  Synthetic
uaacacauuauaauuaacaguu

SEQ ID NO: 413635 - RNA, 23 nt, Artificial Sequence
  Synthetic
guaacacauuauaauuaacaguu

SEQ ID NO: 413636 - RNA, 24 nt, Artificial Sequence
  Synthetic
uguaacacauuauaauuaacaguu

SEQ ID NO: 413637 - RNA, 18 nt, Artificial Sequence
  Synthetic
ggacugucuaacacaguu

SEQ ID NO: 413638 - RNA, 19 nt, Artificial Sequence
  Synthetic
aggacugucuaacacaguu

SEQ ID NO: 413639 - RNA, 20 nt, Artificial Sequence
  Synthetic
caggacugucuaacacaguu

SEQ ID NO: 413640 - RNA, 21 nt, Artificial Sequence
  Synthetic
gcaggacugucuaacacaguu

SEQ ID NO: 413641 - RNA, 22 nt, Artificial Sequence
  Synthetic
agcaggacugucuaacacaguu

SEQ ID NO: 413642 - RNA, 23 nt, Artificial Sequence
  Synthetic
aagcaggacugucuaacacaguu

SEQ ID NO: 413643 - RNA, 24 nt, Artificial Sequence
  Synthetic
aaagcaggacugucuaacacaguu

SEQ ID NO: 413644 - RNA, 18 nt, Artificial Sequence
  Synthetic
aauaaauuuaacacaguu

SEQ ID NO: 413645 - RNA, 19 nt, Artificial Sequence
  Synthetic
aaauaaauuuaacacaguu

SEQ ID NO: 413646 - RNA, 20 nt, Artificial Sequence
  Synthetic
aaaauaaauuuaacacaguu

SEQ ID NO: 413647 - RNA, 21 nt, Artificial Sequence
  Synthetic
gaaaauaaauuuaacacaguu

SEQ ID NO: 413648 - RNA, 22 nt, Artificial Sequence
  Synthetic
agaaaauaaauuuaacacaguu

SEQ ID NO: 413649 - RNA, 23 nt, Artificial Sequence
  Synthetic
gagaaaauaaauuuaacacaguu

SEQ ID NO: 413650 - RNA, 24 nt, Artificial Sequence
  Synthetic
ggagaaaauaaauuuaacacaguu

SEQ ID NO: 413651 - RNA, 18 nt, Artificial Sequence
  Synthetic
uguggaccagacacaguu

SEQ ID NO: 413652 - RNA, 19 nt, Artificial Sequence
  Synthetic
auguggaccagacacaguu

SEQ ID NO: 413653 - RNA, 20 nt, Artificial Sequence
  Synthetic
aauguggaccagacacaguu

SEQ ID NO: 413654 - RNA, 21 nt, Artificial Sequence
  Synthetic
caauguggaccagacacaguu

SEQ ID NO: 413655 - RNA, 22 nt, Artificial Sequence
  Synthetic
acaauguggaccagacacaguu

SEQ ID NO: 413656 - RNA, 23 nt, Artificial Sequence
  Synthetic
uacaauguggaccagacacaguu

SEQ ID NO: 413657 - RNA, 24 nt, Artificial Sequence
  Synthetic
auacaauguggaccagacacaguu

SEQ ID NO: 413658 - RNA, 18 nt, Artificial Sequence
  Synthetic
ugagucucagacacaguu

SEQ ID NO: 413659 - RNA, 19 nt, Artificial Sequence
  Synthetic
gugagucucagacacaguu

SEQ ID NO: 413660 - RNA, 20 nt, Artificial Sequence
  Synthetic
agugagucucagacacaguu

SEQ ID NO: 413661 - RNA, 21 nt, Artificial Sequence
  Synthetic
aagugagucucagacacaguu

SEQ ID NO: 413662 - RNA, 22 nt, Artificial Sequence
  Synthetic
uaagugagucucagacacaguu

SEQ ID NO: 413663 - RNA, 23 nt, Artificial Sequence
  Synthetic
auaagugagucucagacacaguu

SEQ ID NO: 413664 - RNA, 24 nt, Artificial Sequence
  Synthetic
gauaagugagucucagacacaguu

SEQ ID NO: 413665 - RNA, 18 nt, Artificial Sequence
  Synthetic
ggguucuacugcacaguu

SEQ ID NO: 413666 - RNA, 19 nt, Artificial Sequence
  Synthetic
aggguucuacugcacaguu

SEQ ID NO: 413667 - RNA, 20 nt, Artificial Sequence
  Synthetic
aaggguucuacugcacaguu

SEQ ID NO: 413668 - RNA, 21 nt, Artificial Sequence
  Synthetic
aaaggguucuacugcacaguu

SEQ ID NO: 413669 - RNA, 22 nt, Artificial Sequence
  Synthetic
gaaaggguucuacugcacaguu

SEQ ID NO: 413670 - RNA, 23 nt, Artificial Sequence
  Synthetic
ugaaaggguucuacugcacaguu

SEQ ID NO: 413671 - RNA, 24 nt, Artificial Sequence
  Synthetic
augaaaggguucuacugcacaguu

SEQ ID NO: 413672 - RNA, 18 nt, Artificial Sequence
  Synthetic
aaaaaugaccucacaguu

SEQ ID NO: 413673 - RNA, 19 nt, Artificial Sequence
  Synthetic
aaaaaaugaccucacaguu

SEQ ID NO: 413674 - RNA, 20 nt, Artificial Sequence
  Synthetic
caaaaaaugaccucacaguu

SEQ ID NO: 413675 - RNA, 21 nt, Artificial Sequence
  Synthetic
ucaaaaaaugaccucacaguu

SEQ ID NO: 413676 - RNA, 22 nt, Artificial Sequence
  Synthetic
cucaaaaaaugaccucacaguu

SEQ ID NO: 413677 - RNA, 23 nt, Artificial Sequence
  Synthetic
gcucaaaaaaugaccucacaguu

SEQ ID NO: 413678 - RNA, 24 nt, Artificial Sequence
  Synthetic
ggcucaaaaaaugaccucacaguu

SEQ ID NO: 413679 - RNA, 18 nt, Artificial Sequence
  Synthetic
auguauuggcucacaguu

SEQ ID NO: 413680 - RNA, 19 nt, Artificial Sequence
  Synthetic
aauguauuggcucacaguu

SEQ ID NO: 413681 - RNA, 20 nt, Artificial Sequence
  Synthetic
aaauguauuggcucacaguu

SEQ ID NO: 413682 - RNA, 21 nt, Artificial Sequence
  Synthetic
aaaauguauuggcucacaguu

SEQ ID NO: 413683 - RNA, 22 nt, Artificial Sequence
  Synthetic
aaaaauguauuggcucacaguu

SEQ ID NO: 413684 - RNA, 23 nt, Artificial Sequence
  Synthetic
caaaaauguauuggcucacaguu

SEQ ID NO: 413685 - RNA, 24 nt, Artificial Sequence
  Synthetic
acaaaaauguauuggcucacaguu

SEQ ID NO: 413686 - RNA, 18 nt, Artificial Sequence
  Synthetic
aucuuauuucucacaguu

SEQ ID NO: 413687 - RNA, 19 nt, Artificial Sequence
  Synthetic
aaucuuauuucucacaguu

SEQ ID NO: 413688 - RNA, 20 nt, Artificial Sequence
  Synthetic
gaaucuuauuucucacaguu

SEQ ID NO: 413689 - RNA, 21 nt, Artificial Sequence
  Synthetic
agaaucuuauuucucacaguu

SEQ ID NO: 413690 - RNA, 22 nt, Artificial Sequence
  Synthetic
cagaaucuuauuucucacaguu

SEQ ID NO: 413691 - RNA, 23 nt, Artificial Sequence
  Synthetic
acagaaucuuauuucucacaguu

SEQ ID NO: 413692 - RNA, 24 nt, Artificial Sequence
  Synthetic
aacagaaucuuauuucucacaguu

SEQ ID NO: 413693 - RNA, 18 nt, Artificial Sequence
  Synthetic
caucuccaagucacaguu

SEQ ID NO: 413694 - RNA, 19 nt, Artificial Sequence
  Synthetic
ucaucuccaagucacaguu

SEQ ID NO: 413695 - RNA, 20 nt, Artificial Sequence
  Synthetic
aucaucuccaagucacaguu

SEQ ID NO: 413696 - RNA, 21 nt, Artificial Sequence
  Synthetic
gaucaucuccaagucacaguu

SEQ ID NO: 413697 - RNA, 22 nt, Artificial Sequence
  Synthetic
ugaucaucuccaagucacaguu

SEQ ID NO: 413698 - RNA, 23 nt, Artificial Sequence
  Synthetic
augaucaucuccaagucacaguu

SEQ ID NO: 413699 - RNA, 24 nt, Artificial Sequence
  Synthetic
aaugaucaucuccaagucacaguu

SEQ ID NO: 413700 - RNA, 18 nt, Artificial Sequence
  Synthetic
uccccauaagauacaguu

SEQ ID NO: 413701 - RNA, 19 nt, Artificial Sequence
  Synthetic
auccccauaagauacaguu

SEQ ID NO: 413702 - RNA, 20 nt, Artificial Sequence
  Synthetic
aauccccauaagauacaguu

SEQ ID NO: 413703 - RNA, 21 nt, Artificial Sequence
  Synthetic
gaauccccauaagauacaguu

SEQ ID NO: 413704 - RNA, 22 nt, Artificial Sequence
  Synthetic
ugaauccccauaagauacaguu

SEQ ID NO: 413705 - RNA, 23 nt, Artificial Sequence
  Synthetic
uugaauccccauaagauacaguu

SEQ ID NO: 413706 - RNA, 24 nt, Artificial Sequence
  Synthetic
guugaauccccauaagauacaguu

SEQ ID NO: 413707 - RNA, 18 nt, Artificial Sequence
  Synthetic
auuggaaauuauacaguu

SEQ ID NO: 413708 - RNA, 19 nt, Artificial Sequence
  Synthetic
gauuggaaauuauacaguu

SEQ ID NO: 413709 - RNA, 20 nt, Artificial Sequence
  Synthetic
agauuggaaauuauacaguu

SEQ ID NO: 413710 - RNA, 21 nt, Artificial Sequence
  Synthetic
aagauuggaaauuauacaguu

SEQ ID NO: 413711 - RNA, 22 nt, Artificial Sequence
  Synthetic
aaagauuggaaauuauacaguu

SEQ ID NO: 413712 - RNA, 23 nt, Artificial Sequence
  Synthetic
aaaagauuggaaauuauacaguu

SEQ ID NO: 413713 - RNA, 24 nt, Artificial Sequence
  Synthetic
uaaaagauuggaaauuauacaguu

SEQ ID NO: 413714 - RNA, 18 nt, Artificial Sequence
  Synthetic
agcuucuccacuacaguu

SEQ ID NO: 413715 - RNA, 19 nt, Artificial Sequence
  Synthetic
uagcuucuccacuacaguu

SEQ ID NO: 413716 - RNA, 20 nt, Artificial Sequence
  Synthetic
guagcuucuccacuacaguu

SEQ ID NO: 413717 - RNA, 21 nt, Artificial Sequence
  Synthetic
uguagcuucuccacuacaguu

SEQ ID NO: 413718 - RNA, 22 nt, Artificial Sequence
  Synthetic
uuguagcuucuccacuacaguu

SEQ ID NO: 413719 - RNA, 23 nt, Artificial Sequence
  Synthetic
cuuguagcuucuccacuacaguu

SEQ ID NO: 413720 - RNA, 24 nt, Artificial Sequence
  Synthetic
ucuuguagcuucuccacuacaguu

SEQ ID NO: 413721 - RNA, 18 nt, Artificial Sequence
  Synthetic
caacuaaauuguacaguu

SEQ ID NO: 413722 - RNA, 19 nt, Artificial Sequence
  Synthetic
ucaacuaaauuguacaguu

SEQ ID NO: 413723 - RNA, 20 nt, Artificial Sequence
  Synthetic
cucaacuaaauuguacaguu

SEQ ID NO: 413724 - RNA, 21 nt, Artificial Sequence
  Synthetic
ucucaacuaaauuguacaguu

SEQ ID NO: 413725 - RNA, 22 nt, Artificial Sequence
  Synthetic
uucucaacuaaauuguacaguu

SEQ ID NO: 413726 - RNA, 23 nt, Artificial Sequence
  Synthetic
cuucucaacuaaauuguacaguu

SEQ ID NO: 413727 - RNA, 24 nt, Artificial Sequence
  Synthetic
gcuucucaacuaaauuguacaguu

SEQ ID NO: 413728 - RNA, 18 nt, Artificial Sequence
  Synthetic
gucuguugucuuacaguu

SEQ ID NO: 413729 - RNA, 19 nt, Artificial Sequence
  Synthetic
agucuguugucuuacaguu

SEQ ID NO: 413730 - RNA, 20 nt, Artificial Sequence
  Synthetic
aagucuguugucuuacaguu

SEQ ID NO: 413731 - RNA, 21 nt, Artificial Sequence
  Synthetic
gaagucuguugucuuacaguu

SEQ ID NO: 413732 - RNA, 22 nt, Artificial Sequence
  Synthetic
agaagucuguugucuuacaguu

SEQ ID NO: 413733 - RNA, 23 nt, Artificial Sequence
  Synthetic
aagaagucuguugucuuacaguu

SEQ ID NO: 413734 - RNA, 24 nt, Artificial Sequence
  Synthetic
aaagaagucuguugucuuacaguu

SEQ ID NO: 413735 - RNA, 18 nt, Artificial Sequence
  Synthetic
aguuuacuucuuacaguu

SEQ ID NO: 413736 - RNA, 19 nt, Artificial Sequence
  Synthetic
gaguuuacuucuuacaguu

SEQ ID NO: 413737 - RNA, 20 nt, Artificial Sequence
  Synthetic
ggaguuuacuucuuacaguu

SEQ ID NO: 413738 - RNA, 21 nt, Artificial Sequence
  Synthetic
aggaguuuacuucuuacaguu

SEQ ID NO: 413739 - RNA, 22 nt, Artificial Sequence
  Synthetic
aaggaguuuacuucuuacaguu

SEQ ID NO: 413740 - RNA, 23 nt, Artificial Sequence
  Synthetic
aaaggaguuuacuucuuacaguu

SEQ ID NO: 413741 - RNA, 24 nt, Artificial Sequence
  Synthetic
aaaaggaguuuacuucuuacaguu

SEQ ID NO: 413742 - RNA, 18 nt, Artificial Sequence
  Synthetic
uaacuagaauaaccaguu

SEQ ID NO: 413743 - RNA, 19 nt, Artificial Sequence
  Synthetic
cuaacuagaauaaccaguu

SEQ ID NO: 413744 - RNA, 20 nt, Artificial Sequence
  Synthetic
gcuaacuagaauaaccaguu

SEQ ID NO: 413745 - RNA, 21 nt, Artificial Sequence
  Synthetic
ugcuaacuagaauaaccaguu

SEQ ID NO: 413746 - RNA, 22 nt, Artificial Sequence
  Synthetic
uugcuaacuagaauaaccaguu

SEQ ID NO: 413747 - RNA, 23 nt, Artificial Sequence
  Synthetic
auugcuaacuagaauaaccaguu

SEQ ID NO: 413748 - RNA, 24 nt, Artificial Sequence
  Synthetic
aauugcuaacuagaauaaccaguu

SEQ ID NO: 413749 - RNA, 18 nt, Artificial Sequence
  Synthetic
gaacaucacacaccaguu

SEQ ID NO: 413750 - RNA, 19 nt, Artificial Sequence
  Synthetic
ggaacaucacacaccaguu

SEQ ID NO: 413751 - RNA, 20 nt, Artificial Sequence
  Synthetic
gggaacaucacacaccaguu

SEQ ID NO: 413752 - RNA, 21 nt, Artificial Sequence
  Synthetic
ggggaacaucacacaccaguu

SEQ ID NO: 413753 - RNA, 22 nt, Artificial Sequence
  Synthetic
aggggaacaucacacaccaguu

SEQ ID NO: 413754 - RNA, 23 nt, Artificial Sequence
  Synthetic
gaggggaacaucacacaccaguu

SEQ ID NO: 413755 - RNA, 24 nt, Artificial Sequence
  Synthetic
ggaggggaacaucacacaccaguu

SEQ ID NO: 413756 - RNA, 18 nt, Artificial Sequence
  Synthetic
auuuuauuacucccaguu

SEQ ID NO: 413757 - RNA, 19 nt, Artificial Sequence
  Synthetic
aauuuuauuacucccaguu

SEQ ID NO: 413758 - RNA, 20 nt, Artificial Sequence
  Synthetic
aaauuuuauuacucccaguu

SEQ ID NO: 413759 - RNA, 21 nt, Artificial Sequence
  Synthetic
uaaauuuuauuacucccaguu

SEQ ID NO: 413760 - RNA, 22 nt, Artificial Sequence
  Synthetic
cuaaauuuuauuacucccaguu

SEQ ID NO: 413761 - RNA, 23 nt, Artificial Sequence
  Synthetic
acuaaauuuuauuacucccaguu

SEQ ID NO: 413762 - RNA, 24 nt, Artificial Sequence
  Synthetic
uacuaaauuuuauuacucccaguu

SEQ ID NO: 413763 - RNA, 18 nt, Artificial Sequence
  Synthetic
ucauguucccucccaguu

SEQ ID NO: 413764 - RNA, 19 nt, Artificial Sequence
  Synthetic
cucauguucccucccaguu

SEQ ID NO: 413765 - RNA, 20 nt, Artificial Sequence
  Synthetic
ucucauguucccucccaguu

SEQ ID NO: 413766 - RNA, 21 nt, Artificial Sequence
  Synthetic
cucucauguucccucccaguu

SEQ ID NO: 413767 - RNA, 22 nt, Artificial Sequence
  Synthetic
ccucucauguucccucccaguu

SEQ ID NO: 413768 - RNA, 23 nt, Artificial Sequence
  Synthetic
cccucucauguucccucccaguu

SEQ ID NO: 413769 - RNA, 24 nt, Artificial Sequence
  Synthetic
ccccucucauguucccucccaguu

SEQ ID NO: 413770 - RNA, 18 nt, Artificial Sequence
  Synthetic
aaaauuaagaagccaguu

SEQ ID NO: 413771 - RNA, 19 nt, Artificial Sequence
  Synthetic
gaaaauuaagaagccaguu

SEQ ID NO: 413772 - RNA, 20 nt, Artificial Sequence
  Synthetic
agaaaauuaagaagccaguu

SEQ ID NO: 413773 - RNA, 21 nt, Artificial Sequence
  Synthetic
uagaaaauuaagaagccaguu

SEQ ID NO: 413774 - RNA, 22 nt, Artificial Sequence
  Synthetic
uuagaaaauuaagaagccaguu

SEQ ID NO: 413775 - RNA, 23 nt, Artificial Sequence
  Synthetic
uuuagaaaauuaagaagccaguu

SEQ ID NO: 413776 - RNA, 24 nt, Artificial Sequence
  Synthetic
uuuuagaaaauuaagaagccaguu

SEQ ID NO: 413777 - RNA, 18 nt, Artificial Sequence
  Synthetic
ccaauaauuaagccaguu

SEQ ID NO: 413778 - RNA, 19 nt, Artificial Sequence
  Synthetic
gccaauaauuaagccaguu

SEQ ID NO: 413779 - RNA, 20 nt, Artificial Sequence
  Synthetic
agccaauaauuaagccaguu

SEQ ID NO: 413780 - RNA, 21 nt, Artificial Sequence
  Synthetic
aagccaauaauuaagccaguu

SEQ ID NO: 413781 - RNA, 22 nt, Artificial Sequence
  Synthetic
gaagccaauaauuaagccaguu

SEQ ID NO: 413782 - RNA, 23 nt, Artificial Sequence
  Synthetic
agaagccaauaauuaagccaguu

SEQ ID NO: 413783 - RNA, 24 nt, Artificial Sequence
  Synthetic
aagaagccaauaauuaagccaguu

SEQ ID NO: 413784 - RNA, 18 nt, Artificial Sequence
  Synthetic
aguacagaucauccaguu

SEQ ID NO: 413785 - RNA, 19 nt, Artificial Sequence
  Synthetic
gaguacagaucauccaguu

SEQ ID NO: 413786 - RNA, 20 nt, Artificial Sequence
  Synthetic
ugaguacagaucauccaguu

SEQ ID NO: 413787 - RNA, 21 nt, Artificial Sequence
  Synthetic
gugaguacagaucauccaguu

SEQ ID NO: 413788 - RNA, 22 nt, Artificial Sequence
  Synthetic
agugaguacagaucauccaguu

SEQ ID NO: 413789 - RNA, 23 nt, Artificial Sequence
  Synthetic
aagugaguacagaucauccaguu

SEQ ID NO: 413790 - RNA, 24 nt, Artificial Sequence
  Synthetic
caagugaguacagaucauccaguu

SEQ ID NO: 413791 - RNA, 18 nt, Artificial Sequence
  Synthetic
agucuuaagccuccaguu

SEQ ID NO: 413792 - RNA, 19 nt, Artificial Sequence
  Synthetic
gagucuuaagccuccaguu

SEQ ID NO: 413793 - RNA, 20 nt, Artificial Sequence
  Synthetic
ugagucuuaagccuccaguu

SEQ ID NO: 413794 - RNA, 21 nt, Artificial Sequence
  Synthetic
uugagucuuaagccuccaguu

SEQ ID NO: 413795 - RNA, 22 nt, Artificial Sequence
  Synthetic
cuugagucuuaagccuccaguu

SEQ ID NO: 413796 - RNA, 23 nt, Artificial Sequence
  Synthetic
ucuugagucuuaagccuccaguu

SEQ ID NO: 413797 - RNA, 24 nt, Artificial Sequence
  Synthetic
uucuugagucuuaagccuccaguu

SEQ ID NO: 413798 - RNA, 18 nt, Artificial Sequence
  Synthetic
cugccuccugcuccaguu

SEQ ID NO: 413799 - RNA, 19 nt, Artificial Sequence
  Synthetic
ccugccuccugcuccaguu

SEQ ID NO: 413800 - RNA, 20 nt, Artificial Sequence
  Synthetic
cccugccuccugcuccaguu

SEQ ID NO: 413801 - RNA, 21 nt, Artificial Sequence
  Synthetic
ucccugccuccugcuccaguu

SEQ ID NO: 413802 - RNA, 22 nt, Artificial Sequence
  Synthetic
uucccugccuccugcuccaguu

SEQ ID NO: 413803 - RNA, 23 nt, Artificial Sequence
  Synthetic
guucccugccuccugcuccaguu

SEQ ID NO: 413804 - RNA, 24 nt, Artificial Sequence
  Synthetic
uguucccugccuccugcuccaguu

SEQ ID NO: 413805 - RNA, 19 nt, Artificial Sequence
  Synthetic
cccacuguggaaagcaguu

SEQ ID NO: 413806 - RNA, 20 nt, Artificial Sequence
  Synthetic
acccacuguggaaagcaguu

SEQ ID NO: 413807 - RNA, 21 nt, Artificial Sequence
  Synthetic
cacccacuguggaaagcaguu

SEQ ID NO: 413808 - RNA, 22 nt, Artificial Sequence
  Synthetic
ucacccacuguggaaagcaguu

SEQ ID NO: 413809 - RNA, 23 nt, Artificial Sequence
  Synthetic
uucacccacuguggaaagcaguu

SEQ ID NO: 413810 - RNA, 24 nt, Artificial Sequence
  Synthetic
guucacccacuguggaaagcaguu

SEQ ID NO: 413811 - RNA, 18 nt, Artificial Sequence
  Synthetic
ggcgacuuuccagcaguu

SEQ ID NO: 413812 - RNA, 19 nt, Artificial Sequence
  Synthetic
aggcgacuuuccagcaguu

SEQ ID NO: 413813 - RNA, 20 nt, Artificial Sequence
  Synthetic
gaggcgacuuuccagcaguu

SEQ ID NO: 413814 - RNA, 21 nt, Artificial Sequence
  Synthetic
ggaggcgacuuuccagcaguu

SEQ ID NO: 413815 - RNA, 22 nt, Artificial Sequence
  Synthetic
uggaggcgacuuuccagcaguu

SEQ ID NO: 413816 - RNA, 23 nt, Artificial Sequence
  Synthetic
uuggaggcgacuuuccagcaguu

SEQ ID NO: 413817 - RNA, 24 nt, Artificial Sequence
  Synthetic
auuggaggcgacuuuccagcaguu

SEQ ID NO: 413818 - RNA, 18 nt, Artificial Sequence
  Synthetic
auggacuaagcagcaguu

SEQ ID NO: 413819 - RNA, 19 nt, Artificial Sequence
  Synthetic
uauggacuaagcagcaguu

SEQ ID NO: 413820 - RNA, 20 nt, Artificial Sequence
  Synthetic
uuauggacuaagcagcaguu

SEQ ID NO: 413821 - RNA, 21 nt, Artificial Sequence
  Synthetic
uuuauggacuaagcagcaguu

SEQ ID NO: 413822 - RNA, 22 nt, Artificial Sequence
  Synthetic
guuuauggacuaagcagcaguu

SEQ ID NO: 413823 - RNA, 23 nt, Artificial Sequence
  Synthetic
cguuuauggacuaagcagcaguu

SEQ ID NO: 413824 - RNA, 24 nt, Artificial Sequence
  Synthetic
ccguuuauggacuaagcagcaguu

SEQ ID NO: 413825 - RNA, 18 nt, Artificial Sequence
  Synthetic
uuauaaauucccgcaguu

SEQ ID NO: 413826 - RNA, 19 nt, Artificial Sequence
  Synthetic
auuauaaauucccgcaguu

SEQ ID NO: 413827 - RNA, 20 nt, Artificial Sequence
  Synthetic
gauuauaaauucccgcaguu

SEQ ID NO: 413828 - RNA, 21 nt, Artificial Sequence
  Synthetic
agauuauaaauucccgcaguu

SEQ ID NO: 413829 - RNA, 22 nt, Artificial Sequence
  Synthetic
aagauuauaaauucccgcaguu

SEQ ID NO: 413830 - RNA, 23 nt, Artificial Sequence
  Synthetic
gaagauuauaaauucccgcaguu

SEQ ID NO: 413831 - RNA, 24 nt, Artificial Sequence
  Synthetic
ugaagauuauaaauucccgcaguu

SEQ ID NO: 413832 - RNA, 18 nt, Artificial Sequence
  Synthetic
aaucaaugaguggcaguu

SEQ ID NO: 413833 - RNA, 19 nt, Artificial Sequence
  Synthetic
gaaucaaugaguggcaguu

SEQ ID NO: 413834 - RNA, 20 nt, Artificial Sequence
  Synthetic
agaaucaaugaguggcaguu

SEQ ID NO: 413835 - RNA, 21 nt, Artificial Sequence
  Synthetic
gagaaucaaugaguggcaguu

SEQ ID NO: 413836 - RNA, 22 nt, Artificial Sequence
  Synthetic
agagaaucaaugaguggcaguu

SEQ ID NO: 413837 - RNA, 23 nt, Artificial Sequence
  Synthetic
aagagaaucaaugaguggcaguu

SEQ ID NO: 413838 - RNA, 24 nt, Artificial Sequence
  Synthetic
caagagaaucaaugaguggcaguu

SEQ ID NO: 413839 - RNA, 18 nt, Artificial Sequence
  Synthetic
uuguguuuucaugcaguu

SEQ ID NO: 413840 - RNA, 19 nt, Artificial Sequence
  Synthetic
auuguguuuucaugcaguu

SEQ ID NO: 413841 - RNA, 20 nt, Artificial Sequence
  Synthetic
uauuguguuuucaugcaguu

SEQ ID NO: 413842 - RNA, 21 nt, Artificial Sequence
  Synthetic
cuauuguguuuucaugcaguu

SEQ ID NO: 413843 - RNA, 22 nt, Artificial Sequence
  Synthetic
ucuauuguguuuucaugcaguu

SEQ ID NO: 413844 - RNA, 23 nt, Artificial Sequence
  Synthetic
aucuauuguguuuucaugcaguu

SEQ ID NO: 413845 - RNA, 24 nt, Artificial Sequence
  Synthetic
caucuauuguguuuucaugcaguu

SEQ ID NO: 413846 - RNA, 18 nt, Artificial Sequence
  Synthetic
cauaguuguacugcaguu

SEQ ID NO: 413847 - RNA, 19 nt, Artificial Sequence
  Synthetic
gcauaguuguacugcaguu

SEQ ID NO: 413848 - RNA, 20 nt, Artificial Sequence
  Synthetic
ugcauaguuguacugcaguu

SEQ ID NO: 413849 - RNA, 21 nt, Artificial Sequence
  Synthetic
augcauaguuguacugcaguu

SEQ ID NO: 413850 - RNA, 22 nt, Artificial Sequence
  Synthetic
aaugcauaguuguacugcaguu

SEQ ID NO: 413851 - RNA, 23 nt, Artificial Sequence
  Synthetic
aaaugcauaguuguacugcaguu

SEQ ID NO: 413852 - RNA, 24 nt, Artificial Sequence
  Synthetic
gaaaugcauaguuguacugcaguu

SEQ ID NO: 413853 - RNA, 18 nt, Artificial Sequence
  Synthetic
cuucuuaacccugcaguu

SEQ ID NO: 413854 - RNA, 19 nt, Artificial Sequence
  Synthetic
ucuucuuaacccugcaguu

SEQ ID NO: 413855 - RNA, 20 nt, Artificial Sequence
  Synthetic
uucuucuuaacccugcaguu

SEQ ID NO: 413856 - RNA, 21 nt, Artificial Sequence
  Synthetic
uuucuucuuaacccugcaguu

SEQ ID NO: 413857 - RNA, 22 nt, Artificial Sequence
  Synthetic
auuucuucuuaacccugcaguu

SEQ ID NO: 413858 - RNA, 23 nt, Artificial Sequence
  Synthetic
uauuucuucuuaacccugcaguu

SEQ ID NO: 413859 - RNA, 24 nt, Artificial Sequence
  Synthetic
uuauuucuucuuaacccugcaguu

SEQ ID NO: 413860 - RNA, 18 nt, Artificial Sequence
  Synthetic
gcaaaagaaauugcaguu

SEQ ID NO: 413861 - RNA, 19 nt, Artificial Sequence
  Synthetic
ugcaaaagaaauugcaguu

SEQ ID NO: 413862 - RNA, 20 nt, Artificial Sequence
  Synthetic
gugcaaaagaaauugcaguu

SEQ ID NO: 413863 - RNA, 21 nt, Artificial Sequence
  Synthetic
ggugcaaaagaaauugcaguu

SEQ ID NO: 413864 - RNA, 22 nt, Artificial Sequence
  Synthetic
uggugcaaaagaaauugcaguu

SEQ ID NO: 413865 - RNA, 23 nt, Artificial Sequence
  Synthetic
uuggugcaaaagaaauugcaguu

SEQ ID NO: 413866 - RNA, 24 nt, Artificial Sequence
  Synthetic
guuggugcaaaagaaauugcaguu

SEQ ID NO: 413867 - RNA, 18 nt, Artificial Sequence
  Synthetic
aauguauuucuugcaguu

SEQ ID NO: 413868 - RNA, 19 nt, Artificial Sequence
  Synthetic
aaauguauuucuugcaguu

SEQ ID NO: 413869 - RNA, 20 nt, Artificial Sequence
  Synthetic
gaaauguauuucuugcaguu

SEQ ID NO: 413870 - RNA, 21 nt, Artificial Sequence
  Synthetic
agaaauguauuucuugcaguu

SEQ ID NO: 413871 - RNA, 22 nt, Artificial Sequence
  Synthetic
cagaaauguauuucuugcaguu

SEQ ID NO: 413872 - RNA, 23 nt, Artificial Sequence
  Synthetic
acagaaauguauuucuugcaguu

SEQ ID NO: 413873 - RNA, 24 nt, Artificial Sequence
  Synthetic
aacagaaauguauuucuugcaguu

SEQ ID NO: 413874 - RNA, 18 nt, Artificial Sequence
  Synthetic
uaaauuucaacaucaguu

SEQ ID NO: 413875 - RNA, 19 nt, Artificial Sequence
  Synthetic
uuaaauuucaacaucaguu

SEQ ID NO: 413876 - RNA, 20 nt, Artificial Sequence
  Synthetic
auuaaauuucaacaucaguu

SEQ ID NO: 413877 - RNA, 21 nt, Artificial Sequence
  Synthetic
aauuaaauuucaacaucaguu

SEQ ID NO: 413878 - RNA, 22 nt, Artificial Sequence
  Synthetic
caauuaaauuucaacaucaguu

SEQ ID NO: 413879 - RNA, 23 nt, Artificial Sequence
  Synthetic
gcaauuaaauuucaacaucaguu

SEQ ID NO: 413880 - RNA, 24 nt, Artificial Sequence
  Synthetic
ggcaauuaaauuucaacaucaguu

SEQ ID NO: 413881 - RNA, 18 nt, Artificial Sequence
  Synthetic
uuucuccaucacucaguu

SEQ ID NO: 413882 - RNA, 19 nt, Artificial Sequence
  Synthetic
uuuucuccaucacucaguu

SEQ ID NO: 413883 - RNA, 20 nt, Artificial Sequence
  Synthetic
cuuuucuccaucacucaguu

SEQ ID NO: 413884 - RNA, 21 nt, Artificial Sequence
  Synthetic
ucuuuucuccaucacucaguu

SEQ ID NO: 413885 - RNA, 22 nt, Artificial Sequence
  Synthetic
uucuuuucuccaucacucaguu

SEQ ID NO: 413886 - RNA, 23 nt, Artificial Sequence
  Synthetic
uuucuuuucuccaucacucaguu

SEQ ID NO: 413887 - RNA, 24 nt, Artificial Sequence
  Synthetic
uuuucuuuucuccaucacucaguu

SEQ ID NO: 413888 - RNA, 18 nt, Artificial Sequence
  Synthetic
auaaauugaugcucaguu

SEQ ID NO: 413889 - RNA, 19 nt, Artificial Sequence
  Synthetic
uauaaauugaugcucaguu

SEQ ID NO: 413890 - RNA, 20 nt, Artificial Sequence
  Synthetic
guauaaauugaugcucaguu

SEQ ID NO: 413891 - RNA, 21 nt, Artificial Sequence
  Synthetic
aguauaaauugaugcucaguu

SEQ ID NO: 413892 - RNA, 22 nt, Artificial Sequence
  Synthetic
uaguauaaauugaugcucaguu

SEQ ID NO: 413893 - RNA, 23 nt, Artificial Sequence
  Synthetic
guaguauaaauugaugcucaguu

SEQ ID NO: 413894 - RNA, 24 nt, Artificial Sequence
  Synthetic
uguaguauaaauugaugcucaguu

SEQ ID NO: 413895 - RNA, 18 nt, Artificial Sequence
  Synthetic
gagcaaauuugcucaguu

SEQ ID NO: 413896 - RNA, 19 nt, Artificial Sequence
  Synthetic
agagcaaauuugcucaguu

SEQ ID NO: 413897 - RNA, 20 nt, Artificial Sequence
  Synthetic
gagagcaaauuugcucaguu

SEQ ID NO: 413898 - RNA, 18 nt, Artificial Sequence
  Synthetic
uguuucuggcucucaguu

SEQ ID NO: 413899 - RNA, 19 nt, Artificial Sequence
  Synthetic
uuguuucuggcucucaguu

SEQ ID NO: 413900 - RNA, 20 nt, Artificial Sequence
  Synthetic
uuuguuucuggcucucaguu

SEQ ID NO: 413901 - RNA, 21 nt, Artificial Sequence
  Synthetic
uuuuguuucuggcucucaguu

SEQ ID NO: 413902 - RNA, 22 nt, Artificial Sequence
  Synthetic
guuuuguuucuggcucucaguu

SEQ ID NO: 413903 - RNA, 23 nt, Artificial Sequence
  Synthetic
cguuuuguuucuggcucucaguu

SEQ ID NO: 413904 - RNA, 24 nt, Artificial Sequence
  Synthetic
acguuuuguuucuggcucucaguu

SEQ ID NO: 413905 - RNA, 18 nt, Artificial Sequence
  Synthetic
acaguucgauggucaguu

SEQ ID NO: 413906 - RNA, 19 nt, Artificial Sequence
  Synthetic
aacaguucgauggucaguu

SEQ ID NO: 413907 - RNA, 20 nt, Artificial Sequence
  Synthetic
gaacaguucgauggucaguu

SEQ ID NO: 413908 - RNA, 21 nt, Artificial Sequence
  Synthetic
agaacaguucgauggucaguu

SEQ ID NO: 413909 - RNA, 22 nt, Artificial Sequence
  Synthetic
uagaacaguucgauggucaguu

SEQ ID NO: 413910 - RNA, 23 nt, Artificial Sequence
  Synthetic
uuagaacaguucgauggucaguu

SEQ ID NO: 413911 - RNA, 24 nt, Artificial Sequence
  Synthetic
auuagaacaguucgauggucaguu

SEQ ID NO: 413912 - RNA, 18 nt, Artificial Sequence
  Synthetic
aauaaaagguauucaguu

SEQ ID NO: 413913 - RNA, 19 nt, Artificial Sequence
  Synthetic
aaauaaaagguauucaguu

SEQ ID NO: 413914 - RNA, 20 nt, Artificial Sequence
  Synthetic
gaaauaaaagguauucaguu

SEQ ID NO: 413915 - RNA, 21 nt, Artificial Sequence
  Synthetic
ggaaauaaaagguauucaguu

SEQ ID NO: 413916 - RNA, 22 nt, Artificial Sequence
  Synthetic
aggaaauaaaagguauucaguu

SEQ ID NO: 413917 - RNA, 23 nt, Artificial Sequence
  Synthetic
aaggaaauaaaagguauucaguu

SEQ ID NO: 413918 - RNA, 24 nt, Artificial Sequence
  Synthetic
gaaggaaauaaaagguauucaguu

SEQ ID NO: 413919 - RNA, 18 nt, Artificial Sequence
  Synthetic
agccugggaaguucaguu

SEQ ID NO: 413920 - RNA, 19 nt, Artificial Sequence
  Synthetic
uagccugggaaguucaguu

SEQ ID NO: 413921 - RNA, 20 nt, Artificial Sequence
  Synthetic
guagccugggaaguucaguu

SEQ ID NO: 413922 - RNA, 21 nt, Artificial Sequence
  Synthetic
uguagccugggaaguucaguu

SEQ ID NO: 413923 - RNA, 22 nt, Artificial Sequence
  Synthetic
uuguagccugggaaguucaguu

SEQ ID NO: 413924 - RNA, 23 nt, Artificial Sequence
  Synthetic
guuguagccugggaaguucaguu

SEQ ID NO: 413925 - RNA, 24 nt, Artificial Sequence
  Synthetic
aguuguagccugggaaguucaguu

SEQ ID NO: 413926 - RNA, 18 nt, Artificial Sequence
  Synthetic
guugucauuauuucaguu

SEQ ID NO: 413927 - RNA, 19 nt, Artificial Sequence
  Synthetic
aguugucauuauuucaguu

SEQ ID NO: 413928 - RNA, 20 nt, Artificial Sequence
  Synthetic
caguugucauuauuucaguu

SEQ ID NO: 413929 - RNA, 21 nt, Artificial Sequence
  Synthetic
gcaguugucauuauuucaguu

SEQ ID NO: 413930 - RNA, 22 nt, Artificial Sequence
  Synthetic
ugcaguugucauuauuucaguu

SEQ ID NO: 413931 - RNA, 23 nt, Artificial Sequence
  Synthetic
cugcaguugucauuauuucaguu

SEQ ID NO: 413932 - RNA, 24 nt, Artificial Sequence
  Synthetic
ucugcaguugucauuauuucaguu

SEQ ID NO: 413933 - RNA, 18 nt, Artificial Sequence
  Synthetic
gacuacaaaguuucaguu

SEQ ID NO: 413934 - RNA, 19 nt, Artificial Sequence
  Synthetic
agacuacaaaguuucaguu

SEQ ID NO: 413935 - RNA, 20 nt, Artificial Sequence
  Synthetic
aagacuacaaaguuucaguu

SEQ ID NO: 413936 - RNA, 21 nt, Artificial Sequence
  Synthetic
aaagacuacaaaguuucaguu

SEQ ID NO: 413937 - RNA, 22 nt, Artificial Sequence
  Synthetic
uaaagacuacaaaguuucaguu

SEQ ID NO: 413938 - RNA, 23 nt, Artificial Sequence
  Synthetic
uuaaagacuacaaaguuucaguu

SEQ ID NO: 413939 - RNA, 24 nt, Artificial Sequence
  Synthetic
guuaaagacuacaaaguuucaguu

SEQ ID NO: 413940 - RNA, 18 nt, Artificial Sequence
  Synthetic
ugguauagaguuucaguu

SEQ ID NO: 413941 - RNA, 19 nt, Artificial Sequence
  Synthetic
uugguauagaguuucaguu

SEQ ID NO: 413942 - RNA, 20 nt, Artificial Sequence
  Synthetic
auugguauagaguuucaguu

SEQ ID NO: 413943 - RNA, 21 nt, Artificial Sequence
  Synthetic
cauugguauagaguuucaguu

SEQ ID NO: 413944 - RNA, 22 nt, Artificial Sequence
  Synthetic
ucauugguauagaguuucaguu

SEQ ID NO: 413945 - RNA, 23 nt, Artificial Sequence
  Synthetic
gucauugguauagaguuucaguu

SEQ ID NO: 413946 - RNA, 24 nt, Artificial Sequence
  Synthetic
ugucauugguauagaguuucaguu

SEQ ID NO: 413947 - RNA, 18 nt, Artificial Sequence
  Synthetic
ggccucauaaaaagaguu

SEQ ID NO: 413948 - RNA, 19 nt, Artificial Sequence
  Synthetic
uggccucauaaaaagaguu

SEQ ID NO: 413949 - RNA, 20 nt, Artificial Sequence
  Synthetic
cuggccucauaaaaagaguu

SEQ ID NO: 413950 - RNA, 23 nt, Artificial Sequence
  Synthetic
cugcuggccucauaaaaagaguu

SEQ ID NO: 413951 - RNA, 24 nt, Artificial Sequence
  Synthetic
gcugcuggccucauaaaaagaguu

SEQ ID NO: 413952 - RNA, 18 nt, Artificial Sequence
  Synthetic
auuauuuuaaaaagaguu

SEQ ID NO: 413953 - RNA, 19 nt, Artificial Sequence
  Synthetic
gauuauuuuaaaaagaguu

SEQ ID NO: 413954 - RNA, 20 nt, Artificial Sequence
  Synthetic
agauuauuuuaaaaagaguu

SEQ ID NO: 413955 - RNA, 21 nt, Artificial Sequence
  Synthetic
aagauuauuuuaaaaagaguu

SEQ ID NO: 413956 - RNA, 22 nt, Artificial Sequence
  Synthetic
aaagauuauuuuaaaaagaguu

SEQ ID NO: 413957 - RNA, 23 nt, Artificial Sequence
  Synthetic
aaaagauuauuuuaaaaagaguu

SEQ ID NO: 413958 - RNA, 24 nt, Artificial Sequence
  Synthetic
gaaaagauuauuuuaaaaagaguu

SEQ ID NO: 413959 - RNA, 18 nt, Artificial Sequence
  Synthetic
acuuuuaugagaagaguu

SEQ ID NO: 413960 - RNA, 19 nt, Artificial Sequence
  Synthetic
aacuuuuaugagaagaguu

SEQ ID NO: 413961 - RNA, 20 nt, Artificial Sequence
  Synthetic
aaacuuuuaugagaagaguu

SEQ ID NO: 413962 - RNA, 21 nt, Artificial Sequence
  Synthetic
aaaacuuuuaugagaagaguu

SEQ ID NO: 413963 - RNA, 22 nt, Artificial Sequence
  Synthetic
gaaaacuuuuaugagaagaguu

SEQ ID NO: 413964 - RNA, 23 nt, Artificial Sequence
  Synthetic
cgaaaacuuuuaugagaagaguu

SEQ ID NO: 413965 - RNA, 24 nt, Artificial Sequence
  Synthetic
acgaaaacuuuuaugagaagaguu

SEQ ID NO: 413966 - RNA, 18 nt, Artificial Sequence
  Synthetic
uuagaaagaugaagaguu

SEQ ID NO: 413967 - RNA, 19 nt, Artificial Sequence
  Synthetic
uuuagaaagaugaagaguu

SEQ ID NO: 413968 - RNA, 20 nt, Artificial Sequence
  Synthetic
guuuagaaagaugaagaguu

SEQ ID NO: 413969 - RNA, 21 nt, Artificial Sequence
  Synthetic
aguuuagaaagaugaagaguu

SEQ ID NO: 413970 - RNA, 22 nt, Artificial Sequence
  Synthetic
caguuuagaaagaugaagaguu

SEQ ID NO: 413971 - RNA, 23 nt, Artificial Sequence
  Synthetic
ucaguuuagaaagaugaagaguu

SEQ ID NO: 413972 - RNA, 24 nt, Artificial Sequence
  Synthetic
uucaguuuagaaagaugaagaguu

SEQ ID NO: 413973 - RNA, 18 nt, Artificial Sequence
  Synthetic
uuccuuucaguaagaguu

SEQ ID NO: 413974 - RNA, 19 nt, Artificial Sequence
  Synthetic
uuuccuuucaguaagaguu

SEQ ID NO: 413975 - RNA, 20 nt, Artificial Sequence
  Synthetic
uuuuccuuucaguaagaguu

SEQ ID NO: 413976 - RNA, 21 nt, Artificial Sequence
  Synthetic
guuuuccuuucaguaagaguu

SEQ ID NO: 413977 - RNA, 22 nt, Artificial Sequence
  Synthetic
gguuuuccuuucaguaagaguu

SEQ ID NO: 413978 - RNA, 23 nt, Artificial Sequence
  Synthetic
agguuuuccuuucaguaagaguu

SEQ ID NO: 413979 - RNA, 24 nt, Artificial Sequence
  Synthetic
gagguuuuccuuucaguaagaguu

SEQ ID NO: 413980 - RNA, 18 nt, Artificial Sequence
  Synthetic
uccauccagcccagaguu

SEQ ID NO: 413981 - RNA, 19 nt, Artificial Sequence
  Synthetic
cuccauccagcccagaguu

SEQ ID NO: 413982 - RNA, 20 nt, Artificial Sequence
  Synthetic
ucuccauccagcccagaguu

SEQ ID NO: 413983 - RNA, 21 nt, Artificial Sequence
  Synthetic
cucuccauccagcccagaguu

SEQ ID NO: 413984 - RNA, 22 nt, Artificial Sequence
  Synthetic
acucuccauccagcccagaguu

SEQ ID NO: 413985 - RNA, 23 nt, Artificial Sequence
  Synthetic
gacucuccauccagcccagaguu

SEQ ID NO: 413986 - RNA, 24 nt, Artificial Sequence
  Synthetic
ugacucuccauccagcccagaguu

SEQ ID NO: 413987 - RNA, 18 nt, Artificial Sequence
  Synthetic
uacuauaaccucagaguu

SEQ ID NO: 413988 - RNA, 19 nt, Artificial Sequence
  Synthetic
auacuauaaccucagaguu

SEQ ID NO: 413989 - RNA, 20 nt, Artificial Sequence
  Synthetic
aauacuauaaccucagaguu

SEQ ID NO: 413990 - RNA, 21 nt, Artificial Sequence
  Synthetic
uaauacuauaaccucagaguu

SEQ ID NO: 413991 - RNA, 22 nt, Artificial Sequence
  Synthetic
uuaauacuauaaccucagaguu

SEQ ID NO: 413992 - RNA, 23 nt, Artificial Sequence
  Synthetic
cuuaauacuauaaccucagaguu

SEQ ID NO: 413993 - RNA, 24 nt, Artificial Sequence
  Synthetic
gcuuaauacuauaaccucagaguu

SEQ ID NO: 413994 - RNA, 18 nt, Artificial Sequence
  Synthetic
uagagaccauagagaguu

SEQ ID NO: 413995 - RNA, 19 nt, Artificial Sequence
  Synthetic
uuagagaccauagagaguu

SEQ ID NO: 413996 - RNA, 20 nt, Artificial Sequence
  Synthetic
uuuagagaccauagagaguu

SEQ ID NO: 413997 - RNA, 21 nt, Artificial Sequence
  Synthetic
cuuuagagaccauagagaguu

SEQ ID NO: 413998 - RNA, 22 nt, Artificial Sequence
  Synthetic
gcuuuagagaccauagagaguu

SEQ ID NO: 413999 - RNA, 23 nt, Artificial Sequence
  Synthetic
cgcuuuagagaccauagagaguu

SEQ ID NO: 414000 - RNA, 24 nt, Artificial Sequence
  Synthetic
acgcuuuagagaccauagagaguu

SEQ ID NO: 414001 - RNA, 18 nt, Artificial Sequence
  Synthetic
ucuucuaggaggagaguu

SEQ ID NO: 414002 - RNA, 19 nt, Artificial Sequence
  Synthetic
gucuucuaggaggagaguu

SEQ ID NO: 414003 - RNA, 20 nt, Artificial Sequence
  Synthetic
agucuucuaggaggagaguu

SEQ ID NO: 414004 - RNA, 21 nt, Artificial Sequence
  Synthetic
aagucuucuaggaggagaguu

SEQ ID NO: 414005 - RNA, 22 nt, Artificial Sequence
  Synthetic
gaagucuucuaggaggagaguu

SEQ ID NO: 414006 - RNA, 23 nt, Artificial Sequence
  Synthetic
ugaagucuucuaggaggagaguu

SEQ ID NO: 414007 - RNA, 24 nt, Artificial Sequence
  Synthetic
augaagucuucuaggaggagaguu

SEQ ID NO: 414008 - RNA, 18 nt, Artificial Sequence
  Synthetic
cacucauauuugagaguu

SEQ ID NO: 414009 - RNA, 19 nt, Artificial Sequence
  Synthetic
ccacucauauuugagaguu

SEQ ID NO: 414010 - RNA, 20 nt, Artificial Sequence
  Synthetic
uccacucauauuugagaguu

SEQ ID NO: 414011 - RNA, 21 nt, Artificial Sequence
  Synthetic
uuccacucauauuugagaguu

SEQ ID NO: 414012 - RNA, 22 nt, Artificial Sequence
  Synthetic
cuuccacucauauuugagaguu

SEQ ID NO: 414013 - RNA, 23 nt, Artificial Sequence
  Synthetic
acuuccacucauauuugagaguu

SEQ ID NO: 414014 - RNA, 24 nt, Artificial Sequence
  Synthetic
aacuuccacucauauuugagaguu

SEQ ID NO: 414015 - RNA, 18 nt, Artificial Sequence
  Synthetic
cuucuuaagaauagaguu

SEQ ID NO: 414016 - RNA, 19 nt, Artificial Sequence
  Synthetic
gcuucuuaagaauagaguu

SEQ ID NO: 414017 - RNA, 20 nt, Artificial Sequence
  Synthetic
ugcuucuuaagaauagaguu

SEQ ID NO: 414018 - RNA, 21 nt, Artificial Sequence
  Synthetic
uugcuucuuaagaauagaguu

SEQ ID NO: 414019 - RNA, 22 nt, Artificial Sequence
  Synthetic
auugcuucuuaagaauagaguu

SEQ ID NO: 414020 - RNA, 23 nt, Artificial Sequence
  Synthetic
cauugcuucuuaagaauagaguu

SEQ ID NO: 414021 - RNA, 24 nt, Artificial Sequence
  Synthetic
ccauugcuucuuaagaauagaguu

SEQ ID NO: 414022 - RNA, 18 nt, Artificial Sequence
  Synthetic
aggaaugaggauagaguu

SEQ ID NO: 414023 - RNA, 19 nt, Artificial Sequence
  Synthetic
aaggaaugaggauagaguu

SEQ ID NO: 414024 - RNA, 20 nt, Artificial Sequence
  Synthetic
uaaggaaugaggauagaguu

SEQ ID NO: 414025 - RNA, 21 nt, Artificial Sequence
  Synthetic
uuaaggaaugaggauagaguu

SEQ ID NO: 414026 - RNA, 22 nt, Artificial Sequence
  Synthetic
guuaaggaaugaggauagaguu

SEQ ID NO: 414027 - RNA, 23 nt, Artificial Sequence
  Synthetic
uguuaaggaaugaggauagaguu

SEQ ID NO: 414028 - RNA, 24 nt, Artificial Sequence
  Synthetic
auguuaaggaaugaggauagaguu

SEQ ID NO: 414029 - RNA, 18 nt, Artificial Sequence
  Synthetic
auagaccaauaacgaguu

SEQ ID NO: 414030 - RNA, 19 nt, Artificial Sequence
  Synthetic
aauagaccaauaacgaguu

SEQ ID NO: 414031 - RNA, 20 nt, Artificial Sequence
  Synthetic
gaauagaccaauaacgaguu

SEQ ID NO: 414032 - RNA, 21 nt, Artificial Sequence
  Synthetic
ugaauagaccaauaacgaguu

SEQ ID NO: 414033 - RNA, 22 nt, Artificial Sequence
  Synthetic
cugaauagaccaauaacgaguu

SEQ ID NO: 414034 - RNA, 23 nt, Artificial Sequence
  Synthetic
ccugaauagaccaauaacgaguu

SEQ ID NO: 414035 - RNA, 24 nt, Artificial Sequence
  Synthetic
cccugaauagaccaauaacgaguu

SEQ ID NO: 414036 - RNA, 18 nt, Artificial Sequence
  Synthetic
uaaaauuuuuaaggaguu

SEQ ID NO: 414037 - RNA, 19 nt, Artificial Sequence
  Synthetic
auaaaauuuuuaaggaguu

SEQ ID NO: 414038 - RNA, 20 nt, Artificial Sequence
  Synthetic
aauaaaauuuuuaaggaguu

SEQ ID NO: 414039 - RNA, 21 nt, Artificial Sequence
  Synthetic
aaauaaaauuuuuaaggaguu

SEQ ID NO: 414040 - RNA, 22 nt, Artificial Sequence
  Synthetic
aaaauaaaauuuuuaaggaguu

SEQ ID NO: 414041 - RNA, 23 nt, Artificial Sequence
  Synthetic
aaaaauaaaauuuuuaaggaguu

SEQ ID NO: 414042 - RNA, 24 nt, Artificial Sequence
  Synthetic
caaaaauaaaauuuuuaaggaguu

SEQ ID NO: 414043 - RNA, 18 nt, Artificial Sequence
  Synthetic
ucaacauuaucaggaguu

SEQ ID NO: 414044 - RNA, 19 nt, Artificial Sequence
  Synthetic
aucaacauuaucaggaguu

SEQ ID NO: 414045 - RNA, 20 nt, Artificial Sequence
  Synthetic
uaucaacauuaucaggaguu

SEQ ID NO: 414046 - RNA, 21 nt, Artificial Sequence
  Synthetic
auaucaacauuaucaggaguu

SEQ ID NO: 414047 - RNA, 22 nt, Artificial Sequence
  Synthetic
aauaucaacauuaucaggaguu

SEQ ID NO: 414048 - RNA, 23 nt, Artificial Sequence
  Synthetic
aaauaucaacauuaucaggaguu

SEQ ID NO: 414049 - RNA, 24 nt, Artificial Sequence
  Synthetic
aaaauaucaacauuaucaggaguu

SEQ ID NO: 414050 - RNA, 18 nt, Artificial Sequence
  Synthetic
ucccuccagugaggaguu

SEQ ID NO: 414051 - RNA, 19 nt, Artificial Sequence
  Synthetic
cucccuccagugaggaguu

SEQ ID NO: 414052 - RNA, 20 nt, Artificial Sequence
  Synthetic
acucccuccagugaggaguu

SEQ ID NO: 414053 - RNA, 21 nt, Artificial Sequence
  Synthetic
cacucccuccagugaggaguu

SEQ ID NO: 414054 - RNA, 22 nt, Artificial Sequence
  Synthetic
acacucccuccagugaggaguu

SEQ ID NO: 414055 - RNA, 23 nt, Artificial Sequence
  Synthetic
cacacucccuccagugaggaguu

SEQ ID NO: 414056 - RNA, 24 nt, Artificial Sequence
  Synthetic
gcacacucccuccagugaggaguu

SEQ ID NO: 414057 - RNA, 18 nt, Artificial Sequence
  Synthetic
gaaaucaacauaggaguu

SEQ ID NO: 414058 - RNA, 19 nt, Artificial Sequence
  Synthetic
ugaaaucaacauaggaguu

SEQ ID NO: 414059 - RNA, 20 nt, Artificial Sequence
  Synthetic
cugaaaucaacauaggaguu

SEQ ID NO: 414060 - RNA, 21 nt, Artificial Sequence
  Synthetic
acugaaaucaacauaggaguu

SEQ ID NO: 414061 - RNA, 22 nt, Artificial Sequence
  Synthetic
gacugaaaucaacauaggaguu

SEQ ID NO: 414062 - RNA, 23 nt, Artificial Sequence
  Synthetic
agacugaaaucaacauaggaguu

SEQ ID NO: 414063 - RNA, 24 nt, Artificial Sequence
  Synthetic
aagacugaaaucaacauaggaguu

SEQ ID NO: 414064 - RNA, 18 nt, Artificial Sequence
  Synthetic
ccugggaaaguaggaguu

SEQ ID NO: 414065 - RNA, 19 nt, Artificial Sequence
  Synthetic
gccugggaaaguaggaguu

SEQ ID NO: 414066 - RNA, 20 nt, Artificial Sequence
  Synthetic
ugccugggaaaguaggaguu

SEQ ID NO: 414067 - RNA, 21 nt, Artificial Sequence
  Synthetic
gugccugggaaaguaggaguu

SEQ ID NO: 414068 - RNA, 22 nt, Artificial Sequence
  Synthetic
ugugccugggaaaguaggaguu

SEQ ID NO: 414069 - RNA, 23 nt, Artificial Sequence
  Synthetic
augugccugggaaaguaggaguu

SEQ ID NO: 414070 - RNA, 24 nt, Artificial Sequence
  Synthetic
uaugugccugggaaaguaggaguu

SEQ ID NO: 414071 - RNA, 18 nt, Artificial Sequence
  Synthetic
acauuugcccagggaguu

SEQ ID NO: 414072 - RNA, 19 nt, Artificial Sequence
  Synthetic
aacauuugcccagggaguu

SEQ ID NO: 414073 - RNA, 20 nt, Artificial Sequence
  Synthetic
aaacauuugcccagggaguu

SEQ ID NO: 414074 - RNA, 21 nt, Artificial Sequence
  Synthetic
gaaacauuugcccagggaguu

SEQ ID NO: 414075 - RNA, 22 nt, Artificial Sequence
  Synthetic
ugaaacauuugcccagggaguu

SEQ ID NO: 414076 - RNA, 23 nt, Artificial Sequence
  Synthetic
uugaaacauuugcccagggaguu

SEQ ID NO: 414077 - RNA, 24 nt, Artificial Sequence
  Synthetic
uuugaaacauuugcccagggaguu

SEQ ID NO: 414078 - RNA, 18 nt, Artificial Sequence
  Synthetic
cuuuggagagcgggaguu

SEQ ID NO: 414079 - RNA, 19 nt, Artificial Sequence
  Synthetic
acuuuggagagcgggaguu

SEQ ID NO: 414080 - RNA, 20 nt, Artificial Sequence
  Synthetic
cacuuuggagagcgggaguu

SEQ ID NO: 414081 - RNA, 21 nt, Artificial Sequence
  Synthetic
ucacuuuggagagcgggaguu

SEQ ID NO: 414082 - RNA, 22 nt, Artificial Sequence
  Synthetic
uucacuuuggagagcgggaguu

SEQ ID NO: 414083 - RNA, 23 nt, Artificial Sequence
  Synthetic
auucacuuuggagagcgggaguu

SEQ ID NO: 414084 - RNA, 24 nt, Artificial Sequence
  Synthetic
aauucacuuuggagagcgggaguu

SEQ ID NO: 414085 - RNA, 18 nt, Artificial Sequence
  Synthetic
cagauuuucaggggaguu

SEQ ID NO: 414086 - RNA, 19 nt, Artificial Sequence
  Synthetic
ucagauuuucaggggaguu

SEQ ID NO: 414087 - RNA, 20 nt, Artificial Sequence
  Synthetic
aucagauuuucaggggaguu

SEQ ID NO: 414088 - RNA, 21 nt, Artificial Sequence
  Synthetic
caucagauuuucaggggaguu

SEQ ID NO: 414089 - RNA, 22 nt, Artificial Sequence
  Synthetic
ucaucagauuuucaggggaguu

SEQ ID NO: 414090 - RNA, 23 nt, Artificial Sequence
  Synthetic
cucaucagauuuucaggggaguu

SEQ ID NO: 414091 - RNA, 24 nt, Artificial Sequence
  Synthetic
ccucaucagauuuucaggggaguu

SEQ ID NO: 414092 - RNA, 18 nt, Artificial Sequence
  Synthetic
gaagaguugaugggaguu

SEQ ID NO: 414093 - RNA, 19 nt, Artificial Sequence
  Synthetic
ugaagaguugaugggaguu

SEQ ID NO: 414094 - RNA, 20 nt, Artificial Sequence
  Synthetic
uugaagaguugaugggaguu

SEQ ID NO: 414095 - RNA, 21 nt, Artificial Sequence
  Synthetic
guugaagaguugaugggaguu

SEQ ID NO: 414096 - RNA, 22 nt, Artificial Sequence
  Synthetic
uguugaagaguugaugggaguu

SEQ ID NO: 414097 - RNA, 23 nt, Artificial Sequence
  Synthetic
uuguugaagaguugaugggaguu

SEQ ID NO: 414098 - RNA, 24 nt, Artificial Sequence
  Synthetic
uuuguugaagaguugaugggaguu

SEQ ID NO: 414099 - RNA, 18 nt, Artificial Sequence
  Synthetic
cuuuugagcuugggaguu

SEQ ID NO: 414100 - RNA, 19 nt, Artificial Sequence
  Synthetic
acuuuugagcuugggaguu

SEQ ID NO: 414101 - RNA, 20 nt, Artificial Sequence
  Synthetic
uacuuuugagcuugggaguu

SEQ ID NO: 414102 - RNA, 21 nt, Artificial Sequence
  Synthetic
cuacuuuugagcuugggaguu

SEQ ID NO: 414103 - RNA, 22 nt, Artificial Sequence
  Synthetic
acuacuuuugagcuugggaguu

SEQ ID NO: 414104 - RNA, 23 nt, Artificial Sequence
  Synthetic
cacuacuuuugagcuugggaguu

SEQ ID NO: 414105 - RNA, 24 nt, Artificial Sequence
  Synthetic
ucacuacuuuugagcuugggaguu

SEQ ID NO: 414106 - RNA, 18 nt, Artificial Sequence
  Synthetic
uauuucaguuugggaguu

SEQ ID NO: 414107 - RNA, 19 nt, Artificial Sequence
  Synthetic
uuauuucaguuugggaguu

SEQ ID NO: 414108 - RNA, 20 nt, Artificial Sequence
  Synthetic
auuauuucaguuugggaguu

SEQ ID NO: 414109 - RNA, 21 nt, Artificial Sequence
  Synthetic
cauuauuucaguuugggaguu

SEQ ID NO: 414110 - RNA, 22 nt, Artificial Sequence
  Synthetic
ucauuauuucaguuugggaguu

SEQ ID NO: 414111 - RNA, 23 nt, Artificial Sequence
  Synthetic
gucauuauuucaguuugggaguu

SEQ ID NO: 414112 - RNA, 24 nt, Artificial Sequence
  Synthetic
ugucauuauuucaguuugggaguu

SEQ ID NO: 414113 - RNA, 18 nt, Artificial Sequence
  Synthetic
auuuguuagacuggaguu

SEQ ID NO: 414114 - RNA, 19 nt, Artificial Sequence
  Synthetic
cauuuguuagacuggaguu

SEQ ID NO: 414115 - RNA, 20 nt, Artificial Sequence
  Synthetic
gcauuuguuagacuggaguu

SEQ ID NO: 414116 - RNA, 21 nt, Artificial Sequence
  Synthetic
agcauuuguuagacuggaguu

SEQ ID NO: 414117 - RNA, 22 nt, Artificial Sequence
  Synthetic
uagcauuuguuagacuggaguu

SEQ ID NO: 414118 - RNA, 23 nt, Artificial Sequence
  Synthetic
uuagcauuuguuagacuggaguu

SEQ ID NO: 414119 - RNA, 24 nt, Artificial Sequence
  Synthetic
auuagcauuuguuagacuggaguu

SEQ ID NO: 414120 - RNA, 18 nt, Artificial Sequence
  Synthetic
gaagccuguauuggaguu

SEQ ID NO: 414121 - RNA, 19 nt, Artificial Sequence
  Synthetic
agaagccuguauuggaguu

SEQ ID NO: 414122 - RNA, 20 nt, Artificial Sequence
  Synthetic
gagaagccuguauuggaguu

SEQ ID NO: 414123 - RNA, 21 nt, Artificial Sequence
  Synthetic
ggagaagccuguauuggaguu

SEQ ID NO: 414124 - RNA, 22 nt, Artificial Sequence
  Synthetic
aggagaagccuguauuggaguu

SEQ ID NO: 414125 - RNA, 23 nt, Artificial Sequence
  Synthetic
caggagaagccuguauuggaguu

SEQ ID NO: 414126 - RNA, 24 nt, Artificial Sequence
  Synthetic
ucaggagaagccuguauuggaguu

SEQ ID NO: 414127 - RNA, 18 nt, Artificial Sequence
  Synthetic
ugguaggauguuggaguu

SEQ ID NO: 414128 - RNA, 19 nt, Artificial Sequence
  Synthetic
gugguaggauguuggaguu

SEQ ID NO: 414129 - RNA, 20 nt, Artificial Sequence
  Synthetic
ugugguaggauguuggaguu

SEQ ID NO: 414130 - RNA, 21 nt, Artificial Sequence
  Synthetic
cugugguaggauguuggaguu

SEQ ID NO: 414131 - RNA, 22 nt, Artificial Sequence
  Synthetic
gcugugguaggauguuggaguu

SEQ ID NO: 414132 - RNA, 23 nt, Artificial Sequence
  Synthetic
agcugugguaggauguuggaguu

SEQ ID NO: 414133 - RNA, 24 nt, Artificial Sequence
  Synthetic
aagcugugguaggauguuggaguu

SEQ ID NO: 414134 - RNA, 18 nt, Artificial Sequence
  Synthetic
auuaggcacuuuggaguu

SEQ ID NO: 414135 - RNA, 19 nt, Artificial Sequence
  Synthetic
aauuaggcacuuuggaguu

SEQ ID NO: 414136 - RNA, 20 nt, Artificial Sequence
  Synthetic
aaauuaggcacuuuggaguu

SEQ ID NO: 414137 - RNA, 21 nt, Artificial Sequence
  Synthetic
aaaauuaggcacuuuggaguu

SEQ ID NO: 414138 - RNA, 22 nt, Artificial Sequence
  Synthetic
aaaaauuaggcacuuuggaguu

SEQ ID NO: 414139 - RNA, 23 nt, Artificial Sequence
  Synthetic
aaaaaauuaggcacuuuggaguu

SEQ ID NO: 414140 - RNA, 24 nt, Artificial Sequence
  Synthetic
uaaaaaauuaggcacuuuggaguu

SEQ ID NO: 414141 - RNA, 18 nt, Artificial Sequence
  Synthetic
cacuggugcuuuggaguu

SEQ ID NO: 414142 - RNA, 19 nt, Artificial Sequence
  Synthetic
acacuggugcuuuggaguu

SEQ ID NO: 414143 - RNA, 20 nt, Artificial Sequence
  Synthetic
cacacuggugcuuuggaguu

SEQ ID NO: 414144 - RNA, 21 nt, Artificial Sequence
  Synthetic
gcacacuggugcuuuggaguu

SEQ ID NO: 414145 - RNA, 22 nt, Artificial Sequence
  Synthetic
agcacacuggugcuuuggaguu

SEQ ID NO: 414146 - RNA, 23 nt, Artificial Sequence
  Synthetic
gagcacacuggugcuuuggaguu

SEQ ID NO: 414147 - RNA, 24 nt, Artificial Sequence
  Synthetic
agagcacacuggugcuuuggaguu

SEQ ID NO: 414148 - RNA, 18 nt, Artificial Sequence
  Synthetic
ggccucauaaaaugaguu

SEQ ID NO: 414149 - RNA, 19 nt, Artificial Sequence
  Synthetic
uggccucauaaaaugaguu

SEQ ID NO: 414150 - RNA, 20 nt, Artificial Sequence
  Synthetic
cuggccucauaaaaugaguu

SEQ ID NO: 414151 - RNA, 18 nt, Artificial Sequence
  Synthetic
uuuuuuagagaaugaguu

SEQ ID NO: 414152 - RNA, 19 nt, Artificial Sequence
  Synthetic
guuuuuuagagaaugaguu

SEQ ID NO: 414153 - RNA, 20 nt, Artificial Sequence
  Synthetic
uguuuuuuagagaaugaguu

SEQ ID NO: 414154 - RNA, 21 nt, Artificial Sequence
  Synthetic
uuguuuuuuagagaaugaguu

SEQ ID NO: 414155 - RNA, 22 nt, Artificial Sequence
  Synthetic
uuuguuuuuuagagaaugaguu

SEQ ID NO: 414156 - RNA, 23 nt, Artificial Sequence
  Synthetic
uuuuguuuuuuagagaaugaguu

SEQ ID NO: 414157 - RNA, 24 nt, Artificial Sequence
  Synthetic
guuuuguuuuuuagagaaugaguu

SEQ ID NO: 414158 - RNA, 18 nt, Artificial Sequence
  Synthetic
cugaucuuugaaugaguu

SEQ ID NO: 414159 - RNA, 19 nt, Artificial Sequence
  Synthetic
ccugaucuuugaaugaguu

SEQ ID NO: 414160 - RNA, 20 nt, Artificial Sequence
  Synthetic
accugaucuuugaaugaguu

SEQ ID NO: 414161 - RNA, 21 nt, Artificial Sequence
  Synthetic
caccugaucuuugaaugaguu

SEQ ID NO: 414162 - RNA, 22 nt, Artificial Sequence
  Synthetic
ccaccugaucuuugaaugaguu

SEQ ID NO: 414163 - RNA, 23 nt, Artificial Sequence
  Synthetic
uccaccugaucuuugaaugaguu

SEQ ID NO: 414164 - RNA, 24 nt, Artificial Sequence
  Synthetic
auccaccugaucuuugaaugaguu

SEQ ID NO: 414165 - RNA, 18 nt, Artificial Sequence
  Synthetic
acaacccacugaugaguu

SEQ ID NO: 414166 - RNA, 19 nt, Artificial Sequence
  Synthetic
uacaacccacugaugaguu

SEQ ID NO: 414167 - RNA, 20 nt, Artificial Sequence
  Synthetic
uuacaacccacugaugaguu

SEQ ID NO: 414168 - RNA, 21 nt, Artificial Sequence
  Synthetic
cuuacaacccacugaugaguu

SEQ ID NO: 414169 - RNA, 22 nt, Artificial Sequence
  Synthetic
ucuuacaacccacugaugaguu

SEQ ID NO: 414170 - RNA, 23 nt, Artificial Sequence
  Synthetic
aucuuacaacccacugaugaguu

SEQ ID NO: 414171 - RNA, 24 nt, Artificial Sequence
  Synthetic
aaucuuacaacccacugaugaguu

SEQ ID NO: 414172 - RNA, 18 nt, Artificial Sequence
  Synthetic
ugcucgggaggcugaguu

SEQ ID NO: 414173 - RNA, 19 nt, Artificial Sequence
  Synthetic
augcucgggaggcugaguu

SEQ ID NO: 414174 - RNA, 20 nt, Artificial Sequence
  Synthetic
gaugcucgggaggcugaguu

SEQ ID NO: 414175 - RNA, 21 nt, Artificial Sequence
  Synthetic
agaugcucgggaggcugaguu

SEQ ID NO: 414176 - RNA, 22 nt, Artificial Sequence
  Synthetic
uagaugcucgggaggcugaguu

SEQ ID NO: 414177 - RNA, 23 nt, Artificial Sequence
  Synthetic
cuagaugcucgggaggcugaguu

SEQ ID NO: 414178 - RNA, 24 nt, Artificial Sequence
  Synthetic
ccuagaugcucgggaggcugaguu

SEQ ID NO: 414179 - RNA, 18 nt, Artificial Sequence
  Synthetic
ggaugaaaauucugaguu

SEQ ID NO: 414180 - RNA, 19 nt, Artificial Sequence
  Synthetic
aggaugaaaauucugaguu

SEQ ID NO: 414181 - RNA, 20 nt, Artificial Sequence
  Synthetic
caggaugaaaauucugaguu

SEQ ID NO: 414182 - RNA, 21 nt, Artificial Sequence
  Synthetic
gcaggaugaaaauucugaguu

SEQ ID NO: 414183 - RNA, 22 nt, Artificial Sequence
  Synthetic
agcaggaugaaaauucugaguu

SEQ ID NO: 414184 - RNA, 23 nt, Artificial Sequence
  Synthetic
gagcaggaugaaaauucugaguu

SEQ ID NO: 414185 - RNA, 24 nt, Artificial Sequence
  Synthetic
agagcaggaugaaaauucugaguu

SEQ ID NO: 414186 - RNA, 18 nt, Artificial Sequence
  Synthetic
acaguaugcuagugaguu

SEQ ID NO: 414187 - RNA, 19 nt, Artificial Sequence
  Synthetic
uacaguaugcuagugaguu

SEQ ID NO: 414188 - RNA, 20 nt, Artificial Sequence
  Synthetic
uuacaguaugcuagugaguu

SEQ ID NO: 414189 - RNA, 21 nt, Artificial Sequence
  Synthetic
auuacaguaugcuagugaguu

SEQ ID NO: 414190 - RNA, 22 nt, Artificial Sequence
  Synthetic
uauuacaguaugcuagugaguu

SEQ ID NO: 414191 - RNA, 23 nt, Artificial Sequence
  Synthetic
uuauuacaguaugcuagugaguu

SEQ ID NO: 414192 - RNA, 24 nt, Artificial Sequence
  Synthetic
uuuauuacaguaugcuagugaguu

SEQ ID NO: 414193 - RNA, 18 nt, Artificial Sequence
  Synthetic
gucuuaugguggugaguu

SEQ ID NO: 414194 - RNA, 19 nt, Artificial Sequence
  Synthetic
agucuuaugguggugaguu

SEQ ID NO: 414195 - RNA, 20 nt, Artificial Sequence
  Synthetic
aagucuuaugguggugaguu

SEQ ID NO: 414196 - RNA, 21 nt, Artificial Sequence
  Synthetic
gaagucuuaugguggugaguu

SEQ ID NO: 414197 - RNA, 22 nt, Artificial Sequence
  Synthetic
agaagucuuaugguggugaguu

SEQ ID NO: 414198 - RNA, 23 nt, Artificial Sequence
  Synthetic
aagaagucuuaugguggugaguu

SEQ ID NO: 414199 - RNA, 24 nt, Artificial Sequence
  Synthetic
caagaagucuuaugguggugaguu

SEQ ID NO: 414200 - RNA, 18 nt, Artificial Sequence
  Synthetic
uuguucuaauugugaguu

SEQ ID NO: 414201 - RNA, 19 nt, Artificial Sequence
  Synthetic
auuguucuaauugugaguu

SEQ ID NO: 414202 - RNA, 20 nt, Artificial Sequence
  Synthetic
cauuguucuaauugugaguu

SEQ ID NO: 414203 - RNA, 21 nt, Artificial Sequence
  Synthetic
ccauuguucuaauugugaguu

SEQ ID NO: 414204 - RNA, 22 nt, Artificial Sequence
  Synthetic
cccauuguucuaauugugaguu

SEQ ID NO: 414205 - RNA, 23 nt, Artificial Sequence
  Synthetic
acccauuguucuaauugugaguu

SEQ ID NO: 414206 - RNA, 24 nt, Artificial Sequence
  Synthetic
aacccauuguucuaauugugaguu

SEQ ID NO: 414207 - RNA, 18 nt, Artificial Sequence
  Synthetic
cuacaaaggaauugaguu

SEQ ID NO: 414208 - RNA, 19 nt, Artificial Sequence
  Synthetic
gcuacaaaggaauugaguu

SEQ ID NO: 414209 - RNA, 20 nt, Artificial Sequence
  Synthetic
agcuacaaaggaauugaguu

SEQ ID NO: 414210 - RNA, 21 nt, Artificial Sequence
  Synthetic
cagcuacaaaggaauugaguu

SEQ ID NO: 414211 - RNA, 22 nt, Artificial Sequence
  Synthetic
gcagcuacaaaggaauugaguu

SEQ ID NO: 414212 - RNA, 23 nt, Artificial Sequence
  Synthetic
ugcagcuacaaaggaauugaguu

SEQ ID NO: 414213 - RNA, 24 nt, Artificial Sequence
  Synthetic
cugcagcuacaaaggaauugaguu

SEQ ID NO: 414214 - RNA, 18 nt, Artificial Sequence
  Synthetic
aauucacucuguugaguu

SEQ ID NO: 414215 - RNA, 19 nt, Artificial Sequence
  Synthetic
gaauucacucuguugaguu

SEQ ID NO: 414216 - RNA, 20 nt, Artificial Sequence
  Synthetic
cgaauucacucuguugaguu

SEQ ID NO: 414217 - RNA, 21 nt, Artificial Sequence
  Synthetic
acgaauucacucuguugaguu

SEQ ID NO: 414218 - RNA, 22 nt, Artificial Sequence
  Synthetic
cacgaauucacucuguugaguu

SEQ ID NO: 414219 - RNA, 23 nt, Artificial Sequence
  Synthetic
acacgaauucacucuguugaguu

SEQ ID NO: 414220 - RNA, 24 nt, Artificial Sequence
  Synthetic
aacacgaauucacucuguugaguu

SEQ ID NO: 414221 - RNA, 18 nt, Artificial Sequence
  Synthetic
ugaucccaacaaauaguu

SEQ ID NO: 414222 - RNA, 19 nt, Artificial Sequence
  Synthetic
cugaucccaacaaauaguu

SEQ ID NO: 414223 - RNA, 20 nt, Artificial Sequence
  Synthetic
ccugaucccaacaaauaguu

SEQ ID NO: 414224 - RNA, 21 nt, Artificial Sequence
  Synthetic
uccugaucccaacaaauaguu

SEQ ID NO: 414225 - RNA, 22 nt, Artificial Sequence
  Synthetic
uuccugaucccaacaaauaguu

SEQ ID NO: 414226 - RNA, 23 nt, Artificial Sequence
  Synthetic
uuuccugaucccaacaaauaguu

SEQ ID NO: 414227 - RNA, 24 nt, Artificial Sequence
  Synthetic
uuuuccugaucccaacaaauaguu

SEQ ID NO: 414228 - RNA, 18 nt, Artificial Sequence
  Synthetic
auggacuuaauaauaguu

SEQ ID NO: 414229 - RNA, 19 nt, Artificial Sequence
  Synthetic
aauggacuuaauaauaguu

SEQ ID NO: 414230 - RNA, 20 nt, Artificial Sequence
  Synthetic
aaauggacuuaauaauaguu

SEQ ID NO: 414231 - RNA, 21 nt, Artificial Sequence
  Synthetic
caaauggacuuaauaauaguu

SEQ ID NO: 414232 - RNA, 22 nt, Artificial Sequence
  Synthetic
ccaaauggacuuaauaauaguu

SEQ ID NO: 414233 - RNA, 23 nt, Artificial Sequence
  Synthetic
accaaauggacuuaauaauaguu

SEQ ID NO: 414234 - RNA, 24 nt, Artificial Sequence
  Synthetic
gaccaaauggacuuaauaauaguu

SEQ ID NO: 414235 - RNA, 18 nt, Artificial Sequence
  Synthetic
cucuuuuuuaacauaguu

SEQ ID NO: 414236 - RNA, 19 nt, Artificial Sequence
  Synthetic
acucuuuuuuaacauaguu

SEQ ID NO: 414237 - RNA, 20 nt, Artificial Sequence
  Synthetic
uacucuuuuuuaacauaguu

SEQ ID NO: 414238 - RNA, 21 nt, Artificial Sequence
  Synthetic
cuacucuuuuuuaacauaguu

SEQ ID NO: 414239 - RNA, 22 nt, Artificial Sequence
  Synthetic
acuacucuuuuuuaacauaguu

SEQ ID NO: 414240 - RNA, 23 nt, Artificial Sequence
  Synthetic
cacuacucuuuuuuaacauaguu

SEQ ID NO: 414241 - RNA, 24 nt, Artificial Sequence
  Synthetic
ucacuacucuuuuuuaacauaguu

SEQ ID NO: 414242 - RNA, 18 nt, Artificial Sequence
  Synthetic
gucuugcaggccauaguu

SEQ ID NO: 414243 - RNA, 19 nt, Artificial Sequence
  Synthetic
ggucuugcaggccauaguu

SEQ ID NO: 414244 - RNA, 20 nt, Artificial Sequence
  Synthetic
uggucuugcaggccauaguu

SEQ ID NO: 414245 - RNA, 21 nt, Artificial Sequence
  Synthetic
auggucuugcaggccauaguu

SEQ ID NO: 414246 - RNA, 22 nt, Artificial Sequence
  Synthetic
aauggucuugcaggccauaguu

SEQ ID NO: 414247 - RNA, 23 nt, Artificial Sequence
  Synthetic
gaauggucuugcaggccauaguu

SEQ ID NO: 414248 - RNA, 24 nt, Artificial Sequence
  Synthetic
ugaauggucuugcaggccauaguu

SEQ ID NO: 414249 - RNA, 18 nt, Artificial Sequence
  Synthetic
auauauggacucauaguu

SEQ ID NO: 414250 - RNA, 19 nt, Artificial Sequence
  Synthetic
uauauauggacucauaguu

SEQ ID NO: 414251 - RNA, 20 nt, Artificial Sequence
  Synthetic
auauauauggacucauaguu

SEQ ID NO: 414252 - RNA, 21 nt, Artificial Sequence
  Synthetic
uauauauauggacucauaguu

SEQ ID NO: 414253 - RNA, 22 nt, Artificial Sequence
  Synthetic
cuauauauauggacucauaguu

SEQ ID NO: 414254 - RNA, 23 nt, Artificial Sequence
  Synthetic
ccuauauauauggacucauaguu

SEQ ID NO: 414255 - RNA, 24 nt, Artificial Sequence
  Synthetic
accuauauauauggacucauaguu

SEQ ID NO: 414256 - RNA, 18 nt, Artificial Sequence
  Synthetic
auuuguuggcucauaguu

SEQ ID NO: 414257 - RNA, 19 nt, Artificial Sequence
  Synthetic
gauuuguuggcucauaguu

SEQ ID NO: 414258 - RNA, 20 nt, Artificial Sequence
  Synthetic
ggauuuguuggcucauaguu

SEQ ID NO: 414259 - RNA, 21 nt, Artificial Sequence
  Synthetic
gggauuuguuggcucauaguu

SEQ ID NO: 414260 - RNA, 22 nt, Artificial Sequence
  Synthetic
agggauuuguuggcucauaguu

SEQ ID NO: 414261 - RNA, 23 nt, Artificial Sequence
  Synthetic
cagggauuuguuggcucauaguu

SEQ ID NO: 414262 - RNA, 24 nt, Artificial Sequence
  Synthetic
acagggauuuguuggcucauaguu

SEQ ID NO: 414263 - RNA, 18 nt, Artificial Sequence
  Synthetic
acaaccaaaaagauaguu

SEQ ID NO: 414264 - RNA, 19 nt, Artificial Sequence
  Synthetic
cacaaccaaaaagauaguu

SEQ ID NO: 414265 - RNA, 20 nt, Artificial Sequence
  Synthetic
ucacaaccaaaaagauaguu

SEQ ID NO: 414266 - RNA, 21 nt, Artificial Sequence
  Synthetic
uucacaaccaaaaagauaguu

SEQ ID NO: 414267 - RNA, 22 nt, Artificial Sequence
  Synthetic
guucacaaccaaaaagauaguu

SEQ ID NO: 414268 - RNA, 23 nt, Artificial Sequence
  Synthetic
aguucacaaccaaaaagauaguu

SEQ ID NO: 414269 - RNA, 24 nt, Artificial Sequence
  Synthetic
uaguucacaaccaaaaagauaguu

SEQ ID NO: 414270 - RNA, 18 nt, Artificial Sequence
  Synthetic
uuuugaagggggauaguu

SEQ ID NO: 414271 - RNA, 19 nt, Artificial Sequence
  Synthetic
uuuuugaagggggauaguu

SEQ ID NO: 414272 - RNA, 20 nt, Artificial Sequence
  Synthetic
uuuuuugaagggggauaguu

SEQ ID NO: 414273 - RNA, 21 nt, Artificial Sequence
  Synthetic
cuuuuuugaagggggauaguu

SEQ ID NO: 414274 - RNA, 22 nt, Artificial Sequence
  Synthetic
acuuuuuugaagggggauaguu

SEQ ID NO: 414275 - RNA, 23 nt, Artificial Sequence
  Synthetic
gacuuuuuugaagggggauaguu

SEQ ID NO: 414276 - RNA, 24 nt, Artificial Sequence
  Synthetic
ugacuuuuuugaagggggauaguu

SEQ ID NO: 414277 - RNA, 18 nt, Artificial Sequence
  Synthetic
cuucuaucauugauaguu

SEQ ID NO: 414278 - RNA, 19 nt, Artificial Sequence
  Synthetic
acuucuaucauugauaguu

SEQ ID NO: 414279 - RNA, 20 nt, Artificial Sequence
  Synthetic
gacuucuaucauugauaguu

SEQ ID NO: 414280 - RNA, 21 nt, Artificial Sequence
  Synthetic
ugacuucuaucauugauaguu

SEQ ID NO: 414281 - RNA, 22 nt, Artificial Sequence
  Synthetic
uugacuucuaucauugauaguu

SEQ ID NO: 414282 - RNA, 23 nt, Artificial Sequence
  Synthetic
uuugacuucuaucauugauaguu

SEQ ID NO: 414283 - RNA, 24 nt, Artificial Sequence
  Synthetic
auuugacuucuaucauugauaguu

SEQ ID NO: 414284 - RNA, 18 nt, Artificial Sequence
  Synthetic
acuggcacccauauaguu

SEQ ID NO: 414285 - RNA, 19 nt, Artificial Sequence
  Synthetic
aacuggcacccauauaguu

SEQ ID NO: 414286 - RNA, 20 nt, Artificial Sequence
  Synthetic
gaacuggcacccauauaguu

SEQ ID NO: 414287 - RNA, 21 nt, Artificial Sequence
  Synthetic
agaacuggcacccauauaguu

SEQ ID NO: 414288 - RNA, 22 nt, Artificial Sequence
  Synthetic
uagaacuggcacccauauaguu

SEQ ID NO: 414289 - RNA, 23 nt, Artificial Sequence
  Synthetic
uuagaacuggcacccauauaguu

SEQ ID NO: 414290 - RNA, 24 nt, Artificial Sequence
  Synthetic
uuuagaacuggcacccauauaguu

SEQ ID NO: 414291 - RNA, 18 nt, Artificial Sequence
  Synthetic
guaagauuucauauaguu

SEQ ID NO: 414292 - RNA, 19 nt, Artificial Sequence
  Synthetic
gguaagauuucauauaguu

SEQ ID NO: 414293 - RNA, 20 nt, Artificial Sequence
  Synthetic
ggguaagauuucauauaguu

SEQ ID NO: 414294 - RNA, 21 nt, Artificial Sequence
  Synthetic
uggguaagauuucauauaguu

SEQ ID NO: 414295 - RNA, 22 nt, Artificial Sequence
  Synthetic
auggguaagauuucauauaguu

SEQ ID NO: 414296 - RNA, 23 nt, Artificial Sequence
  Synthetic
uauggguaagauuucauauaguu

SEQ ID NO: 414297 - RNA, 24 nt, Artificial Sequence
  Synthetic
cuauggguaagauuucauauaguu

SEQ ID NO: 414298 - RNA, 18 nt, Artificial Sequence
  Synthetic
aggauuauagguauaguu

SEQ ID NO: 414299 - RNA, 19 nt, Artificial Sequence
  Synthetic
aaggauuauagguauaguu

SEQ ID NO: 414300 - RNA, 20 nt, Artificial Sequence
  Synthetic
aaaggauuauagguauaguu

SEQ ID NO: 414301 - RNA, 21 nt, Artificial Sequence
  Synthetic
caaaggauuauagguauaguu

SEQ ID NO: 414302 - RNA, 22 nt, Artificial Sequence
  Synthetic
acaaaggauuauagguauaguu

SEQ ID NO: 414303 - RNA, 23 nt, Artificial Sequence
  Synthetic
aacaaaggauuauagguauaguu

SEQ ID NO: 414304 - RNA, 24 nt, Artificial Sequence
  Synthetic
aaacaaaggauuauagguauaguu

SEQ ID NO: 414305 - RNA, 18 nt, Artificial Sequence
  Synthetic
ccauguguuuguauaguu

SEQ ID NO: 414306 - RNA, 19 nt, Artificial Sequence
  Synthetic
uccauguguuuguauaguu

SEQ ID NO: 414307 - RNA, 20 nt, Artificial Sequence
  Synthetic
uuccauguguuuguauaguu

SEQ ID NO: 414308 - RNA, 21 nt, Artificial Sequence
  Synthetic
uuuccauguguuuguauaguu

SEQ ID NO: 414309 - RNA, 22 nt, Artificial Sequence
  Synthetic
auuuccauguguuuguauaguu

SEQ ID NO: 414310 - RNA, 23 nt, Artificial Sequence
  Synthetic
aauuuccauguguuuguauaguu

SEQ ID NO: 414311 - RNA, 24 nt, Artificial Sequence
  Synthetic
uaauuuccauguguuuguauaguu

SEQ ID NO: 414312 - RNA, 18 nt, Artificial Sequence
  Synthetic
ucuagaaaucuuauaguu

SEQ ID NO: 414313 - RNA, 19 nt, Artificial Sequence
  Synthetic
uucuagaaaucuuauaguu

SEQ ID NO: 414314 - RNA, 20 nt, Artificial Sequence
  Synthetic
auucuagaaaucuuauaguu

SEQ ID NO: 414315 - RNA, 21 nt, Artificial Sequence
  Synthetic
aauucuagaaaucuuauaguu

SEQ ID NO: 414316 - RNA, 22 nt, Artificial Sequence
  Synthetic
caauucuagaaaucuuauaguu

SEQ ID NO: 414317 - RNA, 23 nt, Artificial Sequence
  Synthetic
acaauucuagaaaucuuauaguu

SEQ ID NO: 414318 - RNA, 24 nt, Artificial Sequence
  Synthetic
cacaauucuagaaaucuuauaguu

SEQ ID NO: 414319 - RNA, 18 nt, Artificial Sequence
  Synthetic
gaguuuggcuuuauaguu

SEQ ID NO: 414320 - RNA, 19 nt, Artificial Sequence
  Synthetic
ugaguuuggcuuuauaguu

SEQ ID NO: 414321 - RNA, 20 nt, Artificial Sequence
  Synthetic
gugaguuuggcuuuauaguu

SEQ ID NO: 414322 - RNA, 21 nt, Artificial Sequence
  Synthetic
agugaguuuggcuuuauaguu

SEQ ID NO: 414323 - RNA, 22 nt, Artificial Sequence
  Synthetic
aagugaguuuggcuuuauaguu

SEQ ID NO: 414324 - RNA, 23 nt, Artificial Sequence
  Synthetic
uaagugaguuuggcuuuauaguu

SEQ ID NO: 414325 - RNA, 24 nt, Artificial Sequence
  Synthetic
auaagugaguuuggcuuuauaguu

SEQ ID NO: 414326 - RNA, 18 nt, Artificial Sequence
  Synthetic
uacuaugaggaacuaguu

SEQ ID NO: 414327 - RNA, 19 nt, Artificial Sequence
  Synthetic
uuacuaugaggaacuaguu

SEQ ID NO: 414328 - RNA, 20 nt, Artificial Sequence
  Synthetic
uuuacuaugaggaacuaguu

SEQ ID NO: 414329 - RNA, 21 nt, Artificial Sequence
  Synthetic
auuuacuaugaggaacuaguu

SEQ ID NO: 414330 - RNA, 22 nt, Artificial Sequence
  Synthetic
aauuuacuaugaggaacuaguu

SEQ ID NO: 414331 - RNA, 23 nt, Artificial Sequence
  Synthetic
gaauuuacuaugaggaacuaguu

SEQ ID NO: 414332 - RNA, 24 nt, Artificial Sequence
  Synthetic
ggaauuuacuaugaggaacuaguu

SEQ ID NO: 414333 - RNA, 18 nt, Artificial Sequence
  Synthetic
ccuccaagguuacuaguu

SEQ ID NO: 414334 - RNA, 19 nt, Artificial Sequence
  Synthetic
uccuccaagguuacuaguu

SEQ ID NO: 414335 - RNA, 20 nt, Artificial Sequence
  Synthetic
uuccuccaagguuacuaguu

SEQ ID NO: 414336 - RNA, 21 nt, Artificial Sequence
  Synthetic
auuccuccaagguuacuaguu

SEQ ID NO: 414337 - RNA, 22 nt, Artificial Sequence
  Synthetic
uauuccuccaagguuacuaguu

SEQ ID NO: 414338 - RNA, 23 nt, Artificial Sequence
  Synthetic
auauuccuccaagguuacuaguu

SEQ ID NO: 414339 - RNA, 24 nt, Artificial Sequence
  Synthetic
uauauuccuccaagguuacuaguu

SEQ ID NO: 414340 - RNA, 18 nt, Artificial Sequence
  Synthetic
aacacaagaaagcuaguu

SEQ ID NO: 414341 - RNA, 19 nt, Artificial Sequence
  Synthetic
uaacacaagaaagcuaguu

SEQ ID NO: 414342 - RNA, 20 nt, Artificial Sequence
  Synthetic
cuaacacaagaaagcuaguu

SEQ ID NO: 414343 - RNA, 21 nt, Artificial Sequence
  Synthetic
acuaacacaagaaagcuaguu

SEQ ID NO: 414344 - RNA, 22 nt, Artificial Sequence
  Synthetic
aacuaacacaagaaagcuaguu

SEQ ID NO: 414345 - RNA, 23 nt, Artificial Sequence
  Synthetic
gaacuaacacaagaaagcuaguu

SEQ ID NO: 414346 - RNA, 24 nt, Artificial Sequence
  Synthetic
agaacuaacacaagaaagcuaguu

SEQ ID NO: 414347 - RNA, 18 nt, Artificial Sequence
  Synthetic
uauuuggacaugcuaguu

SEQ ID NO: 414348 - RNA, 19 nt, Artificial Sequence
  Synthetic
uuauuuggacaugcuaguu

SEQ ID NO: 414349 - RNA, 20 nt, Artificial Sequence
  Synthetic
uuuauuuggacaugcuaguu

SEQ ID NO: 414350 - RNA, 21 nt, Artificial Sequence
  Synthetic
cuuuauuuggacaugcuaguu

SEQ ID NO: 414351 - RNA, 22 nt, Artificial Sequence
  Synthetic
ucuuuauuuggacaugcuaguu

SEQ ID NO: 414352 - RNA, 23 nt, Artificial Sequence
  Synthetic
aucuuuauuuggacaugcuaguu

SEQ ID NO: 414353 - RNA, 24 nt, Artificial Sequence
  Synthetic
aaucuuuauuuggacaugcuaguu

SEQ ID NO: 414354 - RNA, 18 nt, Artificial Sequence
  Synthetic
uucuucauccugcuaguu

SEQ ID NO: 414355 - RNA, 19 nt, Artificial Sequence
  Synthetic
uuucuucauccugcuaguu

SEQ ID NO: 414356 - RNA, 20 nt, Artificial Sequence
  Synthetic
uuuucuucauccugcuaguu

SEQ ID NO: 414357 - RNA, 21 nt, Artificial Sequence
  Synthetic
auuuucuucauccugcuaguu

SEQ ID NO: 414358 - RNA, 22 nt, Artificial Sequence
  Synthetic
cauuuucuucauccugcuaguu

SEQ ID NO: 414359 - RNA, 23 nt, Artificial Sequence
  Synthetic
gcauuuucuucauccugcuaguu

SEQ ID NO: 414360 - RNA, 24 nt, Artificial Sequence
  Synthetic
agcauuuucuucauccugcuaguu

SEQ ID NO: 414361 - RNA, 18 nt, Artificial Sequence
  Synthetic
uacucuuuagugcuaguu

SEQ ID NO: 414362 - RNA, 19 nt, Artificial Sequence
  Synthetic
cuacucuuuagugcuaguu

SEQ ID NO: 414363 - RNA, 20 nt, Artificial Sequence
  Synthetic
ucuacucuuuagugcuaguu

SEQ ID NO: 414364 - RNA, 21 nt, Artificial Sequence
  Synthetic
aucuacucuuuagugcuaguu

SEQ ID NO: 414365 - RNA, 22 nt, Artificial Sequence
  Synthetic
caucuacucuuuagugcuaguu

SEQ ID NO: 414366 - RNA, 23 nt, Artificial Sequence
  Synthetic
gcaucuacucuuuagugcuaguu

SEQ ID NO: 414367 - RNA, 24 nt, Artificial Sequence
  Synthetic
ugcaucuacucuuuagugcuaguu

SEQ ID NO: 414368 - RNA, 18 nt, Artificial Sequence
  Synthetic
auaucuuuaaaucuaguu

SEQ ID NO: 414369 - RNA, 19 nt, Artificial Sequence
  Synthetic
cauaucuuuaaaucuaguu

SEQ ID NO: 414370 - RNA, 20 nt, Artificial Sequence
  Synthetic
acauaucuuuaaaucuaguu

SEQ ID NO: 414371 - RNA, 21 nt, Artificial Sequence
  Synthetic
aacauaucuuuaaaucuaguu

SEQ ID NO: 414372 - RNA, 22 nt, Artificial Sequence
  Synthetic
aaacauaucuuuaaaucuaguu

SEQ ID NO: 414373 - RNA, 23 nt, Artificial Sequence
  Synthetic
aaaacauaucuuuaaaucuaguu

SEQ ID NO: 414374 - RNA, 24 nt, Artificial Sequence
  Synthetic
uaaaacauaucuuuaaaucuaguu

SEQ ID NO: 414375 - RNA, 18 nt, Artificial Sequence
  Synthetic
gaagcacacacucuaguu

SEQ ID NO: 414376 - RNA, 19 nt, Artificial Sequence
  Synthetic
ggaagcacacacucuaguu

SEQ ID NO: 414377 - RNA, 20 nt, Artificial Sequence
  Synthetic
aggaagcacacacucuaguu

SEQ ID NO: 414378 - RNA, 21 nt, Artificial Sequence
  Synthetic
caggaagcacacacucuaguu

SEQ ID NO: 414379 - RNA, 22 nt, Artificial Sequence
  Synthetic
ucaggaagcacacacucuaguu

SEQ ID NO: 414380 - RNA, 23 nt, Artificial Sequence
  Synthetic
gucaggaagcacacacucuaguu

SEQ ID NO: 414381 - RNA, 24 nt, Artificial Sequence
  Synthetic
ugucaggaagcacacacucuaguu

SEQ ID NO: 414382 - RNA, 18 nt, Artificial Sequence
  Synthetic
gagagggucacucuaguu

SEQ ID NO: 414383 - RNA, 19 nt, Artificial Sequence
  Synthetic
agagagggucacucuaguu

SEQ ID NO: 414384 - RNA, 20 nt, Artificial Sequence
  Synthetic
uagagagggucacucuaguu

SEQ ID NO: 414385 - RNA, 21 nt, Artificial Sequence
  Synthetic
auagagagggucacucuaguu

SEQ ID NO: 414386 - RNA, 22 nt, Artificial Sequence
  Synthetic
uauagagagggucacucuaguu

SEQ ID NO: 414387 - RNA, 23 nt, Artificial Sequence
  Synthetic
auauagagagggucacucuaguu

SEQ ID NO: 414388 - RNA, 24 nt, Artificial Sequence
  Synthetic
uauauagagagggucacucuaguu

SEQ ID NO: 414389 - RNA, 18 nt, Artificial Sequence
  Synthetic
guuuccaggacucuaguu

SEQ ID NO: 414390 - RNA, 19 nt, Artificial Sequence
  Synthetic
gguuuccaggacucuaguu

SEQ ID NO: 414391 - RNA, 20 nt, Artificial Sequence
  Synthetic
agguuuccaggacucuaguu

SEQ ID NO: 414392 - RNA, 21 nt, Artificial Sequence
  Synthetic
aagguuuccaggacucuaguu

SEQ ID NO: 414393 - RNA, 22 nt, Artificial Sequence
  Synthetic
aaagguuuccaggacucuaguu

SEQ ID NO: 414394 - RNA, 23 nt, Artificial Sequence
  Synthetic
uaaagguuuccaggacucuaguu

SEQ ID NO: 414395 - RNA, 24 nt, Artificial Sequence
  Synthetic
cuaaagguuuccaggacucuaguu

SEQ ID NO: 414396 - RNA, 18 nt, Artificial Sequence
  Synthetic
ggaguuugcauucuaguu

SEQ ID NO: 414397 - RNA, 19 nt, Artificial Sequence
  Synthetic
uggaguuugcauucuaguu

SEQ ID NO: 414398 - RNA, 20 nt, Artificial Sequence
  Synthetic
uuggaguuugcauucuaguu

SEQ ID NO: 414399 - RNA, 21 nt, Artificial Sequence
  Synthetic
auuggaguuugcauucuaguu

SEQ ID NO: 414400 - RNA, 22 nt, Artificial Sequence
  Synthetic
cauuggaguuugcauucuaguu

SEQ ID NO: 414401 - RNA, 23 nt, Artificial Sequence
  Synthetic
ucauuggaguuugcauucuaguu

SEQ ID NO: 414402 - RNA, 24 nt, Artificial Sequence
  Synthetic
cucauuggaguuugcauucuaguu

SEQ ID NO: 414403 - RNA, 18 nt, Artificial Sequence
  Synthetic
aaauccauauuucuaguu

SEQ ID NO: 414404 - RNA, 19 nt, Artificial Sequence
  Synthetic
caaauccauauuucuaguu

SEQ ID NO: 414405 - RNA, 20 nt, Artificial Sequence
  Synthetic
acaaauccauauuucuaguu

SEQ ID NO: 414406 - RNA, 21 nt, Artificial Sequence
  Synthetic
gacaaauccauauuucuaguu

SEQ ID NO: 414407 - RNA, 22 nt, Artificial Sequence
  Synthetic
agacaaauccauauuucuaguu

SEQ ID NO: 414408 - RNA, 23 nt, Artificial Sequence
  Synthetic
cagacaaauccauauuucuaguu

SEQ ID NO: 414409 - RNA, 24 nt, Artificial Sequence
  Synthetic
acagacaaauccauauuucuaguu

SEQ ID NO: 414410 - RNA, 18 nt, Artificial Sequence
  Synthetic
uuuauaauuucaguaguu

SEQ ID NO: 414411 - RNA, 19 nt, Artificial Sequence
  Synthetic
uuuuauaauuucaguaguu

SEQ ID NO: 414412 - RNA, 20 nt, Artificial Sequence
  Synthetic
uuuuuauaauuucaguaguu

SEQ ID NO: 414413 - RNA, 21 nt, Artificial Sequence
  Synthetic
uuuuuuauaauuucaguaguu

SEQ ID NO: 414414 - RNA, 22 nt, Artificial Sequence
  Synthetic
auuuuuuauaauuucaguaguu

SEQ ID NO: 414415 - RNA, 23 nt, Artificial Sequence
  Synthetic
uauuuuuuauaauuucaguaguu

SEQ ID NO: 414416 - RNA, 24 nt, Artificial Sequence
  Synthetic
uuauuuuuuauaauuucaguaguu

SEQ ID NO: 414417 - RNA, 18 nt, Artificial Sequence
  Synthetic
accagggucaggguaguu

SEQ ID NO: 414418 - RNA, 19 nt, Artificial Sequence
  Synthetic
uaccagggucaggguaguu

SEQ ID NO: 414419 - RNA, 20 nt, Artificial Sequence
  Synthetic
uuaccagggucaggguaguu

SEQ ID NO: 414420 - RNA, 21 nt, Artificial Sequence
  Synthetic
guuaccagggucaggguaguu

SEQ ID NO: 414421 - RNA, 22 nt, Artificial Sequence
  Synthetic
gguuaccagggucaggguaguu

SEQ ID NO: 414422 - RNA, 23 nt, Artificial Sequence
  Synthetic
ugguuaccagggucaggguaguu

SEQ ID NO: 414423 - RNA, 24 nt, Artificial Sequence
  Synthetic
gugguuaccagggucaggguaguu

SEQ ID NO: 414424 - RNA, 18 nt, Artificial Sequence
  Synthetic
acaaugccauauguaguu

SEQ ID NO: 414425 - RNA, 19 nt, Artificial Sequence
  Synthetic
cacaaugccauauguaguu

SEQ ID NO: 414426 - RNA, 20 nt, Artificial Sequence
  Synthetic
ucacaaugccauauguaguu

SEQ ID NO: 414427 - RNA, 21 nt, Artificial Sequence
  Synthetic
gucacaaugccauauguaguu

SEQ ID NO: 414428 - RNA, 22 nt, Artificial Sequence
  Synthetic
ugucacaaugccauauguaguu

SEQ ID NO: 414429 - RNA, 23 nt, Artificial Sequence
  Synthetic
uugucacaaugccauauguaguu

SEQ ID NO: 414430 - RNA, 24 nt, Artificial Sequence
  Synthetic
uuugucacaaugccauauguaguu

SEQ ID NO: 414431 - RNA, 18 nt, Artificial Sequence
  Synthetic
gagauguuaccuguaguu

SEQ ID NO: 414432 - RNA, 19 nt, Artificial Sequence
  Synthetic
ugagauguuaccuguaguu

SEQ ID NO: 414433 - RNA, 20 nt, Artificial Sequence
  Synthetic
cugagauguuaccuguaguu

SEQ ID NO: 414434 - RNA, 21 nt, Artificial Sequence
  Synthetic
ucugagauguuaccuguaguu

SEQ ID NO: 414435 - RNA, 22 nt, Artificial Sequence
  Synthetic
uucugagauguuaccuguaguu

SEQ ID NO: 414436 - RNA, 23 nt, Artificial Sequence
  Synthetic
auucugagauguuaccuguaguu

SEQ ID NO: 414437 - RNA, 24 nt, Artificial Sequence
  Synthetic
uauucugagauguuaccuguaguu

SEQ ID NO: 414438 - RNA, 18 nt, Artificial Sequence
  Synthetic
agagccuagaguguaguu

SEQ ID NO: 414439 - RNA, 19 nt, Artificial Sequence
  Synthetic
uagagccuagaguguaguu

SEQ ID NO: 414440 - RNA, 20 nt, Artificial Sequence
  Synthetic
cuagagccuagaguguaguu

SEQ ID NO: 414441 - RNA, 21 nt, Artificial Sequence
  Synthetic
ucuagagccuagaguguaguu

SEQ ID NO: 414442 - RNA, 22 nt, Artificial Sequence
  Synthetic
cucuagagccuagaguguaguu

SEQ ID NO: 414443 - RNA, 23 nt, Artificial Sequence
  Synthetic
ccucuagagccuagaguguaguu

SEQ ID NO: 414444 - RNA, 24 nt, Artificial Sequence
  Synthetic
gccucuagagccuagaguguaguu

SEQ ID NO: 414445 - RNA, 18 nt, Artificial Sequence
  Synthetic
acauuuguaguuguaguu

SEQ ID NO: 414446 - RNA, 19 nt, Artificial Sequence
  Synthetic
aacauuuguaguuguaguu

SEQ ID NO: 414447 - RNA, 20 nt, Artificial Sequence
  Synthetic
aaacauuuguaguuguaguu

SEQ ID NO: 414448 - RNA, 21 nt, Artificial Sequence
  Synthetic
uaaacauuuguaguuguaguu

SEQ ID NO: 414449 - RNA, 22 nt, Artificial Sequence
  Synthetic
uuaaacauuuguaguuguaguu

SEQ ID NO: 414450 - RNA, 23 nt, Artificial Sequence
  Synthetic
uuuaaacauuuguaguuguaguu

SEQ ID NO: 414451 - RNA, 24 nt, Artificial Sequence
  Synthetic
auuuaaacauuuguaguuguaguu

SEQ ID NO: 414452 - RNA, 18 nt, Artificial Sequence
  Synthetic
uuaaauaaugaauuaguu

SEQ ID NO: 414453 - RNA, 19 nt, Artificial Sequence
  Synthetic
uuuaaauaaugaauuaguu

SEQ ID NO: 414454 - RNA, 20 nt, Artificial Sequence
  Synthetic
auuuaaauaaugaauuaguu

SEQ ID NO: 414455 - RNA, 21 nt, Artificial Sequence
  Synthetic
cauuuaaauaaugaauuaguu

SEQ ID NO: 414456 - RNA, 22 nt, Artificial Sequence
  Synthetic
ucauuuaaauaaugaauuaguu

SEQ ID NO: 414457 - RNA, 23 nt, Artificial Sequence
  Synthetic
aucauuuaaauaaugaauuaguu

SEQ ID NO: 414458 - RNA, 24 nt, Artificial Sequence
  Synthetic
uaucauuuaaauaaugaauuaguu

SEQ ID NO: 414459 - RNA, 18 nt, Artificial Sequence
  Synthetic
cuaauuauugaauuaguu

SEQ ID NO: 414460 - RNA, 19 nt, Artificial Sequence
  Synthetic
ccuaauuauugaauuaguu

SEQ ID NO: 414461 - RNA, 20 nt, Artificial Sequence
  Synthetic
cccuaauuauugaauuaguu

SEQ ID NO: 414462 - RNA, 21 nt, Artificial Sequence
  Synthetic
ucccuaauuauugaauuaguu

SEQ ID NO: 414463 - RNA, 22 nt, Artificial Sequence
  Synthetic
uucccuaauuauugaauuaguu

SEQ ID NO: 414464 - RNA, 23 nt, Artificial Sequence
  Synthetic
cuucccuaauuauugaauuaguu

SEQ ID NO: 414465 - RNA, 24 nt, Artificial Sequence
  Synthetic
gcuucccuaauuauugaauuaguu

SEQ ID NO: 414466 - RNA, 18 nt, Artificial Sequence
  Synthetic
acuacauauucauuaguu

SEQ ID NO: 414467 - RNA, 19 nt, Artificial Sequence
  Synthetic
cacuacauauucauuaguu

SEQ ID NO: 414468 - RNA, 20 nt, Artificial Sequence
  Synthetic
ccacuacauauucauuaguu

SEQ ID NO: 414469 - RNA, 21 nt, Artificial Sequence
  Synthetic
uccacuacauauucauuaguu

SEQ ID NO: 414470 - RNA, 22 nt, Artificial Sequence
  Synthetic
uuccacuacauauucauuaguu

SEQ ID NO: 414471 - RNA, 23 nt, Artificial Sequence
  Synthetic
uuuccacuacauauucauuaguu

SEQ ID NO: 414472 - RNA, 24 nt, Artificial Sequence
  Synthetic
cuuuccacuacauauucauuaguu

SEQ ID NO: 414473 - RNA, 18 nt, Artificial Sequence
  Synthetic
cuuaaguggagauuaguu

SEQ ID NO: 414474 - RNA, 19 nt, Artificial Sequence
  Synthetic
ucuuaaguggagauuaguu

SEQ ID NO: 414475 - RNA, 20 nt, Artificial Sequence
  Synthetic
gucuuaaguggagauuaguu

SEQ ID NO: 414476 - RNA, 21 nt, Artificial Sequence
  Synthetic
agucuuaaguggagauuaguu

SEQ ID NO: 414477 - RNA, 22 nt, Artificial Sequence
  Synthetic
gagucuuaaguggagauuaguu

SEQ ID NO: 414478 - RNA, 23 nt, Artificial Sequence
  Synthetic
ugagucuuaaguggagauuaguu

SEQ ID NO: 414479 - RNA, 24 nt, Artificial Sequence
  Synthetic
gugagucuuaaguggagauuaguu

SEQ ID NO: 414480 - RNA, 18 nt, Artificial Sequence
  Synthetic
ucggucagcaccuuaguu

SEQ ID NO: 414481 - RNA, 19 nt, Artificial Sequence
  Synthetic
aucggucagcaccuuaguu

SEQ ID NO: 414482 - RNA, 20 nt, Artificial Sequence
  Synthetic
caucggucagcaccuuaguu

SEQ ID NO: 414483 - RNA, 21 nt, Artificial Sequence
  Synthetic
gcaucggucagcaccuuaguu

SEQ ID NO: 414484 - RNA, 22 nt, Artificial Sequence
  Synthetic
agcaucggucagcaccuuaguu

SEQ ID NO: 414485 - RNA, 23 nt, Artificial Sequence
  Synthetic
gagcaucggucagcaccuuaguu

SEQ ID NO: 414486 - RNA, 24 nt, Artificial Sequence
  Synthetic
agagcaucggucagcaccuuaguu

SEQ ID NO: 414487 - RNA, 18 nt, Artificial Sequence
  Synthetic
gagcuuuggcccuuaguu

SEQ ID NO: 414488 - RNA, 19 nt, Artificial Sequence
  Synthetic
agagcuuuggcccuuaguu

SEQ ID NO: 414489 - RNA, 20 nt, Artificial Sequence
  Synthetic
cagagcuuuggcccuuaguu

SEQ ID NO: 414490 - RNA, 21 nt, Artificial Sequence
  Synthetic
ccagagcuuuggcccuuaguu

SEQ ID NO: 414491 - RNA, 22 nt, Artificial Sequence
  Synthetic
accagagcuuuggcccuuaguu

SEQ ID NO: 414492 - RNA, 23 nt, Artificial Sequence
  Synthetic
gaccagagcuuuggcccuuaguu

SEQ ID NO: 414493 - RNA, 24 nt, Artificial Sequence
  Synthetic
agaccagagcuuuggcccuuaguu

SEQ ID NO: 414494 - RNA, 18 nt, Artificial Sequence
  Synthetic
cccuguucuuccuuaguu

SEQ ID NO: 414495 - RNA, 19 nt, Artificial Sequence
  Synthetic
gcccuguucuuccuuaguu

SEQ ID NO: 414496 - RNA, 20 nt, Artificial Sequence
  Synthetic
agcccuguucuuccuuaguu

SEQ ID NO: 414497 - RNA, 21 nt, Artificial Sequence
  Synthetic
gagcccuguucuuccuuaguu

SEQ ID NO: 414498 - RNA, 22 nt, Artificial Sequence
  Synthetic
ggagcccuguucuuccuuaguu

SEQ ID NO: 414499 - RNA, 23 nt, Artificial Sequence
  Synthetic
uggagcccuguucuuccuuaguu

SEQ ID NO: 414500 - RNA, 24 nt, Artificial Sequence
  Synthetic
uuggagcccuguucuuccuuaguu

SEQ ID NO: 414501 - RNA, 18 nt, Artificial Sequence
  Synthetic
aauuuuaauuucuuaguu

SEQ ID NO: 414502 - RNA, 19 nt, Artificial Sequence
  Synthetic
caauuuuaauuucuuaguu

SEQ ID NO: 414503 - RNA, 20 nt, Artificial Sequence
  Synthetic
acaauuuuaauuucuuaguu

SEQ ID NO: 414504 - RNA, 21 nt, Artificial Sequence
  Synthetic
uacaauuuuaauuucuuaguu

SEQ ID NO: 414505 - RNA, 22 nt, Artificial Sequence
  Synthetic
auacaauuuuaauuucuuaguu

SEQ ID NO: 414506 - RNA, 23 nt, Artificial Sequence
  Synthetic
aauacaauuuuaauuucuuaguu

SEQ ID NO: 414507 - RNA, 24 nt, Artificial Sequence
  Synthetic
aaauacaauuuuaauuucuuaguu

SEQ ID NO: 414508 - RNA, 18 nt, Artificial Sequence
  Synthetic
cucaaggcaaaguuaguu

SEQ ID NO: 414509 - RNA, 19 nt, Artificial Sequence
  Synthetic
acucaaggcaaaguuaguu

SEQ ID NO: 414510 - RNA, 20 nt, Artificial Sequence
  Synthetic
gacucaaggcaaaguuaguu

SEQ ID NO: 414511 - RNA, 21 nt, Artificial Sequence
  Synthetic
ugacucaaggcaaaguuaguu

SEQ ID NO: 414512 - RNA, 22 nt, Artificial Sequence
  Synthetic
augacucaaggcaaaguuaguu

SEQ ID NO: 414513 - RNA, 23 nt, Artificial Sequence
  Synthetic
uaugacucaaggcaaaguuaguu

SEQ ID NO: 414514 - RNA, 24 nt, Artificial Sequence
  Synthetic
uuaugacucaaggcaaaguuaguu

SEQ ID NO: 414515 - RNA, 18 nt, Artificial Sequence
  Synthetic
aaguguaaucauuuaguu

SEQ ID NO: 414516 - RNA, 19 nt, Artificial Sequence
  Synthetic
aaaguguaaucauuuaguu

SEQ ID NO: 414517 - RNA, 20 nt, Artificial Sequence
  Synthetic
caaaguguaaucauuuaguu

SEQ ID NO: 414518 - RNA, 21 nt, Artificial Sequence
  Synthetic
acaaaguguaaucauuuaguu

SEQ ID NO: 414519 - RNA, 22 nt, Artificial Sequence
  Synthetic
cacaaaguguaaucauuuaguu

SEQ ID NO: 414520 - RNA, 23 nt, Artificial Sequence
  Synthetic
ccacaaaguguaaucauuuaguu

SEQ ID NO: 414521 - RNA, 24 nt, Artificial Sequence
  Synthetic
uccacaaaguguaaucauuuaguu

SEQ ID NO: 414522 - RNA, 18 nt, Artificial Sequence
  Synthetic
aaccugucauauuuaguu

SEQ ID NO: 414523 - RNA, 19 nt, Artificial Sequence
  Synthetic
caaccugucauauuuaguu

SEQ ID NO: 414524 - RNA, 20 nt, Artificial Sequence
  Synthetic
ucaaccugucauauuuaguu

SEQ ID NO: 414525 - RNA, 21 nt, Artificial Sequence
  Synthetic
uucaaccugucauauuuaguu

SEQ ID NO: 414526 - RNA, 22 nt, Artificial Sequence
  Synthetic
uuucaaccugucauauuuaguu

SEQ ID NO: 414527 - RNA, 23 nt, Artificial Sequence
  Synthetic
auuucaaccugucauauuuaguu

SEQ ID NO: 414528 - RNA, 24 nt, Artificial Sequence
  Synthetic
cauuucaaccugucauauuuaguu

SEQ ID NO: 414529 - RNA, 18 nt, Artificial Sequence
  Synthetic
cuaggauaccuuuuaguu

SEQ ID NO: 414530 - RNA, 19 nt, Artificial Sequence
  Synthetic
ucuaggauaccuuuuaguu

SEQ ID NO: 414531 - RNA, 20 nt, Artificial Sequence
  Synthetic
aucuaggauaccuuuuaguu

SEQ ID NO: 414532 - RNA, 21 nt, Artificial Sequence
  Synthetic
aaucuaggauaccuuuuaguu

SEQ ID NO: 414533 - RNA, 22 nt, Artificial Sequence
  Synthetic
uaaucuaggauaccuuuuaguu

SEQ ID NO: 414534 - RNA, 23 nt, Artificial Sequence
  Synthetic
auaaucuaggauaccuuuuaguu

SEQ ID NO: 414535 - RNA, 24 nt, Artificial Sequence
  Synthetic
aauaaucuaggauaccuuuuaguu

SEQ ID NO: 414536 - RNA, 18 nt, Artificial Sequence
  Synthetic
uaaaugugagauaacguu

SEQ ID NO: 414537 - RNA, 19 nt, Artificial Sequence
  Synthetic
auaaaugugagauaacguu

SEQ ID NO: 414538 - RNA, 20 nt, Artificial Sequence
  Synthetic
cauaaaugugagauaacguu

SEQ ID NO: 414539 - RNA, 21 nt, Artificial Sequence
  Synthetic
acauaaaugugagauaacguu

SEQ ID NO: 414540 - RNA, 22 nt, Artificial Sequence
  Synthetic
aacauaaaugugagauaacguu

SEQ ID NO: 414541 - RNA, 23 nt, Artificial Sequence
  Synthetic
caacauaaaugugagauaacguu

SEQ ID NO: 414542 - RNA, 24 nt, Artificial Sequence
  Synthetic
gcaacauaaaugugagauaacguu

SEQ ID NO: 414543 - RNA, 18 nt, Artificial Sequence
  Synthetic
agagggagggauaacguu

SEQ ID NO: 414544 - RNA, 19 nt, Artificial Sequence
  Synthetic
cagagggagggauaacguu

SEQ ID NO: 414545 - RNA, 20 nt, Artificial Sequence
  Synthetic
gcagagggagggauaacguu

SEQ ID NO: 414546 - RNA, 21 nt, Artificial Sequence
  Synthetic
ggcagagggagggauaacguu

SEQ ID NO: 414547 - RNA, 22 nt, Artificial Sequence
  Synthetic
gggcagagggagggauaacguu

SEQ ID NO: 414548 - RNA, 23 nt, Artificial Sequence
  Synthetic
ggggcagagggagggauaacguu

SEQ ID NO: 414549 - RNA, 24 nt, Artificial Sequence
  Synthetic
gggggcagagggagggauaacguu

SEQ ID NO: 414550 - RNA, 18 nt, Artificial Sequence
  Synthetic
gaagcucagugacacguu

SEQ ID NO: 414551 - RNA, 19 nt, Artificial Sequence
  Synthetic
ugaagcucagugacacguu

SEQ ID NO: 414552 - RNA, 20 nt, Artificial Sequence
  Synthetic
uugaagcucagugacacguu

SEQ ID NO: 414553 - RNA, 21 nt, Artificial Sequence
  Synthetic
cuugaagcucagugacacguu

SEQ ID NO: 414554 - RNA, 22 nt, Artificial Sequence
  Synthetic
ucuugaagcucagugacacguu

SEQ ID NO: 414555 - RNA, 23 nt, Artificial Sequence
  Synthetic
uucuugaagcucagugacacguu
